United States Patent Application Publication US 2022/0213167 A1 - sequence listing, part 36

SEQ ID NO: 765068 - protein, 12 aa, Homo sapiens
  CDR3 for beta chain variable domain of TCR clone 382534 (TRBV2, TRBJ2-1)
CAKRQGYNEQFF

SEQ ID NO: 765069 - protein, 12 aa, Homo sapiens
  CDR3 for alpha chain variable domain of TCR clone 382535 (TRAV38-2/DV8, TRAJ47)
CVLMEYGNKLVF

SEQ ID NO: 765070 - protein, 15 aa, Homo sapiens
  CDR3 for beta chain variable domain of TCR clone 382535 (TRBV11-2, TRBJ2-1)
CASSLAPRAHNEQFF

SEQ ID NO: 765071 - protein, 12 aa, Homo sapiens
  CDR3 for alpha chain variable domain of TCR clone 382536 (TRAV13-2, TRAJ23)
CADRHRGGKLIF

SEQ ID NO: 765072 - protein, 14 aa, Homo sapiens
  CDR3 for beta chain variable domain of TCR clone 382536 (TRBV2, TRBJ2-7)
CASSLTSGGYEQYF

SEQ ID NO: 765073 - protein, 15 aa, Homo sapiens
  CDR3 for alpha chain variable domain of TCR clone 382537 (TRAV3, TRAJ3)
CAVRDRDSSASNILF

SEQ ID NO: 765074 - protein, 18 aa, Homo sapiens
  CDR3 for beta chain variable domain of TCR clone 382537 (TRBV25-1, TRBJ1-2)
CASSGLQNGQGLIFGYTF

SEQ ID NO: 765075 - protein, 13 aa, Homo sapiens
  CDR3 for alpha chain variable domain of TCR clone 382538 (TRAV13-1, TRAJ11)
CAASKEGYSTLTF

SEQ ID NO: 765076 - protein, 21 aa, Homo sapiens
  CDR3 for beta chain variable domain of TCR clone 382538 (TRBV23-1, TRBJ2-5)
CACTPPGQGPGGDPVLRARHA

SEQ ID NO: 765077 - protein, 19 aa, Homo sapiens
  CDR3 for alpha chain variable domain of TCR clone 382539 (TRAV26-1, TRAJ52)
CIVRAHRNAGGTSYGNLTF

SEQ ID NO: 765078 - protein, 15 aa, Homo sapiens
  CDR3 for beta chain variable domain of TCR clone 382539 (TRBV29-1, TRBJ2-1)
CSGRDKKSSYNEQFF

SEQ ID NO: 765079 - protein, 16 aa, Homo sapiens
  CDR3 for alpha chain variable domain of TCR clone 382540 (TRAV3, TRAJ27)
CAVRDPQGTNAGKSPF

SEQ ID NO: 765080 - protein, 15 aa, Homo sapiens
  CDR3 for beta chain variable domain of TCR clone 382540 (TRBV20-1, TRBJ2-7)
CSARDRVSGMDEQYF

SEQ ID NO: 765081 - protein, 14 aa, Homo sapiens
  CDR3 for alpha chain variable domain of TCR clone 382541 (TRAV16, TRAJ11)
CALSGLSGYSTLTF

SEQ ID NO: 765082 - protein, 15 aa, Homo sapiens
  CDR3 for beta chain variable domain of TCR clone 382541 (TRBV6-3, TRBJ2-7)
CASSSPGTVFYEQYF

SEQ ID NO: 765083 - protein, 12 aa, Homo sapiens
  CDR3 for alpha chain variable domain of TCR clone 382542 (TRAV2, TRAJ33)
SAVPDSNYQLIW

SEQ ID NO: 765084 - protein, 15 aa, Homo sapiens
  CDR3 for beta chain variable domain of TCR clone 382542 (TRBV29-1, TRBJ2-7)
CSVEFFDRGSYEQYF

SEQ ID NO: 765085 - protein, 12 aa, Homo sapiens
  CDR3 for alpha chain variable domain of TCR clone 382543 (TRAV12-2, TRAJ8)
CAVNTGFQNLVF

SEQ ID NO: 765086 - protein, 15 aa, Homo sapiens
  CDR3 for beta chain variable domain of TCR clone 382543 (TRBV7-8, TRBJ1-5)
CASSLERRGLEPQHF

SEQ ID NO: 765087 - protein, 13 aa, Homo sapiens
  CDR3 for alpha chain variable domain of TCR clone 382544 (TRAV17, TRAJ40)
CAGALGGTYKYTF

SEQ ID NO: 765088 - protein, 16 aa, Homo sapiens
  CDR3 for beta chain variable domain of TCR clone 382544 (TRBV11-2, TRBJ1-2)
CASSLDTGGADYGYTF

SEQ ID NO: 765089 - protein, 15 aa, Homo sapiens
  CDR3 for alpha chain variable domain of TCR clone 382545 (TRAV27, TRAJ38)
CSARRNAVNNRKLLL

SEQ ID NO: 765090 - protein, 13 aa, Homo sapiens
  CDR3 for beta chain variable domain of TCR clone 382545 (TRBV12-5, TRBJ2-3)
CASGDRQSDTQYF

SEQ ID NO: 765091 - protein, 13 aa, Homo sapiens
  CDR3 for alpha chain variable domain of TCR clone 382546 (TRAV8-3, TRAJ28)
CAVGAVGSYQLTF

SEQ ID NO: 765092 - protein, 13 aa, Homo sapiens
  CDR3 for beta chain variable domain of TCR clone 382546 (TRBV24-1, TRBJ2-2)
CATSDWSTGELFF

SEQ ID NO: 765093 - protein, 13 aa, Homo sapiens
  CDR3 for alpha chain variable domain of TCR clone 382547 (TRAV12-3, TRAJ44)
CARTTGTASKLTF

SEQ ID NO: 765094 - protein, 13 aa, Homo sapiens
  CDR3 for beta chain variable domain of TCR clone 382547 (TRBV4-1, TRBJ2-2)
CASSQENTGELFF

SEQ ID NO: 765095 - protein, 14 aa, Homo sapiens
  CDR3 for alpha chain variable domain of TCR clone 382548 (TRAV12-2, TRAJ17)
CAVLFKAAGNKLTF

SEQ ID NO: 765096 - protein, 16 aa, Homo sapiens
  CDR3 for beta chain variable domain of TCR clone 382548 (TRBV7-2, TRBJ2-5)
CASSSKWLSGQETQYF

SEQ ID NO: 765097 - protein, 11 aa, Homo sapiens
  CDR3 for alpha chain variable domain of TCR clone 382549 (TRAV3, TRAJ21)
CAFGNFNKFYF

SEQ ID NO: 765098 - protein, 14 aa, Homo sapiens
  CDR3 for beta chain variable domain of TCR clone 382549 (TRBV29-1, TRBJ2-2)
CSGRGSGNTGELFF

SEQ ID NO: 765099 - protein, 15 aa, Homo sapiens
  CDR3 for alpha chain variable domain of TCR clone 382550 (TRAV25, TRAJ10)
CAGSLLTGGGNKLTF

SEQ ID NO: 765100 - protein, 15 aa, Homo sapiens
  CDR3 for beta chain variable domain of TCR clone 382550 (TRBV12-5, TRBJ2-2)
CASGRLEGNTGELFF

SEQ ID NO: 765101 - protein, 16 aa, Homo sapiens
  CDR3 for alpha chain variable domain of TCR clone 382551 (TRAV30, TRAJ24)
CATEIGDADSWGKFQF

SEQ ID NO: 765102 - protein, 14 aa, Homo sapiens
  CDR3 for beta chain variable domain of TCR clone 382551 (TRBV7-2, TRBJ2-7)
CASSPKTSFYEQYF

SEQ ID NO: 765103 - protein, 13 aa, Homo sapiens
  CDR3 for alpha chain variable domain of TCR clone 382552 (TRAV3, TRAJ41)
CAVSSNSGYALNF

SEQ ID NO: 765104 - protein, 12 aa, Homo sapiens
  CDR3 for beta chain variable domain of TCR clone 382552 (TRBV12-5, TRBJ2-5)
CASGQGVETQYF

SEQ ID NO: 765105 - protein, 16 aa, Homo sapiens
  CDR3 for alpha chain variable domain of TCR clone 382553 (TRAV26-1, TRAJ37)
CIVRGDGSGNTGKLIF

SEQ ID NO: 765106 - protein, 15 aa, Homo sapiens
  CDR3 for beta chain variable domain of TCR clone 382553 (TRBV18, TRBJ2-5)
CASSPDPGLQETQYF

SEQ ID NO: 765107 - protein, 18 aa, Homo sapiens
  CDR3 for alpha chain variable domain of TCR clone 382554 (TRAV12-3, TRAJ10)
SPVIQPPTSGGRRNKLTF

SEQ ID NO: 765108 - protein, 13 aa, Homo sapiens
  CDR3 for beta chain variable domain of TCR clone 382554 (TRBV12-4, TRBJ1-1)
CASSPGTGFEAFF

SEQ ID NO: 765109 - protein, 14 aa, Homo sapiens
  CDR3 for alpha chain variable domain of TCR clone 382555 (TRAV1-2, TRAJ8)
CAVREDTGFQKLVF

SEQ ID NO: 765110 - protein, 17 aa, Homo sapiens
  CDR3 for beta chain variable domain of TCR clone 382555 (TRBV19, TRBJ1-5)
CASSRDRILSRFQPHHF

SEQ ID NO: 765111 - protein, 15 aa, Homo sapiens
  CDR3 for alpha chain variable domain of TCR clone 382556 (TRAV12-2, TRAJ53)
CAVNGGGGGNYKLTF

SEQ ID NO: 765112 - protein, 17 aa, Homo sapiens
  CDR3 for beta chain variable domain of TCR clone 382556 (TRBV7-3, TRBJ2-3)
RASSLMKRMRGAATQYF

SEQ ID NO: 765113 - protein, 15 aa, Homo sapiens
  CDR3 for alpha chain variable domain of TCR clone 382557 (TRAV23/DV6, TRAJ18)
CAARYRGSTLGRLYF

SEQ ID NO: 765114 - protein, 15 aa, Homo sapiens
  CDR3 for beta chain variable domain of TCR clone 382557 (TRBV11-2, TRBJ2-2)
CASSSDRVNAGELFF

SEQ ID NO: 765115 - protein, 13 aa, Homo sapiens
  CDR3 for alpha chain variable domain of TCR clone 382558 (TRAV27, TRAJ6)
CAGGTRGSYIPTF

SEQ ID NO: 765116 - protein, 12 aa, Homo sapiens
  CDR3 for beta chain variable domain of TCR clone 382558 (TRBV29-1, TRBJ2-3)
CSVTGGADTQYF

SEQ ID NO: 765117 - protein, 13 aa, Homo sapiens
  CDR3 for alpha chain variable domain of TCR clone 382559 (TRAV12-3, TRAJ9)
CAMRNTGGFKTIF

SEQ ID NO: 765118 - protein, 15 aa, Homo sapiens
  CDR3 for beta chain variable domain of TCR clone 382559 (TRBV18, TRBJ2-1)
CASSPPSASYNEQFF

SEQ ID NO: 765119 - protein, 15 aa, Homo sapiens
  CDR3 for alpha chain variable domain of TCR clone 382560 (TRAV27, TRAJ38)
CAGRFNAGNNRQLLW

SEQ ID NO: 765120 - protein, 13 aa, Homo sapiens
  CDR3 for beta chain variable domain of TCR clone 382560 (TRBV12-5, TRBJ2-3)
CASQNRGTDTQYF

SEQ ID NO: 765121 - protein, 14 aa, Homo sapiens
  CDR3 for alpha chain variable domain of TCR clone 382561 (TRAV12-3, TRAJ12)
CAMSRMDSSYKLIF

SEQ ID NO: 765122 - protein, 14 aa, Homo sapiens
  CDR3 for beta chain variable domain of TCR clone 382561 (TRBV20-1, TRBJ1-4)
CSARSGRSNEKLFF

SEQ ID NO: 765123 - protein, 11 aa, Homo sapiens
  CDR3 for alpha chain variable domain of TCR clone 382562 (TRAV1-2, TRAJ20)
CAVANDYKLSF

SEQ ID NO: 765124 - protein, 18 aa, Homo sapiens
  CDR3 for beta chain variable domain of TCR clone 382562 (TRBV20-1, TRBJ2-6)
CSAETTPTHCSGANDLTF

SEQ ID NO: 765125 - protein, 11 aa, Homo sapiens
  CDR3 for alpha chain variable domain of TCR clone 382563 (TRAV1-2, TRAJ40)
CSVPGTYKYIF

SEQ ID NO: 765126 - protein, 14 aa, Homo sapiens
  CDR3 for beta chain variable domain of TCR clone 382563 (TRBV20-1, TRBJ2-5)
CSAHRQGLWETQYF

SEQ ID NO: 765127 - protein, 16 aa, Homo sapiens
  CDR3 for alpha chain variable domain of TCR clone 382564 (TRAV13-1, TRAJ22)
CSAKGGRSGSARQLTF

SEQ ID NO: 765128 - protein, 15 aa, Homo sapiens
  CDR3 for beta chain variable domain of TCR clone 382564 (TRBV9, TRBJ1-6)
CASSVAGTGDSPLHF

SEQ ID NO: 765129 - protein, 15 aa, Homo sapiens
  CDR3 for alpha chain variable domain of TCR clone 382565 (TRAV3, TRAJ22)
CAVRDRGGSAKQLTF

SEQ ID NO: 765130 - protein, 16 aa, Homo sapiens
  CDR3 for beta chain variable domain of TCR clone 382565 (TRBV25-1, TRBJ1-1)
CASSGDRDRGRIEAFF

SEQ ID NO: 765131 - protein, 13 aa, Homo sapiens
  CDR3 for alpha chain variable domain of TCR clone 382566 (TRAV8-1, TRAJ23)
CAVTGGQGGKLIF

SEQ ID NO: 765132 - protein, 15 aa, Homo sapiens
  CDR3 for beta chain variable domain of TCR clone 382566 (TRBV7-9, TRBJ1-6)
CASSSPGRGNSPLHF

SEQ ID NO: 765133 - protein, 14 aa, Homo sapiens
  CDR3 for alpha chain variable domain of TCR clone 382567 (TRAV17, TRAJ12)
FAILPMDSSYKLIF

SEQ ID NO: 765134 - protein, 11 aa, Homo sapiens
  CDR3 for beta chain variable domain of TCR clone 382567 (TRBV19, TRBJ1-1)
CASSIGSEAFF

SEQ ID NO: 765135 - protein, 10 aa, Homo sapiens
  CDR3 for alpha chain variable domain of TCR clone 382568 (TRAV23/DV6, TRAJ57)
CAASPTLSQG

SEQ ID NO: 765136 - protein, 15 aa, Homo sapiens
  CDR3 for beta chain variable domain of TCR clone 382568 (TRBV4-1, TRBJ1-2)
CASSQDRNRDYGYTF

SEQ ID NO: 765137 - protein, 16 aa, Homo sapiens
  CDR3 for alpha chain variable domain of TCR clone 382569 (TRAV21, TRAJ37)
CAVSPRGSSNTGKLIF

SEQ ID NO: 765138 - protein, 13 aa, Homo sapiens
  CDR3 for beta chain variable domain of TCR clone 382569 (TRBV7-9, TRBJ2-5)
CASLSPGQETQYF

SEQ ID NO: 765139 - protein, 14 aa, Homo sapiens
  CDR3 for alpha chain variable domain of TCR clone 382570 (TRAV12-2, TRAJ40)
CAMKIPSGTYKYNF

SEQ ID NO: 765140 - protein, 14 aa, Homo sapiens
  CDR3 for beta chain variable domain of TCR clone 382570 (TRBV20-1, TRBJ1-1)
CSAQTRIGGTEAFF

SEQ ID NO: 765141 - protein, 15 aa, Homo sapiens
  CDR3 for alpha chain variable domain of TCR clone 382571 (TRAV3, TRAJ9)
CAVRGLNTGGFKTIF

SEQ ID NO: 765142 - protein, 14 aa, Homo sapiens
  CDR3 for beta chain variable domain of TCR clone 382571 (TRBV20-1, TRBJ2-5)
CSARDGRAGETQYF

SEQ ID NO: 765143 - protein, 12 aa, Homo sapiens
  CDR3 for alpha chain variable domain of TCR clone 382572 (TRAV12-3, TRAJ17)
CAMTLTGNKLIF

SEQ ID NO: 765144 - protein, 15 aa, Homo sapiens
  CDR3 for beta chain variable domain of TCR clone 382572 (TRBV20-1, TRBJ2-7)
CSARDRVSGMDEQYC

SEQ ID NO: 765145 - protein, 11 aa, Homo sapiens
  CDR3 for alpha chain variable domain of TCR clone 382573 (TRAV1-2, TRAJ31)
CAVNNNARLMF

SEQ ID NO: 765146 - protein, 14 aa, Homo sapiens
  CDR3 for beta chain variable domain of TCR clone 382573 (TRBV20-1, TRBJ2-1)
CSAQIGGSANEQFF

SEQ ID NO: 765147 - protein, 14 aa, Homo sapiens
  CDR3 for alpha chain variable domain of TCR clone 382574 (TRAV12-2, TRAJ23)
CAVNTYNQGGKLIF

SEQ ID NO: 765148 - protein, 12 aa, Homo sapiens
  CDR3 for beta chain variable domain of TCR clone 382574 (TRBV12-4, TRBJ1-3)
CASSFSGNTMYF

SEQ ID NO: 765149 - protein, 18 aa, Homo sapiens
  CDR3 for alpha chain variable domain of TCR clone 382575 (TRAV12-3, TRAJ52)
CAMSVGGAGGTSYGKLTF

SEQ ID NO: 765150 - protein, 18 aa, Homo sapiens
  CDR3 for beta chain variable domain of TCR clone 382575 (TRBV18, TRBJ1-3)
CASSPRGGAGPSGNTIYF

SEQ ID NO: 765151 - protein, 15 aa, Homo sapiens
  CDR3 for alpha chain variable domain of TCR clone 382576 (TRAV19, TRAJ23)
CALSEGRNQGGQLIF

SEQ ID NO: 765152 - protein, 16 aa, Homo sapiens
  CDR3 for beta chain variable domain of TCR clone 382576 (TRBV7-2, TRBJ2-7)
CASSLDLSGGAYEQYF

SEQ ID NO: 765153 - protein, 13 aa, Homo sapiens
  CDR3 for alpha chain variable domain of TCR clone 382577 (TRAV17, TRAJ5)
CALRGTGRRALTF

SEQ ID NO: 765154 - protein, 15 aa, Homo sapiens
  CDR3 for beta chain variable domain of TCR clone 382577 (TRBV2, TRBJ1-1)
CASTEPGQGASGAFF

SEQ ID NO: 765155 - protein, 15 aa, Homo sapiens
  CDR3 for alpha chain variable domain of TCR clone 382578 (TRAV26-1, TRAJ37)
CIVRVATGNTGKLIF

SEQ ID NO: 765156 - protein, 17 aa, Homo sapiens
  CDR3 for beta chain variable domain of TCR clone 382578 (TRBV5-5, TRBJ1-2)
CASSLGSLDGQSEGYTF

SEQ ID NO: 765157 - protein, 10 aa, Homo sapiens
  CDR3 for alpha chain variable domain of TCR clone 382579 (TRAV38-2/DV8, TRAJ21)
CAYRSNKFYF

SEQ ID NO: 765158 - protein, 12 aa, Homo sapiens
  CDR3 for beta chain variable domain of TCR clone 382579 (TRBV11-3, TRBJ2-3)
CASSLWEDTQYL

SEQ ID NO: 765159 - protein, 11 aa, Homo sapiens
  CDR3 for alpha chain variable domain of TCR clone 382580 (TRAV3, TRAJ31)
CAALPGARLMF

SEQ ID NO: 765160 - protein, 15 aa, Homo sapiens
  CDR3 for beta chain variable domain of TCR clone 382580 (TRBV4-1, TRBJ2-7)
CASSQNTGRLYEQYF

SEQ ID NO: 765161 - protein, 17 aa, Homo sapiens
  CDR3 for alpha chain variable domain of TCR clone 382581 (TRAV3, TRAJ6)
FAVRDCPRAGGSYIPTF

SEQ ID NO: 765162 - protein, 14 aa, Homo sapiens
  CDR3 for beta chain variable domain of TCR clone 382581 (TRBV7-2, TRBJ2-7)
CASSPKTSFYEQYF

SEQ ID NO: 765163 - protein, 14 aa, Homo sapiens
  CDR3 for alpha chain variable domain of TCR clone 382582 (TRAV1-2, TRAJ16)
CAVDRFSDGQKLLF

SEQ ID NO: 765164 - protein, 13 aa, Homo sapiens
  CDR3 for beta chain variable domain of TCR clone 382582 (TRBV7-3, TRBJ1-1)
CASSQDWGAEAFF

SEQ ID NO: 765165 - protein, 14 aa, Homo sapiens
  CDR3 for alpha chain variable domain of TCR clone 382583 (TRAV12-2, TRAJ17)
CAALFKAAGNKLTF

SEQ ID NO: 765166 - protein, 15 aa, Homo sapiens
  CDR3 for beta chain variable domain of TCR clone 382583 (TRBV20-1, TRBJ2-7)
CSARVPAAYFYEQYF

SEQ ID NO: 765167 - protein, 15 aa, Homo sapiens
  CDR3 for alpha chain variable domain of TCR clone 382584 (TRAV41, TRAJ45)
CAASYSGGGADGLTF

SEQ ID NO: 765168 - protein, 16 aa, Homo sapiens
  CDR3 for beta chain variable domain of TCR clone 382584 (TRBV28, TRBJ1-2)
CASSHGQGVYRDGYTF

SEQ ID NO: 765169 - protein, 13 aa, Homo sapiens
  CDR3 for alpha chain variable domain of TCR clone 382585 (TRAV12-1, TRAJ42)
CGGVGGSQGNLVF

SEQ ID NO: 765170 - protein, 15 aa, Homo sapiens
  CDR3 for beta chain variable domain of TCR clone 382585 (TRBV5-4, TRBJ1-4)
CASSSFGTGNEKLFF

SEQ ID NO: 765171 - protein, 13 aa, Homo sapiens
  CDR3 for alpha chain variable domain of TCR clone 382586 (TRAV17, TRAJ54)
CATSWGGAQKLVF

SEQ ID NO: 765172 - protein, 15 aa, Homo sapiens
  CDR3 for beta chain variable domain of TCR clone 382586 (TRBV4-3, TRBJ2-3)
RASSPSLLSTDTQYF

SEQ ID NO: 765173 - protein, 14 aa, Homo sapiens
  CDR3 for alpha chain variable domain of TCR clone 382587 (TRAV2, TRAJ37)
CAVDFTSNTGKLIL

SEQ ID NO: 765174 - protein, 16 aa, Homo sapiens
  CDR3 for beta chain variable domain of TCR clone 382587 (TRBV20-1, TRBJ1-2)
CSASMGQGVANYGYTF

SEQ ID NO: 765175 - protein, 12 aa, Homo sapiens
  CDR3 for alpha chain variable domain of TCR clone 382588 (TRAV3, TRAJ7)
CADLLWEQQTRF

SEQ ID NO: 765176 - protein, 17 aa, Homo sapiens
  CDR3 for beta chain variable domain of TCR clone 382588 (TRBV7-8, TRBJ2-6)
CASSAGTGGAGANVLTF

SEQ ID NO: 765177 - protein, 15 aa, Homo sapiens
  CDR3 for alpha chain variable domain of TCR clone 382589 (TRAV12-3, TRAJ47)
CAMSALVEYGNKLVF

SEQ ID NO: 765178 - protein, 15 aa, Homo sapiens
  CDR3 for beta chain variable domain of TCR clone 382589 (TRBV7-2, TRBJ2-1)
CASSSGLAGGNEQFF

SEQ ID NO: 765179 - protein, 15 aa, Homo sapiens
  CDR3 for alpha chain variable domain of TCR clone 382590 (TRAV3, TRAJ17)
YAVSPKEAAGNKLTF

SEQ ID NO: 765180 - protein, 12 aa, Homo sapiens
  CDR3 for beta chain variable domain of TCR clone 382590 (TRBV7-9, TRBJ1-6)
CASSLMTSPLHF

SEQ ID NO: 765181 - protein, 13 aa, Homo sapiens
  CDR3 for alpha chain variable domain of TCR clone 382591 (TRAV13-2, TRAJ53)
CAENMGSNSKLTF

SEQ ID NO: 765182 - protein, 13 aa, Homo sapiens
  CDR3 for beta chain variable domain of TCR clone 382591 (TRBV4-1, TRBJ2-2)
CASSQEDTGELFF

SEQ ID NO: 765183 - protein, 11 aa, Homo sapiens
  CDR3 for alpha chain variable domain of TCR clone 382592 (TRAV12-1, TRAJ21)
CVVNNFNKFYF

SEQ ID NO: 765184 - protein, 14 aa, Homo sapiens
  CDR3 for beta chain variable domain of TCR clone 382592 (TRBV18, TRBJ2-7)
CSSSPRGGAYEQYF

SEQ ID NO: 765185 - protein, 14 aa, Homo sapiens
  CDR3 for alpha chain variable domain of TCR clone 382593 (TRAV1-1, TRAJ27)
CAVIYNTNAGKSTF

SEQ ID NO: 765186 - protein, 14 aa, Homo sapiens
  CDR3 for beta chain variable domain of TCR clone 382593 (TRBV18, TRBJ2-5)
CASSPGVSQETQYF

SEQ ID NO: 765187 - protein, 13 aa, Homo sapiens
  CDR3 for alpha chain variable domain of TCR clone 382594 (TRAV8-3, TRAJ21)
CAVGPLNFNKFYF

SEQ ID NO: 765188 - protein, 12 aa, Homo sapiens
  CDR3 for beta chain variable domain of TCR clone 382594 (TRBV5-1, TRBJ2-7)
CASSLDSYEQYF

SEQ ID NO: 765189 - protein, 18 aa, Homo sapiens
  CDR3 for alpha chain variable domain of TCR clone 382595 (TRAV4, )
CLVGPHNYDIQNPDPAVF

SEQ ID NO: 765190 - protein, 17 aa, Homo sapiens
  CDR3 for beta chain variable domain of TCR clone 382595 (TRBV24-1, TRBJ2-1)
CATSDVSTSGTYNEQFF

SEQ ID NO: 765191 - protein, 14 aa, Homo sapiens
  CDR3 for alpha chain variable domain of TCR clone 382596 (TRAV17, TRAJ6)
CATNPSGGSYIPTF

SEQ ID NO: 765192 - protein, 15 aa, Homo sapiens
  CDR3 for beta chain variable domain of TCR clone 382596 (TRBV2, TRBJ2-5)
CASSGTVAAGETQYF

SEQ ID NO: 765193 - protein, 12 aa, Homo sapiens
  CDR3 for alpha chain variable domain of TCR clone 382597 (TRAV12-1, TRAJ40)
CVVYSGTYKYIF

SEQ ID NO: 765194 - protein, 22 aa, Homo sapiens
  CDR3 for beta chain variable domain of TCR clone 382597 (TRBV11-2, TRBJ1-4)
CASSLDITRRGIPRKDNEKLFF

SEQ ID NO: 765195 - protein, 14 aa, Homo sapiens
  CDR3 for alpha chain variable domain of TCR clone 382598 (TRAV12-3, TRAJ10)
SHLPLTGGGNKLTF

SEQ ID NO: 765196 - protein, 13 aa, Homo sapiens
  CDR3 for beta chain variable domain of TCR clone 382598 (TRBV12-4, TRBJ1-1)
CASSLGGTTEAFF

SEQ ID NO: 765197 - protein, 12 aa, Homo sapiens
  CDR3 for alpha chain variable domain of TCR clone 382599 (TRAV35, TRAJ49)
CAGWNTGNQFYF

SEQ ID NO: 765198 - protein, 16 aa, Homo sapiens
  CDR3 for beta chain variable domain of TCR clone 382599 (TRBV5-1, TRBJ2-2)
CASSLWDTTNTGELLC

SEQ ID NO: 765199 - protein, 12 aa, Homo sapiens
  CDR3 for alpha chain variable domain of TCR clone 382600 (TRAV1-1, TRAJ39)
CAVPVVGIMLTF

SEQ ID NO: 765200 - protein, 14 aa, Homo sapiens
  CDR3 for beta chain variable domain of TCR clone 382600 (TRBV11-2, TRBJ2-3)
CASSRLARTDTQYF

SEQ ID NO: 765201 - protein, 14 aa, Homo sapiens
  CDR3 for alpha chain variable domain of TCR clone 382601 (TRAV1-2, TRAJ8)
CAVRGETGFQQLVF

SEQ ID NO: 765202 - protein, 15 aa, Homo sapiens
  CDR3 for beta chain variable domain of TCR clone 382601 (TRBV6-3, TRBJ2-7)
CASSSPGTVFYEQYF

SEQ ID NO: 765203 - protein, 14 aa, Homo sapiens
  CDR3 for alpha chain variable domain of TCR clone 382602 (TRAV8-3, TRAJ6)
CAVGASGGSYIPTS

SEQ ID NO: 765204 - protein, 17 aa, Homo sapiens
  CDR3 for beta chain variable domain of TCR clone 382602 (TRBV18, TRBJ2-2)
CASSPSDPWQNTGELFF

SEQ ID NO: 765205 - protein, 14 aa, Homo sapiens
  CDR3 for alpha chain variable domain of TCR clone 382603 (TRAV8-4, TRAJ54)
CALSEVLGAQKLVF

SEQ ID NO: 765206 - protein, 17 aa, Homo sapiens
  CDR3 for beta chain variable domain of TCR clone 382603 (TRBV4-1, TRBJ1-4)
CASSQEGPRGVEEKLFF

SEQ ID NO: 765207 - protein, 14 aa, Homo sapiens
  CDR3 for alpha chain variable domain of TCR clone 382604 (TRAV26-1, TRAJ38)
CIADNAGDNRKLIW

SEQ ID NO: 765208 - protein, 13 aa, Homo sapiens
  CDR3 for beta chain variable domain of TCR clone 382604 (TRBV7-9, TRBJ1-2)
CASSLKQNYGYTF

SEQ ID NO: 765209 - protein, 17 aa, Homo sapiens
  CDR3 for alpha chain variable domain of TCR clone 382605 (TRAV12-2, TRAJ48)
CASNEKLTFGTGTRLTI

SEQ ID NO: 765210 - protein, 15 aa, Homo sapiens
  CDR3 for beta chain variable domain of TCR clone 382605 (TRBV11-2, TRBJ1-2)
CASSLEGVQRNGYTF

SEQ ID NO: 765211 - protein, 11 aa, Homo sapiens
  CDR3 for alpha chain variable domain of TCR clone 382606 (TRAV3, TRAJ21)
CAVCNFNKFYF

SEQ ID NO: 765212 - protein, 15 aa, Homo sapiens
  CDR3 for beta chain variable domain of TCR clone 382606 (TRBV5-1, TRBJ2-1)
CASSLVASAYNEQFF

SEQ ID NO: 765213 - protein, 16 aa, Homo sapiens
  CDR3 for alpha chain variable domain of TCR clone 382607 (TRAV20, TRAJ21)
CAAGVYTTSTNFTLDL

SEQ ID NO: 765214 - protein, 15 aa, Homo sapiens
  CDR3 for beta chain variable domain of TCR clone 382607 (TRBV20-1, TRBJ2-7)
CSARDRVSGMDEQYF

SEQ ID NO: 765215 - protein, 13 aa, Homo sapiens
  CDR3 for alpha chain variable domain of TCR clone 382608 (TRAV12-1, TRAJ7)
CVVNMRGNNRLAF

SEQ ID NO: 765216 - protein, 16 aa, Homo sapiens
  CDR3 for beta chain variable domain of TCR clone 382608 (TRBV12-5, TRBJ2-5)
CASGPRTSGNQETQYF

SEQ ID NO: 765217 - protein, 14 aa, Homo sapiens
  CDR3 for alpha chain variable domain of TCR clone 382609 (TRAV17, TRAJ35)
CATDRPGFGNVLHC

SEQ ID NO: 765218 - protein, 19 aa, Homo sapiens
  CDR3 for beta chain variable domain of TCR clone 382609 (TRBV7-2, TRBJ2-3)
CASSFLSRNWGGGTDTQYF

SEQ ID NO: 765219 - protein, 10 aa, Homo sapiens
  CDR3 for alpha chain variable domain of TCR clone 382610 (TRAV36/DV7, TRAJ49)
CALTGNQFYF

SEQ ID NO: 765220 - protein, 20 aa, Homo sapiens
  CDR3 for beta chain variable domain of TCR clone 382610 (TRBV7-8, TRBJ2-2)
CASSHLFPGPTIHITGELFF

SEQ ID NO: 765221 - protein, 12 aa, Homo sapiens
  CDR3 for alpha chain variable domain of TCR clone 382611 (TRAV3, TRAJ20)
WAVRDPDYKLSF

SEQ ID NO: 765222 - protein, 14 aa, Homo sapiens
  CDR3 for beta chain variable domain of TCR clone 382611 (TRBV4-2, TRBJ2-1)
CASGLDRAYNEQFF

SEQ ID NO: 765223 - protein, 19 aa, Homo sapiens
  CDR3 for alpha chain variable domain of TCR clone 382612 (TRAV1-1, TRAJ13)
CLLLLRCEGESGGYQKVTF

SEQ ID NO: 765224 - protein, 19 aa, Homo sapiens
  CDR3 for beta chain variable domain of TCR clone 382612 (TRBV14, TRBJ2-1)
CASSQDQLWQAPEYNEQFF

SEQ ID NO: 765225 - protein, 12 aa, Homo sapiens
  CDR3 for alpha chain variable domain of TCR clone 382613 (TRAV13-1, TRAJ21)
CATKEDFNKFYF

SEQ ID NO: 765226 - protein, 18 aa, Homo sapiens
  CDR3 for beta chain variable domain of TCR clone 382613 (TRBV20-1, TRBJ2-6)
CSAETTPTHGSGANVLTF

SEQ ID NO: 765227 - protein, 12 aa, Homo sapiens
  CDR3 for alpha chain variable domain of TCR clone 382614 (TRAV26-1, TRAJ36)
CIVRVRADNLFF

SEQ ID NO: 765228 - protein, 18 aa, Homo sapiens
  CDR3 for beta chain variable domain of TCR clone 382614 (TRBV12-4, TRBJ2-2)
CASSLVAGTRGRTGELFF

SEQ ID NO: 765229 - protein, 16 aa, Homo sapiens
  CDR3 for alpha chain variable domain of TCR clone 382615 (TRAV12-3, TRAJ20)
CAMDKLRFGAGTTVTV

SEQ ID NO: 765230 - protein, 14 aa, Homo sapiens
  CDR3 for beta chain variable domain of TCR clone 382615 (TRBV5-4, TRBJ2-2)
CASSLTSRTGELFF

SEQ ID NO: 765231 - protein, 17 aa, Homo sapiens
  CDR3 for alpha chain variable domain of TCR clone 382616 (TRAV3, TRAJ42)
CAVRERDYGGSQGNLIF

SEQ ID NO: 765232 - protein, 18 aa, Homo sapiens
  CDR3 for beta chain variable domain of TCR clone 382616 (TRBV20-1, TRBJ2-3)
CSASGLAGGPGTTDTQYF

SEQ ID NO: 765233 - protein, 17 aa, Homo sapiens
  CDR3 for alpha chain variable domain of TCR clone 382617 (TRAV8-6, TRAJ8)
CAVKEGIENTGFQKLVF

SEQ ID NO: 765234 - protein, 14 aa, Homo sapiens
  CDR3 for beta chain variable domain of TCR clone 382617 (TRBV11-2, TRBJ2-3)
CASSLGGGANTQYF

SEQ ID NO: 765235 - protein, 12 aa, Homo sapiens
  CDR3 for alpha chain variable domain of TCR clone 382618 (TRAV21, TRAJ13)
PGPSVGYQKVTF

SEQ ID NO: 765236 - protein, 14 aa, Homo sapiens
  CDR3 for beta chain variable domain of TCR clone 382618 (TRBV19, TRBJ2-1)
CASPTFVLSGEQFF

SEQ ID NO: 765237 - protein, 11 aa, Homo sapiens
  CDR3 for alpha chain variable domain of TCR clone 382619 (TRAV12-3, TRAJ27)
CAMANAGKSTF

SEQ ID NO: 765238 - protein, 16 aa, Homo sapiens
  CDR3 for beta chain variable domain of TCR clone 382619 (TRBV7-9, TRBJ1-2)
CASSLGFSSGEDGYTF

SEQ ID NO: 765239 - protein, 14 aa, Homo sapiens
  CDR3 for alpha chain variable domain of TCR clone 382620 (TRAV9-2, TRAJ39)
CALYIYNAGNMLTF

SEQ ID NO: 765240 - protein, 13 aa, Homo sapiens
  CDR3 for beta chain variable domain of TCR clone 382620 (TRBV7-2, TRBJ2-2)
CASSSVRAGELFF

SEQ ID NO: 765241 - protein, 14 aa, Homo sapiens
  CDR3 for alpha chain variable domain of TCR clone 382621 (TRAV3, TRAJ36)
CAVRDGTGANNLFF

SEQ ID NO: 765242 - protein, 16 aa, Homo sapiens
  CDR3 for beta chain variable domain of TCR clone 382621 (TRBV7-3, TRBJ2-5)
CASVQPGGSVQETQYF

SEQ ID NO: 765243 - protein, 15 aa, Homo sapiens
  CDR3 for alpha chain variable domain of TCR clone 382622 (TRAV20, TRAJ43)
CAVQAGKRSNNDMRF

SEQ ID NO: 765244 - protein, 14 aa, Homo sapiens
  CDR3 for beta chain variable domain of TCR clone 382622 (TRBV19, TRBJ2-1)
CASPTFVLSGEQFF

SEQ ID NO: 765245 - protein, 13 aa, Homo sapiens
  CDR3 for alpha chain variable domain of TCR clone 382623 (TRAV23/DV6, TRAJ22)
CAPYSGSARQLTF

SEQ ID NO: 765246 - protein, 13 aa, Homo sapiens
  CDR3 for beta chain variable domain of TCR clone 382623 (TRBV7-9, TRBJ2-5)
CASLSPGQETQYF

SEQ ID NO: 765247 - protein, 13 aa, Homo sapiens
  CDR3 for alpha chain variable domain of TCR clone 382624 (TRAV3, TRAJ20)
CAVRSLNDYKLRF

SEQ ID NO: 765248 - protein, 13 aa, Homo sapiens
  CDR3 for beta chain variable domain of TCR clone 382624 (TRBV7-3, TRBJ1-1)
CASSQDWGAEAFV

SEQ ID NO: 765249 - protein, 13 aa, Homo sapiens
  CDR3 for alpha chain variable domain of TCR clone 382625 (TRAV21, TRAJ27)
CAARPGNAGKSTF

SEQ ID NO: 765250 - protein, 15 aa, Homo sapiens
  CDR3 for beta chain variable domain of TCR clone 382625 (TRBV7-2, TRBJ2-1)
CASRKTGSSYNEQFF

SEQ ID NO: 765251 - protein, 14 aa, Homo sapiens
  CDR3 for alpha chain variable domain of TCR clone 382626 (TRAV38-1, TRAJ26)
CAFMRINYGQNFVF

SEQ ID NO: 765252 - protein, 15 aa, Homo sapiens
  CDR3 for beta chain variable domain of TCR clone 382626 (TRBV9, TRBJ1-3)
CASSPGVQAGNTIYF

SEQ ID NO: 765253 - protein, 16 aa, Homo sapiens
  CDR3 for alpha chain variable domain of TCR clone 382627 (TRAV8-2, TRAJ7)
CVVSEGPYYGNNRLAV

SEQ ID NO: 765254 - protein, 13 aa, Homo sapiens
  CDR3 for beta chain variable domain of TCR clone 382627 (TRBV19, TRBJ2-1)
CASSMYRVNEQFF

SEQ ID NO: 765255 - protein, 14 aa, Homo sapiens
  CDR3 for alpha chain variable domain of TCR clone 382628 (TRAV12-3, TRAJ4)
CAMSATGGYNKLIF

SEQ ID NO: 765256 - protein, 17 aa, Homo sapiens
  CDR3 for beta chain variable domain of TCR clone 382628 (TRBV4-2, TRBJ2-7)
CASSQERARGVPYEQYF

SEQ ID NO: 765257 - protein, 16 aa, Homo sapiens
  CDR3 for alpha chain variable domain of TCR clone 382629 (TRAV30, TRAJ24)
CGTQIVDADSWGKFQF

SEQ ID NO: 765258 - protein, 13 aa, Homo sapiens
  CDR3 for beta chain variable domain of TCR clone 382629 (TRBV7-7, TRBJ1-1)
CASSLGANTEAFF

SEQ ID NO: 765259 - protein, 16 aa, Homo sapiens
  CDR3 for alpha chain variable domain of TCR clone 382630 (TRAV1-1, TRAJ45)
CAVRAYSGGGADGLNF

SEQ ID NO: 765260 - protein, 13 aa, Homo sapiens
  CDR3 for beta chain variable domain of TCR clone 382630 (TRBV20-1, TRBJ1-2)
CSARGTADYGYTF

SEQ ID NO: 765261 - protein, 11 aa, Homo sapiens
  CDR3 for alpha chain variable domain of TCR clone 382631 (TRAV35, TRAJ49)
CLGTPVTSSIL

SEQ ID NO: 765262 - protein, 15 aa, Homo sapiens
  CDR3 for beta chain variable domain of TCR clone 382631 (TRBV9, TRBJ2-6)
CASSVALSGANVLTF

SEQ ID NO: 765263 - protein, 12 aa, Homo sapiens
  CDR3 for alpha chain variable domain of TCR clone 382632 (TRAV17, TRAJ57)
SATDGGSEKLVF

SEQ ID NO: 765264 - protein, 13 aa, Homo sapiens
  CDR3 for beta chain variable domain of TCR clone 382632 (TRBV7-9, TRBJ2-7)
CASSVAGAYEQYF

SEQ ID NO: 765265 - protein, 12 aa, Homo sapiens
  CDR3 for alpha chain variable domain of TCR clone 382633 (TRAV13-1, TRAJ20)
CAARQNDYKLSF

SEQ ID NO: 765266 - protein, 13 aa, Homo sapiens
  CDR3 for beta chain variable domain of TCR clone 382633 (TRBV24-1, TRBJ2-2)
CATTATRTGELFF

SEQ ID NO: 765267 - protein, 13 aa, Homo sapiens
  CDR3 for alpha chain variable domain of TCR clone 382634 (TRAV12-2, TRAJ20)
CAVYPSNDYKLSF

SEQ ID NO: 765268 - protein, 14 aa, Homo sapiens
  CDR3 for beta chain variable domain of TCR clone 382634 (TRBV25-1, TRBJ1-1)
CASTHLVGNTEAFF

SEQ ID NO: 765269 - protein, 14 aa, Homo sapiens
  CDR3 for alpha chain variable domain of TCR clone 382635 (TRAV4, TRAJ20)
CLVGRRSNDYKPSF

SEQ ID NO: 765270 - protein, 18 aa, Homo sapiens
  CDR3 for beta chain variable domain of TCR clone 382635 (TRBV2, TRBJ2-5)
CASSGGPQGRGAQETQYF

SEQ ID NO: 765271 - protein, 16 aa, Homo sapiens
  CDR3 for alpha chain variable domain of TCR clone 382636 (TRAV9-2, TRAJ40)
CARSPESTSGTYKYIF

SEQ ID NO: 765272 - protein, 16 aa, Homo sapiens
  CDR3 for beta chain variable domain of TCR clone 382636 (TRBV12-4, TRBJ1-5)
CASSRPVGGSNQPQHF

SEQ ID NO: 765273 - protein, 14 aa, Homo sapiens
  CDR3 for alpha chain variable domain of TCR clone 382637 (TRAV1-2, TRAJ16)
CAVNPFSDGQKLLF

SEQ ID NO: 765274 - protein, 14 aa, Homo sapiens
  CDR3 for beta chain variable domain of TCR clone 382637 (TRBV7-9, TRBJ2-2)
CASSTVLGRGELFF

SEQ ID NO: 765275 - protein, 13 aa, Homo sapiens
  CDR3 for alpha chain variable domain of TCR clone 382638 (TRAV38-2/DV8, TRAJ34)
CAYRNYNTDKLIF

SEQ ID NO: 765276 - protein, 15 aa, Homo sapiens
  CDR3 for beta chain variable domain of TCR clone 382638 (TRBV20-1, TRBJ2-5)
CSSEGTGGLQETQYF

SEQ ID NO: 765277 - protein, 13 aa, Homo sapiens
  CDR3 for alpha chain variable domain of TCR clone 382639 (TRAV1-1, TRAJ9)
CAAKNTGGFKTIF

SEQ ID NO: 765278 - protein, 15 aa, Homo sapiens
  CDR3 for beta chain variable domain of TCR clone 382639 (TRBV7-9, TRBJ2-1)
CASSLGWGRANEQFF

SEQ ID NO: 765279 - protein, 11 aa, Homo sapiens
  CDR3 for alpha chain variable domain of TCR clone 382640 (TRAV2, TRAJ13)
CASGGYQKVTF

SEQ ID NO: 765280 - protein, 11 aa, Homo sapiens
  CDR3 for beta chain variable domain of TCR clone 382640 (TRBV19, TRBJ1-2)
CASSISSGYTF

SEQ ID NO: 765281 - protein, 16 aa, Homo sapiens
  CDR3 for alpha chain variable domain of TCR clone 382641 (TRAV8-3, TRAJ44)
CAVGASNTGTASKLTF

SEQ ID NO: 765282 - protein, 16 aa, Homo sapiens
  CDR3 for beta chain variable domain of TCR clone 382641 (TRBV20-1, TRBJ1-2)
CSASMGQGVANYGYTF

SEQ ID NO: 765283 - protein, 15 aa, Homo sapiens
  CDR3 for alpha chain variable domain of TCR clone 382642 (TRAV27, TRAJ38)
CAARRNAGNNRKLIW

SEQ ID NO: 765284 - protein, 13 aa, Homo sapiens
  CDR3 for beta chain variable domain of TCR clone 382642 (TRBV12-5, TRBJ2-3)
CASGDRQSDSQYF

SEQ ID NO: 765285 - protein, 16 aa, Homo sapiens
  CDR3 for alpha chain variable domain of TCR clone 382643 (TRAV8-3, TRAJ44)
CAVGASNTGTASKLTF

SEQ ID NO: 765286 - protein, 15 aa, Homo sapiens
  CDR3 for beta chain variable domain of TCR clone 382643 (TRBV27, TRBJ1-5)
CAITFNRGSNQHQHF

SEQ ID NO: 765287 - protein, 16 aa, Homo sapiens
  CDR3 for alpha chain variable domain of TCR clone 382644 (TRAV30, TRAJ24)
CGTEIVDADSWGKFQF

SEQ ID NO: 765288 - protein, 15 aa, Homo sapiens
  CDR3 for beta chain variable domain of TCR clone 382644 (TRBV12-4, TRBJ2-2)
CASSPNDSGTGELLF

SEQ ID NO: 765289 - protein, 15 aa, Homo sapiens
  CDR3 for alpha chain variable domain of TCR clone 382645 (TRAV25, TRAJ52)
CAGRPGGTSYGKLTF

SEQ ID NO: 765290 - protein, 17 aa, Homo sapiens
  CDR3 for beta chain variable domain of TCR clone 382645 (TRBV7-8, TRBJ2-6)
WASSAGTGGAGGNVLSF

SEQ ID NO: 765291 - protein, 13 aa, Homo sapiens
  CDR3 for alpha chain variable domain of TCR clone 382646 (TRAV29/DV5, TRAJ31)
CAASRSNNARLMF

SEQ ID NO: 765292 - protein, 13 aa, Homo sapiens
  CDR3 for beta chain variable domain of TCR clone 382646 (TRBV7-2, TRBJ2-4)
CASSREHANIQYF

SEQ ID NO: 765293 - protein, 16 aa, Homo sapiens
  CDR3 for alpha chain variable domain of TCR clone 382647 (TRAV27, TRAJ34)
CAGGGLGDYNTDKLIF

SEQ ID NO: 765294 - protein, 14 aa, Homo sapiens
  CDR3 for beta chain variable domain of TCR clone 382647 (TRBV7-3, TRBJ2-2)
CASSSGGYTGELFF

SEQ ID NO: 765295 - protein, 13 aa, Homo sapiens
  CDR3 for alpha chain variable domain of TCR clone 382648 (TRAV20, TRAJ56)
CAVQAGANSKLTF

SEQ ID NO: 765296 - protein, 14 aa, Homo sapiens
  CDR3 for beta chain variable domain of TCR clone 382648 (TRBV6-1, TRBJ1-3)
CASVQGGGGNTIYF

SEQ ID NO: 765297 - protein, 14 aa, Homo sapiens
  CDR3 for alpha chain variable domain of TCR clone 382649 (TRAV23/DV6, TRAJ37)
CAASTSSNTGKLIF

SEQ ID NO: 765298 - protein, 13 aa, Homo sapiens
  CDR3 for beta chain variable domain of TCR clone 382649 (TRBV7-7, TRBJ1-1)
CASSLGAKTEAFF

SEQ ID NO: 765299 - protein, 15 aa, Homo sapiens
  CDR3 for alpha chain variable domain of TCR clone 382650 (TRAV13-2, TRAJ42)
CAGLNYGGSQGNLIF

SEQ ID NO: 765300 - protein, 17 aa, Homo sapiens
  CDR3 for beta chain variable domain of TCR clone 382650 (TRBV7-8, TRBJ1-2)
CASSLRPLQGHLYGYTF

SEQ ID NO: 765301 - protein, 13 aa, Homo sapiens
  CDR3 for alpha chain variable domain of TCR clone 382651 (TRAV13-1, TRAJ29)
CAASIGLNTPLVF

SEQ ID NO: 765302 - protein, 14 aa, Homo sapiens
  CDR3 for beta chain variable domain of TCR clone 382651 (TRBV7-6, TRBJ2-3)
CASSLGTVTDTQYF

SEQ ID NO: 765303 - protein, 14 aa, Homo sapiens
  CDR3 for alpha chain variable domain of TCR clone 382652 (TRAV16, TRAJ17)
CAPRIKAAGNKLTF

SEQ ID NO: 765304 - protein, 15 aa, Homo sapiens
  CDR3 for beta chain variable domain of TCR clone 382652 (TRBV4-2, TRBJ1-4)
CASSLVQREVEKLFF

SEQ ID NO: 765305 - protein, 11 aa, Homo sapiens
  CDR3 for alpha chain variable domain of TCR clone 382653 (TRAV2, TRAJ33)
CAVYSNYQLIW

SEQ ID NO: 765306 - protein, 16 aa, Homo sapiens
  CDR3 for beta chain variable domain of TCR clone 382653 (TRBV11-3, TRBJ2-5)
CASSSVVAGSTETQYF

SEQ ID NO: 765307 - protein, 16 aa, Homo sapiens
  CDR3 for alpha chain variable domain of TCR clone 382654 (TRAV30, TRAJ42)
CGTSKKYGGSQGNLIF

SEQ ID NO: 765308 - protein, 14 aa, Homo sapiens
  CDR3 for beta chain variable domain of TCR clone 382654 (TRBV19, TRBJ1-5)
CASNSYGTHQPQHF

SEQ ID NO: 765309 - protein, 14 aa, Homo sapiens
  CDR3 for alpha chain variable domain of TCR clone 382655 (TRAV23/DV6, TRAJ49)
CAASKSFVGNQFYF

SEQ ID NO: 765310 - protein, 15 aa, Homo sapiens
  CDR3 for beta chain variable domain of TCR clone 382655 (TRBV19, TRBJ1-5)
CASSIVWADNQPQHF

SEQ ID NO: 765311 - protein, 14 aa, Homo sapiens
  CDR3 for alpha chain variable domain of TCR clone 382656 (TRAV1-2, TRAJ8)
CAVREDSGFQKLVF

SEQ ID NO: 765312 - protein, 14 aa, Homo sapiens
  CDR3 for beta chain variable domain of TCR clone 382656 (TRBV5-4, TRBJ1-1)
CASSLDSRRDEAFF

SEQ ID NO: 765313 - protein, 14 aa, Homo sapiens
  CDR3 for alpha chain variable domain of TCR clone 382657 (TRAV12-3, TRAJ33)
CAMSVPGSNYQLIW

SEQ ID NO: 765314 - protein, 12 aa, Homo sapiens
  CDR3 for beta chain variable domain of TCR clone 382657 (TRBV12-4, TRBJ2-1)
CASSLVRVEQFF

SEQ ID NO: 765315 - protein, 16 aa, Homo sapiens
  CDR3 for alpha chain variable domain of TCR clone 382658 (TRAV26-1, TRAJ42)
CIVRPTMEEAKEISSF

SEQ ID NO: 765316 - protein, 16 aa, Homo sapiens
  CDR3 for beta chain variable domain of TCR clone 382658 (TRBV7-3, TRBJ2-2)
CASSLKRGTLSGELFF

SEQ ID NO: 765317 - protein, 14 aa, Homo sapiens
  CDR3 for alpha chain variable domain of TCR clone 382659 (TRAV3, TRAJ8)
CAALMNTGFQKLVF

SEQ ID NO: 765318 - protein, 14 aa, Homo sapiens
  CDR3 for beta chain variable domain of TCR clone 382659 (TRBV28, TRBJ2-5)
CQQPRIGQSRDQYF

SEQ ID NO: 765319 - protein, 12 aa, Homo sapiens
  CDR3 for alpha chain variable domain of TCR clone 382660 (TRAV12-3, TRAJ17)
CAMTLTGNKLTS

SEQ ID NO: 765320 - protein, 15 aa, Homo sapiens
  CDR3 for beta chain variable domain of TCR clone 382660 (TRBV20-1, TRBJ2-7)
CSSRDRVSGMDEQYF

SEQ ID NO: 765321 - protein, 11 aa, Homo sapiens
  CDR3 for alpha chain variable domain of TCR clone 382661 (TRAV29/DV5, TRAJ49)
CAAVPGNQFYF

SEQ ID NO: 765322 - protein, 16 aa, Homo sapiens
  CDR3 for beta chain variable domain of TCR clone 382661 (TRBV11-2, TRBJ1-1)
CASSLRQGGEHSKAFF

SEQ ID NO: 765323 - protein, 18 aa, Homo sapiens
  CDR3 for alpha chain variable domain of TCR clone 382662 (TRAV21, TRAJ52)
CAVRPSPAGGTSYVKLTF

SEQ ID NO: 765324 - protein, 17 aa, Homo sapiens
  CDR3 for beta chain variable domain of TCR clone 382662 (TRBV13, TRBJ2-3)
RASSLSRVAGGRDTQYF

SEQ ID NO: 765325 - protein, 12 aa, Homo sapiens
  CDR3 for alpha chain variable domain of TCR clone 382663 (TRAV13-1, TRAJ21)
CAAKEGFNKFYF

SEQ ID NO: 765326 - protein, 14 aa, Homo sapiens
  CDR3 for beta chain variable domain of TCR clone 382663 (TRBV7-9, TRBJ2-5)
CASSRWAVSETQYF

SEQ ID NO: 765327 - protein, 15 aa, Homo sapiens
  CDR3 for alpha chain variable domain of TCR clone 382664 (TRAV2, TRAJ15)
CAVEDREQAGTALIF

SEQ ID NO: 765328 - protein, 14 aa, Homo sapiens
  CDR3 for beta chain variable domain of TCR clone 382664 (TRBV20-1, TRBJ1-1)
CSAQTRIGGTEAFF

SEQ ID NO: 765329 - protein, 17 aa, Homo sapiens
  CDR3 for alpha chain variable domain of TCR clone 382665 (TRAV8-6, TRAJ8)
CAVKEGNENTGFQKLVF

SEQ ID NO: 765330 - protein, 12 aa, Homo sapiens
  CDR3 for beta chain variable domain of TCR clone 382665 (TRBV19, TRBJ1-4)
CASKDWLGGLFF

SEQ ID NO: 765331 - protein, 14 aa, Homo sapiens
  CDR3 for alpha chain variable domain of TCR clone 382666 (TRAV4, TRAJ9)
RLVGSGTAGFKTIF

SEQ ID NO: 765332 - protein, 15 aa, Homo sapiens
  CDR3 for beta chain variable domain of TCR clone 382666 (TRBV7-2, TRBJ2-1)
CASSLASGRVNEQFF

SEQ ID NO: 765333 - protein, 16 aa, Homo sapiens
  CDR3 for alpha chain variable domain of TCR clone 382667 (TRAV3, TRAJ37)
CAVRGKGSGNTGNLIF

SEQ ID NO: 765334 - protein, 16 aa, Homo sapiens
  CDR3 for beta chain variable domain of TCR clone 382667 (TRBV12-5, TRBJ2-5)
CASGPRTSGSQETQYF

SEQ ID NO: 765335 - protein, 15 aa, Homo sapiens
  CDR3 for alpha chain variable domain of TCR clone 382668 (TRAV17, TRAJ35)
CATAFVIGFGNVLHC

SEQ ID NO: 765336 - protein, 16 aa, Homo sapiens
  CDR3 for beta chain variable domain of TCR clone 382668 (TRBV11-2, TRBJ2-7)
CASSPVAGGPRYEQYF

SEQ ID NO: 765337 - protein, 19 aa, Homo sapiens
  CDR3 for alpha chain variable domain of TCR clone 382669 (TRAV13-1, TRAJ52)
CAASSSPNAGCTSYGKLTF

SEQ ID NO: 765338 - protein, 15 aa, Homo sapiens
  CDR3 for beta chain variable domain of TCR clone 382669 (TRBV9, TRBJ1-6)
CASSTGGGVDSPLHF

SEQ ID NO: 765339 - protein, 15 aa, Homo sapiens
  CDR3 for alpha chain variable domain of TCR clone 382670 (TRAV3, TRAJ3)
CAVRDRDSSASKIIV

SEQ ID NO: 765340 - protein, 18 aa, Homo sapiens
  CDR3 for beta chain variable domain of TCR clone 382670 (TRBV25-1, TRBJ1-2)
CASSGLQNGQGLIFGYTF

SEQ ID NO: 765341 - protein, 16 aa, Homo sapiens
  CDR3 for alpha chain variable domain of TCR clone 382671 (TRAV3, TRAJ10)
CAVRDMSAGGGNKLTF

SEQ ID NO: 765342 - protein, 14 aa, Homo sapiens
  CDR3 for beta chain variable domain of TCR clone 382671 (TRBV28, TRBJ2-2)
CASTRRSGDGELFF

SEQ ID NO: 765343 - protein, 17 aa, Homo sapiens
  CDR3 for alpha chain variable domain of TCR clone 382672 (TRAV12-1, TRAJ45)
CVVNMGREGGGADGLTF

SEQ ID NO: 765344 - protein, 15 aa, Homo sapiens
  CDR3 for beta chain variable domain of TCR clone 382672 (TRBV7-2, TRBJ2-7)
CASSPWGYLYHEQYF

SEQ ID NO: 765345 - protein, 17 aa, Homo sapiens
  CDR3 for alpha chain variable domain of TCR clone 382673 (TRAV8-1, TRAJ43)
CAVTNDMRFGAGTRFTV

SEQ ID NO: 765346 - protein, 17 aa, Homo sapiens
  CDR3 for beta chain variable domain of TCR clone 382673 (TRBV5-4, TRBJ2-1)
CASSSAGGRGPYNEQFF

SEQ ID NO: 765347 - protein, 13 aa, Homo sapiens
  CDR3 for alpha chain variable domain of TCR clone 382674 (TRAV13-2, TRAJ13)
CAERPGGYQKVTF

SEQ ID NO: 765348 - protein, 13 aa, Homo sapiens
  CDR3 for beta chain variable domain of TCR clone 382674 (TRBV12-4, TRBJ1-2)
CASSLRQGKGYTF

SEQ ID NO: 765349 - protein, 21 aa, Homo sapiens
  CDR3 for alpha chain variable domain of TCR clone 382675 (TRAV12-1, TRAJ37)
CVVNGGLWQHRQPNLWARDNF

SEQ ID NO: 765350 - protein, 12 aa, Homo sapiens
  CDR3 for beta chain variable domain of TCR clone 382675 (TRBV20-1, TRBJ1-2)
CSAPGFNYGYTF

SEQ ID NO: 765351 - protein, 16 aa, Homo sapiens
  CDR3 for alpha chain variable domain of TCR clone 382676 (TRAV16, TRAJ52)
CALSAAGGTSYGKLTF

SEQ ID NO: 765352 - protein, 16 aa, Homo sapiens
  CDR3 for beta chain variable domain of TCR clone 382676 (TRBV11-1, TRBJ2-2)
CASSAEGLKNTGELFF

SEQ ID NO: 765353 - protein, 12 aa, Homo sapiens
  CDR3 for alpha chain variable domain of TCR clone 382677 (TRAV29/DV5, TRAJ15)
CASNQAGTALIF

SEQ ID NO: 765354 - protein, 13 aa, Homo sapiens
  CDR3 for beta chain variable domain of TCR clone 382677 (TRBV14, TRBJ1-1)
CASSQEAGTEAFF

SEQ ID NO: 765355 - protein, 19 aa, Homo sapiens
  CDR3 for alpha chain variable domain of TCR clone 382678 (TRAV27, TRAJ53)
ASTSAQSRNSGGSNYKLTF

SEQ ID NO: 765356 - protein, 14 aa, Homo sapiens
  CDR3 for beta chain variable domain of TCR clone 382678 (TRBV11-1, TRBJ2-7)
SASTFAVPSYEQYF

SEQ ID NO: 765357 - protein, 15 aa, Homo sapiens
  CDR3 for alpha chain variable domain of TCR clone 382679 (TRAV26-1, TRAJ15)
CIVRAPNQAGTALIF

SEQ ID NO: 765358 - protein, 15 aa, Homo sapiens
  CDR3 for beta chain variable domain of TCR clone 382679 (TRBV20-1, TRBJ1-1)
CSARSAATSNTEAFF

SEQ ID NO: 765359 - protein, 13 aa, Homo sapiens
  CDR3 for alpha chain variable domain of TCR clone 382680 (TRAV8-3, TRAJ17)
CAVDAAAGNKLTF

SEQ ID NO: 765360 - protein, 16 aa, Homo sapiens
  CDR3 for beta chain variable domain of TCR clone 382680 (TRBV19, TRBJ2-2)
CASRSPGTGATGELFF

SEQ ID NO: 765361 - protein, 11 aa, Homo sapiens
  CDR3 for alpha chain variable domain of TCR clone 382681 (TRAV1-1, TRAJ23)
CAVRQGGVLIF

SEQ ID NO: 765362 - protein, 20 aa, Homo sapiens
  CDR3 for beta chain variable domain of TCR clone 382681 (TRBV7-8, TRBJ2-2)
CASSHLFPGPTIHITGELFF

SEQ ID NO: 765363 - protein, 14 aa, Homo sapiens
  CDR3 for alpha chain variable domain of TCR clone 382682 (TRAV12-1, TRAJ30)
CVVNIGGRDDKIIF

SEQ ID NO: 765364 - protein, 14 aa, Homo sapiens
  CDR3 for beta chain variable domain of TCR clone 382682 (TRBV18, TRBJ1-2)
CQLTFKYPNYGYTF

SEQ ID NO: 765365 - protein, 13 aa, Homo sapiens
  CDR3 for alpha chain variable domain of TCR clone 382683 (TRAV17, TRAJ9)
CATDYTGGFKTIV

SEQ ID NO: 765366 - protein, 14 aa, Homo sapiens
  CDR3 for beta chain variable domain of TCR clone 382683 (TRBV19, TRBJ2-5)
CASSRTGQQETQYF

SEQ ID NO: 765367 - protein, 16 aa, Homo sapiens
  CDR3 for alpha chain variable domain of TCR clone 382684 (TRAV30, TRAJ24)
CGTAIVDADSWGKFQF

SEQ ID NO: 765368 - protein, 16 aa, Homo sapiens
  CDR3 for beta chain variable domain of TCR clone 382684 (TRBV6-1, TRBJ2-1)
CASILRQGSSYNEQFF

SEQ ID NO: 765369 - protein, 12 aa, Homo sapiens
  CDR3 for alpha chain variable domain of TCR clone 382685 (TRAV8-3, TRAJ20)
CSVDFNDYKLSF

SEQ ID NO: 765370 - protein, 13 aa, Homo sapiens
  CDR3 for beta chain variable domain of TCR clone 382685 (TRBV5-7, TRBJ2-3)
CASSLGRTDTQYF

SEQ ID NO: 765371 - protein, 13 aa, Homo sapiens
  CDR3 for alpha chain variable domain of TCR clone 382686 (TRAV13-2, TRAJ48)
CAEMDFGNEKLTF

SEQ ID NO: 765372 - protein, 13 aa, Homo sapiens
  CDR3 for beta chain variable domain of TCR clone 382686 (TRBV3-1, TRBJ1-1)
CASSPGVITEAFF

SEQ ID NO: 765373 - protein, 14 aa, Homo sapiens
  CDR3 for alpha chain variable domain of TCR clone 382687 (TRAV16, TRAJ54)
CALSLIQGAQKLVS

SEQ ID NO: 765374 - protein, 15 aa, Homo sapiens
  CDR3 for beta chain variable domain of TCR clone 382687 (TRBV20-1, TRBJ2-7)
CSARDRVSGMDEQYY

SEQ ID NO: 765375 - protein, 15 aa, Homo sapiens
  CDR3 for alpha chain variable domain of TCR clone 382688 (TRAV26-1, TRAJ29)
CIVRVEGSGNTPLVF

SEQ ID NO: 765376 - protein, 16 aa, Homo sapiens
  CDR3 for beta chain variable domain of TCR clone 382688 (TRBV11-1, TRBJ2-2)
CASSAEGLKNTGELFF

SEQ ID NO: 765377 - protein, 14 aa, Homo sapiens
  CDR3 for alpha chain variable domain of TCR clone 382689 (TRAV12-3, TRAJ10)
SHLPLTGGGYKLTF

SEQ ID NO: 765378 - protein, 15 aa, Homo sapiens
  CDR3 for beta chain variable domain of TCR clone 382689 (TRBV10-2, TRBJ2-6)
CASSEQGTGANVLTF

SEQ ID NO: 765379 - protein, 12 aa, Homo sapiens
  CDR3 for alpha chain variable domain of TCR clone 382690 (TRAV16, TRAJ27)
CALNHQCRQINL

SEQ ID NO: 765380 - protein, 15 aa, Homo sapiens
  CDR3 for beta chain variable domain of TCR clone 382690 (TRBV5-4, TRBJ2-3)
RASSLDQRATDTQYF

SEQ ID NO: 765381 - protein, 10 aa, Homo sapiens
  CDR3 for alpha chain variable domain of TCR clone 382691 (TRAV8-3, TRAJ27)
CAVGPSKTNA

SEQ ID NO: 765382 - protein, 12 aa, Homo sapiens
  CDR3 for beta chain variable domain of TCR clone 382691 (TRBV11-2, TRBJ2-2)
CASSLGGGELFF

SEQ ID NO: 765383 - protein, 15 aa, Homo sapiens
  CDR3 for alpha chain variable domain of TCR clone 382692 (TRAV19, TRAJ23)
CALTEVGNQGGKLIF

SEQ ID NO: 765384 - protein, 13 aa, Homo sapiens
  CDR3 for beta chain variable domain of TCR clone 382692 (TRBV9, TRBJ2-7)
CASSVAEYYEQYF

SEQ ID NO: 765385 - protein, 15 aa, Homo sapiens
  CDR3 for alpha chain variable domain of TCR clone 382693 (TRAV20, TRAJ40)
CAVQRGTSGAYKYIF

SEQ ID NO: 765386 - protein, 15 aa, Homo sapiens
  CDR3 for beta chain variable domain of TCR clone 382693 (TRBV25-1, TRBJ1-4)
CASSPGDSTNEKLFF

SEQ ID NO: 765387 - protein, 14 aa, Homo sapiens
  CDR3 for alpha chain variable domain of TCR clone 382694 (TRAV12-3, TRAJ10)
SHLPLTVGGNKLTF

SEQ ID NO: 765388 - protein, 11 aa, Homo sapiens
  CDR3 for beta chain variable domain of TCR clone 382694 (TRBV29-1, TRBJ2-5)
CSEDRTGTQYF

SEQ ID NO: 765389 - protein, 14 aa, Homo sapiens
  CDR3 for alpha chain variable domain of TCR clone 382695 (TRAV12-2, TRAJ15)
CAPHTGQAGTALIF

SEQ ID NO: 765390 - protein, 15 aa, Homo sapiens
  CDR3 for beta chain variable domain of TCR clone 382695 (TRBV7-2, TRBJ2-1)
CASSSPGQYLGEQFF

SEQ ID NO: 765391 - protein, 20 aa, Homo sapiens
  CDR3 for alpha chain variable domain of TCR clone 382696 (TRAV26-1, TRAJ57)
CCVLLHRQIENQGGSEKLVF

SEQ ID NO: 765392 - protein, 16 aa, Homo sapiens
  CDR3 for beta chain variable domain of TCR clone 382696 (TRBV4-2, TRBJ2-7)
CASSQEELAGTYEQYF

SEQ ID NO: 765393 - protein, 14 aa, Homo sapiens
  CDR3 for alpha chain variable domain of TCR clone 382697 (TRAV17, TRAJ34)
CATDSLEGTDKLIF

SEQ ID NO: 765394 - protein, 13 aa, Homo sapiens
  CDR3 for beta chain variable domain of TCR clone 382697 (TRBV11-2, TRBJ2-7)
RASSGTRPYEQYF

SEQ ID NO: 765395 - protein, 16 aa, Homo sapiens
  CDR3 for alpha chain variable domain of TCR clone 382698 (TRAV30, TRAJ24)
CGTEIVDADSWGNSSL

SEQ ID NO: 765396 - protein, 16 aa, Homo sapiens
  CDR3 for beta chain variable domain of TCR clone 382698 (TRBV6-1, TRBJ2-1)
CASILRQGSSYNEQFF

SEQ ID NO: 765397 - protein, 12 aa, Homo sapiens
  CDR3 for alpha chain variable domain of TCR clone 382699 (TRAV21, TRAJ11)
CAATSGYSTLTF

SEQ ID NO: 765398 - protein, 14 aa, Homo sapiens
  CDR3 for beta chain variable domain of TCR clone 382699 (TRBV20-1, TRBJ2-7)
CSAPELAGVGEQCV

SEQ ID NO: 765399 - protein, 14 aa, Homo sapiens
  CDR3 for alpha chain variable domain of TCR clone 382700 (TRAV12-1, TRAJ42)
CVVIYGGSQGNLIF

SEQ ID NO: 765400 - protein, 12 aa, Homo sapiens
  CDR3 for beta chain variable domain of TCR clone 382700 (TRBV18, TRBJ2-5)
CQLTPGKETQYF

SEQ ID NO: 765401 - protein, 12 aa, Homo sapiens
  CDR3 for alpha chain variable domain of TCR clone 382701 (TRAV13-2, TRAJ23)
CAERHRGGKFIF

SEQ ID NO: 765402 - protein, 12 aa, Homo sapiens
  CDR3 for beta chain variable domain of TCR clone 382701 (TRBV5-5, TRBJ2-5)
CASSYFGETQYF

SEQ ID NO: 765403 - protein, 14 aa, Homo sapiens
  CDR3 for alpha chain variable domain of TCR clone 382702 (TRAV13-1, TRAJ13)
CAASRLGGYQKVTF

SEQ ID NO: 765404 - protein, 17 aa, Homo sapiens
  CDR3 for beta chain variable domain of TCR clone 382702 (TRBV15, TRBJ1-5)
CATSRAPPGTRNQPQHF

SEQ ID NO: 765405 - protein, 11 aa, Homo sapiens
  CDR3 for alpha chain variable domain of TCR clone 382703 (TRAV2, TRAJ13)
CASGGYQKVTF

SEQ ID NO: 765406 - protein, 14 aa, Homo sapiens
  CDR3 for beta chain variable domain of TCR clone 382703 (TRBV24-1, TRBJ2-5)
CATSDALKGETQYF

SEQ ID NO: 765407 - protein, 11 aa, Homo sapiens
  CDR3 for alpha chain variable domain of TCR clone 382704 (TRAV21, TRAJ4)
HVSVGYNKLIF

SEQ ID NO: 765408 - protein, 13 aa, Homo sapiens
  CDR3 for beta chain variable domain of TCR clone 382704 (TRBV7-3, TRBJ2-5)
CASSLTAGETQYF

SEQ ID NO: 765409 - protein, 17 aa, Homo sapiens
  CDR3 for alpha chain variable domain of TCR clone 382705 (TRAV12-3, TRAJ6)
CAMSARGGAGGSYIPTF

SEQ ID NO: 765410 - protein, 11 aa, Homo sapiens
  CDR3 for beta chain variable domain of TCR clone 382705 (TRBV12-4, TRBJ2-3)
CASSPTDTQYF

SEQ ID NO: 765411 - protein, 15 aa, Homo sapiens
  CDR3 for alpha chain variable domain of TCR clone 382706 (TRAV16, TRAJ10)
CALRELTGGGNKLTF

SEQ ID NO: 765412 - protein, 14 aa, Homo sapiens
  CDR3 for beta chain variable domain of TCR clone 382706 (TRBV5-5, TRBJ2-7)
CASSLGQRTYEQYF

SEQ ID NO: 765413 - protein, 13 aa, Homo sapiens
  CDR3 for alpha chain variable domain of TCR clone 382707 (TRAV8-3, TRAJ28)
CAVGAVGSYQLTS

SEQ ID NO: 765414 - protein, 16 aa, Homo sapiens
  CDR3 for beta chain variable domain of TCR clone 382707 (TRBV12-5, TRBJ2-5)
CASGPRTSGNQETQYF

SEQ ID NO: 765415 - protein, 16 aa, Homo sapiens
  CDR3 for alpha chain variable domain of TCR clone 382708 (TRAV21, TRAJ17)
CAVRPGEEAAGNKLTF

SEQ ID NO: 765416 - protein, 16 aa, Homo sapiens
  CDR3 for beta chain variable domain of TCR clone 382708 (TRBV2, TRBJ2-7)
CASSEPWTGPYYEQYF

SEQ ID NO: 765417 - protein, 17 aa, Homo sapiens
  CDR3 for alpha chain variable domain of TCR clone 382709 (TRAV36/DV7, TRAJ52)
CAVAQRAGGTSYGKLTF

SEQ ID NO: 765418 - protein, 14 aa, Homo sapiens
  CDR3 for beta chain variable domain of TCR clone 382709 (TRBV19, TRBJ2-1)
CASPTFVSSCEQFF

SEQ ID NO: 765419 - protein, 14 aa, Homo sapiens
  CDR3 for alpha chain variable domain of TCR clone 382710 (TRAV17, TRAJ56)
CATVPAGANSKLTF

SEQ ID NO: 765420 - protein, 12 aa, Homo sapiens
  CDR3 for beta chain variable domain of TCR clone 382710 (TRBV12-4, TRBJ2-2)
CQQDYRVRGAVF

SEQ ID NO: 765421 - protein, 13 aa, Homo sapiens
  CDR3 for alpha chain variable domain of TCR clone 382711 (TRAV8-3, TRAJ43)
CAVGPDNNNDMRF

SEQ ID NO: 765422 - protein, 13 aa, Homo sapiens
  CDR3 for beta chain variable domain of TCR clone 382711 (TRBV29-1, TRBJ2-1)
CSVEGGRVNEQFC

SEQ ID NO: 765423 - protein, 14 aa, Homo sapiens
  CDR3 for alpha chain variable domain of TCR clone 382712 (TRAV1-2, TRAJ16)
CAVNRFSDGQKLLF

SEQ ID NO: 765424 - protein, 19 aa, Homo sapiens
  CDR3 for beta chain variable domain of TCR clone 382712 (TRBV7-7, TRBJ2-7)
CASSPQDRDLPGGTYEQYF

SEQ ID NO: 765425 - protein, 13 aa, Homo sapiens
  CDR3 for alpha chain variable domain of TCR clone 382713 (TRAV21, TRAJ27)
CAARPGNAGKSTF

SEQ ID NO: 765426 - protein, 15 aa, Homo sapiens
  CDR3 for beta chain variable domain of TCR clone 382713 (TRBV2, TRBJ1-2)
CAGSESRTVNYGYTF

SEQ ID NO: 765427 - protein, 13 aa, Homo sapiens
  CDR3 for alpha chain variable domain of TCR clone 382714 (TRAV21, TRAJ20)
CAVGLRVDYKLSF

SEQ ID NO: 765428 - protein, 17 aa, Homo sapiens
  CDR3 for beta chain variable domain of TCR clone 382714 (TRBV4-1, TRBJ1-4)
CASSQEGPRGVEEKLFF

SEQ ID NO: 765429 - protein, 18 aa, Homo sapiens
  CDR3 for alpha chain variable domain of TCR clone 382715 (TRAV26-1, TRAJ23)
CIVRVGLEVWNQGGKLSF

SEQ ID NO: 765430 - protein, 12 aa, Homo sapiens
  CDR3 for beta chain variable domain of TCR clone 382715 (TRBV12-4, TRBJ2-7)
CASSLGGYEQYF

SEQ ID NO: 765431 - protein, 14 aa, Homo sapiens
  CDR3 for alpha chain variable domain of TCR clone 382716 (TRAV1-1, TRAJ27)
CAVIYNTNAGKSTF

SEQ ID NO: 765432 - protein, 15 aa, Homo sapiens
  CDR3 for beta chain variable domain of TCR clone 382716 (TRBV19, TRBJ2-1)
CASSGGGALYNEQFF

SEQ ID NO: 765433 - protein, 15 aa, Homo sapiens
  CDR3 for alpha chain variable domain of TCR clone 382717 (TRAV3, TRAJ17)
CAVRDTGAAGNKLTF

SEQ ID NO: 765434 - protein, 14 aa, Homo sapiens
  CDR3 for beta chain variable domain of TCR clone 382717 (TRBV6-3, TRBJ1-1)
RASSILLPGAEAFF

SEQ ID NO: 765435 - protein, 11 aa, Homo sapiens
  CDR3 for alpha chain variable domain of TCR clone 382718 (TRAV8-3, TRAJ4)
CAVGARPDFKR

SEQ ID NO: 765436 - protein, 15 aa, Homo sapiens
  CDR3 for beta chain variable domain of TCR clone 382718 (TRBV4-1, TRBJ1-2)
CASSQGQGAAYGYTF

SEQ ID NO: 765437 - protein, 15 aa, Homo sapiens
  CDR3 for alpha chain variable domain of TCR clone 382719 (TRAV17, TRAJ40)
CASKYIFGTGNRLKV

SEQ ID NO: 765438 - protein, 17 aa, Homo sapiens
  CDR3 for beta chain variable domain of TCR clone 382719 (TRBV11-2, TRBJ2-4)
CASSFLALGGAGDIQYF

SEQ ID NO: 765439 - protein, 13 aa, Homo sapiens
  CDR3 for alpha chain variable domain of TCR clone 382720 (TRAV1-2, TRAJ31)
CAVRPNNNARLMF

SEQ ID NO: 765440 - protein, 14 aa, Homo sapiens
  CDR3 for beta chain variable domain of TCR clone 382720 (TRBV11-3, TRBJ2-1)
CASSLSGPYNEQFF

SEQ ID NO: 765441 - protein, 13 aa, Homo sapiens
  CDR3 for alpha chain variable domain of TCR clone 382721 (TRAV14/DV4, TRAJ16)
CAMREESGQKLLF

SEQ ID NO: 765442 - protein, 15 aa, Homo sapiens
  CDR3 for beta chain variable domain of TCR clone 382721 (TRBV7-9, TRBJ2-7)
CASSLDLDRGYEQYF

SEQ ID NO: 765443 - protein, 15 aa, Homo sapiens
  CDR3 for alpha chain variable domain of TCR clone 382722 (TRAV26-1, TRAJ28)
CIVRVAGAGSYQLTF

SEQ ID NO: 765444 - protein, 19 aa, Homo sapiens
  CDR3 for beta chain variable domain of TCR clone 382722 (TRBV7-3, TRBJ2-7)
CASSSTGVAGGWPSYEQYF

SEQ ID NO: 765445 - protein, 13 aa, Homo sapiens
  CDR3 for alpha chain variable domain of TCR clone 382723 (TRAV2, TRAJ24)
CAVTTVSWGKLQF

SEQ ID NO: 765446 - protein, 14 aa, Homo sapiens
  CDR3 for beta chain variable domain of TCR clone 382723 (TRBV13, TRBJ2-5)
CASSLGRGQETQYF

SEQ ID NO: 765447 - protein, 15 aa, Homo sapiens
  CDR3 for alpha chain variable domain of TCR clone 382724 (TRAV12-3, TRAJ27)
CAMMAYNTNAGRSTF

SEQ ID NO: 765448 - protein, 13 aa, Homo sapiens
  CDR3 for beta chain variable domain of TCR clone 382724 (TRBV11-2, TRBJ2-5)
CASSRGPSETQYF

SEQ ID NO: 765449 - protein, 12 aa, Homo sapiens
  CDR3 for alpha chain variable domain of TCR clone 382725 (TRAV12-1, TRAJ27)
CVVSLNAGKSTF

SEQ ID NO: 765450 - protein, 13 aa, Homo sapiens
  CDR3 for beta chain variable domain of TCR clone 382725 (TRBV7-9, TRBJ1-2)
CASSLKQNYGYTF

SEQ ID NO: 765451 - protein, 14 aa, Homo sapiens
  CDR3 for alpha chain variable domain of TCR clone 382726 (TRAV35, TRAJ33)
CAGSSQDSNYQLIW

SEQ ID NO: 765452 - protein, 14 aa, Homo sapiens
  CDR3 for beta chain variable domain of TCR clone 382726 (TRBV19, TRBJ2-7)
CASSDRAGPYEQYF

SEQ ID NO: 765453 - protein, 10 aa, Homo sapiens
  CDR3 for alpha chain variable domain of TCR clone 382727 (TRAV21, TRAJ31)
CAVDNARLMF

SEQ ID NO: 765454 - protein, 15 aa, Homo sapiens
  CDR3 for beta chain variable domain of TCR clone 382727 (TRBV10-1, TRBJ2-3)
CASSATSGGFDTQYF

SEQ ID NO: 765455 - protein, 16 aa, Homo sapiens
  CDR3 for alpha chain variable domain of TCR clone 382728 (TRAV30, TRAJ24)
CGTEIVDADSWGKFQF

SEQ ID NO: 765456 - protein, 14 aa, Homo sapiens
  CDR3 for beta chain variable domain of TCR clone 382728 (TRBV4-1, TRBJ1-6)
CASSPGSDSSPLHF

SEQ ID NO: 765457 - protein, 13 aa, Homo sapiens
  CDR3 for alpha chain variable domain of TCR clone 382729 (TRAV3, TRAJ21)
CAVRERDFNKFYF

SEQ ID NO: 765458 - protein, 13 aa, Homo sapiens
  CDR3 for beta chain variable domain of TCR clone 382729 (TRBV13, TRBJ2-1)
CASILGGRGEQFF

SEQ ID NO: 765459 - protein, 16 aa, Homo sapiens
  CDR3 for alpha chain variable domain of TCR clone 382730 (TRAV30, TRAJ24)
CGTEIVDADSWGKFQF

SEQ ID NO: 765460 - protein, 12 aa, Homo sapiens
  CDR3 for beta chain variable domain of TCR clone 382730 (TRBV7-9, TRBJ2-7)
CASRTGFDEQYF

SEQ ID NO: 765461 - protein, 14 aa, Homo sapiens
  CDR3 for alpha chain variable domain of TCR clone 382731 (TRAV1-2, TRAJ16)
CAVNRFSDGQKLLF

SEQ ID NO: 765462 - protein, 16 aa, Homo sapiens
  CDR3 for beta chain variable domain of TCR clone 382731 (TRBV11-2, TRBJ1-2)
CASSLDTGGADYGYTL

SEQ ID NO: 765463 - protein, 13 aa, Homo sapiens
  CDR3 for alpha chain variable domain of TCR clone 382732 (TRAV12-1, TRAJ31)
CVVNMNNNARLMF

SEQ ID NO: 765464 - protein, 13 aa, Homo sapiens
  CDR3 for beta chain variable domain of TCR clone 382732 (TRBV7-3, TRBJ1-1)
CASSQDWGAEAFF

SEQ ID NO: 765465 - protein, 11 aa, Homo sapiens
  CDR3 for alpha chain variable domain of TCR clone 382733 (TRAV8-6, TRAJ42)
CGGGSQGNLIF

SEQ ID NO: 765466 - protein, 15 aa, Homo sapiens
  CDR3 for beta chain variable domain of TCR clone 382733 (TRBV19, TRBJ1-1)
CASTSGQIQNTEAFF

SEQ ID NO: 765467 - protein, 13 aa, Homo sapiens
  CDR3 for alpha chain variable domain of TCR clone 382734 (TRAV12-3, TRAJ54)
CAMFAQGAQKLVF

SEQ ID NO: 765468 - protein, 16 aa, Homo sapiens
  CDR3 for beta chain variable domain of TCR clone 382734 (TRBV7-6, TRBJ2-3)
CASSPRRGRLGDTQYF

SEQ ID NO: 765469 - protein, 13 aa, Homo sapiens
  CDR3 for alpha chain variable domain of TCR clone 382735 (TRAV20, TRAJ54)
CALTFEGAQKLAF

SEQ ID NO: 765470 - protein, 15 aa, Homo sapiens
  CDR3 for beta chain variable domain of TCR clone 382735 (TRBV20-1, TRBJ2-7)
CSAESGTSGAYEQYF

SEQ ID NO: 765471 - protein, 14 aa, Homo sapiens
  CDR3 for alpha chain variable domain of TCR clone 382736 (TRAV12-2, TRAJ44)
CAVNPAGTASKLTF

SEQ ID NO: 765472 - protein, 17 aa, Homo sapiens
  CDR3 for beta chain variable domain of TCR clone 382736 (TRBV7-3, TRBJ2-3)
CASSPGGLAGFGDTQYF

SEQ ID NO: 765473 - protein, 15 aa, Homo sapiens
  CDR3 for alpha chain variable domain of TCR clone 382737 (TRAV8-6, TRAJ48)
CCEPRFNFGNEKLTF

SEQ ID NO: 765474 - protein, 15 aa, Homo sapiens
  CDR3 for beta chain variable domain of TCR clone 382737 (TRBV12-4, TRBJ2-2)
CASSPQPGSTGQLFF

SEQ ID NO: 765475 - protein, 14 aa, Homo sapiens
  CDR3 for alpha chain variable domain of TCR clone 382738 (TRAV6, TRAJ6)
CALPTSGGSYIPTF

SEQ ID NO: 765476 - protein, 17 aa, Homo sapiens
  CDR3 for beta chain variable domain of TCR clone 382738 (TRBV5-1, TRBJ2-5)
CASSPGALGQNQETQYF

SEQ ID NO: 765477 - protein, 16 aa, Homo sapiens
  CDR3 for alpha chain variable domain of TCR clone 382739 (TRAV3, TRAJ37)
CAVRVRGSGNTGKLIF

SEQ ID NO: 765478 - protein, 16 aa, Homo sapiens
  CDR3 for beta chain variable domain of TCR clone 382739 (TRBV11-2, TRBJ2-7)
CASSRTTGGVSYEQYF

SEQ ID NO: 765479 - protein, 11 aa, Homo sapiens
  CDR3 for alpha chain variable domain of TCR clone 382740 (TRAV20, TRAJ23)
CACNQGGKLIF

SEQ ID NO: 765480 - protein, 13 aa, Homo sapiens
  CDR3 for beta chain variable domain of TCR clone 382740 (TRBV4-2, TRBJ1-1)
CASSQAGNTEAFF

SEQ ID NO: 765481 - protein, 16 aa, Homo sapiens
  CDR3 for alpha chain variable domain of TCR clone 382741 (TRAV8-6, TRAJ28)
CAVTSKHGAGSYQLTF

SEQ ID NO: 765482 - protein, 16 aa, Homo sapiens
  CDR3 for beta chain variable domain of TCR clone 382741 (TRBV12-4, TRBJ2-5)
CASSWRPSGDLETQYF

SEQ ID NO: 765483 - protein, 13 aa, Homo sapiens
  CDR3 for alpha chain variable domain of TCR clone 382742 (TRAV20, TRAJ31)
CAVQAWNNARLMF

SEQ ID NO: 765484 - protein, 13 aa, Homo sapiens
  CDR3 for beta chain variable domain of TCR clone 382742 (TRBV20-1, TRBJ2-5)
CSAREGGKETQYF

SEQ ID NO: 765485 - protein, 16 aa, Homo sapiens
  CDR3 for alpha chain variable domain of TCR clone 382743 (TRAV30, TRAJ24)
CGTEIVDADSWGKYQF

SEQ ID NO: 765486 - protein, 15 aa, Homo sapiens
  CDR3 for beta chain variable domain of TCR clone 382743 (TRBV5-1, TRBJ2-2)
CASSSRGGNTGELFF

SEQ ID NO: 765487 - protein, 16 aa, Homo sapiens
  CDR3 for alpha chain variable domain of TCR clone 382744 (TRAV16, TRAJ4)
RALSRMFSGGYNKLIF

SEQ ID NO: 765488 - protein, 19 aa, Homo sapiens
  CDR3 for beta chain variable domain of TCR clone 382744 (TRBV28, TRBJ2-7)
CASSYSGTSRLGWVYEQYF

SEQ ID NO: 765489 - protein, 18 aa, Homo sapiens
  CDR3 for alpha chain variable domain of TCR clone 382745 (TRAV26-2, TRAJ54)
CILRDVEVGIQGAQKLVF

SEQ ID NO: 765490 - protein, 16 aa, Homo sapiens
  CDR3 for beta chain variable domain of TCR clone 382745 (TRBV6-1, TRBJ2-5)
CASSETLDRRAETQYF

SEQ ID NO: 765491 - protein, 10 aa, Homo sapiens
  CDR3 for alpha chain variable domain of TCR clone 382746 (TRAV23/DV6, TRAJ57)
CAASSTLSQG

SEQ ID NO: 765492 - protein, 13 aa, Homo sapiens
  CDR3 for beta chain variable domain of TCR clone 382746 (TRBV15, TRBJ1-6)
CATSGGLKSPLHF

SEQ ID NO: 765493 - protein, 14 aa, Homo sapiens
  CDR3 for alpha chain variable domain of TCR clone 382747 (TRAV1-2, TRAJ16)
CAVNRFSDGQKLLF

SEQ ID NO: 765494 - protein, 16 aa, Homo sapiens
  CDR3 for beta chain variable domain of TCR clone 382747 (TRBV29-1, TRBJ2-2)
CSVETRASGNTGELFF

SEQ ID NO: 765495 - protein, 13 aa, Homo sapiens
  CDR3 for alpha chain variable domain of TCR clone 382748 (TRAV13-1, TRAJ37)
CAARSGNTGKLIF

SEQ ID NO: 765496 - protein, 14 aa, Homo sapiens
  CDR3 for beta chain variable domain of TCR clone 382748 (TRBV12-4, TRBJ2-3)
CASSLGQGTETQYF

SEQ ID NO: 765497 - protein, 15 aa, Homo sapiens
  CDR3 for alpha chain variable domain of TCR clone 382749 (TRAV6, TRAJ4)
CALGGFSGGYNKLFF

SEQ ID NO: 765498 - protein, 13 aa, Homo sapiens
  CDR3 for beta chain variable domain of TCR clone 382749 (TRBV19, TRBJ1-2)
CASSVPGQDGYTF

SEQ ID NO: 765499 - protein, 15 aa, Homo sapiens
  CDR3 for alpha chain variable domain of TCR clone 382750 (TRAV17, TRAJ57)
CATGPSQGGSEKPVF

SEQ ID NO: 765500 - protein, 16 aa, Homo sapiens
  CDR3 for beta chain variable domain of TCR clone 382750 (TRBV7-9, TRBJ2-3)
CASSLAQTPSTDTQYF

SEQ ID NO: 765501 - protein, 12 aa, Homo sapiens
  CDR3 for alpha chain variable domain of TCR clone 382751 (TRAV13-1, TRAJ53)
AASGGSNYKLTF

SEQ ID NO: 765502 - protein, 16 aa, Homo sapiens
  CDR3 for beta chain variable domain of TCR clone 382751 (TRBV11-2, TRBJ1-2)
CASSLDTGGADYGYTF

SEQ ID NO: 765503 - protein, 18 aa, Homo sapiens
  CDR3 for alpha chain variable domain of TCR clone 382752 (TRAV13-1, TRAJ52)
CAASKRSAGGTSYGKLTF

SEQ ID NO: 765504 - protein, 15 aa, Homo sapiens
  CDR3 for beta chain variable domain of TCR clone 382752 (TRBV4-1, TRBJ2-5)
CASSQWDLYQETQYF

SEQ ID NO: 765505 - protein, 16 aa, Homo sapiens
  CDR3 for alpha chain variable domain of TCR clone 382753 (TRAV8-6, TRAJ4)
CAVSPTFSGGYNKLIF

SEQ ID NO: 765506 - protein, 14 aa, Homo sapiens
  CDR3 for beta chain variable domain of TCR clone 382753 (TRBV29-1, TRBJ2-2)
CSVVASGAPGELFF

SEQ ID NO: 765507 - protein, 14 aa, Homo sapiens
  CDR3 for alpha chain variable domain of TCR clone 382754 (TRAV8-3, TRAJ35)
CAVVPQGFGNVLHC

SEQ ID NO: 765508 - protein, 14 aa, Homo sapiens
  CDR3 for beta chain variable domain of TCR clone 382754 (TRBV28, TRBJ1-2)
CASRIQGANYGYTF

SEQ ID NO: 765509 - protein, 14 aa, Homo sapiens
  CDR3 for alpha chain variable domain of TCR clone 382755 (TRAV8-4, TRAJ15)
CAGILNQAGTALIF

SEQ ID NO: 765510 - protein, 12 aa, Homo sapiens
  CDR3 for beta chain variable domain of TCR clone 382755 (TRBV7-9, TRBJ1-6)
CASSASESPLHF

SEQ ID NO: 765511 - protein, 15 aa, Homo sapiens
  CDR3 for alpha chain variable domain of TCR clone 382756 (TRAV3, TRAJ22)
CAVRDRGGSARQPTF

SEQ ID NO: 765512 - protein, 13 aa, Homo sapiens
  CDR3 for beta chain variable domain of TCR clone 382756 (TRBV12-4, TRBJ1-2)
CASSLRQGKGYTF

SEQ ID NO: 765513 - protein, 15 aa, Homo sapiens
  CDR3 for alpha chain variable domain of TCR clone 382757 (TRAV8-4, TRAJ11)
FALSRALSGYSTLTF

SEQ ID NO: 765514 - protein, 13 aa, Homo sapiens
  CDR3 for beta chain variable domain of TCR clone 382757 (TRBV10-3, TRBJ2-7)
CASKLAVNYEQYF

SEQ ID NO: 765515 - protein, 15 aa, Homo sapiens
  CDR3 for alpha chain variable domain of TCR clone 382758 (TRAV12-3, TRAJ6)
CAMSATTGGSYIPTF

SEQ ID NO: 765516 - protein, 14 aa, Homo sapiens
  CDR3 for beta chain variable domain of TCR clone 382758 (TRBV13, TRBJ2-5)
CARSLERVGETQYF

SEQ ID NO: 765517 - protein, 12 aa, Homo sapiens
  CDR3 for alpha chain variable domain of TCR clone 382759 (TRAV3, TRAJ26)
CAMRDYGQNFVF

SEQ ID NO: 765518 - protein, 12 aa, Homo sapiens
  CDR3 for beta chain variable domain of TCR clone 382759 (TRBV12-4, TRBJ2-3)
CASSTLPDTQYF

SEQ ID NO: 765519 - protein, 14 aa, Homo sapiens
  CDR3 for alpha chain variable domain of TCR clone 382760 (TRAV26-1, TRAJ49)
CIVRPSNTDNQFYF

SEQ ID NO: 765520 - protein, 15 aa, Homo sapiens
  CDR3 for beta chain variable domain of TCR clone 382760 (TRBV19, TRBJ1-1)
CASMGFRDVNTEAFF

SEQ ID NO: 765521 - protein, 14 aa, Homo sapiens
  CDR3 for alpha chain variable domain of TCR clone 382761 (TRAV23/DV6, TRAJ40)
CAASLTSGTYKYIF

SEQ ID NO: 765522 - protein, 14 aa, Homo sapiens
  CDR3 for beta chain variable domain of TCR clone 382761 (TRBV5-1, TRBJ2-3)
CASSQGQGGGTQYF

SEQ ID NO: 765523 - protein, 12 aa, Homo sapiens
  CDR3 for alpha chain variable domain of TCR clone 382762 (TRAV12-2, TRAJ8)
CAVNTGFQKLVF

SEQ ID NO: 765524 - protein, 14 aa, Homo sapiens
  CDR3 for beta chain variable domain of TCR clone 382762 (TRBV7-8, TRBJ2-5)
CASRATGGQETQYF

SEQ ID NO: 765525 - protein, 15 aa, Homo sapiens
  CDR3 for alpha chain variable domain of TCR clone 382763 (TRAV17, TRAJ57)
CATGPSQGGSEKLVF

SEQ ID NO: 765526 - protein, 14 aa, Homo sapiens
  CDR3 for beta chain variable domain of TCR clone 382763 (TRBV18, TRBJ2-7)
CASSPRGGAYEQYF

SEQ ID NO: 765527 - protein, 14 aa, Homo sapiens
  CDR3 for alpha chain variable domain of TCR clone 382764 (TRAV1-2, TRAJ16)
CAVNQFSDGQKLLF

SEQ ID NO: 765528 - protein, 19 aa, Homo sapiens
  CDR3 for beta chain variable domain of TCR clone 382764 (TRBV18, TRBJ2-1)
CASSPTGGLLAGVYNEQFF

SEQ ID NO: 765529 - protein, 13 aa, Homo sapiens
  CDR3 for alpha chain variable domain of TCR clone 382765 (TRAV4, TRAJ40)
CLVEGSGTYKYIF

SEQ ID NO: 765530 - protein, 14 aa, Homo sapiens
  CDR3 for beta chain variable domain of TCR clone 382765 (TRBV15, TRBJ2-7)
CATSRVARGYEQYF

SEQ ID NO: 765531 - protein, 12 aa, Homo sapiens
  CDR3 for alpha chain variable domain of TCR clone 382766 (TRAV29/DV5, TRAJ49)
CAATATGNQFYF

SEQ ID NO: 765532 - protein, 15 aa, Homo sapiens
  CDR3 for beta chain variable domain of TCR clone 382766 (TRBV19, TRBJ2-2)
CASRQTGADTGELFF

SEQ ID NO: 765533 - protein, 12 aa, Homo sapiens
  CDR3 for alpha chain variable domain of TCR clone 382767 (TRAV17, TRAJ5)
CAILTGRRALTF

SEQ ID NO: 765534 - protein, 14 aa, Homo sapiens
  CDR3 for beta chain variable domain of TCR clone 382767 (TRBV19, TRBJ1-5)
CASGTEVYNQPQHF

SEQ ID NO: 765535 - protein, 17 aa, Homo sapiens
  CDR3 for alpha chain variable domain of TCR clone 382768 (TRAV8-1, TRAJ43)
CAVTNDMRFGAGTRLTV

SEQ ID NO: 765536 - protein, 17 aa, Homo sapiens
  CDR3 for beta chain variable domain of TCR clone 382768 (TRBV5-4, TRBJ2-1)
CASSSSGGRGPYNEQFF

SEQ ID NO: 765537 - protein, 14 aa, Homo sapiens
  CDR3 for alpha chain variable domain of TCR clone 382769 (TRAV1-2, TRAJ16)
YAVNRFSDGQKLLF

SEQ ID NO: 765538 - protein, 12 aa, Homo sapiens
  CDR3 for beta chain variable domain of TCR clone 382769 (TRBV7-6, TRBJ2-7)
CASSLADSEQYF

SEQ ID NO: 765539 - protein, 14 aa, Homo sapiens
  CDR3 for alpha chain variable domain of TCR clone 382770 (TRAV16, TRAJ16)
CALSVLSDGQKLLF

SEQ ID NO: 765540 - protein, 11 aa, Homo sapiens
  CDR3 for beta chain variable domain of TCR clone 382770 (TRBV7-8, TRBJ2-7)
CASSLSLEQYF

SEQ ID NO: 765541 - protein, 16 aa, Homo sapiens
  CDR3 for alpha chain variable domain of TCR clone 382771 (TRAV8-3, TRAJ10)
CAVGPGVTGGGNRLTF

SEQ ID NO: 765542 - protein, 13 aa, Homo sapiens
  CDR3 for beta chain variable domain of TCR clone 382771 (TRBV18, TRBJ1-1)
CASSPGPSGEAFF

SEQ ID NO: 765543 - protein, 16 aa, Homo sapiens
  CDR3 for alpha chain variable domain of TCR clone 382772 (TRAV30, TRAJ24)
CGTEIVGANSWGKFQF

SEQ ID NO: 765544 - protein, 15 aa, Homo sapiens
  CDR3 for beta chain variable domain of TCR clone 382772 (TRBV18, TRBJ2-1)
CASLPDRGRDNEQFF

SEQ ID NO: 765545 - protein, 17 aa, Homo sapiens
  CDR3 for alpha chain variable domain of TCR clone 382773 (TRAV8-4, TRAJ11)
CAVSDRGENSGYSTLTF

SEQ ID NO: 765546 - protein, 16 aa, Homo sapiens
  CDR3 for beta chain variable domain of TCR clone 382773 (TRBV12-4, TRBJ2-5)
CASSCLVRGRQETQYF

SEQ ID NO: 765547 - protein, 11 aa, Homo sapiens
  CDR3 for alpha chain variable domain of TCR clone 382774 (TRAV1-2, TRAJ40)
CAVPGSYKYIF

SEQ ID NO: 765548 - protein, 16 aa, Homo sapiens
  CDR3 for beta chain variable domain of TCR clone 382774 (TRBV7-3, TRBJ2-2)
CASSLKRGTLSGELFF

SEQ ID NO: 765549 - protein, 17 aa, Homo sapiens
  CDR3 for alpha chain variable domain of TCR clone 382775 (TRAV3, TRAJ42)
CAVRGRDYGGSHGNLIF

SEQ ID NO: 765550 - protein, 15 aa, Homo sapiens
  CDR3 for beta chain variable domain of TCR clone 382775 (TRBV3-1, TRBJ2-1)
CASSQVVDDGEEQFF

SEQ ID NO: 765551 - protein, 13 aa, Homo sapiens
  CDR3 for alpha chain variable domain of TCR clone 382776 (TRAV13-1, TRAJ35)
CAASLGLGNVLHC

SEQ ID NO: 765552 - protein, 15 aa, Homo sapiens
  CDR3 for beta chain variable domain of TCR clone 382776 (TRBV20-1, TRBJ2-7)
CSARDRVSGMDEQYF

SEQ ID NO: 765553 - protein, 12 aa, Homo sapiens
  CDR3 for alpha chain variable domain of TCR clone 382777 (TRAV12-3, TRAJ17)
CAMTLTVNTLTF

SEQ ID NO: 765554 - protein, 15 aa, Homo sapiens
  CDR3 for beta chain variable domain of TCR clone 382777 (TRBV20-1, TRBJ2-7)
CSARDRVSGMDEQYF

SEQ ID NO: 765555 - protein, 11 aa, Homo sapiens
  CDR3 for alpha chain variable domain of TCR clone 382778 (TRAV3, TRAJ21)
CAVGNFNKFYF

SEQ ID NO: 765556 - protein, 13 aa, Homo sapiens
  CDR3 for beta chain variable domain of TCR clone 382778 (TRBV7-8, TRBJ2-1)
CASTRDAVDEQFF

SEQ ID NO: 765557 - protein, 14 aa, Homo sapiens
  CDR3 for alpha chain variable domain of TCR clone 382779 (TRAV16, TRAJ33)
CALSAMDSNYQLIW

SEQ ID NO: 765558 - protein, 14 aa, Homo sapiens
  CDR3 for beta chain variable domain of TCR clone 382779 (TRBV7-2, TRBJ2-7)
CASSLYPGRYEQYF

SEQ ID NO: 765559 - protein, 15 aa, Homo sapiens
  CDR3 for alpha chain variable domain of TCR clone 382780 (TRAV8-4, TRAJ37)
CAVTYGSSNTGKLIF

SEQ ID NO: 765560 - protein, 17 aa, Homo sapiens
  CDR3 for beta chain variable domain of TCR clone 382780 (TRBV13, TRBJ2-3)
CASSLSRVAGGRNTQYF

SEQ ID NO: 765561 - protein, 14 aa, Homo sapiens
  CDR3 for alpha chain variable domain of TCR clone 382781 (TRAV27, TRAJ22)
CAGLPSGSARQLTF

SEQ ID NO: 765562 - protein, 14 aa, Homo sapiens
  CDR3 for beta chain variable domain of TCR clone 382781 (TRBV19, TRBJ2-1)
CASSRLASINEQFF

SEQ ID NO: 765563 - protein, 14 aa, Homo sapiens
  CDR3 for alpha chain variable domain of TCR clone 382782 (TRAV1-2, TRAJ8)
CAVREDTGFQKLVF

SEQ ID NO: 765564 - protein, 14 aa, Homo sapiens
  CDR3 for beta chain variable domain of TCR clone 382782 (TRBV2, TRBJ2-2)
CASSLFGGNGELFF

SEQ ID NO: 765565 - protein, 13 aa, Homo sapiens
  CDR3 for alpha chain variable domain of TCR clone 382783 (TRAV17, TRAJ9)
CATDYTGGFKTIF

SEQ ID NO: 765566 - protein, 14 aa, Homo sapiens
  CDR3 for beta chain variable domain of TCR clone 382783 (TRBV19, TRBJ2-5)
CASSMTGQQESQYF

SEQ ID NO: 765567 - protein, 13 aa, Homo sapiens
  CDR3 for alpha chain variable domain of TCR clone 382784 (TRAV2, TRAJ23)
CAVLGIQGGKLIF

SEQ ID NO: 765568 - protein, 15 aa, Homo sapiens
  CDR3 for beta chain variable domain of TCR clone 382784 (TRBV11-2, TRBJ2-1)
CASSSSTISYNEQFF

SEQ ID NO: 765569 - protein, 14 aa, Homo sapiens
  CDR3 for alpha chain variable domain of TCR clone 382785 (TRAV13-1, TRAJ35)
CAASKGGFGNVLHC

SEQ ID NO: 765570 - protein, 16 aa, Homo sapiens
  CDR3 for beta chain variable domain of TCR clone 382785 (TRBV7-2, TRBJ2-6)
CASSERRASGANVLTF

SEQ ID NO: 765571 - protein, 17 aa, Homo sapiens
  CDR3 for alpha chain variable domain of TCR clone 382786 (TRAV3, TRAJ6)
CAVSRRTDTGGSYIPTF

SEQ ID NO: 765572 - protein, 15 aa, Homo sapiens
  CDR3 for beta chain variable domain of TCR clone 382786 (TRBV20-1, TRBJ2-7)
CSARDRVSGMDEQYF

SEQ ID NO: 765573 - protein, 14 aa, Homo sapiens
  CDR3 for alpha chain variable domain of TCR clone 382787 (TRAV35, TRAJ50)
CAGHRKTSYDKVIF

SEQ ID NO: 765574 - protein, 13 aa, Homo sapiens
  CDR3 for beta chain variable domain of TCR clone 382787 (TRBV7-7, TRBJ2-3)
CVSSLSRADTQDF

SEQ ID NO: 765575 - protein, 15 aa, Homo sapiens
  CDR3 for alpha chain variable domain of TCR clone 382788 (TRAV2, TRAJ9)
CAVEDRGTGGFKTIF

SEQ ID NO: 765576 - protein, 16 aa, Homo sapiens
  CDR3 for beta chain variable domain of TCR clone 382788 (TRBV6-1, TRBJ2-2)
CASSFGQGANTGELFF

SEQ ID NO: 765577 - protein, 13 aa, Homo sapiens
  CDR3 for alpha chain variable domain of TCR clone 382789 (TRAV8-3, TRAJ36)
CAVGATGANNLFF

SEQ ID NO: 765578 - protein, 15 aa, Homo sapiens
  CDR3 for beta chain variable domain of TCR clone 382789 (TRBV7-2, TRBJ1-2)
CASSPRAGWNYGYTI

SEQ ID NO: 765579 - protein, 10 aa, Homo sapiens
  CDR3 for alpha chain variable domain of TCR clone 382790 (TRAV1-2, TRAJ31)
CTFFDARLMF

SEQ ID NO: 765580 - protein, 17 aa, Homo sapiens
  CDR3 for beta chain variable domain of TCR clone 382790 (TRBV15, TRBJ1-2)
CATSGREIDVVNYGDTF

SEQ ID NO: 765581 - protein, 14 aa, Homo sapiens
  CDR3 for alpha chain variable domain of TCR clone 382791 (TRAV12-3, TRAJ10)
SHLPPTGGGNKLTF

SEQ ID NO: 765582 - protein, 16 aa, Homo sapiens
  CDR3 for beta chain variable domain of TCR clone 382791 (TRBV15, TRBJ2-7)
CATSRDRGRRRGEQYF

SEQ ID NO: 765583 - protein, 12 aa, Homo sapiens
  CDR3 for alpha chain variable domain of TCR clone 382792 (TRAV12-1, TRAJ40)
CVVPSGTYKYNF

SEQ ID NO: 765584 - protein, 15 aa, Homo sapiens
  CDR3 for beta chain variable domain of TCR clone 382792 (TRBV12-4, TRBJ2-1)
CAGSPLSGRNSEQFF

SEQ ID NO: 765585 - protein, 15 aa, Homo sapiens
  CDR3 for alpha chain variable domain of TCR clone 382793 (TRAV21, TRAJ53)
CATLNSGGSNYKLTF

SEQ ID NO: 765586 - protein, 16 aa, Homo sapiens
  CDR3 for beta chain variable domain of TCR clone 382793 (TRBV11-2, TRBJ2-7)
CASSLAPTGVDYEQYF

SEQ ID NO: 765587 - protein, 14 aa, Homo sapiens
  CDR3 for alpha chain variable domain of TCR clone 382794 (TRAV1-2, TRAJ6)
CAVSLSGGSYIPTF

SEQ ID NO: 765588 - protein, 12 aa, Homo sapiens
  CDR3 for beta chain variable domain of TCR clone 382794 (TRBV28, TRBJ2-3)
CASSLYRDTQYF

SEQ ID NO: 765589 - protein, 15 aa, Homo sapiens
  CDR3 for alpha chain variable domain of TCR clone 382795 (TRAV26-1, TRAJ3)
CIVRSVYSSASKIIF

SEQ ID NO: 765590 - protein, 14 aa, Homo sapiens
  CDR3 for beta chain variable domain of TCR clone 382795 (TRBV13, TRBJ2-5)
CASYRRLAEETQYF

SEQ ID NO: 765591 - protein, 13 aa, Homo sapiens
  CDR3 for alpha chain variable domain of TCR clone 382796 (TRAV1-2, TRAJ9)
CAVLNTGGFKTIF

SEQ ID NO: 765592 - protein, 19 aa, Homo sapiens
  CDR3 for beta chain variable domain of TCR clone 382796 (TRBV2, TRBJ2-7)
CASSDDETSGRANDYEQYF

SEQ ID NO: 765593 - protein, 13 aa, Homo sapiens
  CDR3 for alpha chain variable domain of TCR clone 382797 (TRAV8-6, TRAJ9)
CAVSHTGGFKTTF

SEQ ID NO: 765594 - protein, 17 aa, Homo sapiens
  CDR3 for beta chain variable domain of TCR clone 382797 (TRBV13, TRBJ2-3)
CASSLSRVAGGRNTQYF

SEQ ID NO: 765595 - protein, 14 aa, Homo sapiens
  CDR3 for alpha chain variable domain of TCR clone 382798 (TRAV12-3, TRAJ10)
SHLPLTGGGNKLTF

SEQ ID NO: 765596 - protein, 16 aa, Homo sapiens
  CDR3 for beta chain variable domain of TCR clone 382798 (TRBV4-1, TRBJ1-4)
CASSQDPRRGGEKLFF

SEQ ID NO: 765597 - protein, 15 aa, Homo sapiens
  CDR3 for alpha chain variable domain of TCR clone 382799 (TRAV8-3, TRAJ27)
CAVGPSKTNAGKSTF

SEQ ID NO: 765598 - protein, 17 aa, Homo sapiens
  CDR3 for beta chain variable domain of TCR clone 382799 (TRBV28, TRBJ2-5)
CASSTPEGDALQETQYF

SEQ ID NO: 765599 - protein, 15 aa, Homo sapiens
  CDR3 for alpha chain variable domain of TCR clone 382800 (TRAV4, TRAJ32)
CLVGGDGGATNKLIF

SEQ ID NO: 765600 - protein, 16 aa, Homo sapiens
  CDR3 for beta chain variable domain of TCR clone 382800 (TRBV12-5, TRBJ2-5)
CASGPRTSGNQETQYF

SEQ ID NO: 765601 - protein, 14 aa, Homo sapiens
  CDR3 for alpha chain variable domain of TCR clone 382801 (TRAV8-4, TRAJ15)
CAVTIREAGTVLIF

SEQ ID NO: 765602 - protein, 16 aa, Homo sapiens
  CDR3 for beta chain variable domain of TCR clone 382801 (TRBV29-1, TRBJ2-6)
CSVEDITYSGANVLTF

SEQ ID NO: 765603 - protein, 11 aa, Homo sapiens
  CDR3 for alpha chain variable domain of TCR clone 382802 (TRAV35, TRAJ30)
CAGPGDDKIIF

SEQ ID NO: 765604 - protein, 14 aa, Homo sapiens
  CDR3 for beta chain variable domain of TCR clone 382802 (TRBV7-6, TRBJ1-6)
CASSQAGGVSPLHF

SEQ ID NO: 765605 - protein, 11 aa, Homo sapiens
  CDR3 for alpha chain variable domain of TCR clone 382803 (TRAV25, TRAJ39)
CENNAGNMLTF

SEQ ID NO: 765606 - protein, 15 aa, Homo sapiens
  CDR3 for beta chain variable domain of TCR clone 382803 (TRBV18, TRBJ1-5)
CASSPSDRSNQPQHF

SEQ ID NO: 765607 - protein, 11 aa, Homo sapiens
  CDR3 for alpha chain variable domain of TCR clone 382804 (TRAV2, TRAJ13)
CASWGYQKVTF

SEQ ID NO: 765608 - protein, 14 aa, Homo sapiens
  CDR3 for beta chain variable domain of TCR clone 382804 (TRBV19, TRBJ2-1)
CASPTFVLSGEQFF

SEQ ID NO: 765609 - protein, 14 aa, Homo sapiens
  CDR3 for alpha chain variable domain of TCR clone 382805 (TRAV1-2, TRAJ16)
WAVNRFSDGQKLLF

SEQ ID NO: 765610 - protein, 11 aa, Homo sapiens
  CDR3 for beta chain variable domain of TCR clone 382805 (TRBV7-8, TRBJ2-7)
CASSLSLEQYF

SEQ ID NO: 765611 - protein, 14 aa, Homo sapiens
  CDR3 for alpha chain variable domain of TCR clone 382806 (TRAV34, TRAJ22)
CGADTSGSAGQLTF

SEQ ID NO: 765612 - protein, 13 aa, Homo sapiens
  CDR3 for beta chain variable domain of TCR clone 382806 (TRBV12-4, TRBJ2-7)
CASSPTETYEQYF

SEQ ID NO: 765613 - protein, 15 aa, Homo sapiens
  CDR3 for alpha chain variable domain of TCR clone 382807 (TRAV17, TRAJ23)
CATDAEDNQGGKLIF

SEQ ID NO: 765614 - protein, 12 aa, Homo sapiens
  CDR3 for beta chain variable domain of TCR clone 382807 (TRBV2, TRBJ2-1)
FAKREGYNEQFF

SEQ ID NO: 765615 - protein, 14 aa, Homo sapiens
  CDR3 for alpha chain variable domain of TCR clone 382808 (TRAV1-2, TRAJ16)
CTVNRFSDGQKLLF

SEQ ID NO: 765616 - protein, 13 aa, Homo sapiens
  CDR3 for beta chain variable domain of TCR clone 382808 (TRBV20-1, TRBJ1-1)
CSARAGGNTEAFF

SEQ ID NO: 765617 - protein, 15 aa, Homo sapiens
  CDR3 for alpha chain variable domain of TCR clone 382809 (TRAV10, TRAJ29)
CVVSEPGIQETHLLS

SEQ ID NO: 765618 - protein, 14 aa, Homo sapiens
  CDR3 for beta chain variable domain of TCR clone 382809 (TRBV20-1, TRBJ1-3)
CSASPTGAGNTIYF

SEQ ID NO: 765619 - protein, 15 aa, Homo sapiens
  CDR3 for alpha chain variable domain of TCR clone 382810 (TRAV3, TRAJ5)
CAVRDREKGRRALTF

SEQ ID NO: 765620 - protein, 15 aa, Homo sapiens
  CDR3 for beta chain variable domain of TCR clone 382810 (TRBV7-8, TRBJ2-1)
CASSLADSLYNEQFF

SEQ ID NO: 765621 - protein, 14 aa, Homo sapiens
  CDR3 for alpha chain variable domain of TCR clone 382811 (TRAV1-2, TRAJ16)
CAVNRFSDGQKLLF

SEQ ID NO: 765622 - protein, 14 aa, Homo sapiens
  CDR3 for beta chain variable domain of TCR clone 382811 (TRBV7-2, TRBJ2-1)
CTSSLSGVYNEQFF

SEQ ID NO: 765623 - protein, 14 aa, Homo sapiens
  CDR3 for alpha chain variable domain of TCR clone 382812 (TRAV12-2, TRAJ13)
CAAKKTGGYQRVTF

SEQ ID NO: 765624 - protein, 15 aa, Homo sapiens
  CDR3 for beta chain variable domain of TCR clone 382812 (TRBV27, TRBJ2-1)
CASSNGGGSSNEQFF

SEQ ID NO: 765625 - protein, 12 aa, Homo sapiens
  CDR3 for alpha chain variable domain of TCR clone 382813 (TRAV3, TRAJ20)
CAVRDPDYKLSF

SEQ ID NO: 765626 - protein, 13 aa, Homo sapiens
  CDR3 for beta chain variable domain of TCR clone 382813 (TRBV19, TRBJ2-5)
CASSETAPETQYF

SEQ ID NO: 765627 - protein, 12 aa, Homo sapiens
  CDR3 for alpha chain variable domain of TCR clone 382814 (TRAV3, TRAJ43)
CAVRDPNNDMRF

SEQ ID NO: 765628 - protein, 15 aa, Homo sapiens
  CDR3 for beta chain variable domain of TCR clone 382814 (TRBV27, TRBJ1-5)
CACSLGTGFDQPQHF

SEQ ID NO: 765629 - protein, 12 aa, Homo sapiens
  CDR3 for alpha chain variable domain of TCR clone 382815 (TRAV12-3, TRAJ17)
CAMTLTGNKLTL

SEQ ID NO: 765630 - protein, 15 aa, Homo sapiens
  CDR3 for beta chain variable domain of TCR clone 382815 (TRBV20-1, TRBJ2-7)
CSARDRVSGMDEKYF

SEQ ID NO: 765631 - protein, 17 aa, Homo sapiens
  CDR3 for alpha chain variable domain of TCR clone 382816 (TRAV26-1, TRAJ37)
CIVRVITVSSNTGKLIF

SEQ ID NO: 765632 - protein, 15 aa, Homo sapiens
  CDR3 for beta chain variable domain of TCR clone 382816 (TRBV10-1, TRBJ2-3)
CASSGTSGGFDTQYF

SEQ ID NO: 765633 - protein, 14 aa, Homo sapiens
  CDR3 for alpha chain variable domain of TCR clone 382817 (TRAV12-1, TRAJ45)
CVVNSGGGADGLTF

SEQ ID NO: 765634 - protein, 13 aa, Homo sapiens
  CDR3 for beta chain variable domain of TCR clone 382817 (TRBV19, TRBJ1-2)
CASSVPGQDGYTF

SEQ ID NO: 765635 - protein, 15 aa, Homo sapiens
  CDR3 for alpha chain variable domain of TCR clone 382818 (TRAV21, TRAJ32)
CAVNSYVGATNKLIF

SEQ ID NO: 765636 - protein, 13 aa, Homo sapiens
  CDR3 for beta chain variable domain of TCR clone 382818 (TRBV4-2, TRBJ1-1)
CASSQAGNTEAFF

SEQ ID NO: 765637 - protein, 12 aa, Homo sapiens
  CDR3 for alpha chain variable domain of TCR clone 382819 (TRAV21, TRAJ23)
CAVMLQGGKLIF

SEQ ID NO: 765638 - protein, 15 aa, Homo sapiens
  CDR3 for beta chain variable domain of TCR clone 382819 (TRBV7-9, TRBJ2-3)
CASSLEQGGTDTQYF

SEQ ID NO: 765639 - protein, 14 aa, Homo sapiens
  CDR3 for alpha chain variable domain of TCR clone 382820 (TRAV3, TRAJ6)
CAVRDWGGSYIPTF

SEQ ID NO: 765640 - protein, 16 aa, Homo sapiens
  CDR3 for beta chain variable domain of TCR clone 382820 (TRBV27, TRBJ2-2)
CASSFRGLVRTGELFF

SEQ ID NO: 765641 - protein, 13 aa, Homo sapiens
  CDR3 for alpha chain variable domain of TCR clone 382821 (TRAV25, TRAJ30)
CAGRVDRDDKIIF

SEQ ID NO: 765642 - protein, 15 aa, Homo sapiens
  CDR3 for beta chain variable domain of TCR clone 382821 (TRBV27, TRBJ2-1)
CASSLRAGIPGEQFF

SEQ ID NO: 765643 - protein, 14 aa, Homo sapiens
  CDR3 for alpha chain variable domain of TCR clone 382822 (TRAV16, TRAJ37)
CALDISGNTGKLIF

SEQ ID NO: 765644 - protein, 17 aa, Homo sapiens
  CDR3 for beta chain variable domain of TCR clone 382822 (TRBV28, TRBJ2-5)
CASSTPEGDALQETQYF

SEQ ID NO: 765645 - protein, 19 aa, Homo sapiens
  CDR3 for alpha chain variable domain of TCR clone 382823 (TRAV26-1, TRAJ22)
CCVLLHRWVFSGSARQQTF

SEQ ID NO: 765646 - protein, 19 aa, Homo sapiens
  CDR3 for beta chain variable domain of TCR clone 382823 (TRBV19, TRBJ2-5)
CASSIGQVTDFFLGETQYF

SEQ ID NO: 765647 - protein, 14 aa, Homo sapiens
  CDR3 for alpha chain variable domain of TCR clone 382824 (TRAV12-1, TRAJ17)
CVVNYKAAGNKLTF

SEQ ID NO: 765648 - protein, 14 aa, Homo sapiens
  CDR3 for beta chain variable domain of TCR clone 382824 (TRBV7-8, TRBJ2-3)
CASSLEAGIDTQYF

SEQ ID NO: 765649 - protein, 14 aa, Homo sapiens
  CDR3 for alpha chain variable domain of TCR clone 382825 (TRAV2, TRAJ22)
CAVGRGGSARQLTF

SEQ ID NO: 765650 - protein, 12 aa, Homo sapiens
  CDR3 for beta chain variable domain of TCR clone 382825 (TRBV19, TRBJ2-1)
CASSMQETEQFF

SEQ ID NO: 765651 - protein, 17 aa, Homo sapiens
  CDR3 for alpha chain variable domain of TCR clone 382826 (TRAV3, TRAJ12)
CAVRDGGRMDSSYKLIF

SEQ ID NO: 765652 - protein, 15 aa, Homo sapiens
  CDR3 for beta chain variable domain of TCR clone 382826 (TRBV5-1, TRBJ1-1)
CASSLSDLGGTEAFF

SEQ ID NO: 765653 - protein, 14 aa, Homo sapiens
  CDR3 for alpha chain variable domain of TCR clone 382827 (TRAV12-3, TRAJ10)
SHLPLTGGGNKLTF

SEQ ID NO: 765654 - protein, 14 aa, Homo sapiens
  CDR3 for beta chain variable domain of TCR clone 382827 (TRBV19, TRBJ2-1)
CASPTFVLCGEQFF

SEQ ID NO: 765655 - protein, 11 aa, Homo sapiens
  CDR3 for alpha chain variable domain of TCR clone 382828 (TRAV17, TRAJ9)
CGFTGGFKTIF

SEQ ID NO: 765656 - protein, 15 aa, Homo sapiens
  CDR3 for beta chain variable domain of TCR clone 382828 (TRBV11-1, TRBJ1-3)
CASTDPRAFGNTIYF

SEQ ID NO: 765657 - protein, 15 aa, Homo sapiens
  CDR3 for alpha chain variable domain of TCR clone 382829 (TRAV12-3, TRAJ6)
CAMSATTGGSYIPTF

SEQ ID NO: 765658 - protein, 15 aa, Homo sapiens
  CDR3 for beta chain variable domain of TCR clone 382829 (TRBV5-1, TRBJ2-7)
CASSLNVGPAREQHF

SEQ ID NO: 765659 - protein, 13 aa, Homo sapiens
  CDR3 for alpha chain variable domain of TCR clone 382830 (TRAV36/DV7, TRAJ54)
CAVDIQEAQKLVF

SEQ ID NO: 765660 - protein, 14 aa, Homo sapiens
  CDR3 for beta chain variable domain of TCR clone 382830 (TRBV19, TRBJ2-7)
CSSNFRDTFTGMYF

SEQ ID NO: 765661 - protein, 14 aa, Homo sapiens
  CDR3 for alpha chain variable domain of TCR clone 382831 (TRAV2, TRAJ9)
CAVEDRSGGFKTIF

SEQ ID NO: 765662 - protein, 15 aa, Homo sapiens
  CDR3 for beta chain variable domain of TCR clone 382831 (TRBV5-7, TRBJ1-5)
CASSYGKLLDQPQHF

SEQ ID NO: 765663 - protein, 17 aa, Homo sapiens
  CDR3 for alpha chain variable domain of TCR clone 382832 (TRAV21, TRAJ24)
CAGIRLRSTDSWGKLQF

SEQ ID NO: 765664 - protein, 15 aa, Homo sapiens
  CDR3 for beta chain variable domain of TCR clone 382832 (TRBV7-2, TRBJ2-3)
CASSPRGISTDTQYF

SEQ ID NO: 765665 - protein, 14 aa, Homo sapiens
  CDR3 for alpha chain variable domain of TCR clone 382833 (TRAV23/DV6, TRAJ17)
CAASIGAAGNKLTI

SEQ ID NO: 765666 - protein, 12 aa, Homo sapiens
  CDR3 for beta chain variable domain of TCR clone 382833 (TRBV20-1, TRBJ2-5)
CSAGGAGETQYF

SEQ ID NO: 765667 - protein, 12 aa, Homo sapiens
  CDR3 for alpha chain variable domain of TCR clone 382834 (TRAV25, TRAJ38)
CAGTGNNRKLIW

SEQ ID NO: 765668 - protein, 14 aa, Homo sapiens
  CDR3 for beta chain variable domain of TCR clone 382834 (TRBV5-4, TRBJ1-1)
CASSLDSRRDEAFC

SEQ ID NO: 765669 - protein, 12 aa, Homo sapiens
  CDR3 for alpha chain variable domain of TCR clone 382835 (TRAV12-3, TRAJ17)
CAMTITGNKLTF

SEQ ID NO: 765670 - protein, 15 aa, Homo sapiens
  CDR3 for beta chain variable domain of TCR clone 382835 (TRBV4-1, TRBJ1-4)
CASSDTGGTNEKLFF

SEQ ID NO: 765671 - protein, 19 aa, Homo sapiens
  CDR3 for alpha chain variable domain of TCR clone 382836 (TRAV26-1, TRAJ52)
CIVRAHRNAGGTSYGKLTF

SEQ ID NO: 765672 - protein, 17 aa, Homo sapiens
  CDR3 for beta chain variable domain of TCR clone 382836 (TRBV11-2, TRBJ2-1)
CASSLYPPGVEYNEQFF

SEQ ID NO: 765673 - protein, 14 aa, Homo sapiens
  CDR3 for alpha chain variable domain of TCR clone 382837 (TRAV6, TRAJ10)
CALGLTGGGNKFTF

SEQ ID NO: 765674 - protein, 14 aa, Homo sapiens
  CDR3 for beta chain variable domain of TCR clone 382837 (TRBV18, TRBJ2-7)
CASSPAGGPGEQYF

SEQ ID NO: 765675 - protein, 14 aa, Homo sapiens
  CDR3 for alpha chain variable domain of TCR clone 382838 (TRAV36/DV7, TRAJ16)
CAVEADSDGQKLPF

SEQ ID NO: 765676 - protein, 15 aa, Homo sapiens
  CDR3 for beta chain variable domain of TCR clone 382838 (TRBV5-4, TRBJ2-3)
CATKSSGGALDTQYF

SEQ ID NO: 765677 - protein, 17 aa, Homo sapiens
  CDR3 for alpha chain variable domain of TCR clone 382839 (TRAV36/DV7, TRAJ52)
CAVAQRAGGTSYGKLTF

SEQ ID NO: 765678 - protein, 15 aa, Homo sapiens
  CDR3 for beta chain variable domain of TCR clone 382839 (TRBV6-5, TRBJ1-2)
CASSCSQAFNYGYTF

SEQ ID NO: 765679 - protein, 14 aa, Homo sapiens
  CDR3 for alpha chain variable domain of TCR clone 382840 (TRAV9-2, TRAJ39)
CALYIYNAGNMLTF

SEQ ID NO: 765680 - protein, 18 aa, Homo sapiens
  CDR3 for beta chain variable domain of TCR clone 382840 (TRBV4-1, TRBJ2-5)
CASSPGASGSGLSETQYF

SEQ ID NO: 765681 - protein, 14 aa, Homo sapiens
  CDR3 for alpha chain variable domain of TCR clone 382841 (TRAV1-2, TRAJ29)
CAVRELTSATPLVF

SEQ ID NO: 765682 - protein, 14 aa, Homo sapiens
  CDR3 for beta chain variable domain of TCR clone 382841 (TRBV3-1, TRBJ2-5)
CASSQGTDQETQYF

SEQ ID NO: 765683 - protein, 10 aa, Homo sapiens
  CDR3 for alpha chain variable domain of TCR clone 382842 (TRAV12-1, TRAJ37)
ARGNTGKLIF

SEQ ID NO: 765684 - protein, 15 aa, Homo sapiens
  CDR3 for beta chain variable domain of TCR clone 382842 (TRBV7-2, TRBJ2-3)
CASSLEQRGTDTQYF

SEQ ID NO: 765685 - protein, 13 aa, Homo sapiens
  CDR3 for alpha chain variable domain of TCR clone 382843 (TRAV3, TRAJ43)
CAVKARNNNDMRF

SEQ ID NO: 765686 - protein, 16 aa, Homo sapiens
  CDR3 for beta chain variable domain of TCR clone 382843 (TRBV7-9, TRBJ2-3)
CARSFSVAGGTDTQYF

SEQ ID NO: 765687 - protein, 16 aa, Homo sapiens
  CDR3 for alpha chain variable domain of TCR clone 382844 (TRAV4, TRAJ22)
CLVGDLYSGSARQLTI

SEQ ID NO: 765688 - protein, 16 aa, Homo sapiens
  CDR3 for beta chain variable domain of TCR clone 382844 (TRBV7-9, TRBJ2-1)
CASSDVAGGSYNEQFF

SEQ ID NO: 765689 - protein, 12 aa, Homo sapiens
  CDR3 for alpha chain variable domain of TCR clone 382845 (TRAV8-6, TRAJ8)
CAVTPGFQKLVF

SEQ ID NO: 765690 - protein, 16 aa, Homo sapiens
  CDR3 for beta chain variable domain of TCR clone 382845 (TRBV7-3, TRBJ2-2)
CASSLKRGTLTGELFF

SEQ ID NO: 765691 - protein, 14 aa, Homo sapiens
  CDR3 for alpha chain variable domain of TCR clone 382846 (TRAV12-3, TRAJ10)
SHLPLTGGGNKITF

SEQ ID NO: 765692 - protein, 13 aa, Homo sapiens
  CDR3 for beta chain variable domain of TCR clone 382846 (TRBV29-1, TRBJ2-5)
CSVEATAQGTQYF

SEQ ID NO: 765693 - protein, 18 aa, Homo sapiens
  CDR3 for alpha chain variable domain of TCR clone 382847 (TRAV26-1, TRAJ23)
CIVRVGLEVCNQGGKLIF

SEQ ID NO: 765694 - protein, 16 aa, Homo sapiens
  CDR3 for beta chain variable domain of TCR clone 382847 (TRBV12-4, TRBJ2-5)
CASSFFVRGRQETQYF

SEQ ID NO: 765695 - protein, 14 aa, Homo sapiens
  CDR3 for alpha chain variable domain of TCR clone 382848 (TRAV12-1, TRAJ17)
CVVNYKAAGNKLTF

SEQ ID NO: 765696 - protein, 20 aa, Homo sapiens
  CDR3 for beta chain variable domain of TCR clone 382848 (TRBV7-8, TRBJ2-2)
CASSHLFPGPTIHITGELVF

SEQ ID NO: 765697 - protein, 14 aa, Homo sapiens
  CDR3 for alpha chain variable domain of TCR clone 382849 (TRAV1-2, TRAJ16)
CAVKRFSNGQKLLF

SEQ ID NO: 765698 - protein, 15 aa, Homo sapiens
  CDR3 for beta chain variable domain of TCR clone 382849 (TRBV9, TRBJ1-6)
CASSVAGTGDSPLHF

SEQ ID NO: 765699 - protein, 14 aa, Homo sapiens
  CDR3 for alpha chain variable domain of TCR clone 382850 (TRAV9-2, TRAJ39)
CALYIYNAGNMLTF

SEQ ID NO: 765700 - protein, 14 aa, Homo sapiens
  CDR3 for beta chain variable domain of TCR clone 382850 (TRBV7-8, TRBJ2-1)
CASSLAGSYNEQFF

SEQ ID NO: 765701 - protein, 15 aa, Homo sapiens
  CDR3 for alpha chain variable domain of TCR clone 382851 (TRAV35, TRAJ40)
CAGQLGTSGTYKYIF

SEQ ID NO: 765702 - protein, 14 aa, Homo sapiens
  CDR3 for beta chain variable domain of TCR clone 382851 (TRBV5-1, TRBJ2-7)
CASGRGESLYEQYF

SEQ ID NO: 765703 - protein, 15 aa, Homo sapiens
  CDR3 for alpha chain variable domain of TCR clone 382852 (TRAV17, TRAJ57)
CATGPSQGGSEKLVF

SEQ ID NO: 765704 - protein, 13 aa, Homo sapiens
  CDR3 for beta chain variable domain of TCR clone 382852 (TRBV5-1, TRBJ2-4)
CASSLEGGMNQYF

SEQ ID NO: 765705 - protein, 13 aa, Homo sapiens
  CDR3 for alpha chain variable domain of TCR clone 382853 (TRAV12-2, TRAJ40)
CAVKRTGTYKYIF

SEQ ID NO: 765706 - protein, 16 aa, Homo sapiens
  CDR3 for beta chain variable domain of TCR clone 382853 (TRBV5-4, TRBJ2-3)
CASQQPGAGGSDTQYF

SEQ ID NO: 765707 - protein, 14 aa, Homo sapiens
  CDR3 for alpha chain variable domain of TCR clone 382854 (TRAV17, TRAJ32)
CATDPGGATNKLIF

SEQ ID NO: 765708 - protein, 15 aa, Homo sapiens
  CDR3 for beta chain variable domain of TCR clone 382854 (TRBV20-1, TRBJ1-1)
CSASRGVTGNTEAFF

SEQ ID NO: 765709 - protein, 16 aa, Homo sapiens
  CDR3 for alpha chain variable domain of TCR clone 382855 (TRAV13-1, TRAJ38)
CAASTSNAGNNRKMIW

SEQ ID NO: 765710 - protein, 16 aa, Homo sapiens
  CDR3 for beta chain variable domain of TCR clone 382855 (TRBV12-4, TRBJ1-5)
CASSSGPRGSNQPQHF

SEQ ID NO: 765711 - protein, 16 aa, Homo sapiens
  CDR3 for alpha chain variable domain of TCR clone 382856 (TRAV30, TRAJ24)
CGTEIVDADSWGKFQF

SEQ ID NO: 765712 - protein, 16 aa, Homo sapiens
  CDR3 for beta chain variable domain of TCR clone 382856 (TRBV7-3, TRBJ2-2)
CASSLKWGTLSGELFF

SEQ ID NO: 765713 - protein, 15 aa, Homo sapiens
  CDR3 for alpha chain variable domain of TCR clone 382857 (TRAV17, TRAJ16)
CATALRFSDGQKLLL

SEQ ID NO: 765714 - protein, 15 aa, Homo sapiens
  CDR3 for beta chain variable domain of TCR clone 382857 (TRBV20-1, TRBJ1-1)
CSASRGVTWNTEAFF

SEQ ID NO: 765715 - protein, 14 aa, Homo sapiens
  CDR3 for alpha chain variable domain of TCR clone 382858 (TRAV3, TRAJ9)
CAVRLNTGGFKTIF

SEQ ID NO: 765716 - protein, 14 aa, Homo sapiens
  CDR3 for beta chain variable domain of TCR clone 382858 (TRBV4-2, TRBJ2-1)
CASGLDRAYNEQFF

SEQ ID NO: 765717 - protein, 22 aa, Homo sapiens
  CDR3 for alpha chain variable domain of TCR clone 382859 (TRAV1-1, TRAJ30)
CAVRDQTEMTRSSLEKGHDFIF

SEQ ID NO: 765718 - protein, 12 aa, Homo sapiens
  CDR3 for beta chain variable domain of TCR clone 382859 (TRBV28, TRBJ2-6)
CAIQAGANVLTF

SEQ ID NO: 765719 - protein, 15 aa, Homo sapiens
  CDR3 for alpha chain variable domain of TCR clone 382860 (TRAV38-1, TRAJ37)
CAFLHGSGNTGKLIF

SEQ ID NO: 765720 - protein, 12 aa, Homo sapiens
  CDR3 for beta chain variable domain of TCR clone 382860 (TRBV7-9, TRBJ2-7)
CASSFGSYEQYF

SEQ ID NO: 765721 - protein, 15 aa, Homo sapiens
  CDR3 for alpha chain variable domain of TCR clone 382861 (TRAV30, TRAJ57)
CGTAIPQGGSEKLVF

SEQ ID NO: 765722 - protein, 13 aa, Homo sapiens
  CDR3 for beta chain variable domain of TCR clone 382861 (TRBV7-9, TRBJ1-2)
CASSPSNVWGYTF

SEQ ID NO: 765723 - protein, 12 aa, Homo sapiens
  CDR3 for alpha chain variable domain of TCR clone 382862 (TRAV12-3, TRAJ34)
CAMGYNTDKLIF

SEQ ID NO: 765724 - protein, 12 aa, Homo sapiens
  CDR3 for beta chain variable domain of TCR clone 382862 (TRBV7-8, TRBJ2-7)
CASSLGDREQYF

SEQ ID NO: 765725 - protein, 21 aa, Homo sapiens
  CDR3 for alpha chain variable domain of TCR clone 382863 (TRAV21, TRAJ22)
CAVRLFFWLCKATDLWIWDTI

SEQ ID NO: 765726 - protein, 14 aa, Homo sapiens
  CDR3 for beta chain variable domain of TCR clone 382863 (TRBV19, TRBJ1-5)
CASRAPDSFLSQHF

SEQ ID NO: 765727 - protein, 12 aa, Homo sapiens
  CDR3 for alpha chain variable domain of TCR clone 382864 (TRAV4, TRAJ26)
CLVGDYGQNFFF

SEQ ID NO: 765728 - protein, 15 aa, Homo sapiens
  CDR3 for beta chain variable domain of TCR clone 382864 (TRBV27, TRBJ2-1)
CASSNGGESSNEQFF

SEQ ID NO: 765729 - protein, 13 aa, Homo sapiens
  CDR3 for alpha chain variable domain of TCR clone 382865 (TRAV1-2, TRAJ27)
CAVFNTNAGKSTF

SEQ ID NO: 765730 - protein, 17 aa, Homo sapiens
  CDR3 for beta chain variable domain of TCR clone 382865 (TRBV11-2, TRBJ2-4)
CASSLGEGEGGKTIQYF

SEQ ID NO: 765731 - protein, 14 aa, Homo sapiens
  CDR3 for alpha chain variable domain of TCR clone 382866 (TRAV13-1, TRAJ44)
CAAKATGTASKLTF

SEQ ID NO: 765732 - protein, 17 aa, Homo sapiens
  CDR3 for beta chain variable domain of TCR clone 382866 (TRBV7-3, TRBJ2-3)
RASSLMKGMRGADTQYV

SEQ ID NO: 765733 - protein, 18 aa, Homo sapiens
  CDR3 for alpha chain variable domain of TCR clone 382867 (TRAV20, TRAJ4)
CAVQPYYMFSGGYNKLIF

SEQ ID NO: 765734 - protein, 13 aa, Homo sapiens
  CDR3 for beta chain variable domain of TCR clone 382867 (TRBV19, TRBJ2-3)
CATWDKITDTQCF

SEQ ID NO: 765735 - protein, 16 aa, Homo sapiens
  CDR3 for alpha chain variable domain of TCR clone 382868 (TRAV30, TRAJ24)
CGTEIVDADSWGKFQY

SEQ ID NO: 765736 - protein, 14 aa, Homo sapiens
  CDR3 for beta chain variable domain of TCR clone 382868 (TRBV6-6, TRBJ1-3)
CASSRQGSGNTIYF

SEQ ID NO: 765737 - protein, 16 aa, Homo sapiens
  CDR3 for alpha chain variable domain of TCR clone 382869 (TRAV3, TRAJ37)
CAVRPHGSGNTGKLIF

SEQ ID NO: 765738 - protein, 14 aa, Homo sapiens
  CDR3 for beta chain variable domain of TCR clone 382869 (TRBV19, TRBJ2-2)
CASSTLHRSGELFF

SEQ ID NO: 765739 - protein, 12 aa, Homo sapiens
  CDR3 for alpha chain variable domain of TCR clone 382870 (TRAV8-3, TRAJ34)
CAVLTNTDKLIF

SEQ ID NO: 765740 - protein, 15 aa, Homo sapiens
  CDR3 for beta chain variable domain of TCR clone 382870 (TRBV2, TRBJ2-7)
CASSENRQGKGEQYF

SEQ ID NO: 765741 - protein, 14 aa, Homo sapiens
  CDR3 for alpha chain variable domain of TCR clone 382871 (TRAV20, TRAJ56)
CAVQFGGANSKLTF

SEQ ID NO: 765742 - protein, 14 aa, Homo sapiens
  CDR3 for beta chain variable domain of TCR clone 382871 (TRBV7-2, TRBJ1-1)
CASSFLTGPTEAFF

SEQ ID NO: 765743 - protein, 13 aa, Homo sapiens
  CDR3 for alpha chain variable domain of TCR clone 382872 (TRAV8-6, TRAJ50)
CAVIKTPYDKVIF

SEQ ID NO: 765744 - protein, 15 aa, Homo sapiens
  CDR3 for beta chain variable domain of TCR clone 382872 (TRBV7-2, TRBJ2-2)
CASRRPGQNTGEPFF

SEQ ID NO: 765745 - protein, 18 aa, Homo sapiens
  CDR3 for alpha chain variable domain of TCR clone 382873 (TRAV12-2, )
CAVKDIQNPDPAVYQLRD

SEQ ID NO: 765746 - protein, 18 aa, Homo sapiens
  CDR3 for beta chain variable domain of TCR clone 382873 (TRBV11-2, TRBJ2-3)
CASSLGGASRGAPNTQYF

SEQ ID NO: 765747 - protein, 12 aa, Homo sapiens
  CDR3 for alpha chain variable domain of TCR clone 382874 (TRAV13-2, TRAJ23)
CAERHRGGKLIF

SEQ ID NO: 765748 - protein, 16 aa, Homo sapiens
  CDR3 for beta chain variable domain of TCR clone 382874 (TRBV4-1, TRBJ2-5)
CARSHADRAGGETQYF

SEQ ID NO: 765749 - protein, 13 aa, Homo sapiens
  CDR3 for alpha chain variable domain of TCR clone 382875 (TRAV3, TRAJ8)
CAVRFTGFQKLVF

SEQ ID NO: 765750 - protein, 14 aa, Homo sapiens
  CDR3 for beta chain variable domain of TCR clone 382875 (TRBV7-9, TRBJ2-1)
CASSPRDSLYEQFF

SEQ ID NO: 765751 - protein, 16 aa, Homo sapiens
  CDR3 for alpha chain variable domain of TCR clone 382876 (TRAV27, TRAJ13)
CAGAKSDSGGYQKVTF

SEQ ID NO: 765752 - protein, 15 aa, Homo sapiens
  CDR3 for beta chain variable domain of TCR clone 382876 (TRBV29-1, TRBJ2-1)
CSVGRHAIFYNEQFF

SEQ ID NO: 765753 - protein, 19 aa, Homo sapiens
  CDR3 for alpha chain variable domain of TCR clone 382877 (TRAV1-2, TRAJ26)
CLLPLCCERPDNYGQNFVF

SEQ ID NO: 765754 - protein, 12 aa, Homo sapiens
  CDR3 for beta chain variable domain of TCR clone 382877 (TRBV20-1, TRBJ2-1)
CSARETSDEQFF

SEQ ID NO: 765755 - protein, 14 aa, Homo sapiens
  CDR3 for alpha chain variable domain of TCR clone 382878 (TRAV35, TRAJ13)
CAGSPSGGYQKVTF

SEQ ID NO: 765756 - protein, 17 aa, Homo sapiens
  CDR3 for beta chain variable domain of TCR clone 382878 (TRBV7-6, TRBJ2-5)
CARSPGLADPWGETQYF

SEQ ID NO: 765757 - protein, 15 aa, Homo sapiens
  CDR3 for alpha chain variable domain of TCR clone 382879 (TRAV17, TRAJ57)
CATGPSQGGSEKLVF

SEQ ID NO: 765758 - protein, 13 aa, Homo sapiens
  CDR3 for beta chain variable domain of TCR clone 382879 (TRBV20-1, TRBJ2-7)
CSATHTSGYEQYF

SEQ ID NO: 765759 - protein, 14 aa, Homo sapiens
  CDR3 for alpha chain variable domain of TCR clone 382880 (TRAV1-2, TRAJ16)
CAVNRFSDGQKLLF

SEQ ID NO: 765760 - protein, 16 aa, Homo sapiens
  CDR3 for beta chain variable domain of TCR clone 382880 (TRBV15, TRBJ2-7)
CATSARQARSSYEQYF

SEQ ID NO: 765761 - protein, 14 aa, Homo sapiens
  CDR3 for alpha chain variable domain of TCR clone 382881 (TRAV8-2, TRAJ6)
CVVLSAGGSYIPTF

SEQ ID NO: 765762 - protein, 16 aa, Homo sapiens
  CDR3 for beta chain variable domain of TCR clone 382881 (TRBV7-6, TRBJ2-6)
CASSLPGLSGANVLTF

SEQ ID NO: 765763 - protein, 14 aa, Homo sapiens
  CDR3 for alpha chain variable domain of TCR clone 382882 (TRAV12-3, TRAJ10)
SHLPLTGGVNKLTF

SEQ ID NO: 765764 - protein, 16 aa, Homo sapiens
  CDR3 for beta chain variable domain of TCR clone 382882 (TRBV19, TRBJ2-1)
CASSKAGPSSYNEQFF

SEQ ID NO: 765765 - protein, 14 aa, Homo sapiens
  CDR3 for alpha chain variable domain of TCR clone 382883 (TRAV21, TRAJ35)
CAVIPIRFGNVLHC

SEQ ID NO: 765766 - protein, 12 aa, Homo sapiens
  CDR3 for beta chain variable domain of TCR clone 382883 (TRBV7-9, TRBJ2-7)
CASSIKREEQYF

SEQ ID NO: 765767 - protein, 11 aa, Homo sapiens
  CDR3 for alpha chain variable domain of TCR clone 382884 (TRAV1-2, TRAJ34)
CAGYNTAKLIF

SEQ ID NO: 765768 - protein, 13 aa, Homo sapiens
  CDR3 for beta chain variable domain of TCR clone 382884 (TRBV11-2, TRBJ1-1)
CASSLGNGAEAFF

SEQ ID NO: 765769 - protein, 17 aa, Homo sapiens
  CDR3 for alpha chain variable domain of TCR clone 382885 (TRAV1-2, TRAJ18)
CAVSLRGRGSTLGRLSF

SEQ ID NO: 765770 - protein, 17 aa, Homo sapiens
  CDR3 for beta chain variable domain of TCR clone 382885 (TRBV11-2, TRBJ2-1)
CASSLYPPGVEYNEQFF

SEQ ID NO: 765771 - protein, 17 aa, Homo sapiens
  CDR3 for alpha chain variable domain of TCR clone 382886 (TRAV3, TRAJ6)
CAVRDGPRAGRSYIPTF

SEQ ID NO: 765772 - protein, 17 aa, Homo sapiens
  CDR3 for beta chain variable domain of TCR clone 382886 (TRBV19, TRBJ2-2)
CASSISPSGQGTGELFF

SEQ ID NO: 765773 - protein, 14 aa, Homo sapiens
  CDR3 for alpha chain variable domain of TCR clone 382887 (TRAV1-2, TRAJ16)
CAVNRFSDGQKLLF

SEQ ID NO: 765774 - protein, 15 aa, Homo sapiens
  CDR3 for beta chain variable domain of TCR clone 382887 (TRBV5-1, TRBJ1-2)
CASSYPGTGSSGYTF

SEQ ID NO: 765775 - protein, 12 aa, Homo sapiens
  CDR3 for alpha chain variable domain of TCR clone 382888 (TRAV2, TRAJ31)
CAVEDNNARPMF

SEQ ID NO: 765776 - protein, 14 aa, Homo sapiens
  CDR3 for beta chain variable domain of TCR clone 382888 (TRBV25-1, TRBJ1-1)
CASTHLGGNTEAFF

SEQ ID NO: 765777 - protein, 18 aa, Homo sapiens
  CDR3 for alpha chain variable domain of TCR clone 382889 (TRAV1-2, TRAJ32)
CAVRVSMNYGGATNKLIF

SEQ ID NO: 765778 - protein, 15 aa, Homo sapiens
  CDR3 for beta chain variable domain of TCR clone 382889 (TRBV6-5, TRBJ2-1)
CASSYDAGAGNEQFF

SEQ ID NO: 765779 - protein, 13 aa, Homo sapiens
  CDR3 for alpha chain variable domain of TCR clone 382890 (TRAV12-3, TRAJ40)
RAMSDSGTYKYIF

SEQ ID NO: 765780 - protein, 14 aa, Homo sapiens
  CDR3 for beta chain variable domain of TCR clone 382890 (TRBV7-2, TRBJ1-5)
CASSTQGAGQPQHF

SEQ ID NO: 765781 - protein, 11 aa, Homo sapiens
  CDR3 for alpha chain variable domain of TCR clone 382891 (TRAV17, TRAJ31)
CATSNNARLMF

SEQ ID NO: 765782 - protein, 13 aa, Homo sapiens
  CDR3 for beta chain variable domain of TCR clone 382891 (TRBV11-3, TRBJ2-3)
CASSHDTKDTQYF

SEQ ID NO: 765783 - protein, 14 aa, Homo sapiens
  CDR3 for alpha chain variable domain of TCR clone 382892 (TRAV1-2, TRAJ8)
CAVREDTGFQKLVF

SEQ ID NO: 765784 - protein, 16 aa, Homo sapiens
  CDR3 for beta chain variable domain of TCR clone 382892 (TRBV20-1, TRBJ2-4)
CSASAILAGQGDIQYF

SEQ ID NO: 765785 - protein, 12 aa, Homo sapiens
  CDR3 for alpha chain variable domain of TCR clone 382893 (TRAV26-1, TRAJ48)
CIVPGGNEKLTF

SEQ ID NO: 765786 - protein, 13 aa, Homo sapiens
  CDR3 for beta chain variable domain of TCR clone 382893 (TRBV18, TRBJ2-7)
CASFRDSAYEQYF

SEQ ID NO: 765787 - protein, 17 aa, Homo sapiens
  CDR3 for alpha chain variable domain of TCR clone 382894 (TRAV26-1, TRAJ58)
CTVRVGAEETSGSRLTF

SEQ ID NO: 765788 - protein, 18 aa, Homo sapiens
  CDR3 for beta chain variable domain of TCR clone 382894 (TRBV7-9, TRBJ2-7)
CASSLTTSGSRTWYEQYF

SEQ ID NO: 765789 - protein, 14 aa, Homo sapiens
  CDR3 for alpha chain variable domain of TCR clone 382895 (TRAV12-2, TRAJ44)
CAVNPAGTASKLTF

SEQ ID NO: 765790 - protein, 12 aa, Homo sapiens
  CDR3 for beta chain variable domain of TCR clone 382895 (TRBV14, TRBJ1-1)
CASSQLKGLAFF

SEQ ID NO: 765791 - protein, 14 aa, Homo sapiens
  CDR3 for alpha chain variable domain of TCR clone 382896 (TRAV8-4, TRAJ8)
CAVSVGPGFQKLVF

SEQ ID NO: 765792 - protein, 15 aa, Homo sapiens
  CDR3 for beta chain variable domain of TCR clone 382896 (TRBV2, TRBJ2-3)
CASSGEGTGTDTQYF

SEQ ID NO: 765793 - protein, 13 aa, Homo sapiens
  CDR3 for alpha chain variable domain of TCR clone 382897 (TRAV12-3, TRAJ57)
CAMSQSGSEKLVF

SEQ ID NO: 765794 - protein, 15 aa, Homo sapiens
  CDR3 for beta chain variable domain of TCR clone 382897 (TRBV7-2, TRBJ2-1)
CASSSGLAGGNEQFF

SEQ ID NO: 765795 - protein, 13 aa, Homo sapiens
  CDR3 for alpha chain variable domain of TCR clone 382898 (TRAV1-2, TRAJ12)
CAVSMDSSYKLIF

SEQ ID NO: 765796 - protein, 14 aa, Homo sapiens
  CDR3 for beta chain variable domain of TCR clone 382898 (TRBV20-1, TRBJ1-1)
CSAQTRIGGTEAFF

SEQ ID NO: 765797 - protein, 13 aa, Homo sapiens
  CDR3 for alpha chain variable domain of TCR clone 382899 (TRAV13-1, TRAJ24)
CAASDGTWGKLQF

SEQ ID NO: 765798 - protein, 13 aa, Homo sapiens
  CDR3 for beta chain variable domain of TCR clone 382899 (TRBV4-3, TRBJ2-5)
CASSQGGGETQYF

SEQ ID NO: 765799 - protein, 15 aa, Homo sapiens
  CDR3 for alpha chain variable domain of TCR clone 382900 (TRAV17, TRAJ13)
CATDAGSGGYQKVTF

SEQ ID NO: 765800 - protein, 16 aa, Homo sapiens
  CDR3 for beta chain variable domain of TCR clone 382900 (TRBV11-2, TRBJ2-1)
CQQLIPPRVEYNEQFF

SEQ ID NO: 765801 - protein, 15 aa, Homo sapiens
  CDR3 for alpha chain variable domain of TCR clone 382901 (TRAV8-3, TRAJ27)
CAVGPSKTNAGKSTF

SEQ ID NO: 765802 - protein, 12 aa, Homo sapiens
  CDR3 for beta chain variable domain of TCR clone 382901 (TRBV11-2, TRBJ2-2)
CASSLGGGELFF

SEQ ID NO: 765803 - protein, 14 aa, Homo sapiens
  CDR3 for alpha chain variable domain of TCR clone 382902 (TRAV12-3, TRAJ15)
CAMIPPQAGTALVF

SEQ ID NO: 765804 - protein, 12 aa, Homo sapiens
  CDR3 for beta chain variable domain of TCR clone 382902 (TRBV11-2, TRBJ2-2)
CASSFGGGELFF

SEQ ID NO: 765805 - protein, 13 aa, Homo sapiens
  CDR3 for alpha chain variable domain of TCR clone 382903 (TRAV27, TRAJ6)
CAGGTRGSYIPTF

SEQ ID NO: 765806 - protein, 14 aa, Homo sapiens
  CDR3 for beta chain variable domain of TCR clone 382903 (TRBV7-9, TRBJ1-2)
CASKRGTLTYGYAF

SEQ ID NO: 765807 - protein, 12 aa, Homo sapiens
  CDR3 for alpha chain variable domain of TCR clone 382904 (TRAV3, TRAJ31)
CAVRDGNARLMF

SEQ ID NO: 765808 - protein, 18 aa, Homo sapiens
  CDR3 for beta chain variable domain of TCR clone 382904 (TRBV7-2, TRBJ2-3)
CASSLRREGSGITDTHHF

SEQ ID NO: 765809 - protein, 13 aa, Homo sapiens
  CDR3 for alpha chain variable domain of TCR clone 382905 (TRAV27, TRAJ8)
CAGGPTGFQKLEF

SEQ ID NO: 765810 - protein, 15 aa, Homo sapiens
  CDR3 for beta chain variable domain of TCR clone 382905 (TRBV6-1, TRBJ2-7)
CASSESMGDFYEQYF

SEQ ID NO: 765811 - protein, 13 aa, Homo sapiens
  CDR3 for alpha chain variable domain of TCR clone 382906 (TRAV17, TRAJ5)
CAPMDTGRRALTF

SEQ ID NO: 765812 - protein, 14 aa, Homo sapiens
  CDR3 for beta chain variable domain of TCR clone 382906 (TRBV7-9, TRBJ2-2)
CASSGLADTGELFF

SEQ ID NO: 765813 - protein, 14 aa, Homo sapiens
  CDR3 for alpha chain variable domain of TCR clone 382907 (TRAV21, TRAJ32)
CCGDYGGATNRLIF

SEQ ID NO: 765814 - protein, 13 aa, Homo sapiens
  CDR3 for beta chain variable domain of TCR clone 382907 (TRBV2, TRBJ1-6)
CASGRGGISPLHV

SEQ ID NO: 765815 - protein, 14 aa, Homo sapiens
  CDR3 for alpha chain variable domain of TCR clone 382908 (TRAV17, TRAJ57)
CATDPQGGSEKLVF

SEQ ID NO: 765816 - protein, 16 aa, Homo sapiens
  CDR3 for beta chain variable domain of TCR clone 382908 (TRBV13, TRBJ2-2)
CASSPRAGEHTGELFF

SEQ ID NO: 765817 - protein, 16 aa, Homo sapiens
  CDR3 for alpha chain variable domain of TCR clone 382909 (TRAV3, TRAJ32)
CAVRDVEGGATNKLIF

SEQ ID NO: 765818 - protein, 14 aa, Homo sapiens
  CDR3 for beta chain variable domain of TCR clone 382909 (TRBV7-7, TRBJ2-2)
CATRQDSDTGELFF

SEQ ID NO: 765819 - protein, 15 aa, Homo sapiens
  CDR3 for alpha chain variable domain of TCR clone 382910 (TRAV12-2, TRAJ53)
CAVNGGGGSNYKLTF

SEQ ID NO: 765820 - protein, 16 aa, Homo sapiens
  CDR3 for beta chain variable domain of TCR clone 382910 (TRBV6-1, TRBJ2-5)
CASSETLDRGAETQYF

SEQ ID NO: 765821 - protein, 14 aa, Homo sapiens
  CDR3 for alpha chain variable domain of TCR clone 382911 (TRAV25, TRAJ6)
CAGRESGGSYIPTF

SEQ ID NO: 765822 - protein, 13 aa, Homo sapiens
  CDR3 for beta chain variable domain of TCR clone 382911 (TRBV12-4, TRBJ2-7)
CASSLSGAYEQYF

SEQ ID NO: 765823 - protein, 16 aa, Homo sapiens
  CDR3 for alpha chain variable domain of TCR clone 382912 (TRAV3, TRAJ37)
CAVRGKGSGNTGKLIF

SEQ ID NO: 765824 - protein, 19 aa, Homo sapiens
  CDR3 for beta chain variable domain of TCR clone 382912 (TRBV7-3, TRBJ2-2)
CASSLRAGGSGPNTGELFF

SEQ ID NO: 765825 - protein, 14 aa, Homo sapiens
  CDR3 for alpha chain variable domain of TCR clone 382913 (TRAV9-2, TRAJ6)
CALSDPGGSYIPTF

SEQ ID NO: 765826 - protein, 16 aa, Homo sapiens
  CDR3 for beta chain variable domain of TCR clone 382913 (TRBV19, TRBJ2-2)
CASRSPGTGATGELFS

SEQ ID NO: 765827 - protein, 13 aa, Homo sapiens
  CDR3 for alpha chain variable domain of TCR clone 382914 (TRAV17, TRAJ7)
CATDNYGNNRLAF

SEQ ID NO: 765828 - protein, 16 aa, Homo sapiens
  CDR3 for beta chain variable domain of TCR clone 382914 (TRBV4-1, TRBJ2-5)
CASRQAIAASSATQYF

SEQ ID NO: 765829 - protein, 11 aa, Homo sapiens
  CDR3 for alpha chain variable domain of TCR clone 382915 (TRAV35, TRAJ30)
CAGPGDDKIIF

SEQ ID NO: 765830 - protein, 14 aa, Homo sapiens
  CDR3 for beta chain variable domain of TCR clone 382915 (TRBV7-6, TRBJ1-6)
CASSQAGGGAPLHF

SEQ ID NO: 765831 - protein, 12 aa, Homo sapiens
  CDR3 for alpha chain variable domain of TCR clone 382916 (TRAV2, TRAJ33)
CAFMDSNYQLIW

SEQ ID NO: 765832 - protein, 15 aa, Homo sapiens
  CDR3 for beta chain variable domain of TCR clone 382916 (TRBV4-1, TRBJ1-4)
CASSDTGGTNEKLFF

SEQ ID NO: 765833 - protein, 13 aa, Homo sapiens
  CDR3 for alpha chain variable domain of TCR clone 382917 (TRAV35, TRAJ36)
CAGPRIGAYNLFF

SEQ ID NO: 765834 - protein, 15 aa, Homo sapiens
  CDR3 for beta chain variable domain of TCR clone 382917 (TRBV28, TRBJ2-5)
CASSPPWSYQETQFF

SEQ ID NO: 765835 - protein, 22 aa, Homo sapiens
  CDR3 for alpha chain variable domain of TCR clone 382918 (TRAV26-1, TRAJ5)
CCVLCIVRVVPPRDTGRRALTF

SEQ ID NO: 765836 - protein, 15 aa, Homo sapiens
  CDR3 for beta chain variable domain of TCR clone 382918 (TRBV7-9, TRBJ2-7)
CASSLPMGQANEQYF

SEQ ID NO: 765837 - protein, 12 aa, Homo sapiens
  CDR3 for alpha chain variable domain of TCR clone 382919 (TRAV12-3, TRAJ31)
CAMSVPNARLMF

SEQ ID NO: 765838 - protein, 12 aa, Homo sapiens
  CDR3 for beta chain variable domain of TCR clone 382919 (TRBV11-2, TRBJ2-1)
SASSVQREGQFF

SEQ ID NO: 765839 - protein, 16 aa, Homo sapiens
  CDR3 for alpha chain variable domain of TCR clone 382920 (TRAV16, TRAJ52)
CALSGVGGTSYGKLTF

SEQ ID NO: 765840 - protein, 11 aa, Homo sapiens
  CDR3 for beta chain variable domain of TCR clone 382920 (TRBV19, TRBJ1-1)
CASSIGSEAFF

SEQ ID NO: 765841 - protein, 17 aa, Homo sapiens
  CDR3 for alpha chain variable domain of TCR clone 382921 (TRAV3, TRAJ6)
CAVRDGPRAGGSYIPTF

SEQ ID NO: 765842 - protein, 18 aa, Homo sapiens
  CDR3 for beta chain variable domain of TCR clone 382921 (TRBV7-3, TRBJ2-3)
CASRSTGTYPGSTDTQYF

SEQ ID NO: 765843 - protein, 14 aa, Homo sapiens
  CDR3 for alpha chain variable domain of TCR clone 382922 (TRAV26-1, TRAJ33)
CIVRNMDSNYQLIW

SEQ ID NO: 765844 - protein, 15 aa, Homo sapiens
  CDR3 for beta chain variable domain of TCR clone 382922 (TRBV7-9, TRBJ1-4)
CASSARTGGNEKLFF

SEQ ID NO: 765845 - protein, 14 aa, Homo sapiens
  CDR3 for alpha chain variable domain of TCR clone 382923 (TRAV12-2, TRAJ5)
CAVNRSTGRRALTF

SEQ ID NO: 765846 - protein, 17 aa, Homo sapiens
  CDR3 for beta chain variable domain of TCR clone 382923 (TRBV7-9, TRBJ2-3)
CASSPTVAGDLTDTQYF

SEQ ID NO: 765847 - protein, 13 aa, Homo sapiens
  CDR3 for alpha chain variable domain of TCR clone 382924 (TRAV2, TRAJ40)
CAVVTSGTYKYIF

SEQ ID NO: 765848 - protein, 16 aa, Homo sapiens
  CDR3 for beta chain variable domain of TCR clone 382924 (TRBV19, TRBJ2-2)
CASLSPGTGATGELFF

SEQ ID NO: 765849 - protein, 16 aa, Homo sapiens
  CDR3 for alpha chain variable domain of TCR clone 382925 (TRAV30, TRAJ24)
CGTEIVDADSWGKFQF

SEQ ID NO: 765850 - protein, 15 aa, Homo sapiens
  CDR3 for beta chain variable domain of TCR clone 382925 (TRBV29-1, TRBJ2-7)
CSAEFFDRGSYEQYF

SEQ ID NO: 765851 - protein, 16 aa, Homo sapiens
  CDR3 for alpha chain variable domain of TCR clone 382926 (TRAV9-2, TRAJ45)
CALSAYSEGGADGLTF

SEQ ID NO: 765852 - protein, 13 aa, Homo sapiens
  CDR3 for beta chain variable domain of TCR clone 382926 (TRBV18, TRBJ2-5)
CASSLQGQETQYF

SEQ ID NO: 765853 - protein, 13 aa, Homo sapiens
  CDR3 for alpha chain variable domain of TCR clone 382927 (TRAV13-2, TRAJ8)
CAFMNTGFQKLVF

SEQ ID NO: 765854 - protein, 17 aa, Homo sapiens
  CDR3 for beta chain variable domain of TCR clone 382927 (TRBV28, TRBJ2-1)
CDSSSARQALTYNEQFF

SEQ ID NO: 765855 - protein, 16 aa, Homo sapiens
  CDR3 for alpha chain variable domain of TCR clone 382928 (TRAV39, TRAJ32)
CAVDMEYGGATNKLIF

SEQ ID NO: 765856 - protein, 14 aa, Homo sapiens
  CDR3 for beta chain variable domain of TCR clone 382928 (TRBV11-2, TRBJ1-5)
CASSLDRGRQPQHF

SEQ ID NO: 765857 - protein, 12 aa, Homo sapiens
  CDR3 for alpha chain variable domain of TCR clone 382929 (TRAV20, TRAJ4)
CRACGGYNKLIF

SEQ ID NO: 765858 - protein, 18 aa, Homo sapiens
  CDR3 for beta chain variable domain of TCR clone 382929 (TRBV19, TRBJ1-5)
CASSKGQVSIHSNQPQHF

SEQ ID NO: 765859 - protein, 15 aa, Homo sapiens
  CDR3 for alpha chain variable domain of TCR clone 382930 (TRAV8-3, TRAJ37)
CAVGARASNTGKLIF

SEQ ID NO: 765860 - protein, 13 aa, Homo sapiens
  CDR3 for beta chain variable domain of TCR clone 382930 (TRBV24-1, TRBJ1-4)
CATNNGRSEKLFF

SEQ ID NO: 765861 - protein, 14 aa, Homo sapiens
  CDR3 for alpha chain variable domain of TCR clone 382931 (TRAV30, TRAJ33)
CGTERRFSNYQLIW

SEQ ID NO: 765862 - protein, 16 aa, Homo sapiens
  CDR3 for beta chain variable domain of TCR clone 382931 (TRBV7-3, TRBJ2-2)
CASSLKRVTLSGELFF

SEQ ID NO: 765863 - protein, 16 aa, Homo sapiens
  CDR3 for alpha chain variable domain of TCR clone 382932 (TRAV12-1, TRAJ4)
CLVNPGIAGGYNKLIF

SEQ ID NO: 765864 - protein, 14 aa, Homo sapiens
  CDR3 for beta chain variable domain of TCR clone 382932 (TRBV5-7, TRBJ2-3)
CASRTSGGTDTQYF

SEQ ID NO: 765865 - protein, 16 aa, Homo sapiens
  CDR3 for alpha chain variable domain of TCR clone 382933 (TRAV30, TRAJ24)
CGPEIVDADSLGKFQF

SEQ ID NO: 765866 - protein, 15 aa, Homo sapiens
  CDR3 for beta chain variable domain of TCR clone 382933 (TRBV20-1, TRBJ2-7)
CSARDRVSGMDEQYF

SEQ ID NO: 765867 - protein, 18 aa, Homo sapiens
  CDR3 for alpha chain variable domain of TCR clone 382934 (TRAV21, TRAJ52)
CAVRPSPAGGTSYGKLAF

SEQ ID NO: 765868 - protein, 14 aa, Homo sapiens
  CDR3 for beta chain variable domain of TCR clone 382934 (TRBV10-2, TRBJ1-3)
CASTRTDTGNTIYF

SEQ ID NO: 765869 - protein, 16 aa, Homo sapiens
  CDR3 for alpha chain variable domain of TCR clone 382935 (TRAV9-2, TRAJ5)
CALSFSMDPGRRALTF

SEQ ID NO: 765870 - protein, 13 aa, Homo sapiens
  CDR3 for beta chain variable domain of TCR clone 382935 (TRBV15, TRBJ1-2)
CATSRGQLYGYTF

SEQ ID NO: 765871 - protein, 11 aa, Homo sapiens
  CDR3 for alpha chain variable domain of TCR clone 382936 (TRAV1-2, TRAJ20)
CAVANDYKLSF

SEQ ID NO: 765872 - protein, 18 aa, Homo sapiens
  CDR3 for beta chain variable domain of TCR clone 382936 (TRBV20-1, TRBJ2-6)
CNAETTPTRGSGANVLTF

SEQ ID NO: 765873 - protein, 14 aa, Homo sapiens
  CDR3 for alpha chain variable domain of TCR clone 382937 (TRAV12-3, TRAJ58)
CAMSTETSGSRLNF

SEQ ID NO: 765874 - protein, 15 aa, Homo sapiens
  CDR3 for beta chain variable domain of TCR clone 382937 (TRBV11-3, TRBJ1-1)
CASSLGGPGDTEAFF

SEQ ID NO: 765875 - protein, 13 aa, Homo sapiens
  CDR3 for alpha chain variable domain of TCR clone 382938 (TRAV2, TRAJ40)
CAVVTSGTYKYIF

SEQ ID NO: 765876 - protein, 13 aa, Homo sapiens
  CDR3 for beta chain variable domain of TCR clone 382938 (TRBV7-2, TRBJ2-7)
CASSSPGGSEQYF

SEQ ID NO: 765877 - protein, 10 aa, Homo sapiens
  CDR3 for alpha chain variable domain of TCR clone 382939 (TRAV23/DV6, TRAJ57)
CAASSTLSQG

SEQ ID NO: 765878 - protein, 14 aa, Homo sapiens
  CDR3 for beta chain variable domain of TCR clone 382939 (TRBV7-8, TRBJ2-5)
YASSATGGQETQYF

SEQ ID NO: 765879 - protein, 21 aa, Homo sapiens
  CDR3 for alpha chain variable domain of TCR clone 382940 (TRAV35, TRAJ52)
CWAGYADGPNAGGTSYGRLTF

SEQ ID NO: 765880 - protein, 12 aa, Homo sapiens
  CDR3 for beta chain variable domain of TCR clone 382940 (TRBV5-1, TRBJ2-7)
CASSFRGYEQYF

SEQ ID NO: 765881 - protein, 12 aa, Homo sapiens
  CDR3 for alpha chain variable domain of TCR clone 382941 (TRAV35, TRAJ30)
CAGLNRDDKIIF

SEQ ID NO: 765882 - protein, 15 aa, Homo sapiens
  CDR3 for beta chain variable domain of TCR clone 382941 (TRBV18, TRBJ2-3)
CASSPLAGETDTQYF

SEQ ID NO: 765883 - protein, 17 aa, Homo sapiens
  CDR3 for alpha chain variable domain of TCR clone 382942 (TRAV8-3, TRAJ8)
CAVGPNEHRLSETCSWN

SEQ ID NO: 765884 - protein, 13 aa, Homo sapiens
  CDR3 for beta chain variable domain of TCR clone 382942 (TRBV7-9, TRBJ2-1)
CASSWESYNEQFF

SEQ ID NO: 765885 - protein, 12 aa, Homo sapiens
  CDR3 for alpha chain variable domain of TCR clone 382943 (TRAV35, TRAJ40)
CAGCAGTYKYIF

SEQ ID NO: 765886 - protein, 16 aa, Homo sapiens
  CDR3 for beta chain variable domain of TCR clone 382943 (TRBV20-1, TRBJ1-4)
CSAPGQGLLTNEKLFF

SEQ ID NO: 765887 - protein, 12 aa, Homo sapiens
  CDR3 for alpha chain variable domain of TCR clone 382944 (TRAV36/DV7, TRAJ54)
CAVVRGAQKLVF

SEQ ID NO: 765888 - protein, 14 aa, Homo sapiens
  CDR3 for beta chain variable domain of TCR clone 382944 (TRBV7-3, TRBJ1-1)
CASSLKGGKTEAFF

SEQ ID NO: 765889 - protein, 15 aa, Homo sapiens
  CDR3 for alpha chain variable domain of TCR clone 382945 (TRAV27, TRAJ38)
CAARSNAGNNRKLIR

SEQ ID NO: 765890 - protein, 13 aa, Homo sapiens
  CDR3 for beta chain variable domain of TCR clone 382945 (TRBV12-5, TRBJ2-3)
CASGDRQSDTQYF

SEQ ID NO: 765891 - protein, 14 aa, Homo sapiens
  CDR3 for alpha chain variable domain of TCR clone 382946 (TRAV17, TRAJ6)
CATDASGGSYIPTF

SEQ ID NO: 765892 - protein, 23 aa, Homo sapiens
  CDR3 for beta chain variable domain of TCR clone 382946 (TRBV11-2, TRBJ2-5)
CASSSPGGEGAASRDPVLRARHA

SEQ ID NO: 765893 - protein, 14 aa, Homo sapiens
  CDR3 for alpha chain variable domain of TCR clone 382947 (TRAV1-2, TRAJ8)
CAVREDTGFHKLVF

SEQ ID NO: 765894 - protein, 14 aa, Homo sapiens
  CDR3 for beta chain variable domain of TCR clone 382947 (TRBV7-6, TRBJ2-3)
CASSLGTVTDTQYF

SEQ ID NO: 765895 - protein, 12 aa, Homo sapiens
  CDR3 for alpha chain variable domain of TCR clone 382948 (TRAV25, TRAJ11)
CAGDSGYSTLTF

SEQ ID NO: 765896 - protein, 12 aa, Homo sapiens
  CDR3 for beta chain variable domain of TCR clone 382948 (TRBV7-8, TRBJ2-7)
CASSLGDREQYF

SEQ ID NO: 765897 - protein, 16 aa, Homo sapiens
  CDR3 for alpha chain variable domain of TCR clone 382949 (TRAV12-1, TRAJ28)
CVVIAYSGAGSYQLTF

SEQ ID NO: 765898 - protein, 15 aa, Homo sapiens
  CDR3 for beta chain variable domain of TCR clone 382949 (TRBV14, TRBJ1-1)
CASSQEGMDFTEAFF

SEQ ID NO: 765899 - protein, 15 aa, Homo sapiens
  CDR3 for alpha chain variable domain of TCR clone 382950 (TRAV2, TRAJ9)
CAVEDRGTGGFKTIF

SEQ ID NO: 765900 - protein, 13 aa, Homo sapiens
  CDR3 for beta chain variable domain of TCR clone 382950 (TRBV12-5, TRBJ2-3)
CASGGRQSDTQYF

SEQ ID NO: 765901 - protein, 18 aa, Homo sapiens
  CDR3 for alpha chain variable domain of TCR clone 382951 (TRAV21, TRAJ53)
CAVKGGENSGGSNYKLTF

SEQ ID NO: 765902 - protein, 13 aa, Homo sapiens
  CDR3 for beta chain variable domain of TCR clone 382951 (TRBV2, TRBJ1-1)
CASNLLRNTEAFF

SEQ ID NO: 765903 - protein, 13 aa, Homo sapiens
  CDR3 for alpha chain variable domain of TCR clone 382952 (TRAV1-1, TRAJ13)
GAVNSGGYQKVTF

SEQ ID NO: 765904 - protein, 12 aa, Homo sapiens
  CDR3 for beta chain variable domain of TCR clone 382952 (TRBV28, TRBJ2-1)
CASSVQINEQFF

SEQ ID NO: 765905 - protein, 16 aa, Homo sapiens
  CDR3 for alpha chain variable domain of TCR clone 382953 (TRAV3, TRAJ10)
CAVRDMRAGGGNKLPF

SEQ ID NO: 765906 - protein, 13 aa, Homo sapiens
  CDR3 for beta chain variable domain of TCR clone 382953 (TRBV4-2, TRBJ1-1)
CASSQAGNTEAFF

SEQ ID NO: 765907 - protein, 13 aa, Homo sapiens
  CDR3 for alpha chain variable domain of TCR clone 382954 (TRAV26-2, TRAJ57)
CILSRGGSEKLVF

SEQ ID NO: 765908 - protein, 15 aa, Homo sapiens
  CDR3 for beta chain variable domain of TCR clone 382954 (TRBV4-1, TRBJ1-6)
CASSAGQGYNSPLHF

SEQ ID NO: 765909 - protein, 18 aa, Homo sapiens
  CDR3 for alpha chain variable domain of TCR clone 382955 (TRAV13-1, TRAJ52)
CAAKNPNAGGTSDGKLTF

SEQ ID NO: 765910 - protein, 18 aa, Homo sapiens
  CDR3 for beta chain variable domain of TCR clone 382955 (TRBV12-4, TRBJ2-4)
CASSRTGAVDVAKNIQYF

SEQ ID NO: 765911 - protein, 14 aa, Homo sapiens
  CDR3 for alpha chain variable domain of TCR clone 382956 (TRAV12-1, TRAJ15)
CVVNRNQAGTALIF

SEQ ID NO: 765912 - protein, 15 aa, Homo sapiens
  CDR3 for beta chain variable domain of TCR clone 382956 (TRBV20-1, TRBJ2-1)
CSARGGTRYYNEQFF

SEQ ID NO: 765913 - protein, 12 aa, Homo sapiens
  CDR3 for alpha chain variable domain of TCR clone 382957 (TRAV8-6, TRAJ43)
CAVSNNNNDMRF

SEQ ID NO: 765914 - protein, 21 aa, Homo sapiens
  CDR3 for beta chain variable domain of TCR clone 382957 (TRBV7-3, TRBJ2-6)
CASSLGGWGQRPDFRGRQQAD

SEQ ID NO: 765915 - protein, 14 aa, Homo sapiens
  CDR3 for alpha chain variable domain of TCR clone 382958 (TRAV38-1, TRAJ43)
CAFMKHNNNNDMLF

SEQ ID NO: 765916 - protein, 17 aa, Homo sapiens
  CDR3 for beta chain variable domain of TCR clone 382958 (TRBV7-7, TRBJ1-4)
CASSLVGQGASNEKLFF

SEQ ID NO: 765917 - protein, 15 aa, Homo sapiens
  CDR3 for alpha chain variable domain of TCR clone 382959 (TRAV30, TRAJ45)
CAASYSGGGADGLTF

SEQ ID NO: 765918 - protein, 14 aa, Homo sapiens
  CDR3 for beta chain variable domain of TCR clone 382959 (TRBV12-5, TRBJ2-5)
CASGSRTHQETQYF

SEQ ID NO: 765919 - protein, 12 aa, Homo sapiens
  CDR3 for alpha chain variable domain of TCR clone 382960 (TRAV12-2, TRAJ11)
CAVKRWNSTLTF

SEQ ID NO: 765920 - protein, 15 aa, Homo sapiens
  CDR3 for beta chain variable domain of TCR clone 382960 (TRBV7-2, TRBJ2-1)
CASSLASGRVNEQFF

SEQ ID NO: 765921 - protein, 16 aa, Homo sapiens
  CDR3 for alpha chain variable domain of TCR clone 382961 (TRAV14/DV4, TRAJ54)
CAMREGRIQGAQKLVF

SEQ ID NO: 765922 - protein, 12 aa, Homo sapiens
  CDR3 for beta chain variable domain of TCR clone 382961 (TRBV2, TRBJ2-7)
CASTYRTDEQYF

SEQ ID NO: 765923 - protein, 16 aa, Homo sapiens
  CDR3 for alpha chain variable domain of TCR clone 382962 (TRAV1-2, TRAJ23)
CAVRAFRTEQGGKLIF

SEQ ID NO: 765924 - protein, 13 aa, Homo sapiens
  CDR3 for beta chain variable domain of TCR clone 382962 (TRBV7-6, TRBJ1-2)
CASSLVADYGYTF

SEQ ID NO: 765925 - protein, 12 aa, Homo sapiens
  CDR3 for alpha chain variable domain of TCR clone 382963 (TRAV21, TRAJ11)
CAATSGYSTLTF

SEQ ID NO: 765926 - protein, 15 aa, Homo sapiens
  CDR3 for beta chain variable domain of TCR clone 382963 (TRBV27, TRBJ2-7)
CASSTAGTGSYEQYF

SEQ ID NO: 765927 - protein, 19 aa, Homo sapiens
  CDR3 for alpha chain variable domain of TCR clone 382964 (TRAV2, TRAJ20)
ILQVREADAAVYRDCKLSF

SEQ ID NO: 765928 - protein, 17 aa, Homo sapiens
  CDR3 for beta chain variable domain of TCR clone 382964 (TRBV11-2, TRBJ2-1)
CASSLYPSGVEYNEQFF

SEQ ID NO: 765929 - protein, 15 aa, Homo sapiens
  CDR3 for alpha chain variable domain of TCR clone 382965 (TRAV12-3, TRAJ13)
CAMSARSGGYQKVTF

SEQ ID NO: 765930 - protein, 13 aa, Homo sapiens
  CDR3 for beta chain variable domain of TCR clone 382965 (TRBV28, TRBJ2-5)
CASSFAGGETQYF

SEQ ID NO: 765931 - protein, 14 aa, Homo sapiens
  CDR3 for alpha chain variable domain of TCR clone 382966 (TRAV1-2, TRAJ16)
SAVNRFSDGQKLLF

SEQ ID NO: 765932 - protein, 13 aa, Homo sapiens
  CDR3 for beta chain variable domain of TCR clone 382966 (TRBV20-1, TRBJ2-2)
CSALSGGAGELFF

SEQ ID NO: 765933 - protein, 13 aa, Homo sapiens
  CDR3 for alpha chain variable domain of TCR clone 382967 (TRAV3, TRAJ15)
CAVRDQAGTALIV

SEQ ID NO: 765934 - protein, 17 aa, Homo sapiens
  CDR3 for beta chain variable domain of TCR clone 382967 (TRBV11-1, TRBJ2-7)
CASSLNYGLPTSSTSGR

SEQ ID NO: 765935 - protein, 13 aa, Homo sapiens
  CDR3 for alpha chain variable domain of TCR clone 382968 (TRAV17, TRAJ6)
CATGFGGSYIPTF

SEQ ID NO: 765936 - protein, 16 aa, Homo sapiens
  CDR3 for beta chain variable domain of TCR clone 382968 (TRBV5-1, TRBJ2-3)
CASSVFPMSSTDTQYF

SEQ ID NO: 765937 - protein, 13 aa, Homo sapiens
  CDR3 for alpha chain variable domain of TCR clone 382969 (TRAV3, TRAJ20)
CCEAFCNDYKLSF

SEQ ID NO: 765938 - protein, 15 aa, Homo sapiens
  CDR3 for beta chain variable domain of TCR clone 382969 (TRBV12-4, TRBJ1-2)
CASRLGVAGNYGYTF

SEQ ID NO: 765939 - protein, 16 aa, Homo sapiens
  CDR3 for alpha chain variable domain of TCR clone 382970 (TRAV30, TRAJ24)
CGTEIVDADRWGKFQF

SEQ ID NO: 765940 - protein, 13 aa, Homo sapiens
  CDR3 for beta chain variable domain of TCR clone 382970 (TRBV20-1, TRBJ1-1)
CSARGGGNTEAFL

SEQ ID NO: 765941 - protein, 13 aa, Homo sapiens
  CDR3 for alpha chain variable domain of TCR clone 382971 (TRAV20, TRAJ48)
CAVHLFGNDKLTF

SEQ ID NO: 765942 - protein, 15 aa, Homo sapiens
  CDR3 for beta chain variable domain of TCR clone 382971 (TRBV6-5, TRBJ2-6)
CASSQWEAGANVLTF

SEQ ID NO: 765943 - protein, 14 aa, Homo sapiens
  CDR3 for alpha chain variable domain of TCR clone 382972 (TRAV12-3, TRAJ10)
SHLPLTGGGNKLTF

SEQ ID NO: 765944 - protein, 15 aa, Homo sapiens
  CDR3 for beta chain variable domain of TCR clone 382972 (TRBV25-1, TRBJ2-4)
CASSETGSAKNMQYF

SEQ ID NO: 765945 - protein, 15 aa, Homo sapiens
  CDR3 for alpha chain variable domain of TCR clone 382973 (TRAV8-3, TRAJ41)
CAVGSNSNSGYARNF

SEQ ID NO: 765946 - protein, 13 aa, Homo sapiens
  CDR3 for beta chain variable domain of TCR clone 382973 (TRBV7-9, TRBJ1-2)
CASSLKQNYGYTF

SEQ ID NO: 765947 - protein, 15 aa, Homo sapiens
  CDR3 for alpha chain variable domain of TCR clone 382974 (TRAV2, TRAJ15)
CAVEDRGQAGTALIF

SEQ ID NO: 765948 - protein, 15 aa, Homo sapiens
  CDR3 for beta chain variable domain of TCR clone 382974 (TRBV7-9, TRBJ2-5)
CASSLEGGSGETQYF

SEQ ID NO: 765949 - protein, 14 aa, Homo sapiens
  CDR3 for alpha chain variable domain of TCR clone 382975 (TRAV1-2, TRAJ16)
CAVNRFSDGPKLHF

SEQ ID NO: 765950 - protein, 15 aa, Homo sapiens
  CDR3 for beta chain variable domain of TCR clone 382975 (TRBV7-9, TRBJ1-6)
CASSSPGRGNSPLHF

SEQ ID NO: 765951 - protein, 20 aa, Homo sapiens
  CDR3 for alpha chain variable domain of TCR clone 382976 (TRAV1-2, TRAJ8)
CAVREDTGFQKLVLELAPDF

SEQ ID NO: 765952 - protein, 14 aa, Homo sapiens
  CDR3 for beta chain variable domain of TCR clone 382976 (TRBV12-5, TRBJ2-5)
CASGSRTHQETQYF

SEQ ID NO: 765953 - protein, 12 aa, Homo sapiens
  CDR3 for alpha chain variable domain of TCR clone 382977 (TRAV27, TRAJ9)
CAGESGGFKTIF

SEQ ID NO: 765954 - protein, 14 aa, Homo sapiens
  CDR3 for beta chain variable domain of TCR clone 382977 (TRBV2, TRBJ2-3)
CASSEGQNTDTQYF

SEQ ID NO: 765955 - protein, 17 aa, Homo sapiens
  CDR3 for alpha chain variable domain of TCR clone 382978 (TRAV3, TRAJ6)
CAVRDGPRAGGSYIPPF

SEQ ID NO: 765956 - protein, 15 aa, Homo sapiens
  CDR3 for beta chain variable domain of TCR clone 382978 (TRBV7-2, TRBJ2-1)
CASSLVGSSYNEQFF

SEQ ID NO: 765957 - protein, 14 aa, Homo sapiens
  CDR3 for alpha chain variable domain of TCR clone 382979 (TRAV3, TRAJ21)
CAVESQANFNKFYF

SEQ ID NO: 765958 - protein, 18 aa, Homo sapiens
  CDR3 for beta chain variable domain of TCR clone 382979 (TRBV7-9, TRBJ2-1)
CASSLAVSGTSVRNEQFF

SEQ ID NO: 765959 - protein, 16 aa, Homo sapiens
  CDR3 for alpha chain variable domain of TCR clone 382980 (TRAV30, TRAJ24)
CGTEMVDADSGGKFQF

SEQ ID NO: 765960 - protein, 12 aa, Homo sapiens
  CDR3 for beta chain variable domain of TCR clone 382980 (TRBV11-2, TRBJ2-2)
CASSLGGGELFF

SEQ ID NO: 765961 - protein, 14 aa, Homo sapiens
  CDR3 for alpha chain variable domain of TCR clone 382981 (TRAV12-2, TRAJ13)
CAVKKTGGYQKVTF

SEQ ID NO: 765962 - protein, 17 aa, Homo sapiens
  CDR3 for beta chain variable domain of TCR clone 382981 (TRBV5-4, TRBJ2-1)
CASSSAGGRGPYNEQFF

SEQ ID NO: 765963 - protein, 19 aa, Homo sapiens
  CDR3 for alpha chain variable domain of TCR clone 382982 (TRAV26-2, TRAJ52)
CILRTGFNAGGTSYGKLTF

SEQ ID NO: 765964 - protein, 15 aa, Homo sapiens
  CDR3 for beta chain variable domain of TCR clone 382982 (TRBV20-1, TRBJ2-7)
CSARDRVSGMDEQYF

SEQ ID NO: 765965 - protein, 14 aa, Homo sapiens
  CDR3 for alpha chain variable domain of TCR clone 382983 (TRAV12-3, TRAJ6)
CAMSATGGSYIPTF

SEQ ID NO: 765966 - protein, 16 aa, Homo sapiens
  CDR3 for beta chain variable domain of TCR clone 382983 (TRBV4-2, TRBJ2-1)
CASSPRAGQGANGQFI

SEQ ID NO: 765967 - protein, 15 aa, Homo sapiens
  CDR3 for alpha chain variable domain of TCR clone 382984 (TRAV12-2, TRAJ20)
CAVKGGFGAGTTVTV

SEQ ID NO: 765968 - protein, 13 aa, Homo sapiens
  CDR3 for beta chain variable domain of TCR clone 382984 (TRBV12-4, TRBJ2-7)
CDSSPGQLYEQYF

SEQ ID NO: 765969 - protein, 12 aa, Homo sapiens
  CDR3 for alpha chain variable domain of TCR clone 382985 (TRAV13-1, TRAJ15)
CAASQAGTALIF

SEQ ID NO: 765970 - protein, 14 aa, Homo sapiens
  CDR3 for beta chain variable domain of TCR clone 382985 (TRBV19, TRBJ2-1)
CASPAFVLSGEQFF

SEQ ID NO: 765971 - protein, 13 aa, Homo sapiens
  CDR3 for alpha chain variable domain of TCR clone 382986 (TRAV21, TRAJ57)
CAVIEGGSEKLVF

SEQ ID NO: 765972 - protein, 15 aa, Homo sapiens
  CDR3 for beta chain variable domain of TCR clone 382986 (TRBV10-3, TRBJ2-5)
CVISEFGRGQETQYF

SEQ ID NO: 765973 - protein, 13 aa, Homo sapiens
  CDR3 for alpha chain variable domain of TCR clone 382987 (TRAV1-2, TRAJ9)
CAARNTGGFKTIF

SEQ ID NO: 765974 - protein, 14 aa, Homo sapiens
  CDR3 for beta chain variable domain of TCR clone 382987 (TRBV20-1, TRBJ2-1)
CSAQIGGSANEQFF

SEQ ID NO: 765975 - protein, 14 aa, Homo sapiens
  CDR3 for alpha chain variable domain of TCR clone 382988 (TRAV8-3, TRAJ40)
CAVGASSGTYKYIF

SEQ ID NO: 765976 - protein, 15 aa, Homo sapiens
  CDR3 for beta chain variable domain of TCR clone 382988 (TRBV28, TRBJ2-1)
CASSIIAGGRSEQFF

SEQ ID NO: 765977 - protein, 13 aa, Homo sapiens
  CDR3 for alpha chain variable domain of TCR clone 382989 (TRAV35, TRAJ44)
CAGLSGTASKLTF

SEQ ID NO: 765978 - protein, 17 aa, Homo sapiens
  CDR3 for beta chain variable domain of TCR clone 382989 (TRBV7-8, TRBJ1-2)
CASSLRPLQGHLYGYNF

SEQ ID NO: 765979 - protein, 14 aa, Homo sapiens
  CDR3 for alpha chain variable domain of TCR clone 382990 (TRAV12-2, TRAJ40)
CAVKITSGTYKYNF

SEQ ID NO: 765980 - protein, 14 aa, Homo sapiens
  CDR3 for beta chain variable domain of TCR clone 382990 (TRBV20-1, TRBJ1-1)
CSAQTRIGGTEAFF

SEQ ID NO: 765981 - protein, 12 aa, Homo sapiens
  CDR3 for alpha chain variable domain of TCR clone 382991 (TRAV13-2, TRAJ23)
CAERHRGGKLIF

SEQ ID NO: 765982 - protein, 16 aa, Homo sapiens
  CDR3 for beta chain variable domain of TCR clone 382991 (TRBV7-2, TRBJ2-6)
CAIFSGVASGANVLTF

SEQ ID NO: 765983 - protein, 16 aa, Homo sapiens
  CDR3 for alpha chain variable domain of TCR clone 382992 (TRAV30, TRAJ24)
CGTEIVDADSWGNSSL

SEQ ID NO: 765984 - protein, 12 aa, Homo sapiens
  CDR3 for beta chain variable domain of TCR clone 382992 (TRBV11-2, TRBJ2-2)
CASSLPTGELFF

SEQ ID NO: 765985 - protein, 18 aa, Homo sapiens
  CDR3 for alpha chain variable domain of TCR clone 382993 (TRAV21, TRAJ52)
CAVRPSPAGGTSYGKLTF

SEQ ID NO: 765986 - protein, 15 aa, Homo sapiens
  CDR3 for beta chain variable domain of TCR clone 382993 (TRBV7-8, TRBJ1-1)
CASSLGSGFDTEAFF

SEQ ID NO: 765987 - protein, 14 aa, Homo sapiens
  CDR3 for alpha chain variable domain of TCR clone 382994 (TRAV26-1, TRAJ44)
CIVKSTGNDSKLTF

SEQ ID NO: 765988 - protein, 15 aa, Homo sapiens
  CDR3 for beta chain variable domain of TCR clone 382994 (TRBV19, TRBJ2-4)
CASSDGGGAKNIQYF

SEQ ID NO: 765989 - protein, 16 aa, Homo sapiens
  CDR3 for alpha chain variable domain of TCR clone 382995 (TRAV26-1, TRAJ45)
CIVEKYSGGGADGLTF

SEQ ID NO: 765990 - protein, 13 aa, Homo sapiens
  CDR3 for beta chain variable domain of TCR clone 382995 (TRBV4-2, TRBJ1-1)
CASSQAGNTEAFF

SEQ ID NO: 765991 - protein, 13 aa, Homo sapiens
  CDR3 for alpha chain variable domain of TCR clone 382996 (TRAV41, TRAJ48)
SVPVNFGNEKLTF

SEQ ID NO: 765992 - protein, 16 aa, Homo sapiens
  CDR3 for beta chain variable domain of TCR clone 382996 (TRBV12-5, TRBJ2-5)
CASGPRTSGNQETHDF

SEQ ID NO: 765993 - protein, 11 aa, Homo sapiens
  CDR3 for alpha chain variable domain of TCR clone 382997 (TRAV2, TRAJ33)
CAVEGNYQLIW

SEQ ID NO: 765994 - protein, 15 aa, Homo sapiens
  CDR3 for beta chain variable domain of TCR clone 382997 (TRBV19, TRBJ1-5)
CASSIVWADNQPQHF

SEQ ID NO: 765995 - protein, 14 aa, Homo sapiens
  CDR3 for alpha chain variable domain of TCR clone 382998 (TRAV13-2, TRAJ11)
CAETGNSGYSTLTV

SEQ ID NO: 765996 - protein, 11 aa, Homo sapiens
  CDR3 for beta chain variable domain of TCR clone 382998 (TRBV10-3, TRBJ2-7)
CAISEGLEQYF

SEQ ID NO: 765997 - protein, 16 aa, Homo sapiens
  CDR3 for alpha chain variable domain of TCR clone 382999 (TRAV21, TRAJ52)
CAVTNAGGTSYGKLTF

SEQ ID NO: 765998 - protein, 13 aa, Homo sapiens
  CDR3 for beta chain variable domain of TCR clone 382999 (TRBV20-1, TRBJ2-3)
CSASLAGTDTQYF

SEQ ID NO: 765999 - protein, 14 aa, Homo sapiens
  CDR3 for alpha chain variable domain of TCR clone 383000 (TRAV4, TRAJ9)
CLVGSGTGGFKTIF

SEQ ID NO: 766000 - protein, 17 aa, Homo sapiens
  CDR3 for beta chain variable domain of TCR clone 383000 (TRBV13, TRBJ2-3)
CASSLSRVAGGRNTQYF

SEQ ID NO: 766001 - protein, 16 aa, Homo sapiens
  CDR3 for alpha chain variable domain of TCR clone 383001 (TRAV3, TRAJ5)
CAVRNLMDTGRRPLTF

SEQ ID NO: 766002 - protein, 16 aa, Homo sapiens
  CDR3 for beta chain variable domain of TCR clone 383001 (TRBV4-2, TRBJ2-7)
CASSQEGLANSYEQYF

SEQ ID NO: 766003 - protein, 17 aa, Homo sapiens
  CDR3 for alpha chain variable domain of TCR clone 383002 (TRAV3, TRAJ38)
CAVRDCLNAGNNRKLIW

SEQ ID NO: 766004 - protein, 15 aa, Homo sapiens
  CDR3 for beta chain variable domain of TCR clone 383002 (TRBV6-3, TRBJ2-7)
CASSSPGTVFYEQYF

SEQ ID NO: 766005 - protein, 16 aa, Homo sapiens
  CDR3 for alpha chain variable domain of TCR clone 383003 (TRAV35, TRAJ28)
CAGQKYSGAGSYQLTF

SEQ ID NO: 766006 - protein, 16 aa, Homo sapiens
  CDR3 for beta chain variable domain of TCR clone 383003 (TRBV7-3, TRBJ2-2)
CASSLKRGTLTGELFF

SEQ ID NO: 766007 - protein, 14 aa, Homo sapiens
  CDR3 for alpha chain variable domain of TCR clone 383004 (TRAV12-3, TRAJ42)
CAMNYGGSQGNLIF

SEQ ID NO: 766008 - protein, 15 aa, Homo sapiens
  CDR3 for beta chain variable domain of TCR clone 383004 (TRBV15, TRBJ1-5)
CATSTTGVVNQPQHF

SEQ ID NO: 766009 - protein, 11 aa, Homo sapiens
  CDR3 for alpha chain variable domain of TCR clone 383005 (TRAV3, TRAJ21)
CAVGNFNKFYF

SEQ ID NO: 766010 - protein, 16 aa, Homo sapiens
  CDR3 for beta chain variable domain of TCR clone 383005 (TRBV7-2, TRBJ2-3)
CASSPQGLSNTDTQYF

SEQ ID NO: 766011 - protein, 13 aa, Homo sapiens
  CDR3 for alpha chain variable domain of TCR clone 383006 (TRAV20, TRAJ37)
FAGCASNTGKLIF

SEQ ID NO: 766012 - protein, 11 aa, Homo sapiens
  CDR3 for beta chain variable domain of TCR clone 383006 (TRBV12-4, TRBJ2-3)
CASTATDTQYF

SEQ ID NO: 766013 - protein, 14 aa, Homo sapiens
  CDR3 for alpha chain variable domain of TCR clone 383007 (TRAV1-2, TRAJ16)
CAVNRFSDGQKLLF

SEQ ID NO: 766014 - protein, 14 aa, Homo sapiens
  CDR3 for beta chain variable domain of TCR clone 383007 (TRBV4-2, TRBJ2-7)
CASSLAGGSYEQYF

SEQ ID NO: 766015 - protein, 14 aa, Homo sapiens
  CDR3 for alpha chain variable domain of TCR clone 383008 (TRAV8-2, TRAJ4)
CVVSPSGGYNKQIF

SEQ ID NO: 766016 - protein, 15 aa, Homo sapiens
  CDR3 for beta chain variable domain of TCR clone 383008 (TRBV2, TRBJ2-1)
CASSELAGSYNEQFF

SEQ ID NO: 766017 - protein, 14 aa, Homo sapiens
  CDR3 for alpha chain variable domain of TCR clone 383009 (TRAV34, TRAJ22)
CGADTSGSARQLTF

SEQ ID NO: 766018 - protein, 13 aa, Homo sapiens
  CDR3 for beta chain variable domain of TCR clone 383009 (TRBV20-1, TRBJ1-6)
CSAPLGVGSPLHF

SEQ ID NO: 766019 - protein, 16 aa, Homo sapiens
  CDR3 for alpha chain variable domain of TCR clone 383010 (TRAV12-3, TRAJ53)
CAMSPGSGGSNYKLTF

SEQ ID NO: 766020 - protein, 11 aa, Homo sapiens
  CDR3 for beta chain variable domain of TCR clone 383010 (TRBV29-1, TRBJ2-5)
CSEDRTGQQYF

SEQ ID NO: 766021 - protein, 13 aa, Homo sapiens
  CDR3 for alpha chain variable domain of TCR clone 383011 (TRAV12-2, TRAJ10)
CAVPTGGGNKLTF

SEQ ID NO: 766022 - protein, 14 aa, Homo sapiens
  CDR3 for beta chain variable domain of TCR clone 383011 (TRBV25-1, TRBJ1-1)
CASTNLGGNTEAFF

SEQ ID NO: 766023 - protein, 13 aa, Homo sapiens
  CDR3 for alpha chain variable domain of TCR clone 383012 (TRAV12-2, TRAJ4)
CAGFSGGYNKLIF

SEQ ID NO: 766024 - protein, 15 aa, Homo sapiens
  CDR3 for beta chain variable domain of TCR clone 383012 (TRBV7-6, TRBJ2-5)
CASSKPTGPQETQYF

SEQ ID NO: 766025 - protein, 15 aa, Homo sapiens
  CDR3 for alpha chain variable domain of TCR clone 383013 (TRAV25, TRAJ53)
CPTSNSGVSNYQLTF

SEQ ID NO: 766026 - protein, 14 aa, Homo sapiens
  CDR3 for beta chain variable domain of TCR clone 383013 (TRBV11-2, TRBJ2-3)
CASSRLARTDTQYF

SEQ ID NO: 766027 - protein, 16 aa, Homo sapiens
  CDR3 for alpha chain variable domain of TCR clone 383014 (TRAV12-3, TRAJ58)
CAMTDTEETSGSRLTF

SEQ ID NO: 766028 - protein, 13 aa, Homo sapiens
  CDR3 for beta chain variable domain of TCR clone 383014 (TRBV25-1, TRBJ1-5)
CASSGQVNQPQHF

SEQ ID NO: 766029 - protein, 14 aa, Homo sapiens
  CDR3 for alpha chain variable domain of TCR clone 383015 (TRAV20, TRAJ17)
CAARREAAGNKLTF

SEQ ID NO: 766030 - protein, 13 aa, Homo sapiens
  CDR3 for beta chain variable domain of TCR clone 383015 (TRBV12-4, TRBJ2-7)
CASSPTETYEQYF

SEQ ID NO: 766031 - protein, 16 aa, Homo sapiens
  CDR3 for alpha chain variable domain of TCR clone 383016 (TRAV23/DV6, TRAJ48)
CAASGVVNVGNEKLTF

SEQ ID NO: 766032 - protein, 15 aa, Homo sapiens
  CDR3 for beta chain variable domain of TCR clone 383016 (TRBV20-1, TRBJ2-5)
CSAGLAGVSQETQYF

SEQ ID NO: 766033 - protein, 14 aa, Homo sapiens
  CDR3 for alpha chain variable domain of TCR clone 383017 (TRAV38-1, TRAJ29)
CAFITPSGNTPLVF

SEQ ID NO: 766034 - protein, 14 aa, Homo sapiens
  CDR3 for beta chain variable domain of TCR clone 383017 (TRBV5-5, TRBJ2-7)
CASSAGYSSYEQYF

SEQ ID NO: 766035 - protein, 13 aa, Homo sapiens
  CDR3 for alpha chain variable domain of TCR clone 383018 (TRAV27, TRAJ29)
CAGAHSGNTPLLF

SEQ ID NO: 766036 - protein, 15 aa, Homo sapiens
  CDR3 for beta chain variable domain of TCR clone 383018 (TRBV7-9, TRBJ1-4)
CASSRTGGFNEKLFF

SEQ ID NO: 766037 - protein, 12 aa, Homo sapiens
  CDR3 for alpha chain variable domain of TCR clone 383019 (TRAV1-1, TRAJ24)
CAVRGSWGTFQF

SEQ ID NO: 766038 - protein, 14 aa, Homo sapiens
  CDR3 for beta chain variable domain of TCR clone 383019 (TRBV20-1, TRBJ2-3)
CSARGGTSTDTQYF

SEQ ID NO: 766039 - protein, 13 aa, Homo sapiens
  CDR3 for alpha chain variable domain of TCR clone 383020 (TRAV8-3, TRAJ28)
CAVGAVGSYQLTF

SEQ ID NO: 766040 - protein, 14 aa, Homo sapiens
  CDR3 for beta chain variable domain of TCR clone 383020 (TRBV7-2, TRBJ2-7)
CATRSQGAAYEQYF

SEQ ID NO: 766041 - protein, 12 aa, Homo sapiens
  CDR3 for alpha chain variable domain of TCR clone 383021 (TRAV21, TRAJ13)
PGPSGGYQEVNF

SEQ ID NO: 766042 - protein, 15 aa, Homo sapiens
  CDR3 for beta chain variable domain of TCR clone 383021 (TRBV7-9, TRBJ1-6)
CASSSPGRGNSPLHF

SEQ ID NO: 766043 - protein, 14 aa, Homo sapiens
  CDR3 for alpha chain variable domain of TCR clone 383022 (TRAV12-3, TRAJ10)
SHLPLTGGRAKLTF

SEQ ID NO: 766044 - protein, 14 aa, Homo sapiens
  CDR3 for beta chain variable domain of TCR clone 383022 (TRBV7-2, TRBJ2-2)
CASSLNSNTGELFF

SEQ ID NO: 766045 - protein, 12 aa, Homo sapiens
  CDR3 for alpha chain variable domain of TCR clone 383023 (TRAV13-1, TRAJ21)
CAAKEGFNKFYF

SEQ ID NO: 766046 - protein, 14 aa, Homo sapiens
  CDR3 for beta chain variable domain of TCR clone 383023 (TRBV23-1, TRBJ2-5)
CASSLLRSQETQYF

SEQ ID NO: 766047 - protein, 13 aa, Homo sapiens
  CDR3 for alpha chain variable domain of TCR clone 383024 (TRAV36/DV7, TRAJ41)
CAVEANSGYALNF

SEQ ID NO: 766048 - protein, 16 aa, Homo sapiens
  CDR3 for beta chain variable domain of TCR clone 383024 (TRBV12-5, TRBJ2-5)
CASGPRTSGNQETQYF

SEQ ID NO: 766049 - protein, 15 aa, Homo sapiens
  CDR3 for alpha chain variable domain of TCR clone 383025 (TRAV17, TRAJ56)
CATEPFTGANSKLTF

SEQ ID NO: 766050 - protein, 15 aa, Homo sapiens
  CDR3 for beta chain variable domain of TCR clone 383025 (TRBV28, TRBJ1-5)
CDSSRTGGYVQPQHF

SEQ ID NO: 766051 - protein, 19 aa, Homo sapiens
  CDR3 for alpha chain variable domain of TCR clone 383026 (TRAV12-1, TRAJ42)
SVVQPPTSVKGGSQGNLIF

SEQ ID NO: 766052 - protein, 15 aa, Homo sapiens
  CDR3 for beta chain variable domain of TCR clone 383026 (TRBV5-7, TRBJ2-6)
CASSHQVSGANVLTF

SEQ ID NO: 766053 - protein, 16 aa, Homo sapiens
  CDR3 for alpha chain variable domain of TCR clone 383027 (TRAV1-2, TRAJ18)
CAVRVERGSTLGRLYF

SEQ ID NO: 766054 - protein, 16 aa, Homo sapiens
  CDR3 for beta chain variable domain of TCR clone 383027 (TRBV20-1, TRBJ2-7)
CSASTSGRRSSYEQYF

SEQ ID NO: 766055 - protein, 14 aa, Homo sapiens
  CDR3 for alpha chain variable domain of TCR clone 383028 (TRAV20, TRAJ44)
CAVQDTGTASKLTF

SEQ ID NO: 766056 - protein, 13 aa, Homo sapiens
  CDR3 for beta chain variable domain of TCR clone 383028 (TRBV29-1, TRBJ1-3)
CSAGTGRGNTIYY

SEQ ID NO: 766057 - protein, 11 aa, Homo sapiens
  CDR3 for alpha chain variable domain of TCR clone 383029 (TRAV12-3, TRAJ6)
CAMSGSYIPTF

SEQ ID NO: 766058 - protein, 14 aa, Homo sapiens
  CDR3 for beta chain variable domain of TCR clone 383029 (TRBV7-9, TRBJ2-5)
CASSLAFGQETQYF

SEQ ID NO: 766059 - protein, 16 aa, Homo sapiens
  CDR3 for alpha chain variable domain of TCR clone 383030 (TRAV30, TRAJ24)
CGTEIVDADSWGKFQI

SEQ ID NO: 766060 - protein, 16 aa, Homo sapiens
  CDR3 for beta chain variable domain of TCR clone 383030 (TRBV28, TRBJ2-7)
CASSLFFETGGPEQYF

SEQ ID NO: 766061 - protein, 10 aa, Homo sapiens
  CDR3 for alpha chain variable domain of TCR clone 383031 (TRAV23/DV6, TRAJ57)
CAASSTLSQG

SEQ ID NO: 766062 - protein, 13 aa, Homo sapiens
  CDR3 for beta chain variable domain of TCR clone 383031 (TRBV25-1, TRBJ1-1)
CQHPPGGNTKAFF

SEQ ID NO: 766063 - protein, 15 aa, Homo sapiens
  CDR3 for alpha chain variable domain of TCR clone 383032 (TRAV17, TRAJ23)
CATDAEDNQGGKLIF

SEQ ID NO: 766064 - protein, 13 aa, Homo sapiens
  CDR3 for beta chain variable domain of TCR clone 383032 (TRBV11-2, TRBJ2-1)
CASSSEAYNEQFF

SEQ ID NO: 766065 - protein, 18 aa, Homo sapiens
  CDR3 for alpha chain variable domain of TCR clone 383033 (TRAV21, TRAJ52)
CAVRPSPAGGTSYGKLTF

SEQ ID NO: 766066 - protein, 17 aa, Homo sapiens
  CDR3 for beta chain variable domain of TCR clone 383033 (TRBV13, TRBJ2-3)
CASSLSRVARGRNTQYV

SEQ ID NO: 766067 - protein, 11 aa, Homo sapiens
  CDR3 for alpha chain variable domain of TCR clone 383034 (TRAV23/DV6, TRAJ58)
CAARLLRVETS

SEQ ID NO: 766068 - protein, 14 aa, Homo sapiens
  CDR3 for beta chain variable domain of TCR clone 383034 (TRBV2, TRBJ2-7)
CASSLTSGGYEQYF

SEQ ID NO: 766069 - protein, 16 aa, Homo sapiens
  CDR3 for alpha chain variable domain of TCR clone 383035 (TRAV38-2/DV8, TRAJ42)
CAYRAFYGGSQGNLIF

SEQ ID NO: 766070 - protein, 16 aa, Homo sapiens
  CDR3 for beta chain variable domain of TCR clone 383035 (TRBV7-2, TRBJ1-2)
CASSSNQDRRGHGYTF

SEQ ID NO: 766071 - protein, 15 aa, Homo sapiens
  CDR3 for alpha chain variable domain of TCR clone 383036 (TRAV35, TRAJ40)
CAGQLGTSGTYRYIF

SEQ ID NO: 766072 - protein, 14 aa, Homo sapiens
  CDR3 for beta chain variable domain of TCR clone 383036 (TRBV5-1, TRBJ2-7)
CASSRGESLYEQYF

SEQ ID NO: 766073 - protein, 13 aa, Homo sapiens
  CDR3 for alpha chain variable domain of TCR clone 383037 (TRAV20, TRAJ17)
CAVLRDAGNKLTF

SEQ ID NO: 766074 - protein, 15 aa, Homo sapiens
  CDR3 for beta chain variable domain of TCR clone 383037 (TRBV2, TRBJ2-5)
CASTRDGGPQETQYF

SEQ ID NO: 766075 - protein, 15 aa, Homo sapiens
  CDR3 for alpha chain variable domain of TCR clone 383038 (TRAV8-3, TRAJ27)
CAVGPSKTNAGKSTF

SEQ ID NO: 766076 - protein, 13 aa, Homo sapiens
  CDR3 for beta chain variable domain of TCR clone 383038 (TRBV27, TRBJ1-1)
CASSLSIGAEAFF

SEQ ID NO: 766077 - protein, 12 aa, Homo sapiens
  CDR3 for alpha chain variable domain of TCR clone 383039 (TRAV12-1, TRAJ40)
CVVYSGTYKYIF

SEQ ID NO: 766078 - protein, 15 aa, Homo sapiens
  CDR3 for beta chain variable domain of TCR clone 383039 (TRBV7-9, TRBJ1-5)
CARSQGHQPNQPQHF

SEQ ID NO: 766079 - protein, 12 aa, Homo sapiens
  CDR3 for alpha chain variable domain of TCR clone 383040 (TRAV3, TRAJ27)
CAVRDGAAKSTF

SEQ ID NO: 766080 - protein, 13 aa, Homo sapiens
  CDR3 for beta chain variable domain of TCR clone 383040 (TRBV10-3, TRBJ1-2)
CAINADLNYGYTF

SEQ ID NO: 766081 - protein, 15 aa, Homo sapiens
  CDR3 for alpha chain variable domain of TCR clone 383041 (TRAV16, TRAJ4)
CALEDPSGGYNKLIF

SEQ ID NO: 766082 - protein, 13 aa, Homo sapiens
  CDR3 for beta chain variable domain of TCR clone 383041 (TRBV7-3, TRBJ2-7)
CASSQAGGYEQHF

SEQ ID NO: 766083 - protein, 13 aa, Homo sapiens
  CDR3 for alpha chain variable domain of TCR clone 383042 (TRAV2, TRAJ40)
CAVVTSGTYKYIF

SEQ ID NO: 766084 - protein, 17 aa, Homo sapiens
  CDR3 for beta chain variable domain of TCR clone 383042 (TRBV6-3, TRBJ2-7)
CASSYNSLRDGPYEQYF

SEQ ID NO: 766085 - protein, 10 aa, Homo sapiens
  CDR3 for alpha chain variable domain of TCR clone 383043 (TRAV23/DV6, TRAJ57)
CAASSTLSQG

SEQ ID NO: 766086 - protein, 13 aa, Homo sapiens
  CDR3 for beta chain variable domain of TCR clone 383043 (TRBV7-9, TRBJ2-3)
CASSPGSTDTQYF

SEQ ID NO: 766087 - protein, 13 aa, Homo sapiens
  CDR3 for alpha chain variable domain of TCR clone 383044 (TRAV12-3, TRAJ33)
CAMSVNSNYQLIW

SEQ ID NO: 766088 - protein, 14 aa, Homo sapiens
  CDR3 for beta chain variable domain of TCR clone 383044 (TRBV7-8, TRBJ2-7)
CASSPRDRVYEQYF

SEQ ID NO: 766089 - protein, 16 aa, Homo sapiens
  CDR3 for alpha chain variable domain of TCR clone 383045 (TRAV3, TRAJ23)
CAVKIGIYNQGGKLIF

SEQ ID NO: 766090 - protein, 17 aa, Homo sapiens
  CDR3 for beta chain variable domain of TCR clone 383045 (TRBV10-3, TRBJ2-6)
CPISESTAPAGANALTF

SEQ ID NO: 766091 - protein, 16 aa, Homo sapiens
  CDR3 for alpha chain variable domain of TCR clone 383046 (TRAV20, TRAJ22)
CAVQASSSGSARQLTF

SEQ ID NO: 766092 - protein, 13 aa, Homo sapiens
  CDR3 for beta chain variable domain of TCR clone 383046 (TRBV7-2, TRBJ2-5)
CASSQTSVETQHF

SEQ ID NO: 766093 - protein, 13 aa, Homo sapiens
  CDR3 for alpha chain variable domain of TCR clone 383047 (TRAV13-1, TRAJ37)
CAAVSGNTGKLIF

SEQ ID NO: 766094 - protein, 19 aa, Homo sapiens
  CDR3 for beta chain variable domain of TCR clone 383047 (TRBV25-1, TRBJ2-2)
CAILVYRVDRGRKTGELFF

SEQ ID NO: 766095 - protein, 14 aa, Homo sapiens
  CDR3 for alpha chain variable domain of TCR clone 383048 (TRAV3, TRAJ37)
CAVKESGNTGKLII

SEQ ID NO: 766096 - protein, 13 aa, Homo sapiens
  CDR3 for beta chain variable domain of TCR clone 383048 (TRBV7-9, TRBJ1-2)
CASSLKQNYGYTF

SEQ ID NO: 766097 - protein, 14 aa, Homo sapiens
  CDR3 for alpha chain variable domain of TCR clone 383049 (TRAV9-2, TRAJ24)
CALNPRGSCGKLQF

SEQ ID NO: 766098 - protein, 15 aa, Homo sapiens
  CDR3 for beta chain variable domain of TCR clone 383049 (TRBV7-2, TRBJ2-3)
CASSSTGLETDTQYF

SEQ ID NO: 766099 - protein, 19 aa, Homo sapiens
  CDR3 for alpha chain variable domain of TCR clone 383050 (TRAV25, TRAJ20)
TATQTTDVGILPHDYKLSF

SEQ ID NO: 766100 - protein, 17 aa, Homo sapiens
  CDR3 for beta chain variable domain of TCR clone 383050 (TRBV4-3, TRBJ2-1)
GASSQFSSGRASGEQFF

SEQ ID NO: 766101 - protein, 14 aa, Homo sapiens
  CDR3 for alpha chain variable domain of TCR clone 383051 (TRAV12-1, TRAJ9)
CVVTGYTGGFKPIF

SEQ ID NO: 766102 - protein, 13 aa, Homo sapiens
  CDR3 for beta chain variable domain of TCR clone 383051 (TRBV20-1, TRBJ1-1)
CSARAGGNTEAFF

SEQ ID NO: 766103 - protein, 17 aa, Homo sapiens
  CDR3 for alpha chain variable domain of TCR clone 383052 (TRAV3, TRAJ6)
CAVRDGPRAGGSYVPTF

SEQ ID NO: 766104 - protein, 14 aa, Homo sapiens
  CDR3 for beta chain variable domain of TCR clone 383052 (TRBV7-2, TRBJ2-7)
RASSPKTSFYEQYF

SEQ ID NO: 766105 - protein, 16 aa, Homo sapiens
  CDR3 for alpha chain variable domain of TCR clone 383053 (TRAV23/DV6, TRAJ9)
CAASIGGNTGGFKTIF

SEQ ID NO: 766106 - protein, 16 aa, Homo sapiens
  CDR3 for beta chain variable domain of TCR clone 383053 (TRBV10-3, TRBJ2-7)
CAISADFADRPYEQYF

SEQ ID NO: 766107 - protein, 15 aa, Homo sapiens
  CDR3 for alpha chain variable domain of TCR clone 383054 (TRAV27, TRAJ38)
CAARRNAGTNRKLIW

SEQ ID NO: 766108 - protein, 13 aa, Homo sapiens
  CDR3 for beta chain variable domain of TCR clone 383054 (TRBV12-5, TRBJ2-3)
CASGDRQSDTQYC

SEQ ID NO: 766109 - protein, 16 aa, Homo sapiens
  CDR3 for alpha chain variable domain of TCR clone 383055 (TRAV8-3, TRAJ28)
CAVGATLGLGVTNSLS

SEQ ID NO: 766110 - protein, 17 aa, Homo sapiens
  CDR3 for beta chain variable domain of TCR clone 383055 (TRBV7-2, TRBJ2-1)
CASSLVASYPSYNEQFF

SEQ ID NO: 766111 - protein, 18 aa, Homo sapiens
  CDR3 for alpha chain variable domain of TCR clone 383056 (TRAV26-1, TRAJ56)
CIVRVASIVTGANSKLTF

SEQ ID NO: 766112 - protein, 15 aa, Homo sapiens
  CDR3 for beta chain variable domain of TCR clone 383056 (TRBV7-9, TRBJ2-5)
CASSDTGRGRETQYF

SEQ ID NO: 766113 - protein, 14 aa, Homo sapiens
  CDR3 for alpha chain variable domain of TCR clone 383057 (TRAV8-1, TRAJ15)
CAVNGQQAGTALIF

SEQ ID NO: 766114 - protein, 14 aa, Homo sapiens
  CDR3 for beta chain variable domain of TCR clone 383057 (TRBV19, TRBJ2-1)
CASPTFVLSGEQFF

SEQ ID NO: 766115 - protein, 17 aa, Homo sapiens
  CDR3 for alpha chain variable domain of TCR clone 383058 (TRAV3, TRAJ6)
CAVRDGPRAGGSYIPTF

SEQ ID NO: 766116 - protein, 13 aa, Homo sapiens
  CDR3 for beta chain variable domain of TCR clone 383058 (TRBV7-9, TRBJ1-2)
CASSLKQSYGYTF

SEQ ID NO: 766117 - protein, 12 aa, Homo sapiens
  CDR3 for alpha chain variable domain of TCR clone 383059 (TRAV8-4, TRAJ37)
CAKSSNTGKRIF

SEQ ID NO: 766118 - protein, 15 aa, Homo sapiens
  CDR3 for beta chain variable domain of TCR clone 383059 (TRBV7-9, TRBJ2-7)
CASSSSGLAVYEQYC

SEQ ID NO: 766119 - protein, 13 aa, Homo sapiens
  CDR3 for alpha chain variable domain of TCR clone 383060 (TRAV35, TRAJ29)
CAGQRGGNTPLVF

SEQ ID NO: 766120 - protein, 15 aa, Homo sapiens
  CDR3 for beta chain variable domain of TCR clone 383060 (TRBV10-3, TRBJ1-2)
CAISESRESNYGYTF

SEQ ID NO: 766121 - protein, 14 aa, Homo sapiens
  CDR3 for alpha chain variable domain of TCR clone 383061 (TRAV25, TRAJ12)
CAGCDMDSSYKLIF

SEQ ID NO: 766122 - protein, 14 aa, Homo sapiens
  CDR3 for beta chain variable domain of TCR clone 383061 (TRBV6-1, TRBJ1-1)
CASSENDRTTEAFF

SEQ ID NO: 766123 - protein, 14 aa, Homo sapiens
  CDR3 for alpha chain variable domain of TCR clone 383062 (TRAV1-2, TRAJ16)
CAVNRFSAGQKLLF

SEQ ID NO: 766124 - protein, 15 aa, Homo sapiens
  CDR3 for beta chain variable domain of TCR clone 383062 (TRBV7-9, TRBJ1-6)
CASSSPGRGNSLLHF

SEQ ID NO: 766125 - protein, 13 aa, Homo sapiens
  CDR3 for alpha chain variable domain of TCR clone 383063 (TRAV12-1, TRAJ40)
CVVPTSGTYKYIF

SEQ ID NO: 766126 - protein, 15 aa, Homo sapiens
  CDR3 for beta chain variable domain of TCR clone 383063 (TRBV20-1, TRBJ2-7)
CSARDRVSGMDEQYF

SEQ ID NO: 766127 - protein, 16 aa, Homo sapiens
  CDR3 for alpha chain variable domain of TCR clone 383064 (TRAV1-1, TRAJ29)
CAVRSTRNSGNTPLVF

SEQ ID NO: 766128 - protein, 12 aa, Homo sapiens
  CDR3 for beta chain variable domain of TCR clone 383064 (TRBV2, TRBJ2-1)
CAYGPPGNEQFF

SEQ ID NO: 766129 - protein, 11 aa, Homo sapiens
  CDR3 for alpha chain variable domain of TCR clone 383065 (TRAV12-3, TRAJ49)
CAANTGNQFYF

SEQ ID NO: 766130 - protein, 14 aa, Homo sapiens
  CDR3 for beta chain variable domain of TCR clone 383065 (TRBV25-1, TRBJ1-1)
CASTHLGGNTEAFF

SEQ ID NO: 766131 - protein, 13 aa, Homo sapiens
  CDR3 for alpha chain variable domain of TCR clone 383066 (TRAV12-3, TRAJ54)
CALVPQGSQKLVF

SEQ ID NO: 766132 - protein, 15 aa, Homo sapiens
  CDR3 for beta chain variable domain of TCR clone 383066 (TRBV4-1, TRBJ2-2)
CASSQDSRGTGELFS

SEQ ID NO: 766133 - protein, 12 aa, Homo sapiens
  CDR3 for alpha chain variable domain of TCR clone 383067 (TRAV12-3, TRAJ17)
CAITLTGNKLTF

SEQ ID NO: 766134 - protein, 19 aa, Homo sapiens
  CDR3 for beta chain variable domain of TCR clone 383067 (TRBV25-1, TRBJ2-2)
CAILVYRVDRGRKTGELFF

SEQ ID NO: 766135 - protein, 12 aa, Homo sapiens
  CDR3 for alpha chain variable domain of TCR clone 383068 (TRAV12-3, TRAJ41)
CAMSYSGYALNF

SEQ ID NO: 766136 - protein, 15 aa, Homo sapiens
  CDR3 for beta chain variable domain of TCR clone 383068 (TRBV5-1, TRBJ1-1)
CASSSGGRRVTEAFF

SEQ ID NO: 766137 - protein, 15 aa, Homo sapiens
  CDR3 for alpha chain variable domain of TCR clone 383069 (TRAV8-4, TRAJ37)
CAVTYGSSNTGKLIF

SEQ ID NO: 766138 - protein, 12 aa, Homo sapiens
  CDR3 for beta chain variable domain of TCR clone 383069 (TRBV19, TRBJ1-1)
CASSTTGIEAFF

SEQ ID NO: 766139 - protein, 14 aa, Homo sapiens
  CDR3 for alpha chain variable domain of TCR clone 383070 (TRAV8-1, TRAJ5)
CAVRTDTGRRALTF

SEQ ID NO: 766140 - protein, 12 aa, Homo sapiens
  CDR3 for beta chain variable domain of TCR clone 383070 (TRBV11-2, TRBJ2-1)
CASSPENNEQFF

SEQ ID NO: 766141 - protein, 13 aa, Homo sapiens
  CDR3 for alpha chain variable domain of TCR clone 383071 (TRAV8-3, TRAJ28)
CALGAVGSYQLTF

SEQ ID NO: 766142 - protein, 17 aa, Homo sapiens
  CDR3 for beta chain variable domain of TCR clone 383071 (TRBV11-2, TRBJ2-1)
CASSLYPPGVEYNEQFF

SEQ ID NO: 766143 - protein, 15 aa, Homo sapiens
  CDR3 for alpha chain variable domain of TCR clone 383072 (TRAV2, TRAJ30)
CAVEDPLNRDDKIIF

SEQ ID NO: 766144 - protein, 14 aa, Homo sapiens
  CDR3 for beta chain variable domain of TCR clone 383072 (TRBV6-1, TRBJ1-3)
CASVQGGGGNTIYF

SEQ ID NO: 766145 - protein, 11 aa, Homo sapiens
  CDR3 for alpha chain variable domain of TCR clone 383073 (TRAV12-2, TRAJ33)
CAVTSNSHLIW

SEQ ID NO: 766146 - protein, 14 aa, Homo sapiens
  CDR3 for beta chain variable domain of TCR clone 383073 (TRBV12-4, TRBJ2-2)
CASNQGANTGELFF

SEQ ID NO: 766147 - protein, 14 aa, Homo sapiens
  CDR3 for alpha chain variable domain of TCR clone 383074 (TRAV1-2, TRAJ8)
CAVREDTGFQKLVF

SEQ ID NO: 766148 - protein, 14 aa, Homo sapiens
  CDR3 for beta chain variable domain of TCR clone 383074 (TRBV29-1, TRBJ2-3)
CSAGAGVGTDTQYF

SEQ ID NO: 766149 - protein, 14 aa, Homo sapiens
  CDR3 for alpha chain variable domain of TCR clone 383075 (TRAV1-2, TRAJ16)
CAVRSASDGQQLLF

SEQ ID NO: 766150 - protein, 16 aa, Homo sapiens
  CDR3 for beta chain variable domain of TCR clone 383075 (TRBV19, TRBJ1-1)
CASSPTRFWPGTEAFF

SEQ ID NO: 766151 - protein, 15 aa, Homo sapiens
  CDR3 for alpha chain variable domain of TCR clone 383076 (TRAV10, TRAJ22)
CGVRISSGSARQPTF

SEQ ID NO: 766152 - protein, 16 aa, Homo sapiens
  CDR3 for beta chain variable domain of TCR clone 383076 (TRBV12-4, TRBJ2-3)
CASSFISGSGTDTQYF

SEQ ID NO: 766153 - protein, 14 aa, Homo sapiens
  CDR3 for alpha chain variable domain of TCR clone 383077 (TRAV17, TRAJ57)
CATDASGGSEKLVF

SEQ ID NO: 766154 - protein, 14 aa, Homo sapiens
  CDR3 for beta chain variable domain of TCR clone 383077 (TRBV4-2, TRBJ2-1)
CASGLDRAHNEQFF

SEQ ID NO: 766155 - protein, 15 aa, Homo sapiens
  CDR3 for alpha chain variable domain of TCR clone 383078 (TRAV9-2, TRAJ42)
FALSGPGGSQGNLIF

SEQ ID NO: 766156 - protein, 13 aa, Homo sapiens
  CDR3 for beta chain variable domain of TCR clone 383078 (TRBV6-5, TRBJ2-5)
CATAPSPQETQYF

SEQ ID NO: 766157 - protein, 13 aa, Homo sapiens
  CDR3 for alpha chain variable domain of TCR clone 383079 (TRAV17, TRAJ20)
CATDAVGDYKLGF

SEQ ID NO: 766158 - protein, 15 aa, Homo sapiens
  CDR3 for beta chain variable domain of TCR clone 383079 (TRBV9, TRBJ1-3)
CASSARAGGGNTIYF

SEQ ID NO: 766159 - protein, 12 aa, Homo sapiens
  CDR3 for alpha chain variable domain of TCR clone 383080 (TRAV10, TRAJ31)
CVVRAHRARLMF

SEQ ID NO: 766160 - protein, 13 aa, Homo sapiens
  CDR3 for beta chain variable domain of TCR clone 383080 (TRBV10-3, TRBJ2-7)
CASKLAVNYEQYF

SEQ ID NO: 766161 - protein, 13 aa, Homo sapiens
  CDR3 for alpha chain variable domain of TCR clone 383081 (TRAV12-3, TRAJ29)
CAMTLSGNTPLVF

SEQ ID NO: 766162 - protein, 14 aa, Homo sapiens
  CDR3 for beta chain variable domain of TCR clone 383081 (TRBV7-3, TRBJ1-1)
CASSLKGGNTEAFF

SEQ ID NO: 766163 - protein, 17 aa, Homo sapiens
  CDR3 for alpha chain variable domain of TCR clone 383082 (TRAV3, TRAJ6)
CAVRDGPRAGGSSIPTF

SEQ ID NO: 766164 - protein, 13 aa, Homo sapiens
  CDR3 for beta chain variable domain of TCR clone 383082 (TRBV29-1, TRBJ2-5)
CSVLLASGETQYF

SEQ ID NO: 766165 - protein, 13 aa, Homo sapiens
  CDR3 for alpha chain variable domain of TCR clone 383083 (TRAV2, TRAJ15)
CAVASQAGTALIF

SEQ ID NO: 766166 - protein, 16 aa, Homo sapiens
  CDR3 for beta chain variable domain of TCR clone 383083 (TRBV10-3, TRBJ2-1)
CAISGVGDGGGGEQFF

SEQ ID NO: 766167 - protein, 13 aa, Homo sapiens
  CDR3 for alpha chain variable domain of TCR clone 383084 (TRAV17, TRAJ5)
CALRGTGRRALTF

SEQ ID NO: 766168 - protein, 17 aa, Homo sapiens
  CDR3 for beta chain variable domain of TCR clone 383084 (TRBV20-1, TRBJ2-2)
CSASGSGQGGLTGELFF

SEQ ID NO: 766169 - protein, 12 aa, Homo sapiens
  CDR3 for alpha chain variable domain of TCR clone 383085 (TRAV21, TRAJ33)
CAVQHSNYQLIW

SEQ ID NO: 766170 - protein, 14 aa, Homo sapiens
  CDR3 for beta chain variable domain of TCR clone 383085 (TRBV10-2, TRBJ1-5)
CASSSTGRNQPQHF

SEQ ID NO: 766171 - protein, 13 aa, Homo sapiens
  CDR3 for alpha chain variable domain of TCR clone 383086 (TRAV8-3, TRAJ28)
CAVGAVGSYQLTF

SEQ ID NO: 766172 - protein, 13 aa, Homo sapiens
  CDR3 for beta chain variable domain of TCR clone 383086 (TRBV12-4, TRBJ2-5)
CASSAQVRETQYF

SEQ ID NO: 766173 - protein, 14 aa, Homo sapiens
  CDR3 for alpha chain variable domain of TCR clone 383087 (TRAV3, TRAJ33)
CAVRDMDSNYQLIW

SEQ ID NO: 766174 - protein, 19 aa, Homo sapiens
  CDR3 for beta chain variable domain of TCR clone 383087 (TRBV7-3, TRBJ1-2)
CASSFPQGNDSELWLHLRF

SEQ ID NO: 766175 - protein, 12 aa, Homo sapiens
  CDR3 for alpha chain variable domain of TCR clone 383088 (TRAV38-1, TRAJ28)
CGSGAGSYQLTF

SEQ ID NO: 766176 - protein, 14 aa, Homo sapiens
  CDR3 for beta chain variable domain of TCR clone 383088 (TRBV19, TRBJ1-2)
CASSVLGYNYGYTF

SEQ ID NO: 766177 - protein, 10 aa, Homo sapiens
  CDR3 for alpha chain variable domain of TCR clone 383089 (TRAV12-2, TRAJ22)
CAVNETQLTF

SEQ ID NO: 766178 - protein, 13 aa, Homo sapiens
  CDR3 for beta chain variable domain of TCR clone 383089 (TRBV10-3, TRBJ2-7)
CASKPAVNYEQYF

SEQ ID NO: 766179 - protein, 13 aa, Homo sapiens
  CDR3 for alpha chain variable domain of TCR clone 383090 (TRAV38-2/DV8, TRAJ43)
CAYLGSYKNDMRF

SEQ ID NO: 766180 - protein, 15 aa, Homo sapiens
  CDR3 for beta chain variable domain of TCR clone 383090 (TRBV4-1, TRBJ2-5)
CASSQLAGGQETQYF

SEQ ID NO: 766181 - protein, 12 aa, Homo sapiens
  CDR3 for alpha chain variable domain of TCR clone 383091 (TRAV16, TRAJ10)
CSRTGGGNKLTF

SEQ ID NO: 766182 - protein, 13 aa, Homo sapiens
  CDR3 for beta chain variable domain of TCR clone 383091 (TRBV7-7, TRBJ2-5)
CASSRSGQETQYF

SEQ ID NO: 766183 - protein, 13 aa, Homo sapiens
  CDR3 for alpha chain variable domain of TCR clone 383092 (TRAV20, TRAJ56)
CAVQAGANSKLTF

SEQ ID NO: 766184 - protein, 17 aa, Homo sapiens
  CDR3 for beta chain variable domain of TCR clone 383092 (TRBV20-1, TRBJ2-2)
CSASGSGQGGLTGELSF

SEQ ID NO: 766185 - protein, 14 aa, Homo sapiens
  CDR3 for alpha chain variable domain of TCR clone 383093 (TRAV35, TRAJ22)
CAGLRPGSARQLTF

SEQ ID NO: 766186 - protein, 15 aa, Homo sapiens
  CDR3 for beta chain variable domain of TCR clone 383093 (TRBV12-4, TRBJ2-7)
CASSPPTGLQETQYF

SEQ ID NO: 766187 - protein, 13 aa, Homo sapiens
  CDR3 for alpha chain variable domain of TCR clone 383094 (TRAV12-3, TRAJ40)
CAMSTRGTHKYIF

SEQ ID NO: 766188 - protein, 16 aa, Homo sapiens
  CDR3 for beta chain variable domain of TCR clone 383094 (TRBV20-1, TRBJ2-3)
CSGEAGLAGGQDTQYF

SEQ ID NO: 766189 - protein, 15 aa, Homo sapiens
  CDR3 for alpha chain variable domain of TCR clone 383095 (TRAV3, TRAJ3)
CAVRDRDSISSKIIF

SEQ ID NO: 766190 - protein, 18 aa, Homo sapiens
  CDR3 for beta chain variable domain of TCR clone 383095 (TRBV25-1, TRBJ1-2)
CASSGLQNGKGLIFGYTF

SEQ ID NO: 766191 - protein, 14 aa, Homo sapiens
  CDR3 for alpha chain variable domain of TCR clone 383096 (TRAV35, TRAJ22)
CAGLRPGSARQLTF

SEQ ID NO: 766192 - protein, 15 aa, Homo sapiens
  CDR3 for beta chain variable domain of TCR clone 383096 (TRBV12-4, TRBJ2-1)
CASSPPTGLQETQYF

SEQ ID NO: 766193 - protein, 17 aa, Homo sapiens
  CDR3 for alpha chain variable domain of TCR clone 383097 (TRAV20, TRAJ42)
CALQAWGYGGSQGNLIF

SEQ ID NO: 766194 - protein, 16 aa, Homo sapiens
  CDR3 for beta chain variable domain of TCR clone 383097 (TRBV29-1, TRBJ2-5)
CSVEGLAGDYQETQYF

SEQ ID NO: 766195 - protein, 12 aa, Homo sapiens
  CDR3 for alpha chain variable domain of TCR clone 383098 (TRAV1-1, TRAJ8)
CAGGTGFQKLVF

SEQ ID NO: 766196 - protein, 16 aa, Homo sapiens
  CDR3 for beta chain variable domain of TCR clone 383098 (TRBV12-4, TRBJ1-5)
CASSRPVGGSNQHQHF

SEQ ID NO: 766197 - protein, 15 aa, Homo sapiens
  CDR3 for alpha chain variable domain of TCR clone 383099 (TRAV3, TRAJ36)
CAVRASQTGSNNLFF

SEQ ID NO: 766198 - protein, 13 aa, Homo sapiens
  CDR3 for beta chain variable domain of TCR clone 383099 (TRBV10-3, TRBJ1-2)
CAISERDSYGYTF

SEQ ID NO: 766199 - protein, 13 aa, Homo sapiens
  CDR3 for alpha chain variable domain of TCR clone 383100 (TRAV12-3, TRAJ9)
CAMSADGGFKTIF

SEQ ID NO: 766200 - protein, 14 aa, Homo sapiens
  CDR3 for beta chain variable domain of TCR clone 383100 (TRBV4-1, TRBJ2-7)
CASRLTSGSYEQYF

SEQ ID NO: 766201 - protein, 13 aa, Homo sapiens
  CDR3 for alpha chain variable domain of TCR clone 383101 (TRAV3, TRAJ36)
CAVRDTGANNLFF

SEQ ID NO: 766202 - protein, 15 aa, Homo sapiens
  CDR3 for beta chain variable domain of TCR clone 383101 (TRBV24-1, TRBJ2-1)
CATSGSGGIYNEQFF

SEQ ID NO: 766203 - protein, 14 aa, Homo sapiens
  CDR3 for alpha chain variable domain of TCR clone 383102 (TRAV17, TRAJ57)
CATDPQGGSEKLVF

SEQ ID NO: 766204 - protein, 14 aa, Homo sapiens
  CDR3 for beta chain variable domain of TCR clone 383102 (TRBV20-1, TRBJ2-1)
CSAQIGGSANEQFF

SEQ ID NO: 766205 - protein, 12 aa, Homo sapiens
  CDR3 for alpha chain variable domain of TCR clone 383103 (TRAV8-4, TRAJ43)
CAVSVNNDDMRF

SEQ ID NO: 766206 - protein, 14 aa, Homo sapiens
  CDR3 for beta chain variable domain of TCR clone 383103 (TRBV11-2, TRBJ1-2)
CASSLGTANYGYTF

SEQ ID NO: 766207 - protein, 15 aa, Homo sapiens
  CDR3 for alpha chain variable domain of TCR clone 383104 (TRAV23/DV6, TRAJ13)
CAAWPGGGGYHTVTF

SEQ ID NO: 766208 - protein, 17 aa, Homo sapiens
  CDR3 for beta chain variable domain of TCR clone 383104 (TRBV19, TRBJ2-7)
CASSISFYDSYPYEQYF

SEQ ID NO: 766209 - protein, 14 aa, Homo sapiens
  CDR3 for alpha chain variable domain of TCR clone 383105 (TRAV16, TRAJ17)
CALSGRAAGNKLTF

SEQ ID NO: 766210 - protein, 17 aa, Homo sapiens
  CDR3 for beta chain variable domain of TCR clone 383105 (TRBV18, TRBJ2-6)
CASSPRQGDVGANVLTF

SEQ ID NO: 766211 - protein, 15 aa, Homo sapiens
  CDR3 for alpha chain variable domain of TCR clone 383106 (TRAV12-3, TRAJ48)
CAMTAKNFGNEKLTF

SEQ ID NO: 766212 - protein, 14 aa, Homo sapiens
  CDR3 for beta chain variable domain of TCR clone 383106 (TRBV2, TRBJ1-6)
CASSESRNNSPLHF

SEQ ID NO: 766213 - protein, 15 aa, Homo sapiens
  CDR3 for alpha chain variable domain of TCR clone 383107 (TRAV3, TRAJ5)
CAVRDLDTGRRALTF

SEQ ID NO: 766214 - protein, 14 aa, Homo sapiens
  CDR3 for beta chain variable domain of TCR clone 383107 (TRBV7-3, TRBJ2-1)
CASRLAGGTNEQFF

SEQ ID NO: 766215 - protein, 15 aa, Homo sapiens
  CDR3 for alpha chain variable domain of TCR clone 383108 (TRAV17, TRAJ45)
CATAELGGGAEGLTF

SEQ ID NO: 766216 - protein, 14 aa, Homo sapiens
  CDR3 for beta chain variable domain of TCR clone 383108 (TRBV3-1, TRBJ2-5)
CASSQAVRQETQYF

SEQ ID NO: 766217 - protein, 12 aa, Homo sapiens
  CDR3 for alpha chain variable domain of TCR clone 383109 (TRAV12-3, TRAJ17)
CAMTLTGNKLTL

SEQ ID NO: 766218 - protein, 18 aa, Homo sapiens
  CDR3 for beta chain variable domain of TCR clone 383109 (TRBV4-3, TRBJ1-6)
CASSQGTPASSYNSPLHF

SEQ ID NO: 766219 - protein, 13 aa, Homo sapiens
  CDR3 for alpha chain variable domain of TCR clone 383110 (TRAV12-2, TRAJ3)
CAFQYSSASKIIF

SEQ ID NO: 766220 - protein, 11 aa, Homo sapiens
  CDR3 for beta chain variable domain of TCR clone 383110 (TRBV20-1, TRBJ2-3)
CSGTSSTTQYY

SEQ ID NO: 766221 - protein, 17 aa, Homo sapiens
  CDR3 for alpha chain variable domain of TCR clone 383111 (TRAV8-1, TRAJ42)
CAVKWGNYGGSQGNLIF

SEQ ID NO: 766222 - protein, 15 aa, Homo sapiens
  CDR3 for beta chain variable domain of TCR clone 383111 (TRBV9, TRBJ1-6)
CASSVAGTGDSPLHC

SEQ ID NO: 766223 - protein, 14 aa, Homo sapiens
  CDR3 for alpha chain variable domain of TCR clone 383112 (TRAV9-2, TRAJ39)
CALYIYNAGNMLTF

SEQ ID NO: 766224 - protein, 13 aa, Homo sapiens
  CDR3 for beta chain variable domain of TCR clone 383112 (TRBV6-4, TRBJ1-5)
CASSADLNQPQHF

SEQ ID NO: 766225 - protein, 15 aa, Homo sapiens
  CDR3 for alpha chain variable domain of TCR clone 383113 (TRAV38-1, TRAJ37)
GAFIHGSGNTGKLIF

SEQ ID NO: 766226 - protein, 12 aa, Homo sapiens
  CDR3 for beta chain variable domain of TCR clone 383113 (TRBV7-9, TRBJ2-7)
CASSFGSYEQYF

SEQ ID NO: 766227 - protein, 13 aa, Homo sapiens
  CDR3 for alpha chain variable domain of TCR clone 383114 (TRAV3, TRAJ21)
CAVREPDFNKFYF

SEQ ID NO: 766228 - protein, 18 aa, Homo sapiens
  CDR3 for beta chain variable domain of TCR clone 383114 (TRBV11-2, TRBJ2-3)
CASSLGGASRGAHNTQYF

SEQ ID NO: 766229 - protein, 13 aa, Homo sapiens
  CDR3 for alpha chain variable domain of TCR clone 383115 (TRAV12-3, TRAJ40)
CAMSARGTYKYIF

SEQ ID NO: 766230 - protein, 16 aa, Homo sapiens
  CDR3 for beta chain variable domain of TCR clone 383115 (TRBV20-1, TRBJ2-3)
CSGEAGLAGGQDTQYS

SEQ ID NO: 766231 - protein, 13 aa, Homo sapiens
  CDR3 for alpha chain variable domain of TCR clone 383116 (TRAV21, TRAJ27)
CAARPGNAGKSTF

SEQ ID NO: 766232 - protein, 15 aa, Homo sapiens
  CDR3 for beta chain variable domain of TCR clone 383116 (TRBV5-1, TRBJ1-5)
CASSLLGGRNQPQHF

SEQ ID NO: 766233 - protein, 15 aa, Homo sapiens
  CDR3 for alpha chain variable domain of TCR clone 383117 (TRAV17, TRAJ57)
CATGPSQGGSEKRVF

SEQ ID NO: 766234 - protein, 15 aa, Homo sapiens
  CDR3 for beta chain variable domain of TCR clone 383117 (TRBV12-4, TRBJ2-5)
CASTLNSGRGETQYF

SEQ ID NO: 766235 - protein, 16 aa, Homo sapiens
  CDR3 for alpha chain variable domain of TCR clone 383118 (TRAV3, TRAJ10)
CAVRDMNAGGGNKLTF

SEQ ID NO: 766236 - protein, 15 aa, Homo sapiens
  CDR3 for beta chain variable domain of TCR clone 383118 (TRBV4-3, TRBJ1-1)
CASSQELGRGTEAFF

SEQ ID NO: 766237 - protein, 11 aa, Homo sapiens
  CDR3 for alpha chain variable domain of TCR clone 383119 (TRAV12-3, TRAJ43)
CAMSVSNDMRF

SEQ ID NO: 766238 - protein, 13 aa, Homo sapiens
  CDR3 for beta chain variable domain of TCR clone 383119 (TRBV12-5, TRBJ2-3)
CASGDRQSDTQYF

SEQ ID NO: 766239 - protein, 13 aa, Homo sapiens
  CDR3 for alpha chain variable domain of TCR clone 383120 (TRAV8-3, TRAJ28)
CAVGAVGSYQLTF

SEQ ID NO: 766240 - protein, 14 aa, Homo sapiens
  CDR3 for beta chain variable domain of TCR clone 383120 (TRBV25-1, TRBJ1-1)
CASTHLVGNTEAFF

SEQ ID NO: 766241 - protein, 14 aa, Homo sapiens
  CDR3 for alpha chain variable domain of TCR clone 383121 (TRAV8-4, TRAJ9)
CAVTLNTAGFKTIF

SEQ ID NO: 766242 - protein, 15 aa, Homo sapiens
  CDR3 for beta chain variable domain of TCR clone 383121 (TRBV7-9, TRBJ2-2)
CASSPETGAGGELFF

SEQ ID NO: 766243 - protein, 15 aa, Homo sapiens
  CDR3 for alpha chain variable domain of TCR clone 383122 (TRAV13-1, TRAJ32)
CAASNGWWCYKQANL

SEQ ID NO: 766244 - protein, 15 aa, Homo sapiens
  CDR3 for beta chain variable domain of TCR clone 383122 (TRBV20-1, TRBJ1-2)
CSAIRTGAFNYGYTF

SEQ ID NO: 766245 - protein, 14 aa, Homo sapiens
  CDR3 for alpha chain variable domain of TCR clone 383123 (TRAV20, TRAJ56)
CAVQFGGANSKLTF

SEQ ID NO: 766246 - protein, 16 aa, Homo sapiens
  CDR3 for beta chain variable domain of TCR clone 383123 (TRBV6-1, TRBJ2-5)
CASSETLDRGAETQYF

SEQ ID NO: 766247 - protein, 12 aa, Homo sapiens
  CDR3 for alpha chain variable domain of TCR clone 383124 (TRAV29/DV5, TRAJ34)
CAARHKTAKLIF

SEQ ID NO: 766248 - protein, 15 aa, Homo sapiens
  CDR3 for beta chain variable domain of TCR clone 383124 (TRBV19, TRBJ2-7)
CASSPAGSGEALRYF

SEQ ID NO: 766249 - protein, 15 aa, Homo sapiens
  CDR3 for alpha chain variable domain of TCR clone 383125 (TRAV2, TRAJ9)
CAVEDRGTGGFKTIF

SEQ ID NO: 766250 - protein, 17 aa, Homo sapiens
  CDR3 for beta chain variable domain of TCR clone 383125 (TRBV13, TRBJ2-3)
CASSPSRVAGGRNTQYF

SEQ ID NO: 766251 - protein, 12 aa, Homo sapiens
  CDR3 for alpha chain variable domain of TCR clone 383126 (TRAV35, TRAJ39)
LAPNNAGNMLTF

SEQ ID NO: 766252 - protein, 15 aa, Homo sapiens
  CDR3 for beta chain variable domain of TCR clone 383126 (TRBV7-2, TRBJ2-7)
CASSTPGLTRGEQYF

SEQ ID NO: 766253 - protein, 14 aa, Homo sapiens
  CDR3 for alpha chain variable domain of TCR clone 383127 (TRAV1-2, TRAJ16)
CAVNRFSDGQKLLS

SEQ ID NO: 766254 - protein, 15 aa, Homo sapiens
  CDR3 for beta chain variable domain of TCR clone 383127 (TRBV7-9, TRBJ1-6)
CASSSPGRGNSPLHV

SEQ ID NO: 766255 - protein, 15 aa, Homo sapiens
  CDR3 for alpha chain variable domain of TCR clone 383128 (TRAV21, TRAJ53)
CATLDSGGSNYKLTF

SEQ ID NO: 766256 - protein, 14 aa, Homo sapiens
  CDR3 for beta chain variable domain of TCR clone 383128 (TRBV27, TRBJ2-2)
CASRPGVNTGELFF

SEQ ID NO: 766257 - protein, 13 aa, Homo sapiens
  CDR3 for alpha chain variable domain of TCR clone 383129 (TRAV30, TRAJ34)
CGTVGYNTDKLLF

SEQ ID NO: 766258 - protein, 16 aa, Homo sapiens
  CDR3 for beta chain variable domain of TCR clone 383129 (TRBV7-9, TRBJ1-2)
CASSLGFSSGEDGYTF

SEQ ID NO: 766259 - protein, 14 aa, Homo sapiens
  CDR3 for alpha chain variable domain of TCR clone 383130 (TRAV13-1, TRAJ5)
CAASPDTSRRALTF

SEQ ID NO: 766260 - protein, 15 aa, Homo sapiens
  CDR3 for beta chain variable domain of TCR clone 383130 (TRBV7-2, TRBJ2-7)
CASSLTGQGTYEQYF

SEQ ID NO: 766261 - protein, 12 aa, Homo sapiens
  CDR3 for alpha chain variable domain of TCR clone 383131 (TRAV3, TRAJ20)
CAVRDPDYKLSF

SEQ ID NO: 766262 - protein, 14 aa, Homo sapiens
  CDR3 for beta chain variable domain of TCR clone 383131 (TRBV4-2, TRBJ2-1)
CASGLDRAYNAQFF

SEQ ID NO: 766263 - protein, 16 aa, Homo sapiens
  CDR3 for alpha chain variable domain of TCR clone 383132 (TRAV16, TRAJ4)
CALSRMFSGGYNNLIF

SEQ ID NO: 766264 - protein, 12 aa, Homo sapiens
  CDR3 for beta chain variable domain of TCR clone 383132 (TRBV29-1, TRBJ2-3)
CSVTGGADTQYF

SEQ ID NO: 766265 - protein, 15 aa, Homo sapiens
  CDR3 for alpha chain variable domain of TCR clone 383133 (TRAV3, TRAJ5)
CAVRDLDTGRRALTF

SEQ ID NO: 766266 - protein, 14 aa, Homo sapiens
  CDR3 for beta chain variable domain of TCR clone 383133 (TRBV7-9, TRBJ2-5)
CASSLDTAQETQYF

SEQ ID NO: 766267 - protein, 11 aa, Homo sapiens
  CDR3 for alpha chain variable domain of TCR clone 383134 (TRAV25, TRAJ5)
CRGGGRKALTF

SEQ ID NO: 766268 - protein, 15 aa, Homo sapiens
  CDR3 for beta chain variable domain of TCR clone 383134 (TRBV20-1, TRBJ2-7)
CSARDRVSGMDEQYF

SEQ ID NO: 766269 - protein, 14 aa, Homo sapiens
  CDR3 for alpha chain variable domain of TCR clone 383135 (TRAV12-2, TRAJ20)
CAVKKNRNDYKLSF

SEQ ID NO: 766270 - protein, 15 aa, Homo sapiens
  CDR3 for beta chain variable domain of TCR clone 383135 (TRBV2, TRBJ2-7)
CASSEGLARSYEQYF

SEQ ID NO: 766271 - protein, 14 aa, Homo sapiens
  CDR3 for alpha chain variable domain of TCR clone 383136 (TRAV1-2, TRAJ16)
CAVNRFSDGQKLLF

SEQ ID NO: 766272 - protein, 14 aa, Homo sapiens
  CDR3 for beta chain variable domain of TCR clone 383136 (TRBV7-2, TRBJ2-7)
CASRSQGAAYDQYF

SEQ ID NO: 766273 - protein, 13 aa, Homo sapiens
  CDR3 for alpha chain variable domain of TCR clone 383137 (TRAV29/DV5, TRAJ34)
CAARVDNTDKLIF

SEQ ID NO: 766274 - protein, 15 aa, Homo sapiens
  CDR3 for beta chain variable domain of TCR clone 383137 (TRBV11-2, TRBJ2-1)
CASSLGPDSYNQQFF

SEQ ID NO: 766275 - protein, 14 aa, Homo sapiens
  CDR3 for alpha chain variable domain of TCR clone 383138 (TRAV1-2, TRAJ16)
CAVNRFSDCQKLLF

SEQ ID NO: 766276 - protein, 14 aa, Homo sapiens
  CDR3 for beta chain variable domain of TCR clone 383138 (TRBV7-8, TRBJ2-7)
CASSQTQGADEQYF

SEQ ID NO: 766277 - protein, 15 aa, Homo sapiens
  CDR3 for alpha chain variable domain of TCR clone 383139 (TRAV27, TRAJ38)
CAARRNAGNSRQRIW

SEQ ID NO: 766278 - protein, 13 aa, Homo sapiens
  CDR3 for beta chain variable domain of TCR clone 383139 (TRBV12-5, TRBJ2-3)
CASGDRQSDTQYF

SEQ ID NO: 766279 - protein, 17 aa, Homo sapiens
  CDR3 for alpha chain variable domain of TCR clone 383140 (TRAV3, TRAJ6)
CAVRDGPRAGGSYIPTF

SEQ ID NO: 766280 - protein, 15 aa, Homo sapiens
  CDR3 for beta chain variable domain of TCR clone 383140 (TRBV20-1, TRBJ2-5)
CSAGLAGVSQETQYF

SEQ ID NO: 766281 - protein, 22 aa, Homo sapiens
  CDR3 for alpha chain variable domain of TCR clone 383141 (TRAV3, TRAJ38)
CAVRDCLNAGNNHIQNPDPAVY

SEQ ID NO: 766282 - protein, 18 aa, Homo sapiens
  CDR3 for beta chain variable domain of TCR clone 383141 (TRBV19, TRBJ2-6)
CASSADRAGSSGANVLTF

SEQ ID NO: 766283 - protein, 13 aa, Homo sapiens
  CDR3 for alpha chain variable domain of TCR clone 383142 (TRAV21, TRAJ10)
CAVRMGGGNKLTF

SEQ ID NO: 766284 - protein, 12 aa, Homo sapiens
  CDR3 for beta chain variable domain of TCR clone 383142 (TRBV7-9, TRBJ2-7)
CASSIKREEQYF

SEQ ID NO: 766285 - protein, 10 aa, Homo sapiens
  CDR3 for alpha chain variable domain of TCR clone 383143 (TRAV12-2, TRAJ48)
CAVTSEQLTF

SEQ ID NO: 766286 - protein, 17 aa, Homo sapiens
  CDR3 for beta chain variable domain of TCR clone 383143 (TRBV11-1, TRBJ2-7)
CASSLTGSFGLDYEQYL

SEQ ID NO: 766287 - protein, 14 aa, Homo sapiens
  CDR3 for alpha chain variable domain of TCR clone 383144 (TRAV1-1, TRAJ23)
CAVSIYNQGGKLIF

SEQ ID NO: 766288 - protein, 12 aa, Homo sapiens
  CDR3 for beta chain variable domain of TCR clone 383144 (TRBV28, TRBJ2-3)
CASSLYRDAQYF

SEQ ID NO: 766289 - protein, 15 aa, Homo sapiens
  CDR3 for alpha chain variable domain of TCR clone 383145 (TRAV2, TRAJ15)
WAVEDRGQAGTALIF

SEQ ID NO: 766290 - protein, 13 aa, Homo sapiens
  CDR3 for beta chain variable domain of TCR clone 383145 (TRBV10-2, TRBJ2-7)
CASGASGGYEQYF

SEQ ID NO: 766291 - protein, 13 aa, Homo sapiens
  CDR3 for alpha chain variable domain of TCR clone 383146 (TRAV29/DV5, TRAJ29)
CAASAAGNTPPVF

SEQ ID NO: 766292 - protein, 14 aa, Homo sapiens
  CDR3 for beta chain variable domain of TCR clone 383146 (TRBV19, TRBJ2-3)
CASSAPRGTDTQYF

SEQ ID NO: 766293 - protein, 15 aa, Homo sapiens
  CDR3 for alpha chain variable domain of TCR clone 383147 (TRAV38-1, TRAJ37)
CAFIHGSGTTGKLIF

SEQ ID NO: 766294 - protein, 12 aa, Homo sapiens
  CDR3 for beta chain variable domain of TCR clone 383147 (TRBV7-9, TRBJ2-7)
CASRFGSYEQYF

SEQ ID NO: 766295 - protein, 15 aa, Homo sapiens
  CDR3 for alpha chain variable domain of TCR clone 383148 (TRAV17, TRAJ16)
CATALRFSDGQKLLF

SEQ ID NO: 766296 - protein, 15 aa, Homo sapiens
  CDR3 for beta chain variable domain of TCR clone 383148 (TRBV18, TRBJ2-7)
CASSPLQGRTYEQYF

SEQ ID NO: 766297 - protein, 11 aa, Homo sapiens
  CDR3 for alpha chain variable domain of TCR clone 383149 (TRAV2, TRAJ13)
CVSGGYQKVTF

SEQ ID NO: 766298 - protein, 13 aa, Homo sapiens
  CDR3 for beta chain variable domain of TCR clone 383149 (TRBV2, TRBJ1-1)
CASNLLRNTEAFF

SEQ ID NO: 766299 - protein, 15 aa, Homo sapiens
  CDR3 for alpha chain variable domain of TCR clone 383150 (TRAV12-3, TRAJ6)
CAMSATSGGSYIPTF

SEQ ID NO: 766300 - protein, 11 aa, Homo sapiens
  CDR3 for beta chain variable domain of TCR clone 383150 (TRBV6-4, TRBJ2-1)
CASRDSYAQFF

SEQ ID NO: 766301 - protein, 10 aa, Homo sapiens
  CDR3 for alpha chain variable domain of TCR clone 383151 (TRAV13-1, TRAJ43)
CAASKNDMRF

SEQ ID NO: 766302 - protein, 14 aa, Homo sapiens
  CDR3 for beta chain variable domain of TCR clone 383151 (TRBV7-2, TRBJ2-7)
CASSPKTSFYEQYF

SEQ ID NO: 766303 - protein, 14 aa, Homo sapiens
  CDR3 for alpha chain variable domain of TCR clone 383152 (TRAV17, TRAJ57)
CATDASGGSEMLVF

SEQ ID NO: 766304 - protein, 14 aa, Homo sapiens
  CDR3 for beta chain variable domain of TCR clone 383152 (TRBV4-2, TRBJ2-1)
CASGLDRAYNEQFF

SEQ ID NO: 766305 - protein, 16 aa, Homo sapiens
  CDR3 for alpha chain variable domain of TCR clone 383153 (TRAV17, TRAJ28)
CSTASVSGAGSYQLTF

SEQ ID NO: 766306 - protein, 11 aa, Homo sapiens
  CDR3 for beta chain variable domain of TCR clone 383153 (TRBV7-9, TRBJ2-5)
CASSLGETQYF

SEQ ID NO: 766307 - protein, 15 aa, Homo sapiens
  CDR3 for alpha chain variable domain of TCR clone 383154 (TRAV20, TRAJ43)
CAVQAGKSSNNDMRF

SEQ ID NO: 766308 - protein, 14 aa, Homo sapiens
  CDR3 for beta chain variable domain of TCR clone 383154 (TRBV27, TRBJ2-1)
CASRHLGGRKEQFF

SEQ ID NO: 766309 - protein, 15 aa, Homo sapiens
  CDR3 for alpha chain variable domain of TCR clone 383155 (TRAV12-2, TRAJ20)
CAVKGGFGAGTTVTV

SEQ ID NO: 766310 - protein, 16 aa, Homo sapiens
  CDR3 for beta chain variable domain of TCR clone 383155 (TRBV19, TRBJ2-1)
CASSKAGPSSYNEQFF

SEQ ID NO: 766311 - protein, 14 aa, Homo sapiens
  CDR3 for alpha chain variable domain of TCR clone 383156 (TRAV16, TRAJ15)
CALSFNQAGTALIF

SEQ ID NO: 766312 - protein, 16 aa, Homo sapiens
  CDR3 for beta chain variable domain of TCR clone 383156 (TRBV9, TRBJ2-7)
WASSAGPDRSPYEQYF

SEQ ID NO: 766313 - protein, 14 aa, Homo sapiens
  CDR3 for alpha chain variable domain of TCR clone 383157 (TRAV38-1, TRAJ40)
CALRPTSGTYKYIF

SEQ ID NO: 766314 - protein, 14 aa, Homo sapiens
  CDR3 for beta chain variable domain of TCR clone 383157 (TRBV25-1, TRBJ1-1)
CASTHLGGNTEAVV

SEQ ID NO: 766315 - protein, 12 aa, Homo sapiens
  CDR3 for alpha chain variable domain of TCR clone 383158 (TRAV2, TRAJ31)
CAVEDNNARLMV

SEQ ID NO: 766316 - protein, 11 aa, Homo sapiens
  CDR3 for beta chain variable domain of TCR clone 383158 (TRBV29-1, TRBJ2-5)
CSEDRTGTQYF

SEQ ID NO: 766317 - protein, 13 aa, Homo sapiens
  CDR3 for alpha chain variable domain of TCR clone 383159 (TRAV21, TRAJ57)
CSVTQGGSEKLFF

SEQ ID NO: 766318 - protein, 16 aa, Homo sapiens
  CDR3 for beta chain variable domain of TCR clone 383159 (TRBV29-1, TRBJ2-7)
CSVEDAEDGTAYEQYF

SEQ ID NO: 766319 - protein, 16 aa, Homo sapiens
  CDR3 for alpha chain variable domain of TCR clone 383160 (TRAV12-2, TRAJ10)
CAVNRVLTGGGNKLTF

SEQ ID NO: 766320 - protein, 14 aa, Homo sapiens
  CDR3 for beta chain variable domain of TCR clone 383160 (TRBV20-1, TRBJ1-5)
CSARDVTGFQPQHF

SEQ ID NO: 766321 - protein, 14 aa, Homo sapiens
  CDR3 for alpha chain variable domain of TCR clone 383161 (TRAV12-1, TRAJ3)
CVVNPGSSASKIIF

SEQ ID NO: 766322 - protein, 14 aa, Homo sapiens
  CDR3 for beta chain variable domain of TCR clone 383161 (TRBV20-1, TRBJ2-3)
CSAGGGTSTDKQYF

SEQ ID NO: 766323 - protein, 14 aa, Homo sapiens
  CDR3 for alpha chain variable domain of TCR clone 383162 (TRAV13-2, TRAJ16)
CAVNNWEDGQKLLF

SEQ ID NO: 766324 - protein, 14 aa, Homo sapiens
  CDR3 for beta chain variable domain of TCR clone 383162 (TRBV7-9, TRBJ1-1)
CASSLGGLKTEAFF

SEQ ID NO: 766325 - protein, 19 aa, Homo sapiens
  CDR3 for alpha chain variable domain of TCR clone 383163 (TRAV35, TRAJ49)
SDVASTSVLDTNTGNQFYF

SEQ ID NO: 766326 - protein, 13 aa, Homo sapiens
  CDR3 for beta chain variable domain of TCR clone 383163 (TRBV6-3, TRBJ2-5)
CASSWAGEETQYF

SEQ ID NO: 766327 - protein, 16 aa, Homo sapiens
  CDR3 for alpha chain variable domain of TCR clone 383164 (TRAV12-3, TRAJ53)
CAMSVGSGGSNYKLTF

SEQ ID NO: 766328 - protein, 16 aa, Homo sapiens
  CDR3 for beta chain variable domain of TCR clone 383164 (TRBV25-1, TRBJ1-1)
CASSGDRDRGRIEAFF

SEQ ID NO: 766329 - protein, 15 aa, Homo sapiens
  CDR3 for alpha chain variable domain of TCR clone 383165 (TRAV12-1, TRAJ44)
CVVDEYTGTASKLTF

SEQ ID NO: 766330 - protein, 15 aa, Homo sapiens
  CDR3 for beta chain variable domain of TCR clone 383165 (TRBV7-2, TRBJ2-7)
CASSLKGALTYEQYF

SEQ ID NO: 766331 - protein, 16 aa, Homo sapiens
  CDR3 for alpha chain variable domain of TCR clone 383166 (TRAV26-2, TRAJ37)
CILRDFGSSDTGKLIF

SEQ ID NO: 766332 - protein, 15 aa, Homo sapiens
  CDR3 for beta chain variable domain of TCR clone 383166 (TRBV6-5, TRBJ2-7)
CASRSLAVSSYEQYF

SEQ ID NO: 766333 - protein, 13 aa, Homo sapiens
  CDR3 for alpha chain variable domain of TCR clone 383167 (TRAV29/DV5, TRAJ47)
CAASEEYGNKLVL

SEQ ID NO: 766334 - protein, 15 aa, Homo sapiens
  CDR3 for beta chain variable domain of TCR clone 383167 (TRBV5-1, TRBJ2-1)
CASSPPRAPYNEQFF

SEQ ID NO: 766335 - protein, 14 aa, Homo sapiens
  CDR3 for alpha chain variable domain of TCR clone 383168 (TRAV12-1, TRAJ6)
CVVPTSGGSYIPTF

SEQ ID NO: 766336 - protein, 17 aa, Homo sapiens
  CDR3 for beta chain variable domain of TCR clone 383168 (TRBV14, TRBJ2-3)
CDSSQEPSGLSTDTQYF

SEQ ID NO: 766337 - protein, 13 aa, Homo sapiens
  CDR3 for alpha chain variable domain of TCR clone 383169 (TRAV3, TRAJ21)
CALREPDFNKFYF

SEQ ID NO: 766338 - protein, 12 aa, Homo sapiens
  CDR3 for beta chain variable domain of TCR clone 383169 (TRBV5-1, TRBJ2-4)
LAGEWTKNIQYF

SEQ ID NO: 766339 - protein, 14 aa, Homo sapiens
  CDR3 for alpha chain variable domain of TCR clone 383170 (TRAV12-2, TRAJ5)
CAVNSSTGRRPLTF

SEQ ID NO: 766340 - protein, 12 aa, Homo sapiens
  CDR3 for beta chain variable domain of TCR clone 383170 (TRBV19, TRBJ1-5)
CASSIAQQPQHF

SEQ ID NO: 766341 - protein, 12 aa, Homo sapiens
  CDR3 for alpha chain variable domain of TCR clone 383171 (TRAV12-3, TRAJ17)
CAMMLTGNKLTF

SEQ ID NO: 766342 - protein, 15 aa, Homo sapiens
  CDR3 for beta chain variable domain of TCR clone 383171 (TRBV20-1, TRBJ2-7)
CSARDQVSGMDEQYF

SEQ ID NO: 766343 - protein, 14 aa, Homo sapiens
  CDR3 for alpha chain variable domain of TCR clone 383172 (TRAV1-2, TRAJ6)
CAVRSSGGSYIPTF

SEQ ID NO: 766344 - protein, 18 aa, Homo sapiens
  CDR3 for beta chain variable domain of TCR clone 383172 (TRBV7-9, TRBJ2-7)
CASSLTTSGSRTWYEQYF

SEQ ID NO: 766345 - protein, 13 aa, Homo sapiens
  CDR3 for alpha chain variable domain of TCR clone 383173 (TRAV2, TRAJ29)
CAAQNSGNTPLVF

SEQ ID NO: 766346 - protein, 14 aa, Homo sapiens
  CDR3 for beta chain variable domain of TCR clone 383173 (TRBV7-9, TRBJ2-4)
CASSLAMGGNIRYF

SEQ ID NO: 766347 - protein, 15 aa, Homo sapiens
  CDR3 for alpha chain variable domain of TCR clone 383174 (TRAV17, TRAJ57)
CATGPSQGGSEKLVF

SEQ ID NO: 766348 - protein, 13 aa, Homo sapiens
  CDR3 for beta chain variable domain of TCR clone 383174 (TRBV20-1, TRBJ2-1)
CSATGLAGDEQFF

SEQ ID NO: 766349 - protein, 15 aa, Homo sapiens
  CDR3 for alpha chain variable domain of TCR clone 383175 (TRAV12-3, TRAJ10)
CASYIPTGGGNKLTC

SEQ ID NO: 766350 - protein, 13 aa, Homo sapiens
  CDR3 for beta chain variable domain of TCR clone 383175 (TRBV4-2, TRBJ1-1)
CASSQAGNTEAFF

SEQ ID NO: 766351 - protein, 23 aa, Homo sapiens
  CDR3 for alpha chain variable domain of TCR clone 383176 (TRAV30, TRAJ29)
PAQLLRNLLLWHRAFSGNTPLVF

SEQ ID NO: 766352 - protein, 15 aa, Homo sapiens
  CDR3 for beta chain variable domain of TCR clone 383176 (TRBV5-1, TRBJ2-2)
CASSLFGQNTGVLFF

SEQ ID NO: 766353 - protein, 14 aa, Homo sapiens
  CDR3 for alpha chain variable domain of TCR clone 383177 (TRAV1-2, TRAJ8)
CAVREDTGFQKLVF

SEQ ID NO: 766354 - protein, 14 aa, Homo sapiens
  CDR3 for beta chain variable domain of TCR clone 383177 (TRBV29-1, TRBJ2-5)
CSVQTSGSGETQYF

SEQ ID NO: 766355 - protein, 15 aa, Homo sapiens
  CDR3 for alpha chain variable domain of TCR clone 383178 (TRAV13-1, TRAJ52)
CAATSPRTSYGKLTF

SEQ ID NO: 766356 - protein, 13 aa, Homo sapiens
  CDR3 for beta chain variable domain of TCR clone 383178 (TRBV2, TRBJ1-1)
CASSEGGNTEAFF

SEQ ID NO: 766357 - protein, 11 aa, Homo sapiens
  CDR3 for alpha chain variable domain of TCR clone 383179 (TRAV2, TRAJ13)
CASGGYQKVTF

SEQ ID NO: 766358 - protein, 13 aa, Homo sapiens
  CDR3 for beta chain variable domain of TCR clone 383179 (TRBV7-3, TRBJ2-1)
CQQLSGGTNEQFF

SEQ ID NO: 766359 - protein, 18 aa, Homo sapiens
  CDR3 for alpha chain variable domain of TCR clone 383180 (TRAV29/DV5, TRAJ37)
CSVLLCSEGSGNTGKIIV

SEQ ID NO: 766360 - protein, 14 aa, Homo sapiens
  CDR3 for beta chain variable domain of TCR clone 383180 (TRBV5-1, TRBJ1-1)
CASSLAVGSGEAFF

SEQ ID NO: 766361 - protein, 14 aa, Homo sapiens
  CDR3 for alpha chain variable domain of TCR clone 383181 (TRAV38-2/DV8, TRAJ23)
CAYRSQTQGGKLIF

SEQ ID NO: 766362 - protein, 13 aa, Homo sapiens
  CDR3 for beta chain variable domain of TCR clone 383181 (TRBV24-1, TRBJ2-1)
CATSAGPYNEQFF

SEQ ID NO: 766363 - protein, 14 aa, Homo sapiens
  CDR3 for alpha chain variable domain of TCR clone 383182 (TRAV38-1, TRAJ40)
CALRPTSGTYKYIF

SEQ ID NO: 766364 - protein, 14 aa, Homo sapiens
  CDR3 for beta chain variable domain of TCR clone 383182 (TRBV25-1, TRBJ1-1)
CASTNLGGNTEAFF

SEQ ID NO: 766365 - protein, 11 aa, Homo sapiens
  CDR3 for alpha chain variable domain of TCR clone 383183 (TRAV2, TRAJ13)
CACGGYQKVTF

SEQ ID NO: 766366 - protein, 16 aa, Homo sapiens
  CDR3 for beta chain variable domain of TCR clone 383183 (TRBV6-1, TRBJ2-5)
CASSETLDRGAETQYF

SEQ ID NO: 766367 - protein, 11 aa, Homo sapiens
  CDR3 for alpha chain variable domain of TCR clone 383184 (TRAV21, TRAJ11)
CAVNGYSTLTF

SEQ ID NO: 766368 - protein, 15 aa, Homo sapiens
  CDR3 for beta chain variable domain of TCR clone 383184 (TRBV9, TRBJ1-6)
CASSVAGTGDSPLHF

SEQ ID NO: 766369 - protein, 16 aa, Homo sapiens
  CDR3 for alpha chain variable domain of TCR clone 383185 (TRAV12-3, TRAJ53)
CAMSPGSGGSNYKLTF

SEQ ID NO: 766370 - protein, 16 aa, Homo sapiens
  CDR3 for beta chain variable domain of TCR clone 383185 (TRBV4-2, TRBJ1-1)
CASSQAGFGMNTEAFC

SEQ ID NO: 766371 - protein, 15 aa, Homo sapiens
  CDR3 for alpha chain variable domain of TCR clone 383186 (TRAV27, TRAJ38)
CAARRNAGNNRKLIW

SEQ ID NO: 766372 - protein, 13 aa, Homo sapiens
  CDR3 for beta chain variable domain of TCR clone 383186 (TRBV12-4, TRBJ2-7)
CASNPTETYEQYF

SEQ ID NO: 766373 - protein, 14 aa, Homo sapiens
  CDR3 for alpha chain variable domain of TCR clone 383187 (TRAV12-3, TRAJ13)
CAMRNSGGYQKVTF

SEQ ID NO: 766374 - protein, 14 aa, Homo sapiens
  CDR3 for beta chain variable domain of TCR clone 383187 (TRBV11-2, TRBJ2-3)
CASSLGGGANTQYF

SEQ ID NO: 766375 - protein, 14 aa, Homo sapiens
  CDR3 for alpha chain variable domain of TCR clone 383188 (TRAV21, TRAJ40)
CAVVWTSGTYKYIF

SEQ ID NO: 766376 - protein, 12 aa, Homo sapiens
  CDR3 for beta chain variable domain of TCR clone 383188 (TRBV28, TRBJ2-6)
CAIHAGANVLTF

SEQ ID NO: 766377 - protein, 14 aa, Homo sapiens
  CDR3 for alpha chain variable domain of TCR clone 383189 (TRAV13-2, TRAJ29)
CAEGTFETKTPLVF

SEQ ID NO: 766378 - protein, 13 aa, Homo sapiens
  CDR3 for beta chain variable domain of TCR clone 383189 (TRBV2, TRBJ1-1)
CASNLLRNTEAFF

SEQ ID NO: 766379 - protein, 15 aa, Homo sapiens
  CDR3 for alpha chain variable domain of TCR clone 383190 (TRAV12-1, TRAJ41)
CVVNSRTGSGYALNF

SEQ ID NO: 766380 - protein, 16 aa, Homo sapiens
  CDR3 for beta chain variable domain of TCR clone 383190 (TRBV6-1, TRBJ2-5)
CASSETLDRGAETQYF

SEQ ID NO: 766381 - protein, 14 aa, Homo sapiens
  CDR3 for alpha chain variable domain of TCR clone 383191 (TRAV12-3, TRAJ9)
CAMSPNTGGFNTIF

SEQ ID NO: 766382 - protein, 12 aa, Homo sapiens
  CDR3 for beta chain variable domain of TCR clone 383191 (TRBV11-2, TRBJ2-2)
CASSLGGGELFF

SEQ ID NO: 766383 - protein, 13 aa, Homo sapiens
  CDR3 for alpha chain variable domain of TCR clone 383192 (TRAV26-1, TRAJ41)
CIVRINYGYALNF

SEQ ID NO: 766384 - protein, 13 aa, Homo sapiens
  CDR3 for beta chain variable domain of TCR clone 383192 (TRBV20-1, TRBJ1-5)
CSATAAGGQPQHF

SEQ ID NO: 766385 - protein, 11 aa, Homo sapiens
  CDR3 for alpha chain variable domain of TCR clone 383193 (TRAV12-1, TRAJ15)
CVVNAGTALIF

SEQ ID NO: 766386 - protein, 16 aa, Homo sapiens
  CDR3 for beta chain variable domain of TCR clone 383193 (TRBV28, TRBJ2-1)
CASSSRVRDSYNAQFF

SEQ ID NO: 766387 - protein, 15 aa, Homo sapiens
  CDR3 for alpha chain variable domain of TCR clone 383194 (TRAV36/DV7, TRAJ54)
CAVEKPVQGAQKLVF

SEQ ID NO: 766388 - protein, 14 aa, Homo sapiens
  CDR3 for beta chain variable domain of TCR clone 383194 (TRBV4-3, TRBJ2-2)
CASSQGHVIGELFF

SEQ ID NO: 766389 - protein, 15 aa, Homo sapiens
  CDR3 for alpha chain variable domain of TCR clone 383195 (TRAV13-1, TRAJ5)
CAVYIRDTGRRALTF

SEQ ID NO: 766390 - protein, 15 aa, Homo sapiens
  CDR3 for beta chain variable domain of TCR clone 383195 (TRBV2, TRBJ2-1)
RASSELAGGYNEQFF

SEQ ID NO: 766391 - protein, 11 aa, Homo sapiens
  CDR3 for alpha chain variable domain of TCR clone 383196 (TRAV2, TRAJ13)
RASGGYQKVTF

SEQ ID NO: 766392 - protein, 13 aa, Homo sapiens
  CDR3 for beta chain variable domain of TCR clone 383196 (TRBV20-1, TRBJ2-2)
CSASAAGTGELFF

SEQ ID NO: 766393 - protein, 14 aa, Homo sapiens
  CDR3 for alpha chain variable domain of TCR clone 383197 (TRAV13-2, TRAJ17)
CAENSKAAGNKLTF

SEQ ID NO: 766394 - protein, 14 aa, Homo sapiens
  CDR3 for beta chain variable domain of TCR clone 383197 (TRBV19, TRBJ2-1)
CASPTFVLSGKQFF

SEQ ID NO: 766395 - protein, 14 aa, Homo sapiens
  CDR3 for alpha chain variable domain of TCR clone 383198 (TRAV21, TRAJ32)
CCGDYGGATKRLIF

SEQ ID NO: 766396 - protein, 13 aa, Homo sapiens
  CDR3 for beta chain variable domain of TCR clone 383198 (TRBV2, TRBJ1-6)
CASGRGGISPLHF

SEQ ID NO: 766397 - protein, 14 aa, Homo sapiens
  CDR3 for alpha chain variable domain of TCR clone 383199 (TRAV13-1, TRAJ3)
CAASKSSSASKIIF

SEQ ID NO: 766398 - protein, 16 aa, Homo sapiens
  CDR3 for beta chain variable domain of TCR clone 383199 (TRBV15, TRBJ2-3)
CATSRDRGIVTDTQYF

SEQ ID NO: 766399 - protein, 14 aa, Homo sapiens
  CDR3 for alpha chain variable domain of TCR clone 383200 (TRAV14/DV4, TRAJ54)
CAMREAPGAQKLVF

SEQ ID NO: 766400 - protein, 15 aa, Homo sapiens
  CDR3 for beta chain variable domain of TCR clone 383200 (TRBV5-1, TRBJ2-7)
GASSVNGGPAREQYF

SEQ ID NO: 766401 - protein, 14 aa, Homo sapiens
  CDR3 for alpha chain variable domain of TCR clone 383201 (TRAV3, TRAJ13)
CAVSYSGGYQKVTF

SEQ ID NO: 766402 - protein, 12 aa, Homo sapiens
  CDR3 for beta chain variable domain of TCR clone 383201 (TRBV2, TRBJ1-2)
CASSGQTYGYTF

SEQ ID NO: 766403 - protein, 14 aa, Homo sapiens
  CDR3 for alpha chain variable domain of TCR clone 383202 (TRAV26-1, TRAJ44)
CIARTTGTASKLTF

SEQ ID NO: 766404 - protein, 12 aa, Homo sapiens
  CDR3 for beta chain variable domain of TCR clone 383202 (TRBV28, TRBJ2-1)
CASSVQINEQFF

SEQ ID NO: 766405 - protein, 14 aa, Homo sapiens
  CDR3 for alpha chain variable domain of TCR clone 383203 (TRAV1-2, TRAJ16)
CAVNRFSDGQNLLF

SEQ ID NO: 766406 - protein, 12 aa, Homo sapiens
  CDR3 for beta chain variable domain of TCR clone 383203 (TRBV20-1, TRBJ1-5)
CSAAGWDQPQHF

SEQ ID NO: 766407 - protein, 12 aa, Homo sapiens
  CDR3 for alpha chain variable domain of TCR clone 383204 (TRAV12-3, TRAJ17)
CAMTLTGNKLTL

SEQ ID NO: 766408 - protein, 15 aa, Homo sapiens
  CDR3 for beta chain variable domain of TCR clone 383204 (TRBV20-1, TRBJ2-7)
CSARDRVSGMDEQHF

SEQ ID NO: 766409 - protein, 23 aa, Homo sapiens
  CDR3 for alpha chain variable domain of TCR clone 383205 (TRAV26-1, TRAJ38)
CIADNAGNNHIQNPDPAVYQLRD

SEQ ID NO: 766410 - protein, 15 aa, Homo sapiens
  CDR3 for beta chain variable domain of TCR clone 383205 (TRBV2, TRBJ2-7)
CASSEGLARSYEQYF

SEQ ID NO: 766411 - protein, 16 aa, Homo sapiens
  CDR3 for alpha chain variable domain of TCR clone 383206 (TRAV12-3, TRAJ53)
CAMSPGSGGSNYKLTF

SEQ ID NO: 766412 - protein, 15 aa, Homo sapiens
  CDR3 for beta chain variable domain of TCR clone 383206 (TRBV2, TRBJ2-5)
CASTRDGGPQETQYF

SEQ ID NO: 766413 - protein, 18 aa, Homo sapiens
  CDR3 for alpha chain variable domain of TCR clone 383207 (TRAV12-3, TRAJ52)
CAMSRTNAGGTSYGKLTF

SEQ ID NO: 766414 - protein, 17 aa, Homo sapiens
  CDR3 for beta chain variable domain of TCR clone 383207 (TRBV7-3, TRBJ2-3)
CASSLMKRMRGPDTQYF

SEQ ID NO: 766415 - protein, 14 aa, Homo sapiens
  CDR3 for alpha chain variable domain of TCR clone 383208 (TRAV12-2, TRAJ40)
CAVKIPSGTYNYIL

SEQ ID NO: 766416 - protein, 14 aa, Homo sapiens
  CDR3 for beta chain variable domain of TCR clone 383208 (TRBV20-1, TRBJ1-1)
CSAQTRIGGTEAFF

SEQ ID NO: 766417 - protein, 13 aa, Homo sapiens
  CDR3 for alpha chain variable domain of TCR clone 383209 (TRAV36/DV7, TRAJ30)
CAVEPVRDDKIIF

SEQ ID NO: 766418 - protein, 13 aa, Homo sapiens
  CDR3 for beta chain variable domain of TCR clone 383209 (TRBV7-9, TRBJ1-2)
CASSLKQNYGYTF

SEQ ID NO: 766419 - protein, 13 aa, Homo sapiens
  CDR3 for alpha chain variable domain of TCR clone 383210 (TRAV21, TRAJ36)
CAVLKTGANNLFF

SEQ ID NO: 766420 - protein, 13 aa, Homo sapiens
  CDR3 for beta chain variable domain of TCR clone 383210 (TRBV29-1, TRBJ2-3)
CSATRGGRDTQYF

SEQ ID NO: 766421 - protein, 15 aa, Homo sapiens
  CDR3 for alpha chain variable domain of TCR clone 383211 (TRAV12-2, TRAJ53)
CAVNGGGGRNYKLTF

SEQ ID NO: 766422 - protein, 15 aa, Homo sapiens
  CDR3 for beta chain variable domain of TCR clone 383211 (TRBV20-1, TRBJ2-7)
CSARDRVSGMDEQYF

SEQ ID NO: 766423 - protein, 16 aa, Homo sapiens
  CDR3 for alpha chain variable domain of TCR clone 383212 (TRAV12-1, TRAJ42)
CVVTPYYGGSHGNLIF

SEQ ID NO: 766424 - protein, 15 aa, Homo sapiens
  CDR3 for beta chain variable domain of TCR clone 383212 (TRBV4-3, TRBJ2-7)
CASSQGGRGIYEQYF

SEQ ID NO: 766425 - protein, 15 aa, Homo sapiens
  CDR3 for alpha chain variable domain of TCR clone 383213 (TRAV27, TRAJ38)
CAARRNAGNNRKLIW

SEQ ID NO: 766426 - protein, 15 aa, Homo sapiens
  CDR3 for beta chain variable domain of TCR clone 383213 (TRBV7-2, TRBJ2-7)
CASSLKGALTYEQYF

SEQ ID NO: 766427 - protein, 10 aa, Homo sapiens
  CDR3 for alpha chain variable domain of TCR clone 383214 (TRAV2, TRAJ40)
CGAGTYKYIF

SEQ ID NO: 766428 - protein, 17 aa, Homo sapiens
  CDR3 for beta chain variable domain of TCR clone 383214 (TRBV11-2, TRBJ2-1)
CASSLYPPGVEYNEQFF

SEQ ID NO: 766429 - protein, 16 aa, Homo sapiens
  CDR3 for alpha chain variable domain of TCR clone 383215 (TRAV3, TRAJ37)
CAVRGKGSGNTGKLVF

SEQ ID NO: 766430 - protein, 16 aa, Homo sapiens
  CDR3 for beta chain variable domain of TCR clone 383215 (TRBV12-4, TRBJ1-5)
CASSRPVGGSNQPQHF

SEQ ID NO: 766431 - protein, 13 aa, Homo sapiens
  CDR3 for alpha chain variable domain of TCR clone 383216 (TRAV3, TRAJ20)
CAVRSLNDYKLSF

SEQ ID NO: 766432 - protein, 17 aa, Homo sapiens
  CDR3 for beta chain variable domain of TCR clone 383216 (TRBV7-3, TRBJ2-2)
CASSLSGTSGGTGELFF

SEQ ID NO: 766433 - protein, 14 aa, Homo sapiens
  CDR3 for alpha chain variable domain of TCR clone 383217 (TRAV12-2, TRAJ13)
CAVKKTGGYQKVTF

SEQ ID NO: 766434 - protein, 16 aa, Homo sapiens
  CDR3 for beta chain variable domain of TCR clone 383217 (TRBV3-1, TRBJ2-1)
CASSQVGGTSYNEQFF

SEQ ID NO: 766435 - protein, 14 aa, Homo sapiens
  CDR3 for alpha chain variable domain of TCR clone 383218 (TRAV1-2, TRAJ8)
CAEREDTGFQKLVF

SEQ ID NO: 766436 - protein, 12 aa, Homo sapiens
  CDR3 for beta chain variable domain of TCR clone 383218 (TRBV2, TRBJ2-1)
CAYGPPGNEQFF

SEQ ID NO: 766437 - protein, 15 aa, Homo sapiens
  CDR3 for alpha chain variable domain of TCR clone 383219 (TRAV30, TRAJ32)
CGTEILGGATNKLIF

SEQ ID NO: 766438 - protein, 16 aa, Homo sapiens
  CDR3 for beta chain variable domain of TCR clone 383219 (TRBV7-6, TRBJ2-1)
CASSAPGPSSYNEQFF

SEQ ID NO: 766439 - protein, 18 aa, Homo sapiens
  CDR3 for alpha chain variable domain of TCR clone 383220 (TRAV21, TRAJ17)
CAVRPSPAGGTSYGKLTF

SEQ ID NO: 766440 - protein, 18 aa, Homo sapiens
  CDR3 for beta chain variable domain of TCR clone 383220 (TRBV7-9, TRBJ2-7)
CASSLTTSGSRTWYEQYF

SEQ ID NO: 766441 - protein, 15 aa, Homo sapiens
  CDR3 for alpha chain variable domain of TCR clone 383221 (TRAV20, TRAJ53)
CAVRASGGSNYKLTF

SEQ ID NO: 766442 - protein, 14 aa, Homo sapiens
  CDR3 for beta chain variable domain of TCR clone 383221 (TRBV11-2, TRBJ2-7)
CASSSGAGAYEQYF

SEQ ID NO: 766443 - protein, 17 aa, Homo sapiens
  CDR3 for alpha chain variable domain of TCR clone 383222 (TRAV26-1, TRAJ28)
CIVRIPDSGAGSYQLTF

SEQ ID NO: 766444 - protein, 17 aa, Homo sapiens
  CDR3 for beta chain variable domain of TCR clone 383222 (TRBV28, TRBJ2-7)
CASSPLPAGGKSYEQYF

SEQ ID NO: 766445 - protein, 12 aa, Homo sapiens
  CDR3 for alpha chain variable domain of TCR clone 383223 (TRAV22, TRAJ22)
CAPGGSARQLTF

SEQ ID NO: 766446 - protein, 13 aa, Homo sapiens
  CDR3 for beta chain variable domain of TCR clone 383223 (TRBV15, TRBJ1-6)
CATSGGLNSPVHF

SEQ ID NO: 766447 - protein, 13 aa, Homo sapiens
  CDR3 for alpha chain variable domain of TCR clone 383224 (TRAV2, TRAJ29)
CAAGNSGNTPLVF

SEQ ID NO: 766448 - protein, 16 aa, Homo sapiens
  CDR3 for beta chain variable domain of TCR clone 383224 (TRBV7-9, TRBJ1-2)
CASSPGGGTINYGYTF

SEQ ID NO: 766449 - protein, 12 aa, Homo sapiens
  CDR3 for alpha chain variable domain of TCR clone 383225 (TRAV8-4, TRAJ37)
SAVRSNTGKLIF

SEQ ID NO: 766450 - protein, 16 aa, Homo sapiens
  CDR3 for beta chain variable domain of TCR clone 383225 (TRBV7-2, TRBJ2-3)
CASSLVGDASTDTQYF

SEQ ID NO: 766451 - protein, 11 aa, Homo sapiens
  CDR3 for alpha chain variable domain of TCR clone 383226 (TRAV2, TRAJ33)
CAVDSNYQLIW

SEQ ID NO: 766452 - protein, 16 aa, Homo sapiens
  CDR3 for beta chain variable domain of TCR clone 383226 (TRBV5-1, TRBJ1-1)
CASSSGGNSLNTEACF

SEQ ID NO: 766453 - protein, 16 aa, Homo sapiens
  CDR3 for alpha chain variable domain of TCR clone 383227 (TRAV26-1, TRAJ37)
CIVRGDGSGYTGKLIF

SEQ ID NO: 766454 - protein, 15 aa, Homo sapiens
  CDR3 for beta chain variable domain of TCR clone 383227 (TRBV7-3, TRBJ2-1)
CASSPTGGGEVEQFF

SEQ ID NO: 766455 - protein, 13 aa, Homo sapiens
  CDR3 for alpha chain variable domain of TCR clone 383228 (TRAV2, TRAJ15)
CAVASQAGTALIF

SEQ ID NO: 766456 - protein, 14 aa, Homo sapiens
  CDR3 for beta chain variable domain of TCR clone 383228 (TRBV7-2, TRBJ1-5)
CASSTQGAGQPQHF

SEQ ID NO: 766457 - protein, 15 aa, Homo sapiens
  CDR3 for alpha chain variable domain of TCR clone 383229 (TRAV29/DV5, TRAJ42)
CAAKTDGGRQGNHIF

SEQ ID NO: 766458 - protein, 15 aa, Homo sapiens
  CDR3 for beta chain variable domain of TCR clone 383229 (TRBV5-1, TRBJ2-2)
CASSSQGGNTGELFF

SEQ ID NO: 766459 - protein, 13 aa, Homo sapiens
  CDR3 for alpha chain variable domain of TCR clone 383230 (TRAV12-3, TRAJ33)
CAMSLNSNYQLIW

SEQ ID NO: 766460 - protein, 13 aa, Homo sapiens
  CDR3 for beta chain variable domain of TCR clone 383230 (TRBV7-2, TRBJ2-2)
SASSLAVTGELFF

SEQ ID NO: 766461 - protein, 12 aa, Homo sapiens
  CDR3 for alpha chain variable domain of TCR clone 383231 (TRAV12-1, TRAJ40)
CAMSSGTYKYIF

SEQ ID NO: 766462 - protein, 15 aa, Homo sapiens
  CDR3 for beta chain variable domain of TCR clone 383231 (TRBV25-1, TRBJ1-4)
CASSKRIATNEKLFF

SEQ ID NO: 766463 - protein, 14 aa, Homo sapiens
  CDR3 for alpha chain variable domain of TCR clone 383232 (TRAV29/DV5, TRAJ20)
CAASAPIEDYRLSF

SEQ ID NO: 766464 - protein, 16 aa, Homo sapiens
  CDR3 for beta chain variable domain of TCR clone 383232 (TRBV12-4, TRBJ2-3)
CASRSRVAGETDTQYF

SEQ ID NO: 766465 - protein, 13 aa, Homo sapiens
  CDR3 for alpha chain variable domain of TCR clone 383233 (TRAV12-2, TRAJ20)
CAVYPSNDCKLSF

SEQ ID NO: 766466 - protein, 15 aa, Homo sapiens
  CDR3 for beta chain variable domain of TCR clone 383233 (TRBV27, TRBJ2-5)
CASSLYPRGGETQCF

SEQ ID NO: 766467 - protein, 13 aa, Homo sapiens
  CDR3 for alpha chain variable domain of TCR clone 383234 (TRAV12-3, TRAJ13)
CAMGTGGDQKVTF

SEQ ID NO: 766468 - protein, 14 aa, Homo sapiens
  CDR3 for beta chain variable domain of TCR clone 383234 (TRBV7-2, TRBJ2-5)
CASSTGGELKTQYF

SEQ ID NO: 766469 - protein, 11 aa, Homo sapiens
  CDR3 for alpha chain variable domain of TCR clone 383235 (TRAV4, TRAJ23)
CLVAPGGKLIF

SEQ ID NO: 766470 - protein, 15 aa, Homo sapiens
  CDR3 for beta chain variable domain of TCR clone 383235 (TRBV7-2, TRBJ2-1)
CASSFQADEYNVQFF

SEQ ID NO: 766471 - protein, 17 aa, Homo sapiens
  CDR3 for alpha chain variable domain of TCR clone 383236 (TRAV20, TRAJ42)
CAVQAWGYGGSQGNLIF

SEQ ID NO: 766472 - protein, 16 aa, Homo sapiens
  CDR3 for beta chain variable domain of TCR clone 383236 (TRBV29-1, TRBJ2-5)
CSVEGLAGDDQETQYF

SEQ ID NO: 766473 - protein, 15 aa, Homo sapiens
  CDR3 for alpha chain variable domain of TCR clone 383237 (TRAV17, TRAJ16)
CATALRFSDGQKLLF

SEQ ID NO: 766474 - protein, 13 aa, Homo sapiens
  CDR3 for beta chain variable domain of TCR clone 383237 (TRBV7-2, TRBJ2-4)
CASSREHANIQYF

SEQ ID NO: 766475 - protein, 14 aa, Homo sapiens
  CDR3 for alpha chain variable domain of TCR clone 383238 (TRAV26-1, TRAJ38)
CIADNAGNNRTLIW

SEQ ID NO: 766476 - protein, 17 aa, Homo sapiens
  CDR3 for beta chain variable domain of TCR clone 383238 (TRBV7-9, TRBJ2-3)
CASSPTVAGDLTDTQYF

SEQ ID NO: 766477 - protein, 21 aa, Homo sapiens
  CDR3 for alpha chain variable domain of TCR clone 383239 (TRAV3, TRAJ17)
CAVGARRGGRSCRQQANFLRR

SEQ ID NO: 766478 - protein, 14 aa, Homo sapiens
  CDR3 for beta chain variable domain of TCR clone 383239 (TRBV4-1, TRBJ2-2)
CASSQAVNTGELFF

SEQ ID NO: 766479 - protein, 12 aa, Homo sapiens
  CDR3 for alpha chain variable domain of TCR clone 383240 (TRAV12-1, TRAJ16)
CVVFRDGQKLLF

SEQ ID NO: 766480 - protein, 14 aa, Homo sapiens
  CDR3 for beta chain variable domain of TCR clone 383240 (TRBV25-1, TRBJ1-1)
CASTHLGGNTEAFF

SEQ ID NO: 766481 - protein, 12 aa, Homo sapiens
  CDR3 for alpha chain variable domain of TCR clone 383241 (TRAV12-2, TRAJ10)
WGVTGGGNKLTF

SEQ ID NO: 766482 - protein, 16 aa, Homo sapiens
  CDR3 for beta chain variable domain of TCR clone 383241 (TRBV5-1, TRBJ2-5)
CASSAARAGAQETQYF

SEQ ID NO: 766483 - protein, 13 aa, Homo sapiens
  CDR3 for alpha chain variable domain of TCR clone 383242 (TRAV8-3, TRAJ44)
CAVVPGTASKRTF

SEQ ID NO: 766484 - protein, 14 aa, Homo sapiens
  CDR3 for beta chain variable domain of TCR clone 383242 (TRBV11-2, TRBJ2-3)
CASSRLARTDTQHF

SEQ ID NO: 766485 - protein, 16 aa, Homo sapiens
  CDR3 for alpha chain variable domain of TCR clone 383243 (TRAV22, TRAJ45)
CAVERGKRGGGDGLTF

SEQ ID NO: 766486 - protein, 13 aa, Homo sapiens
  CDR3 for beta chain variable domain of TCR clone 383243 (TRBV27, TRBJ1-1)
CASSLSIGAEAFF

SEQ ID NO: 766487 - protein, 16 aa, Homo sapiens
  CDR3 for alpha chain variable domain of TCR clone 383244 (TRAV9-2, TRAJ10)
CALSEGGTGGGNKPTF

SEQ ID NO: 766488 - protein, 14 aa, Homo sapiens
  CDR3 for beta chain variable domain of TCR clone 383244 (TRBV7-8, TRBJ1-2)
CASSPDSLSYGYTL

SEQ ID NO: 766489 - protein, 14 aa, Homo sapiens
  CDR3 for alpha chain variable domain of TCR clone 383245 (TRAV12-2, TRAJ53)
CAVKGGGSNSKLTF

SEQ ID NO: 766490 - protein, 14 aa, Homo sapiens
  CDR3 for beta chain variable domain of TCR clone 383245 (TRBV7-7, TRBJ2-2)
CATRQDSETGELFF

SEQ ID NO: 766491 - protein, 18 aa, Homo sapiens
  CDR3 for alpha chain variable domain of TCR clone 383246 (TRAV21, TRAJ13)
CAVPRSFWGLPESYLWNW

SEQ ID NO: 766492 - protein, 13 aa, Homo sapiens
  CDR3 for beta chain variable domain of TCR clone 383246 (TRBV7-9, TRBJ1-2)
CASSLKQNYGYTF

SEQ ID NO: 766493 - protein, 14 aa, Homo sapiens
  CDR3 for alpha chain variable domain of TCR clone 383247 (TRAV29/DV5, TRAJ36)
CAARRKTGANNLFF

SEQ ID NO: 766494 - protein, 15 aa, Homo sapiens
  CDR3 for beta chain variable domain of TCR clone 383247 (TRBV7-9, TRBJ2-7)
CASSLARAEAYEQYF

SEQ ID NO: 766495 - protein, 13 aa, Homo sapiens
  CDR3 for alpha chain variable domain of TCR clone 383248 (TRAV27, TRAJ45)
CRSSGGGADGLTF

SEQ ID NO: 766496 - protein, 17 aa, Homo sapiens
  CDR3 for beta chain variable domain of TCR clone 383248 (TRBV11-2, TRBJ2-1)
CASSLYPPGVDYNEKFF

SEQ ID NO: 766497 - protein, 15 aa, Homo sapiens
  CDR3 for alpha chain variable domain of TCR clone 383249 (TRAV13-2, TRAJ45)
FAEHHSGGGADGLTF

SEQ ID NO: 766498 - protein, 15 aa, Homo sapiens
  CDR3 for beta chain variable domain of TCR clone 383249 (TRBV7-2, TRBJ2-7)
CASSLALGSAYEQYF

SEQ ID NO: 766499 - protein, 16 aa, Homo sapiens
  CDR3 for alpha chain variable domain of TCR clone 383250 (TRAV23/DV6, TRAJ22)
CAAAAISSGSARRLTF

SEQ ID NO: 766500 - protein, 14 aa, Homo sapiens
  CDR3 for beta chain variable domain of TCR clone 383250 (TRBV18, TRBJ2-3)
CASSGLADTDTQYF

SEQ ID NO: 766501 - protein, 11 aa, Homo sapiens
  CDR3 for alpha chain variable domain of TCR clone 383251 (TRAV1-2, TRAJ20)
CAVANDYKLSF

SEQ ID NO: 766502 - protein, 15 aa, Homo sapiens
  CDR3 for beta chain variable domain of TCR clone 383251 (TRBV28, TRBJ2-3)
CASSPDRQGANTQYF

SEQ ID NO: 766503 - protein, 11 aa, Homo sapiens
  CDR3 for alpha chain variable domain of TCR clone 383252 (TRAV12-2, TRAJ39)
CAVNNMLTFGG

SEQ ID NO: 766504 - protein, 14 aa, Homo sapiens
  CDR3 for beta chain variable domain of TCR clone 383252 (TRBV6-1, TRBJ1-3)
CASVQGGGGNTIYF

SEQ ID NO: 766505 - protein, 10 aa, Homo sapiens
  CDR3 for alpha chain variable domain of TCR clone 383253 (TRAV12-1, TRAJ20)
CVVNPRKLSF

SEQ ID NO: 766506 - protein, 15 aa, Homo sapiens
  CDR3 for beta chain variable domain of TCR clone 383253 (TRBV5-1, TRBJ2-1)
CASSLPRAPYNEQFF

SEQ ID NO: 766507 - protein, 14 aa, Homo sapiens
  CDR3 for alpha chain variable domain of TCR clone 383254 (TRAV27, TRAJ22)
CAGVSVLGKRQLTF

SEQ ID NO: 766508 - protein, 17 aa, Homo sapiens
  CDR3 for beta chain variable domain of TCR clone 383254 (TRBV14, TRBJ2-1)
CASSHDRRVTSYNEQFF

SEQ ID NO: 766509 - protein, 13 aa, Homo sapiens
  CDR3 for alpha chain variable domain of TCR clone 383255 (TRAV3, TRAJ3)
CAVADSSASKIIF

SEQ ID NO: 766510 - protein, 14 aa, Homo sapiens
  CDR3 for beta chain variable domain of TCR clone 383255 (TRBV25-1, TRBJ1-1)
CASTHLGGNTEAFF

SEQ ID NO: 766511 - protein, 14 aa, Homo sapiens
  CDR3 for alpha chain variable domain of TCR clone 383256 (TRAV1-2, TRAJ16)
CAVRSAPDGQKLPF

SEQ ID NO: 766512 - protein, 17 aa, Homo sapiens
  CDR3 for beta chain variable domain of TCR clone 383256 (TRBV7-3, TRBJ2-3)
CASSLMKRMRGADTQYF

SEQ ID NO: 766513 - protein, 12 aa, Homo sapiens
  CDR3 for alpha chain variable domain of TCR clone 383257 (TRAV12-3, TRAJ41)
CAMSYSGYALNF

SEQ ID NO: 766514 - protein, 17 aa, Homo sapiens
  CDR3 for beta chain variable domain of TCR clone 383257 (TRBV13, TRBJ2-3)
CASSLSRVAGGRNTQYF

SEQ ID NO: 766515 - protein, 12 aa, Homo sapiens
  CDR3 for alpha chain variable domain of TCR clone 383258 (TRAV20, TRAJ56)
CAVTGADSKMTF

SEQ ID NO: 766516 - protein, 14 aa, Homo sapiens
  CDR3 for beta chain variable domain of TCR clone 383258 (TRBV20-1, TRBJ2-5)
CSALVPGYQETQYS

SEQ ID NO: 766517 - protein, 13 aa, Homo sapiens
  CDR3 for alpha chain variable domain of TCR clone 383259 (TRAV13-1, TRAJ6)
CAASKGGSYIPTF

SEQ ID NO: 766518 - protein, 14 aa, Homo sapiens
  CDR3 for beta chain variable domain of TCR clone 383259 (TRBV7-2, TRBJ2-1)
CASSLGVGYNEQFF

SEQ ID NO: 766519 - protein, 15 aa, Homo sapiens
  CDR3 for alpha chain variable domain of TCR clone 383260 (TRAV12-3, TRAJ6)
CAMSATTGGSYIPTF

SEQ ID NO: 766520 - protein, 15 aa, Homo sapiens
  CDR3 for beta chain variable domain of TCR clone 383260 (TRBV5-1, TRBJ2-7)
CASSLNGGRAREQYF

SEQ ID NO: 766521 - protein, 13 aa, Homo sapiens
  CDR3 for alpha chain variable domain of TCR clone 383261 (TRAV16, TRAJ28)
CAPTGAGSYQLTF

SEQ ID NO: 766522 - protein, 16 aa, Homo sapiens
  CDR3 for beta chain variable domain of TCR clone 383261 (TRBV28, TRBJ1-5)
CASSLTGQGWNQPQHV

SEQ ID NO: 766523 - protein, 14 aa, Homo sapiens
  CDR3 for alpha chain variable domain of TCR clone 383262 (TRAV8-1, TRAJ5)
CAVRTDAGRRALTF

SEQ ID NO: 766524 - protein, 14 aa, Homo sapiens
  CDR3 for beta chain variable domain of TCR clone 383262 (TRBV7-8, TRBJ2-3)
CASSFPDGQDTQYF

SEQ ID NO: 766525 - protein, 14 aa, Homo sapiens
  CDR3 for alpha chain variable domain of TCR clone 383263 (TRAV12-2, TRAJ13)
CAVKKTGGYQKVTL

SEQ ID NO: 766526 - protein, 13 aa, Homo sapiens
  CDR3 for beta chain variable domain of TCR clone 383263 (TRBV6-1, TRBJ1-1)
CASSRQGNTGAFF

SEQ ID NO: 766527 - protein, 16 aa, Homo sapiens
  CDR3 for alpha chain variable domain of TCR clone 383264 (TRAV30, TRAJ24)
CGTEIVDADSWGKFQF

SEQ ID NO: 766528 - protein, 17 aa, Homo sapiens
  CDR3 for beta chain variable domain of TCR clone 383264 (TRBV19, TRBJ2-2)
CASSISPSGQGTGELFF

SEQ ID NO: 766529 - protein, 14 aa, Homo sapiens
  CDR3 for alpha chain variable domain of TCR clone 383265 (TRAV12-2, TRAJ4)
CAEDLSGGYNKLIF

SEQ ID NO: 766530 - protein, 13 aa, Homo sapiens
  CDR3 for beta chain variable domain of TCR clone 383265 (TRBV7-9, TRBJ1-2)
CASSLKQNYGYIF

SEQ ID NO: 766531 - protein, 14 aa, Homo sapiens
  CDR3 for alpha chain variable domain of TCR clone 383266 (TRAV13-2, TRAJ4)
CAENHSGGYNKLIF

SEQ ID NO: 766532 - protein, 15 aa, Homo sapiens
  CDR3 for beta chain variable domain of TCR clone 383266 (TRBV7-9, TRBJ1-6)
CASSSPGRGNSPLHF

SEQ ID NO: 766533 - protein, 14 aa, Homo sapiens
  CDR3 for alpha chain variable domain of TCR clone 383267 (TRAV12-3, TRAJ10)
SHLPLTGGGNKLTF

SEQ ID NO: 766534 - protein, 15 aa, Homo sapiens
  CDR3 for beta chain variable domain of TCR clone 383267 (TRBV12-4, TRBJ2-3)
CASSRLRGSTDTQYF

SEQ ID NO: 766535 - protein, 12 aa, Homo sapiens
  CDR3 for alpha chain variable domain of TCR clone 383268 (TRAV3, TRAJ43)
CAVRDLNNDMRF

SEQ ID NO: 766536 - protein, 13 aa, Homo sapiens
  CDR3 for beta chain variable domain of TCR clone 383268 (TRBV19, TRBJ1-2)
CASSVPGQDGYTF

SEQ ID NO: 766537 - protein, 12 aa, Homo sapiens
  CDR3 for alpha chain variable domain of TCR clone 383269 (TRAV21, TRAJ33)
CAKMDSNYQLIW

SEQ ID NO: 766538 - protein, 18 aa, Homo sapiens
  CDR3 for beta chain variable domain of TCR clone 383269 (TRBV15, TRBJ2-3)
CATSRDGARSWDTDTHYF

SEQ ID NO: 766539 - protein, 13 aa, Homo sapiens
  CDR3 for alpha chain variable domain of TCR clone 383270 (TRAV8-3, TRAJ48)
CAVVPFGNEKLTF

SEQ ID NO: 766540 - protein, 15 aa, Homo sapiens
  CDR3 for beta chain variable domain of TCR clone 383270 (TRBV11-1, TRBJ2-7)
CASSLNYGASYEQYF

SEQ ID NO: 766541 - protein, 20 aa, Homo sapiens
  CDR3 for alpha chain variable domain of TCR clone 383271 (TRAV2, TRAJ26)
CAGSPGRLWSEFCLWSRNQF

SEQ ID NO: 766542 - protein, 13 aa, Homo sapiens
  CDR3 for beta chain variable domain of TCR clone 383271 (TRBV7-9, TRBJ1-2)
CASSLKQNYGYTF

SEQ ID NO: 766543 - protein, 16 aa, Homo sapiens
  CDR3 for alpha chain variable domain of TCR clone 383272 (TRAV3, TRAJ10)
CAVRDMRAGGGNKLTF

SEQ ID NO: 766544 - protein, 13 aa, Homo sapiens
  CDR3 for beta chain variable domain of TCR clone 383272 (TRBV20-1, TRBJ1-1)
CSAPPGGHTEAFF

SEQ ID NO: 766545 - protein, 12 aa, Homo sapiens
  CDR3 for alpha chain variable domain of TCR clone 383273 (TRAV12-1, TRAJ20)
CVVNPDDYKLSF

SEQ ID NO: 766546 - protein, 16 aa, Homo sapiens
  CDR3 for beta chain variable domain of TCR clone 383273 (TRBV7-2, TRBJ2-7)
CASSLDLSGGAYEQYF

SEQ ID NO: 766547 - protein, 15 aa, Homo sapiens
  CDR3 for alpha chain variable domain of TCR clone 383274 (TRAV13-1, TRAJ18)
CAASGGGSTLGRLYF

SEQ ID NO: 766548 - protein, 13 aa, Homo sapiens
  CDR3 for beta chain variable domain of TCR clone 383274 (TRBV18, TRBJ2-1)
CASGLGSNNEQFF

SEQ ID NO: 766549 - protein, 14 aa, Homo sapiens
  CDR3 for alpha chain variable domain of TCR clone 383275 (TRAV1-2, TRAJ16)
CAVNRFSGGQKLLF

SEQ ID NO: 766550 - protein, 14 aa, Homo sapiens
  CDR3 for beta chain variable domain of TCR clone 383275 (TRBV6-1, TRBJ1-3)
CASVQGGGGNTIYF

SEQ ID NO: 766551 - protein, 13 aa, Homo sapiens
  CDR3 for alpha chain variable domain of TCR clone 383276 (TRAV8-6, TRAJ49)
CAVITNTGNQFYF

SEQ ID NO: 766552 - protein, 13 aa, Homo sapiens
  CDR3 for beta chain variable domain of TCR clone 383276 (TRBV7-9, TRBJ1-2)
CASSLKQDYGYTF

SEQ ID NO: 766553 - protein, 13 aa, Homo sapiens
  CDR3 for alpha chain variable domain of TCR clone 383277 (TRAV35, TRAJ21)
CAGQLSNFNKFYF

SEQ ID NO: 766554 - protein, 14 aa, Homo sapiens
  CDR3 for beta chain variable domain of TCR clone 383277 (TRBV12-5, TRBJ2-5)
CASGSRTHQETQYF

SEQ ID NO: 766555 - protein, 13 aa, Homo sapiens
  CDR3 for alpha chain variable domain of TCR clone 383278 (TRAV35, TRAJ36)
CARPRIGANNLFF

SEQ ID NO: 766556 - protein, 18 aa, Homo sapiens
  CDR3 for beta chain variable domain of TCR clone 383278 (TRBV11-2, TRBJ2-3)
CASSLGGASRGAPNTQYF

SEQ ID NO: 766557 - protein, 14 aa, Homo sapiens
  CDR3 for alpha chain variable domain of TCR clone 383279 (TRAV1-2, TRAJ8)
CAVREDTGFQKLVF

SEQ ID NO: 766558 - protein, 14 aa, Homo sapiens
  CDR3 for beta chain variable domain of TCR clone 383279 (TRBV7-3, TRBJ2-1)
CASGLAGGTNEQFF

SEQ ID NO: 766559 - protein, 14 aa, Homo sapiens
  CDR3 for alpha chain variable domain of TCR clone 383280 (TRAV8-6, TRAJ4)
CAVTVSGGYNKLIF

SEQ ID NO: 766560 - protein, 13 aa, Homo sapiens
  CDR3 for beta chain variable domain of TCR clone 383280 (TRBV10-2, TRBJ2-7)
CASGASGGYEQYF

SEQ ID NO: 766561 - protein, 15 aa, Homo sapiens
  CDR3 for alpha chain variable domain of TCR clone 383281 (TRAV12-2, TRAJ43)
CAFDMRLGAGTRLTV

SEQ ID NO: 766562 - protein, 15 aa, Homo sapiens
  CDR3 for beta chain variable domain of TCR clone 383281 (TRBV20-1, TRBJ2-7)
CSARDRVSGMDEQYF

SEQ ID NO: 766563 - protein, 14 aa, Homo sapiens
  CDR3 for alpha chain variable domain of TCR clone 383282 (TRAV13-1, TRAJ9)
CAASALTAGFKTIF

SEQ ID NO: 766564 - protein, 16 aa, Homo sapiens
  CDR3 for beta chain variable domain of TCR clone 383282 (TRBV12-4, TRBJ2-3)
CASSFGTGGISDTQYF

SEQ ID NO: 766565 - protein, 14 aa, Homo sapiens
  CDR3 for alpha chain variable domain of TCR clone 383283 (TRAV27, TRAJ36)
CAGPPKRGANNLFF

SEQ ID NO: 766566 - protein, 15 aa, Homo sapiens
  CDR3 for beta chain variable domain of TCR clone 383283 (TRBV18, TRBJ2-7)
FPRSPASTPNYEQYF

SEQ ID NO: 766567 - protein, 13 aa, Homo sapiens
  CDR3 for alpha chain variable domain of TCR clone 383284 (TRAV27, TRAJ41)
CAGEGNAGYALNF

SEQ ID NO: 766568 - protein, 13 aa, Homo sapiens
  CDR3 for beta chain variable domain of TCR clone 383284 (TRBV19, TRBJ1-2)
CASSVPGQDGYTF

SEQ ID NO: 766569 - protein, 12 aa, Homo sapiens
  CDR3 for alpha chain variable domain of TCR clone 383285 (TRAV23/DV6, TRAJ33)
CAAEDSNYQLIW

SEQ ID NO: 766570 - protein, 14 aa, Homo sapiens
  CDR3 for beta chain variable domain of TCR clone 383285 (TRBV7-3, TRBJ1-1)
CASSLKGGNTEAFF

SEQ ID NO: 766571 - protein, 11 aa, Homo sapiens
  CDR3 for alpha chain variable domain of TCR clone 383286 (TRAV8-3, TRAJ20)
CCDFNDYKLSF

SEQ ID NO: 766572 - protein, 17 aa, Homo sapiens
  CDR3 for beta chain variable domain of TCR clone 383286 (TRBV7-8, TRBJ2-6)
CASSAGTGGAGANVLTF

SEQ ID NO: 766573 - protein, 16 aa, Homo sapiens
  CDR3 for alpha chain variable domain of TCR clone 383287 (TRAV26-1, TRAJ53)
CTVRVAMGGINYKLTF

SEQ ID NO: 766574 - protein, 12 aa, Homo sapiens
  CDR3 for beta chain variable domain of TCR clone 383287 (TRBV7-9, TRBJ1-5)
CASSPQGQPQHF

SEQ ID NO: 766575 - protein, 13 aa, Homo sapiens
  CDR3 for alpha chain variable domain of TCR clone 383288 (TRAV17, TRAJ5)
CAPIDTGRRALTF

SEQ ID NO: 766576 - protein, 15 aa, Homo sapiens
  CDR3 for beta chain variable domain of TCR clone 383288 (TRBV6-6, TRBJ2-5)
CASSPGGGLEETQYF

SEQ ID NO: 766577 - protein, 16 aa, Homo sapiens
  CDR3 for alpha chain variable domain of TCR clone 383289 (TRAV21, TRAJ52)
CAVTNAGGTSYGKLTF

SEQ ID NO: 766578 - protein, 11 aa, Homo sapiens
  CDR3 for beta chain variable domain of TCR clone 383289 (TRBV2, TRBJ1-1)
CASSEGTEAFF

SEQ ID NO: 766579 - protein, 12 aa, Homo sapiens
  CDR3 for alpha chain variable domain of TCR clone 383290 (TRAV3, TRAJ43)
CAVRDPNNDMRF

SEQ ID NO: 766580 - protein, 15 aa, Homo sapiens
  CDR3 for beta chain variable domain of TCR clone 383290 (TRBV4-3, TRBJ2-7)
CASSQGDWGGYEQYF

SEQ ID NO: 766581 - protein, 15 aa, Homo sapiens
  CDR3 for alpha chain variable domain of TCR clone 383291 (TRAV17, TRAJ57)
CATGPSQGGSEKLVF

SEQ ID NO: 766582 - protein, 17 aa, Homo sapiens
  CDR3 for beta chain variable domain of TCR clone 383291 (TRBV25-1, TRBJ1-4)
CASSPGDSTNEKLFLAV

SEQ ID NO: 766583 - protein, 17 aa, Homo sapiens
  CDR3 for alpha chain variable domain of TCR clone 383292 (TRAV8-6, TRAJ32)
CAVSALWWCYKQAHLLN

SEQ ID NO: 766584 - protein, 13 aa, Homo sapiens
  CDR3 for beta chain variable domain of TCR clone 383292 (TRBV11-2, TRBJ2-5)
CASGHGAKETQYF

SEQ ID NO: 766585 - protein, 14 aa, Homo sapiens
  CDR3 for alpha chain variable domain of TCR clone 383293 (TRAV25, TRAJ35)
CARRMEGFGNVLHC

SEQ ID NO: 766586 - protein, 15 aa, Homo sapiens
  CDR3 for beta chain variable domain of TCR clone 383293 (TRBV9, TRBJ2-1)
CASSLAGRSYNEQFF

SEQ ID NO: 766587 - protein, 17 aa, Homo sapiens
  CDR3 for alpha chain variable domain of TCR clone 383294 (TRAV3, TRAJ12)
CAVRDGGWMDSSYKLIF

SEQ ID NO: 766588 - protein, 12 aa, Homo sapiens
  CDR3 for beta chain variable domain of TCR clone 383294 (TRBV11-2, TRBJ2-2)
CASGLGGGELFF

SEQ ID NO: 766589 - protein, 13 aa, Homo sapiens
  CDR3 for alpha chain variable domain of TCR clone 383295 (TRAV13-2, TRAJ5)
CAVMDTGRRALTF

SEQ ID NO: 766590 - protein, 14 aa, Homo sapiens
  CDR3 for beta chain variable domain of TCR clone 383295 (TRBV10-3, TRBJ1-2)
CAISELQGPYGYTF

SEQ ID NO: 766591 - protein, 12 aa, Homo sapiens
  CDR3 for alpha chain variable domain of TCR clone 383296 (TRAV12-2, TRAJ8)
CAMNTGFQKLVF

SEQ ID NO: 766592 - protein, 15 aa, Homo sapiens
  CDR3 for beta chain variable domain of TCR clone 383296 (TRBV7-8, TRBJ1-5)
CASSLERRGLEPQHF

SEQ ID NO: 766593 - protein, 13 aa, Homo sapiens
  CDR3 for alpha chain variable domain of TCR clone 383297 (TRAV3, TRAJ21)
CAVREPDFNKFYF

SEQ ID NO: 766594 - protein, 16 aa, Homo sapiens
  CDR3 for beta chain variable domain of TCR clone 383297 (TRBV4-3, TRBJ2-2)
CASSHLQGSGTGELFF

SEQ ID NO: 766595 - protein, 14 aa, Homo sapiens
  CDR3 for alpha chain variable domain of TCR clone 383298 (TRAV8-4, TRAJ27)
CAGSKGTNAGKSTF

SEQ ID NO: 766596 - protein, 16 aa, Homo sapiens
  CDR3 for beta chain variable domain of TCR clone 383298 (TRBV2, TRBJ2-7)
CASSPTRRGSSYEQYF

SEQ ID NO: 766597 - protein, 14 aa, Homo sapiens
  CDR3 for alpha chain variable domain of TCR clone 383299 (TRAV26-1, TRAJ34)
CIVRVAYNTDKLIF

SEQ ID NO: 766598 - protein, 14 aa, Homo sapiens
  CDR3 for beta chain variable domain of TCR clone 383299 (TRBV7-2, TRBJ2-7)
CASSPKTSFYEQYF

SEQ ID NO: 766599 - protein, 16 aa, Homo sapiens
  CDR3 for alpha chain variable domain of TCR clone 383300 (TRAV12-2, TRAJ52)
CAVNNRGGTSYGKLTF

SEQ ID NO: 766600 - protein, 13 aa, Homo sapiens
  CDR3 for beta chain variable domain of TCR clone 383300 (TRBV12-4, TRBJ1-2)
CASSLRQGKGYTF

SEQ ID NO: 766601 - protein, 16 aa, Homo sapiens
  CDR3 for alpha chain variable domain of TCR clone 383301 (TRAV8-3, TRAJ44)
CAVGASNTGTASKLTF

SEQ ID NO: 766602 - protein, 15 aa, Homo sapiens
  CDR3 for beta chain variable domain of TCR clone 383301 (TRBV7-6, TRBJ2-1)
CASSLGGQSHNEQFF

SEQ ID NO: 766603 - protein, 15 aa, Homo sapiens
  CDR3 for alpha chain variable domain of TCR clone 383302 (TRAV12-3, TRAJ6)
CAMSATTGGSYIPTF

SEQ ID NO: 766604 - protein, 16 aa, Homo sapiens
  CDR3 for beta chain variable domain of TCR clone 383302 (TRBV20-1, TRBJ1-2)
CSVSIGQGVANYGYTF

SEQ ID NO: 766605 - protein, 14 aa, Homo sapiens
  CDR3 for alpha chain variable domain of TCR clone 383303 (TRAV16, TRAJ26)
CALSSANYGKNFVS

SEQ ID NO: 766606 - protein, 16 aa, Homo sapiens
  CDR3 for beta chain variable domain of TCR clone 383303 (TRBV20-1, TRBJ1-4)
CSAPGQGLLTNEKLFF

SEQ ID NO: 766607 - protein, 13 aa, Homo sapiens
  CDR3 for alpha chain variable domain of TCR clone 383304 (TRAV26-2, TRAJ54)
FIPRVGGAQKLVF

SEQ ID NO: 766608 - protein, 16 aa, Homo sapiens
  CDR3 for beta chain variable domain of TCR clone 383304 (TRBV4-1, TRBJ1-1)
CASSSMSERPNTEAFF

SEQ ID NO: 766609 - protein, 13 aa, Homo sapiens
  CDR3 for alpha chain variable domain of TCR clone 383305 (TRAV35, TRAJ57)
CAGSQGGSEKIVF

SEQ ID NO: 766610 - protein, 14 aa, Homo sapiens
  CDR3 for beta chain variable domain of TCR clone 383305 (TRBV25-1, TRBJ1-1)
CASTHLGGNTEAFF

SEQ ID NO: 766611 - protein, 13 aa, Homo sapiens
  CDR3 for alpha chain variable domain of TCR clone 383306 (TRAV21, TRAJ27)
CAARPGNAGKSTF

SEQ ID NO: 766612 - protein, 14 aa, Homo sapiens
  CDR3 for beta chain variable domain of TCR clone 383306 (TRBV7-9, TRBJ1-2)
CASSRQGAKYGYTF

SEQ ID NO: 766613 - protein, 19 aa, Homo sapiens
  CDR3 for alpha chain variable domain of TCR clone 383307 (TRAV26-1, TRAJ52)
CIVRAHRNAGGSSYGKLTF

SEQ ID NO: 766614 - protein, 15 aa, Homo sapiens
  CDR3 for beta chain variable domain of TCR clone 383307 (TRBV29-1, TRBJ2-1)
CSGRDRKSSYNEQFF

SEQ ID NO: 766615 - protein, 16 aa, Homo sapiens
  CDR3 for alpha chain variable domain of TCR clone 383308 (TRAV12-3, TRAJ53)
YAMSPGSGGSNYKLTF

SEQ ID NO: 766616 - protein, 15 aa, Homo sapiens
  CDR3 for beta chain variable domain of TCR clone 383308 (TRBV25-1, TRBJ1-4)
CASSKRIATNEKLFF

SEQ ID NO: 766617 - protein, 16 aa, Homo sapiens
  CDR3 for alpha chain variable domain of TCR clone 383309 (TRAV12-3, TRAJ53)
CAMSPGSGGSNYKLTF

SEQ ID NO: 766618 - protein, 12 aa, Homo sapiens
  CDR3 for beta chain variable domain of TCR clone 383309 (TRBV7-8, TRBJ2-7)
CASSIGDREQYF

SEQ ID NO: 766619 - protein, 15 aa, Homo sapiens
  CDR3 for alpha chain variable domain of TCR clone 383310 (TRAV3, TRAJ42)
CAVRGGTGSQGNLVF

SEQ ID NO: 766620 - protein, 14 aa, Homo sapiens
  CDR3 for beta chain variable domain of TCR clone 383310 (TRBV19, TRBJ1-2)
CASSSLVARDVYTF

SEQ ID NO: 766621 - protein, 11 aa, Homo sapiens
  CDR3 for alpha chain variable domain of TCR clone 383311 (TRAV1-1, TRAJ23)
CAVRQGGKLIF

SEQ ID NO: 766622 - protein, 15 aa, Homo sapiens
  CDR3 for beta chain variable domain of TCR clone 383311 (TRBV11-2, TRBJ2-3)
CASSPGGGATDTQYF

SEQ ID NO: 766623 - protein, 13 aa, Homo sapiens
  CDR3 for alpha chain variable domain of TCR clone 383312 (TRAV12-1, TRAJ21)
CVVSLYNFNKFYF

SEQ ID NO: 766624 - protein, 20 aa, Homo sapiens
  CDR3 for beta chain variable domain of TCR clone 383312 (TRBV7-8, TRBJ2-1)
CASSLAHRLARVRSYNEQFF

SEQ ID NO: 766625 - protein, 16 aa, Homo sapiens
  CDR3 for alpha chain variable domain of TCR clone 383313 (TRAV3, TRAJ37)
CAVRGKGSGNTGKLIL

SEQ ID NO: 766626 - protein, 14 aa, Homo sapiens
  CDR3 for beta chain variable domain of TCR clone 383313 (TRBV7-9, TRBJ2-5)
CASSLEGGEETQYF

SEQ ID NO: 766627 - protein, 17 aa, Homo sapiens
  CDR3 for alpha chain variable domain of TCR clone 383314 (TRAV8-1, TRAJ43)
CAVTNDMRFGAGTRLTV

SEQ ID NO: 766628 - protein, 13 aa, Homo sapiens
  CDR3 for beta chain variable domain of TCR clone 383314 (TRBV12-5, TRBJ2-1)
CASGLGRGNEQFF

SEQ ID NO: 766629 - protein, 12 aa, Homo sapiens
  CDR3 for alpha chain variable domain of TCR clone 383315 (TRAV12-3, TRAJ17)
CAMTLTGNKLTF

SEQ ID NO: 766630 - protein, 15 aa, Homo sapiens
  CDR3 for beta chain variable domain of TCR clone 383315 (TRBV20-1, TRBJ2-1)
CSAEGGLLAGDEQFF

SEQ ID NO: 766631 - protein, 16 aa, Homo sapiens
  CDR3 for alpha chain variable domain of TCR clone 383316 (TRAV30, TRAJ24)
CGTEIVDADSWGKFPF

SEQ ID NO: 766632 - protein, 14 aa, Homo sapiens
  CDR3 for beta chain variable domain of TCR clone 383316 (TRBV12-5, TRBJ2-5)
CASGSRTHQGTQYF

SEQ ID NO: 766633 - protein, 14 aa, Homo sapiens
  CDR3 for alpha chain variable domain of TCR clone 383317 (TRAV1-2, TRAJ8)
CAVREDTGFQKLVF

SEQ ID NO: 766634 - protein, 12 aa, Homo sapiens
  CDR3 for beta chain variable domain of TCR clone 383317 (TRBV14, TRBJ2-7)
CARNRLKGEQYF

SEQ ID NO: 766635 - protein, 14 aa, Homo sapiens
  CDR3 for alpha chain variable domain of TCR clone 383318 (TRAV26-1, TRAJ21)
FIVRPPYNFNKFYF

SEQ ID NO: 766636 - protein, 14 aa, Homo sapiens
  CDR3 for beta chain variable domain of TCR clone 383318 (TRBV19, TRBJ2-1)
CASPTFVLSGEQFF

SEQ ID NO: 766637 - protein, 17 aa, Homo sapiens
  CDR3 for alpha chain variable domain of TCR clone 383319 (TRAV35, TRAJ38)
CAGQLQRNAGNNRKLIW

SEQ ID NO: 766638 - protein, 16 aa, Homo sapiens
  CDR3 for beta chain variable domain of TCR clone 383319 (TRBV27, TRBJ2-1)
SMNVEPGTSGDNEQFF

SEQ ID NO: 766639 - protein, 13 aa, Homo sapiens
  CDR3 for alpha chain variable domain of TCR clone 383320 (TRAV36/DV7, TRAJ49)
CAGDSNTVNQFYF

SEQ ID NO: 766640 - protein, 12 aa, Homo sapiens
  CDR3 for beta chain variable domain of TCR clone 383320 (TRBV11-2, TRBJ2-2)
CASSLGGGELFF

SEQ ID NO: 766641 - protein, 13 aa, Homo sapiens
  CDR3 for alpha chain variable domain of TCR clone 383321 (TRAV12-3, TRAJ50)
CARGGTSYDKVIF

SEQ ID NO: 766642 - protein, 13 aa, Homo sapiens
  CDR3 for beta chain variable domain of TCR clone 383321 (TRBV12-4, TRBJ1-2)
CASSLRQGKGYTF

SEQ ID NO: 766643 - protein, 14 aa, Homo sapiens
  CDR3 for alpha chain variable domain of TCR clone 383322 (TRAV8-3, TRAJ24)
CAVGSTDSWGKLQF

SEQ ID NO: 766644 - protein, 20 aa, Homo sapiens
  CDR3 for beta chain variable domain of TCR clone 383322 (TRBV7-8, TRBJ2-2)
CASSHLFPGPTIHITGELFF

SEQ ID NO: 766645 - protein, 14 aa, Homo sapiens
  CDR3 for alpha chain variable domain of TCR clone 383323 (TRAV8-4, TRAJ34)
CAVSDHGDTDKLIF

SEQ ID NO: 766646 - protein, 14 aa, Homo sapiens
  CDR3 for beta chain variable domain of TCR clone 383323 (TRBV20-1, TRBJ2-5)
CSARDGRAGETQYF

SEQ ID NO: 766647 - protein, 14 aa, Homo sapiens
  CDR3 for alpha chain variable domain of TCR clone 383324 (TRAV12-3, TRAJ10)
SHLPLTGGGNKLTF

SEQ ID NO: 766648 - protein, 13 aa, Homo sapiens
  CDR3 for beta chain variable domain of TCR clone 383324 (TRBV10-3, TRBJ2-7)
CASKLVVNYEQYF

SEQ ID NO: 766649 - protein, 14 aa, Homo sapiens
  CDR3 for alpha chain variable domain of TCR clone 383325 (TRAV13-1, TRAJ10)
CAATEPGGGNKLTF

SEQ ID NO: 766650 - protein, 14 aa, Homo sapiens
  CDR3 for beta chain variable domain of TCR clone 383325 (TRBV6-6, TRBJ2-7)
CASSDSGAGYEQYF

SEQ ID NO: 766651 - protein, 12 aa, Homo sapiens
  CDR3 for alpha chain variable domain of TCR clone 383326 (TRAV12-3, TRAJ17)
CAMTLTGNKLTF

SEQ ID NO: 766652 - protein, 13 aa, Homo sapiens
  CDR3 for beta chain variable domain of TCR clone 383326 (TRBV19, TRBJ2-7)
CASSPRQSHEQYF

SEQ ID NO: 766653 - protein, 13 aa, Homo sapiens
  CDR3 for alpha chain variable domain of TCR clone 383327 (TRAV3, TRAJ27)
CAVRPLGAGKSTF

SEQ ID NO: 766654 - protein, 13 aa, Homo sapiens
  CDR3 for beta chain variable domain of TCR clone 383327 (TRBV4-2, TRBJ1-1)
CASSQAGNTEDFF

SEQ ID NO: 766655 - protein, 13 aa, Homo sapiens
  CDR3 for alpha chain variable domain of TCR clone 383328 (TRAV13-2, TRAJ48)
CAEMDLGNEKLTF

SEQ ID NO: 766656 - protein, 16 aa, Homo sapiens
  CDR3 for beta chain variable domain of TCR clone 383328 (TRBV25-1, TRBJ1-1)
CASSGDRDRGRIEAFF

SEQ ID NO: 766657 - protein, 16 aa, Homo sapiens
  CDR3 for alpha chain variable domain of TCR clone 383329 (TRAV30, TRAJ24)
CGTEIVDADSWGKFQF

SEQ ID NO: 766658 - protein, 17 aa, Homo sapiens
  CDR3 for beta chain variable domain of TCR clone 383329 (TRBV7-6, TRBJ2-1)
CASSFGLAGGTYNEQFF

SEQ ID NO: 766659 - protein, 17 aa, Homo sapiens
  CDR3 for alpha chain variable domain of TCR clone 383330 (TRAV3, TRAJ42)
CAVRDRDHGGSQGNLIL

SEQ ID NO: 766660 - protein, 15 aa, Homo sapiens
  CDR3 for beta chain variable domain of TCR clone 383330 (TRBV2, TRBJ2-7)
CASSEGLARSYEQYF

SEQ ID NO: 766661 - protein, 13 aa, Homo sapiens
  CDR3 for alpha chain variable domain of TCR clone 383331 (TRAV20, TRAJ20)
CAVQAGSGYKLSF

SEQ ID NO: 766662 - protein, 19 aa, Homo sapiens
  CDR3 for beta chain variable domain of TCR clone 383331 (TRBV25-1, TRBJ2-2)
CAILVYRVDRGRKTGELFF

SEQ ID NO: 766663 - protein, 15 aa, Homo sapiens
  CDR3 for alpha chain variable domain of TCR clone 383332 (TRAV12-3, TRAJ52)
CNGGAGGTSYGRLTF

SEQ ID NO: 766664 - protein, 13 aa, Homo sapiens
  CDR3 for beta chain variable domain of TCR clone 383332 (TRBV20-1, TRBJ2-5)
CSAIGDYQETQYF

SEQ ID NO: 766665 - protein, 13 aa, Homo sapiens
  CDR3 for alpha chain variable domain of TCR clone 383333 (TRAV27, TRAJ27)
CAGGITNAGKLTF

SEQ ID NO: 766666 - protein, 13 aa, Homo sapiens
  CDR3 for beta chain variable domain of TCR clone 383333 (TRBV20-1, TRBJ1-2)
CSASLGVGYGYTF

SEQ ID NO: 766667 - protein, 14 aa, Homo sapiens
  CDR3 for alpha chain variable domain of TCR clone 383334 (TRAV2, TRAJ22)
CAVGRGGSARQLTF

SEQ ID NO: 766668 - protein, 16 aa, Homo sapiens
  CDR3 for beta chain variable domain of TCR clone 383334 (TRBV5-5, TRBJ2-2)
CASSGRREGATGELFF

SEQ ID NO: 766669 - protein, 18 aa, Homo sapiens
  CDR3 for alpha chain variable domain of TCR clone 383335 (TRAV21, TRAJ52)
CAVRPSPAGGTSYVKLTF

SEQ ID NO: 766670 - protein, 17 aa, Homo sapiens
  CDR3 for beta chain variable domain of TCR clone 383335 (TRBV13, TRBJ2-3)
CASSPSRVAGGRNTQYF

SEQ ID NO: 766671 - protein, 17 aa, Homo sapiens
  CDR3 for alpha chain variable domain of TCR clone 383336 (TRAV17, TRAJ52)
CATERPSGGTSYGKLTF

SEQ ID NO: 766672 - protein, 15 aa, Homo sapiens
  CDR3 for beta chain variable domain of TCR clone 383336 (TRBV5-1, TRBJ2-1)
CASSLVANSYSEQFF

SEQ ID NO: 766673 - protein, 16 aa, Homo sapiens
  CDR3 for alpha chain variable domain of TCR clone 383337 (TRAV1-1, TRAJ37)
CAVRDKALATQANYSL

SEQ ID NO: 766674 - protein, 13 aa, Homo sapiens
  CDR3 for beta chain variable domain of TCR clone 383337 (TRBV7-3, TRBJ1-1)
CASSQDWGAEAFF

SEQ ID NO: 766675 - protein, 15 aa, Homo sapiens
  CDR3 for alpha chain variable domain of TCR clone 383338 (TRAV2, TRAJ37)
CAVGDGSSHTGKLIF

SEQ ID NO: 766676 - protein, 13 aa, Homo sapiens
  CDR3 for beta chain variable domain of TCR clone 383338 (TRBV20-1, TRBJ2-7)
CSAQTGLSYEQYF

SEQ ID NO: 766677 - protein, 12 aa, Homo sapiens
  CDR3 for alpha chain variable domain of TCR clone 383339 (TRAV21, TRAJ33)
CAKMDSNYQLLW

SEQ ID NO: 766678 - protein, 11 aa, Homo sapiens
  CDR3 for beta chain variable domain of TCR clone 383339 (TRBV11-2, TRBJ2-2)
CASSLPGELFF

SEQ ID NO: 766679 - protein, 12 aa, Homo sapiens
  CDR3 for alpha chain variable domain of TCR clone 383340 (TRAV16, TRAJ10)
CSRTGGGNKLTF

SEQ ID NO: 766680 - protein, 13 aa, Homo sapiens
  CDR3 for beta chain variable domain of TCR clone 383340 (TRBV20-1, TRBJ2-3)
CSAPGVGTDTQYF

SEQ ID NO: 766681 - protein, 14 aa, Homo sapiens
  CDR3 for alpha chain variable domain of TCR clone 383341 (TRAV8-3, TRAJ30)
CAVGEVNRDDKIIF

SEQ ID NO: 766682 - protein, 15 aa, Homo sapiens
  CDR3 for beta chain variable domain of TCR clone 383341 (TRBV10-3, TRBJ1-3)
CAISDSQGAGNTIYF

SEQ ID NO: 766683 - protein, 12 aa, Homo sapiens
  CDR3 for alpha chain variable domain of TCR clone 383342 (TRAV12-2, TRAJ16)
CAVNLDGQNLLF

SEQ ID NO: 766684 - protein, 16 aa, Homo sapiens
  CDR3 for beta chain variable domain of TCR clone 383342 (TRBV7-9, TRBJ2-1)
CASSLVLTGQGNEQFF

SEQ ID NO: 766685 - protein, 15 aa, Homo sapiens
  CDR3 for alpha chain variable domain of TCR clone 383343 (TRAV12-1, TRAJ5)
CVVNMLETGRRALTF

SEQ ID NO: 766686 - protein, 13 aa, Homo sapiens
  CDR3 for beta chain variable domain of TCR clone 383343 (TRBV14, TRBJ1-5)
CTSSQDRRGPQHF

SEQ ID NO: 766687 - protein, 14 aa, Homo sapiens
  CDR3 for alpha chain variable domain of TCR clone 383344 (TRAV4, TRAJ13)
CLVGYSGGYQQVTF

SEQ ID NO: 766688 - protein, 14 aa, Homo sapiens
  CDR3 for beta chain variable domain of TCR clone 383344 (TRBV6-5, TRBJ1-5)
CASSFRQFNQPQHF

SEQ ID NO: 766689 - protein, 17 aa, Homo sapiens
  CDR3 for alpha chain variable domain of TCR clone 383345 (TRAV23/DV6, TRAJ58)
CAARLLRGETSGSRLTF

SEQ ID NO: 766690 - protein, 14 aa, Homo sapiens
  CDR3 for beta chain variable domain of TCR clone 383345 (TRBV20-1, TRBJ1-1)
CSAQTRIGGTEAFF

SEQ ID NO: 766691 - protein, 13 aa, Homo sapiens
  CDR3 for alpha chain variable domain of TCR clone 383346 (TRAV12-2, TRAJ26)
CAVTENYGQNFVF

SEQ ID NO: 766692 - protein, 13 aa, Homo sapiens
  CDR3 for beta chain variable domain of TCR clone 383346 (TRBV18, TRBJ2-2)
CASSPTRGGELFF

SEQ ID NO: 766693 - protein, 12 aa, Homo sapiens
  CDR3 for alpha chain variable domain of TCR clone 383347 (TRAV12-3, TRAJ34)
CAMGHNTYKLIF

SEQ ID NO: 766694 - protein, 14 aa, Homo sapiens
  CDR3 for beta chain variable domain of TCR clone 383347 (TRBV4-1, TRBJ2-2)
CASSQAVNTGELFF

SEQ ID NO: 766695 - protein, 14 aa, Homo sapiens
  CDR3 for alpha chain variable domain of TCR clone 383348 (TRAV3, TRAJ28)
CAVRRGLGVTNSLS

SEQ ID NO: 766696 - protein, 16 aa, Homo sapiens
  CDR3 for beta chain variable domain of TCR clone 383348 (TRBV4-1, TRBJ2-7)
GASSQEWTSGPLEQYF

SEQ ID NO: 766697 - protein, 15 aa, Homo sapiens
  CDR3 for alpha chain variable domain of TCR clone 383349 (TRAV25, TRAJ53)
CPTSNSGGSNYKLTF

SEQ ID NO: 766698 - protein, 16 aa, Homo sapiens
  CDR3 for beta chain variable domain of TCR clone 383349 (TRBV5-1, TRBJ2-2)
CASSARTGGRTGELFF

SEQ ID NO: 766699 - protein, 10 aa, Homo sapiens
  CDR3 for alpha chain variable domain of TCR clone 383350 (TRAV13-1, TRAJ26)
CAARRLWSEF

SEQ ID NO: 766700 - protein, 12 aa, Homo sapiens
  CDR3 for beta chain variable domain of TCR clone 383350 (TRBV24-1, TRBJ1-1)
CATLYPDTEAFF

SEQ ID NO: 766701 - protein, 17 aa, Homo sapiens
  CDR3 for alpha chain variable domain of TCR clone 383351 (TRAV1-2, TRAJ8)
CAVRDPDENTGFQKLVF

SEQ ID NO: 766702 - protein, 16 aa, Homo sapiens
  CDR3 for beta chain variable domain of TCR clone 383351 (TRBV7-9, TRBJ2-2)
CASSGFGGENTGELFF

SEQ ID NO: 766703 - protein, 11 aa, Homo sapiens
  CDR3 for alpha chain variable domain of TCR clone 383352 (TRAV12-3, TRAJ27)
CAMANAGKSTF

SEQ ID NO: 766704 - protein, 17 aa, Homo sapiens
  CDR3 for beta chain variable domain of TCR clone 383352 (TRBV11-2, TRBJ2-4)
CASSSVGPGGHRNIQYF

SEQ ID NO: 766705 - protein, 16 aa, Homo sapiens
  CDR3 for alpha chain variable domain of TCR clone 383353 (TRAV12-2, TRAJ40)
CAVIRGGTSGTYKYIF

SEQ ID NO: 766706 - protein, 14 aa, Homo sapiens
  CDR3 for beta chain variable domain of TCR clone 383353 (TRBV7-9, TRBJ2-1)
CASSPRDSLYEQFF

SEQ ID NO: 766707 - protein, 15 aa, Homo sapiens
  CDR3 for alpha chain variable domain of TCR clone 383354 (TRAV12-3, TRAJ6)
CAMSATTGGSYIPTF

SEQ ID NO: 766708 - protein, 15 aa, Homo sapiens
  CDR3 for beta chain variable domain of TCR clone 383354 (TRBV2, TRBJ2-1)
CASDIGLAGEGEQFF

SEQ ID NO: 766709 - protein, 16 aa, Homo sapiens
  CDR3 for alpha chain variable domain of TCR clone 383355 (TRAV30, TRAJ24)
CGTEIVDATSWGKFQF

SEQ ID NO: 766710 - protein, 14 aa, Homo sapiens
  CDR3 for beta chain variable domain of TCR clone 383355 (TRBV12-5, TRBJ2-5)
CASGSRTHQETQYF

SEQ ID NO: 766711 - protein, 14 aa, Homo sapiens
  CDR3 for alpha chain variable domain of TCR clone 383356 (TRAV34, TRAJ22)
CGADTSGSARQLTF

SEQ ID NO: 766712 - protein, 17 aa, Homo sapiens
  CDR3 for beta chain variable domain of TCR clone 383356 (TRBV5-4, TRBJ2-1)
CASSSAGGRGPYNEQFF

SEQ ID NO: 766713 - protein, 12 aa, Homo sapiens
  CDR3 for alpha chain variable domain of TCR clone 383357 (TRAV21, TRAJ13)
PGPSGGYQKVTF

SEQ ID NO: 766714 - protein, 15 aa, Homo sapiens
  CDR3 for beta chain variable domain of TCR clone 383357 (TRBV7-9, TRBJ1-6)
CASSSPGRGNSPPHF

SEQ ID NO: 766715 - protein, 11 aa, Homo sapiens
  CDR3 for alpha chain variable domain of TCR clone 383358 (TRAV3, TRAJ49)
WAPITGNQFYF

SEQ ID NO: 766716 - protein, 16 aa, Homo sapiens
  CDR3 for beta chain variable domain of TCR clone 383358 (TRBV5-1, TRBJ2-3)
CASSVFPMSSTDTQYF

SEQ ID NO: 766717 - protein, 16 aa, Homo sapiens
  CDR3 for alpha chain variable domain of TCR clone 383359 (TRAV20, TRAJ28)
CAVRDPSGAGSYQLTF

SEQ ID NO: 766718 - protein, 15 aa, Homo sapiens
  CDR3 for beta chain variable domain of TCR clone 383359 (TRBV5-1, TRBJ2-1)
CASSPPRAPYNEQFF

SEQ ID NO: 766719 - protein, 23 aa, Homo sapiens
  CDR3 for alpha chain variable domain of TCR clone 383360 (TRAV26-1, TRAJ38)
CIADNAGNNHIQNPDPAVYQLRD

SEQ ID NO: 766720 - protein, 13 aa, Homo sapiens
  CDR3 for beta chain variable domain of TCR clone 383360 (TRBV12-4, TRBJ1-3)
CASSLASGNTIYF

SEQ ID NO: 766721 - protein, 14 aa, Homo sapiens
  CDR3 for alpha chain variable domain of TCR clone 383361 (TRAV1-2, TRAJ16)
CAVNRFSDGEKLLF

SEQ ID NO: 766722 - protein, 14 aa, Homo sapiens
  CDR3 for beta chain variable domain of TCR clone 383361 (TRBV23-1, TRBJ2-5)
CASSFLRSQETQYF

SEQ ID NO: 766723 - protein, 14 aa, Homo sapiens
  CDR3 for alpha chain variable domain of TCR clone 383362 (TRAV1-2, TRAJ16)
CAVNRFSDGQKLLF

SEQ ID NO: 766724 - protein, 12 aa, Homo sapiens
  CDR3 for beta chain variable domain of TCR clone 383362 (TRBV11-2, TRBJ2-2)
CASSLPTGEPFF

SEQ ID NO: 766725 - protein, 14 aa, Homo sapiens
  CDR3 for alpha chain variable domain of TCR clone 383363 (TRAV12-3, TRAJ10)
SHLPLTGGGNKLTF

SEQ ID NO: 766726 - protein, 12 aa, Homo sapiens
  CDR3 for beta chain variable domain of TCR clone 383363 (TRBV7-3, TRBJ2-5)
CASSSPGGTQYL

SEQ ID NO: 766727 - protein, 11 aa, Homo sapiens
  CDR3 for alpha chain variable domain of TCR clone 383364 (TRAV1-2, TRAJ31)
CALNNNAGLMF

SEQ ID NO: 766728 - protein, 15 aa, Homo sapiens
  CDR3 for beta chain variable domain of TCR clone 383364 (TRBV28, TRBJ2-1)
CASSIIAGGRSEQFF

SEQ ID NO: 766729 - protein, 15 aa, Homo sapiens
  CDR3 for alpha chain variable domain of TCR clone 383365 (TRAV26-2, TRAJ13)
CILRDLSGGYQKVTF

SEQ ID NO: 766730 - protein, 13 aa, Homo sapiens
  CDR3 for beta chain variable domain of TCR clone 383365 (TRBV7-9, TRBJ1-2)
CASSLKQNYGYPF

SEQ ID NO: 766731 - protein, 16 aa, Homo sapiens
  CDR3 for alpha chain variable domain of TCR clone 383366 (TRAV21, TRAJ37)
CAVRTAGSSNTGKLIS

SEQ ID NO: 766732 - protein, 13 aa, Homo sapiens
  CDR3 for beta chain variable domain of TCR clone 383366 (TRBV7-9, TRBJ2-5)
CASLPSGRETQYF

SEQ ID NO: 766733 - protein, 15 aa, Homo sapiens
  CDR3 for alpha chain variable domain of TCR clone 383367 (TRAV17, TRAJ16)
CATALRFSDSQKLLF

SEQ ID NO: 766734 - protein, 15 aa, Homo sapiens
  CDR3 for beta chain variable domain of TCR clone 383367 (TRBV13, TRBJ1-5)
CASSFGQGGVQPQHF

SEQ ID NO: 766735 - protein, 18 aa, Homo sapiens
  CDR3 for alpha chain variable domain of TCR clone 383368 (TRAV12-2, )
CAVEDIQNPDPAVYQLRD

SEQ ID NO: 766736 - protein, 13 aa, Homo sapiens
  CDR3 for beta chain variable domain of TCR clone 383368 (TRBV15, TRBJ1-6)
CATSGGLNSPLHF

SEQ ID NO: 766737 - protein, 15 aa, Homo sapiens
  CDR3 for alpha chain variable domain of TCR clone 383369 (TRAV27, TRAJ38)
CAARRNAGNNRKPIW

SEQ ID NO: 766738 - protein, 14 aa, Homo sapiens
  CDR3 for beta chain variable domain of TCR clone 383369 (TRBV7-8, TRBJ2-3)
CASSLEAGTDTQYF

SEQ ID NO: 766739 - protein, 14 aa, Homo sapiens
  CDR3 for alpha chain variable domain of TCR clone 383370 (TRAV4, TRAJ17)
CLVGPRAAGNKLTF

SEQ ID NO: 766740 - protein, 16 aa, Homo sapiens
  CDR3 for beta chain variable domain of TCR clone 383370 (TRBV19, TRBJ2-3)
CASSPGAASRTDTQYF

SEQ ID NO: 766741 - protein, 13 aa, Homo sapiens
  CDR3 for alpha chain variable domain of TCR clone 383371 (TRAV26-2, TRAJ43)
CILRAVNNNDMRF

SEQ ID NO: 766742 - protein, 13 aa, Homo sapiens
  CDR3 for beta chain variable domain of TCR clone 383371 (TRBV14, TRBJ2-1)
CASSQDRRNGQFF

SEQ ID NO: 766743 - protein, 15 aa, Homo sapiens
  CDR3 for alpha chain variable domain of TCR clone 383372 (TRAV23/DV6, TRAJ4)
CAASLLSGGYNKLIF

SEQ ID NO: 766744 - protein, 15 aa, Homo sapiens
  CDR3 for beta chain variable domain of TCR clone 383372 (TRBV7-9, TRBJ1-5)
CASSQGHQPNQPQHF

SEQ ID NO: 766745 - protein, 14 aa, Homo sapiens
  CDR3 for alpha chain variable domain of TCR clone 383373 (TRAV1-2, TRAJ8)
CAVREDTGFQKLVF

SEQ ID NO: 766746 - protein, 17 aa, Homo sapiens
  CDR3 for beta chain variable domain of TCR clone 383373 (TRBV20-1, TRBJ2-3)
CSASLLGRGGSADTQYF

SEQ ID NO: 766747 - protein, 14 aa, Homo sapiens
  CDR3 for alpha chain variable domain of TCR clone 383374 (TRAV8-4, TRAJ48)
CAVSETFGNEKLIF

SEQ ID NO: 766748 - protein, 14 aa, Homo sapiens
  CDR3 for beta chain variable domain of TCR clone 383374 (TRBV13, TRBJ2-7)
CASSLKGASYEQYF

SEQ ID NO: 766749 - protein, 12 aa, Homo sapiens
  CDR3 for alpha chain variable domain of TCR clone 383375 (TRAV12-3, TRAJ32)
CAGGGATNKLIF

SEQ ID NO: 766750 - protein, 13 aa, Homo sapiens
  CDR3 for beta chain variable domain of TCR clone 383375 (TRBV10-2, TRBJ2-7)
CASGASGGYEQYF

SEQ ID NO: 766751 - protein, 12 aa, Homo sapiens
  CDR3 for alpha chain variable domain of TCR clone 383376 (TRAV12-2, TRAJ10)
WGVTGGGNKLTF

SEQ ID NO: 766752 - protein, 10 aa, Homo sapiens
  CDR3 for beta chain variable domain of TCR clone 383376 (TRBV2, TRBJ2-5)
CASSAATQYF

SEQ ID NO: 766753 - protein, 13 aa, Homo sapiens
  CDR3 for alpha chain variable domain of TCR clone 383377 (TRAV13-2, TRAJ13)
CAERPGGYQKVTF

SEQ ID NO: 766754 - protein, 14 aa, Homo sapiens
  CDR3 for beta chain variable domain of TCR clone 383377 (TRBV23-1, TRBJ2-5)
CPSSFLRSQETQYF

SEQ ID NO: 766755 - protein, 13 aa, Homo sapiens
  CDR3 for alpha chain variable domain of TCR clone 383378 (TRAV8-3, TRAJ28)
CAVVAVGSYQLTF

SEQ ID NO: 766756 - protein, 14 aa, Homo sapiens
  CDR3 for beta chain variable domain of TCR clone 383378 (TRBV25-1, TRBJ1-1)
CASTHLGGNTEAFF

SEQ ID NO: 766757 - protein, 11 aa, Homo sapiens
  CDR3 for alpha chain variable domain of TCR clone 383379 (TRAV21, TRAJ34)
CASLDTDKLIF

SEQ ID NO: 766758 - protein, 16 aa, Homo sapiens
  CDR3 for beta chain variable domain of TCR clone 383379 (TRBV5-1, TRBJ2-3)
RASSLAGDRGTDTQYF

SEQ ID NO: 766759 - protein, 13 aa, Homo sapiens
  CDR3 for alpha chain variable domain of TCR clone 383380 (TRAV2, TRAJ15)
CAVASQAGTALIS

SEQ ID NO: 766760 - protein, 16 aa, Homo sapiens
  CDR3 for beta chain variable domain of TCR clone 383380 (TRBV18, TRBJ1-5)
CASSPYRVEGNQPQHF

SEQ ID NO: 766761 - protein, 14 aa, Homo sapiens
  CDR3 for alpha chain variable domain of TCR clone 383381 (TRAV1-2, TRAJ8)
CAVREDTGFQKLVF

SEQ ID NO: 766762 - protein, 14 aa, Homo sapiens
  CDR3 for beta chain variable domain of TCR clone 383381 (TRBV15, TRBJ2-3)
CATRSGTSTDAQYF

SEQ ID NO: 766763 - protein, 14 aa, Homo sapiens
  CDR3 for alpha chain variable domain of TCR clone 383382 (TRAV12-3, TRAJ47)
CAMSVWEYGNKLVF

SEQ ID NO: 766764 - protein, 15 aa, Homo sapiens
  CDR3 for beta chain variable domain of TCR clone 383382 (TRBV20-1, TRBJ2-2)
CSARDTRLNTGELFF

SEQ ID NO: 766765 - protein, 18 aa, Homo sapiens
  CDR3 for alpha chain variable domain of TCR clone 383383 (TRAV21, TRAJ52)
CAVRPSPAGGTSYGNLTF

SEQ ID NO: 766766 - protein, 17 aa, Homo sapiens
  CDR3 for beta chain variable domain of TCR clone 383383 (TRBV13, TRBJ2-3)
CASSRSRVAGGRNTQYF

SEQ ID NO: 766767 - protein, 14 aa, Homo sapiens
  CDR3 for alpha chain variable domain of TCR clone 383384 (TRAV26-2, TRAJ39)
CSLRGNNNAGNLLT

SEQ ID NO: 766768 - protein, 15 aa, Homo sapiens
  CDR3 for beta chain variable domain of TCR clone 383384 (TRBV5-4, TRBJ1-1)
CASSSLGWANTEAFF

SEQ ID NO: 766769 - protein, 13 aa, Homo sapiens
  CDR3 for alpha chain variable domain of TCR clone 383385 (TRAV12-2, TRAJ42)
CAVKRGSQGNLIF

SEQ ID NO: 766770 - protein, 14 aa, Homo sapiens
  CDR3 for beta chain variable domain of TCR clone 383385 (TRBV28, TRBJ1-2)
CASRIQGANYGYTF

SEQ ID NO: 766771 - protein, 16 aa, Homo sapiens
  CDR3 for alpha chain variable domain of TCR clone 383386 (TRAV12-1, TRAJ8)
CVVNGRGNTGFQKLVF

SEQ ID NO: 766772 - protein, 15 aa, Homo sapiens
  CDR3 for beta chain variable domain of TCR clone 383386 (TRBV7-9, TRBJ1-6)
CASSSPGRGNSPLHF

SEQ ID NO: 766773 - protein, 12 aa, Homo sapiens
  CDR3 for alpha chain variable domain of TCR clone 383387 (TRAV2, TRAJ9)
CAVGARDFKTIF

SEQ ID NO: 766774 - protein, 16 aa, Homo sapiens
  CDR3 for beta chain variable domain of TCR clone 383387 (TRBV13, TRBJ2-2)
CASSPRSGEHTWELFF

SEQ ID NO: 766775 - protein, 13 aa, Homo sapiens
  CDR3 for alpha chain variable domain of TCR clone 383388 (TRAV36/DV7, TRAJ33)
CAVDMDSNYQLIW

SEQ ID NO: 766776 - protein, 16 aa, Homo sapiens
  CDR3 for beta chain variable domain of TCR clone 383388 (TRBV15, TRBJ2-3)
CATRLAGGRAPDTQYF

SEQ ID NO: 766777 - protein, 14 aa, Homo sapiens
  CDR3 for alpha chain variable domain of TCR clone 383389 (TRAV8-2, TRAJ37)
CVVSISGNTGKLIF

SEQ ID NO: 766778 - protein, 14 aa, Homo sapiens
  CDR3 for beta chain variable domain of TCR clone 383389 (TRBV5-5, TRBJ2-7)
CASSAGYSSYEQYF

SEQ ID NO: 766779 - protein, 12 aa, Homo sapiens
  CDR3 for alpha chain variable domain of TCR clone 383390 (TRAV10, TRAJ31)
CVVRAHRARLMF

SEQ ID NO: 766780 - protein, 14 aa, Homo sapiens
  CDR3 for beta chain variable domain of TCR clone 383390 (TRBV23-1, TRBJ1-1)
CASSQRPLKGGAFF

SEQ ID NO: 766781 - protein, 14 aa, Homo sapiens
  CDR3 for alpha chain variable domain of TCR clone 383391 (TRAV29/DV5, TRAJ36)
CAARRKTGANNLFF

SEQ ID NO: 766782 - protein, 13 aa, Homo sapiens
  CDR3 for beta chain variable domain of TCR clone 383391 (TRBV15, TRBJ1-6)
CATAGGLNSPLHF

SEQ ID NO: 766783 - protein, 15 aa, Homo sapiens
  CDR3 for alpha chain variable domain of TCR clone 383392 (TRAV17, TRAJ4)
CATGTWSGGYNKLIF

SEQ ID NO: 766784 - protein, 12 aa, Homo sapiens
  CDR3 for beta chain variable domain of TCR clone 383392 (TRBV7-9, TRBJ2-7)
CASSLEGYEQYF

SEQ ID NO: 766785 - protein, 17 aa, Homo sapiens
  CDR3 for alpha chain variable domain of TCR clone 383393 (TRAV3, TRAJ6)
CAVIDGPRAGGSYIHTF

SEQ ID NO: 766786 - protein, 14 aa, Homo sapiens
  CDR3 for beta chain variable domain of TCR clone 383393 (TRBV7-2, TRBJ2-7)
CASSPKTSFYEQYF

SEQ ID NO: 766787 - protein, 13 aa, Homo sapiens
  CDR3 for alpha chain variable domain of TCR clone 383394 (TRAV29/DV5, TRAJ31)
CAASRNNNARIMF

SEQ ID NO: 766788 - protein, 16 aa, Homo sapiens
  CDR3 for beta chain variable domain of TCR clone 383394 (TRBV20-1, TRBJ1-4)
CSAPGQGLLTNEKLFF

SEQ ID NO: 766789 - protein, 13 aa, Homo sapiens
  CDR3 for alpha chain variable domain of TCR clone 383395 (TRAV3, TRAJ16)
CAVRDRNGQKLLF

SEQ ID NO: 766790 - protein, 14 aa, Homo sapiens
  CDR3 for beta chain variable domain of TCR clone 383395 (TRBV12-5, TRBJ2-5)
CASGSRTHQETQYF

SEQ ID NO: 766791 - protein, 12 aa, Homo sapiens
  CDR3 for alpha chain variable domain of TCR clone 383396 (TRAV17, TRAJ57)
CATDGGSEKLVF

SEQ ID NO: 766792 - protein, 13 aa, Homo sapiens
  CDR3 for beta chain variable domain of TCR clone 383396 (TRBV4-2, TRBJ1-1)
CASSQAGNTEAFF

SEQ ID NO: 766793 - protein, 14 aa, Homo sapiens
  CDR3 for alpha chain variable domain of TCR clone 383397 (TRAV12-2, TRAJ24)
CREQERDSWGKLQF

SEQ ID NO: 766794 - protein, 13 aa, Homo sapiens
  CDR3 for beta chain variable domain of TCR clone 383397 (TRBV12-5, TRBJ2-3)
CASGDRQSDTQYF

SEQ ID NO: 766795 - protein, 23 aa, Homo sapiens
  CDR3 for alpha chain variable domain of TCR clone 383398 (TRAV25, TRAJ26)
PAHHSHPDYRCRNRGVYSQNFVF

SEQ ID NO: 766796 - protein, 14 aa, Homo sapiens
  CDR3 for beta chain variable domain of TCR clone 383398 (TRBV7-6, TRBJ2-3)
CASSLGTVTDTQYF

SEQ ID NO: 766797 - protein, 14 aa, Homo sapiens
  CDR3 for alpha chain variable domain of TCR clone 383399 (TRAV26-1, TRAJ45)
CIEVTGGGADGLTF

SEQ ID NO: 766798 - protein, 15 aa, Homo sapiens
  CDR3 for beta chain variable domain of TCR clone 383399 (TRBV10-3, TRBJ2-1)
CAISGGREGSDEQFF

SEQ ID NO: 766799 - protein, 14 aa, Homo sapiens
  CDR3 for alpha chain variable domain of TCR clone 383400 (TRAV23/DV6, TRAJ6)
CAARWTGGSYIPTF

SEQ ID NO: 766800 - protein, 17 aa, Homo sapiens
  CDR3 for beta chain variable domain of TCR clone 383400 (TRBV28, TRBJ2-5)
CASSTPEGDALQETQYF

SEQ ID NO: 766801 - protein, 13 aa, Homo sapiens
  CDR3 for alpha chain variable domain of TCR clone 383401 (TRAV8-3, TRAJ28)
CAVGAVRSYQLTF

SEQ ID NO: 766802 - protein, 13 aa, Homo sapiens
  CDR3 for beta chain variable domain of TCR clone 383401 (TRBV19, TRBJ1-2)
CASSVPGQDGYTF

SEQ ID NO: 766803 - protein, 14 aa, Homo sapiens
  CDR3 for alpha chain variable domain of TCR clone 383402 (TRAV2, TRAJ37)
CAVDFTSNTGKLIF

SEQ ID NO: 766804 - protein, 15 aa, Homo sapiens
  CDR3 for beta chain variable domain of TCR clone 383402 (TRBV28, TRBJ2-1)
CASSPPGLADHEQFF

SEQ ID NO: 766805 - protein, 11 aa, Homo sapiens
  CDR3 for alpha chain variable domain of TCR clone 383403 (TRAV26-1, TRAJ37)
CIVRGGRKLIF

SEQ ID NO: 766806 - protein, 13 aa, Homo sapiens
  CDR3 for beta chain variable domain of TCR clone 383403 (TRBV14, TRBJ1-2)
CASSEDRRYGYTF

SEQ ID NO: 766807 - protein, 10 aa, Homo sapiens
  CDR3 for alpha chain variable domain of TCR clone 383404 (TRAV1-2, TRAJ31)
CAFFDSRLMF

SEQ ID NO: 766808 - protein, 13 aa, Homo sapiens
  CDR3 for beta chain variable domain of TCR clone 383404 (TRBV20-1, TRBJ2-2)
CSASAAGTGELFF

SEQ ID NO: 766809 - protein, 14 aa, Homo sapiens
  CDR3 for alpha chain variable domain of TCR clone 383405 (TRAV13-1, TRAJ44)
CAAKATGTASKLTF

SEQ ID NO: 766810 - protein, 22 aa, Homo sapiens
  CDR3 for beta chain variable domain of TCR clone 383405 (TRBV19, TRBJ2-1)
CASSVRDRVTGTSVRIYNEQFF

SEQ ID NO: 766811 - protein, 11 aa, Homo sapiens
  CDR3 for alpha chain variable domain of TCR clone 383406 (TRAV12-1, TRAJ34)
CVVNKGRELIF

SEQ ID NO: 766812 - protein, 12 aa, Homo sapiens
  CDR3 for beta chain variable domain of TCR clone 383406 (TRBV2, TRBJ2-1)
CAYWPPGNEQFF

SEQ ID NO: 766813 - protein, 15 aa, Homo sapiens
  CDR3 for alpha chain variable domain of TCR clone 383407 (TRAV3, TRAJ3)
CAVRDMSSSASKIIL

SEQ ID NO: 766814 - protein, 13 aa, Homo sapiens
  CDR3 for beta chain variable domain of TCR clone 383407 (TRBV20-1, TRBJ2-5)
CSARGDYQETQYF

SEQ ID NO: 766815 - protein, 17 aa, Homo sapiens
  CDR3 for alpha chain variable domain of TCR clone 383408 (TRAV3, TRAJ38)
CAVRDCLNACNNRKLIL

SEQ ID NO: 766816 - protein, 14 aa, Homo sapiens
  CDR3 for beta chain variable domain of TCR clone 383408 (TRBV5-5, TRBJ1-5)
CASSGQGVDQPQHF

SEQ ID NO: 766817 - protein, 15 aa, Homo sapiens
  CDR3 for alpha chain variable domain of TCR clone 383409 (TRAV34, TRAJ38)
CGADFTPGNNRKLIW

SEQ ID NO: 766818 - protein, 18 aa, Homo sapiens
  CDR3 for beta chain variable domain of TCR clone 383409 (TRBV11-2, TRBJ2-6)
CASSLNPFLGTGANVLTF

SEQ ID NO: 766819 - protein, 13 aa, Homo sapiens
  CDR3 for alpha chain variable domain of TCR clone 383410 (TRAV13-1, TRAJ5)
CAASDTGRRALTF

SEQ ID NO: 766820 - protein, 14 aa, Homo sapiens
  CDR3 for beta chain variable domain of TCR clone 383410 (TRBV7-8, TRBJ2-3)
CASSLEAGTDTQYF

SEQ ID NO: 766821 - protein, 13 aa, Homo sapiens
  CDR3 for alpha chain variable domain of TCR clone 383411 (TRAV8-3, TRAJ43)
CAVVPYNNNDMRF

SEQ ID NO: 766822 - protein, 17 aa, Homo sapiens
  CDR3 for beta chain variable domain of TCR clone 383411 (TRBV7-7, TRBJ1-1)
CASIVDRPNLGVTEAFF

SEQ ID NO: 766823 - protein, 14 aa, Homo sapiens
  CDR3 for alpha chain variable domain of TCR clone 383412 (TRAV26-1, TRAJ38)
CIADNAGNNRKLIW

SEQ ID NO: 766824 - protein, 13 aa, Homo sapiens
  CDR3 for beta chain variable domain of TCR clone 383412 (TRBV7-9, TRBJ2-1)
CASSLRLTHEQFF

SEQ ID NO: 766825 - protein, 12 aa, Homo sapiens
  CDR3 for alpha chain variable domain of TCR clone 383413 (TRAV4, TRAJ22)
CLVGDINYFLWF

SEQ ID NO: 766826 - protein, 13 aa, Homo sapiens
  CDR3 for beta chain variable domain of TCR clone 383413 (TRBV19, TRBJ1-5)
CASSEGSNQPQHF

SEQ ID NO: 766827 - protein, 15 aa, Homo sapiens
  CDR3 for alpha chain variable domain of TCR clone 383414 (TRAV12-3, TRAJ42)
CAMITSVGSQGNLIF

SEQ ID NO: 766828 - protein, 13 aa, Homo sapiens
  CDR3 for beta chain variable domain of TCR clone 383414 (TRBV25-1, TRBJ2-6)
CASRGPGANDLTF

SEQ ID NO: 766829 - protein, 13 aa, Homo sapiens
  CDR3 for alpha chain variable domain of TCR clone 383415 (TRAV12-3, TRAJ9)
CAMRNTVGFKTIF

SEQ ID NO: 766830 - protein, 16 aa, Homo sapiens
  CDR3 for beta chain variable domain of TCR clone 383415 (TRBV19, TRBJ2-1)
CASSIDGSLAYNEQFF

SEQ ID NO: 766831 - protein, 15 aa, Homo sapiens
  CDR3 for alpha chain variable domain of TCR clone 383416 (TRAV8-3, TRAJ27)
CAVGPSKTNGGKSTF

SEQ ID NO: 766832 - protein, 12 aa, Homo sapiens
  CDR3 for beta chain variable domain of TCR clone 383416 (TRBV11-2, TRBJ2-2)
CASSLGGGELFF

SEQ ID NO: 766833 - protein, 16 aa, Homo sapiens
  CDR3 for alpha chain variable domain of TCR clone 383417 (TRAV3, TRAJ10)
CAVRDMRAGGGNKLTF

SEQ ID NO: 766834 - protein, 14 aa, Homo sapiens
  CDR3 for beta chain variable domain of TCR clone 383417 (TRBV7-6, TRBJ2-4)
CASSPAPGSFLWYF

SEQ ID NO: 766835 - protein, 11 aa, Homo sapiens
  CDR3 for alpha chain variable domain of TCR clone 383418 (TRAV3, TRAJ21)
CAVGNFDKFYF

SEQ ID NO: 766836 - protein, 16 aa, Homo sapiens
  CDR3 for beta chain variable domain of TCR clone 383418 (TRBV19, TRBJ2-1)
CASSKAGLSSYNEQFF

SEQ ID NO: 766837 - protein, 14 aa, Homo sapiens
  CDR3 for alpha chain variable domain of TCR clone 383419 (TRAV12-2, TRAJ45)
CALPERGGADGLTF

SEQ ID NO: 766838 - protein, 14 aa, Homo sapiens
  CDR3 for beta chain variable domain of TCR clone 383419 (TRBV18, TRBJ1-5)
CASSPVNSNQPQHF

SEQ ID NO: 766839 - protein, 12 aa, Homo sapiens
  CDR3 for alpha chain variable domain of TCR clone 383420 (TRAV12-3, TRAJ17)
CAMTLTGNKLTF

SEQ ID NO: 766840 - protein, 15 aa, Homo sapiens
  CDR3 for beta chain variable domain of TCR clone 383420 (TRBV6-4, TRBJ2-7)
CASSDQGPSNYEQYF

SEQ ID NO: 766841 - protein, 11 aa, Homo sapiens
  CDR3 for alpha chain variable domain of TCR clone 383421 (TRAV17, TRAJ36)
CAPTGANNLFF

SEQ ID NO: 766842 - protein, 17 aa, Homo sapiens
  CDR3 for beta chain variable domain of TCR clone 383421 (TRBV24-1, TRBJ2-3)
CATSDLPSGEDTDTQYF

SEQ ID NO: 766843 - protein, 15 aa, Homo sapiens
  CDR3 for alpha chain variable domain of TCR clone 383422 (TRAV23/DV6, TRAJ13)
CASWPGGGGYQKVTF

SEQ ID NO: 766844 - protein, 17 aa, Homo sapiens
  CDR3 for beta chain variable domain of TCR clone 383422 (TRBV19, TRBJ2-7)
CASSISFYDSYPYEQYF

SEQ ID NO: 766845 - protein, 11 aa, Homo sapiens
  CDR3 for alpha chain variable domain of TCR clone 383423 (TRAV27, TRAJ45)
CAGAQKEVLTD

SEQ ID NO: 766846 - protein, 17 aa, Homo sapiens
  CDR3 for beta chain variable domain of TCR clone 383423 (TRBV11-2, TRBJ2-1)
CASSLYPPGVEYNEQFF

SEQ ID NO: 766847 - protein, 14 aa, Homo sapiens
  CDR3 for alpha chain variable domain of TCR clone 383424 (TRAV12-2, TRAJ17)
CAVLFKAAGNKLTF

SEQ ID NO: 766848 - protein, 15 aa, Homo sapiens
  CDR3 for beta chain variable domain of TCR clone 383424 (TRBV7-2, TRBJ2-5)
CASRGTSGREETQYF

SEQ ID NO: 766849 - protein, 14 aa, Homo sapiens
  CDR3 for alpha chain variable domain of TCR clone 383425 (TRAV1-2, TRAJ8)
CAVREDTGFQKLVF

SEQ ID NO: 766850 - protein, 17 aa, Homo sapiens
  CDR3 for beta chain variable domain of TCR clone 383425 (TRBV28, TRBJ2-7)
CASSPLHRASGVYEQYF

SEQ ID NO: 766851 - protein, 16 aa, Homo sapiens
  CDR3 for alpha chain variable domain of TCR clone 383426 (TRAV26-1, TRAJ33)
CIVPFWGEDSNYQLIW

SEQ ID NO: 766852 - protein, 20 aa, Homo sapiens
  CDR3 for beta chain variable domain of TCR clone 383426 (TRBV7-8, TRBJ2-2)
CASSHLFPGPTIHITGELFF

SEQ ID NO: 766853 - protein, 16 aa, Homo sapiens
  CDR3 for alpha chain variable domain of TCR clone 383427 (TRAV12-3, TRAJ53)
CAMSPGSGGSNYKLTF

SEQ ID NO: 766854 - protein, 11 aa, Homo sapiens
  CDR3 for beta chain variable domain of TCR clone 383427 (TRBV29-1, TRBJ2-5)
YSEDRTGTQYF

SEQ ID NO: 766855 - protein, 11 aa, Homo sapiens
  CDR3 for alpha chain variable domain of TCR clone 383428 (TRAV3, TRAJ21)
CAVGNFNKFYF

SEQ ID NO: 766856 - protein, 15 aa, Homo sapiens
  CDR3 for beta chain variable domain of TCR clone 383428 (TRBV5-1, TRBJ2-1)
CARSLVANSYNEQFF

SEQ ID NO: 766857 - protein, 14 aa, Homo sapiens
  CDR3 for alpha chain variable domain of TCR clone 383429 (TRAV16, TRAJ15)
CALSGPQAGAALIF

SEQ ID NO: 766858 - protein, 12 aa, Homo sapiens
  CDR3 for beta chain variable domain of TCR clone 383429 (TRBV18, TRBJ2-5)
CASSPSKETQYF

SEQ ID NO: 766859 - protein, 13 aa, Homo sapiens
  CDR3 for alpha chain variable domain of TCR clone 383430 (TRAV13-1, TRAJ21)
CAASIYNFNKFYF

SEQ ID NO: 766860 - protein, 19 aa, Homo sapiens
  CDR3 for beta chain variable domain of TCR clone 383430 (TRBV7-2, TRBJ2-3)
CASSFLSRNWGGGTDTQYF

SEQ ID NO: 766861 - protein, 15 aa, Homo sapiens
  CDR3 for alpha chain variable domain of TCR clone 383431 (TRAV35, TRAJ40)
CAGQLGTSGTYKYIF

SEQ ID NO: 766862 - protein, 13 aa, Homo sapiens
  CDR3 for beta chain variable domain of TCR clone 383431 (TRBV7-3, TRBJ2-1)
CQQLRGGTNEQFF

SEQ ID NO: 766863 - protein, 14 aa, Homo sapiens
  CDR3 for alpha chain variable domain of TCR clone 383432 (TRAV30, TRAJ26)
CCTEIVSYGQNFVF

SEQ ID NO: 766864 - protein, 13 aa, Homo sapiens
  CDR3 for beta chain variable domain of TCR clone 383432 (TRBV19, TRBJ1-3)
CASRLSLGNTRYF

SEQ ID NO: 766865 - protein, 15 aa, Homo sapiens
  CDR3 for alpha chain variable domain of TCR clone 383433 (TRAV26-1, TRAJ29)
CIVRVEGEGNTPLVF

SEQ ID NO: 766866 - protein, 14 aa, Homo sapiens
  CDR3 for beta chain variable domain of TCR clone 383433 (TRBV18, TRBJ2-5)
CASSPGVSQETQYF

SEQ ID NO: 766867 - protein, 12 aa, Homo sapiens
  CDR3 for alpha chain variable domain of TCR clone 383434 (TRAV12-3, TRAJ17)
CAMTLTANKLTF

SEQ ID NO: 766868 - protein, 15 aa, Homo sapiens
  CDR3 for beta chain variable domain of TCR clone 383434 (TRBV20-1, TRBJ2-7)
CSARDRVAGMDEQCF

SEQ ID NO: 766869 - protein, 18 aa, Homo sapiens
  CDR3 for alpha chain variable domain of TCR clone 383435 (TRAV21, TRAJ52)
CAVRPSPAGGTSYGELTF

SEQ ID NO: 766870 - protein, 14 aa, Homo sapiens
  CDR3 for beta chain variable domain of TCR clone 383435 (TRBV6-1, TRBJ1-3)
CASVQGGGGNTIYF

SEQ ID NO: 766871 - protein, 14 aa, Homo sapiens
  CDR3 for alpha chain variable domain of TCR clone 383436 (TRAV27, TRAJ23)
CAGAFDNQGGKLIF

SEQ ID NO: 766872 - protein, 15 aa, Homo sapiens
  CDR3 for beta chain variable domain of TCR clone 383436 (TRBV7-9, TRBJ1-4)
CASSATGGNNEKLFF

SEQ ID NO: 766873 - protein, 14 aa, Homo sapiens
  CDR3 for alpha chain variable domain of TCR clone 383437 (TRAV13-1, TRAJ45)
CAAIGGGGADGLTV

SEQ ID NO: 766874 - protein, 16 aa, Homo sapiens
  CDR3 for beta chain variable domain of TCR clone 383437 (TRBV7-2, TRBJ1-1)
CASSLGAGWTNTEAFF

SEQ ID NO: 766875 - protein, 15 aa, Homo sapiens
  CDR3 for alpha chain variable domain of TCR clone 383438 (TRAV21, TRAJ37)
CAVRPTLSNTGKLIF

SEQ ID NO: 766876 - protein, 14 aa, Homo sapiens
  CDR3 for beta chain variable domain of TCR clone 383438 (TRBV7-2, TRBJ1-2)
CASSQTGSTYGYTF

SEQ ID NO: 766877 - protein, 15 aa, Homo sapiens
  CDR3 for alpha chain variable domain of TCR clone 383439 (TRAV12-2, TRAJ53)
CAVNGGGGSNYKLSF

SEQ ID NO: 766878 - protein, 14 aa, Homo sapiens
  CDR3 for beta chain variable domain of TCR clone 383439 (TRBV19, TRBJ2-2)
CASSTLHRSGELLF

SEQ ID NO: 766879 - protein, 14 aa, Homo sapiens
  CDR3 for alpha chain variable domain of TCR clone 383440 (TRAV12-2, TRAJ13)
CAVKQTGGYQKVTF

SEQ ID NO: 766880 - protein, 12 aa, Homo sapiens
  CDR3 for beta chain variable domain of TCR clone 383440 (TRBV6-3, TRBJ2-7)
CASSLTPYEQYF

SEQ ID NO: 766881 - protein, 11 aa, Homo sapiens
  CDR3 for alpha chain variable domain of TCR clone 383441 (TRAV35, TRAJ30)
CAVERDDKIIF

SEQ ID NO: 766882 - protein, 14 aa, Homo sapiens
  CDR3 for beta chain variable domain of TCR clone 383441 (TRBV19, TRBJ1-5)
CASSYTGSNQPQHF

SEQ ID NO: 766883 - protein, 17 aa, Homo sapiens
  CDR3 for alpha chain variable domain of TCR clone 383442 (TRAV26-1, TRAJ34)
CCVLLHRQTLITDKLIF

SEQ ID NO: 766884 - protein, 13 aa, Homo sapiens
  CDR3 for beta chain variable domain of TCR clone 383442 (TRBV5-1, TRBJ2-1)
CASSLGSYNEQFF

SEQ ID NO: 766885 - protein, 14 aa, Homo sapiens
  CDR3 for alpha chain variable domain of TCR clone 383443 (TRAV8-4, TRAJ16)
RAVSPVGRWPEAAL

SEQ ID NO: 766886 - protein, 14 aa, Homo sapiens
  CDR3 for beta chain variable domain of TCR clone 383443 (TRBV23-1, TRBJ2-5)
CASSFLRSQETQYF

SEQ ID NO: 766887 - protein, 12 aa, Homo sapiens
  CDR3 for alpha chain variable domain of TCR clone 383444 (TRAV1-1, TRAJ30)
CAVRGRDDKIIF

SEQ ID NO: 766888 - protein, 14 aa, Homo sapiens
  CDR3 for beta chain variable domain of TCR clone 383444 (TRBV5-7, TRBJ1-1)
CASSLAGDWTEAFF

SEQ ID NO: 766889 - protein, 18 aa, Homo sapiens
  CDR3 for alpha chain variable domain of TCR clone 383445 (TRAV21, TRAJ52)
CAVRPSPAGGTSYGKLTF

SEQ ID NO: 766890 - protein, 15 aa, Homo sapiens
  CDR3 for beta chain variable domain of TCR clone 383445 (TRBV6-5, TRBJ1-2)
CASSYSQAFNYGYTF

SEQ ID NO: 766891 - protein, 13 aa, Homo sapiens
  CDR3 for alpha chain variable domain of TCR clone 383446 (TRAV17, TRAJ5)
CALRGTGRGALTF

SEQ ID NO: 766892 - protein, 11 aa, Homo sapiens
  CDR3 for beta chain variable domain of TCR clone 383446 (TRBV6-3, TRBJ2-3)
CATGQADTQYF

SEQ ID NO: 766893 - protein, 12 aa, Homo sapiens
  CDR3 for alpha chain variable domain of TCR clone 383447 (TRAV29/DV5, TRAJ49)
CAATDTGNQFYF

SEQ ID NO: 766894 - protein, 16 aa, Homo sapiens
  CDR3 for beta chain variable domain of TCR clone 383447 (TRBV10-3, TRBJ2-1)
CAISGVGDGGGGEQFF

SEQ ID NO: 766895 - protein, 13 aa, Homo sapiens
  CDR3 for alpha chain variable domain of TCR clone 383448 (TRAV39, TRAJ48)
CAAVNFGNEKLTF

SEQ ID NO: 766896 - protein, 12 aa, Homo sapiens
  CDR3 for beta chain variable domain of TCR clone 383448 (TRBV5-5, TRBJ2-5)
CASSYFGETQHF

SEQ ID NO: 766897 - protein, 11 aa, Homo sapiens
  CDR3 for alpha chain variable domain of TCR clone 383449 (TRAV13-1, TRAJ49)
CACVGGNQFYS

SEQ ID NO: 766898 - protein, 16 aa, Homo sapiens
  CDR3 for beta chain variable domain of TCR clone 383449 (TRBV11-2, TRBJ2-2)
CASSLRTGNLIGELFF

SEQ ID NO: 766899 - protein, 11 aa, Homo sapiens
  CDR3 for alpha chain variable domain of TCR clone 383450 (TRAV3, TRAJ21)
CAVGNFNKFYF

SEQ ID NO: 766900 - protein, 15 aa, Homo sapiens
  CDR3 for beta chain variable domain of TCR clone 383450 (TRBV2, TRBJ2-5)
CASSGTVAAGETQYF

SEQ ID NO: 766901 - protein, 12 aa, Homo sapiens
  CDR3 for alpha chain variable domain of TCR clone 383451 (TRAV8-3, TRAJ4)
PAFSGGYNKLIF

SEQ ID NO: 766902 - protein, 13 aa, Homo sapiens
  CDR3 for beta chain variable domain of TCR clone 383451 (TRBV19, TRBJ1-3)
CASRLSLGNTIYF

SEQ ID NO: 766903 - protein, 19 aa, Homo sapiens
  CDR3 for alpha chain variable domain of TCR clone 383452 (TRAV2, TRAJ20)
ILQVREADAAVHRDCKLSF

SEQ ID NO: 766904 - protein, 16 aa, Homo sapiens
  CDR3 for beta chain variable domain of TCR clone 383452 (TRBV5-1, TRBJ2-5)
CASSFALLRAGETQYF

SEQ ID NO: 766905 - protein, 13 aa, Homo sapiens
  CDR3 for alpha chain variable domain of TCR clone 383453 (TRAV26-2, TRAJ43)
CILRAVNNNDMRF

SEQ ID NO: 766906 - protein, 13 aa, Homo sapiens
  CDR3 for beta chain variable domain of TCR clone 383453 (TRBV11-2, TRBJ1-6)
CASSLAGTSPLHF

SEQ ID NO: 766907 - protein, 11 aa, Homo sapiens
  CDR3 for alpha chain variable domain of TCR clone 383454 (TRAV1-2, TRAJ20)
CAVANDYKLSF

SEQ ID NO: 766908 - protein, 14 aa, Homo sapiens
  CDR3 for beta chain variable domain of TCR clone 383454 (TRBV7-9, TRBJ1-1)
YASTPLQSYTEAFF

SEQ ID NO: 766909 - protein, 14 aa, Homo sapiens
  CDR3 for alpha chain variable domain of TCR clone 383455 (TRAV12-2, TRAJ13)
CAVKKTGGYQKVTF

SEQ ID NO: 766910 - protein, 12 aa, Homo sapiens
  CDR3 for beta chain variable domain of TCR clone 383455 (TRBV11-2, TRBJ2-2)
CASSLGRGELFF

SEQ ID NO: 766911 - protein, 13 aa, Homo sapiens
  CDR3 for alpha chain variable domain of TCR clone 383456 (TRAV16, TRAJ27)
CALRRTNAGKSTF

SEQ ID NO: 766912 - protein, 15 aa, Homo sapiens
  CDR3 for beta chain variable domain of TCR clone 383456 (TRBV18, TRBJ2-1)
CASPPPSASYNEQFF

SEQ ID NO: 766913 - protein, 13 aa, Homo sapiens
  CDR3 for alpha chain variable domain of TCR clone 383457 (TRAV3, TRAJ30)
CAVRDRGYDKIIF

SEQ ID NO: 766914 - protein, 16 aa, Homo sapiens
  CDR3 for beta chain variable domain of TCR clone 383457 (TRBV7-3, TRBJ2-2)
CASSLKRGTLSGELFF

SEQ ID NO: 766915 - protein, 16 aa, Homo sapiens
  CDR3 for alpha chain variable domain of TCR clone 383458 (TRAV12-2, TRAJ43)
CAGDDMRLGAGTRLTV

SEQ ID NO: 766916 - protein, 16 aa, Homo sapiens
  CDR3 for beta chain variable domain of TCR clone 383458 (TRBV2, TRBJ2-4)
CASSEAPGGEQNVQYF

SEQ ID NO: 766917 - protein, 11 aa, Homo sapiens
  CDR3 for alpha chain variable domain of TCR clone 383459 (TRAV2, TRAJ13)
CASGGYQKVTL

SEQ ID NO: 766918 - protein, 13 aa, Homo sapiens
  CDR3 for beta chain variable domain of TCR clone 383459 (TRBV6-1, TRBJ1-1)
WASSRQGNTEAFF

SEQ ID NO: 766919 - protein, 11 aa, Homo sapiens
  CDR3 for alpha chain variable domain of TCR clone 383460 (TRAV2, TRAJ33)
CAVDSNYQLIW

SEQ ID NO: 766920 - protein, 15 aa, Homo sapiens
  CDR3 for beta chain variable domain of TCR clone 383460 (TRBV16, TRBJ1-5)
CASSQSGTADQPQHF

SEQ ID NO: 766921 - protein, 15 aa, Homo sapiens
  CDR3 for alpha chain variable domain of TCR clone 383461 (TRAV8-1, TRAJ6)
CAVNANPGGRYIPTF

SEQ ID NO: 766922 - protein, 12 aa, Homo sapiens
  CDR3 for beta chain variable domain of TCR clone 383461 (TRBV5-7, TRBJ2-7)
CASSVQGGEQYF

SEQ ID NO: 766923 - protein, 10 aa, Homo sapiens
  CDR3 for alpha chain variable domain of TCR clone 383462 (TRAV12-3, TRAJ49)
CAVHGNQLYF

SEQ ID NO: 766924 - protein, 12 aa, Homo sapiens
  CDR3 for beta chain variable domain of TCR clone 383462 (TRBV24-1, TRBJ2-7)
CATSDPGYEQYF

SEQ ID NO: 766925 - protein, 18 aa, Homo sapiens
  CDR3 for alpha chain variable domain of TCR clone 383463 (TRAV21, TRAJ52)
CAVRPSPAGGTSYGKLTF

SEQ ID NO: 766926 - protein, 15 aa, Homo sapiens
  CDR3 for beta chain variable domain of TCR clone 383463 (TRBV20-1, TRBJ2-7)
CSASERVSGMDEQYF

SEQ ID NO: 766927 - protein, 15 aa, Homo sapiens
  CDR3 for alpha chain variable domain of TCR clone 383464 (TRAV3, TRAJ22)
CAVRDRGGSARPRTF

SEQ ID NO: 766928 - protein, 14 aa, Homo sapiens
  CDR3 for beta chain variable domain of TCR clone 383464 (TRBV20-1, TRBJ1-1)
CSAQTRIGGTEAFF

SEQ ID NO: 766929 - protein, 12 aa, Homo sapiens
  CDR3 for alpha chain variable domain of TCR clone 383465 (TRAV8-4, TRAJ49)
CAVSEAGNQFYF

SEQ ID NO: 766930 - protein, 14 aa, Homo sapiens
  CDR3 for beta chain variable domain of TCR clone 383465 (TRBV19, TRBJ1-2)
CASSLQGQAYGYTF

SEQ ID NO: 766931 - protein, 16 aa, Homo sapiens
  CDR3 for alpha chain variable domain of TCR clone 383466 (TRAV1-2, TRAJ10)
CAVRGVLTGGGIKLTF

SEQ ID NO: 766932 - protein, 12 aa, Homo sapiens
  CDR3 for beta chain variable domain of TCR clone 383466 (TRBV11-3, TRBJ2-1)
CASSPGNNEQFF

SEQ ID NO: 766933 - protein, 20 aa, Homo sapiens
  CDR3 for alpha chain variable domain of TCR clone 383467 (TRAV12-2, TRAJ52)
SPVIQPPARAVGTSYGKLTF

SEQ ID NO: 766934 - protein, 16 aa, Homo sapiens
  CDR3 for beta chain variable domain of TCR clone 383467 (TRBV15, TRBJ1-2)
CATSRGPRTGGGGYTF

SEQ ID NO: 766935 - protein, 13 aa, Homo sapiens
  CDR3 for alpha chain variable domain of TCR clone 383468 (TRAV17, TRAJ22)
CAGRRGSARQLTF

SEQ ID NO: 766936 - protein, 12 aa, Homo sapiens
  CDR3 for beta chain variable domain of TCR clone 383468 (TRBV3-1, TRBJ2-1)
CASSQGSSGRFF

SEQ ID NO: 766937 - protein, 17 aa, Homo sapiens
  CDR3 for alpha chain variable domain of TCR clone 383469 (TRAV12-1, TRAJ53)
CVAGAIVGGGSNYKPTF

SEQ ID NO: 766938 - protein, 13 aa, Homo sapiens
  CDR3 for beta chain variable domain of TCR clone 383469 (TRBV7-3, TRBJ1-1)
CASSQDWGAEAFF

SEQ ID NO: 766939 - protein, 14 aa, Homo sapiens
  CDR3 for alpha chain variable domain of TCR clone 383470 (TRAV12-2, TRAJ52)
CAVPGGTSYGKLTL

SEQ ID NO: 766940 - protein, 12 aa, Homo sapiens
  CDR3 for beta chain variable domain of TCR clone 383470 (TRBV18, TRBJ2-1)
CASSPGTSEGFF

SEQ ID NO: 766941 - protein, 14 aa, Homo sapiens
  CDR3 for alpha chain variable domain of TCR clone 383471 (TRAV13-1, TRAJ10)
CAAKEPGGGNKLTF

SEQ ID NO: 766942 - protein, 14 aa, Homo sapiens
  CDR3 for beta chain variable domain of TCR clone 383471 (TRBV6-3, TRBJ2-2)
CASTYTPDTGELFF

SEQ ID NO: 766943 - protein, 15 aa, Homo sapiens
  CDR3 for alpha chain variable domain of TCR clone 383472 (TRAV3, TRAJ7)
CAVRDKDKGNNRLAF

SEQ ID NO: 766944 - protein, 19 aa, Homo sapiens
  CDR3 for beta chain variable domain of TCR clone 383472 (TRBV5-8, TRBJ2-3)
CASSFLGTSGSHRTDTQYF

SEQ ID NO: 766945 - protein, 13 aa, Homo sapiens
  CDR3 for alpha chain variable domain of TCR clone 383473 (TRAV1-2, TRAJ31)
CAVRPNNNARLMF

SEQ ID NO: 766946 - protein, 14 aa, Homo sapiens
  CDR3 for beta chain variable domain of TCR clone 383473 (TRBV12-5, TRBJ2-5)
CASGSRTHQETQYF

SEQ ID NO: 766947 - protein, 12 aa, Homo sapiens
  CDR3 for alpha chain variable domain of TCR clone 383474 (TRAV12-3, TRAJ17)
CAMTLTGNNLTF

SEQ ID NO: 766948 - protein, 15 aa, Homo sapiens
  CDR3 for beta chain variable domain of TCR clone 383474 (TRBV20-1, TRBJ2-7)
CSARDRGSGMDEQYF

SEQ ID NO: 766949 - protein, 12 aa, Homo sapiens
  CDR3 for alpha chain variable domain of TCR clone 383475 (TRAV12-1, TRAJ34)
CVVAGATDKLIF

SEQ ID NO: 766950 - protein, 14 aa, Homo sapiens
  CDR3 for beta chain variable domain of TCR clone 383475 (TRBV12-5, TRBJ2-5)
CASGSRTHQETQYF

SEQ ID NO: 766951 - protein, 15 aa, Homo sapiens
  CDR3 for alpha chain variable domain of TCR clone 383476 (TRAV21, TRAJ53)
CATLNSGGSNYKLTF

SEQ ID NO: 766952 - protein, 18 aa, Homo sapiens
  CDR3 for beta chain variable domain of TCR clone 383476 (TRBV2, TRBJ2-2)
CQQSTGTSGGGNTGELFF

SEQ ID NO: 766953 - protein, 14 aa, Homo sapiens
  CDR3 for alpha chain variable domain of TCR clone 383477 (TRAV12-3, TRAJ9)
CAMSPNTGGYKTIF

SEQ ID NO: 766954 - protein, 12 aa, Homo sapiens
  CDR3 for beta chain variable domain of TCR clone 383477 (TRBV11-2, TRBJ2-2)
CASSLGGGELFF

SEQ ID NO: 766955 - protein, 13 aa, Homo sapiens
  CDR3 for alpha chain variable domain of TCR clone 383478 (TRAV8-6, TRAJ49)
CAVITNTGNQFYF

SEQ ID NO: 766956 - protein, 16 aa, Homo sapiens
  CDR3 for beta chain variable domain of TCR clone 383478 (TRBV7-3, TRBJ2-1)
CASSLEGYRSYNEQFF

SEQ ID NO: 766957 - protein, 14 aa, Homo sapiens
  CDR3 for alpha chain variable domain of TCR clone 383479 (TRAV20, TRAJ44)
CAVQDTGTASKLTF

SEQ ID NO: 766958 - protein, 13 aa, Homo sapiens
  CDR3 for beta chain variable domain of TCR clone 383479 (TRBV29-1, TRBJ1-3)
CSAGTGRGNAIYF

SEQ ID NO: 766959 - protein, 13 aa, Homo sapiens
  CDR3 for alpha chain variable domain of TCR clone 383480 (TRAV17, TRAJ39)
CAISTNAGNMLTF

SEQ ID NO: 766960 - protein, 15 aa, Homo sapiens
  CDR3 for beta chain variable domain of TCR clone 383480 (TRBV28, TRBJ2-1)
CASSIIAGGRSEQFF

SEQ ID NO: 766961 - protein, 13 aa, Homo sapiens
  CDR3 for alpha chain variable domain of TCR clone 383481 (TRAV20, TRAJ45)
CGYSGGGADGLTF

SEQ ID NO: 766962 - protein, 14 aa, Homo sapiens
  CDR3 for beta chain variable domain of TCR clone 383481 (TRBV18, TRBJ2-5)
CASSPPGHQETQYF

SEQ ID NO: 766963 - protein, 10 aa, Homo sapiens
  CDR3 for alpha chain variable domain of TCR clone 383482 (TRAV4, TRAJ15)
CLPFWTALIF

SEQ ID NO: 766964 - protein, 15 aa, Homo sapiens
  CDR3 for beta chain variable domain of TCR clone 383482 (TRBV5-1, TRBJ2-1)
SASSFSGTGYNEQFF

SEQ ID NO: 766965 - protein, 12 aa, Homo sapiens
  CDR3 for alpha chain variable domain of TCR clone 383483 (TRAV17, TRAJ12)
CATLRSSYKLIF

SEQ ID NO: 766966 - protein, 14 aa, Homo sapiens
  CDR3 for beta chain variable domain of TCR clone 383483 (TRBV5-1, TRBJ2-7)
CASSRGESLYEQYF

SEQ ID NO: 766967 - protein, 14 aa, Homo sapiens
  CDR3 for alpha chain variable domain of TCR clone 383484 (TRAV3, TRAJ7)
CAVREEEREQQTRF

SEQ ID NO: 766968 - protein, 15 aa, Homo sapiens
  CDR3 for beta chain variable domain of TCR clone 383484 (TRBV20-1, TRBJ1-5)
CSAFKNGQRNQPQHF

SEQ ID NO: 766969 - protein, 15 aa, Homo sapiens
  CDR3 for alpha chain variable domain of TCR clone 383485 (TRAV17, TRAJ54)
CATEKLGQGAQKLVF

SEQ ID NO: 766970 - protein, 15 aa, Homo sapiens
  CDR3 for beta chain variable domain of TCR clone 383485 (TRBV20-1, TRBJ1-1)
CSASCDRFLNTEAFF

SEQ ID NO: 766971 - protein, 15 aa, Homo sapiens
  CDR3 for alpha chain variable domain of TCR clone 383486 (TRAV23/DV6, TRAJ18)
CAARYRGSTLGRLYF

SEQ ID NO: 766972 - protein, 13 aa, Homo sapiens
  CDR3 for beta chain variable domain of TCR clone 383486 (TRBV7-2, TRBJ2-7)
CDSSSPSGSEQYF

SEQ ID NO: 766973 - protein, 14 aa, Homo sapiens
  CDR3 for alpha chain variable domain of TCR clone 383487 (TRAV16, TRAJ32)
CALKSGGATNKLIF

SEQ ID NO: 766974 - protein, 14 aa, Homo sapiens
  CDR3 for beta chain variable domain of TCR clone 383487 (TRBV7-2, TRBJ2-7)
RASRSQGAAYEQYF

SEQ ID NO: 766975 - protein, 16 aa, Homo sapiens
  CDR3 for alpha chain variable domain of TCR clone 383488 (TRAV19, TRAJ42)
CALSVNYGGSQGKLIF

SEQ ID NO: 766976 - protein, 13 aa, Homo sapiens
  CDR3 for beta chain variable domain of TCR clone 383488 (TRBV7-3, TRBJ2-1)
CASSPVAYNEQFF

SEQ ID NO: 766977 - protein, 11 aa, Homo sapiens
  CDR3 for alpha chain variable domain of TCR clone 383489 (TRAV2, TRAJ13)
CASGGYQKVTF

SEQ ID NO: 766978 - protein, 13 aa, Homo sapiens
  CDR3 for beta chain variable domain of TCR clone 383489 (TRBV20-1, TRBJ2-2)
CSASAAGNGELFF

SEQ ID NO: 766979 - protein, 14 aa, Homo sapiens
  CDR3 for alpha chain variable domain of TCR clone 383490 (TRAV2, TRAJ9)
CAVEDRSGGFKTIF

SEQ ID NO: 766980 - protein, 11 aa, Homo sapiens
  CDR3 for beta chain variable domain of TCR clone 383490 (TRBV11-2, TRBJ2-2)
CASSLPGEPFF

SEQ ID NO: 766981 - protein, 16 aa, Homo sapiens
  CDR3 for alpha chain variable domain of TCR clone 383491 (TRAV3, TRAJ28)
CAVLPRSGAGSYQLTF

SEQ ID NO: 766982 - protein, 17 aa, Homo sapiens
  CDR3 for beta chain variable domain of TCR clone 383491 (TRBV11-2, TRBJ2-1)
CASSLYPPGVEYNEQFF

SEQ ID NO: 766983 - protein, 14 aa, Homo sapiens
  CDR3 for alpha chain variable domain of TCR clone 383492 (TRAV16, TRAJ26)
CITVLYLDGQNFVF

SEQ ID NO: 766984 - protein, 15 aa, Homo sapiens
  CDR3 for beta chain variable domain of TCR clone 383492 (TRBV6-3, TRBJ2-7)
CASSSPGTVFYEQYF

SEQ ID NO: 766985 - protein, 10 aa, Homo sapiens
  CDR3 for alpha chain variable domain of TCR clone 383493 (TRAV1-2, TRAJ23)
CVGQGGKLLI

SEQ ID NO: 766986 - protein, 16 aa, Homo sapiens
  CDR3 for beta chain variable domain of TCR clone 383493 (TRBV11-2, TRBJ1-1)
CASSLRQGGEHSKAFF

SEQ ID NO: 766987 - protein, 14 aa, Homo sapiens
  CDR3 for alpha chain variable domain of TCR clone 383494 (TRAV39, TRAJ44)
CAVLNTGTASKLTF

SEQ ID NO: 766988 - protein, 12 aa, Homo sapiens
  CDR3 for beta chain variable domain of TCR clone 383494 (TRBV11-2, TRBJ2-2)
CASSLGGGELFF

SEQ ID NO: 766989 - protein, 13 aa, Homo sapiens
  CDR3 for alpha chain variable domain of TCR clone 383495 (TRAV13-1, TRAJ39)
CSKYSNAGNMLTF

SEQ ID NO: 766990 - protein, 13 aa, Homo sapiens
  CDR3 for beta chain variable domain of TCR clone 383495 (TRBV4-2, TRBJ2-3)
CASSLTSTDTQYF

SEQ ID NO: 766991 - protein, 12 aa, Homo sapiens
  CDR3 for alpha chain variable domain of TCR clone 383496 (TRAV16, TRAJ26)
CALRSYGQNFVF

SEQ ID NO: 766992 - protein, 14 aa, Homo sapiens
  CDR3 for beta chain variable domain of TCR clone 383496 (TRBV19, TRBJ2-1)
CASPTFVLSGEQFF

SEQ ID NO: 766993 - protein, 14 aa, Homo sapiens
  CDR3 for alpha chain variable domain of TCR clone 383497 (TRAV12-1, TRAJ42)
CVVIYGGSQGNLIF

SEQ ID NO: 766994 - protein, 14 aa, Homo sapiens
  CDR3 for beta chain variable domain of TCR clone 383497 (TRBV12-5, TRBJ2-5)
CASGSRTHQETQYF

SEQ ID NO: 766995 - protein, 14 aa, Homo sapiens
  CDR3 for alpha chain variable domain of TCR clone 383498 (TRAV3, TRAJ40)
CAVRDMTGTYKYIF

SEQ ID NO: 766996 - protein, 14 aa, Homo sapiens
  CDR3 for beta chain variable domain of TCR clone 383498 (TRBV12-4, TRBJ1-1)
CASSLGTGGTEAFF

SEQ ID NO: 766997 - protein, 12 aa, Homo sapiens
  CDR3 for alpha chain variable domain of TCR clone 383499 (TRAV21, TRAJ6)
CAVKGGSYIPTF

SEQ ID NO: 766998 - protein, 18 aa, Homo sapiens
  CDR3 for beta chain variable domain of TCR clone 383499 (TRBV7-2, TRBJ2-3)
CASSLKREGSGITDTQYF

SEQ ID NO: 766999 - protein, 13 aa, Homo sapiens
  CDR3 for alpha chain variable domain of TCR clone 383500 (TRAV3, TRAJ21)
CAVREPDFNKFYF

SEQ ID NO: 767000 - protein, 18 aa, Homo sapiens
  CDR3 for beta chain variable domain of TCR clone 383500 (TRBV11-2, TRBJ2-3)
CASSLGGASRWAPNTQYF

SEQ ID NO: 767001 - protein, 13 aa, Homo sapiens
  CDR3 for alpha chain variable domain of TCR clone 383501 (TRAV8-3, TRAJ21)
CAVGAYNFNKFYF

SEQ ID NO: 767002 - protein, 15 aa, Homo sapiens
  CDR3 for beta chain variable domain of TCR clone 383501 (TRBV11-2, TRBJ2-1)
CASSRNRGLMYEQFF

SEQ ID NO: 767003 - protein, 15 aa, Homo sapiens
  CDR3 for alpha chain variable domain of TCR clone 383502 (TRAV13-1, TRAJ44)
CAASRNTGTASKLTF

SEQ ID NO: 767004 - protein, 12 aa, Homo sapiens
  CDR3 for beta chain variable domain of TCR clone 383502 (TRBV20-1, TRBJ2-5)
CSATRNQETQYF

SEQ ID NO: 767005 - protein, 13 aa, Homo sapiens
  CDR3 for alpha chain variable domain of TCR clone 383503 (TRAV26-1, )
CIVSHRVEGFWNQ

SEQ ID NO: 767006 - protein, 13 aa, Homo sapiens
  CDR3 for beta chain variable domain of TCR clone 383503 (TRBV20-1, TRBJ2-7)
QCWTALSSYEQYF

SEQ ID NO: 767007 - protein, 14 aa, Homo sapiens
  CDR3 for alpha chain variable domain of TCR clone 383504 (TRAV1-2, TRAJ8)
CAVREDTGFQKLVF

SEQ ID NO: 767008 - protein, 13 aa, Homo sapiens
  CDR3 for beta chain variable domain of TCR clone 383504 (TRBV27, TRBJ2-1)
CASSLGRIWGQFF

SEQ ID NO: 767009 - protein, 13 aa, Homo sapiens
  CDR3 for alpha chain variable domain of TCR clone 383505 (TRAV1-1, TRAJ9)
CAAKNTGGFKTIF

SEQ ID NO: 767010 - protein, 15 aa, Homo sapiens
  CDR3 for beta chain variable domain of TCR clone 383505 (TRBV6-1, TRBJ2-3)
CASSERGGITDTQYF

SEQ ID NO: 767011 - protein, 14 aa, Homo sapiens
  CDR3 for alpha chain variable domain of TCR clone 383506 (TRAV6, TRAJ17)
CAPDIEAAGNKLTF

SEQ ID NO: 767012 - protein, 17 aa, Homo sapiens
  CDR3 for beta chain variable domain of TCR clone 383506 (TRBV2, TRBJ1-5)
CASSVGTGMRGYQPQHL

SEQ ID NO: 767013 - protein, 14 aa, Homo sapiens
  CDR3 for alpha chain variable domain of TCR clone 383507 (TRAV12-2, TRAJ17)
CAVLFKAAGNKLTF

SEQ ID NO: 767014 - protein, 16 aa, Homo sapiens
  CDR3 for beta chain variable domain of TCR clone 383507 (TRBV20-1, TRBJ2-3)
CSAIFPIGGLTDTQYF

SEQ ID NO: 767015 - protein, 13 aa, Homo sapiens
  CDR3 for alpha chain variable domain of TCR clone 383508 (TRAV13-1, TRAJ12)
CAASPDSSYKLIF

SEQ ID NO: 767016 - protein, 16 aa, Homo sapiens
  CDR3 for beta chain variable domain of TCR clone 383508 (TRBV15, TRBJ2-1)
CATSRERLAGAYGQFF

SEQ ID NO: 767017 - protein, 16 aa, Homo sapiens
  CDR3 for alpha chain variable domain of TCR clone 383509 (TRAV21, TRAJ17)
CAVRPGEEAAGNKLTF

SEQ ID NO: 767018 - protein, 14 aa, Homo sapiens
  CDR3 for beta chain variable domain of TCR clone 383509 (TRBV7-8, TRBJ2-7)
CASSLGRASYEQYF

SEQ ID NO: 767019 - protein, 15 aa, Homo sapiens
  CDR3 for alpha chain variable domain of TCR clone 383510 (TRAV8-3, TRAJ20)
CCGFPRIANDYKLSF

SEQ ID NO: 767020 - protein, 14 aa, Homo sapiens
  CDR3 for beta chain variable domain of TCR clone 383510 (TRBV20-1, TRBJ1-1)
CSAQTRIGGTEAFF

SEQ ID NO: 767021 - protein, 15 aa, Homo sapiens
  CDR3 for alpha chain variable domain of TCR clone 383511 (TRAV13-1, TRAJ57)
CAACNTQGGSEKLVF

SEQ ID NO: 767022 - protein, 16 aa, Homo sapiens
  CDR3 for beta chain variable domain of TCR clone 383511 (TRBV19, TRBJ2-1)
CASSKAGPSSYNEQFF

SEQ ID NO: 767023 - protein, 17 aa, Homo sapiens
  CDR3 for alpha chain variable domain of TCR clone 383512 (TRAV3, TRAJ6)
CAVSDGPRAGGSYIPTF

SEQ ID NO: 767024 - protein, 15 aa, Homo sapiens
  CDR3 for beta chain variable domain of TCR clone 383512 (TRBV7-6, TRBJ2-3)
CASSPIIYSTDTQYF

SEQ ID NO: 767025 - protein, 11 aa, Homo sapiens
  CDR3 for alpha chain variable domain of TCR clone 383513 (TRAV2, TRAJ33)
CAVESNYQVIW

SEQ ID NO: 767026 - protein, 15 aa, Homo sapiens
  CDR3 for beta chain variable domain of TCR clone 383513 (TRBV7-9, TRBJ2-2)
CASSPETGAGGELFF

SEQ ID NO: 767027 - protein, 15 aa, Homo sapiens
  CDR3 for alpha chain variable domain of TCR clone 383514 (TRAV27, TRAJ50)
CAGVGRGTSYDKVIF

SEQ ID NO: 767028 - protein, 15 aa, Homo sapiens
  CDR3 for beta chain variable domain of TCR clone 383514 (TRBV19, TRBJ1-1)
CASTSGQIQNTEAFF

SEQ ID NO: 767029 - protein, 14 aa, Homo sapiens
  CDR3 for alpha chain variable domain of TCR clone 383515 (TRAV9-2, TRAJ39)
RALYTYNAGNMLTF

SEQ ID NO: 767030 - protein, 19 aa, Homo sapiens
  CDR3 for beta chain variable domain of TCR clone 383515 (TRBV5-1, TRBJ2-3)
CASSLWLAGGITTTDTQYF

SEQ ID NO: 767031 - protein, 15 aa, Homo sapiens
  CDR3 for alpha chain variable domain of TCR clone 383516 (TRAV27, TRAJ50)
CAGVGRGTSYDKVIF

SEQ ID NO: 767032 - protein, 12 aa, Homo sapiens
  CDR3 for beta chain variable domain of TCR clone 383516 (TRBV12-5, TRBJ2-5)
CASGQGVETQYF

SEQ ID NO: 767033 - protein, 13 aa, Homo sapiens
  CDR3 for alpha chain variable domain of TCR clone 383517 (TRAV20, TRAJ20)
CAVQAGSGYKLSF

SEQ ID NO: 767034 - protein, 16 aa, Homo sapiens
  CDR3 for beta chain variable domain of TCR clone 383517 (TRBV3-1, TRBJ2-3)
CISVPAAKGGGNTQYF

SEQ ID NO: 767035 - protein, 11 aa, Homo sapiens
  CDR3 for alpha chain variable domain of TCR clone 383518 (TRAV12-2, TRAJ29)
CAGTLRSPLVF

SEQ ID NO: 767036 - protein, 16 aa, Homo sapiens
  CDR3 for beta chain variable domain of TCR clone 383518 (TRBV19, TRBJ1-5)
CASSIDRGGPRQPQHF

SEQ ID NO: 767037 - protein, 14 aa, Homo sapiens
  CDR3 for alpha chain variable domain of TCR clone 383519 (TRAV3, TRAJ6)
CAVRDSRRKLHTYI

SEQ ID NO: 767038 - protein, 15 aa, Homo sapiens
  CDR3 for beta chain variable domain of TCR clone 383519 (TRBV18, TRBJ2-7)
CASSPRQGRTDEQYF

SEQ ID NO: 767039 - protein, 13 aa, Homo sapiens
  CDR3 for alpha chain variable domain of TCR clone 383520 (TRAV2, TRAJ35)
CAVSCGFGNVLHC

SEQ ID NO: 767040 - protein, 13 aa, Homo sapiens
  CDR3 for beta chain variable domain of TCR clone 383520 (TRBV9, TRBJ2-1)
CASSPSGGNEQFF

SEQ ID NO: 767041 - protein, 13 aa, Homo sapiens
  CDR3 for alpha chain variable domain of TCR clone 383521 (TRAV3, TRAJ34)
CAVRAGGTDKLIF

SEQ ID NO: 767042 - protein, 14 aa, Homo sapiens
  CDR3 for beta chain variable domain of TCR clone 383521 (TRBV11-2, TRBJ2-5)
CASSRTGGIETQYF

SEQ ID NO: 767043 - protein, 14 aa, Homo sapiens
  CDR3 for alpha chain variable domain of TCR clone 383522 (TRAV13-1, TRAJ44)
CAAKATGTAGKLTF

SEQ ID NO: 767044 - protein, 14 aa, Homo sapiens
  CDR3 for beta chain variable domain of TCR clone 383522 (TRBV19, TRBJ2-2)
CASSTLHRSGELFF

SEQ ID NO: 767045 - protein, 14 aa, Homo sapiens
  CDR3 for alpha chain variable domain of TCR clone 383523 (TRAV13-1, TRAJ3)
CAASKSSSASKIIF

SEQ ID NO: 767046 - protein, 13 aa, Homo sapiens
  CDR3 for beta chain variable domain of TCR clone 383523 (TRBV25-1, TRBJ2-5)
CASSESGRETHYF

SEQ ID NO: 767047 - protein, 12 aa, Homo sapiens
  CDR3 for alpha chain variable domain of TCR clone 383524 (TRAV3, TRAJ43)
CAVRDPNNDIRF

SEQ ID NO: 767048 - protein, 15 aa, Homo sapiens
  CDR3 for beta chain variable domain of TCR clone 383524 (TRBV27, TRBJ1-5)
CASSLGTGVDQPQHF

SEQ ID NO: 767049 - protein, 12 aa, Homo sapiens
  CDR3 for alpha chain variable domain of TCR clone 383525 (TRAV13-1, TRAJ21)
CAAQEGFNKFYF

SEQ ID NO: 767050 - protein, 17 aa, Homo sapiens
  CDR3 for beta chain variable domain of TCR clone 383525 (TRBV20-1, TRBJ2-1)
CSASSSGLAGSYNEQFF

SEQ ID NO: 767051 - protein, 14 aa, Homo sapiens
  CDR3 for alpha chain variable domain of TCR clone 383526 (TRAV3, TRAJ17)
CAVRDAAAGNKLTF

SEQ ID NO: 767052 - protein, 17 aa, Homo sapiens
  CDR3 for beta chain variable domain of TCR clone 383526 (TRBV3-1, TRBJ2-5)
CASSNWGGTSGQETQYF

SEQ ID NO: 767053 - protein, 10 aa, Homo sapiens
  CDR3 for alpha chain variable domain of TCR clone 383527 (TRAV21, TRAJ34)
CAADTDKLIF

SEQ ID NO: 767054 - protein, 14 aa, Homo sapiens
  CDR3 for beta chain variable domain of TCR clone 383527 (TRBV5-4, TRBJ1-2)
CGSSSSGRYVGYTF

SEQ ID NO: 767055 - protein, 23 aa, Homo sapiens
  CDR3 for alpha chain variable domain of TCR clone 383528 (TRAV26-1, TRAJ38)
CIADNAGNNHIQNPDPAEYQLRD

SEQ ID NO: 767056 - protein, 15 aa, Homo sapiens
  CDR3 for beta chain variable domain of TCR clone 383528 (TRBV20-1, TRBJ1-1)
CSARGGGTLKLSLDK

SEQ ID NO: 767057 - protein, 13 aa, Homo sapiens
  CDR3 for alpha chain variable domain of TCR clone 383529 (TRAV21, TRAJ27)
CAARPGTAGKSTF

SEQ ID NO: 767058 - protein, 14 aa, Homo sapiens
  CDR3 for beta chain variable domain of TCR clone 383529 (TRBV7-9, TRBJ2-5)
CASSLDTAHETQYF

SEQ ID NO: 767059 - protein, 15 aa, Homo sapiens
  CDR3 for alpha chain variable domain of TCR clone 383530 (TRAV3, TRAJ20)
CAVRDIKLSDYKLSF

SEQ ID NO: 767060 - protein, 14 aa, Homo sapiens
  CDR3 for beta chain variable domain of TCR clone 383530 (TRBV7-9, TRBJ1-1)
CASTPLQSYTEAFF

SEQ ID NO: 767061 - protein, 12 aa, Homo sapiens
  CDR3 for alpha chain variable domain of TCR clone 383531 (TRAV12-3, TRAJ17)
CAMTLTGNKLTF

SEQ ID NO: 767062 - protein, 15 aa, Homo sapiens
  CDR3 for beta chain variable domain of TCR clone 383531 (TRBV6-6, TRBJ2-5)
CASSPGRGLEETQYF

SEQ ID NO: 767063 - protein, 14 aa, Homo sapiens
  CDR3 for alpha chain variable domain of TCR clone 383532 (TRAV23/DV6, TRAJ23)
CAAGPYNQGGNLIF

SEQ ID NO: 767064 - protein, 17 aa, Homo sapiens
  CDR3 for beta chain variable domain of TCR clone 383532 (TRBV4-2, TRBJ1-1)
CASSQVATGGMSTGAFF

SEQ ID NO: 767065 - protein, 17 aa, Homo sapiens
  CDR3 for alpha chain variable domain of TCR clone 383533 (TRAV26-1, TRAJ53)
CIVRVDDSGGSKYKLKF

SEQ ID NO: 767066 - protein, 15 aa, Homo sapiens
  CDR3 for beta chain variable domain of TCR clone 383533 (TRBV20-1, TRBJ2-7)
CSARVPAAYFYEQYF

SEQ ID NO: 767067 - protein, 12 aa, Homo sapiens
  CDR3 for alpha chain variable domain of TCR clone 383534 (TRAV12-3, TRAJ40)
CAMSSGTYKYIF

SEQ ID NO: 767068 - protein, 12 aa, Homo sapiens
  CDR3 for beta chain variable domain of TCR clone 383534 (TRBV7-8, TRBJ2-7)
CASSLGDREQYF

SEQ ID NO: 767069 - protein, 10 aa, Homo sapiens
  CDR3 for alpha chain variable domain of TCR clone 383535 (TRAV17, TRAJ36)
CATVAGNLFF

SEQ ID NO: 767070 - protein, 13 aa, Homo sapiens
  CDR3 for beta chain variable domain of TCR clone 383535 (TRBV7-9, TRBJ1-2)
CASSLKQNYGYTF

SEQ ID NO: 767071 - protein, 13 aa, Homo sapiens
  CDR3 for alpha chain variable domain of TCR clone 383536 (TRAV13-1, TRAJ40)
CAARTSGTYKYIF

SEQ ID NO: 767072 - protein, 13 aa, Homo sapiens
  CDR3 for beta chain variable domain of TCR clone 383536 (TRBV7-9, TRBJ1-2)
CASSLKQNYGYTF

SEQ ID NO: 767073 - protein, 14 aa, Homo sapiens
  CDR3 for alpha chain variable domain of TCR clone 383537 (TRAV12-2, TRAJ13)
CAVKKTGGYQKVTF

SEQ ID NO: 767074 - protein, 17 aa, Homo sapiens
  CDR3 for beta chain variable domain of TCR clone 383537 (TRBV13, TRBJ2-3)
CASSLSRVAGGRNTQYL

SEQ ID NO: 767075 - protein, 12 aa, Homo sapiens
  CDR3 for alpha chain variable domain of TCR clone 383538 (TRAV12-3, TRAJ17)
CAMTLTGNKLTF

SEQ ID NO: 767076 - protein, 13 aa, Homo sapiens
  CDR3 for beta chain variable domain of TCR clone 383538 (TRBV7-9, TRBJ1-2)
CATSLKQNYGFTF

SEQ ID NO: 767077 - protein, 14 aa, Homo sapiens
  CDR3 for alpha chain variable domain of TCR clone 383539 (TRAV2, TRAJ9)
CAVEERRGGFKTIF

SEQ ID NO: 767078 - protein, 14 aa, Homo sapiens
  CDR3 for beta chain variable domain of TCR clone 383539 (TRBV12-5, TRBJ2-5)
CASGSRTHQETQYF

SEQ ID NO: 767079 - protein, 15 aa, Homo sapiens
  CDR3 for alpha chain variable domain of TCR clone 383540 (TRAV12-3, TRAJ6)
CAMSAAPGGSYLPTF

SEQ ID NO: 767080 - protein, 13 aa, Homo sapiens
  CDR3 for beta chain variable domain of TCR clone 383540 (TRBV20-1, TRBJ1-2)
CSASPEFNYGYTF

SEQ ID NO: 767081 - protein, 16 aa, Homo sapiens
  CDR3 for alpha chain variable domain of TCR clone 383541 (TRAV30, TRAJ24)
FGTEIVDADSWGKFQF

SEQ ID NO: 767082 - protein, 17 aa, Homo sapiens
  CDR3 for beta chain variable domain of TCR clone 383541 (TRBV20-1, TRBJ2-1)
CSAPPRLAGTRYNEQFF

SEQ ID NO: 767083 - protein, 12 aa, Homo sapiens
  CDR3 for alpha chain variable domain of TCR clone 383542 (TRAV12-1, TRAJ34)
CVVAGATDKLIF

SEQ ID NO: 767084 - protein, 15 aa, Homo sapiens
  CDR3 for beta chain variable domain of TCR clone 383542 (TRBV14, TRBJ2-5)
CASSQGEAVQETQYF

SEQ ID NO: 767085 - protein, 14 aa, Homo sapiens
  CDR3 for alpha chain variable domain of TCR clone 383543 (TRAV14/DV4, TRAJ49)
CAFNRYLTGNQFYF

SEQ ID NO: 767086 - protein, 13 aa, Homo sapiens
  CDR3 for beta chain variable domain of TCR clone 383543 (TRBV10-3, TRBJ2-7)
CASKLAVNYEQYF

SEQ ID NO: 767087 - protein, 12 aa, Homo sapiens
  CDR3 for alpha chain variable domain of TCR clone 383544 (TRAV12-2, TRAJ47)
CAVAEYGNKLVF

SEQ ID NO: 767088 - protein, 14 aa, Homo sapiens
  CDR3 for beta chain variable domain of TCR clone 383544 (TRBV20-1, TRBJ1-1)
FSAMGGTATTEAFF

SEQ ID NO: 767089 - protein, 13 aa, Homo sapiens
  CDR3 for alpha chain variable domain of TCR clone 383545 (TRAV26-2, TRAJ39)
CILRDNAGNMLTF

SEQ ID NO: 767090 - protein, 18 aa, Homo sapiens
  CDR3 for beta chain variable domain of TCR clone 383545 (TRBV12-4, TRBJ2-2)
CASSLVAGTRGRTGELFF

SEQ ID NO: 767091 - protein, 12 aa, Homo sapiens
  CDR3 for alpha chain variable domain of TCR clone 383546 (TRAV13-2, TRAJ23)
CAERHRGGKLIF

SEQ ID NO: 767092 - protein, 14 aa, Homo sapiens
  CDR3 for beta chain variable domain of TCR clone 383546 (TRBV7-2, TRBJ2-7)
CASRSQGAVYEQYF

SEQ ID NO: 767093 - protein, 17 aa, Homo sapiens
  CDR3 for alpha chain variable domain of TCR clone 383547 (TRAV4, TRAJ13)
CLVGVQGSSGGYQKVTF

SEQ ID NO: 767094 - protein, 15 aa, Homo sapiens
  CDR3 for beta chain variable domain of TCR clone 383547 (TRBV18, TRBJ1-1)
CASSPRQGENTEAFF

SEQ ID NO: 767095 - protein, 12 aa, Homo sapiens
  CDR3 for alpha chain variable domain of TCR clone 383548 (TRAV8-3, TRAJ20)
CAVDFNDYKLSF

SEQ ID NO: 767096 - protein, 13 aa, Homo sapiens
  CDR3 for beta chain variable domain of TCR clone 383548 (TRBV7-2, TRBJ2-2)
CASSLAVTGELFF

SEQ ID NO: 767097 - protein, 10 aa, Homo sapiens
  CDR3 for alpha chain variable domain of TCR clone 383549 (TRAV36/DV7, TRAJ49)
CALTGNQFYF

SEQ ID NO: 767098 - protein, 14 aa, Homo sapiens
  CDR3 for beta chain variable domain of TCR clone 383549 (TRBV12-4, TRBJ2-5)
CASSFGASGGTQYL

SEQ ID NO: 767099 - protein, 12 aa, Homo sapiens
  CDR3 for alpha chain variable domain of TCR clone 383550 (TRAV27, TRAJ21)
CAGVRQLQQILL

SEQ ID NO: 767100 - protein, 14 aa, Homo sapiens
  CDR3 for beta chain variable domain of TCR clone 383550 (TRBV7-9, TRBJ1-4)
CASSLEGQSEKLFV

SEQ ID NO: 767101 - protein, 13 aa, Homo sapiens
  CDR3 for alpha chain variable domain of TCR clone 383551 (TRAV4, TRAJ42)
CLVGGGSQGNLIF

SEQ ID NO: 767102 - protein, 16 aa, Homo sapiens
  CDR3 for beta chain variable domain of TCR clone 383551 (TRBV5-1, TRBJ2-3)
CASSLQGRVGADTQYL

SEQ ID NO: 767103 - protein, 11 aa, Homo sapiens
  CDR3 for alpha chain variable domain of TCR clone 383552 (TRAV1-2, TRAJ20)
CAVSNDYKLSF

SEQ ID NO: 767104 - protein, 16 aa, Homo sapiens
  CDR3 for beta chain variable domain of TCR clone 383552 (TRBV12-5, TRBJ2-5)
CASGPRASGNQETQYF

SEQ ID NO: 767105 - protein, 16 aa, Homo sapiens
  CDR3 for alpha chain variable domain of TCR clone 383553 (TRAV3, TRAJ4)
CAVRPSPSGGDNKLIF

SEQ ID NO: 767106 - protein, 12 aa, Homo sapiens
  CDR3 for beta chain variable domain of TCR clone 383553 (TRBV7-9, TRBJ2-7)
CASSQGVYEQYF

SEQ ID NO: 767107 - protein, 17 aa, Homo sapiens
  CDR3 for alpha chain variable domain of TCR clone 383554 (TRAV3, TRAJ42)
CAVRDRDYGGSQGNLIF

SEQ ID NO: 767108 - protein, 13 aa, Homo sapiens
  CDR3 for beta chain variable domain of TCR clone 383554 (TRBV20-1, TRBJ2-5)
CSARRGTGETQYF

SEQ ID NO: 767109 - protein, 16 aa, Homo sapiens
  CDR3 for alpha chain variable domain of TCR clone 383555 (TRAV3, TRAJ21)
CAVRDIERGNFNKSYF

SEQ ID NO: 767110 - protein, 14 aa, Homo sapiens
  CDR3 for beta chain variable domain of TCR clone 383555 (TRBV12-4, TRBJ2-5)
CASSLSSGRETQYF

SEQ ID NO: 767111 - protein, 13 aa, Homo sapiens
  CDR3 for alpha chain variable domain of TCR clone 383556 (TRAV2, TRAJ40)
CAVVTSGTYKYIF

SEQ ID NO: 767112 - protein, 14 aa, Homo sapiens
  CDR3 for beta chain variable domain of TCR clone 383556 (TRBV19, TRBJ2-1)
CARPPFVLSGEQFF

SEQ ID NO: 767113 - protein, 10 aa, Homo sapiens
  CDR3 for alpha chain variable domain of TCR clone 383557 (TRAV23/DV6, TRAJ57)
CAASSTLSQG

SEQ ID NO: 767114 - protein, 20 aa, Homo sapiens
  CDR3 for beta chain variable domain of TCR clone 383557 (TRBV11-3, TRBJ2-7)
CASSQRTSGSLRAVLRAGHQ

SEQ ID NO: 767115 - protein, 15 aa, Homo sapiens
  CDR3 for alpha chain variable domain of TCR clone 383558 (TRAV3, TRAJ11)
CAVRDRGSGYSTLTF

SEQ ID NO: 767116 - protein, 13 aa, Homo sapiens
  CDR3 for beta chain variable domain of TCR clone 383558 (TRBV24-1, TRBJ2-3)
CATSTGGTDTQYF

SEQ ID NO: 767117 - protein, 23 aa, Homo sapiens
  CDR3 for alpha chain variable domain of TCR clone 383559 (TRAV26-1, TRAJ38)
CIADNAGNNHIQNPDPAVYQLRD

SEQ ID NO: 767118 - protein, 15 aa, Homo sapiens
  CDR3 for beta chain variable domain of TCR clone 383559 (TRBV2, TRBJ2-1)
CASSEGREGDNEQFF

SEQ ID NO: 767119 - protein, 15 aa, Homo sapiens
  CDR3 for alpha chain variable domain of TCR clone 383560 (TRAV1-2, TRAJ15)
CAVDVMGSTGTALIF

SEQ ID NO: 767120 - protein, 13 aa, Homo sapiens
  CDR3 for beta chain variable domain of TCR clone 383560 (TRBV7-2, TRBJ2-5)
CASCQTSVETQYF

SEQ ID NO: 767121 - protein, 13 aa, Homo sapiens
  CDR3 for alpha chain variable domain of TCR clone 383561 (TRAV13-1, TRAJ39)
CAASIWAGNMLTF

SEQ ID NO: 767122 - protein, 15 aa, Homo sapiens
  CDR3 for beta chain variable domain of TCR clone 383561 (TRBV7-9, TRBJ1-1)
CASGLLEQGGTEAFF

SEQ ID NO: 767123 - protein, 12 aa, Homo sapiens
  CDR3 for alpha chain variable domain of TCR clone 383562 (TRAV13-1, TRAJ15)
CAARQAGTALIF

SEQ ID NO: 767124 - protein, 14 aa, Homo sapiens
  CDR3 for beta chain variable domain of TCR clone 383562 (TRBV19, TRBJ2-2)
CASSTLHRSGELFF

SEQ ID NO: 767125 - protein, 12 aa, Homo sapiens
  CDR3 for alpha chain variable domain of TCR clone 383563 (TRAV12-3, TRAJ17)
CAMTLTGNKLTF

SEQ ID NO: 767126 - protein, 14 aa, Homo sapiens
  CDR3 for beta chain variable domain of TCR clone 383563 (TRBV12-4, TRBJ2-3)
CASSGQRSTDTQYF

SEQ ID NO: 767127 - protein, 12 aa, Homo sapiens
  CDR3 for alpha chain variable domain of TCR clone 383564 (TRAV1-2, TRAJ26)
CVVRYYGQNFVF

SEQ ID NO: 767128 - protein, 15 aa, Homo sapiens
  CDR3 for beta chain variable domain of TCR clone 383564 (TRBV28, TRBJ2-1)
CASSIIAGGRSEQFF

SEQ ID NO: 767129 - protein, 14 aa, Homo sapiens
  CDR3 for alpha chain variable domain of TCR clone 383565 (TRAV35, TRAJ33)
CAGSSQDSNYELIW

SEQ ID NO: 767130 - protein, 15 aa, Homo sapiens
  CDR3 for beta chain variable domain of TCR clone 383565 (TRBV5-1, TRBJ1-4)
FAPAAWKDGNEKLFF

SEQ ID NO: 767131 - protein, 14 aa, Homo sapiens
  CDR3 for alpha chain variable domain of TCR clone 383566 (TRAV2, TRAJ37)
CSVDFTSNTGKRIF

SEQ ID NO: 767132 - protein, 15 aa, Homo sapiens
  CDR3 for beta chain variable domain of TCR clone 383566 (TRBV20-1, TRBJ1-1)
CSASRGVTGNTEAFF

SEQ ID NO: 767133 - protein, 15 aa, Homo sapiens
  CDR3 for alpha chain variable domain of TCR clone 383567 (TRAV1-2, TRAJ28)
CAVQYSGAGSYKLTF

SEQ ID NO: 767134 - protein, 13 aa, Homo sapiens
  CDR3 for beta chain variable domain of TCR clone 383567 (TRBV20-1, TRBJ2-7)
CSATHTSGYEQYF

SEQ ID NO: 767135 - protein, 16 aa, Homo sapiens
  CDR3 for alpha chain variable domain of TCR clone 383568 (TRAV30, TRAJ24)
CGTEIVDADSWGKFQF

SEQ ID NO: 767136 - protein, 15 aa, Homo sapiens
  CDR3 for beta chain variable domain of TCR clone 383568 (TRBV7-9, TRBJ1-4)
CASSRTGGFNEKLLF

SEQ ID NO: 767137 - protein, 10 aa, Homo sapiens
  CDR3 for alpha chain variable domain of TCR clone 383569 (TRAV23/DV6, TRAJ57)
CAASSTLSRG

SEQ ID NO: 767138 - protein, 14 aa, Homo sapiens
  CDR3 for beta chain variable domain of TCR clone 383569 (TRBV7-8, TRBJ2-5)
CASSATGGQETQYF

SEQ ID NO: 767139 - protein, 13 aa, Homo sapiens
  CDR3 for alpha chain variable domain of TCR clone 383570 (TRAV36/DV7, TRAJ29)
CCGPLSGNTPLVF

SEQ ID NO: 767140 - protein, 14 aa, Homo sapiens
  CDR3 for beta chain variable domain of TCR clone 383570 (TRBV2, TRBJ2-7)
CASSLTSGGYEQYF

SEQ ID NO: 767141 - protein, 11 aa, Homo sapiens
  CDR3 for alpha chain variable domain of TCR clone 383571 (TRAV3, TRAJ21)
CAVGNFNQFYF

SEQ ID NO: 767142 - protein, 17 aa, Homo sapiens
  CDR3 for beta chain variable domain of TCR clone 383571 (TRBV5-1, TRBJ2-5)
CASAVTRQFGNKETQYF

SEQ ID NO: 767143 - protein, 15 aa, Homo sapiens
  CDR3 for alpha chain variable domain of TCR clone 383572 (TRAV3, TRAJ22)
CAVRDRGGSARQLTS

SEQ ID NO: 767144 - protein, 15 aa, Homo sapiens
  CDR3 for beta chain variable domain of TCR clone 383572 (TRBV7-3, TRBJ2-2)
CASSETGQGTGELFF

SEQ ID NO: 767145 - protein, 20 aa, Homo sapiens
  CDR3 for alpha chain variable domain of TCR clone 383573 (TRAV25, TRAJ33)
TATQTTDVGASRGSNYQLIW

SEQ ID NO: 767146 - protein, 14 aa, Homo sapiens
  CDR3 for beta chain variable domain of TCR clone 383573 (TRBV7-2, TRBJ2-5)
CASSTGGELKTQYF

SEQ ID NO: 767147 - protein, 11 aa, Homo sapiens
  CDR3 for alpha chain variable domain of TCR clone 383574 (TRAV13-1, TRAJ24)
CAASGWGKLQF

SEQ ID NO: 767148 - protein, 15 aa, Homo sapiens
  CDR3 for beta chain variable domain of TCR clone 383574 (TRBV11-2, TRBJ2-2)
CASSLDPGNTGELFF

SEQ ID NO: 767149 - protein, 14 aa, Homo sapiens
  CDR3 for alpha chain variable domain of TCR clone 383575 (TRAV26-1, TRAJ39)
CIVRGSRAGNMLTF

SEQ ID NO: 767150 - protein, 15 aa, Homo sapiens
  CDR3 for beta chain variable domain of TCR clone 383575 (TRBV9, TRBJ1-6)
CASSVAGTGDSPLHF

SEQ ID NO: 767151 - protein, 14 aa, Homo sapiens
  CDR3 for alpha chain variable domain of TCR clone 383576 (TRAV26-1, TRAJ22)
CIVRVSGSARQLTF

SEQ ID NO: 767152 - protein, 13 aa, Homo sapiens
  CDR3 for beta chain variable domain of TCR clone 383576 (TRBV19, TRBJ1-2)
CASSVPGQDGYTF

SEQ ID NO: 767153 - protein, 22 aa, Homo sapiens
  CDR3 for alpha chain variable domain of TCR clone 383577 (TRAV8-3, TRAJ32)
CAVEVVLQTSYSLELALCLLSS

SEQ ID NO: 767154 - protein, 12 aa, Homo sapiens
  CDR3 for beta chain variable domain of TCR clone 383577 (TRBV7-8, TRBJ2-7)
CASSLGDREQYF

SEQ ID NO: 767155 - protein, 14 aa, Homo sapiens
  CDR3 for alpha chain variable domain of TCR clone 383578 (TRAV13-1, TRAJ35)
CAAGKGGFGNVLHC

SEQ ID NO: 767156 - protein, 13 aa, Homo sapiens
  CDR3 for beta chain variable domain of TCR clone 383578 (TRBV7-3, TRBJ1-1)
CASSQDWEAEAFF

SEQ ID NO: 767157 - protein, 14 aa, Homo sapiens
  CDR3 for alpha chain variable domain of TCR clone 383579 (TRAV17, TRAJ57)
CATDPRGGSEKLVF

SEQ ID NO: 767158 - protein, 17 aa, Homo sapiens
  CDR3 for beta chain variable domain of TCR clone 383579 (TRBV5-1, TRBJ2-2)
CASSLAGLSGGTGELFF

SEQ ID NO: 767159 - protein, 13 aa, Homo sapiens
  CDR3 for alpha chain variable domain of TCR clone 383580 (TRAV12-3, TRAJ13)
CAMTSGGYQKVTF

SEQ ID NO: 767160 - protein, 13 aa, Homo sapiens
  CDR3 for beta chain variable domain of TCR clone 383580 (TRBV7-9, TRBJ1-2)
CVSSLKQNYGYTF

SEQ ID NO: 767161 - protein, 15 aa, Homo sapiens
  CDR3 for alpha chain variable domain of TCR clone 383581 (TRAV35, TRAJ40)
CAGVPGASGTYKYIF

SEQ ID NO: 767162 - protein, 13 aa, Homo sapiens
  CDR3 for beta chain variable domain of TCR clone 383581 (TRBV3-1, TRBJ1-5)
CAITRRDGQPQHF

SEQ ID NO: 767163 - protein, 15 aa, Homo sapiens
  CDR3 for alpha chain variable domain of TCR clone 383582 (TRAV12-3, TRAJ27)
CAMRAYNTNAGKSTF

SEQ ID NO: 767164 - protein, 13 aa, Homo sapiens
  CDR3 for beta chain variable domain of TCR clone 383582 (TRBV11-2, TRBJ2-5)
CASSRGPAETQSF

SEQ ID NO: 767165 - protein, 12 aa, Homo sapiens
  CDR3 for alpha chain variable domain of TCR clone 383583 (TRAV3, TRAJ20)
CAVRDGDYKLSF

SEQ ID NO: 767166 - protein, 11 aa, Homo sapiens
  CDR3 for beta chain variable domain of TCR clone 383583 (TRBV12-4, TRBJ2-3)
CASTATDTQYF

SEQ ID NO: 767167 - protein, 14 aa, Homo sapiens
  CDR3 for alpha chain variable domain of TCR clone 383584 (TRAV26-1, TRAJ38)
CIADNAGNNRKLIW

SEQ ID NO: 767168 - protein, 17 aa, Homo sapiens
  CDR3 for beta chain variable domain of TCR clone 383584 (TRBV7-3, TRBJ2-5)
CASSLGSGRSGSETQYF

SEQ ID NO: 767169 - protein, 13 aa, Homo sapiens
  CDR3 for alpha chain variable domain of TCR clone 383585 (TRAV8-4, TRAJ42)
CAVKEGSQGNLIF

SEQ ID NO: 767170 - protein, 14 aa, Homo sapiens
  CDR3 for beta chain variable domain of TCR clone 383585 (TRBV7-9, TRBJ1-5)
CASADLGSNQPQHF

SEQ ID NO: 767171 - protein, 18 aa, Homo sapiens
  CDR3 for alpha chain variable domain of TCR clone 383586 (TRAV38-1, TRAJ54)
CDVFLCFHVSSGAQKLVF

SEQ ID NO: 767172 - protein, 16 aa, Homo sapiens
  CDR3 for beta chain variable domain of TCR clone 383586 (TRBV28, TRBJ2-1)
CASSLGGSGSYNEQFF

SEQ ID NO: 767173 - protein, 11 aa, Homo sapiens
  CDR3 for alpha chain variable domain of TCR clone 383587 (TRAV26-1, TRAJ37)
CIVRVGRKLIF

SEQ ID NO: 767174 - protein, 14 aa, Homo sapiens
  CDR3 for beta chain variable domain of TCR clone 383587 (TRBV18, TRBJ2-5)
CARSPGVSQETQYF

SEQ ID NO: 767175 - protein, 17 aa, Homo sapiens
  CDR3 for alpha chain variable domain of TCR clone 383588 (TRAV3, TRAJ6)
CAVRDGPKAGGSCIPTF

SEQ ID NO: 767176 - protein, 13 aa, Homo sapiens
  CDR3 for beta chain variable domain of TCR clone 383588 (TRBV27, TRBJ2-1)
CASRTLGVGEQFF

SEQ ID NO: 767177 - protein, 15 aa, Homo sapiens
  CDR3 for alpha chain variable domain of TCR clone 383589 (TRAV20, TRAJ24)
CAVQAAPDSWGKFQF

SEQ ID NO: 767178 - protein, 16 aa, Homo sapiens
  CDR3 for beta chain variable domain of TCR clone 383589 (TRBV20-1, TRBJ1-1)
CSARDRGRGSEAFLDK

SEQ ID NO: 767179 - protein, 15 aa, Homo sapiens
  CDR3 for alpha chain variable domain of TCR clone 383590 (TRAV12-3, TRAJ6)
CAMSATTGGSYIPTF

SEQ ID NO: 767180 - protein, 17 aa, Homo sapiens
  CDR3 for beta chain variable domain of TCR clone 383590 (TRBV6-6, TRBJ2-1)
CASSHRPGWSSYNEQFF

SEQ ID NO: 767181 - protein, 14 aa, Homo sapiens
  CDR3 for alpha chain variable domain of TCR clone 383591 (TRAV17, TRAJ42)
CATDNGGSQGNLIF

SEQ ID NO: 767182 - protein, 15 aa, Homo sapiens
  CDR3 for beta chain variable domain of TCR clone 383591 (TRBV2, TRBJ1-4)
CASSERRGTNEKLFF

SEQ ID NO: 767183 - protein, 13 aa, Homo sapiens
  CDR3 for alpha chain variable domain of TCR clone 383592 (TRAV1-2, TRAJ9)
CAALNTGGFKTIF

SEQ ID NO: 767184 - protein, 13 aa, Homo sapiens
  CDR3 for beta chain variable domain of TCR clone 383592 (TRBV19, TRBJ1-2)
CASSVPGQDDDTF

SEQ ID NO: 767185 - protein, 15 aa, Homo sapiens
  CDR3 for alpha chain variable domain of TCR clone 383593 (TRAV2, TRAJ9)
CAVEDRGTGGFKTIF

SEQ ID NO: 767186 - protein, 14 aa, Homo sapiens
  CDR3 for beta chain variable domain of TCR clone 383593 (TRBV4-2, TRBJ2-5)
CASSQDRGRETQYF

SEQ ID NO: 767187 - protein, 17 aa, Homo sapiens
  CDR3 for alpha chain variable domain of TCR clone 383594 (TRAV16, TRAJ42)
CALSPKLYGGSPGNLIF

SEQ ID NO: 767188 - protein, 13 aa, Homo sapiens
  CDR3 for beta chain variable domain of TCR clone 383594 (TRBV19, TRBJ1-5)
CASSTRRDQPQHF

SEQ ID NO: 767189 - protein, 16 aa, Homo sapiens
  CDR3 for alpha chain variable domain of TCR clone 383595 (TRAV13-2, TRAJ53)
CAQNANSGGSNYKLTF

SEQ ID NO: 767190 - protein, 19 aa, Homo sapiens
  CDR3 for beta chain variable domain of TCR clone 383595 (TRBV28, TRBJ2-7)
CASSYSGTSRLGWVYEQYF

SEQ ID NO: 767191 - protein, 17 aa, Homo sapiens
  CDR3 for alpha chain variable domain of TCR clone 383596 (TRAV3, TRAJ42)
CAVRDRDYGGSQGNLIF

SEQ ID NO: 767192 - protein, 16 aa, Homo sapiens
  CDR3 for beta chain variable domain of TCR clone 383596 (TRBV4-2, TRBJ1-1)
CASSQAGFGMNTEAFF

SEQ ID NO: 767193 - protein, 13 aa, Homo sapiens
  CDR3 for alpha chain variable domain of TCR clone 383597 (TRAV3, TRAJ27)
CAVRPLGAGKSTF

SEQ ID NO: 767194 - protein, 13 aa, Homo sapiens
  CDR3 for beta chain variable domain of TCR clone 383597 (TRBV7-9, TRBJ2-3)
CSSSPGSTDTRYF

SEQ ID NO: 767195 - protein, 16 aa, Homo sapiens
  CDR3 for alpha chain variable domain of TCR clone 383598 (TRAV13-1, TRAJ18)
CAASRMRGSTLGRLYF

SEQ ID NO: 767196 - protein, 16 aa, Homo sapiens
  CDR3 for beta chain variable domain of TCR clone 383598 (TRBV27, TRBJ1-1)
CASSYRGRTGYTEAFF

SEQ ID NO: 767197 - protein, 13 aa, Homo sapiens
  CDR3 for alpha chain variable domain of TCR clone 383599 (TRAV13-2, TRAJ53)
CAENMGSNYKVTF

SEQ ID NO: 767198 - protein, 13 aa, Homo sapiens
  CDR3 for beta chain variable domain of TCR clone 383599 (TRBV4-1, TRBJ2-2)
CASSQENTGELFF

SEQ ID NO: 767199 - protein, 15 aa, Homo sapiens
  CDR3 for alpha chain variable domain of TCR clone 383600 (TRAV3, TRAJ5)
CGVRDIDTGRRALTF

SEQ ID NO: 767200 - protein, 13 aa, Homo sapiens
  CDR3 for beta chain variable domain of TCR clone 383600 (TRBV12-4, TRBJ2-7)
CASSPTETYEQYF

SEQ ID NO: 767201 - protein, 12 aa, Homo sapiens
  CDR3 for alpha chain variable domain of TCR clone 383601 (TRAV3, TRAJ34)
CAVLGKTDKLIF

SEQ ID NO: 767202 - protein, 12 aa, Homo sapiens
  CDR3 for beta chain variable domain of TCR clone 383601 (TRBV11-2, TRBJ2-1)
CASSPGNNEQFF

SEQ ID NO: 767203 - protein, 12 aa, Homo sapiens
  CDR3 for alpha chain variable domain of TCR clone 383602 (TRAV6, TRAJ34)
CALHRGTDKLIF

SEQ ID NO: 767204 - protein, 13 aa, Homo sapiens
  CDR3 for beta chain variable domain of TCR clone 383602 (TRBV7-3, TRBJ1-1)
CASSRDWGAEAFF

SEQ ID NO: 767205 - protein, 13 aa, Homo sapiens
  CDR3 for alpha chain variable domain of TCR clone 383603 (TRAV17, TRAJ9)
CASDYTGGFKTIF

SEQ ID NO: 767206 - protein, 14 aa, Homo sapiens
  CDR3 for beta chain variable domain of TCR clone 383603 (TRBV19, TRBJ2-5)
CASSMTGQQETQYF

SEQ ID NO: 767207 - protein, 14 aa, Homo sapiens
  CDR3 for alpha chain variable domain of TCR clone 383604 (TRAV3, TRAJ40)
CAVRDMTGTYNYIF

SEQ ID NO: 767208 - protein, 16 aa, Homo sapiens
  CDR3 for beta chain variable domain of TCR clone 383604 (TRBV18, TRBJ2-7)
CASSPGRAGGAYEQYF

SEQ ID NO: 767209 - protein, 13 aa, Homo sapiens
  CDR3 for alpha chain variable domain of TCR clone 383605 (TRAV26-2, TRAJ43)
CILRAVNNTDMRF

SEQ ID NO: 767210 - protein, 11 aa, Homo sapiens
  CDR3 for beta chain variable domain of TCR clone 383605 (TRBV29-1, TRBJ2-5)
CSEDRTGTQYF

SEQ ID NO: 767211 - protein, 14 aa, Homo sapiens
  CDR3 for alpha chain variable domain of TCR clone 383606 (TRAV17, TRAJ32)
CATDPGDATNKLIF

SEQ ID NO: 767212 - protein, 12 aa, Homo sapiens
  CDR3 for beta chain variable domain of TCR clone 383606 (TRBV7-8, TRBJ2-7)
CASSLGDREQYF

SEQ ID NO: 767213 - protein, 18 aa, Homo sapiens
  CDR3 for alpha chain variable domain of TCR clone 383607 (TRAV21, TRAJ52)
CAVRPSPAGGTSYGKLTF

SEQ ID NO: 767214 - protein, 17 aa, Homo sapiens
  CDR3 for beta chain variable domain of TCR clone 383607 (TRBV13, TRBJ2-3)
CASRLARVAGGRNTQYF

SEQ ID NO: 767215 - protein, 12 aa, Homo sapiens
  CDR3 for alpha chain variable domain of TCR clone 383608 (TRAV16, TRAJ10)
CSRTGGGNKLPF

SEQ ID NO: 767216 - protein, 16 aa, Homo sapiens
  CDR3 for beta chain variable domain of TCR clone 383608 (TRBV7-3, TRBJ2-2)
CASSLKRGTLSGELFF

SEQ ID NO: 767217 - protein, 17 aa, Homo sapiens
  CDR3 for alpha chain variable domain of TCR clone 383609 (TRAV13-1, TRAJ31)
CAPRDRLMFGDGTQLVV

SEQ ID NO: 767218 - protein, 12 aa, Homo sapiens
  CDR3 for beta chain variable domain of TCR clone 383609 (TRBV7-9, TRBJ2-7)
CASSLEGYEHYF

SEQ ID NO: 767219 - protein, 14 aa, Homo sapiens
  CDR3 for alpha chain variable domain of TCR clone 383610 (TRAV1-2, TRAJ24)
CAVLTTDSWGKFQF

SEQ ID NO: 767220 - protein, 15 aa, Homo sapiens
  CDR3 for beta chain variable domain of TCR clone 383610 (TRBV9, TRBJ1-6)
CASSVAGTGDSPLHF

SEQ ID NO: 767221 - protein, 15 aa, Homo sapiens
  CDR3 for alpha chain variable domain of TCR clone 383611 (TRAV21, TRAJ32)
CAVNSYGGATNKLIF

SEQ ID NO: 767222 - protein, 15 aa, Homo sapiens
  CDR3 for beta chain variable domain of TCR clone 383611 (TRBV7-3, TRBJ2-2)
CASSETGQGTGELFF

SEQ ID NO: 767223 - protein, 14 aa, Homo sapiens
  CDR3 for alpha chain variable domain of TCR clone 383612 (TRAV12-3, TRAJ43)
CAMSLGGAGTRLTV

SEQ ID NO: 767224 - protein, 10 aa, Homo sapiens
  CDR3 for beta chain variable domain of TCR clone 383612 (TRBV7-9, TRBJ1-2)
CASSLSRTMA

SEQ ID NO: 767225 - protein, 12 aa, Homo sapiens
  CDR3 for alpha chain variable domain of TCR clone 383613 (TRAV20, TRAJ37)
CALPSNTAKLIF

SEQ ID NO: 767226 - protein, 14 aa, Homo sapiens
  CDR3 for beta chain variable domain of TCR clone 383613 (TRBV19, TRBJ2-1)
CASPTFVLSGEQFF

SEQ ID NO: 767227 - protein, 12 aa, Homo sapiens
  CDR3 for alpha chain variable domain of TCR clone 383614 (TRAV12-3, TRAJ17)
CALTLTGNKLTF

SEQ ID NO: 767228 - protein, 20 aa, Homo sapiens
  CDR3 for beta chain variable domain of TCR clone 383614 (TRBV19, TRBJ2-1)
CASSISRTVTSTRLNNEQFF

SEQ ID NO: 767229 - protein, 15 aa, Homo sapiens
  CDR3 for alpha chain variable domain of TCR clone 383615 (TRAV8-6, TRAJ21)
RAVSPSSLTNFTLDL

SEQ ID NO: 767230 - protein, 14 aa, Homo sapiens
  CDR3 for beta chain variable domain of TCR clone 383615 (TRBV7-9, TRBJ2-5)
CASSLDTAQETQYL

SEQ ID NO: 767231 - protein, 15 aa, Homo sapiens
  CDR3 for alpha chain variable domain of TCR clone 383616 (TRAV1-2, TRAJ15)
CAVDVMGSAGTTLIF

SEQ ID NO: 767232 - protein, 13 aa, Homo sapiens
  CDR3 for beta chain variable domain of TCR clone 383616 (TRBV20-1, TRBJ1-1)
CSAFDRENTEAFF

SEQ ID NO: 767233 - protein, 12 aa, Homo sapiens
  CDR3 for alpha chain variable domain of TCR clone 383617 (TRAV2, TRAJ15)
CAVAQAGTALIF

SEQ ID NO: 767234 - protein, 17 aa, Homo sapiens
  CDR3 for beta chain variable domain of TCR clone 383617 (TRBV28, TRBJ2-5)
CASSRQGGLAGAETQYF

SEQ ID NO: 767235 - protein, 14 aa, Homo sapiens
  CDR3 for alpha chain variable domain of TCR clone 383618 (TRAV1-1, TRAJ27)
CAVIYNTNAGKSTF

SEQ ID NO: 767236 - protein, 12 aa, Homo sapiens
  CDR3 for beta chain variable domain of TCR clone 383618 (TRBV11-2, TRBJ2-1)
CASSPGNNQQFF

SEQ ID NO: 767237 - protein, 13 aa, Homo sapiens
  CDR3 for alpha chain variable domain of TCR clone 383619 (TRAV26-2, TRAJ54)
CIPRVGGAQKLVF

SEQ ID NO: 767238 - protein, 16 aa, Homo sapiens
  CDR3 for beta chain variable domain of TCR clone 383619 (TRBV4-1, TRBJ1-1)
RASSSMSERPNTEAFF

SEQ ID NO: 767239 - protein, 17 aa, Homo sapiens
  CDR3 for alpha chain variable domain of TCR clone 383620 (TRAV21, TRAJ52)
CAVGVNAGGTSYGKLAF

SEQ ID NO: 767240 - protein, 13 aa, Homo sapiens
  CDR3 for beta chain variable domain of TCR clone 383620 (TRBV5-1, TRBJ1-2)
CASSFQGNYGYTF

SEQ ID NO: 767241 - protein, 11 aa, Homo sapiens
  CDR3 for alpha chain variable domain of TCR clone 383621 (TRAV8-3, TRAJ49)
CAVNTGNQFYF

SEQ ID NO: 767242 - protein, 12 aa, Homo sapiens
  CDR3 for beta chain variable domain of TCR clone 383621 (TRBV7-9, TRBJ2-7)
CATRTDAYEQYF

SEQ ID NO: 767243 - protein, 14 aa, Homo sapiens
  CDR3 for alpha chain variable domain of TCR clone 383622 (TRAV9-2, TRAJ39)
CALYIYNAGNMLTF

SEQ ID NO: 767244 - protein, 15 aa, Homo sapiens
  CDR3 for beta chain variable domain of TCR clone 383622 (TRBV15, TRBJ1-4)
YATSRDMGSYEKLFF

SEQ ID NO: 767245 - protein, 14 aa, Homo sapiens
  CDR3 for alpha chain variable domain of TCR clone 383623 (TRAV2, TRAJ9)
CAVEDRSGGFKTTF

SEQ ID NO: 767246 - protein, 17 aa, Homo sapiens
  CDR3 for beta chain variable domain of TCR clone 383623 (TRBV4-1, TRBJ2-7)
CASSRDPLGVRGGEQYF

SEQ ID NO: 767247 - protein, 12 aa, Homo sapiens
  CDR3 for alpha chain variable domain of TCR clone 383624 (TRAV13-1, TRAJ21)
CAAKEGFNKFYF

SEQ ID NO: 767248 - protein, 16 aa, Homo sapiens
  CDR3 for beta chain variable domain of TCR clone 383624 (TRBV11-2, TRBJ1-2)
CASSLDTGGADYGYTF

SEQ ID NO: 767249 - protein, 17 aa, Homo sapiens
  CDR3 for alpha chain variable domain of TCR clone 383625 (TRAV4, TRAJ18)
CLVGERSVGSTLGRLYF

SEQ ID NO: 767250 - protein, 16 aa, Homo sapiens
  CDR3 for beta chain variable domain of TCR clone 383625 (TRBV15, TRBJ1-4)
GATSRDSPPGREKLFF

SEQ ID NO: 767251 - protein, 17 aa, Homo sapiens
  CDR3 for alpha chain variable domain of TCR clone 383626 (TRAV3, TRAJ12)
CAVRAGGRMDSSYKLIF

SEQ ID NO: 767252 - protein, 12 aa, Homo sapiens
  CDR3 for beta chain variable domain of TCR clone 383626 (TRBV11-2, TRBJ2-2)
CASSLGGGELFF

SEQ ID NO: 767253 - protein, 23 aa, Homo sapiens
  CDR3 for alpha chain variable domain of TCR clone 383627 (TRAV1-1, TRAJ8)
CAGAQAFRNLYVELAPDFWSVQI

SEQ ID NO: 767254 - protein, 15 aa, Homo sapiens
  CDR3 for beta chain variable domain of TCR clone 383627 (TRBV7-9, TRBJ1-4)
CASSRTGGFNEKLFF

SEQ ID NO: 767255 - protein, 14 aa, Homo sapiens
  CDR3 for alpha chain variable domain of TCR clone 383628 (TRAV12-3, TRAJ10)
SHLPLTGGGNKLTF

SEQ ID NO: 767256 - protein, 15 aa, Homo sapiens
  CDR3 for beta chain variable domain of TCR clone 383628 (TRBV4-1, TRBJ1-4)
CASSDTGGTNEKLFS

SEQ ID NO: 767257 - protein, 11 aa, Homo sapiens
  CDR3 for alpha chain variable domain of TCR clone 383629 (TRAV35, TRAJ30)
CAGPRDDKIIF

SEQ ID NO: 767258 - protein, 18 aa, Homo sapiens
  CDR3 for beta chain variable domain of TCR clone 383629 (TRBV7-6, TRBJ2-1)
CASSPRTSGMSSYNEQFF

SEQ ID NO: 767259 - protein, 14 aa, Homo sapiens
  CDR3 for alpha chain variable domain of TCR clone 383630 (TRAV3, TRAJ5)
CCGDLDTGRRALTF

SEQ ID NO: 767260 - protein, 13 aa, Homo sapiens
  CDR3 for beta chain variable domain of TCR clone 383630 (TRBV12-4, TRBJ2-7)
CASSPTETYEQYF

SEQ ID NO: 767261 - protein, 16 aa, Homo sapiens
  CDR3 for alpha chain variable domain of TCR clone 383631 (TRAV38-1, TRAJ37)
CAFKGDGSSNTGKLIF

SEQ ID NO: 767262 - protein, 13 aa, Homo sapiens
  CDR3 for beta chain variable domain of TCR clone 383631 (TRBV12-4, TRBJ2-5)
CASSLFRKETQYF

SEQ ID NO: 767263 - protein, 12 aa, Homo sapiens
  CDR3 for alpha chain variable domain of TCR clone 383632 (TRAV20, TRAJ23)
CAVHNQGGKLIF

SEQ ID NO: 767264 - protein, 17 aa, Homo sapiens
  CDR3 for beta chain variable domain of TCR clone 383632 (TRBV6-5, TRBJ2-3)
CASKAKFSREQSDTQYF

SEQ ID NO: 767265 - protein, 15 aa, Homo sapiens
  CDR3 for alpha chain variable domain of TCR clone 383633 (TRAV27, TRAJ38)
CAARRNAGNNRKRIW

SEQ ID NO: 767266 - protein, 14 aa, Homo sapiens
  CDR3 for beta chain variable domain of TCR clone 383633 (TRBV12-5, TRBJ2-5)
CASGSRTHQETQYF

SEQ ID NO: 767267 - protein, 16 aa, Homo sapiens
  CDR3 for alpha chain variable domain of TCR clone 383634 (TRAV12-2, TRAJ32)
CAVNLGQGGATNKLIF

SEQ ID NO: 767268 - protein, 16 aa, Homo sapiens
  CDR3 for beta chain variable domain of TCR clone 383634 (TRBV7-2, TRBJ2-5)
CASSSKWLSGQETQYF

SEQ ID NO: 767269 - protein, 15 aa, Homo sapiens
  CDR3 for alpha chain variable domain of TCR clone 383635 (TRAV35, TRAJ50)
CAGQLRKTSYDKVLF

SEQ ID NO: 767270 - protein, 12 aa, Homo sapiens
  CDR3 for beta chain variable domain of TCR clone 383635 (TRBV5-1, TRBJ2-5)
CASSLGLETQYL

SEQ ID NO: 767271 - protein, 18 aa, Homo sapiens
  CDR3 for alpha chain variable domain of TCR clone 383636 (TRAV21, TRAJ52)
CAVRPSPAGGISYGKLTF

SEQ ID NO: 767272 - protein, 13 aa, Homo sapiens
  CDR3 for beta chain variable domain of TCR clone 383636 (TRBV7-9, TRBJ2-7)
CASSLDHTHEQYF

SEQ ID NO: 767273 - protein, 12 aa, Homo sapiens
  CDR3 for alpha chain variable domain of TCR clone 383637 (TRAV3, TRAJ20)
CAVRDPDYKLSF

SEQ ID NO: 767274 - protein, 15 aa, Homo sapiens
  CDR3 for beta chain variable domain of TCR clone 383637 (TRBV7-6, TRBJ2-1)
CASSSAGRSYNEQFF

SEQ ID NO: 767275 - protein, 15 aa, Homo sapiens
  CDR3 for alpha chain variable domain of TCR clone 383638 (TRAV23/DV6, TRAJ18)
CAARYRGPTLGRLYF

SEQ ID NO: 767276 - protein, 13 aa, Homo sapiens
  CDR3 for beta chain variable domain of TCR clone 383638 (TRBV7-2, TRBJ2-7)
CASSSPSGGEQYF

SEQ ID NO: 767277 - protein, 13 aa, Homo sapiens
  CDR3 for alpha chain variable domain of TCR clone 383639 (TRAV8-1, TRAJ34)
CAVRPYNNDKLIF

SEQ ID NO: 767278 - protein, 15 aa, Homo sapiens
  CDR3 for beta chain variable domain of TCR clone 383639 (TRBV7-9, TRBJ1-3)
CASSLRSGSGNTIYF

SEQ ID NO: 767279 - protein, 12 aa, Homo sapiens
  CDR3 for alpha chain variable domain of TCR clone 383640 (TRAV8-3, TRAJ26)
CAGDNYGQNFVF

SEQ ID NO: 767280 - protein, 13 aa, Homo sapiens
  CDR3 for beta chain variable domain of TCR clone 383640 (TRBV15, TRBJ1-6)
CATSGCLNSPLHF

SEQ ID NO: 767281 - protein, 13 aa, Homo sapiens
  CDR3 for alpha chain variable domain of TCR clone 383641 (TRAV17, TRAJ5)
CALRGTGRRALTF

SEQ ID NO: 767282 - protein, 15 aa, Homo sapiens
  CDR3 for beta chain variable domain of TCR clone 383641 (TRBV6-1, TRBJ1-5)
CASSELREGKQPQHF

SEQ ID NO: 767283 - protein, 16 aa, Homo sapiens
  CDR3 for alpha chain variable domain of TCR clone 383642 (TRAV12-1, TRAJ45)
CVVIRYSGGGADGLTF

SEQ ID NO: 767284 - protein, 14 aa, Homo sapiens
  CDR3 for beta chain variable domain of TCR clone 383642 (TRBV4-2, TRBJ2-1)
CASGLDRAYNEQFF

SEQ ID NO: 767285 - protein, 12 aa, Homo sapiens
  CDR3 for alpha chain variable domain of TCR clone 383643 (TRAV12-1, TRAJ40)
CVVYSGTYKYIF

SEQ ID NO: 767286 - protein, 18 aa, Homo sapiens
  CDR3 for beta chain variable domain of TCR clone 383643 (TRBV11-2, TRBJ2-3)
CASSFGGAARGGPNTQYF

SEQ ID NO: 767287 - protein, 14 aa, Homo sapiens
  CDR3 for alpha chain variable domain of TCR clone 383644 (TRAV1-2, TRAJ8)
CAVREDTGFQNLVF

SEQ ID NO: 767288 - protein, 16 aa, Homo sapiens
  CDR3 for beta chain variable domain of TCR clone 383644 (TRBV12-5, TRBJ2-5)
CASGPRTSGNQETQYF

SEQ ID NO: 767289 - protein, 16 aa, Homo sapiens
  CDR3 for alpha chain variable domain of TCR clone 383645 (TRAV30, TRAJ24)
CGTEIVDADSWGKFQF

SEQ ID NO: 767290 - protein, 13 aa, Homo sapiens
  CDR3 for beta chain variable domain of TCR clone 383645 (TRBV20-1, TRBJ1-1)
CSGRGGGNTEAFF

SEQ ID NO: 767291 - protein, 10 aa, Homo sapiens
  CDR3 for alpha chain variable domain of TCR clone 383646 (TRAV8-2, TRAJ41)
CVVSELRRTQ

SEQ ID NO: 767292 - protein, 11 aa, Homo sapiens
  CDR3 for beta chain variable domain of TCR clone 383646 (TRBV20-1, TRBJ2-7)
CSARLSYEQYF

SEQ ID NO: 767293 - protein, 13 aa, Homo sapiens
  CDR3 for alpha chain variable domain of TCR clone 383647 (TRAV13-1, TRAJ5)
CAARVTGRRAPTS

SEQ ID NO: 767294 - protein, 15 aa, Homo sapiens
  CDR3 for beta chain variable domain of TCR clone 383647 (TRBV7-9, TRBJ2-7)
CASSPGGGLTYEQYF

SEQ ID NO: 767295 - protein, 11 aa, Homo sapiens
  CDR3 for alpha chain variable domain of TCR clone 383648 (TRAV23/DV6, TRAJ43)
CAARNNNDMRF

SEQ ID NO: 767296 - protein, 15 aa, Homo sapiens
  CDR3 for beta chain variable domain of TCR clone 383648 (TRBV7-9, TRBJ2-5)
CASSFKAGREETQYF

SEQ ID NO: 767297 - protein, 13 aa, Homo sapiens
  CDR3 for alpha chain variable domain of TCR clone 383649 (TRAV21, TRAJ27)
CAARPGNAGKSTF

SEQ ID NO: 767298 - protein, 16 aa, Homo sapiens
  CDR3 for beta chain variable domain of TCR clone 383649 (TRBV7-9, TRBJ2-3)
CASSPWREVGTDTQYF

SEQ ID NO: 767299 - protein, 16 aa, Homo sapiens
  CDR3 for alpha chain variable domain of TCR clone 383650 (TRAV1-2, TRAJ10)
CAVRGVLTGGGNKLTF

SEQ ID NO: 767300 - protein, 15 aa, Homo sapiens
  CDR3 for beta chain variable domain of TCR clone 383650 (TRBV4-1, TRBJ1-1)
CASSQEWGHYTEAFF

SEQ ID NO: 767301 - protein, 10 aa, Homo sapiens
  CDR3 for alpha chain variable domain of TCR clone 383651 (TRAV21, TRAJ3)
CAASTAVLQD

SEQ ID NO: 767302 - protein, 16 aa, Homo sapiens
  CDR3 for beta chain variable domain of TCR clone 383651 (TRBV19, TRBJ2-1)
CASSKAGPSSYNEQFF

SEQ ID NO: 767303 - protein, 23 aa, Homo sapiens
  CDR3 for alpha chain variable domain of TCR clone 383652 (TRAV8-4, TRAJ32)
CAAYMVVLQTSSSLELALCLLSS

SEQ ID NO: 767304 - protein, 12 aa, Homo sapiens
  CDR3 for beta chain variable domain of TCR clone 383652 (TRBV27, TRBJ2-2)
CASSLPTGELFF

SEQ ID NO: 767305 - protein, 13 aa, Homo sapiens
  CDR3 for alpha chain variable domain of TCR clone 383653 (TRAV27, TRAJ49)
CAPRPYTGNQFYF

SEQ ID NO: 767306 - protein, 18 aa, Homo sapiens
  CDR3 for beta chain variable domain of TCR clone 383653 (TRBV7-3, TRBJ2-5)
WASSLGGAAQGRWETQYF

SEQ ID NO: 767307 - protein, 13 aa, Homo sapiens
  CDR3 for alpha chain variable domain of TCR clone 383654 (TRAV3, TRAJ27)
CAVRPLGAGKSTF

SEQ ID NO: 767308 - protein, 16 aa, Homo sapiens
  CDR3 for beta chain variable domain of TCR clone 383654 (TRBV7-9, TRBJ2-3)
CASSSGSGGGTDTQYF

SEQ ID NO: 767309 - protein, 14 aa, Homo sapiens
  CDR3 for alpha chain variable domain of TCR clone 383655 (TRAV16, TRAJ44)
CALSTTGTASKLTF

SEQ ID NO: 767310 - protein, 17 aa, Homo sapiens
  CDR3 for beta chain variable domain of TCR clone 383655 (TRBV11-2, TRBJ2-5)
CASSNSQENPVLRARHA

SEQ ID NO: 767311 - protein, 14 aa, Homo sapiens
  CDR3 for alpha chain variable domain of TCR clone 383656 (TRAV1-1, TRAJ35)
FAVRSIGFGNVLHC

SEQ ID NO: 767312 - protein, 14 aa, Homo sapiens
  CDR3 for beta chain variable domain of TCR clone 383656 (TRBV19, TRBJ2-1)
CASPTFVLSGGQFF

SEQ ID NO: 767313 - protein, 13 aa, Homo sapiens
  CDR3 for alpha chain variable domain of TCR clone 383657 (TRAV36/DV7, TRAJ57)
CAVVLGGSEKLVF

SEQ ID NO: 767314 - protein, 14 aa, Homo sapiens
  CDR3 for beta chain variable domain of TCR clone 383657 (TRBV4-1, TRBJ1-2)
CASSQDGQVRGYTL

SEQ ID NO: 767315 - protein, 20 aa, Homo sapiens
  CDR3 for alpha chain variable domain of TCR clone 383658 (TRAV21, TRAJ57)
SLVTQPPTSSLQGGSEKLVF

SEQ ID NO: 767316 - protein, 12 aa, Homo sapiens
  CDR3 for beta chain variable domain of TCR clone 383658 (TRBV7-2, TRBJ1-6)
CASSLSSSPLHF

SEQ ID NO: 767317 - protein, 15 aa, Homo sapiens
  CDR3 for alpha chain variable domain of TCR clone 383659 (TRAV8-2, TRAJ40)
CVVFGTTSGTYKYIF

SEQ ID NO: 767318 - protein, 11 aa, Homo sapiens
  CDR3 for beta chain variable domain of TCR clone 383659 (TRBV6-3, TRBJ2-3)
CATGQADTQYF

SEQ ID NO: 767319 - protein, 16 aa, Homo sapiens
  CDR3 for alpha chain variable domain of TCR clone 383660 (TRAV3, TRAJ37)
CAGRGKGSGNTGKLIF

SEQ ID NO: 767320 - protein, 12 aa, Homo sapiens
  CDR3 for beta chain variable domain of TCR clone 383660 (TRBV11-2, TRBJ2-5)
CASSLVGETQYF

SEQ ID NO: 767321 - protein, 18 aa, Homo sapiens
  CDR3 for alpha chain variable domain of TCR clone 383661 (TRAV13-1, TRAJ52)
CAASKRSAGGTSYGKLTF

SEQ ID NO: 767322 - protein, 15 aa, Homo sapiens
  CDR3 for beta chain variable domain of TCR clone 383661 (TRBV2, TRBJ2-4)
CASSAQGAAKNMQYF

SEQ ID NO: 767323 - protein, 13 aa, Homo sapiens
  CDR3 for alpha chain variable domain of TCR clone 383662 (TRAV3, TRAJ9)
CCEGNTGGFKTIF

SEQ ID NO: 767324 - protein, 15 aa, Homo sapiens
  CDR3 for beta chain variable domain of TCR clone 383662 (TRBV11-3, TRBJ2-7)
CASSPGPASSYEQYF

SEQ ID NO: 767325 - protein, 14 aa, Homo sapiens
  CDR3 for alpha chain variable domain of TCR clone 383663 (TRAV3, TRAJ7)
CAVRGEEREQQTRF

SEQ ID NO: 767326 - protein, 12 aa, Homo sapiens
  CDR3 for beta chain variable domain of TCR clone 383663 (TRBV7-8, TRBJ2-7)
CASSLGDREQYF

SEQ ID NO: 767327 - protein, 13 aa, Homo sapiens
  CDR3 for alpha chain variable domain of TCR clone 383664 (TRAV27, TRAJ45)
CRSSGGGADGLTF

SEQ ID NO: 767328 - protein, 17 aa, Homo sapiens
  CDR3 for beta chain variable domain of TCR clone 383664 (TRBV11-2, TRBJ2-1)
CASSLYPQGSSTMSSSS

SEQ ID NO: 767329 - protein, 15 aa, Homo sapiens
  CDR3 for alpha chain variable domain of TCR clone 383665 (TRAV34, TRAJ38)
CGADFTPGNNRKLIW

SEQ ID NO: 767330 - protein, 13 aa, Homo sapiens
  CDR3 for beta chain variable domain of TCR clone 383665 (TRBV19, TRBJ2-1)
CATSRGVYNEQFF

SEQ ID NO: 767331 - protein, 21 aa, Homo sapiens
  CDR3 for alpha chain variable domain of TCR clone 383666 (TRAV1-1, TRAJ6)
CLLLLRCERLERTGGSYIPTF

SEQ ID NO: 767332 - protein, 13 aa, Homo sapiens
  CDR3 for beta chain variable domain of TCR clone 383666 (TRBV10-2, TRBJ2-7)
CGSGASGGYEQYF

SEQ ID NO: 767333 - protein, 13 aa, Homo sapiens
  CDR3 for alpha chain variable domain of TCR clone 383667 (TRAV8-6, TRAJ49)
CAVITNTGNQVYF

SEQ ID NO: 767334 - protein, 14 aa, Homo sapiens
  CDR3 for beta chain variable domain of TCR clone 383667 (TRBV19, TRBJ2-1)
CASPTFVLSGEQFF

SEQ ID NO: 767335 - protein, 11 aa, Homo sapiens
  CDR3 for alpha chain variable domain of TCR clone 383668 (TRAV3, TRAJ17)
CAEAAGNKLTF

SEQ ID NO: 767336 - protein, 15 aa, Homo sapiens
  CDR3 for beta chain variable domain of TCR clone 383668 (TRBV12-4, TRBJ2-7)
CASSLGSGGPYDQYF

SEQ ID NO: 767337 - protein, 14 aa, Homo sapiens
  CDR3 for alpha chain variable domain of TCR clone 383669 (TRAV12-1, TRAJ9)
CVVTGYTGGFKTIF

SEQ ID NO: 767338 - protein, 15 aa, Homo sapiens
  CDR3 for beta chain variable domain of TCR clone 383669 (TRBV7-2, TRBJ2-3)
CASSLRGGSTDTQYF

SEQ ID NO: 767339 - protein, 15 aa, Homo sapiens
  CDR3 for alpha chain variable domain of TCR clone 383670 (TRAV3, TRAJ24)
CAGGMTTDSWGKFQF

SEQ ID NO: 767340 - protein, 14 aa, Homo sapiens
  CDR3 for beta chain variable domain of TCR clone 383670 (TRBV4-1, TRBJ2-2)
CASRRGRASGEPFF

SEQ ID NO: 767341 - protein, 13 aa, Homo sapiens
  CDR3 for alpha chain variable domain of TCR clone 383671 (TRAV13-1, TRAJ49)
CAAMLYTGNQFYF

SEQ ID NO: 767342 - protein, 15 aa, Homo sapiens
  CDR3 for beta chain variable domain of TCR clone 383671 (TRBV12-4, TRBJ1-5)
CASTRGSGSGQPQHF

SEQ ID NO: 767343 - protein, 14 aa, Homo sapiens
  CDR3 for alpha chain variable domain of TCR clone 383672 (TRAV27, TRAJ15)
CAGFDNQAGTALIF

SEQ ID NO: 767344 - protein, 17 aa, Homo sapiens
  CDR3 for beta chain variable domain of TCR clone 383672 (TRBV13, TRBJ2-3)
CASSLSRVAGGRNTQYF

SEQ ID NO: 767345 - protein, 14 aa, Homo sapiens
  CDR3 for alpha chain variable domain of TCR clone 383673 (TRAV38-1, TRAJ29)
CAFITPSGHTPLVF

SEQ ID NO: 767346 - protein, 15 aa, Homo sapiens
  CDR3 for beta chain variable domain of TCR clone 383673 (TRBV5-1, TRBJ2-1)
CASSPPRAPYNEQFF

SEQ ID NO: 767347 - protein, 13 aa, Homo sapiens
  CDR3 for alpha chain variable domain of TCR clone 383674 (TRAV8-6, TRAJ49)
CAVITNTGNQFYF

SEQ ID NO: 767348 - protein, 12 aa, Homo sapiens
  CDR3 for beta chain variable domain of TCR clone 383674 (TRBV20-1, TRBJ1-2)
CSAPDQGPGYTF

SEQ ID NO: 767349 - protein, 13 aa, Homo sapiens
  CDR3 for alpha chain variable domain of TCR clone 383675 (TRAV35, TRAJ33)
LAPGGDSNYQLIW

SEQ ID NO: 767350 - protein, 11 aa, Homo sapiens
  CDR3 for beta chain variable domain of TCR clone 383675 (TRBV10-3, TRBJ2-7)
CAISEGLEQYF

SEQ ID NO: 767351 - protein, 11 aa, Homo sapiens
  CDR3 for alpha chain variable domain of TCR clone 383676 (TRAV2, TRAJ13)
CASGGYQKVTF

SEQ ID NO: 767352 - protein, 13 aa, Homo sapiens
  CDR3 for beta chain variable domain of TCR clone 383676 (TRBV6-1, TRBJ2-2)
CANSGHNTGELFF

SEQ ID NO: 767353 - protein, 12 aa, Homo sapiens
  CDR3 for alpha chain variable domain of TCR clone 383677 (TRAV3, TRAJ31)
CAVRDGNARLMF

SEQ ID NO: 767354 - protein, 18 aa, Homo sapiens
  CDR3 for beta chain variable domain of TCR clone 383677 (TRBV7-2, TRBJ2-3)
CPSSLKREGSGITDTQYF

SEQ ID NO: 767355 - protein, 17 aa, Homo sapiens
  CDR3 for alpha chain variable domain of TCR clone 383678 (TRAV3, TRAJ6)
CAVRDGPRAGGSYIPTF

SEQ ID NO: 767356 - protein, 15 aa, Homo sapiens
  CDR3 for beta chain variable domain of TCR clone 383678 (TRBV7-8, TRBJ1-5)
CASSLERRGLEPQHF

SEQ ID NO: 767357 - protein, 17 aa, Homo sapiens
  CDR3 for alpha chain variable domain of TCR clone 383679 (TRAV4, )
CLVDIQNPEPAVYQLRD

SEQ ID NO: 767358 - protein, 13 aa, Homo sapiens
  CDR3 for beta chain variable domain of TCR clone 383679 (TRBV6-1, TRBJ2-1)
CAGMDPTNNEQFF

SEQ ID NO: 767359 - protein, 15 aa, Homo sapiens
  CDR3 for alpha chain variable domain of TCR clone 383680 (TRAV29/DV5, TRAJ24)
CAASGATDSWGKFQF

SEQ ID NO: 767360 - protein, 17 aa, Homo sapiens
  CDR3 for beta chain variable domain of TCR clone 383680 (TRBV5-5, TRBJ1-2)
CASSLGSLDGQSEGYTF

SEQ ID NO: 767361 - protein, 14 aa, Homo sapiens
  CDR3 for alpha chain variable domain of TCR clone 383681 (TRAV8-3, TRAJ9)
CAVVYNTGGFKTIF

SEQ ID NO: 767362 - protein, 14 aa, Homo sapiens
  CDR3 for beta chain variable domain of TCR clone 383681 (TRBV2, TRBJ2-1)
CASRTGSSYNEQFF

SEQ ID NO: 767363 - protein, 13 aa, Homo sapiens
  CDR3 for alpha chain variable domain of TCR clone 383682 (TRAV8-4, TRAJ9)
CAVSETGGFKTIF

SEQ ID NO: 767364 - protein, 16 aa, Homo sapiens
  CDR3 for beta chain variable domain of TCR clone 383682 (TRBV19, TRBJ2-2)
CASRSPGTGATGELFF

SEQ ID NO: 767365 - protein, 14 aa, Homo sapiens
  CDR3 for alpha chain variable domain of TCR clone 383683 (TRAV3, TRAJ5)
CAVRDGTGRRALTF

SEQ ID NO: 767366 - protein, 12 aa, Homo sapiens
  CDR3 for beta chain variable domain of TCR clone 383683 (TRBV11-2, TRBJ2-2)
CASSLPTGELFF

SEQ ID NO: 767367 - protein, 14 aa, Homo sapiens
  CDR3 for alpha chain variable domain of TCR clone 383684 (TRAV16, TRAJ17)
CAPRIKAAGNKLTF

SEQ ID NO: 767368 - protein, 15 aa, Homo sapiens
  CDR3 for beta chain variable domain of TCR clone 383684 (TRBV20-1, TRBJ2-5)
CSAPPRTGFGETQYF

SEQ ID NO: 767369 - protein, 10 aa, Homo sapiens
  CDR3 for alpha chain variable domain of TCR clone 383685 (TRAV13-1, TRAJ27)
CAPLAGQINL

SEQ ID NO: 767370 - protein, 13 aa, Homo sapiens
  CDR3 for beta chain variable domain of TCR clone 383685 (TRBV7-3, TRBJ1-1)
CASSQDWGAEAFF

SEQ ID NO: 767371 - protein, 12 aa, Homo sapiens
  CDR3 for alpha chain variable domain of TCR clone 383686 (TRAV35, TRAJ39)
LAPNNAGNMLTF

SEQ ID NO: 767372 - protein, 16 aa, Homo sapiens
  CDR3 for beta chain variable domain of TCR clone 383686 (TRBV2, TRBJ2-3)
CASSTSAEGVTDTQYF

SEQ ID NO: 767373 - protein, 14 aa, Homo sapiens
  CDR3 for alpha chain variable domain of TCR clone 383687 (TRAV25, TRAJ6)
CAGRESGGSYIPTF

SEQ ID NO: 767374 - protein, 13 aa, Homo sapiens
  CDR3 for beta chain variable domain of TCR clone 383687 (TRBV27, TRBJ1-1)
CASSLSSGAEAFF

SEQ ID NO: 767375 - protein, 18 aa, Homo sapiens
  CDR3 for alpha chain variable domain of TCR clone 383688 (TRAV21, TRAJ52)
CAVRPSPAGGTSYGKLTF

SEQ ID NO: 767376 - protein, 13 aa, Homo sapiens
  CDR3 for beta chain variable domain of TCR clone 383688 (TRBV7-3, TRBJ1-1)
CASSQDWGAAAFF

SEQ ID NO: 767377 - protein, 19 aa, Homo sapiens
  CDR3 for alpha chain variable domain of TCR clone 383689 (TRAV29/DV5, TRAJ53)
QCTSVQQARQMGSNYKMTF

SEQ ID NO: 767378 - protein, 13 aa, Homo sapiens
  CDR3 for beta chain variable domain of TCR clone 383689 (TRBV28, TRBJ2-3)
CASSLAREDTQYF

SEQ ID NO: 767379 - protein, 14 aa, Homo sapiens
  CDR3 for alpha chain variable domain of TCR clone 383690 (TRAV41, TRAJ22)
CCSLPSGSARQLTF

SEQ ID NO: 767380 - protein, 13 aa, Homo sapiens
  CDR3 for beta chain variable domain of TCR clone 383690 (TRBV19, TRBJ1-2)
CASSVPGQDGYTF

SEQ ID NO: 767381 - protein, 13 aa, Homo sapiens
  CDR3 for alpha chain variable domain of TCR clone 383691 (TRAV21, TRAJ57)
CAVTKGGPEKLVF

SEQ ID NO: 767382 - protein, 16 aa, Homo sapiens
  CDR3 for beta chain variable domain of TCR clone 383691 (TRBV29-1, TRBJ2-7)
CSVEDAEDGTAYEQYF

SEQ ID NO: 767383 - protein, 15 aa, Homo sapiens
  CDR3 for alpha chain variable domain of TCR clone 383692 (TRAV2, TRAJ24)
CAVEVLTDSWGKFQF

SEQ ID NO: 767384 - protein, 15 aa, Homo sapiens
  CDR3 for beta chain variable domain of TCR clone 383692 (TRBV19, TRBJ1-2)
CASSVGQVLNYGYTF

SEQ ID NO: 767385 - protein, 10 aa, Homo sapiens
  CDR3 for alpha chain variable domain of TCR clone 383693 (TRAV23/DV6, TRAJ15)
SQPAGTALLF

SEQ ID NO: 767386 - protein, 14 aa, Homo sapiens
  CDR3 for beta chain variable domain of TCR clone 383693 (TRBV7-9, TRBJ1-2)
CASSRQGANYGYTF

SEQ ID NO: 767387 - protein, 15 aa, Homo sapiens
  CDR3 for alpha chain variable domain of TCR clone 383694 (TRAV21, TRAJ53)
CATLNSGGSNYKLTF

SEQ ID NO: 767388 - protein, 15 aa, Homo sapiens
  CDR3 for beta chain variable domain of TCR clone 383694 (TRBV7-2, TRBJ1-5)
CASSFSAGINQPQHF

SEQ ID NO: 767389 - protein, 12 aa, Homo sapiens
  CDR3 for alpha chain variable domain of TCR clone 383695 (TRAV13-1, TRAJ49)
GAAPNTGNQFYF

SEQ ID NO: 767390 - protein, 17 aa, Homo sapiens
  CDR3 for beta chain variable domain of TCR clone 383695 (TRBV25-1, TRBJ2-7)
CASSDARVVFSSYEQYF

SEQ ID NO: 767391 - protein, 11 aa, Homo sapiens
  CDR3 for alpha chain variable domain of TCR clone 383696 (TRAV35, TRAJ49)
CAGLFGNQFYF

SEQ ID NO: 767392 - protein, 15 aa, Homo sapiens
  CDR3 for beta chain variable domain of TCR clone 383696 (TRBV9, TRBJ1-6)
CASSVAGTGDSPLHF

SEQ ID NO: 767393 - protein, 15 aa, Homo sapiens
  CDR3 for alpha chain variable domain of TCR clone 383697 (TRAV3, TRAJ47)
CAVRDIGKYGNKLVF

SEQ ID NO: 767394 - protein, 14 aa, Homo sapiens
  CDR3 for beta chain variable domain of TCR clone 383697 (TRBV13, TRBJ2-5)
CASSLGRVGETQYF

SEQ ID NO: 767395 - protein, 16 aa, Homo sapiens
  CDR3 for alpha chain variable domain of TCR clone 383698 (TRAV30, TRAJ24)
CGTEIVDADSWGKFQF

SEQ ID NO: 767396 - protein, 13 aa, Homo sapiens
  CDR3 for beta chain variable domain of TCR clone 383698 (TRBV20-1, TRBJ1-1)
CSARGGGNTDAFF

SEQ ID NO: 767397 - protein, 13 aa, Homo sapiens
  CDR3 for alpha chain variable domain of TCR clone 383699 (TRAV21, TRAJ57)
CAGIEGGSEKLVF

SEQ ID NO: 767398 - protein, 14 aa, Homo sapiens
  CDR3 for beta chain variable domain of TCR clone 383699 (TRBV12-5, TRBJ2-5)
CASGSRTHQETQYF

SEQ ID NO: 767399 - protein, 12 aa, Homo sapiens
  CDR3 for alpha chain variable domain of TCR clone 383700 (TRAV21, TRAJ40)
CAASTGTYKYIF

SEQ ID NO: 767400 - protein, 15 aa, Homo sapiens
  CDR3 for beta chain variable domain of TCR clone 383700 (TRBV5-1, TRBJ2-3)
CASSVTSGSTDTQYF

SEQ ID NO: 767401 - protein, 12 aa, Homo sapiens
  CDR3 for alpha chain variable domain of TCR clone 383701 (TRAV16, TRAJ22)
CALEVCARQLTF

SEQ ID NO: 767402 - protein, 14 aa, Homo sapiens
  CDR3 for beta chain variable domain of TCR clone 383701 (TRBV11-2, TRBJ2-3)
CASSSIASTDTQYF

SEQ ID NO: 767403 - protein, 15 aa, Homo sapiens
  CDR3 for alpha chain variable domain of TCR clone 383702 (TRAV40, TRAJ45)
CLLGDLGGGADGLTF

SEQ ID NO: 767404 - protein, 13 aa, Homo sapiens
  CDR3 for beta chain variable domain of TCR clone 383702 (TRBV7-3, TRBJ1-1)
CASSQDWGAEAFF

SEQ ID NO: 767405 - protein, 16 aa, Homo sapiens
  CDR3 for alpha chain variable domain of TCR clone 383703 (TRAV13-1, TRAJ38)
CAASTSNAGNNRKLIW

SEQ ID NO: 767406 - protein, 14 aa, Homo sapiens
  CDR3 for beta chain variable domain of TCR clone 383703 (TRBV2, TRBJ2-7)
CASSLTSGGYEQYF

SEQ ID NO: 767407 - protein, 14 aa, Homo sapiens
  CDR3 for alpha chain variable domain of TCR clone 383704 (TRAV3, TRAJ17)
CAVRDAAAGNKLTF

SEQ ID NO: 767408 - protein, 13 aa, Homo sapiens
  CDR3 for beta chain variable domain of TCR clone 383704 (TRBV2, TRBJ1-1)
CATSVSGYTEAFF

SEQ ID NO: 767409 - protein, 14 aa, Homo sapiens
  CDR3 for alpha chain variable domain of TCR clone 383705 (TRAV8-4, TRAJ13)
CAVTLSGGYQKVTF

SEQ ID NO: 767410 - protein, 14 aa, Homo sapiens
  CDR3 for beta chain variable domain of TCR clone 383705 (TRBV7-2, TRBJ1-2)
YASSQTGSTYGYTF

SEQ ID NO: 767411 - protein, 11 aa, Homo sapiens
  CDR3 for alpha chain variable domain of TCR clone 383706 (TRAV12-2, TRAJ31)
CPILNNARLMF

SEQ ID NO: 767412 - protein, 16 aa, Homo sapiens
  CDR3 for beta chain variable domain of TCR clone 383706 (TRBV13, TRBJ2-2)
CASSPRTGEHTGELFF

SEQ ID NO: 767413 - protein, 13 aa, Homo sapiens
  CDR3 for alpha chain variable domain of TCR clone 383707 (TRAV35, TRAJ27)
CAGENTNAGKSTF

SEQ ID NO: 767414 - protein, 16 aa, Homo sapiens
  CDR3 for beta chain variable domain of TCR clone 383707 (TRBV7-3, TRBJ2-1)
CASSTGAGTYYNEQFF

SEQ ID NO: 767415 - protein, 17 aa, Homo sapiens
  CDR3 for alpha chain variable domain of TCR clone 383708 (TRAV3, TRAJ6)
CAVRDGKGIRRKLHTYI

SEQ ID NO: 767416 - protein, 15 aa, Homo sapiens
  CDR3 for beta chain variable domain of TCR clone 383708 (TRBV7-9, TRBJ1-5)
CASSQGHQPNQPQHF

SEQ ID NO: 767417 - protein, 12 aa, Homo sapiens
  CDR3 for alpha chain variable domain of TCR clone 383709 (TRAV13-1, TRAJ21)
CAAQEGFNKFYF

SEQ ID NO: 767418 - protein, 13 aa, Homo sapiens
  CDR3 for beta chain variable domain of TCR clone 383709 (TRBV28, TRBJ1-2)
CASRPGTLYGYTF

SEQ ID NO: 767419 - protein, 16 aa, Homo sapiens
  CDR3 for alpha chain variable domain of TCR clone 383710 (TRAV21, TRAJ37)
CAVRTSGSSNTGKLIF

SEQ ID NO: 767420 - protein, 13 aa, Homo sapiens
  CDR3 for beta chain variable domain of TCR clone 383710 (TRBV7-9, TRBJ2-5)
CASLPSGREAQYF

SEQ ID NO: 767421 - protein, 14 aa, Homo sapiens
  CDR3 for alpha chain variable domain of TCR clone 383711 (TRAV12-2, TRAJ13)
CAVKKTGGYQQVTF

SEQ ID NO: 767422 - protein, 17 aa, Homo sapiens
  CDR3 for beta chain variable domain of TCR clone 383711 (TRBV15, TRBJ2-4)
CATSRDNPQTGLDIQYF

SEQ ID NO: 767423 - protein, 15 aa, Homo sapiens
  CDR3 for alpha chain variable domain of TCR clone 383712 (TRAV14/DV4, TRAJ46)
CAMREKKSSGDKLTF

SEQ ID NO: 767424 - protein, 13 aa, Homo sapiens
  CDR3 for beta chain variable domain of TCR clone 383712 (TRBV20-1, TRBJ2-5)
SAVLEAFQETQYF

SEQ ID NO: 767425 - protein, 16 aa, Homo sapiens
  CDR3 for alpha chain variable domain of TCR clone 383713 (TRAV35, TRAJ37)
CWASLRGSSNTGKLIF

SEQ ID NO: 767426 - protein, 13 aa, Homo sapiens
  CDR3 for beta chain variable domain of TCR clone 383713 (TRBV2, TRBJ1-2)
CASSVRGNYGYTF

SEQ ID NO: 767427 - protein, 14 aa, Homo sapiens
  CDR3 for alpha chain variable domain of TCR clone 383714 (TRAV35, TRAJ33)
CGGSSQDSNYQLIW

SEQ ID NO: 767428 - protein, 15 aa, Homo sapiens
  CDR3 for beta chain variable domain of TCR clone 383714 (TRBV20-1, TRBJ2-7)
CSAESGTSGAYEQYF

SEQ ID NO: 767429 - protein, 12 aa, Homo sapiens
  CDR3 for alpha chain variable domain of TCR clone 383715 (TRAV12-1, TRAJ34)
CVVAGATDKLIF

SEQ ID NO: 767430 - protein, 16 aa, Homo sapiens
  CDR3 for beta chain variable domain of TCR clone 383715 (TRBV5-1, TRBJ1-1)
CASSSGGNSLNTEAFF

SEQ ID NO: 767431 - protein, 21 aa, Homo sapiens
  CDR3 for alpha chain variable domain of TCR clone 383716 (TRAV1-1, TRAJ6)
CLLLLRCERLERTGGSYISTF

SEQ ID NO: 767432 - protein, 15 aa, Homo sapiens
  CDR3 for beta chain variable domain of TCR clone 383716 (TRBV7-2, TRBJ2-3)
CASSLVVRGPDTQYF

SEQ ID NO: 767433 - protein, 14 aa, Homo sapiens
  CDR3 for alpha chain variable domain of TCR clone 383717 (TRAV2, TRAJ9)
CAVEDRSGGFKTIF

SEQ ID NO: 767434 - protein, 15 aa, Homo sapiens
  CDR3 for beta chain variable domain of TCR clone 383717 (TRBV19, TRBJ2-1)
CASSHRDRGPNEQFC

SEQ ID NO: 767435 - protein, 12 aa, Homo sapiens
  CDR3 for alpha chain variable domain of TCR clone 383718 (TRAV12-3, TRAJ17)
CAMTLTGNKLTF

SEQ ID NO: 767436 - protein, 13 aa, Homo sapiens
  CDR3 for beta chain variable domain of TCR clone 383718 (TRBV7-3, TRBJ2-3)
CASSDQIGETQYF

SEQ ID NO: 767437 - protein, 19 aa, Homo sapiens
  CDR3 for alpha chain variable domain of TCR clone 383719 (TRAV1-2, TRAJ26)
CLLPLCCERPANYGQNFVF

SEQ ID NO: 767438 - protein, 13 aa, Homo sapiens
  CDR3 for beta chain variable domain of TCR clone 383719 (TRBV19, TRBJ1-2)
CASSQGQVYGYTF

SEQ ID NO: 767439 - protein, 14 aa, Homo sapiens
  CDR3 for alpha chain variable domain of TCR clone 383720 (TRAV3, TRAJ9)
CAVRLNPGGFKTIF

SEQ ID NO: 767440 - protein, 14 aa, Homo sapiens
  CDR3 for beta chain variable domain of TCR clone 383720 (TRBV19, TRBJ2-7)
CASTVQGRPYEQYF

SEQ ID NO: 767441 - protein, 13 aa, Homo sapiens
  CDR3 for alpha chain variable domain of TCR clone 383721 (TRAV21, TRAJ27)
CAARPGNAGKSTF

SEQ ID NO: 767442 - protein, 14 aa, Homo sapiens
  CDR3 for beta chain variable domain of TCR clone 383721 (TRBV7-6, TRBJ2-3)
CASSLGTVKDTQYV

SEQ ID NO: 767443 - protein, 14 aa, Homo sapiens
  CDR3 for alpha chain variable domain of TCR clone 383722 (TRAV12-3, TRAJ10)
SHLPLTGGGNKLTF

SEQ ID NO: 767444 - protein, 15 aa, Homo sapiens
  CDR3 for beta chain variable domain of TCR clone 383722 (TRBV5-1, TRBJ2-7)
CASSLVAAHSYEQYF

SEQ ID NO: 767445 - protein, 14 aa, Homo sapiens
  CDR3 for alpha chain variable domain of TCR clone 383723 (TRAV17, TRAJ57)
CVTDPQGGSEKLVF

SEQ ID NO: 767446 - protein, 13 aa, Homo sapiens
  CDR3 for beta chain variable domain of TCR clone 383723 (TRBV29-1, TRBJ2-1)
CSVEGGRVNEQFF

SEQ ID NO: 767447 - protein, 14 aa, Homo sapiens
  CDR3 for alpha chain variable domain of TCR clone 383724 (TRAV12-1, TRAJ3)
CVVILYSSASKIIF

SEQ ID NO: 767448 - protein, 12 aa, Homo sapiens
  CDR3 for beta chain variable domain of TCR clone 383724 (TRBV7-2, TRBJ1-6)
CASSLSSSPLHF

SEQ ID NO: 767449 - protein, 13 aa, Homo sapiens
  CDR3 for alpha chain variable domain of TCR clone 383725 (TRAV22, TRAJ48)
CAVGRFGNEKLTF

SEQ ID NO: 767450 - protein, 13 aa, Homo sapiens
  CDR3 for beta chain variable domain of TCR clone 383725 (TRBV20-1, TRBJ2-5)
CSARGDYQETQYF

SEQ ID NO: 767451 - protein, 15 aa, Homo sapiens
  CDR3 for alpha chain variable domain of TCR clone 383726 (TRAV26-1, TRAJ40)
CIVRAVPSGTYRYIF

SEQ ID NO: 767452 - protein, 14 aa, Homo sapiens
  CDR3 for beta chain variable domain of TCR clone 383726 (TRBV19, TRBJ2-1)
CASKAPGLANEQFF

SEQ ID NO: 767453 - protein, 13 aa, Homo sapiens
  CDR3 for alpha chain variable domain of TCR clone 383727 (TRAV12-2, TRAJ26)
CAVTDPYGQNFVF

SEQ ID NO: 767454 - protein, 13 aa, Homo sapiens
  CDR3 for beta chain variable domain of TCR clone 383727 (TRBV19, TRBJ1-2)
CASSVPGQDGYTF

SEQ ID NO: 767455 - protein, 12 aa, Homo sapiens
  CDR3 for alpha chain variable domain of TCR clone 383728 (TRAV13-2, TRAJ23)
CAERHRGGKLIF

SEQ ID NO: 767456 - protein, 15 aa, Homo sapiens
  CDR3 for beta chain variable domain of TCR clone 383728 (TRBV15, TRBJ1-2)
CATSRVRASGSGYTF

SEQ ID NO: 767457 - protein, 12 aa, Homo sapiens
  CDR3 for alpha chain variable domain of TCR clone 383729 (TRAV21, TRAJ11)
CAAPSGYSTLTF

SEQ ID NO: 767458 - protein, 13 aa, Homo sapiens
  CDR3 for beta chain variable domain of TCR clone 383729 (TRBV20-1, TRBJ2-7)
QCPRAGGVGEQYF

SEQ ID NO: 767459 - protein, 14 aa, Homo sapiens
  CDR3 for alpha chain variable domain of TCR clone 383730 (TRAV17, TRAJ22)
CATSPSGSARQLTF

SEQ ID NO: 767460 - protein, 16 aa, Homo sapiens
  CDR3 for beta chain variable domain of TCR clone 383730 (TRBV19, TRBJ1-1)
CASSPTRFWPGTEAFF

SEQ ID NO: 767461 - protein, 12 aa, Homo sapiens
  CDR3 for alpha chain variable domain of TCR clone 383731 (TRAV25, TRAJ17)
CAGEAAGNKLTF

SEQ ID NO: 767462 - protein, 13 aa, Homo sapiens
  CDR3 for beta chain variable domain of TCR clone 383731 (TRBV14, TRBJ2-7)
CASSQDRRYEQYF

SEQ ID NO: 767463 - protein, 13 aa, Homo sapiens
  CDR3 for alpha chain variable domain of TCR clone 383732 (TRAV26-1, TRAJ36)
FIVVGTGANNRFF

SEQ ID NO: 767464 - protein, 13 aa, Homo sapiens
  CDR3 for beta chain variable domain of TCR clone 383732 (TRBV6-5, TRBJ2-6)
CASSTSGPLRLDF

SEQ ID NO: 767465 - protein, 15 aa, Homo sapiens
  CDR3 for alpha chain variable domain of TCR clone 383733 (TRAV23/DV6, TRAJ13)
CAAWPGGGGSQNVPL

SEQ ID NO: 767466 - protein, 17 aa, Homo sapiens
  CDR3 for beta chain variable domain of TCR clone 383733 (TRBV19, TRBJ2-7)
CASSISFYDSYPYEQYF

SEQ ID NO: 767467 - protein, 14 aa, Homo sapiens
  CDR3 for alpha chain variable domain of TCR clone 383734 (TRAV2, TRAJ9)
CAVEDRSGGVKTIF

SEQ ID NO: 767468 - protein, 17 aa, Homo sapiens
  CDR3 for beta chain variable domain of TCR clone 383734 (TRBV13, TRBJ2-3)
CASSLSRVAGGRNTQYF

SEQ ID NO: 767469 - protein, 13 aa, Homo sapiens
  CDR3 for alpha chain variable domain of TCR clone 383735 (TRAV3, TRAJ36)
CAVRDTGANNLFF

SEQ ID NO: 767470 - protein, 15 aa, Homo sapiens
  CDR3 for beta chain variable domain of TCR clone 383735 (TRBV24-1, TRBJ2-1)
CATSGSGVFYNEQFF

SEQ ID NO: 767471 - protein, 12 aa, Homo sapiens
  CDR3 for alpha chain variable domain of TCR clone 383736 (TRAV12-2, TRAJ10)
WGVTGGGNKLTF

SEQ ID NO: 767472 - protein, 15 aa, Homo sapiens
  CDR3 for beta chain variable domain of TCR clone 383736 (TRBV7-2, TRBJ2-1)
CASTHGTGIYNEQFF

SEQ ID NO: 767473 - protein, 15 aa, Homo sapiens
  CDR3 for alpha chain variable domain of TCR clone 383737 (TRAV21, TRAJ10)
CAVPLLTGGGNKLTF

SEQ ID NO: 767474 - protein, 14 aa, Homo sapiens
  CDR3 for beta chain variable domain of TCR clone 383737 (TRBV12-4, TRBJ1-1)
CASSIGTGGTEAFF

SEQ ID NO: 767475 - protein, 16 aa, Homo sapiens
  CDR3 for alpha chain variable domain of TCR clone 383738 (TRAV3, TRAJ10)
CAVRDMRAGGGNKLTF

SEQ ID NO: 767476 - protein, 16 aa, Homo sapiens
  CDR3 for beta chain variable domain of TCR clone 383738 (TRBV4-1, TRBJ1-2)
CASSQDAGQVLYGYTF

SEQ ID NO: 767477 - protein, 16 aa, Homo sapiens
  CDR3 for alpha chain variable domain of TCR clone 383739 (TRAV12-2, TRAJ32)
CAVNLGQGGATNKLIF

SEQ ID NO: 767478 - protein, 17 aa, Homo sapiens
  CDR3 for beta chain variable domain of TCR clone 383739 (TRBV20-1, TRBJ2-7)
CSARGPLAGGGSSTSGR

SEQ ID NO: 767479 - protein, 16 aa, Homo sapiens
  CDR3 for alpha chain variable domain of TCR clone 383740 (TRAV16, TRAJ52)
CALSAAGGTSYGKVTF

SEQ ID NO: 767480 - protein, 17 aa, Homo sapiens
  CDR3 for beta chain variable domain of TCR clone 383740 (TRBV11-2, TRBJ2-1)
CASSLYPPGVEYNEQFF

SEQ ID NO: 767481 - protein, 16 aa, Homo sapiens
  CDR3 for alpha chain variable domain of TCR clone 383741 (TRAV30, TRAJ24)
CGAEIVDADSWGKFQF

SEQ ID NO: 767482 - protein, 13 aa, Homo sapiens
  CDR3 for beta chain variable domain of TCR clone 383741 (TRBV7-3, TRBJ1-1)
CASSQDWGAEAFF

SEQ ID NO: 767483 - protein, 12 aa, Homo sapiens
  CDR3 for alpha chain variable domain of TCR clone 383742 (TRAV41, TRAJ58)
CAVETSGSRLTF

SEQ ID NO: 767484 - protein, 15 aa, Homo sapiens
  CDR3 for beta chain variable domain of TCR clone 383742 (TRBV29-1, TRBJ2-6)
CSVGVRGSGANVLTF

SEQ ID NO: 767485 - protein, 15 aa, Homo sapiens
  CDR3 for alpha chain variable domain of TCR clone 383743 (TRAV3, TRAJ5)
CAVRDRKTGRRALTF

SEQ ID NO: 767486 - protein, 15 aa, Homo sapiens
  CDR3 for beta chain variable domain of TCR clone 383743 (TRBV7-9, TRBJ2-2)
CASGPLHTFPGELFF

SEQ ID NO: 767487 - protein, 13 aa, Homo sapiens
  CDR3 for alpha chain variable domain of TCR clone 383744 (TRAV12-3, TRAJ33)
CAMSVNSNYQLIW

SEQ ID NO: 767488 - protein, 14 aa, Homo sapiens
  CDR3 for beta chain variable domain of TCR clone 383744 (TRBV4-1, TRBJ2-2)
CASSQAVNTGELFF

SEQ ID NO: 767489 - protein, 14 aa, Homo sapiens
  CDR3 for alpha chain variable domain of TCR clone 383745 (TRAV12-2, TRAJ13)
CAVKKTGGYQKVNF

SEQ ID NO: 767490 - protein, 16 aa, Homo sapiens
  CDR3 for beta chain variable domain of TCR clone 383745 (TRBV12-5, TRBJ2-5)
CASGPRTSGNQETQYF

SEQ ID NO: 767491 - protein, 15 aa, Homo sapiens
  CDR3 for alpha chain variable domain of TCR clone 383746 (TRAV4, TRAJ26)
CLVGDMNNYVQNFVF

SEQ ID NO: 767492 - protein, 16 aa, Homo sapiens
  CDR3 for beta chain variable domain of TCR clone 383746 (TRBV28, TRBJ1-4)
CASSSRTGAANEKLFF

SEQ ID NO: 767493 - protein, 14 aa, Homo sapiens
  CDR3 for alpha chain variable domain of TCR clone 383747 (TRAV13-1, TRAJ40)
CAASMTSGTYKYIF

SEQ ID NO: 767494 - protein, 16 aa, Homo sapiens
  CDR3 for beta chain variable domain of TCR clone 383747 (TRBV5-7, TRBJ2-5)
CASSFGQGGYQETQYF

SEQ ID NO: 767495 - protein, 14 aa, Homo sapiens
  CDR3 for alpha chain variable domain of TCR clone 383748 (TRAV1-2, TRAJ6)
CAVSLSGGSYIPTL

SEQ ID NO: 767496 - protein, 16 aa, Homo sapiens
  CDR3 for beta chain variable domain of TCR clone 383748 (TRBV12-5, TRBJ2-5)
CASGPRTSGNQETQYF

SEQ ID NO: 767497 - protein, 12 aa, Homo sapiens
  CDR3 for alpha chain variable domain of TCR clone 383749 (TRAV2, TRAJ34)
CAVERNTDKLIF

SEQ ID NO: 767498 - protein, 20 aa, Homo sapiens
  CDR3 for beta chain variable domain of TCR clone 383749 (TRBV7-2, TRBJ2-5)
CASSFRRGGGRDPVLRARHA

SEQ ID NO: 767499 - protein, 16 aa, Homo sapiens
  CDR3 for alpha chain variable domain of TCR clone 383750 (TRAV38-1, TRAJ43)
CAFMKHNSGRHALLSR

SEQ ID NO: 767500 - protein, 11 aa, Homo sapiens
  CDR3 for beta chain variable domain of TCR clone 383750 (TRBV7-9, TRBJ2-3)
CASSYTDTQYF

SEQ ID NO: 767501 - protein, 15 aa, Homo sapiens
  CDR3 for alpha chain variable domain of TCR clone 383751 (TRAV12-1, TRAJ45)
CVVLSGGGGADGLTF

SEQ ID NO: 767502 - protein, 17 aa, Homo sapiens
  CDR3 for beta chain variable domain of TCR clone 383751 (TRBV7-8, TRBJ1-2)
CASSLRPLQGHLYGYTF

SEQ ID NO: 767503 - protein, 16 aa, Homo sapiens
  CDR3 for alpha chain variable domain of TCR clone 383752 (TRAV3, TRAJ37)
CAVRPHGSGNTGKLIF

SEQ ID NO: 767504 - protein, 16 aa, Homo sapiens
  CDR3 for beta chain variable domain of TCR clone 383752 (TRBV20-1, TRBJ1-4)
CSAPGHGLLTNEKLFF

SEQ ID NO: 767505 - protein, 16 aa, Homo sapiens
  CDR3 for alpha chain variable domain of TCR clone 383753 (TRAV3, TRAJ10)
CAVRDMRAGGGNKLTF

SEQ ID NO: 767506 - protein, 15 aa, Homo sapiens
  CDR3 for beta chain variable domain of TCR clone 383753 (TRBV7-2, TRBJ1-5)
CASSRGQGDNQPQHC

SEQ ID NO: 767507 - protein, 15 aa, Homo sapiens
  CDR3 for alpha chain variable domain of TCR clone 383754 (TRAV8-4, TRAJ8)
CAVSDLNTGFQKLVF

SEQ ID NO: 767508 - protein, 14 aa, Homo sapiens
  CDR3 for beta chain variable domain of TCR clone 383754 (TRBV7-8, TRBJ2-3)
CASSLGAGTDTQYC

SEQ ID NO: 767509 - protein, 13 aa, Homo sapiens
  CDR3 for alpha chain variable domain of TCR clone 383755 (TRAV12-2, TRAJ36)
YAVIATGANNLFF

SEQ ID NO: 767510 - protein, 13 aa, Homo sapiens
  CDR3 for beta chain variable domain of TCR clone 383755 (TRBV20-1, TRBJ1-1)
CSAPLGGGTEAFF

SEQ ID NO: 767511 - protein, 16 aa, Homo sapiens
  CDR3 for alpha chain variable domain of TCR clone 383756 (TRAV3, TRAJ3)
CAVRDRAKSSASTIIF

SEQ ID NO: 767512 - protein, 13 aa, Homo sapiens
  CDR3 for beta chain variable domain of TCR clone 383756 (TRBV10-3, TRBJ2-7)
CASKLAVNYGQYF

SEQ ID NO: 767513 - protein, 13 aa, Homo sapiens
  CDR3 for alpha chain variable domain of TCR clone 383757 (TRAV13-1, TRAJ39)
CAASIWAGNMLTF

SEQ ID NO: 767514 - protein, 13 aa, Homo sapiens
  CDR3 for beta chain variable domain of TCR clone 383757 (TRBV11-2, TRBJ1-3)
CASSVEPVNTIYF

SEQ ID NO: 767515 - protein, 14 aa, Homo sapiens
  CDR3 for alpha chain variable domain of TCR clone 383758 (TRAV26-1, TRAJ38)
CIADNAGNNRKLIW

SEQ ID NO: 767516 - protein, 16 aa, Homo sapiens
  CDR3 for beta chain variable domain of TCR clone 383758 (TRBV20-1, TRBJ1-4)
CSARPYGGELNEKLFF

SEQ ID NO: 767517 - protein, 14 aa, Homo sapiens
  CDR3 for alpha chain variable domain of TCR clone 383759 (TRAV1-2, TRAJ8)
CAVREDTGVQKLVF

SEQ ID NO: 767518 - protein, 12 aa, Homo sapiens
  CDR3 for beta chain variable domain of TCR clone 383759 (TRBV29-1, TRBJ2-3)
CSVTGGADTQYF

SEQ ID NO: 767519 - protein, 14 aa, Homo sapiens
  CDR3 for alpha chain variable domain of TCR clone 383760 (TRAV12-1, TRAJ17)
CVVNYKAPGNKLTF

SEQ ID NO: 767520 - protein, 17 aa, Homo sapiens
  CDR3 for beta chain variable domain of TCR clone 383760 (TRBV11-2, TRBJ2-1)
CASSLYPPGVEYNEQFF

SEQ ID NO: 767521 - protein, 16 aa, Homo sapiens
  CDR3 for alpha chain variable domain of TCR clone 383761 (TRAV38-1, TRAJ45)
CAFMKRSGGGADGLTF

SEQ ID NO: 767522 - protein, 15 aa, Homo sapiens
  CDR3 for beta chain variable domain of TCR clone 383761 (TRBV20-1, TRBJ2-7)
CSAREGRDSLYEQYF

SEQ ID NO: 767523 - protein, 21 aa, Homo sapiens
  CDR3 for alpha chain variable domain of TCR clone 383762 (TRAV41, TRAJ42)
TASHPRDSAVYICAPQGNLIF

SEQ ID NO: 767524 - protein, 13 aa, Homo sapiens
  CDR3 for beta chain variable domain of TCR clone 383762 (TRBV25-1, TRBJ2-6)
CASRGPGANVLTF

SEQ ID NO: 767525 - protein, 21 aa, Homo sapiens
  CDR3 for alpha chain variable domain of TCR clone 383763 (TRAV12-2, TRAJ43)
CSSDSQPSDSATYLCAFDMRF

SEQ ID NO: 767526 - protein, 18 aa, Homo sapiens
  CDR3 for beta chain variable domain of TCR clone 383763 (TRBV20-1, TRBJ2-3)
CSASGLAGGPGTTDTQYF

SEQ ID NO: 767527 - protein, 16 aa, Homo sapiens
  CDR3 for alpha chain variable domain of TCR clone 383764 (TRAV23/DV6, TRAJ48)
CAASGVVNFGNEKLTF

SEQ ID NO: 767528 - protein, 15 aa, Homo sapiens
  CDR3 for beta chain variable domain of TCR clone 383764 (TRBV20-1, TRBJ2-5)
CSAGLAGVSQETQYV

SEQ ID NO: 767529 - protein, 11 aa, Homo sapiens
  CDR3 for alpha chain variable domain of TCR clone 383765 (TRAV1-1, TRAJ23)
CAVRQGGKLIF

SEQ ID NO: 767530 - protein, 15 aa, Homo sapiens
  CDR3 for beta chain variable domain of TCR clone 383765 (TRBV18, TRBJ2-7)
CASSPLQGRTYEQYF

SEQ ID NO: 767531 - protein, 16 aa, Homo sapiens
  CDR3 for alpha chain variable domain of TCR clone 383766 (TRAV30, TRAJ24)
CGTGIVDADSWGKFQF

SEQ ID NO: 767532 - protein, 15 aa, Homo sapiens
  CDR3 for beta chain variable domain of TCR clone 383766 (TRBV28, TRBJ2-1)
CASSIIAGGRSEQFF

SEQ ID NO: 767533 - protein, 14 aa, Homo sapiens
  CDR3 for alpha chain variable domain of TCR clone 383767 (TRAV12-3, TRAJ29)
CAMILLSGTTPLVF

SEQ ID NO: 767534 - protein, 16 aa, Homo sapiens
  CDR3 for beta chain variable domain of TCR clone 383767 (TRBV28, TRBJ2-7)
CASSSGTSGRGYEQYF

SEQ ID NO: 767535 - protein, 14 aa, Homo sapiens
  CDR3 for alpha chain variable domain of TCR clone 383768 (TRAV26-1, TRAJ38)
CIADNAGNNRKLIW

SEQ ID NO: 767536 - protein, 16 aa, Homo sapiens
  CDR3 for beta chain variable domain of TCR clone 383768 (TRBV4-2, TRBJ2-3)
CASSQELAGDTDTQYF

SEQ ID NO: 767537 - protein, 14 aa, Homo sapiens
  CDR3 for alpha chain variable domain of TCR clone 383769 (TRAV1-2, TRAJ16)
CAVNRFSDGQKLLF

SEQ ID NO: 767538 - protein, 14 aa, Homo sapiens
  CDR3 for beta chain variable domain of TCR clone 383769 (TRBV7-9, TRBJ2-1)
CASSQGQAEAEQFF

SEQ ID NO: 767539 - protein, 15 aa, Homo sapiens
  CDR3 for alpha chain variable domain of TCR clone 383770 (TRAV20, TRAJ6)
CAVRLQSGGSYIPTF

SEQ ID NO: 767540 - protein, 14 aa, Homo sapiens
  CDR3 for beta chain variable domain of TCR clone 383770 (TRBV12-4, TRBJ2-7)
CASNASGGWYEQDF

SEQ ID NO: 767541 - protein, 18 aa, Homo sapiens
  CDR3 for alpha chain variable domain of TCR clone 383771 (TRAV21, TRAJ52)
CAVRPSPAGGTSYGQLTF

SEQ ID NO: 767542 - protein, 17 aa, Homo sapiens
  CDR3 for beta chain variable domain of TCR clone 383771 (TRBV11-2, TRBJ2-1)
CASSLYPPGVEYNEQFF

SEQ ID NO: 767543 - protein, 12 aa, Homo sapiens
  CDR3 for alpha chain variable domain of TCR clone 383772 (TRAV21, TRAJ23)
CAVGPQGGKLIF

SEQ ID NO: 767544 - protein, 13 aa, Homo sapiens
  CDR3 for beta chain variable domain of TCR clone 383772 (TRBV19, TRBJ2-7)
CASSIDRTYEQYF

SEQ ID NO: 767545 - protein, 12 aa, Homo sapiens
  CDR3 for alpha chain variable domain of TCR clone 383773 (TRAV12-1, TRAJ40)
CVVYSGTYKYIF

SEQ ID NO: 767546 - protein, 14 aa, Homo sapiens
  CDR3 for beta chain variable domain of TCR clone 383773 (TRBV6-5, TRBJ1-2)
CASSYDGTGGGYTF

SEQ ID NO: 767547 - protein, 13 aa, Homo sapiens
  CDR3 for alpha chain variable domain of TCR clone 383774 (TRAV21, TRAJ27)
CAARLGNAGKSTF

SEQ ID NO: 767548 - protein, 16 aa, Homo sapiens
  CDR3 for beta chain variable domain of TCR clone 383774 (TRBV7-6, TRBJ2-1)
CIAVPAAWGGADEQFF

SEQ ID NO: 767549 - protein, 16 aa, Homo sapiens
  CDR3 for alpha chain variable domain of TCR clone 383775 (TRAV35, TRAJ28)
CAGYLYSWAGSYQLTF

SEQ ID NO: 767550 - protein, 16 aa, Homo sapiens
  CDR3 for beta chain variable domain of TCR clone 383775 (TRBV5-1, TRBJ2-1)
CASSHGLAGAKNEQFF

SEQ ID NO: 767551 - protein, 13 aa, Homo sapiens
  CDR3 for alpha chain variable domain of TCR clone 383776 (TRAV12-2, TRAJ52)
CAVSGTSYGKLPF

SEQ ID NO: 767552 - protein, 17 aa, Homo sapiens
  CDR3 for beta chain variable domain of TCR clone 383776 (TRBV11-2, TRBJ2-1)
CAGSLYPPGVEYNEQFF

SEQ ID NO: 767553 - protein, 13 aa, Homo sapiens
  CDR3 for alpha chain variable domain of TCR clone 383777 (TRAV12-1, TRAJ13)
CVVALLGYQQVTF

SEQ ID NO: 767554 - protein, 13 aa, Homo sapiens
  CDR3 for beta chain variable domain of TCR clone 383777 (TRBV20-1, TRBJ2-5)
CSAILTGQETQYF

SEQ ID NO: 767555 - protein, 17 aa, Homo sapiens
  CDR3 for alpha chain variable domain of TCR clone 383778 (TRAV3, TRAJ6)
CAVRDGPRAGGSYIPTF

SEQ ID NO: 767556 - protein, 17 aa, Homo sapiens
  CDR3 for beta chain variable domain of TCR clone 383778 (TRBV7-6, TRBJ2-5)
CASSLGGLAGGLKTQYF

SEQ ID NO: 767557 - protein, 14 aa, Homo sapiens
  CDR3 for alpha chain variable domain of TCR clone 383779 (TRAV27, TRAJ22)
CAGLPSGSPRQLTF

SEQ ID NO: 767558 - protein, 16 aa, Homo sapiens
  CDR3 for beta chain variable domain of TCR clone 383779 (TRBV7-3, TRBJ2-2)
CASSLKRGTLSGELFF

SEQ ID NO: 767559 - protein, 14 aa, Homo sapiens
  CDR3 for alpha chain variable domain of TCR clone 383780 (TRAV13-1, TRAJ35)
CAACKGGFGNVLHC

SEQ ID NO: 767560 - protein, 15 aa, Homo sapiens
  CDR3 for beta chain variable domain of TCR clone 383780 (TRBV7-9, TRBJ1-6)
CASSSPGRGNSPLHF

SEQ ID NO: 767561 - protein, 13 aa, Homo sapiens
  CDR3 for alpha chain variable domain of TCR clone 383781 (TRAV27, TRAJ56)
CAGKPGANSKLTF

SEQ ID NO: 767562 - protein, 16 aa, Homo sapiens
  CDR3 for beta chain variable domain of TCR clone 383781 (TRBV19, TRBJ1-1)
CASRFGGPVTGTEAFF

SEQ ID NO: 767563 - protein, 11 aa, Homo sapiens
  CDR3 for alpha chain variable domain of TCR clone 383782 (TRAV3, TRAJ21)
CAVGNFDKFYF

SEQ ID NO: 767564 - protein, 15 aa, Homo sapiens
  CDR3 for beta chain variable domain of TCR clone 383782 (TRBV6-3, TRBJ2-1)
CASSYASDSYNEQFF

SEQ ID NO: 767565 - protein, 13 aa, Homo sapiens
  CDR3 for alpha chain variable domain of TCR clone 383783 (TRAV23/DV6, TRAJ12)
YAPRVDSSYKLIF

SEQ ID NO: 767566 - protein, 12 aa, Homo sapiens
  CDR3 for beta chain variable domain of TCR clone 383783 (TRBV7-8, TRBJ2-7)
CASSLGDREQYF

SEQ ID NO: 767567 - protein, 19 aa, Homo sapiens
  CDR3 for alpha chain variable domain of TCR clone 383784 (TRAV26-1, TRAJ52)
CIVRVGNNAGGTSYGKLTF

SEQ ID NO: 767568 - protein, 14 aa, Homo sapiens
  CDR3 for beta chain variable domain of TCR clone 383784 (TRBV19, TRBJ1-2)
CASSIGAGSYGYTF

SEQ ID NO: 767569 - protein, 13 aa, Homo sapiens
  CDR3 for alpha chain variable domain of TCR clone 383785 (TRAV17, TRAJ26)
CATVDNYGQNFVF

SEQ ID NO: 767570 - protein, 14 aa, Homo sapiens
  CDR3 for beta chain variable domain of TCR clone 383785 (TRBV5-1, TRBJ2-7)
CASSSGTGGYEQYF

SEQ ID NO: 767571 - protein, 11 aa, Homo sapiens
  CDR3 for alpha chain variable domain of TCR clone 383786 (TRAV21, TRAJ34)
CAVTNTDKLIF

SEQ ID NO: 767572 - protein, 16 aa, Homo sapiens
  CDR3 for beta chain variable domain of TCR clone 383786 (TRBV18, TRBJ1-1)
CASSPGVGGRGGQAFF

SEQ ID NO: 767573 - protein, 13 aa, Homo sapiens
  CDR3 for alpha chain variable domain of TCR clone 383787 (TRAV21, TRAJ57)
CAVTQGGSEKLVF

SEQ ID NO: 767574 - protein, 17 aa, Homo sapiens
  CDR3 for beta chain variable domain of TCR clone 383787 (TRBV10-3, TRBJ2-4)
CTSVPSVNKGSKNIQYF

SEQ ID NO: 767575 - protein, 15 aa, Homo sapiens
  CDR3 for alpha chain variable domain of TCR clone 383788 (TRAV12-2, TRAJ53)
CAVNGGGGSNYKLTF

SEQ ID NO: 767576 - protein, 17 aa, Homo sapiens
  CDR3 for beta chain variable domain of TCR clone 383788 (TRBV7-3, TRBJ2-3)
CASSLTKGMRGADTQYF

SEQ ID NO: 767577 - protein, 14 aa, Homo sapiens
  CDR3 for alpha chain variable domain of TCR clone 383789 (TRAV12-1, TRAJ17)
CVVNYKAAGNQLTF

SEQ ID NO: 767578 - protein, 15 aa, Homo sapiens
  CDR3 for beta chain variable domain of TCR clone 383789 (TRBV7-2, TRBJ2-1)
CASTHGTGIYNEQFF

SEQ ID NO: 767579 - protein, 13 aa, Homo sapiens
  CDR3 for alpha chain variable domain of TCR clone 383790 (TRAV13-1, TRAJ5)
CAARVTGRRTLTF

SEQ ID NO: 767580 - protein, 15 aa, Homo sapiens
  CDR3 for beta chain variable domain of TCR clone 383790 (TRBV7-9, TRBJ2-7)
CASSPGGGLTYEQYF

SEQ ID NO: 767581 - protein, 16 aa, Homo sapiens
  CDR3 for alpha chain variable domain of TCR clone 383791 (TRAV14/DV4, TRAJ54)
CAMREGRIQGAQKLVF

SEQ ID NO: 767582 - protein, 15 aa, Homo sapiens
  CDR3 for beta chain variable domain of TCR clone 383791 (TRBV6-1, TRBJ2-3)
CASSERGGITDTQYF

SEQ ID NO: 767583 - protein, 12 aa, Homo sapiens
  CDR3 for alpha chain variable domain of TCR clone 383792 (TRAV25, TRAJ5)
CAGGGGRRALTF

SEQ ID NO: 767584 - protein, 18 aa, Homo sapiens
  CDR3 for beta chain variable domain of TCR clone 383792 (TRBV7-9, TRBJ2-7)
CASSLTTSGSRTWYEQYF

SEQ ID NO: 767585 - protein, 15 aa, Homo sapiens
  CDR3 for alpha chain variable domain of TCR clone 383793 (TRAV20, TRAJ41)
CAVQANSNSGYALNF

SEQ ID NO: 767586 - protein, 18 aa, Homo sapiens
  CDR3 for beta chain variable domain of TCR clone 383793 (TRBV7-9, TRBJ2-7)
CASSLTTSGGRTWYEQYF

SEQ ID NO: 767587 - protein, 13 aa, Homo sapiens
  CDR3 for alpha chain variable domain of TCR clone 383794 (TRAV12-2, TRAJ24)
CAVSTDSWVKLQF

SEQ ID NO: 767588 - protein, 12 aa, Homo sapiens
  CDR3 for beta chain variable domain of TCR clone 383794 (TRBV7-6, TRBJ2-7)
CASSLADSEQYF

SEQ ID NO: 767589 - protein, 15 aa, Homo sapiens
  CDR3 for alpha chain variable domain of TCR clone 383795 (TRAV3, TRAJ47)
CAVRDIGEYGNKLVF

SEQ ID NO: 767590 - protein, 15 aa, Homo sapiens
  CDR3 for beta chain variable domain of TCR clone 383795 (TRBV20-1, TRBJ2-7)
CSARDRVSGMDEQYF

SEQ ID NO: 767591 - protein, 13 aa, Homo sapiens
  CDR3 for alpha chain variable domain of TCR clone 383796 (TRAV3, TRAJ20)
CCEAFCNDYKLSF

SEQ ID NO: 767592 - protein, 14 aa, Homo sapiens
  CDR3 for beta chain variable domain of TCR clone 383796 (TRBV28, TRBJ1-2)
CASRIQGANYGYTF

SEQ ID NO: 767593 - protein, 15 aa, Homo sapiens
  CDR3 for alpha chain variable domain of TCR clone 383797 (TRAV12-2, TRAJ53)
CAVNGGGGSNYKLTF

SEQ ID NO: 767594 - protein, 15 aa, Homo sapiens
  CDR3 for beta chain variable domain of TCR clone 383797 (TRBV12-4, TRBJ1-1)
CASSLAVSRGAEAFF

SEQ ID NO: 767595 - protein, 12 aa, Homo sapiens
  CDR3 for alpha chain variable domain of TCR clone 383798 (TRAV12-3, TRAJ17)
CAMTLTGNKLTL

SEQ ID NO: 767596 - protein, 14 aa, Homo sapiens
  CDR3 for beta chain variable domain of TCR clone 383798 (TRBV4-1, TRBJ2-7)
CASSQDREHVEQYF

SEQ ID NO: 767597 - protein, 14 aa, Homo sapiens
  CDR3 for alpha chain variable domain of TCR clone 383799 (TRAV12-3, TRAJ33)
CAMSVPGSNSQLIW

SEQ ID NO: 767598 - protein, 12 aa, Homo sapiens
  CDR3 for beta chain variable domain of TCR clone 383799 (TRBV7-8, TRBJ2-7)
CASSLGDREQYF

SEQ ID NO: 767599 - protein, 14 aa, Homo sapiens
  CDR3 for alpha chain variable domain of TCR clone 383800 (TRAV12-2, TRAJ40)
CAVKIPSGTYKYIF

SEQ ID NO: 767600 - protein, 18 aa, Homo sapiens
  CDR3 for beta chain variable domain of TCR clone 383800 (TRBV6-5, TRBJ2-5)
CASSYSQAGGSYQETQYF

SEQ ID NO: 767601 - protein, 16 aa, Homo sapiens
  CDR3 for alpha chain variable domain of TCR clone 383801 (TRAV12-3, TRAJ53)
CAMSPGSGGSNYKLKF

SEQ ID NO: 767602 - protein, 11 aa, Homo sapiens
  CDR3 for beta chain variable domain of TCR clone 383801 (TRBV29-1, TRBJ2-5)
CSEDRTGTQHF

SEQ ID NO: 767603 - protein, 14 aa, Homo sapiens
  CDR3 for alpha chain variable domain of TCR clone 383802 (TRAV26-1, TRAJ49)
CIVRPSNTGNQFSF

SEQ ID NO: 767604 - protein, 15 aa, Homo sapiens
  CDR3 for beta chain variable domain of TCR clone 383802 (TRBV19, TRBJ1-1)
CASMGFRDVNTEAFF

SEQ ID NO: 767605 - protein, 12 aa, Homo sapiens
  CDR3 for alpha chain variable domain of TCR clone 383803 (TRAV8-3, TRAJ20)
CAVGANDYKLSF

SEQ ID NO: 767606 - protein, 15 aa, Homo sapiens
  CDR3 for beta chain variable domain of TCR clone 383803 (TRBV11-2, TRBJ2-1)
YASSLGTSGLNEQFF

SEQ ID NO: 767607 - protein, 14 aa, Homo sapiens
  CDR3 for alpha chain variable domain of TCR clone 383804 (TRAV1-2, TRAJ8)
CAVREDTGFQKLVF

SEQ ID NO: 767608 - protein, 13 aa, Homo sapiens
  CDR3 for beta chain variable domain of TCR clone 383804 (TRBV20-1, TRBJ1-1)
CSARAGGNTEAFF

SEQ ID NO: 767609 - protein, 16 aa, Homo sapiens
  CDR3 for alpha chain variable domain of TCR clone 383805 (TRAV17, TRAJ52)
CATGIIGGTSYGNLTF

SEQ ID NO: 767610 - protein, 12 aa, Homo sapiens
  CDR3 for beta chain variable domain of TCR clone 383805 (TRBV7-3, TRBJ2-1)
CASSFINNEQFF

SEQ ID NO: 767611 - protein, 14 aa, Homo sapiens
  CDR3 for alpha chain variable domain of TCR clone 383806 (TRAV1-2, TRAJ16)
CAVNRFSDGQKLHF

SEQ ID NO: 767612 - protein, 16 aa, Homo sapiens
  CDR3 for beta chain variable domain of TCR clone 383806 (TRBV12-5, TRBJ2-5)
CASGPRTSGNQETQYF

SEQ ID NO: 767613 - protein, 14 aa, Homo sapiens
  CDR3 for alpha chain variable domain of TCR clone 383807 (TRAV17, TRAJ16)
CATADFSDGQKLLF

SEQ ID NO: 767614 - protein, 14 aa, Homo sapiens
  CDR3 for beta chain variable domain of TCR clone 383807 (TRBV7-2, TRBJ2-7)
CASSLDPGPYEQYF

SEQ ID NO: 767615 - protein, 12 aa, Homo sapiens
  CDR3 for alpha chain variable domain of TCR clone 383808 (TRAV2, TRAJ9)
CAVGAGGFKTIC

SEQ ID NO: 767616 - protein, 11 aa, Homo sapiens
  CDR3 for beta chain variable domain of TCR clone 383808 (TRBV13, TRBJ2-2)
CASSPRTGEHT

SEQ ID NO: 767617 - protein, 12 aa, Homo sapiens
  CDR3 for alpha chain variable domain of TCR clone 383809 (TRAV12-3, TRAJ17)
CAMTLTGNKITF

SEQ ID NO: 767618 - protein, 12 aa, Homo sapiens
  CDR3 for beta chain variable domain of TCR clone 383809 (TRBV2, TRBJ2-1)
CAYGPPGNEQFF

SEQ ID NO: 767619 - protein, 11 aa, Homo sapiens
  CDR3 for alpha chain variable domain of TCR clone 383810 (TRAV17, TRAJ43)
CATPRSNDMRF

SEQ ID NO: 767620 - protein, 15 aa, Homo sapiens
  CDR3 for beta chain variable domain of TCR clone 383810 (TRBV11-2, TRBJ2-1)
CDSSLGTSGLNEQFF

SEQ ID NO: 767621 - protein, 14 aa, Homo sapiens
  CDR3 for alpha chain variable domain of TCR clone 383811 (TRAV16, TRAJ32)
CALKSGGATNKLIF

SEQ ID NO: 767622 - protein, 13 aa, Homo sapiens
  CDR3 for beta chain variable domain of TCR clone 383811 (TRBV15, TRBJ1-6)
CATSGGLNSPPHF

SEQ ID NO: 767623 - protein, 11 aa, Homo sapiens
  CDR3 for alpha chain variable domain of TCR clone 383812 (TRAV29/DV5, TRAJ31)
CAASYRDRLMF

SEQ ID NO: 767624 - protein, 19 aa, Homo sapiens
  CDR3 for beta chain variable domain of TCR clone 383812 (TRBV19, TRBJ2-5)
CASSIGRVTDFFLGETQYF

SEQ ID NO: 767625 - protein, 15 aa, Homo sapiens
  CDR3 for alpha chain variable domain of TCR clone 383813 (TRAV12-1, TRAJ44)
CVVFVNTGTASKLTF

SEQ ID NO: 767626 - protein, 14 aa, Homo sapiens
  CDR3 for beta chain variable domain of TCR clone 383813 (TRBV20-1, TRBJ2-1)
CSAQIGGAANEQFF

SEQ ID NO: 767627 - protein, 13 aa, Homo sapiens
  CDR3 for alpha chain variable domain of TCR clone 383814 (TRAV41, TRAJ48)
SVPVNFGNEKLTF

SEQ ID NO: 767628 - protein, 14 aa, Homo sapiens
  CDR3 for beta chain variable domain of TCR clone 383814 (TRBV6-1, TRBJ1-3)
CASVQGGGGNTIYF

SEQ ID NO: 767629 - protein, 15 aa, Homo sapiens
  CDR3 for alpha chain variable domain of TCR clone 383815 (TRAV12-3, TRAJ6)
CAMSATTGGSYIPTF

SEQ ID NO: 767630 - protein, 13 aa, Homo sapiens
  CDR3 for beta chain variable domain of TCR clone 383815 (TRBV12-4, TRBJ2-1)
CASSLSPSNEQFF

SEQ ID NO: 767631 - protein, 15 aa, Homo sapiens
  CDR3 for alpha chain variable domain of TCR clone 383816 (TRAV13-2, TRAJ40)
CAENRSRQGTYKYIV

SEQ ID NO: 767632 - protein, 15 aa, Homo sapiens
  CDR3 for beta chain variable domain of TCR clone 383816 (TRBV19, TRBJ2-1)
CASSMGWNSNNEQFF

SEQ ID NO: 767633 - protein, 13 aa, Homo sapiens
  CDR3 for alpha chain variable domain of TCR clone 383817 (TRAV36/DV7, TRAJ7)
CAGTRYGNNRLAF

SEQ ID NO: 767634 - protein, 15 aa, Homo sapiens
  CDR3 for beta chain variable domain of TCR clone 383817 (TRBV11-3, TRBJ2-7)
CDSSPGPASSYEQYF

SEQ ID NO: 767635 - protein, 11 aa, Homo sapiens
  CDR3 for alpha chain variable domain of TCR clone 383818 (TRAV3, TRAJ21)
SAVGNFNKFYF

SEQ ID NO: 767636 - protein, 16 aa, Homo sapiens
  CDR3 for beta chain variable domain of TCR clone 383818 (TRBV19, TRBJ2-1)
CASSKAGPSSYNEQFF

SEQ ID NO: 767637 - protein, 14 aa, Homo sapiens
  CDR3 for alpha chain variable domain of TCR clone 383819 (TRAV1-2, TRAJ16)
CAVRSASDGQKLLF

SEQ ID NO: 767638 - protein, 14 aa, Homo sapiens
  CDR3 for beta chain variable domain of TCR clone 383819 (TRBV7-3, TRBJ2-1)
CASSLAGGTNEQFF

SEQ ID NO: 767639 - protein, 14 aa, Homo sapiens
  CDR3 for alpha chain variable domain of TCR clone 383820 (TRAV38-1, TRAJ29)
CSFITPSGNTPLVF

SEQ ID NO: 767640 - protein, 15 aa, Homo sapiens
  CDR3 for beta chain variable domain of TCR clone 383820 (TRBV5-1, TRBJ2-1)
CASSPPRAPYNEQFF

SEQ ID NO: 767641 - protein, 17 aa, Homo sapiens
  CDR3 for alpha chain variable domain of TCR clone 383821 (TRAV3, TRAJ6)
CAVRDGPRAGGSYIPTF

SEQ ID NO: 767642 - protein, 14 aa, Homo sapiens
  CDR3 for beta chain variable domain of TCR clone 383821 (TRBV20-1, TRBJ2-7)
CSAKRGRSSYEHYF

SEQ ID NO: 767643 - protein, 12 aa, Homo sapiens
  CDR3 for alpha chain variable domain of TCR clone 383822 (TRAV12-2, TRAJ52)
IGGGTSYGKLTV

SEQ ID NO: 767644 - protein, 13 aa, Homo sapiens
  CDR3 for beta chain variable domain of TCR clone 383822 (TRBV12-4, TRBJ1-1)
CASSPGTGFEAFF

SEQ ID NO: 767645 - protein, 14 aa, Homo sapiens
  CDR3 for alpha chain variable domain of TCR clone 383823 (TRAV12-2, TRAJ40)
CAVKIPSGTYKYIF

SEQ ID NO: 767646 - protein, 16 aa, Homo sapiens
  CDR3 for beta chain variable domain of TCR clone 383823 (TRBV10-3, TRBJ2-1)
CAIRGGGRGDYNEQFF

SEQ ID NO: 767647 - protein, 10 aa, Homo sapiens
  CDR3 for alpha chain variable domain of TCR clone 383824 (TRAV25, TRAJ53)
CAGSNYKLTF

SEQ ID NO: 767648 - protein, 15 aa, Homo sapiens
  CDR3 for beta chain variable domain of TCR clone 383824 (TRBV6-3, TRBJ2-7)
CASSSPGTVFYEQYF

SEQ ID NO: 767649 - protein, 11 aa, Homo sapiens
  CDR3 for alpha chain variable domain of TCR clone 383825 (TRAV12-1, TRAJ30)
CVVNGQDKIIF

SEQ ID NO: 767650 - protein, 13 aa, Homo sapiens
  CDR3 for beta chain variable domain of TCR clone 383825 (TRBV7-9, TRBJ1-2)
CASGLKQNYGYTF

SEQ ID NO: 767651 - protein, 14 aa, Homo sapiens
  CDR3 for alpha chain variable domain of TCR clone 383826 (TRAV23/DV6, TRAJ11)
CEALIGGGYSTLPF

SEQ ID NO: 767652 - protein, 13 aa, Homo sapiens
  CDR3 for beta chain variable domain of TCR clone 383826 (TRBV11-3, TRBJ1-1)
CASSLGGNTEAFF

SEQ ID NO: 767653 - protein, 15 aa, Homo sapiens
  CDR3 for alpha chain variable domain of TCR clone 383827 (TRAV12-3, TRAJ27)
CGMRAYNTNAGKSTF

SEQ ID NO: 767654 - protein, 13 aa, Homo sapiens
  CDR3 for beta chain variable domain of TCR clone 383827 (TRBV11-2, TRBJ2-5)
CASSRGPSETQYF

SEQ ID NO: 767655 - protein, 15 aa, Homo sapiens
  CDR3 for alpha chain variable domain of TCR clone 383828 (TRAV17, TRAJ57)
CATGPSQGGSEKLVF

SEQ ID NO: 767656 - protein, 14 aa, Homo sapiens
  CDR3 for beta chain variable domain of TCR clone 383828 (TRBV4-2, TRBJ2-3)
CASRETRAPGMQYF

SEQ ID NO: 767657 - protein, 16 aa, Homo sapiens
  CDR3 for alpha chain variable domain of TCR clone 383829 (TRAV35, TRAJ28)
CAGRRGGWELPTHFRE

SEQ ID NO: 767658 - protein, 13 aa, Homo sapiens
  CDR3 for beta chain variable domain of TCR clone 383829 (TRBV9, TRBJ2-1)
CASSPSGGSEQFF

SEQ ID NO: 767659 - protein, 15 aa, Homo sapiens
  CDR3 for alpha chain variable domain of TCR clone 383830 (TRAV3, TRAJ5)
CAVRDRKTGRRALTF

SEQ ID NO: 767660 - protein, 15 aa, Homo sapiens
  CDR3 for beta chain variable domain of TCR clone 383830 (TRBV7-2, TRBJ1-2)
CASSPRAGWNYGYTF

SEQ ID NO: 767661 - protein, 15 aa, Homo sapiens
  CDR3 for alpha chain variable domain of TCR clone 383831 (TRAV21, TRAJ36)
CAVRRKQTGANNLFF

SEQ ID NO: 767662 - protein, 14 aa, Homo sapiens
  CDR3 for beta chain variable domain of TCR clone 383831 (TRBV7-9, TRBJ2-1)
CASSPRDSLYEQFF

SEQ ID NO: 767663 - protein, 17 aa, Homo sapiens
  CDR3 for alpha chain variable domain of TCR clone 383832 (TRAV13-1, TRAJ23)
CAASKRFHRLRKAYLRT

SEQ ID NO: 767664 - protein, 16 aa, Homo sapiens
  CDR3 for beta chain variable domain of TCR clone 383832 (TRBV7-7, TRBJ2-1)
CASSLASGTSYNEQFF

SEQ ID NO: 767665 - protein, 15 aa, Homo sapiens
  CDR3 for alpha chain variable domain of TCR clone 383833 (TRAV35, TRAJ23)
CAGPLGNNQGGKLSF

SEQ ID NO: 767666 - protein, 14 aa, Homo sapiens
  CDR3 for beta chain variable domain of TCR clone 383833 (TRBV7-9, TRBJ1-1)
CASTPLQSYTEAFF

SEQ ID NO: 767667 - protein, 15 aa, Homo sapiens
  CDR3 for alpha chain variable domain of TCR clone 383834 (TRAV3, TRAJ22)
CAVRDRGGSARQLTF

SEQ ID NO: 767668 - protein, 13 aa, Homo sapiens
  CDR3 for beta chain variable domain of TCR clone 383834 (TRBV20-1, TRBJ1-5)
CSASGRGNQPQHF

SEQ ID NO: 767669 - protein, 14 aa, Homo sapiens
  CDR3 for alpha chain variable domain of TCR clone 383835 (TRAV26-1, TRAJ34)
CIVRVAYNTDKLTF

SEQ ID NO: 767670 - protein, 14 aa, Homo sapiens
  CDR3 for beta chain variable domain of TCR clone 383835 (TRBV20-1, TRBJ2-7)
CSAWTALSSYEQYF

SEQ ID NO: 767671 - protein, 11 aa, Homo sapiens
  CDR3 for alpha chain variable domain of TCR clone 383836 (TRAV12-1, TRAJ8)
CVVTGCQKLVF

SEQ ID NO: 767672 - protein, 14 aa, Homo sapiens
  CDR3 for beta chain variable domain of TCR clone 383836 (TRBV19, TRBJ2-1)
CASGKSTQYNEQFF

SEQ ID NO: 767673 - protein, 14 aa, Homo sapiens
  CDR3 for alpha chain variable domain of TCR clone 383837 (TRAV1-2, TRAJ8)
CAVREDTGFQKLVF

SEQ ID NO: 767674 - protein, 15 aa, Homo sapiens
  CDR3 for beta chain variable domain of TCR clone 383837 (TRBV12-4, TRBJ2-5)
CASTPPTGLQETQYF

SEQ ID NO: 767675 - protein, 12 aa, Homo sapiens
  CDR3 for alpha chain variable domain of TCR clone 383838 (TRAV3, TRAJ43)
CAVRDPNNDMRF

SEQ ID NO: 767676 - protein, 17 aa, Homo sapiens
  CDR3 for beta chain variable domain of TCR clone 383838 (TRBV20-1, TRBJ2-2)
CSASGSRQGGLTGELFF

SEQ ID NO: 767677 - protein, 15 aa, Homo sapiens
  CDR3 for alpha chain variable domain of TCR clone 383839 (TRAV35, TRAJ40)
CAGQLGTSGTYKYIF

SEQ ID NO: 767678 - protein, 10 aa, Homo sapiens
  CDR3 for beta chain variable domain of TCR clone 383839 (TRBV23-1, TRBJ2-7)
SAGTGHEQYF

SEQ ID NO: 767679 - protein, 10 aa, Homo sapiens
  CDR3 for alpha chain variable domain of TCR clone 383840 (TRAV30, TRAJ24)
WMLTAGKFQF

SEQ ID NO: 767680 - protein, 15 aa, Homo sapiens
  CDR3 for beta chain variable domain of TCR clone 383840 (TRBV12-4, TRBJ2-2)
CASSPNDSGTGELFF

SEQ ID NO: 767681 - protein, 14 aa, Homo sapiens
  CDR3 for alpha chain variable domain of TCR clone 383841 (TRAV4, TRAJ43)
CLVRPMYNNNDMRF

SEQ ID NO: 767682 - protein, 21 aa, Homo sapiens
  CDR3 for beta chain variable domain of TCR clone 383841 (TRBV11-1, TRBJ2-1)
CASSARERLRPEGPSYNEQFF

SEQ ID NO: 767683 - protein, 14 aa, Homo sapiens
  CDR3 for alpha chain variable domain of TCR clone 383842 (TRAV12-2, TRAJ53)
CAVKGGGSNYKLTV

SEQ ID NO: 767684 - protein, 14 aa, Homo sapiens
  CDR3 for beta chain variable domain of TCR clone 383842 (TRBV7-7, TRBJ2-2)
CATRQDSDTGELFF

SEQ ID NO: 767685 - protein, 11 aa, Homo sapiens
  CDR3 for alpha chain variable domain of TCR clone 383843 (TRAV13-1, TRAJ39)
CASHAGNMLTF

SEQ ID NO: 767686 - protein, 14 aa, Homo sapiens
  CDR3 for beta chain variable domain of TCR clone 383843 (TRBV7-9, TRBJ2-5)
CASSLDTAQETQYF

SEQ ID NO: 767687 - protein, 15 aa, Homo sapiens
  CDR3 for alpha chain variable domain of TCR clone 383844 (TRAV17, TRAJ56)
CATEPFTGANSKLTF

SEQ ID NO: 767688 - protein, 15 aa, Homo sapiens
  CDR3 for beta chain variable domain of TCR clone 383844 (TRBV28, TRBJ1-5)
CASSRTGGYVQPHHF

SEQ ID NO: 767689 - protein, 13 aa, Homo sapiens
  CDR3 for alpha chain variable domain of TCR clone 383845 (TRAV12-3, TRAJ7)
CAMTPYGNNRLAF

SEQ ID NO: 767690 - protein, 12 aa, Homo sapiens
  CDR3 for beta chain variable domain of TCR clone 383845 (TRBV5-4, TRBJ2-5)
CASSSTRETQYF

SEQ ID NO: 767691 - protein, 14 aa, Homo sapiens
  CDR3 for alpha chain variable domain of TCR clone 383846 (TRAV1-2, TRAJ17)
CALRRGAAGNKLIF

SEQ ID NO: 767692 - protein, 13 aa, Homo sapiens
  CDR3 for beta chain variable domain of TCR clone 383846 (TRBV9, TRBJ2-1)
CASSVGQGGEQFF

SEQ ID NO: 767693 - protein, 14 aa, Homo sapiens
  CDR3 for alpha chain variable domain of TCR clone 383847 (TRAV29/DV5, TRAJ29)
CAARSNSGNTPLVF

SEQ ID NO: 767694 - protein, 17 aa, Homo sapiens
  CDR3 for beta chain variable domain of TCR clone 383847 (TRBV4-2, TRBJ2-1)
CASSQVSGLAMNSEQFF

SEQ ID NO: 767695 - protein, 14 aa, Homo sapiens
  CDR3 for alpha chain variable domain of TCR clone 383848 (TRAV2, TRAJ29)
CAGPFQYGNTPLVF

SEQ ID NO: 767696 - protein, 14 aa, Homo sapiens
  CDR3 for beta chain variable domain of TCR clone 383848 (TRBV19, TRBJ2-1)
CASPTFVLSGEQFI

SEQ ID NO: 767697 - protein, 12 aa, Homo sapiens
  CDR3 for alpha chain variable domain of TCR clone 383849 (TRAV30, TRAJ43)
CGTEERGNDMRF

SEQ ID NO: 767698 - protein, 15 aa, Homo sapiens
  CDR3 for beta chain variable domain of TCR clone 383849 (TRBV7-2, TRBJ1-2)
CASSPRAGWNYGYTF

SEQ ID NO: 767699 - protein, 11 aa, Homo sapiens
  CDR3 for alpha chain variable domain of TCR clone 383850 (TRAV12-3, TRAJ43)
CAMSVSNDMRF

SEQ ID NO: 767700 - protein, 13 aa, Homo sapiens
  CDR3 for beta chain variable domain of TCR clone 383850 (TRBV20-1, TRBJ1-1)
CSAPHGGGTKAFF

SEQ ID NO: 767701 - protein, 12 aa, Homo sapiens
  CDR3 for alpha chain variable domain of TCR clone 383851 (TRAV8-3, TRAJ26)
CAGDNYGQNFVF

SEQ ID NO: 767702 - protein, 14 aa, Homo sapiens
  CDR3 for beta chain variable domain of TCR clone 383851 (TRBV11-2, TRBJ1-4)
CASSPEVKNEKLFF

SEQ ID NO: 767703 - protein, 14 aa, Homo sapiens
  CDR3 for alpha chain variable domain of TCR clone 383852 (TRAV12-2, TRAJ13)
CAVKKTGGYQKGTF

SEQ ID NO: 767704 - protein, 15 aa, Homo sapiens
  CDR3 for beta chain variable domain of TCR clone 383852 (TRBV11-2, TRBJ2-2)
CASSSDRVNAGELFF

SEQ ID NO: 767705 - protein, 12 aa, Homo sapiens
  CDR3 for alpha chain variable domain of TCR clone 383853 (TRAV12-3, TRAJ17)
CAMTLTGNKLTF

SEQ ID NO: 767706 - protein, 16 aa, Homo sapiens
  CDR3 for beta chain variable domain of TCR clone 383853 (TRBV7-3, TRBJ2-1)
CASSLEGYRPYNEQFF

SEQ ID NO: 767707 - protein, 13 aa, Homo sapiens
  CDR3 for alpha chain variable domain of TCR clone 383854 (TRAV17, TRAJ20)
CAPLVVDDYKLSF

SEQ ID NO: 767708 - protein, 12 aa, Homo sapiens
  CDR3 for beta chain variable domain of TCR clone 383854 (TRBV29-1, TRBJ2-3)
CSVTGGADTQYF

SEQ ID NO: 767709 - protein, 12 aa, Homo sapiens
  CDR3 for alpha chain variable domain of TCR clone 383855 (TRAV29/DV5, TRAJ15)
CASNQAGTALIF

SEQ ID NO: 767710 - protein, 14 aa, Homo sapiens
  CDR3 for beta chain variable domain of TCR clone 383855 (TRBV12-5, TRBJ2-5)
CASGSRTHQETQYF

SEQ ID NO: 767711 - protein, 11 aa, Homo sapiens
  CDR3 for alpha chain variable domain of TCR clone 383856 (TRAV1-2, TRAJ40)
CAVPGTYKYIF

SEQ ID NO: 767712 - protein, 15 aa, Homo sapiens
  CDR3 for beta chain variable domain of TCR clone 383856 (TRBV25-1, TRBJ1-4)
CTSSPGDSTNGKLFF

SEQ ID NO: 767713 - protein, 17 aa, Homo sapiens
  CDR3 for alpha chain variable domain of TCR clone 383857 (TRAV8-6, TRAJ8)
CAVKEGIENTGFQKLVF

SEQ ID NO: 767714 - protein, 12 aa, Homo sapiens
  CDR3 for beta chain variable domain of TCR clone 383857 (TRBV19, TRBJ1-4)
CASKDWTGGLFF

SEQ ID NO: 767715 - protein, 15 aa, Homo sapiens
  CDR3 for alpha chain variable domain of TCR clone 383858 (TRAV29/DV5, TRAJ28)
CAAGYSGAGSYQLTF

SEQ ID NO: 767716 - protein, 16 aa, Homo sapiens
  CDR3 for beta chain variable domain of TCR clone 383858 (TRBV7-3, TRBJ2-2)
CASSLKRGTLSGELFF

SEQ ID NO: 767717 - protein, 12 aa, Homo sapiens
  CDR3 for alpha chain variable domain of TCR clone 383859 (TRAV21, TRAJ9)
CAVRLGGFKTIF

SEQ ID NO: 767718 - protein, 16 aa, Homo sapiens
  CDR3 for beta chain variable domain of TCR clone 383859 (TRBV12-5, TRBJ2-5)
CASGPRTSGSQETQYF

SEQ ID NO: 767719 - protein, 17 aa, Homo sapiens
  CDR3 for alpha chain variable domain of TCR clone 383860 (TRAV38-2/DV8, TRAJ38)
CAYRSARGAGNNRKPIG

SEQ ID NO: 767720 - protein, 13 aa, Homo sapiens
  CDR3 for beta chain variable domain of TCR clone 383860 (TRBV6-5, TRBJ2-1)
CASRGRVGNEQFF

SEQ ID NO: 767721 - protein, 13 aa, Homo sapiens
  CDR3 for alpha chain variable domain of TCR clone 383861 (TRAV21, TRAJ20)
CAVGLRVDYKLSF

SEQ ID NO: 767722 - protein, 19 aa, Homo sapiens
  CDR3 for beta chain variable domain of TCR clone 383861 (TRBV25-1, TRBJ2-2)
CAILVYRVDRGRKTGELFF

SEQ ID NO: 767723 - protein, 14 aa, Homo sapiens
  CDR3 for alpha chain variable domain of TCR clone 383862 (TRAV1-2, TRAJ16)
CAVNRFSDGQKLLF

SEQ ID NO: 767724 - protein, 16 aa, Homo sapiens
  CDR3 for beta chain variable domain of TCR clone 383862 (TRBV6-1, TRBJ2-1)
YASILRQGSSYNEQFF

SEQ ID NO: 767725 - protein, 12 aa, Homo sapiens
  CDR3 for alpha chain variable domain of TCR clone 383863 (TRAV27, TRAJ13)
CAGVRGYQKVTF

SEQ ID NO: 767726 - protein, 16 aa, Homo sapiens
  CDR3 for beta chain variable domain of TCR clone 383863 (TRBV28, TRBJ2-1)
CASSLSYSGSLNKQFF

SEQ ID NO: 767727 - protein, 14 aa, Homo sapiens
  CDR3 for alpha chain variable domain of TCR clone 383864 (TRAV8-3, TRAJ37)
CAVGSSGNPGKLIF

SEQ ID NO: 767728 - protein, 15 aa, Homo sapiens
  CDR3 for beta chain variable domain of TCR clone 383864 (TRBV11-2, TRBJ1-3)
CASSLSPLVRDTIYF

SEQ ID NO: 767729 - protein, 12 aa, Homo sapiens
  CDR3 for alpha chain variable domain of TCR clone 383865 (TRAV12-3, TRAJ41)
CAMSYSGYALNF

SEQ ID NO: 767730 - protein, 13 aa, Homo sapiens
  CDR3 for beta chain variable domain of TCR clone 383865 (TRBV11-2, TRBJ2-5)
CASSSTGEETQYF

SEQ ID NO: 767731 - protein, 14 aa, Homo sapiens
  CDR3 for alpha chain variable domain of TCR clone 383866 (TRAV8-4, TRAJ40)
CAVIPTSGTYRYIF

SEQ ID NO: 767732 - protein, 15 aa, Homo sapiens
  CDR3 for beta chain variable domain of TCR clone 383866 (TRBV7-2, TRBJ2-1)
CASTSASGDYNEQFF

SEQ ID NO: 767733 - protein, 12 aa, Homo sapiens
  CDR3 for alpha chain variable domain of TCR clone 383867 (TRAV12-3, TRAJ17)
CAMTLTGNKLTF

SEQ ID NO: 767734 - protein, 17 aa, Homo sapiens
  CDR3 for beta chain variable domain of TCR clone 383867 (TRBV7-3, TRBJ2-3)
CASSLMKRMREADTQYF

SEQ ID NO: 767735 - protein, 18 aa, Homo sapiens
  CDR3 for alpha chain variable domain of TCR clone 383868 (TRAV29/DV5, TRAJ37)
CSVLLCSEGSGNTGKLIF

SEQ ID NO: 767736 - protein, 14 aa, Homo sapiens
  CDR3 for beta chain variable domain of TCR clone 383868 (TRBV5-1, TRBJ1-1)
FASSLAVGSGEAFF

SEQ ID NO: 767737 - protein, 19 aa, Homo sapiens
  CDR3 for alpha chain variable domain of TCR clone 383869 (TRAV26-1, TRAJ28)
CIVRVAHAYSGAGSYKLTF

SEQ ID NO: 767738 - protein, 15 aa, Homo sapiens
  CDR3 for beta chain variable domain of TCR clone 383869 (TRBV20-1, TRBJ1-1)
CSASRGVTGNTGAFF

SEQ ID NO: 767739 - protein, 10 aa, Homo sapiens
  CDR3 for alpha chain variable domain of TCR clone 383870 (TRAV30, TRAJ32)
CGTEKDMLVL

SEQ ID NO: 767740 - protein, 13 aa, Homo sapiens
  CDR3 for beta chain variable domain of TCR clone 383870 (TRBV10-3, TRBJ2-7)
SASKLAVNYEQYF

SEQ ID NO: 767741 - protein, 14 aa, Homo sapiens
  CDR3 for alpha chain variable domain of TCR clone 383871 (TRAV12-3, TRAJ10)
SHLPLTGGGNKLTF

SEQ ID NO: 767742 - protein, 15 aa, Homo sapiens
  CDR3 for beta chain variable domain of TCR clone 383871 (TRBV7-2, TRBJ1-2)
CASSPRAGWNYGYTV

SEQ ID NO: 767743 - protein, 13 aa, Homo sapiens
  CDR3 for alpha chain variable domain of TCR clone 383872 (TRAV29/DV5, TRAJ31)
CAASRNNNARLMF

SEQ ID NO: 767744 - protein, 16 aa, Homo sapiens
  CDR3 for beta chain variable domain of TCR clone 383872 (TRBV29-1, TRBJ2-7)
CSVEVVGTSGSYEQYF

SEQ ID NO: 767745 - protein, 13 aa, Homo sapiens
  CDR3 for alpha chain variable domain of TCR clone 383873 (TRAV2, TRAJ40)
CAVVTSGTYKYIF

SEQ ID NO: 767746 - protein, 14 aa, Homo sapiens
  CDR3 for beta chain variable domain of TCR clone 383873 (TRBV20-1, TRBJ2-5)
CSASGTPDQETQYF

SEQ ID NO: 767747 - protein, 17 aa, Homo sapiens
  CDR3 for alpha chain variable domain of TCR clone 383874 (TRAV3, TRAJ6)
CAVRDGPGAGGSSIPTF

SEQ ID NO: 767748 - protein, 14 aa, Homo sapiens
  CDR3 for beta chain variable domain of TCR clone 383874 (TRBV7-2, TRBJ2-7)
CASSPKTSFYEQYF

SEQ ID NO: 767749 - protein, 16 aa, Homo sapiens
  CDR3 for alpha chain variable domain of TCR clone 383875 (TRAV13-1, TRAJ37)
CAASSLGSSNTGKLIF

SEQ ID NO: 767750 - protein, 12 aa, Homo sapiens
  CDR3 for beta chain variable domain of TCR clone 383875 (TRBV6-1, TRBJ2-5)
CASSEGRETQYY

SEQ ID NO: 767751 - protein, 13 aa, Homo sapiens
  CDR3 for alpha chain variable domain of TCR clone 383876 (TRAV8-4, TRAJ49)
CAVRKLTGNQFYF

SEQ ID NO: 767752 - protein, 16 aa, Homo sapiens
  CDR3 for beta chain variable domain of TCR clone 383876 (TRBV5-7, TRBJ2-5)
CASTLAPAGGRETQYF

SEQ ID NO: 767753 - protein, 14 aa, Homo sapiens
  CDR3 for alpha chain variable domain of TCR clone 383877 (TRAV12-2, TRAJ5)
CAVNRSTGRRALTF

SEQ ID NO: 767754 - protein, 12 aa, Homo sapiens
  CDR3 for beta chain variable domain of TCR clone 383877 (TRBV19, TRBJ1-5)
CDSSIAQQPQHF

SEQ ID NO: 767755 - protein, 16 aa, Homo sapiens
  CDR3 for alpha chain variable domain of TCR clone 383878 (TRAV26-1, TRAJ53)
CIVRVAMGGIKYKLTF

SEQ ID NO: 767756 - protein, 12 aa, Homo sapiens
  CDR3 for beta chain variable domain of TCR clone 383878 (TRBV7-9, TRBJ1-5)
CASSPQGQPQHF

SEQ ID NO: 767757 - protein, 13 aa, Homo sapiens
  CDR3 for alpha chain variable domain of TCR clone 383879 (TRAV12-3, TRAJ6)
CANPSGGSYIPTF

SEQ ID NO: 767758 - protein, 14 aa, Homo sapiens
  CDR3 for beta chain variable domain of TCR clone 383879 (TRBV19, TRBJ1-1)
CASSRDRDATESFF

SEQ ID NO: 767759 - protein, 13 aa, Homo sapiens
  CDR3 for alpha chain variable domain of TCR clone 383880 (TRAV6, TRAJ20)
CALAVSNDYKLSF

SEQ ID NO: 767760 - protein, 15 aa, Homo sapiens
  CDR3 for beta chain variable domain of TCR clone 383880 (TRBV18, TRBJ1-2)
CASSPGNGLGYGYTF

SEQ ID NO: 767761 - protein, 16 aa, Homo sapiens
  CDR3 for alpha chain variable domain of TCR clone 383881 (TRAV26-1, TRAJ22)
CIVSRSYSGSARQLTF

SEQ ID NO: 767762 - protein, 16 aa, Homo sapiens
  CDR3 for beta chain variable domain of TCR clone 383881 (TRBV19, TRBJ1-1)
CASRFGGPVTGTEAFF

SEQ ID NO: 767763 - protein, 11 aa, Homo sapiens
  CDR3 for alpha chain variable domain of TCR clone 383882 (TRAV12-2, TRAJ49)
CAVHTGNQFYF

SEQ ID NO: 767764 - protein, 16 aa, Homo sapiens
  CDR3 for beta chain variable domain of TCR clone 383882 (TRBV19, TRBJ2-1)
CASSKAGPSSYNEQFF

SEQ ID NO: 767765 - protein, 15 aa, Homo sapiens
  CDR3 for alpha chain variable domain of TCR clone 383883 (TRAV8-3, TRAJ45)
CASSYSGVVADGLTF

SEQ ID NO: 767766 - protein, 18 aa, Homo sapiens
  CDR3 for beta chain variable domain of TCR clone 383883 (TRBV18, TRBJ1-3)
RASSPRGGAGPSGNTIYF

SEQ ID NO: 767767 - protein, 17 aa, Homo sapiens
  CDR3 for alpha chain variable domain of TCR clone 383884 (TRAV12-3, TRAJ6)
CAMSARGGAGGRNIPTF

SEQ ID NO: 767768 - protein, 12 aa, Homo sapiens
  CDR3 for beta chain variable domain of TCR clone 383884 (TRBV12-4, TRBJ2-3)
CASSTLPDTQYF

SEQ ID NO: 767769 - protein, 11 aa, Homo sapiens
  CDR3 for alpha chain variable domain of TCR clone 383885 (TRAV2, TRAJ33)
CAVESNYQLIW

SEQ ID NO: 767770 - protein, 18 aa, Homo sapiens
  CDR3 for beta chain variable domain of TCR clone 383885 (TRBV5-1, TRBJ1-6)
CASSVGGGYGERNSPLHF

SEQ ID NO: 767771 - protein, 13 aa, Homo sapiens
  CDR3 for alpha chain variable domain of TCR clone 383886 (TRAV8-6, TRAJ8)
CAVSNTGFQKLVF

SEQ ID NO: 767772 - protein, 15 aa, Homo sapiens
  CDR3 for beta chain variable domain of TCR clone 383886 (TRBV7-2, TRBJ2-2)
CASRRPGQNTGELFF

SEQ ID NO: 767773 - protein, 11 aa, Homo sapiens
  CDR3 for alpha chain variable domain of TCR clone 383887 (TRAV3, TRAJ21)
CAVRYIERGNF

SEQ ID NO: 767774 - protein, 14 aa, Homo sapiens
  CDR3 for beta chain variable domain of TCR clone 383887 (TRBV19, TRBJ1-5)
CASSKMTGPQPQHF

SEQ ID NO: 767775 - protein, 16 aa, Homo sapiens
  CDR3 for alpha chain variable domain of TCR clone 383888 (TRAV3, TRAJ21)
CAVRDIERGNFNKFYF

SEQ ID NO: 767776 - protein, 13 aa, Homo sapiens
  CDR3 for beta chain variable domain of TCR clone 383888 (TRBV28, TRBJ2-5)
CASSFAGGETQYF

SEQ ID NO: 767777 - protein, 15 aa, Homo sapiens
  CDR3 for alpha chain variable domain of TCR clone 383889 (TRAV25, TRAJ23)
CALAPNYNQGGKLIF

SEQ ID NO: 767778 - protein, 15 aa, Homo sapiens
  CDR3 for beta chain variable domain of TCR clone 383889 (TRBV11-3, TRBJ1-1)
CASSWDGNTEAFLDK

SEQ ID NO: 767779 - protein, 13 aa, Homo sapiens
  CDR3 for alpha chain variable domain of TCR clone 383890 (TRAV12-1, TRAJ42)
CGGGGGSQGNLIF

SEQ ID NO: 767780 - protein, 15 aa, Homo sapiens
  CDR3 for beta chain variable domain of TCR clone 383890 (TRBV5-4, TRBJ1-4)
CASSSFGTGNEKLFS

SEQ ID NO: 767781 - protein, 13 aa, Homo sapiens
  CDR3 for alpha chain variable domain of TCR clone 383891 (TRAV13-1, TRAJ37)
CAARSGNTGKIIF

SEQ ID NO: 767782 - protein, 14 aa, Homo sapiens
  CDR3 for beta chain variable domain of TCR clone 383891 (TRBV12-4, TRBJ2-3)
CASSLGQGTDTQYF

SEQ ID NO: 767783 - protein, 12 aa, Homo sapiens
  CDR3 for alpha chain variable domain of TCR clone 383892 (TRAV12-3, TRAJ17)
CAMTLTGNKLTF

SEQ ID NO: 767784 - protein, 14 aa, Homo sapiens
  CDR3 for beta chain variable domain of TCR clone 383892 (TRBV7-9, TRBJ2-1)
CASSLASGSNEQFF

SEQ ID NO: 767785 - protein, 12 aa, Homo sapiens
  CDR3 for alpha chain variable domain of TCR clone 383893 (TRAV23/DV6, TRAJ30)
CAASKGYDKIIF

SEQ ID NO: 767786 - protein, 18 aa, Homo sapiens
  CDR3 for beta chain variable domain of TCR clone 383893 (TRBV10-3, TRBJ2-3)
CAISESRVGPMRGDTQYF

SEQ ID NO: 767787 - protein, 16 aa, Homo sapiens
  CDR3 for alpha chain variable domain of TCR clone 383894 (TRAV21, TRAJ52)
CAVTNAGRTSYGKLTF

SEQ ID NO: 767788 - protein, 13 aa, Homo sapiens
  CDR3 for beta chain variable domain of TCR clone 383894 (TRBV20-1, TRBJ2-3)
CSARLAGTDTQYF

SEQ ID NO: 767789 - protein, 14 aa, Homo sapiens
  CDR3 for alpha chain variable domain of TCR clone 383895 (TRAV1-2, TRAJ16)
CAVNRFSDGPKLLF

SEQ ID NO: 767790 - protein, 14 aa, Homo sapiens
  CDR3 for beta chain variable domain of TCR clone 383895 (TRBV13, TRBJ1-1)
CASTVITVNTEAFF

SEQ ID NO: 767791 - protein, 15 aa, Homo sapiens
  CDR3 for alpha chain variable domain of TCR clone 383896 (TRAV8-4, TRAJ12)
CVVSDRVDSSYKLIF

SEQ ID NO: 767792 - protein, 15 aa, Homo sapiens
  CDR3 for beta chain variable domain of TCR clone 383896 (TRBV11-3, TRBJ2-1)
CASSLAGQTYNEQFF

SEQ ID NO: 767793 - protein, 14 aa, Homo sapiens
  CDR3 for alpha chain variable domain of TCR clone 383897 (TRAV38-2/DV8, TRAJ23)
CAYRSQNQGGKLIF

SEQ ID NO: 767794 - protein, 12 aa, Homo sapiens
  CDR3 for beta chain variable domain of TCR clone 383897 (TRBV11-2, TRBJ2-2)
CASSLPTGELFF

SEQ ID NO: 767795 - protein, 12 aa, Homo sapiens
  CDR3 for alpha chain variable domain of TCR clone 383898 (TRAV12-3, TRAJ17)
CAMTLTGNKLTF

SEQ ID NO: 767796 - protein, 16 aa, Homo sapiens
  CDR3 for beta chain variable domain of TCR clone 383898 (TRBV20-1, TRBJ2-1)
CSARTGEDIRNNEQFF

SEQ ID NO: 767797 - protein, 18 aa, Homo sapiens
  CDR3 for alpha chain variable domain of TCR clone 383899 (TRAV13-1, TRAJ52)
CVAKNTNAGGTSYGKMTF

SEQ ID NO: 767798 - protein, 15 aa, Homo sapiens
  CDR3 for beta chain variable domain of TCR clone 383899 (TRBV6-1, TRBJ2-3)
CASSERGGITDTQYF

SEQ ID NO: 767799 - protein, 12 aa, Homo sapiens
  CDR3 for alpha chain variable domain of TCR clone 383900 (TRAV2, TRAJ33)
CAVEDSNYQLIW

SEQ ID NO: 767800 - protein, 14 aa, Homo sapiens
  CDR3 for beta chain variable domain of TCR clone 383900 (TRBV19, TRBJ1-4)
CASSINRGGERLFF

SEQ ID NO: 767801 - protein, 12 aa, Homo sapiens
  CDR3 for alpha chain variable domain of TCR clone 383901 (TRAV13-1, TRAJ21)
CAAKEGFNKFYF

SEQ ID NO: 767802 - protein, 14 aa, Homo sapiens
  CDR3 for beta chain variable domain of TCR clone 383901 (TRBV11-2, TRBJ2-2)
CASSFTPGDGELFF

SEQ ID NO: 767803 - protein, 19 aa, Homo sapiens
  CDR3 for alpha chain variable domain of TCR clone 383902 (TRAV3, TRAJ37)
CAVRDIVGGYPSNTGKLIF

SEQ ID NO: 767804 - protein, 14 aa, Homo sapiens
  CDR3 for beta chain variable domain of TCR clone 383902 (TRBV7-8, TRBJ2-3)
CASSLEAGTNTQYF

SEQ ID NO: 767805 - protein, 15 aa, Homo sapiens
  CDR3 for alpha chain variable domain of TCR clone 383903 (TRAV8-3, TRAJ11)
CAVGLLNSGYSTLTF

SEQ ID NO: 767806 - protein, 15 aa, Homo sapiens
  CDR3 for beta chain variable domain of TCR clone 383903 (TRBV28, TRBJ2-1)
CASSIIAGGRSEQFF

SEQ ID NO: 767807 - protein, 14 aa, Homo sapiens
  CDR3 for alpha chain variable domain of TCR clone 383904 (TRAV1-2, TRAJ16)
CAVNRFSDGQKLLF

SEQ ID NO: 767808 - protein, 17 aa, Homo sapiens
  CDR3 for beta chain variable domain of TCR clone 383904 (TRBV24-1, TRBJ2-3)
CATSDLPSGEDTDTQYF

SEQ ID NO: 767809 - protein, 13 aa, Homo sapiens
  CDR3 for alpha chain variable domain of TCR clone 383905 (TRAV2, TRAJ40)
CAVVTSGTYIYLF

SEQ ID NO: 767810 - protein, 14 aa, Homo sapiens
  CDR3 for beta chain variable domain of TCR clone 383905 (TRBV19, TRBJ2-1)
CASPTFVLSGEQFF

SEQ ID NO: 767811 - protein, 14 aa, Homo sapiens
  CDR3 for alpha chain variable domain of TCR clone 383906 (TRAV29/DV5, TRAJ36)
CAARRKTGANNLFF

SEQ ID NO: 767812 - protein, 12 aa, Homo sapiens
  CDR3 for beta chain variable domain of TCR clone 383906 (TRBV12-4, TRBJ2-7)
CTSSLGGYEQYF

SEQ ID NO: 767813 - protein, 10 aa, Homo sapiens
  CDR3 for alpha chain variable domain of TCR clone 383907 (TRAV16, TRAJ22)
SAMYLRQLTF

SEQ ID NO: 767814 - protein, 11 aa, Homo sapiens
  CDR3 for beta chain variable domain of TCR clone 383907 (TRBV7-2, TRBJ2-2)
CASSIRGELFS

SEQ ID NO: 767815 - protein, 13 aa, Homo sapiens
  CDR3 for alpha chain variable domain of TCR clone 383908 (TRAV17, TRAJ39)
CDISTNAGNMLTF

SEQ ID NO: 767816 - protein, 15 aa, Homo sapiens
  CDR3 for beta chain variable domain of TCR clone 383908 (TRBV4-1, TRBJ2-7)
CASSQQGQGFDEQYF

SEQ ID NO: 767817 - protein, 13 aa, Homo sapiens
  CDR3 for alpha chain variable domain of TCR clone 383909 (TRAV27, TRAJ49)
CAPRPYTGNQFYF

SEQ ID NO: 767818 - protein, 16 aa, Homo sapiens
  CDR3 for beta chain variable domain of TCR clone 383909 (TRBV4-1, TRBJ1-2)
CASSPDAGQVLYGYTF

SEQ ID NO: 767819 - protein, 12 aa, Homo sapiens
  CDR3 for alpha chain variable domain of TCR clone 383910 (TRAV12-1, TRAJ40)
CVVYSGTYKYIF

SEQ ID NO: 767820 - protein, 15 aa, Homo sapiens
  CDR3 for beta chain variable domain of TCR clone 383910 (TRBV6-6, TRBJ2-7)
CASSYSYGGSYEQYF

SEQ ID NO: 767821 - protein, 14 aa, Homo sapiens
  CDR3 for alpha chain variable domain of TCR clone 383911 (TRAV12-3, TRAJ47)
CAMSVREYGNKLVF

SEQ ID NO: 767822 - protein, 15 aa, Homo sapiens
  CDR3 for beta chain variable domain of TCR clone 383911 (TRBV7-3, TRBJ2-2)
CASSETGQGTGELFF

SEQ ID NO: 767823 - protein, 14 aa, Homo sapiens
  CDR3 for alpha chain variable domain of TCR clone 383912 (TRAV20, TRAJ32)
CCGRYGGATNKLIF

SEQ ID NO: 767824 - protein, 16 aa, Homo sapiens
  CDR3 for beta chain variable domain of TCR clone 383912 (TRBV19, TRBJ2-1)
CASSKAGPSSYNEQFF

SEQ ID NO: 767825 - protein, 14 aa, Homo sapiens
  CDR3 for alpha chain variable domain of TCR clone 383913 (TRAV9-2, TRAJ39)
CARYIYNAGNMLTF

SEQ ID NO: 767826 - protein, 17 aa, Homo sapiens
  CDR3 for beta chain variable domain of TCR clone 383913 (TRBV7-8, TRBJ2-6)
CASSAGTGGAGANVLTF

SEQ ID NO: 767827 - protein, 14 aa, Homo sapiens
  CDR3 for alpha chain variable domain of TCR clone 383914 (TRAV12-2, TRAJ13)
CAVKKTGGYQKVTF

SEQ ID NO: 767828 - protein, 17 aa, Homo sapiens
  CDR3 for beta chain variable domain of TCR clone 383914 (TRBV13, TRBJ2-3)
CPSSLSRVAGGRNTQYF

SEQ ID NO: 767829 - protein, 14 aa, Homo sapiens
  CDR3 for alpha chain variable domain of TCR clone 383915 (TRAV1-2, TRAJ16)
CAVNRFSDGQKLLF

SEQ ID NO: 767830 - protein, 17 aa, Homo sapiens
  CDR3 for beta chain variable domain of TCR clone 383915 (TRBV7-9, TRBJ2-1)
CASSLVASCPSYNEQFF

SEQ ID NO: 767831 - protein, 18 aa, Homo sapiens
  CDR3 for alpha chain variable domain of TCR clone 383916 (TRAV21, TRAJ52)
CAVRPSPAGGTSYGKLTF

SEQ ID NO: 767832 - protein, 13 aa, Homo sapiens
  CDR3 for beta chain variable domain of TCR clone 383916 (TRBV20-1, TRBJ1-1)
GSARVGGNTEAFF

SEQ ID NO: 767833 - protein, 14 aa, Homo sapiens
  CDR3 for alpha chain variable domain of TCR clone 383917 (TRAV1-2, TRAJ27)
CAPAEYTNAGKSTF

SEQ ID NO: 767834 - protein, 13 aa, Homo sapiens
  CDR3 for beta chain variable domain of TCR clone 383917 (TRBV10-3, TRBJ2-7)
CASKLAVNYEQYF

SEQ ID NO: 767835 - protein, 14 aa, Homo sapiens
  CDR3 for alpha chain variable domain of TCR clone 383918 (TRAV1-1, TRAJ27)
CAVIYNTNACKSTF

SEQ ID NO: 767836 - protein, 15 aa, Homo sapiens
  CDR3 for beta chain variable domain of TCR clone 383918 (TRBV7-2, TRBJ2-3)
CASSLAGAFIDTQYF

SEQ ID NO: 767837 - protein, 13 aa, Homo sapiens
  CDR3 for alpha chain variable domain of TCR clone 383919 (TRAV12-3, TRAJ54)
CAMKVQGAQKLVF

SEQ ID NO: 767838 - protein, 15 aa, Homo sapiens
  CDR3 for beta chain variable domain of TCR clone 383919 (TRBV28, TRBJ2-7)
CASSPTGTGSYEQYL

SEQ ID NO: 767839 - protein, 11 aa, Homo sapiens
  CDR3 for alpha chain variable domain of TCR clone 383920 (TRAV13-1, TRAJ15)
CAATPGTALIF

SEQ ID NO: 767840 - protein, 15 aa, Homo sapiens
  CDR3 for beta chain variable domain of TCR clone 383920 (TRBV28, TRBJ2-5)
CASSSPWSYQETQYF

SEQ ID NO: 767841 - protein, 17 aa, Homo sapiens
  CDR3 for alpha chain variable domain of TCR clone 383921 (TRAV13-1, TRAJ23)
CAASKRFHRLRKAYLRT

SEQ ID NO: 767842 - protein, 14 aa, Homo sapiens
  CDR3 for beta chain variable domain of TCR clone 383921 (TRBV7-8, TRBJ2-3)
CASSLEAGTDTQYF

SEQ ID NO: 767843 - protein, 12 aa, Homo sapiens
  CDR3 for alpha chain variable domain of TCR clone 383922 (TRAV12-1, TRAJ9)
CVLNTGGFKTIF

SEQ ID NO: 767844 - protein, 14 aa, Homo sapiens
  CDR3 for beta chain variable domain of TCR clone 383922 (TRBV7-2, TRBJ1-1)
CASSLQGSSTEAFF

SEQ ID NO: 767845 - protein, 14 aa, Homo sapiens
  CDR3 for alpha chain variable domain of TCR clone 383923 (TRAV8-3, TRAJ35)
CAVVPQGFRNVLHC

SEQ ID NO: 767846 - protein, 13 aa, Homo sapiens
  CDR3 for beta chain variable domain of TCR clone 383923 (TRBV15, TRBJ1-6)
CATSGGLNSPLHF

SEQ ID NO: 767847 - protein, 18 aa, Homo sapiens
  CDR3 for alpha chain variable domain of TCR clone 383924 (TRAV21, TRAJ52)
CAVRPSPAGGTSYGKLTF

SEQ ID NO: 767848 - protein, 13 aa, Homo sapiens
  CDR3 for beta chain variable domain of TCR clone 383924 (TRBV12-4, TRBJ2-2)
CASSITGSGELFF

SEQ ID NO: 767849 - protein, 14 aa, Homo sapiens
  CDR3 for alpha chain variable domain of TCR clone 383925 (TRAV8-3, TRAJ15)
CAVGRHQAGTALFF

SEQ ID NO: 767850 - protein, 15 aa, Homo sapiens
  CDR3 for beta chain variable domain of TCR clone 383925 (TRBV27, TRBJ2-1)
CASSNGGGSSNEQFF

SEQ ID NO: 767851 - protein, 14 aa, Homo sapiens
  CDR3 for alpha chain variable domain of TCR clone 383926 (TRAV13-1, TRAJ44)
CAAKATGTASKLTF

SEQ ID NO: 767852 - protein, 14 aa, Homo sapiens
  CDR3 for beta chain variable domain of TCR clone 383926 (TRBV5-1, TRBJ2-7)
CASSRGESLYEQYF

SEQ ID NO: 767853 - protein, 14 aa, Homo sapiens
  CDR3 for alpha chain variable domain of TCR clone 383927 (TRAV2, TRAJ9)
CAVEDRSGGFKTIF

SEQ ID NO: 767854 - protein, 15 aa, Homo sapiens
  CDR3 for beta chain variable domain of TCR clone 383927 (TRBV12-4, TRBJ2-5)
CASSLGGQGRETQYF

SEQ ID NO: 767855 - protein, 15 aa, Homo sapiens
  CDR3 for alpha chain variable domain of TCR clone 383928 (TRAV17, TRAJ57)
CATGPSQGGSEKLGC

SEQ ID NO: 767856 - protein, 14 aa, Homo sapiens
  CDR3 for beta chain variable domain of TCR clone 383928 (TRBV12-5, TRBJ2-5)
CASGSRTHQETQYF

SEQ ID NO: 767857 - protein, 15 aa, Homo sapiens
  CDR3 for alpha chain variable domain of TCR clone 383929 (TRAV17, TRAJ6)
CATDLPSGGSYIPTF

SEQ ID NO: 767858 - protein, 16 aa, Homo sapiens
  CDR3 for beta chain variable domain of TCR clone 383929 (TRBV4-1, TRBJ2-7)
CVSSQDPTGYSYEQYF

SEQ ID NO: 767859 - protein, 11 aa, Homo sapiens
  CDR3 for alpha chain variable domain of TCR clone 383930 (TRAV1-2, TRAJ40)
CAVPGTYKYIF

SEQ ID NO: 767860 - protein, 14 aa, Homo sapiens
  CDR3 for beta chain variable domain of TCR clone 383930 (TRBV25-1, TRBJ2-2)
CASSELGLPGELFF

SEQ ID NO: 767861 - protein, 12 aa, Homo sapiens
  CDR3 for alpha chain variable domain of TCR clone 383931 (TRAV12-3, TRAJ17)
CAMTLTSNKLTF

SEQ ID NO: 767862 - protein, 15 aa, Homo sapiens
  CDR3 for beta chain variable domain of TCR clone 383931 (TRBV20-1, TRBJ2-7)
CSARDRVSWMDEQYF

SEQ ID NO: 767863 - protein, 23 aa, Homo sapiens
  CDR3 for alpha chain variable domain of TCR clone 383932 (TRAV30, TRAJ29)
PAQLLRNLLLWHRAFSVNTPLVF

SEQ ID NO: 767864 - protein, 15 aa, Homo sapiens
  CDR3 for beta chain variable domain of TCR clone 383932 (TRBV5-1, TRBJ2-2)
CASSLFGQNTGELFF

SEQ ID NO: 767865 - protein, 15 aa, Homo sapiens
  CDR3 for alpha chain variable domain of TCR clone 383933 (TRAV23/DV6, TRAJ30)
PPTSVQQARDDKIIF

SEQ ID NO: 767866 - protein, 15 aa, Homo sapiens
  CDR3 for beta chain variable domain of TCR clone 383933 (TRBV9, TRBJ2-2)
CISVPAASSPGSCFF

SEQ ID NO: 767867 - protein, 14 aa, Homo sapiens
  CDR3 for alpha chain variable domain of TCR clone 383934 (TRAV12-2, TRAJ13)
CAVKKTGGYQKVNF

SEQ ID NO: 767868 - protein, 12 aa, Homo sapiens
  CDR3 for beta chain variable domain of TCR clone 383934 (TRBV12-4, TRBJ1-2)
CASSFIWLQLRF

SEQ ID NO: 767869 - protein, 15 aa, Homo sapiens
  CDR3 for alpha chain variable domain of TCR clone 383935 (TRAV3, TRAJ22)
CAVRDRGGSARQLTF

SEQ ID NO: 767870 - protein, 15 aa, Homo sapiens
  CDR3 for beta chain variable domain of TCR clone 383935 (TRBV19, TRBJ2-5)
CASSIVRASQETQHF

SEQ ID NO: 767871 - protein, 15 aa, Homo sapiens
  CDR3 for alpha chain variable domain of TCR clone 383936 (TRAV27, TRAJ38)
CAGRFNAGNNRKLIW

SEQ ID NO: 767872 - protein, 14 aa, Homo sapiens
  CDR3 for beta chain variable domain of TCR clone 383936 (TRBV19, TRBJ2-3)
CASSAPRGTDTQYF

SEQ ID NO: 767873 - protein, 13 aa, Homo sapiens
  CDR3 for alpha chain variable domain of TCR clone 383937 (TRAV13-2, TRAJ13)
CAERPAGYQKVTF

SEQ ID NO: 767874 - protein, 15 aa, Homo sapiens
  CDR3 for beta chain variable domain of TCR clone 383937 (TRBV11-3, TRBJ2-7)
CASSPGPASSYEQYF

SEQ ID NO: 767875 - protein, 15 aa, Homo sapiens
  CDR3 for alpha chain variable domain of TCR clone 383938 (TRAV27, TRAJ38)
CAGRFNAGNNRKLIW

SEQ ID NO: 767876 - protein, 14 aa, Homo sapiens
  CDR3 for beta chain variable domain of TCR clone 383938 (TRBV19, TRBJ2-7)
CASSAPRGTDTQYF

SEQ ID NO: 767877 - protein, 18 aa, Homo sapiens
  CDR3 for alpha chain variable domain of TCR clone 383939 (TRAV21, TRAJ52)
CAVRPSPAGGTSYGKLTF

SEQ ID NO: 767878 - protein, 15 aa, Homo sapiens
  CDR3 for beta chain variable domain of TCR clone 383939 (TRBV28, TRBJ1-5)
CASSRTGGYVQHQHF

SEQ ID NO: 767879 - protein, 18 aa, Homo sapiens
  CDR3 for alpha chain variable domain of TCR clone 383940 (TRAV21, TRAJ52)
CAVRPSPAGGTSYGKLTF

SEQ ID NO: 767880 - protein, 13 aa, Homo sapiens
  CDR3 for beta chain variable domain of TCR clone 383940 (TRBV20-1, TRBJ2-5)
CSAREAFQETQSF

SEQ ID NO: 767881 - protein, 14 aa, Homo sapiens
  CDR3 for alpha chain variable domain of TCR clone 383941 (TRAV8-3, TRAJ4)
CAVGAAGGYNKLIF

SEQ ID NO: 767882 - protein, 14 aa, Homo sapiens
  CDR3 for beta chain variable domain of TCR clone 383941 (TRBV19, TRBJ2-1)
CESKTLVLRGEKLL

SEQ ID NO: 767883 - protein, 14 aa, Homo sapiens
  CDR3 for alpha chain variable domain of TCR clone 383942 (TRAV2, TRAJ37)
CAVDFTSNTGKLIF

SEQ ID NO: 767884 - protein, 15 aa, Homo sapiens
  CDR3 for beta chain variable domain of TCR clone 383942 (TRBV20-1, TRBJ1-1)
CRASRGVTGNTEALF

SEQ ID NO: 767885 - protein, 12 aa, Homo sapiens
  CDR3 for alpha chain variable domain of TCR clone 383943 (TRAV12-2, TRAJ10)
WGVTGGGNKLTF

SEQ ID NO: 767886 - protein, 14 aa, Homo sapiens
  CDR3 for beta chain variable domain of TCR clone 383943 (TRBV27, TRBJ2-7)
CASATGTERRQQYF

SEQ ID NO: 767887 - protein, 13 aa, Homo sapiens
  CDR3 for alpha chain variable domain of TCR clone 383944 (TRAV12-1, TRAJ34)
CVVTGYTTDKLIF

SEQ ID NO: 767888 - protein, 13 aa, Homo sapiens
  CDR3 for beta chain variable domain of TCR clone 383944 (TRBV28, TRBJ2-7)
CASKAGGVYEQYF

SEQ ID NO: 767889 - protein, 12 aa, Homo sapiens
  CDR3 for alpha chain variable domain of TCR clone 383945 (TRAV1-1, TRAJ30)
CAVRGRDDKIIV

SEQ ID NO: 767890 - protein, 13 aa, Homo sapiens
  CDR3 for beta chain variable domain of TCR clone 383945 (TRBV11-3, TRBJ2-7)
CASSLDKLYEQYF

SEQ ID NO: 767891 - protein, 11 aa, Homo sapiens
  CDR3 for alpha chain variable domain of TCR clone 383946 (TRAV12-2, TRAJ33)
CAVGSNYQLIW

SEQ ID NO: 767892 - protein, 14 aa, Homo sapiens
  CDR3 for beta chain variable domain of TCR clone 383946 (TRBV7-2, TRBJ2-7)
CASRSQGAAYEQYF

SEQ ID NO: 767893 - protein, 14 aa, Homo sapiens
  CDR3 for alpha chain variable domain of TCR clone 383947 (TRAV3, TRAJ17)
CAVRDAAAGNKPTF

SEQ ID NO: 767894 - protein, 15 aa, Homo sapiens
  CDR3 for beta chain variable domain of TCR clone 383947 (TRBV6-3, TRBJ2-5)
CASSLLRGDQEPQYF

SEQ ID NO: 767895 - protein, 13 aa, Homo sapiens
  CDR3 for alpha chain variable domain of TCR clone 383948 (TRAV21, TRAJ20)
CAVGLRVDYKLSF

SEQ ID NO: 767896 - protein, 16 aa, Homo sapiens
  CDR3 for beta chain variable domain of TCR clone 383948 (TRBV6-1, TRBJ2-5)
CASSETLDRGAETHYF

SEQ ID NO: 767897 - protein, 10 aa, Homo sapiens
  CDR3 for alpha chain variable domain of TCR clone 383949 (TRAV17, TRAJ36)
CATVAGNLFF

SEQ ID NO: 767898 - protein, 15 aa, Homo sapiens
  CDR3 for beta chain variable domain of TCR clone 383949 (TRBV7-9, TRBJ2-7)
CASSLALAEAYEQYF

SEQ ID NO: 767899 - protein, 11 aa, Homo sapiens
  CDR3 for alpha chain variable domain of TCR clone 383950 (TRAV1-2, TRAJ20)
CAVSNDYKLSF

SEQ ID NO: 767900 - protein, 15 aa, Homo sapiens
  CDR3 for beta chain variable domain of TCR clone 383950 (TRBV11-2, TRBJ2-1)
CASSLGTSGLNEQFF

SEQ ID NO: 767901 - protein, 18 aa, Homo sapiens
  CDR3 for alpha chain variable domain of TCR clone 383951 (TRAV12-3, TRAJ52)
CAMSVGGAGGTSYGKLTF

SEQ ID NO: 767902 - protein, 18 aa, Homo sapiens
  CDR3 for beta chain variable domain of TCR clone 383951 (TRBV7-3, TRBJ2-5)
CASSFRGGGDPVLRARHA

SEQ ID NO: 767903 - protein, 13 aa, Homo sapiens
  CDR3 for alpha chain variable domain of TCR clone 383952 (TRAV22, TRAJ29)
CAVGGAGNTPLVF

SEQ ID NO: 767904 - protein, 13 aa, Homo sapiens
  CDR3 for beta chain variable domain of TCR clone 383952 (TRBV19, TRBJ2-7)
CASRKAGGSEQYF

SEQ ID NO: 767905 - protein, 14 aa, Homo sapiens
  CDR3 for alpha chain variable domain of TCR clone 383953 (TRAV1-2, TRAJ16)
CAVNRFSDGQQLLF

SEQ ID NO: 767906 - protein, 17 aa, Homo sapiens
  CDR3 for beta chain variable domain of TCR clone 383953 (TRBV13, TRBJ2-3)
CASSLSRVAGGRNTQYF

SEQ ID NO: 767907 - protein, 14 aa, Homo sapiens
  CDR3 for alpha chain variable domain of TCR clone 383954 (TRAV38-1, TRAJ43)
CAFMKHNNNNDMRF

SEQ ID NO: 767908 - protein, 14 aa, Homo sapiens
  CDR3 for beta chain variable domain of TCR clone 383954 (TRBV5-4, TRBJ1-1)
CASSLDSLRDEAFF

SEQ ID NO: 767909 - protein, 16 aa, Homo sapiens
  CDR3 for alpha chain variable domain of TCR clone 383955 (TRAV12-3, TRAJ53)
CAMSVGSGGSNYKLTF

SEQ ID NO: 767910 - protein, 13 aa, Homo sapiens
  CDR3 for beta chain variable domain of TCR clone 383955 (TRBV7-6, TRBJ1-2)
CASSLVADYGDTF

SEQ ID NO: 767911 - protein, 13 aa, Homo sapiens
  CDR3 for alpha chain variable domain of TCR clone 383956 (TRAV12-1, TRAJ7)
CVVNMRGNNRLAF

SEQ ID NO: 767912 - protein, 14 aa, Homo sapiens
  CDR3 for beta chain variable domain of TCR clone 383956 (TRBV19, TRBJ2-2)
CASSIAGAFGELFF

SEQ ID NO: 767913 - protein, 16 aa, Homo sapiens
  CDR3 for alpha chain variable domain of TCR clone 383957 (TRAV21, TRAJ52)
CAVTDAGGTSYGKLTF

SEQ ID NO: 767914 - protein, 11 aa, Homo sapiens
  CDR3 for beta chain variable domain of TCR clone 383957 (TRBV2, TRBJ1-1)
CASRERTEAFF

SEQ ID NO: 767915 - protein, 15 aa, Homo sapiens
  CDR3 for alpha chain variable domain of TCR clone 383958 (TRAV35, TRAJ40)
CAGQLGTSGTYKYIF

SEQ ID NO: 767916 - protein, 10 aa, Homo sapiens
  CDR3 for beta chain variable domain of TCR clone 383958 (TRBV23-1, TRBJ2-7)
SSGTGLEQYF

SEQ ID NO: 767917 - protein, 14 aa, Homo sapiens
  CDR3 for alpha chain variable domain of TCR clone 383959 (TRAV13-1, TRAJ44)
CAAKATGTASKLTF

SEQ ID NO: 767918 - protein, 14 aa, Homo sapiens
  CDR3 for beta chain variable domain of TCR clone 383959 (TRBV18, TRBJ2-7)
CASSPRGGSYEQYF

SEQ ID NO: 767919 - protein, 14 aa, Homo sapiens
  CDR3 for alpha chain variable domain of TCR clone 383960 (TRAV1-2, TRAJ8)
CALREDTGFQKLVF

SEQ ID NO: 767920 - protein, 15 aa, Homo sapiens
  CDR3 for beta chain variable domain of TCR clone 383960 (TRBV20-1, TRBJ2-7)
CSARDRVSGMDEQYF

SEQ ID NO: 767921 - protein, 13 aa, Homo sapiens
  CDR3 for alpha chain variable domain of TCR clone 383961 (TRAV21, TRAJ57)
CAVIQGGSEKLVF

SEQ ID NO: 767922 - protein, 14 aa, Homo sapiens
  CDR3 for beta chain variable domain of TCR clone 383961 (TRBV5-1, TRBJ2-1)
CASSALWAGNEQFF

SEQ ID NO: 767923 - protein, 13 aa, Homo sapiens
  CDR3 for alpha chain variable domain of TCR clone 383962 (TRAV16, TRAJ9)
CALSNTGGFKTIF

SEQ ID NO: 767924 - protein, 14 aa, Homo sapiens
  CDR3 for beta chain variable domain of TCR clone 383962 (TRBV5-1, TRBJ2-1)
CASSLEGPVYEQFL

SEQ ID NO: 767925 - protein, 13 aa, Homo sapiens
  CDR3 for alpha chain variable domain of TCR clone 383963 (TRAV8-6, TRAJ24)
CAVSSDSWGKLQF

SEQ ID NO: 767926 - protein, 14 aa, Homo sapiens
  CDR3 for beta chain variable domain of TCR clone 383963 (TRBV12-5, TRBJ2-5)
CASGSRTHQETQYF

SEQ ID NO: 767927 - protein, 14 aa, Homo sapiens
  CDR3 for alpha chain variable domain of TCR clone 383964 (TRAV1-2, TRAJ16)
CAVNRFSDGQKLLF

SEQ ID NO: 767928 - protein, 13 aa, Homo sapiens
  CDR3 for beta chain variable domain of TCR clone 383964 (TRBV18, TRBJ2-5)
RASSPAGKETQYF

SEQ ID NO: 767929 - protein, 15 aa, Homo sapiens
  CDR3 for alpha chain variable domain of TCR clone 383965 (TRAV23/DV6, TRAJ30)
RAASSQESRDDKIIF

SEQ ID NO: 767930 - protein, 17 aa, Homo sapiens
  CDR3 for beta chain variable domain of TCR clone 383965 (TRBV4-3, TRBJ2-1)
CASSQFSSGRASGEQFF

SEQ ID NO: 767931 - protein, 11 aa, Homo sapiens
  CDR3 for alpha chain variable domain of TCR clone 383966 (TRAV3, TRAJ21)
GAVGHFNKFYF

SEQ ID NO: 767932 - protein, 16 aa, Homo sapiens
  CDR3 for beta chain variable domain of TCR clone 383966 (TRBV19, TRBJ2-1)
CASSKAGPSSYNEQFF

SEQ ID NO: 767933 - protein, 15 aa, Homo sapiens
  CDR3 for alpha chain variable domain of TCR clone 383967 (TRAV20, TRAJ4)
CAVQVFSGGYNKLIF

SEQ ID NO: 767934 - protein, 14 aa, Homo sapiens
  CDR3 for beta chain variable domain of TCR clone 383967 (TRBV7-6, TRBJ2-3)
CASSSGGDANTQYF

SEQ ID NO: 767935 - protein, 12 aa, Homo sapiens
  CDR3 for alpha chain variable domain of TCR clone 383968 (TRAV12-3, TRAJ20)
CAMVRGDYKLSF

SEQ ID NO: 767936 - protein, 14 aa, Homo sapiens
  CDR3 for beta chain variable domain of TCR clone 383968 (TRBV5-8, TRBJ2-3)
CASSLGQGADTQYF

SEQ ID NO: 767937 - protein, 14 aa, Homo sapiens
  CDR3 for alpha chain variable domain of TCR clone 383969 (TRAV2, TRAJ9)
CAVEDRSGGFKTIF

SEQ ID NO: 767938 - protein, 11 aa, Homo sapiens
  CDR3 for beta chain variable domain of TCR clone 383969 (TRBV19, TRBJ1-1)
CASSIGSEAFF

SEQ ID NO: 767939 - protein, 18 aa, Homo sapiens
  CDR3 for alpha chain variable domain of TCR clone 383970 (TRAV29/DV5, TRAJ52)
CAAGFRGAGGPSYGQLTF

SEQ ID NO: 767940 - protein, 16 aa, Homo sapiens
  CDR3 for beta chain variable domain of TCR clone 383970 (TRBV7-3, TRBJ2-2)
CASSLKRGTLSGELFF

SEQ ID NO: 767941 - protein, 16 aa, Homo sapiens
  CDR3 for alpha chain variable domain of TCR clone 383971 (TRAV30, TRAJ24)
CGTEIVDAESWGKFQF

SEQ ID NO: 767942 - protein, 20 aa, Homo sapiens
  CDR3 for beta chain variable domain of TCR clone 383971 (TRBV19, TRBJ2-1)
CASSISRTVTSTRLNNEQFF

SEQ ID NO: 767943 - protein, 14 aa, Homo sapiens
  CDR3 for alpha chain variable domain of TCR clone 383972 (TRAV2, TRAJ20)
CAVEDVVNDYKLSF

SEQ ID NO: 767944 - protein, 14 aa, Homo sapiens
  CDR3 for beta chain variable domain of TCR clone 383972 (TRBV11-2, TRBJ1-5)
CASSLDRGRQPQHF

SEQ ID NO: 767945 - protein, 14 aa, Homo sapiens
  CDR3 for alpha chain variable domain of TCR clone 383973 (TRAV35, TRAJ13)
CAGRSPGGDQKVTF

SEQ ID NO: 767946 - protein, 14 aa, Homo sapiens
  CDR3 for beta chain variable domain of TCR clone 383973 (TRBV19, TRBJ2-2)
CASSMVGLSGELFF

SEQ ID NO: 767947 - protein, 15 aa, Homo sapiens
  CDR3 for alpha chain variable domain of TCR clone 383974 (TRAV8-3, TRAJ27)
CAVCPSKTNAGKSTF

SEQ ID NO: 767948 - protein, 15 aa, Homo sapiens
  CDR3 for beta chain variable domain of TCR clone 383974 (TRBV27, TRBJ2-1)
CASSNGGGSSNEQFF

SEQ ID NO: 767949 - protein, 18 aa, Homo sapiens
  CDR3 for alpha chain variable domain of TCR clone 383975 (TRAV21, TRAJ52)
CAVRPSPAGGTSYGKLTF

SEQ ID NO: 767950 - protein, 15 aa, Homo sapiens
  CDR3 for beta chain variable domain of TCR clone 383975 (TRBV4-1, TRBJ1-2)
CASSQGQGAAYGYTF

SEQ ID NO: 767951 - protein, 16 aa, Homo sapiens
  CDR3 for alpha chain variable domain of TCR clone 383976 (TRAV12-3, TRAJ53)
CAMSPGSGGSNYKLTF

SEQ ID NO: 767952 - protein, 11 aa, Homo sapiens
  CDR3 for beta chain variable domain of TCR clone 383976 (TRBV29-1, TRBJ2-5)
CSEDRAGNQYF

SEQ ID NO: 767953 - protein, 18 aa, Homo sapiens
  CDR3 for alpha chain variable domain of TCR clone 383977 (TRAV26-1, TRAJ23)
CIVRVGLEVRNQGGKLIF

SEQ ID NO: 767954 - protein, 16 aa, Homo sapiens
  CDR3 for beta chain variable domain of TCR clone 383977 (TRBV12-4, TRBJ2-5)
CASSFFVRGRQETQYL

SEQ ID NO: 767955 - protein, 16 aa, Homo sapiens
  CDR3 for alpha chain variable domain of TCR clone 383978 (TRAV26-2, TRAJ45)
CTTASPIGGGADGLTF

SEQ ID NO: 767956 - protein, 20 aa, Homo sapiens
  CDR3 for beta chain variable domain of TCR clone 383978 (TRBV28, TRBJ2-1)
CASTPIGRSPGLAGGNEQSF

SEQ ID NO: 767957 - protein, 12 aa, Homo sapiens
  CDR3 for alpha chain variable domain of TCR clone 383979 (TRAV29/DV5, TRAJ36)
CAARRKTGETTS

SEQ ID NO: 767958 - protein, 14 aa, Homo sapiens
  CDR3 for beta chain variable domain of TCR clone 383979 (TRBV12-5, TRBJ2-5)
CASGSRTHQETQYF

SEQ ID NO: 767959 - protein, 15 aa, Homo sapiens
  CDR3 for alpha chain variable domain of TCR clone 383980 (TRAV13-1, TRAJ17)
CAAPRCRQQSNSCRR

SEQ ID NO: 767960 - protein, 15 aa, Homo sapiens
  CDR3 for beta chain variable domain of TCR clone 383980 (TRBV28, TRBJ2-3)
CAPTFRDWSTDTQYF

SEQ ID NO: 767961 - protein, 12 aa, Homo sapiens
  CDR3 for alpha chain variable domain of TCR clone 383981 (TRAV29/DV5, TRAJ34)
CAARHNTDKLIF

SEQ ID NO: 767962 - protein, 15 aa, Homo sapiens
  CDR3 for beta chain variable domain of TCR clone 383981 (TRBV11-3, TRBJ2-3)
CASLKEGREGDTQYF

SEQ ID NO: 767963 - protein, 14 aa, Homo sapiens
  CDR3 for alpha chain variable domain of TCR clone 383982 (TRAV3, TRAJ27)
CAVRDDTNAGKATF

SEQ ID NO: 767964 - protein, 15 aa, Homo sapiens
  CDR3 for beta chain variable domain of TCR clone 383982 (TRBV7-7, TRBJ2-2)
CATGKLAKNTGELFF

SEQ ID NO: 767965 - protein, 14 aa, Homo sapiens
  CDR3 for alpha chain variable domain of TCR clone 383983 (TRAV16, TRAJ33)
CALSAMDSNYQLIW

SEQ ID NO: 767966 - protein, 16 aa, Homo sapiens
  CDR3 for beta chain variable domain of TCR clone 383983 (TRBV11-3, TRBJ2-5)
CASSSVVAGSTETQYF

SEQ ID NO: 767967 - protein, 14 aa, Homo sapiens
  CDR3 for alpha chain variable domain of TCR clone 383984 (TRAV12-2, TRAJ13)
CAVKKTGGYQNVTF

SEQ ID NO: 767968 - protein, 15 aa, Homo sapiens
  CDR3 for beta chain variable domain of TCR clone 383984 (TRBV27, TRBJ2-1)
CASSNGGGSANEQFF

SEQ ID NO: 767969 - protein, 16 aa, Homo sapiens
  CDR3 for alpha chain variable domain of TCR clone 383985 (TRAV14/DV4, TRAJ17)
CAMREVGRAAGNKLTF

SEQ ID NO: 767970 - protein, 17 aa, Homo sapiens
  CDR3 for beta chain variable domain of TCR clone 383985 (TRBV13, TRBJ2-3)
CASSLSRVAGGRNTQYF

SEQ ID NO: 767971 - protein, 13 aa, Homo sapiens
  CDR3 for alpha chain variable domain of TCR clone 383986 (TRAV1-2, TRAJ20)
CAVRDGNDYKLSF

SEQ ID NO: 767972 - protein, 16 aa, Homo sapiens
  CDR3 for beta chain variable domain of TCR clone 383986 (TRBV12-5, TRBJ2-5)
CASGPRTRGNQETQYF

SEQ ID NO: 767973 - protein, 14 aa, Homo sapiens
  CDR3 for alpha chain variable domain of TCR clone 383987 (TRAV3, TRAJ33)
CAVRDMGSNYHLIW

SEQ ID NO: 767974 - protein, 17 aa, Homo sapiens
  CDR3 for beta chain variable domain of TCR clone 383987 (TRBV19, TRBJ2-1)
CASSIWSAQPTHNEQFF

SEQ ID NO: 767975 - protein, 12 aa, Homo sapiens
  CDR3 for alpha chain variable domain of TCR clone 383988 (TRAV12-2, TRAJ10)
WGVTGGGNKLTF

SEQ ID NO: 767976 - protein, 16 aa, Homo sapiens
  CDR3 for beta chain variable domain of TCR clone 383988 (TRBV6-4, TRBJ1-2)
CASSESVGDPNYGYTF

SEQ ID NO: 767977 - protein, 13 aa, Homo sapiens
  CDR3 for alpha chain variable domain of TCR clone 383989 (TRAV30, TRAJ24)
CGIVTDSWGKLQF

SEQ ID NO: 767978 - protein, 15 aa, Homo sapiens
  CDR3 for beta chain variable domain of TCR clone 383989 (TRBV25-1, TRBJ1-4)
CASSPGDSTNEKLFF

SEQ ID NO: 767979 - protein, 13 aa, Homo sapiens
  CDR3 for alpha chain variable domain of TCR clone 383990 (TRAV13-1, TRAJ37)
CAAVSGNTGKLLF

SEQ ID NO: 767980 - protein, 17 aa, Homo sapiens
  CDR3 for beta chain variable domain of TCR clone 383990 (TRBV10-2, TRBJ1-6)
CASSENRGSSYNSPLHF

SEQ ID NO: 767981 - protein, 15 aa, Homo sapiens
  CDR3 for alpha chain variable domain of TCR clone 383991 (TRAV25, TRAJ52)
CAGTSGGTSYGKLTF

SEQ ID NO: 767982 - protein, 18 aa, Homo sapiens
  CDR3 for beta chain variable domain of TCR clone 383991 (TRBV12-4, TRBJ2-2)
CASSLVAGTRGRTGELFF

SEQ ID NO: 767983 - protein, 12 aa, Homo sapiens
  CDR3 for alpha chain variable domain of TCR clone 383992 (TRAV13-2, TRAJ39)
CAENNAGNMLTF

SEQ ID NO: 767984 - protein, 12 aa, Homo sapiens
  CDR3 for beta chain variable domain of TCR clone 383992 (TRBV11-2, TRBJ2-2)
CAISLGGGELFF

SEQ ID NO: 767985 - protein, 14 aa, Homo sapiens
  CDR3 for alpha chain variable domain of TCR clone 383993 (TRAV8-3, TRAJ4)
CAVEASGGYNKLIF

SEQ ID NO: 767986 - protein, 13 aa, Homo sapiens
  CDR3 for beta chain variable domain of TCR clone 383993 (TRBV18, TRBJ2-5)
CASSLQGQETQYF

SEQ ID NO: 767987 - protein, 14 aa, Homo sapiens
  CDR3 for alpha chain variable domain of TCR clone 383994 (TRAV21, TRAJ35)
CAVMPIGFGNVLHC

SEQ ID NO: 767988 - protein, 13 aa, Homo sapiens
  CDR3 for beta chain variable domain of TCR clone 383994 (TRBV28, TRBJ2-7)
CASKAGGVYEQYF

SEQ ID NO: 767989 - protein, 11 aa, Homo sapiens
  CDR3 for alpha chain variable domain of TCR clone 383995 (TRAV39, TRAJ49)
CAVDISTQFYF

SEQ ID NO: 767990 - protein, 15 aa, Homo sapiens
  CDR3 for beta chain variable domain of TCR clone 383995 (TRBV7-8, TRBJ2-7)
CASSLTGQGKYEQYF

SEQ ID NO: 767991 - protein, 16 aa, Homo sapiens
  CDR3 for alpha chain variable domain of TCR clone 383996 (TRAV30, TRAJ24)
CGTEIVDADSWGQFQF

SEQ ID NO: 767992 - protein, 16 aa, Homo sapiens
  CDR3 for beta chain variable domain of TCR clone 383996 (TRBV28, TRBJ2-7)
CASSLFFETGGPEQYF

SEQ ID NO: 767993 - protein, 12 aa, Homo sapiens
  CDR3 for alpha chain variable domain of TCR clone 383997 (TRAV27, TRAJ35)
CAGADFGNVLHF

SEQ ID NO: 767994 - protein, 13 aa, Homo sapiens
  CDR3 for beta chain variable domain of TCR clone 383997 (TRBV4-2, TRBJ1-1)
CASSQAGNTEAFF

SEQ ID NO: 767995 - protein, 10 aa, Homo sapiens
  CDR3 for alpha chain variable domain of TCR clone 383998 (TRAV1-2, TRAJ31)
CAFFDARLMF

SEQ ID NO: 767996 - protein, 15 aa, Homo sapiens
  CDR3 for beta chain variable domain of TCR clone 383998 (TRBV7-6, TRBJ2-7)
CASSLVPLLDGEQYF

SEQ ID NO: 767997 - protein, 11 aa, Homo sapiens
  CDR3 for alpha chain variable domain of TCR clone 383999 (TRAV1-2, TRAJ31)
CAVNNNARLMF

SEQ ID NO: 767998 - protein, 16 aa, Homo sapiens
  CDR3 for beta chain variable domain of TCR clone 383999 (TRBV2, TRBJ2-1)
CASRSPAGGKYNEQFF

SEQ ID NO: 767999 - protein, 14 aa, Homo sapiens
  CDR3 for alpha chain variable domain of TCR clone 384000 (TRAV26-1, TRAJ48)
CIVRVGFGDEKLTF

SEQ ID NO: 768000 - protein, 14 aa, Homo sapiens
  CDR3 for beta chain variable domain of TCR clone 384000 (TRBV19, TRBJ2-1)
CASPTFVLSGEQFF

SEQ ID NO: 768001 - protein, 12 aa, Homo sapiens
  CDR3 for alpha chain variable domain of TCR clone 384001 (TRAV1-1, TRAJ9)
CAVDTGGFKPIF

SEQ ID NO: 768002 - protein, 15 aa, Homo sapiens
  CDR3 for beta chain variable domain of TCR clone 384001 (TRBV6-1, TRBJ2-3)
CASSERGGITDTQYF

SEQ ID NO: 768003 - protein, 10 aa, Homo sapiens
  CDR3 for alpha chain variable domain of TCR clone 384002 (TRAV26-1, TRAJ22)
CIVSLNFFWF

SEQ ID NO: 768004 - protein, 15 aa, Homo sapiens
  CDR3 for beta chain variable domain of TCR clone 384002 (TRBV4-2, TRBJ1-2)
RASSQRTGGRDGYTF

SEQ ID NO: 768005 - protein, 12 aa, Homo sapiens
  CDR3 for alpha chain variable domain of TCR clone 384003 (TRAV13-1, TRAJ49)
CAASPMGNQFYF

SEQ ID NO: 768006 - protein, 10 aa, Homo sapiens
  CDR3 for beta chain variable domain of TCR clone 384003 (TRBV11-2, TRBJ2-1)
PGVEYNEQFF

SEQ ID NO: 768007 - protein, 14 aa, Homo sapiens
  CDR3 for alpha chain variable domain of TCR clone 384004 (TRAV35, TRAJ33)
CWPRGRDSNSQLIW

SEQ ID NO: 768008 - protein, 11 aa, Homo sapiens
  CDR3 for beta chain variable domain of TCR clone 384004 (TRBV10-3, TRBJ2-7)
CAISEGLEQYF

SEQ ID NO: 768009 - protein, 14 aa, Homo sapiens
  CDR3 for alpha chain variable domain of TCR clone 384005 (TRAV1-2, TRAJ16)
CAVNRLSDGQKLLF

SEQ ID NO: 768010 - protein, 13 aa, Homo sapiens
  CDR3 for beta chain variable domain of TCR clone 384005 (TRBV19, TRBJ2-7)
CASRKAGGSEQYF

SEQ ID NO: 768011 - protein, 13 aa, Homo sapiens
  CDR3 for alpha chain variable domain of TCR clone 384006 (TRAV8-3, TRAJ6)
CAVVLNIRRKLHT

SEQ ID NO: 768012 - protein, 14 aa, Homo sapiens
  CDR3 for beta chain variable domain of TCR clone 384006 (TRBV6-6, TRBJ2-7)
CASSDSGAGYEQYF

SEQ ID NO: 768013 - protein, 18 aa, Homo sapiens
  CDR3 for alpha chain variable domain of TCR clone 384007 (TRAV12-3, TRAJ52)
CAMSVGGAGGTSYGKLTF

SEQ ID NO: 768014 - protein, 17 aa, Homo sapiens
  CDR3 for beta chain variable domain of TCR clone 384007 (TRBV13, TRBJ2-3)
CASSLSRVAGGSNTQYF

SEQ ID NO: 768015 - protein, 14 aa, Homo sapiens
  CDR3 for alpha chain variable domain of TCR clone 384008 (TRAV12-1, TRAJ37)
CVVTGSSHTGKLIF

SEQ ID NO: 768016 - protein, 20 aa, Homo sapiens
  CDR3 for beta chain variable domain of TCR clone 384008 (TRBV23-1, TRBJ2-5)
CISAPAVPERVLLIQETQYF

SEQ ID NO: 768017 - protein, 12 aa, Homo sapiens
  CDR3 for alpha chain variable domain of TCR clone 384009 (TRAV25, TRAJ16)
CAGDRDGQKLLF

SEQ ID NO: 768018 - protein, 13 aa, Homo sapiens
  CDR3 for beta chain variable domain of TCR clone 384009 (TRBV7-7, TRBJ2-2)
CASSLTSAGELFF

SEQ ID NO: 768019 - protein, 23 aa, Homo sapiens
  CDR3 for alpha chain variable domain of TCR clone 384010 (TRAV26-1, )
CIADNAGKNHIQNPDSAVYQLRD

SEQ ID NO: 768020 - protein, 13 aa, Homo sapiens
  CDR3 for beta chain variable domain of TCR clone 384010 (TRBV20-1, TRBJ1-1)
CSARGGGNTEAFF

SEQ ID NO: 768021 - protein, 15 aa, Homo sapiens
  CDR3 for alpha chain variable domain of TCR clone 384011 (TRAV4, TRAJ12)
CLVGDLMDSGYKLIF

SEQ ID NO: 768022 - protein, 14 aa, Homo sapiens
  CDR3 for beta chain variable domain of TCR clone 384011 (TRBV7-2, TRBJ1-1)
CASSHRQGRTEAFF

SEQ ID NO: 768023 - protein, 20 aa, Homo sapiens
  CDR3 for alpha chain variable domain of TCR clone 384012 (TRAV30, TRAJ26)
RNLLLWHRVGGDNYGQNLVF

SEQ ID NO: 768024 - protein, 13 aa, Homo sapiens
  CDR3 for beta chain variable domain of TCR clone 384012 (TRBV19, TRBJ1-2)
CASSISEDYGYTF

SEQ ID NO: 768025 - protein, 17 aa, Homo sapiens
  CDR3 for alpha chain variable domain of TCR clone 384013 (TRAV29/DV5, TRAJ40)
CAASVIYTTSVTYKYIF

SEQ ID NO: 768026 - protein, 13 aa, Homo sapiens
  CDR3 for beta chain variable domain of TCR clone 384013 (TRBV6-1, TRBJ2-1)
CASSHDRNNEQFF

SEQ ID NO: 768027 - protein, 14 aa, Homo sapiens
  CDR3 for alpha chain variable domain of TCR clone 384014 (TRAV1-2, TRAJ8)
CAVREDTGFQKLVF

SEQ ID NO: 768028 - protein, 12 aa, Homo sapiens
  CDR3 for beta chain variable domain of TCR clone 384014 (TRBV28, TRBJ2-3)
CASSLCRDTQYF

SEQ ID NO: 768029 - protein, 14 aa, Homo sapiens
  CDR3 for alpha chain variable domain of TCR clone 384015 (TRAV20, TRAJ20)
CAVRRGYNDYKLSF

SEQ ID NO: 768030 - protein, 13 aa, Homo sapiens
  CDR3 for beta chain variable domain of TCR clone 384015 (TRBV19, TRBJ2-5)
CASSETAQETQYL

SEQ ID NO: 768031 - protein, 15 aa, Homo sapiens
  CDR3 for alpha chain variable domain of TCR clone 384016 (TRAV12-2, TRAJ50)
CAVNGLETSYDKVIF

SEQ ID NO: 768032 - protein, 16 aa, Homo sapiens
  CDR3 for beta chain variable domain of TCR clone 384016 (TRBV7-3, TRBJ2-2)
CARSLKRGTLSGELFF

SEQ ID NO: 768033 - protein, 14 aa, Homo sapiens
  CDR3 for alpha chain variable domain of TCR clone 384017 (TRAV8-6, TRAJ49)
CAVSDPGTGNQFYF

SEQ ID NO: 768034 - protein, 13 aa, Homo sapiens
  CDR3 for beta chain variable domain of TCR clone 384017 (TRBV7-9, TRBJ1-2)
CASSLKQNYGDTF

SEQ ID NO: 768035 - protein, 14 aa, Homo sapiens
  CDR3 for alpha chain variable domain of TCR clone 384018 (TRAV35, TRAJ42)
CCVPYGGSKGNLIF

SEQ ID NO: 768036 - protein, 18 aa, Homo sapiens
  CDR3 for beta chain variable domain of TCR clone 384018 (TRBV13, TRBJ2-6)
CASSPMTSGGSGANVLTF

SEQ ID NO: 768037 - protein, 14 aa, Homo sapiens
  CDR3 for alpha chain variable domain of TCR clone 384019 (TRAV2, TRAJ37)
CAVDFTINTGKLIF

SEQ ID NO: 768038 - protein, 15 aa, Homo sapiens
  CDR3 for beta chain variable domain of TCR clone 384019 (TRBV7-2, TRBJ2-1)
CASSSGLAGGNEQFF

SEQ ID NO: 768039 - protein, 11 aa, Homo sapiens
  CDR3 for alpha chain variable domain of TCR clone 384020 (TRAV21, TRAJ39)
LLVNAGNMLTF

SEQ ID NO: 768040 - protein, 15 aa, Homo sapiens
  CDR3 for beta chain variable domain of TCR clone 384020 (TRBV2, TRBJ2-7)
CASTLLGSGATEQYF

SEQ ID NO: 768041 - protein, 14 aa, Homo sapiens
  CDR3 for alpha chain variable domain of TCR clone 384021 (TRAV13-1, TRAJ44)
CAAKAIGTASKLTF

SEQ ID NO: 768042 - protein, 17 aa, Homo sapiens
  CDR3 for beta chain variable domain of TCR clone 384021 (TRBV7-3, TRBJ2-3)
RASSLMKRMRGADTQYF

SEQ ID NO: 768043 - protein, 14 aa, Homo sapiens
  CDR3 for alpha chain variable domain of TCR clone 384022 (TRAV17, TRAJ12)
CAILPMDSSYKLIF

SEQ ID NO: 768044 - protein, 15 aa, Homo sapiens
  CDR3 for beta chain variable domain of TCR clone 384022 (TRBV5-1, TRBJ1-1)
CASSLGEGEHTEAFF

SEQ ID NO: 768045 - protein, 14 aa, Homo sapiens
  CDR3 for alpha chain variable domain of TCR clone 384023 (TRAV13-1, TRAJ3)
CAARKSSSASKIIF

SEQ ID NO: 768046 - protein, 13 aa, Homo sapiens
  CDR3 for beta chain variable domain of TCR clone 384023 (TRBV4-2, TRBJ1-1)
CASSQAGNTEAFF

SEQ ID NO: 768047 - protein, 18 aa, Homo sapiens
  CDR3 for alpha chain variable domain of TCR clone 384024 (TRAV21, TRAJ52)
CAVRASPAGGTSYGKLTF

SEQ ID NO: 768048 - protein, 15 aa, Homo sapiens
  CDR3 for beta chain variable domain of TCR clone 384024 (TRBV20-1, TRBJ2-7)
CSARDRVSGMDEQYF

SEQ ID NO: 768049 - protein, 12 aa, Homo sapiens
  CDR3 for alpha chain variable domain of TCR clone 384025 (TRAV23/DV6, TRAJ18)
CAASMNHRGSTL

SEQ ID NO: 768050 - protein, 13 aa, Homo sapiens
  CDR3 for beta chain variable domain of TCR clone 384025 (TRBV9, TRBJ2-1)
CASSPSGGSEQFF

SEQ ID NO: 768051 - protein, 11 aa, Homo sapiens
  CDR3 for alpha chain variable domain of TCR clone 384026 (TRAV13-1, TRAJ49)
CACVGGNQFYF

SEQ ID NO: 768052 - protein, 16 aa, Homo sapiens
  CDR3 for beta chain variable domain of TCR clone 384026 (TRBV11-2, TRBJ2-2)
CASSLRTGNLIGELLF

SEQ ID NO: 768053 - protein, 14 aa, Homo sapiens
  CDR3 for alpha chain variable domain of TCR clone 384027 (TRAV21, TRAJ10)
CAVALTGGGNKLTF

SEQ ID NO: 768054 - protein, 13 aa, Homo sapiens
  CDR3 for beta chain variable domain of TCR clone 384027 (TRBV7-2, TRBJ1-6)
CASSLESNSPLHF

SEQ ID NO: 768055 - protein, 11 aa, Homo sapiens
  CDR3 for alpha chain variable domain of TCR clone 384028 (TRAV21, TRAJ31)
CAVRNNARLMF

SEQ ID NO: 768056 - protein, 14 aa, Homo sapiens
  CDR3 for beta chain variable domain of TCR clone 384028 (TRBV5-1, TRBJ1-2)
CASSLEPVNYGYTF

SEQ ID NO: 768057 - protein, 16 aa, Homo sapiens
  CDR3 for alpha chain variable domain of TCR clone 384029 (TRAV3, TRAJ37)
CAVRPHGSGNTGKLIF

SEQ ID NO: 768058 - protein, 14 aa, Homo sapiens
  CDR3 for beta chain variable domain of TCR clone 384029 (TRBV23-1, TRBJ2-5)
CASSFLRSPATQYF

SEQ ID NO: 768059 - protein, 14 aa, Homo sapiens
  CDR3 for alpha chain variable domain of TCR clone 384030 (TRAV12-3, TRAJ9)
CAMSPNTGGFKTIF

SEQ ID NO: 768060 - protein, 14 aa, Homo sapiens
  CDR3 for beta chain variable domain of TCR clone 384030 (TRBV13, TRBJ2-5)
CASSLERVGETQYF

SEQ ID NO: 768061 - protein, 14 aa, Homo sapiens
  CDR3 for alpha chain variable domain of TCR clone 384031 (TRAV8-3, TRAJ47)
CAVGAQGYGNKLVF

SEQ ID NO: 768062 - protein, 14 aa, Homo sapiens
  CDR3 for beta chain variable domain of TCR clone 384031 (TRBV7-2, TRBJ2-2)
CASRGQGAAGELFF

SEQ ID NO: 768063 - protein, 15 aa, Homo sapiens
  CDR3 for alpha chain variable domain of TCR clone 384032 (TRAV35, TRAJ50)
CAGQLRKTSYDKVIF

SEQ ID NO: 768064 - protein, 14 aa, Homo sapiens
  CDR3 for beta chain variable domain of TCR clone 384032 (TRBV13, TRBJ2-3)
CASSLGGPQRPQYF

SEQ ID NO: 768065 - protein, 14 aa, Homo sapiens
  CDR3 for alpha chain variable domain of TCR clone 384033 (TRAV1-2, TRAJ8)
CALREDTGFQKLVF

SEQ ID NO: 768066 - protein, 15 aa, Homo sapiens
  CDR3 for beta chain variable domain of TCR clone 384033 (TRBV4-1, TRBJ2-7)
CASSQNTGRLYEQYF

SEQ ID NO: 768067 - protein, 15 aa, Homo sapiens
  CDR3 for alpha chain variable domain of TCR clone 384034 (TRAV12-3, TRAJ6)
CAMSAASGGSYIPTF

SEQ ID NO: 768068 - protein, 13 aa, Homo sapiens
  CDR3 for beta chain variable domain of TCR clone 384034 (TRBV20-1, TRBJ1-2)
CSASTVRIYGYTF

SEQ ID NO: 768069 - protein, 14 aa, Homo sapiens
  CDR3 for alpha chain variable domain of TCR clone 384035 (TRAV13-1, TRAJ13)
CAAIPLVGCQKVTF

SEQ ID NO: 768070 - protein, 17 aa, Homo sapiens
  CDR3 for beta chain variable domain of TCR clone 384035 (TRBV13, TRBJ2-3)
CASSLSRVAGGRNTQYF

SEQ ID NO: 768071 - protein, 11 aa, Homo sapiens
  CDR3 for alpha chain variable domain of TCR clone 384036 (TRAV3, TRAJ21)
CAVGNFNKFYF

SEQ ID NO: 768072 - protein, 16 aa, Homo sapiens
  CDR3 for beta chain variable domain of TCR clone 384036 (TRBV19, TRBJ2-1)
CARSKAGPGSYNEQFF

SEQ ID NO: 768073 - protein, 18 aa, Homo sapiens
  CDR3 for alpha chain variable domain of TCR clone 384037 (TRAV21, TRAJ52)
CAVRPSPAGGTSYGKLTF

SEQ ID NO: 768074 - protein, 20 aa, Homo sapiens
  CDR3 for beta chain variable domain of TCR clone 384037 (TRBV19, TRBJ2-1)
CASSISRTVTSTRLNNEQFF

SEQ ID NO: 768075 - protein, 10 aa, Homo sapiens
  CDR3 for alpha chain variable domain of TCR clone 384038 (TRAV4, TRAJ33)
TLDSNYQLIW

SEQ ID NO: 768076 - protein, 16 aa, Homo sapiens
  CDR3 for beta chain variable domain of TCR clone 384038 (TRBV5-1, TRBJ2-7)
CASSLEGLAGLYEQYF

SEQ ID NO: 768077 - protein, 11 aa, Homo sapiens
  CDR3 for alpha chain variable domain of TCR clone 384039 (TRAV3, TRAJ21)
CAVGNFNKFYF

SEQ ID NO: 768078 - protein, 15 aa, Homo sapiens
  CDR3 for beta chain variable domain of TCR clone 384039 (TRBV7-9, TRBJ1-6)
CASRSPGRGNSPLHF

SEQ ID NO: 768079 - protein, 13 aa, Homo sapiens
  CDR3 for alpha chain variable domain of TCR clone 384040 (TRAV21, TRAJ37)
CAVSSGNTGKLIF

SEQ ID NO: 768080 - protein, 15 aa, Homo sapiens
  CDR3 for beta chain variable domain of TCR clone 384040 (TRBV28, TRBJ2-5)
CASSQTSGSLETQYF

SEQ ID NO: 768081 - protein, 14 aa, Homo sapiens
  CDR3 for alpha chain variable domain of TCR clone 384041 (TRAV12-2, TRAJ44)
CAVNPAGTASKLTF

SEQ ID NO: 768082 - protein, 13 aa, Homo sapiens
  CDR3 for beta chain variable domain of TCR clone 384041 (TRBV20-1, TRBJ1-6)
CSAPLGVGSPIHF

SEQ ID NO: 768083 - protein, 14 aa, Homo sapiens
  CDR3 for alpha chain variable domain of TCR clone 384042 (TRAV4, TRAJ9)
CLVGSGTGGFKTIF

SEQ ID NO: 768084 - protein, 13 aa, Homo sapiens
  CDR3 for beta chain variable domain of TCR clone 384042 (TRBV20-1, TRBJ2-2)
CSASAAGTGELFF

SEQ ID NO: 768085 - protein, 13 aa, Homo sapiens
  CDR3 for alpha chain variable domain of TCR clone 384043 (TRAV12-3, TRAJ13)
CAMSSGGYQEVTF

SEQ ID NO: 768086 - protein, 13 aa, Homo sapiens
  CDR3 for beta chain variable domain of TCR clone 384043 (TRBV20-1, TRBJ1-1)
CSAPPGGNTEAFF

SEQ ID NO: 768087 - protein, 14 aa, Homo sapiens
  CDR3 for alpha chain variable domain of TCR clone 384044 (TRAV12-2, TRAJ45)
CALPDRGGAGGLTF

SEQ ID NO: 768088 - protein, 14 aa, Homo sapiens
  CDR3 for beta chain variable domain of TCR clone 384044 (TRBV18, TRBJ1-5)
CASSPGNSNQPQHF

SEQ ID NO: 768089 - protein, 15 aa, Homo sapiens
  CDR3 for alpha chain variable domain of TCR clone 384045 (TRAV2, TRAJ9)
CAVEDRGTGGFKTIF

SEQ ID NO: 768090 - protein, 12 aa, Homo sapiens
  CDR3 for beta chain variable domain of TCR clone 384045 (TRBV7-9, TRBJ2-7)
CASSIKREEQYF

SEQ ID NO: 768091 - protein, 13 aa, Homo sapiens
  CDR3 for alpha chain variable domain of TCR clone 384046 (TRAV21, TRAJ26)
CAVLDNYGQNFVF

SEQ ID NO: 768092 - protein, 16 aa, Homo sapiens
  CDR3 for beta chain variable domain of TCR clone 384046 (TRBV29-1, TRBJ2-2)
CSVETGASGNTGELFF

SEQ ID NO: 768093 - protein, 23 aa, Homo sapiens
  CDR3 for alpha chain variable domain of TCR clone 384047 (TRAV1-1, TRAJ11)
LLQELQMKDSASYFCAGYSTLTF

SEQ ID NO: 768094 - protein, 15 aa, Homo sapiens
  CDR3 for beta chain variable domain of TCR clone 384047 (TRBV25-1, TRBJ1-4)
CASSPGDSTNEKLFF

SEQ ID NO: 768095 - protein, 12 aa, Homo sapiens
  CDR3 for alpha chain variable domain of TCR clone 384048 (TRAV17, TRAJ12)
CATLRSSYKLIF

SEQ ID NO: 768096 - protein, 15 aa, Homo sapiens
  CDR3 for beta chain variable domain of TCR clone 384048 (TRBV19, TRBJ2-2)
CASRPRTGWTGELFF

SEQ ID NO: 768097 - protein, 18 aa, Homo sapiens
  CDR3 for alpha chain variable domain of TCR clone 384049 (TRAV13-1, TRAJ52)
CAAKNPNAGGTSYGKLTF

SEQ ID NO: 768098 - protein, 13 aa, Homo sapiens
  CDR3 for beta chain variable domain of TCR clone 384049 (TRBV20-1, TRBJ1-1)
CSARGGGNTEAVF

SEQ ID NO: 768099 - protein, 15 aa, Homo sapiens
  CDR3 for alpha chain variable domain of TCR clone 384050 (TRAV23/DV6, TRAJ30)
CAASSQETRDDKIIF

SEQ ID NO: 768100 - protein, 17 aa, Homo sapiens
  CDR3 for beta chain variable domain of TCR clone 384050 (TRBV4-3, TRBJ2-1)
CASSQFSSGRASGEQFF

SEQ ID NO: 768101 - protein, 16 aa, Homo sapiens
  CDR3 for alpha chain variable domain of TCR clone 384051 (TRAV38-2/DV8, TRAJ47)
CAYRSAIMDYGNKLVF

SEQ ID NO: 768102 - protein, 16 aa, Homo sapiens
  CDR3 for beta chain variable domain of TCR clone 384051 (TRBV20-1, TRBJ2-1)
CSASASGYSSYNEQFF

SEQ ID NO: 768103 - protein, 13 aa, Homo sapiens
  CDR3 for alpha chain variable domain of TCR clone 384052 (TRAV12-1, TRAJ9)
CVVRNTGGFKTIF

SEQ ID NO: 768104 - protein, 14 aa, Homo sapiens
  CDR3 for beta chain variable domain of TCR clone 384052 (TRBV20-1, TRBJ2-1)
CSAQIGGSANQQFF

SEQ ID NO: 768105 - protein, 16 aa, Homo sapiens
  CDR3 for alpha chain variable domain of TCR clone 384053 (TRAV3, TRAJ23)
CAVKIGIYNQGGKLIF

SEQ ID NO: 768106 - protein, 15 aa, Homo sapiens
  CDR3 for beta chain variable domain of TCR clone 384053 (TRBV20-1, TRBJ2-5)
CSAGLAGVSQETQYF

SEQ ID NO: 768107 - protein, 16 aa, Homo sapiens
  CDR3 for alpha chain variable domain of TCR clone 384054 (TRAV26-1, TRAJ23)
CIVRVERYNQGGKLIF

SEQ ID NO: 768108 - protein, 16 aa, Homo sapiens
  CDR3 for beta chain variable domain of TCR clone 384054 (TRBV7-3, TRBJ2-2)
CASSLKRGTLSGELFF

SEQ ID NO: 768109 - protein, 11 aa, Homo sapiens
  CDR3 for alpha chain variable domain of TCR clone 384055 (TRAV13-1, TRAJ39)
CASYAGNMLTF

SEQ ID NO: 768110 - protein, 13 aa, Homo sapiens
  CDR3 for beta chain variable domain of TCR clone 384055 (TRBV11-2, TRBJ1-5)
CQQLRQGRQPQHF

SEQ ID NO: 768111 - protein, 11 aa, Homo sapiens
  CDR3 for alpha chain variable domain of TCR clone 384056 (TRAV2, TRAJ13)
CASGGYQKVTF

SEQ ID NO: 768112 - protein, 16 aa, Homo sapiens
  CDR3 for beta chain variable domain of TCR clone 384056 (TRBV24-1, TRBJ2-3)
CATSDAISGITDTQYF

SEQ ID NO: 768113 - protein, 15 aa, Homo sapiens
  CDR3 for alpha chain variable domain of TCR clone 384057 (TRAV1-1, TRAJ5)
CAVRHMDTGRRALTF

SEQ ID NO: 768114 - protein, 16 aa, Homo sapiens
  CDR3 for beta chain variable domain of TCR clone 384057 (TRBV12-4, TRBJ1-5)
CASSRPVGGSNQPQHF

SEQ ID NO: 768115 - protein, 16 aa, Homo sapiens
  CDR3 for alpha chain variable domain of TCR clone 384058 (TRAV2, TRAJ10)
CCGGSTVTGGGNILTF

SEQ ID NO: 768116 - protein, 16 aa, Homo sapiens
  CDR3 for beta chain variable domain of TCR clone 384058 (TRBV18, TRBJ1-5)
CASSPSTGNSNQTQHF

SEQ ID NO: 768117 - protein, 14 aa, Homo sapiens
  CDR3 for alpha chain variable domain of TCR clone 384059 (TRAV12-2, TRAJ40)
CAVKIPSGTYKYIF

SEQ ID NO: 768118 - protein, 19 aa, Homo sapiens
  CDR3 for beta chain variable domain of TCR clone 384059 (TRBV28, TRBJ2-1)
CQHPIGRSPGLAGGNEQFF

SEQ ID NO: 768119 - protein, 16 aa, Homo sapiens
  CDR3 for alpha chain variable domain of TCR clone 384060 (TRAV30, TRAJ24)
CGTEIVDADSWGKFQF

SEQ ID NO: 768120 - protein, 13 aa, Homo sapiens
  CDR3 for beta chain variable domain of TCR clone 384060 (TRBV10-3, TRBJ1-2)
CAISERDSYGDTL

SEQ ID NO: 768121 - protein, 14 aa, Homo sapiens
  CDR3 for alpha chain variable domain of TCR clone 384061 (TRAV17, TRAJ57)
CATDASGGSEKLVF

SEQ ID NO: 768122 - protein, 14 aa, Homo sapiens
  CDR3 for beta chain variable domain of TCR clone 384061 (TRBV4-2, TRBJ2-1)
CASGLDMAYNEQFF

SEQ ID NO: 768123 - protein, 10 aa, Homo sapiens
  CDR3 for alpha chain variable domain of TCR clone 384062 (TRAV23/DV6, TRAJ28)
CAASSGILWG

SEQ ID NO: 768124 - protein, 15 aa, Homo sapiens
  CDR3 for beta chain variable domain of TCR clone 384062 (TRBV9, TRBJ2-1)
CASSARLARYNEQFF

SEQ ID NO: 768125 - protein, 14 aa, Homo sapiens
  CDR3 for alpha chain variable domain of TCR clone 384063 (TRAV1-2, TRAJ8)
CAVREDTGFQKLVF

SEQ ID NO: 768126 - protein, 15 aa, Homo sapiens
  CDR3 for beta chain variable domain of TCR clone 384063 (TRBV12-4, TRBJ2-5)
CASSPPTGLQETQYY

SEQ ID NO: 768127 - protein, 17 aa, Homo sapiens
  CDR3 for alpha chain variable domain of TCR clone 384064 (TRAV13-1, TRAJ31)
CAPRDRLMFGDGTQLVV

SEQ ID NO: 768128 - protein, 15 aa, Homo sapiens
  CDR3 for beta chain variable domain of TCR clone 384064 (TRBV12-4, TRBJ2-5)
CASSPPTGLQETQYF

SEQ ID NO: 768129 - protein, 14 aa, Homo sapiens
  CDR3 for alpha chain variable domain of TCR clone 384065 (TRAV17, TRAJ34)
SATDSLEGTDKLIF

SEQ ID NO: 768130 - protein, 13 aa, Homo sapiens
  CDR3 for beta chain variable domain of TCR clone 384065 (TRBV11-2, TRBJ2-7)
CASSGTRPYEQYF

SEQ ID NO: 768131 - protein, 13 aa, Homo sapiens
  CDR3 for alpha chain variable domain of TCR clone 384066 (TRAV20, TRAJ21)
CAVEGYNFNKFYF

SEQ ID NO: 768132 - protein, 12 aa, Homo sapiens
  CDR3 for beta chain variable domain of TCR clone 384066 (TRBV7-2, TRBJ2-5)
CASSQYQETQYF

SEQ ID NO: 768133 - protein, 14 aa, Homo sapiens
  CDR3 for alpha chain variable domain of TCR clone 384067 (TRAV13-2, TRAJ16)
CAENNWEDGQKLLC

SEQ ID NO: 768134 - protein, 14 aa, Homo sapiens
  CDR3 for beta chain variable domain of TCR clone 384067 (TRBV7-9, TRBJ1-1)
CASSLGGLKTEAFF

SEQ ID NO: 768135 - protein, 16 aa, Homo sapiens
  CDR3 for alpha chain variable domain of TCR clone 384068 (TRAV1-2, TRAJ10)
CAVRGVLTGGGNKLIV

SEQ ID NO: 768136 - protein, 12 aa, Homo sapiens
  CDR3 for beta chain variable domain of TCR clone 384068 (TRBV7-8, TRBJ2-7)
CASSLGDREQYF

SEQ ID NO: 768137 - protein, 17 aa, Homo sapiens
  CDR3 for alpha chain variable domain of TCR clone 384069 (TRAV13-1, TRAJ52)
CSKNPNAGGTSYVKLTF

SEQ ID NO: 768138 - protein, 14 aa, Homo sapiens
  CDR3 for beta chain variable domain of TCR clone 384069 (TRBV7-3, TRBJ2-1)
CASSLAGGTNEQFF

SEQ ID NO: 768139 - protein, 16 aa, Homo sapiens
  CDR3 for alpha chain variable domain of TCR clone 384070 (TRAV12-1, TRAJ45)
CVVNGGIGGGADGLTF

SEQ ID NO: 768140 - protein, 13 aa, Homo sapiens
  CDR3 for beta chain variable domain of TCR clone 384070 (TRBV4-2, TRBJ1-1)
CASSQAGNTEAFF

SEQ ID NO: 768141 - protein, 17 aa, Homo sapiens
  CDR3 for alpha chain variable domain of TCR clone 384071 (TRAV3, TRAJ12)
CAVRDGGGMDSSYKLIF

SEQ ID NO: 768142 - protein, 15 aa, Homo sapiens
  CDR3 for beta chain variable domain of TCR clone 384071 (TRBV20-1, TRBJ2-5)
CSAEGTGGLQETQYF

SEQ ID NO: 768143 - protein, 16 aa, Homo sapiens
  CDR3 for alpha chain variable domain of TCR clone 384072 (TRAV20, TRAJ22)
CAVQAPSSGSASQLTF

SEQ ID NO: 768144 - protein, 13 aa, Homo sapiens
  CDR3 for beta chain variable domain of TCR clone 384072 (TRBV7-2, TRBJ2-5)
CASSQTSVETQYF

SEQ ID NO: 768145 - protein, 15 aa, Homo sapiens
  CDR3 for alpha chain variable domain of TCR clone 384073 (TRAV3, TRAJ3)
CAVRDRDSSASAIIF

SEQ ID NO: 768146 - protein, 18 aa, Homo sapiens
  CDR3 for beta chain variable domain of TCR clone 384073 (TRBV25-1, TRBJ1-2)
CASSGLQNGQGLIFGYTF

SEQ ID NO: 768147 - protein, 13 aa, Homo sapiens
  CDR3 for alpha chain variable domain of TCR clone 384074 (TRAV12-3, TRAJ33)
CAMSVNSNYQLIW

SEQ ID NO: 768148 - protein, 15 aa, Homo sapiens
  CDR3 for beta chain variable domain of TCR clone 384074 (TRBV11-3, TRBJ1-3)
CASSLSGTSGNTIYF

SEQ ID NO: 768149 - protein, 18 aa, Homo sapiens
  CDR3 for alpha chain variable domain of TCR clone 384075 (TRAV26-2, )
CILTDIQNPDPAVYQLRD

SEQ ID NO: 768150 - protein, 16 aa, Homo sapiens
  CDR3 for beta chain variable domain of TCR clone 384075 (TRBV7-3, TRBJ2-2)
CASSLKRGTLSGELFF

SEQ ID NO: 768151 - protein, 15 aa, Homo sapiens
  CDR3 for alpha chain variable domain of TCR clone 384076 (TRAV12-2, TRAJ9)
CAVNNERTGGFKTIF

SEQ ID NO: 768152 - protein, 14 aa, Homo sapiens
  CDR3 for beta chain variable domain of TCR clone 384076 (TRBV4-1, TRBJ1-4)
CASSQERKKEKLFF

SEQ ID NO: 768153 - protein, 14 aa, Homo sapiens
  CDR3 for alpha chain variable domain of TCR clone 384077 (TRAV1-2, TRAJ8)
CAVREDTGFQKLVF

SEQ ID NO: 768154 - protein, 17 aa, Homo sapiens
  CDR3 for beta chain variable domain of TCR clone 384077 (TRBV11-2, TRBJ2-1)
YACSLCPPGVEYNEQFF

SEQ ID NO: 768155 - protein, 10 aa, Homo sapiens
  CDR3 for alpha chain variable domain of TCR clone 384078 (TRAV12-3, TRAJ49)
CAMNDDQFYF

SEQ ID NO: 768156 - protein, 17 aa, Homo sapiens
  CDR3 for beta chain variable domain of TCR clone 384078 (TRBV7-8, TRBJ2-6)
CASSAGTGGAGANVLTF

SEQ ID NO: 768157 - protein, 14 aa, Homo sapiens
  CDR3 for alpha chain variable domain of TCR clone 384079 (TRAV1-2, TRAJ8)
CAVREDTGFQKLVF

SEQ ID NO: 768158 - protein, 16 aa, Homo sapiens
  CDR3 for beta chain variable domain of TCR clone 384079 (TRBV20-1, TRBJ2-1)
CSARDLNQGMNNEQFF

SEQ ID NO: 768159 - protein, 16 aa, Homo sapiens
  CDR3 for alpha chain variable domain of TCR clone 384080 (TRAV26-2, TRAJ48)
CILRPPFNFGNEKLTF

SEQ ID NO: 768160 - protein, 15 aa, Homo sapiens
  CDR3 for beta chain variable domain of TCR clone 384080 (TRBV20-1, TRBJ2-3)
CSARVEGTYTDTQYF

SEQ ID NO: 768161 - protein, 14 aa, Homo sapiens
  CDR3 for alpha chain variable domain of TCR clone 384081 (TRAV26-1, TRAJ38)
CIADNAGNNRKLIW

SEQ ID NO: 768162 - protein, 15 aa, Homo sapiens
  CDR3 for beta chain variable domain of TCR clone 384081 (TRBV7-6, TRBJ1-4)
CASSLGAGAGERQFF

SEQ ID NO: 768163 - protein, 12 aa, Homo sapiens
  CDR3 for alpha chain variable domain of TCR clone 384082 (TRAV12-1, TRAJ40)
CVVYSGTYKYIF

SEQ ID NO: 768164 - protein, 11 aa, Homo sapiens
  CDR3 for beta chain variable domain of TCR clone 384082 (TRBV27, TRBJ2-7)
CASSLGYEQYF

SEQ ID NO: 768165 - protein, 14 aa, Homo sapiens
  CDR3 for alpha chain variable domain of TCR clone 384083 (TRAV13-2, TRAJ17)
CAENSKAAGNKLTF

SEQ ID NO: 768166 - protein, 12 aa, Homo sapiens
  CDR3 for beta chain variable domain of TCR clone 384083 (TRBV28, TRBJ2-3)
CASSLYRDTQYF

SEQ ID NO: 768167 - protein, 17 aa, Homo sapiens
  CDR3 for alpha chain variable domain of TCR clone 384084 (TRAV3, TRAJ28)
CAVREAYSGAGSYQLTF

SEQ ID NO: 768168 - protein, 13 aa, Homo sapiens
  CDR3 for beta chain variable domain of TCR clone 384084 (TRBV19, TRBJ2-7)
CASRKAGGSEQYF

SEQ ID NO: 768169 - protein, 14 aa, Homo sapiens
  CDR3 for alpha chain variable domain of TCR clone 384085 (TRAV17, TRAJ6)
CATDESGGSYIPTF

SEQ ID NO: 768170 - protein, 14 aa, Homo sapiens
  CDR3 for beta chain variable domain of TCR clone 384085 (TRBV19, TRBJ1-5)
CASGTEVYNQPQHF

SEQ ID NO: 768171 - protein, 15 aa, Homo sapiens
  CDR3 for alpha chain variable domain of TCR clone 384086 (TRAV17, TRAJ57)
CATGPSHGGSEKLVF

SEQ ID NO: 768172 - protein, 17 aa, Homo sapiens
  CDR3 for beta chain variable domain of TCR clone 384086 (TRBV20-1, TRBJ2-1)
CSASSSGLAGSYNEQFF

SEQ ID NO: 768173 - protein, 12 aa, Homo sapiens
  CDR3 for alpha chain variable domain of TCR clone 384087 (TRAV12-1, TRAJ40)
CVFYSGTYKYIF

SEQ ID NO: 768174 - protein, 13 aa, Homo sapiens
  CDR3 for beta chain variable domain of TCR clone 384087 (TRBV11-2, TRBJ1-6)
CASSLAGVSPLHF

SEQ ID NO: 768175 - protein, 13 aa, Homo sapiens
  CDR3 for alpha chain variable domain of TCR clone 384088 (TRAV3, TRAJ21)
CAVREPDFNKFYF

SEQ ID NO: 768176 - protein, 15 aa, Homo sapiens
  CDR3 for beta chain variable domain of TCR clone 384088 (TRBV27, TRBJ2-2)
CTSVPANSSPGSCFF

SEQ ID NO: 768177 - protein, 13 aa, Homo sapiens
  CDR3 for alpha chain variable domain of TCR clone 384089 (TRAV12-3, TRAJ7)
CAMTPYGNNRLAF

SEQ ID NO: 768178 - protein, 14 aa, Homo sapiens
  CDR3 for beta chain variable domain of TCR clone 384089 (TRBV5-1, TRBJ2-7)
CASSLQGAVDEQYF

SEQ ID NO: 768179 - protein, 20 aa, Homo sapiens
  CDR3 for alpha chain variable domain of TCR clone 384090 (TRAV26-1, TRAJ37)
CCVLLHRQINGSSNTGKLIF

SEQ ID NO: 768180 - protein, 13 aa, Homo sapiens
  CDR3 for beta chain variable domain of TCR clone 384090 (TRBV20-1, TRBJ2-7)
CSARTSGNYEQYY

SEQ ID NO: 768181 - protein, 15 aa, Homo sapiens
  CDR3 for alpha chain variable domain of TCR clone 384091 (TRAV21, TRAJ53)
CATLNSGGSNYKLTF

SEQ ID NO: 768182 - protein, 14 aa, Homo sapiens
  CDR3 for beta chain variable domain of TCR clone 384091 (TRBV15, TRBJ1-2)
CTTSRASVNYGYTF

SEQ ID NO: 768183 - protein, 15 aa, Homo sapiens
  CDR3 for alpha chain variable domain of TCR clone 384092 (TRAV21, TRAJ53)
CATLNSGGSNYKLTF

SEQ ID NO: 768184 - protein, 13 aa, Homo sapiens
  CDR3 for beta chain variable domain of TCR clone 384092 (TRBV7-2, TRBJ1-5)
CASSFARNQPQHF

SEQ ID NO: 768185 - protein, 13 aa, Homo sapiens
  CDR3 for alpha chain variable domain of TCR clone 384093 (TRAV13-1, TRAJ6)
CAASKGGSYIPTF

SEQ ID NO: 768186 - protein, 14 aa, Homo sapiens
  CDR3 for beta chain variable domain of TCR clone 384093 (TRBV7-2, TRBJ2-1)
CASSIGVGYNKQFF

SEQ ID NO: 768187 - protein, 15 aa, Homo sapiens
  CDR3 for alpha chain variable domain of TCR clone 384094 (TRAV3, TRAJ22)
CAVRDRGGSARQLTF

SEQ ID NO: 768188 - protein, 16 aa, Homo sapiens
  CDR3 for beta chain variable domain of TCR clone 384094 (TRBV5-4, TRBJ2-3)
CASQQPGAGGAHTQYF

SEQ ID NO: 768189 - protein, 13 aa, Homo sapiens
  CDR3 for alpha chain variable domain of TCR clone 384095 (TRAV8-6, TRAJ16)
CAVSRWVGQKLLF

SEQ ID NO: 768190 - protein, 15 aa, Homo sapiens
  CDR3 for beta chain variable domain of TCR clone 384095 (TRBV5-1, TRBJ2-3)
CASSPRATSTDTQYF

SEQ ID NO: 768191 - protein, 11 aa, Homo sapiens
  CDR3 for alpha chain variable domain of TCR clone 384096 (TRAV13-1, TRAJ6)
CATLGSYIPTF

SEQ ID NO: 768192 - protein, 14 aa, Homo sapiens
  CDR3 for beta chain variable domain of TCR clone 384096 (TRBV5-4, TRBJ1-1)
CASSLDSRRDEAFF

SEQ ID NO: 768193 - protein, 15 aa, Homo sapiens
  CDR3 for alpha chain variable domain of TCR clone 384097 (TRAV35, TRAJ40)
CAGQLGTSGTYKYIF

SEQ ID NO: 768194 - protein, 16 aa, Homo sapiens
  CDR3 for beta chain variable domain of TCR clone 384097 (TRBV4-3, TRBJ2-2)
CASSHLQGSGTGELFF

SEQ ID NO: 768195 - protein, 14 aa, Homo sapiens
  CDR3 for alpha chain variable domain of TCR clone 384098 (TRAV20, TRAJ17)
CAVQARAAGNKLTC

SEQ ID NO: 768196 - protein, 13 aa, Homo sapiens
  CDR3 for beta chain variable domain of TCR clone 384098 (TRBV19, TRBJ1-2)
CASSPTLNYGYTF

SEQ ID NO: 768197 - protein, 12 aa, Homo sapiens
  CDR3 for alpha chain variable domain of TCR clone 384099 (TRAV12-2, TRAJ4)
GWPEGGYNKLIF

SEQ ID NO: 768198 - protein, 15 aa, Homo sapiens
  CDR3 for beta chain variable domain of TCR clone 384099 (TRBV9, TRBJ1-6)
CASSVAGTGDSPLQF

SEQ ID NO: 768199 - protein, 10 aa, Homo sapiens
  CDR3 for alpha chain variable domain of TCR clone 384100 (TRAV8-1, TRAJ21)
CAVNGANFYF

SEQ ID NO: 768200 - protein, 16 aa, Homo sapiens
  CDR3 for beta chain variable domain of TCR clone 384100 (TRBV7-2, TRBJ1-5)
CASSPWGPEGNQPQHF

SEQ ID NO: 768201 - protein, 12 aa, Homo sapiens
  CDR3 for alpha chain variable domain of TCR clone 384101 (TRAV13-1, TRAJ49)
CAASPMGNQFYF

SEQ ID NO: 768202 - protein, 13 aa, Homo sapiens
  CDR3 for beta chain variable domain of TCR clone 384101 (TRBV7-2, TRBJ2-2)
CASSLAVTGELFF

SEQ ID NO: 768203 - protein, 11 aa, Homo sapiens
  CDR3 for alpha chain variable domain of TCR clone 384102 (TRAV1-2, TRAJ20)
CAVANDYKLSF

SEQ ID NO: 768204 - protein, 16 aa, Homo sapiens
  CDR3 for beta chain variable domain of TCR clone 384102 (TRBV11-3, TRBJ2-1)
CQQLSEYKSSYNEQFF

SEQ ID NO: 768205 - protein, 12 aa, Homo sapiens
  CDR3 for alpha chain variable domain of TCR clone 384103 (TRAV26-1, TRAJ54)
CIGGWGAQKLVF

SEQ ID NO: 768206 - protein, 14 aa, Homo sapiens
  CDR3 for beta chain variable domain of TCR clone 384103 (TRBV19, TRBJ2-1)
CASPTFVLSGEQFF

SEQ ID NO: 768207 - protein, 18 aa, Homo sapiens
  CDR3 for alpha chain variable domain of TCR clone 384104 (TRAV13-1, TRAJ52)
CAASKRSAGGTSYGKLKF

SEQ ID NO: 768208 - protein, 13 aa, Homo sapiens
  CDR3 for beta chain variable domain of TCR clone 384104 (TRBV12-4, TRBJ1-2)
CASSLRQGKGYTF

SEQ ID NO: 768209 - protein, 12 aa, Homo sapiens
  CDR3 for alpha chain variable domain of TCR clone 384105 (TRAV13-1, TRAJ27)
CAAHTNAGKSTF

SEQ ID NO: 768210 - protein, 11 aa, Homo sapiens
  CDR3 for beta chain variable domain of TCR clone 384105 (TRBV27, TRBJ2-7)
CASSQGYEQYF

SEQ ID NO: 768211 - protein, 16 aa, Homo sapiens
  CDR3 for alpha chain variable domain of TCR clone 384106 (TRAV17, TRAJ9)
CATGEWGGTGGVKTIF

SEQ ID NO: 768212 - protein, 15 aa, Homo sapiens
  CDR3 for beta chain variable domain of TCR clone 384106 (TRBV20-1, TRBJ1-2)
CSARDSRGRNYGYTF

SEQ ID NO: 768213 - protein, 16 aa, Homo sapiens
  CDR3 for alpha chain variable domain of TCR clone 384107 (TRAV26-1, TRAJ45)
CIVEKYSGGGADGLTF

SEQ ID NO: 768214 - protein, 15 aa, Homo sapiens
  CDR3 for beta chain variable domain of TCR clone 384107 (TRBV15, TRBJ2-7)
CHQQRPVQQAYEQYF

SEQ ID NO: 768215 - protein, 15 aa, Homo sapiens
  CDR3 for alpha chain variable domain of TCR clone 384108 (TRAV21, TRAJ43)
CAVRPSKAVFDDMRF

SEQ ID NO: 768216 - protein, 12 aa, Homo sapiens
  CDR3 for beta chain variable domain of TCR clone 384108 (TRBV12-4, TRBJ2-7)
CASSLGGYEQYF

SEQ ID NO: 768217 - protein, 14 aa, Homo sapiens
  CDR3 for alpha chain variable domain of TCR clone 384109 (TRAV26-1, TRAJ38)
CIADNAGNNRKLIW

SEQ ID NO: 768218 - protein, 17 aa, Homo sapiens
  CDR3 for beta chain variable domain of TCR clone 384109 (TRBV7-9, TRBJ2-3)
CASSPTVAGGPHRYAVF

SEQ ID NO: 768219 - protein, 11 aa, Homo sapiens
  CDR3 for alpha chain variable domain of TCR clone 384110 (TRAV20, TRAJ40)
CAVGGTYKYIF

SEQ ID NO: 768220 - protein, 15 aa, Homo sapiens
  CDR3 for beta chain variable domain of TCR clone 384110 (TRBV6-3, TRBJ2-2)
CASSFLVTLTGELFF

SEQ ID NO: 768221 - protein, 15 aa, Homo sapiens
  CDR3 for alpha chain variable domain of TCR clone 384111 (TRAV2, TRAJ9)
CAVAALNPGGFNTIF

SEQ ID NO: 768222 - protein, 12 aa, Homo sapiens
  CDR3 for beta chain variable domain of TCR clone 384111 (TRBV19, TRBJ1-4)
CASKDWPGGLFF

SEQ ID NO: 768223 - protein, 14 aa, Homo sapiens
  CDR3 for alpha chain variable domain of TCR clone 384112 (TRAV1-2, TRAJ16)
CAVNRFSDGQKLLF

SEQ ID NO: 768224 - protein, 14 aa, Homo sapiens
  CDR3 for beta chain variable domain of TCR clone 384112 (TRBV7-2, TRBJ2-7)
CAGSPKTSFYEQYF

SEQ ID NO: 768225 - protein, 14 aa, Homo sapiens
  CDR3 for alpha chain variable domain of TCR clone 384113 (TRAV12-1, TRAJ17)
CVVNYKAAGNKLAF

SEQ ID NO: 768226 - protein, 14 aa, Homo sapiens
  CDR3 for beta chain variable domain of TCR clone 384113 (TRBV19, TRBJ2-1)
CASPTFVLSGEQFF

SEQ ID NO: 768227 - protein, 15 aa, Homo sapiens
  CDR3 for alpha chain variable domain of TCR clone 384114 (TRAV4, TRAJ10)
CLVVREGGGGNKLTF

SEQ ID NO: 768228 - protein, 17 aa, Homo sapiens
  CDR3 for beta chain variable domain of TCR clone 384114 (TRBV5-1, TRBJ2-1)
CASSLALAGGPYNEQFF

SEQ ID NO: 768229 - protein, 17 aa, Homo sapiens
  CDR3 for alpha chain variable domain of TCR clone 384115 (TRAV3, TRAJ6)
CAVRDGPRARGSYIPTF

SEQ ID NO: 768230 - protein, 14 aa, Homo sapiens
  CDR3 for beta chain variable domain of TCR clone 384115 (TRBV7-3, TRBJ2-1)
FASSTSGGWDEQFF

SEQ ID NO: 768231 - protein, 10 aa, Homo sapiens
  CDR3 for alpha chain variable domain of TCR clone 384116 (TRAV26-1, TRAJ40)
CIAGTYKYIF

SEQ ID NO: 768232 - protein, 15 aa, Homo sapiens
  CDR3 for beta chain variable domain of TCR clone 384116 (TRBV19, TRBJ2-1)
CASSSPGVPLDEQFC

SEQ ID NO: 768233 - protein, 12 aa, Homo sapiens
  CDR3 for alpha chain variable domain of TCR clone 384117 (TRAV4, TRAJ26)
CLVGDYGQNFVF

SEQ ID NO: 768234 - protein, 14 aa, Homo sapiens
  CDR3 for beta chain variable domain of TCR clone 384117 (TRBV6-1, TRBJ1-3)
CASVQGGGGNTIYF

SEQ ID NO: 768235 - protein, 14 aa, Homo sapiens
  CDR3 for alpha chain variable domain of TCR clone 384118 (TRAV20, TRAJ56)
CALQFGGANSKLTF

SEQ ID NO: 768236 - protein, 14 aa, Homo sapiens
  CDR3 for beta chain variable domain of TCR clone 384118 (TRBV7-2, TRBJ1-1)
CASSFLTGTTEAFF

SEQ ID NO: 768237 - protein, 12 aa, Homo sapiens
  CDR3 for alpha chain variable domain of TCR clone 384119 (TRAV12-3, TRAJ42)
CAPGGSQGNLIF

SEQ ID NO: 768238 - protein, 13 aa, Homo sapiens
  CDR3 for beta chain variable domain of TCR clone 384119 (TRBV5-6, TRBJ2-6)
CASTSSGANVLTV

SEQ ID NO: 768239 - protein, 13 aa, Homo sapiens
  CDR3 for alpha chain variable domain of TCR clone 384120 (TRAV21, TRAJ20)
CAVGLRVDYKLSF

SEQ ID NO: 768240 - protein, 17 aa, Homo sapiens
  CDR3 for beta chain variable domain of TCR clone 384120 (TRBV7-9, TRBJ2-1)
CASSLVASYPSYNEQFF

SEQ ID NO: 768241 - protein, 11 aa, Homo sapiens
  CDR3 for alpha chain variable domain of TCR clone 384121 (TRAV17, TRAJ43)
CATPRSNDMRF

SEQ ID NO: 768242 - protein, 15 aa, Homo sapiens
  CDR3 for beta chain variable domain of TCR clone 384121 (TRBV11-2, TRBJ2-1)
CASSLGTSGLNDQFF

SEQ ID NO: 768243 - protein, 18 aa, Homo sapiens
  CDR3 for alpha chain variable domain of TCR clone 384122 (TRAV21, TRAJ52)
CAVRPSPAGGTSYGKLAF

SEQ ID NO: 768244 - protein, 14 aa, Homo sapiens
  CDR3 for beta chain variable domain of TCR clone 384122 (TRBV10-2, TRBJ1-3)
CASTRTDTGNTMYF

SEQ ID NO: 768245 - protein, 12 aa, Homo sapiens
  CDR3 for alpha chain variable domain of TCR clone 384123 (TRAV8-3, TRAJ26)
CAGDNYGQNFVF

SEQ ID NO: 768246 - protein, 13 aa, Homo sapiens
  CDR3 for beta chain variable domain of TCR clone 384123 (TRBV11-2, TRBJ1-1)
CASSLGNGAEAFF

SEQ ID NO: 768247 - protein, 13 aa, Homo sapiens
  CDR3 for alpha chain variable domain of TCR clone 384124 (TRAV20, TRAJ48)
CAVHLFGNEKLTF

SEQ ID NO: 768248 - protein, 14 aa, Homo sapiens
  CDR3 for beta chain variable domain of TCR clone 384124 (TRBV20-1, TRBJ1-6)
CSARGTGYNSPLHF

SEQ ID NO: 768249 - protein, 14 aa, Homo sapiens
  CDR3 for alpha chain variable domain of TCR clone 384125 (TRAV12-2, TRAJ13)
CAVKKTGGYQKVTF

SEQ ID NO: 768250 - protein, 15 aa, Homo sapiens
  CDR3 for beta chain variable domain of TCR clone 384125 (TRBV29-1, TRBJ2-7)
CSVEFVDRGSYEQYF

SEQ ID NO: 768251 - protein, 14 aa, Homo sapiens
  CDR3 for alpha chain variable domain of TCR clone 384126 (TRAV34, TRAJ44)
CGADGTGTASKITF

SEQ ID NO: 768252 - protein, 15 aa, Homo sapiens
  CDR3 for beta chain variable domain of TCR clone 384126 (TRBV5-1, TRBJ2-1)
CASSPPRAPYNEQFF

SEQ ID NO: 768253 - protein, 10 aa, Homo sapiens
  CDR3 for alpha chain variable domain of TCR clone 384127 (TRAV26-1, TRAJ40)
CIAGTYKYIF

SEQ ID NO: 768254 - protein, 15 aa, Homo sapiens
  CDR3 for beta chain variable domain of TCR clone 384127 (TRBV20-1, TRBJ2-7)
CSARDRVSGMDEQYF

SEQ ID NO: 768255 - protein, 12 aa, Homo sapiens
  CDR3 for alpha chain variable domain of TCR clone 384128 (TRAV3, TRAJ9)
CAVLPAGFKTIF

SEQ ID NO: 768256 - protein, 14 aa, Homo sapiens
  CDR3 for beta chain variable domain of TCR clone 384128 (TRBV12-5, TRBJ2-5)
CASGSRTHQETQYF

SEQ ID NO: 768257 - protein, 12 aa, Homo sapiens
  CDR3 for alpha chain variable domain of TCR clone 384129 (TRAV12-3, TRAJ40)
CAMSSGTYKYIF

SEQ ID NO: 768258 - protein, 20 aa, Homo sapiens
  CDR3 for beta chain variable domain of TCR clone 384129 (TRBV7-8, TRBJ2-2)
GASSHLFPGPTIHITGELFF

SEQ ID NO: 768259 - protein, 14 aa, Homo sapiens
  CDR3 for alpha chain variable domain of TCR clone 384130 (TRAV12-2, TRAJ52)
CAVPGVTSYGKLTF

SEQ ID NO: 768260 - protein, 12 aa, Homo sapiens
  CDR3 for beta chain variable domain of TCR clone 384130 (TRBV18, TRBJ2-1)
CASSPGTSEGFF

SEQ ID NO: 768261 - protein, 14 aa, Homo sapiens
  CDR3 for alpha chain variable domain of TCR clone 384131 (TRAV12-3, TRAJ57)
CAMSAWGGSEKLVF

SEQ ID NO: 768262 - protein, 14 aa, Homo sapiens
  CDR3 for beta chain variable domain of TCR clone 384131 (TRBV11-3, TRBJ2-1)
CASSATTSGSIQFF

SEQ ID NO: 768263 - protein, 12 aa, Homo sapiens
  CDR3 for alpha chain variable domain of TCR clone 384132 (TRAV16, TRAJ10)
CSRTGGGNKLTF

SEQ ID NO: 768264 - protein, 15 aa, Homo sapiens
  CDR3 for beta chain variable domain of TCR clone 384132 (TRBV19, TRBJ1-2)
CASSVGQVLNYGYTF

SEQ ID NO: 768265 - protein, 14 aa, Homo sapiens
  CDR3 for alpha chain variable domain of TCR clone 384133 (TRAV17, TRAJ57)
CATDPQGGSEKLVF

SEQ ID NO: 768266 - protein, 16 aa, Homo sapiens
  CDR3 for beta chain variable domain of TCR clone 384133 (TRBV28, TRBJ2-7)
CASSLFFETGGPEQYF

SEQ ID NO: 768267 - protein, 13 aa, Homo sapiens
  CDR3 for alpha chain variable domain of TCR clone 384134 (TRAV1-2, TRAJ9)
CAALNTGGFQTIF

SEQ ID NO: 768268 - protein, 15 aa, Homo sapiens
  CDR3 for beta chain variable domain of TCR clone 384134 (TRBV24-1, TRBJ2-1)
CATSGSGGFYNEQFF

SEQ ID NO: 768269 - protein, 11 aa, Homo sapiens
  CDR3 for alpha chain variable domain of TCR clone 384135 (TRAV1-1, TRAJ23)
CAVRQGGKLIF

SEQ ID NO: 768270 - protein, 16 aa, Homo sapiens
  CDR3 for beta chain variable domain of TCR clone 384135 (TRBV5-1, TRBJ2-3)
CASSLEGGSFTDTQYF

SEQ ID NO: 768271 - protein, 13 aa, Homo sapiens
  CDR3 for alpha chain variable domain of TCR clone 384136 (TRAV27, TRAJ41)
CAGAGNSGYALNF

SEQ ID NO: 768272 - protein, 14 aa, Homo sapiens
  CDR3 for beta chain variable domain of TCR clone 384136 (TRBV25-1, TRBJ1-1)
CASTHLGGNTEAFF

SEQ ID NO: 768273 - protein, 21 aa, Homo sapiens
  CDR3 for alpha chain variable domain of TCR clone 384137 (TRAV1-1, TRAJ6)
CAVRREEATYLHLEEEPTLLF

SEQ ID NO: 768274 - protein, 15 aa, Homo sapiens
  CDR3 for beta chain variable domain of TCR clone 384137 (TRBV6-6, TRBJ2-1)
CATRQGVSSYNEQFF

SEQ ID NO: 768275 - protein, 15 aa, Homo sapiens
  CDR3 for alpha chain variable domain of TCR clone 384138 (TRAV3, TRAJ45)
CAVRTPWGGADGVTF

SEQ ID NO: 768276 - protein, 16 aa, Homo sapiens
  CDR3 for beta chain variable domain of TCR clone 384138 (TRBV6-1, TRBJ2-2)
CASSFGQGANTGELFF

SEQ ID NO: 768277 - protein, 13 aa, Homo sapiens
  CDR3 for alpha chain variable domain of TCR clone 384139 (TRAV8-6, TRAJ49)
CAVITNTGNQSYF

SEQ ID NO: 768278 - protein, 13 aa, Homo sapiens
  CDR3 for beta chain variable domain of TCR clone 384139 (TRBV10-3, TRBJ2-7)
CASKLAVNYEQYF

SEQ ID NO: 768279 - protein, 14 aa, Homo sapiens
  CDR3 for alpha chain variable domain of TCR clone 384140 (TRAV3, TRAJ17)
CAVRDAAAGNKLTF

SEQ ID NO: 768280 - protein, 13 aa, Homo sapiens
  CDR3 for beta chain variable domain of TCR clone 384140 (TRBV2, TRBJ1-6)
CADSGSYNSPLHF

SEQ ID NO: 768281 - protein, 12 aa, Homo sapiens
  CDR3 for alpha chain variable domain of TCR clone 384141 (TRAV29/DV5, TRAJ34)
CAASGNTDKLIF

SEQ ID NO: 768282 - protein, 15 aa, Homo sapiens
  CDR3 for beta chain variable domain of TCR clone 384141 (TRBV27, TRBJ2-1)
CASSNGGGSSNEQFF

SEQ ID NO: 768283 - protein, 14 aa, Homo sapiens
  CDR3 for alpha chain variable domain of TCR clone 384142 (TRAV8-3, TRAJ9)
CAVVYNTGGFKTIF

SEQ ID NO: 768284 - protein, 16 aa, Homo sapiens
  CDR3 for beta chain variable domain of TCR clone 384142 (TRBV7-3, TRBJ2-2)
CASSLKRGTLSGELLF

SEQ ID NO: 768285 - protein, 16 aa, Homo sapiens
  CDR3 for alpha chain variable domain of TCR clone 384143 (TRAV30, TRAJ24)
CGTEIVDADSWGIFKF

SEQ ID NO: 768286 - protein, 14 aa, Homo sapiens
  CDR3 for beta chain variable domain of TCR clone 384143 (TRBV12-5, TRBJ2-5)
CASGSRTHQETQYF

SEQ ID NO: 768287 - protein, 12 aa, Homo sapiens
  CDR3 for alpha chain variable domain of TCR clone 384144 (TRAV1-1, TRAJ9)
CAVDTGGFKTIF

SEQ ID NO: 768288 - protein, 14 aa, Homo sapiens
  CDR3 for beta chain variable domain of TCR clone 384144 (TRBV7-8, TRBJ2-5)
CASSATGGEETQYF

SEQ ID NO: 768289 - protein, 14 aa, Homo sapiens
  CDR3 for alpha chain variable domain of TCR clone 384145 (TRAV26-1, TRAJ38)
CIADNAGNNRKLIW

SEQ ID NO: 768290 - protein, 16 aa, Homo sapiens
  CDR3 for beta chain variable domain of TCR clone 384145 (TRBV9, TRBJ1-2)
CASSVEEKVSPYGYTF

SEQ ID NO: 768291 - protein, 12 aa, Homo sapiens
  CDR3 for alpha chain variable domain of TCR clone 384146 (TRAV12-3, TRAJ40)
CAMSSGTYKYIF

SEQ ID NO: 768292 - protein, 15 aa, Homo sapiens
  CDR3 for beta chain variable domain of TCR clone 384146 (TRBV7-3, TRBJ2-2)
CASSETGQGTVELFF

SEQ ID NO: 768293 - protein, 13 aa, Homo sapiens
  CDR3 for alpha chain variable domain of TCR clone 384147 (TRAV2, TRAJ40)
CAVVTSGTYKYIF

SEQ ID NO: 768294 - protein, 15 aa, Homo sapiens
  CDR3 for beta chain variable domain of TCR clone 384147 (TRBV11-3, TRBJ2-3)
CAGLKDGREGYTQYF

SEQ ID NO: 768295 - protein, 17 aa, Homo sapiens
  CDR3 for alpha chain variable domain of TCR clone 384148 (TRAV21, TRAJ52)
CAVGTNAGGTSYGRLTF

SEQ ID NO: 768296 - protein, 13 aa, Homo sapiens
  CDR3 for beta chain variable domain of TCR clone 384148 (TRBV5-1, TRBJ1-2)
CASSFSGNPGYTF

SEQ ID NO: 768297 - protein, 14 aa, Homo sapiens
  CDR3 for alpha chain variable domain of TCR clone 384149 (TRAV12-2, TRAJ45)
CAVYSGGGADGLTF

SEQ ID NO: 768298 - protein, 14 aa, Homo sapiens
  CDR3 for beta chain variable domain of TCR clone 384149 (TRBV6-5, TRBJ1-2)
CASTRGGGSDGYTI

SEQ ID NO: 768299 - protein, 14 aa, Homo sapiens
  CDR3 for alpha chain variable domain of TCR clone 384150 (TRAV3, TRAJ21)
CAVRDGYNFNKFYF

SEQ ID NO: 768300 - protein, 15 aa, Homo sapiens
  CDR3 for beta chain variable domain of TCR clone 384150 (TRBV6-5, TRBJ1-5)
CASSYSWDSNQPQHF

SEQ ID NO: 768301 - protein, 14 aa, Homo sapiens
  CDR3 for alpha chain variable domain of TCR clone 384151 (TRAV2, TRAJ22)
CAVGRGGSARQLTF

SEQ ID NO: 768302 - protein, 15 aa, Homo sapiens
  CDR3 for beta chain variable domain of TCR clone 384151 (TRBV27, TRBJ2-1)
CASSNGGGSSNEQFF

SEQ ID NO: 768303 - protein, 14 aa, Homo sapiens
  CDR3 for alpha chain variable domain of TCR clone 384152 (TRAV1-2, TRAJ16)
CAVNRFSDGQKLLF

SEQ ID NO: 768304 - protein, 16 aa, Homo sapiens
  CDR3 for beta chain variable domain of TCR clone 384152 (TRBV19, TRBJ2-1)
CASSKSGPSSYNEQFF

SEQ ID NO: 768305 - protein, 16 aa, Homo sapiens
  CDR3 for alpha chain variable domain of TCR clone 384153 (TRAV3, TRAJ10)
CAVRDIRAGGGNKLTF

SEQ ID NO: 768306 - protein, 16 aa, Homo sapiens
  CDR3 for beta chain variable domain of TCR clone 384153 (TRBV12-4, TRBJ1-5)
CASSRPVGGSNQPQHF

SEQ ID NO: 768307 - protein, 13 aa, Homo sapiens
  CDR3 for alpha chain variable domain of TCR clone 384154 (TRAV12-2, TRAJ52)
CNAGGTSYGKLTF

SEQ ID NO: 768308 - protein, 14 aa, Homo sapiens
  CDR3 for beta chain variable domain of TCR clone 384154 (TRBV5-1, TRBJ2-7)
CASSLQGAVDEQYF

SEQ ID NO: 768309 - protein, 16 aa, Homo sapiens
  CDR3 for alpha chain variable domain of TCR clone 384155 (TRAV12-1, TRAJ8)
CVVNGRGNTGFQQLVF

SEQ ID NO: 768310 - protein, 14 aa, Homo sapiens
  CDR3 for beta chain variable domain of TCR clone 384155 (TRBV7-9, TRBJ2-5)
CASSLVGGEETQYF

SEQ ID NO: 768311 - protein, 14 aa, Homo sapiens
  CDR3 for alpha chain variable domain of TCR clone 384156 (TRAV12-2, TRAJ13)
CAVQKTGGYQKVTF

SEQ ID NO: 768312 - protein, 16 aa, Homo sapiens
  CDR3 for beta chain variable domain of TCR clone 384156 (TRBV4-1, TRBJ2-3)
CASSQSTSGAEDTQYF

SEQ ID NO: 768313 - protein, 17 aa, Homo sapiens
  CDR3 for alpha chain variable domain of TCR clone 384157 (TRAV3, TRAJ6)
CSVRDGPRAGGSYIPTS

SEQ ID NO: 768314 - protein, 14 aa, Homo sapiens
  CDR3 for beta chain variable domain of TCR clone 384157 (TRBV7-2, TRBJ2-7)
CASSPKTSFYEQYF

SEQ ID NO: 768315 - protein, 12 aa, Homo sapiens
  CDR3 for alpha chain variable domain of TCR clone 384158 (TRAV1-1, TRAJ39)
CAVPVVGNMLTF

SEQ ID NO: 768316 - protein, 13 aa, Homo sapiens
  CDR3 for beta chain variable domain of TCR clone 384158 (TRBV7-9, TRBJ2-7)
CASSFAGAYEQYF

SEQ ID NO: 768317 - protein, 11 aa, Homo sapiens
  CDR3 for alpha chain variable domain of TCR clone 384159 (TRAV2, TRAJ33)
CAVDSTYQLIW

SEQ ID NO: 768318 - protein, 14 aa, Homo sapiens
  CDR3 for beta chain variable domain of TCR clone 384159 (TRBV11-2, TRBJ2-3)
CASSRLARTDTQYF

SEQ ID NO: 768319 - protein, 11 aa, Homo sapiens
  CDR3 for alpha chain variable domain of TCR clone 384160 (TRAV35, TRAJ34)
CWARNTAKLIF

SEQ ID NO: 768320 - protein, 14 aa, Homo sapiens
  CDR3 for beta chain variable domain of TCR clone 384160 (TRBV12-5, TRBJ2-5)
CASGSRTHQETQYF

SEQ ID NO: 768321 - protein, 12 aa, Homo sapiens
  CDR3 for alpha chain variable domain of TCR clone 384161 (TRAV12-2, TRAJ7)
CAVMRGNNRLAS

SEQ ID NO: 768322 - protein, 12 aa, Homo sapiens
  CDR3 for beta chain variable domain of TCR clone 384161 (TRBV7-8, TRBJ2-7)
CASSLGDREQYF

SEQ ID NO: 768323 - protein, 12 aa, Homo sapiens
  CDR3 for alpha chain variable domain of TCR clone 384162 (TRAV12-3, TRAJ17)
CAMTPTGNKLTF

SEQ ID NO: 768324 - protein, 13 aa, Homo sapiens
  CDR3 for beta chain variable domain of TCR clone 384162 (TRBV7-3, TRBJ1-1)
CASSQDWGAEAFF

SEQ ID NO: 768325 - protein, 15 aa, Homo sapiens
  CDR3 for alpha chain variable domain of TCR clone 384163 (TRAV20, TRAJ6)
CAVRLQSGGSYIPTF

SEQ ID NO: 768326 - protein, 14 aa, Homo sapiens
  CDR3 for beta chain variable domain of TCR clone 384163 (TRBV12-4, TRBJ2-7)
CASSAAGGWYEQYF

SEQ ID NO: 768327 - protein, 12 aa, Homo sapiens
  CDR3 for alpha chain variable domain of TCR clone 384164 (TRAV2, TRAJ10)
CASTGGGNKLTF

SEQ ID NO: 768328 - protein, 14 aa, Homo sapiens
  CDR3 for beta chain variable domain of TCR clone 384164 (TRBV4-2, TRBJ1-5)
CASSRDRGNQPQHF

SEQ ID NO: 768329 - protein, 12 aa, Homo sapiens
  CDR3 for alpha chain variable domain of TCR clone 384165 (TRAV21, TRAJ27)
CAPPGNAGKSTF

SEQ ID NO: 768330 - protein, 13 aa, Homo sapiens
  CDR3 for beta chain variable domain of TCR clone 384165 (TRBV2, TRBJ1-1)
CARNPTRGFHAFF

SEQ ID NO: 768331 - protein, 21 aa, Homo sapiens
  CDR3 for alpha chain variable domain of TCR clone 384166 (TRAV12-1, TRAJ37)
CVVNGGLWQHRQTNLWARDNF

SEQ ID NO: 768332 - protein, 12 aa, Homo sapiens
  CDR3 for beta chain variable domain of TCR clone 384166 (TRBV20-1, TRBJ1-2)
CSAPGFNYGYYF

SEQ ID NO: 768333 - protein, 15 aa, Homo sapiens
  CDR3 for alpha chain variable domain of TCR clone 384167 (TRAV12-2, TRAJ43)
CAFDMRFGAGTRLTV

SEQ ID NO: 768334 - protein, 16 aa, Homo sapiens
  CDR3 for beta chain variable domain of TCR clone 384167 (TRBV20-1, TRBJ1-4)
CSAPGQGLLTNEKLFF

SEQ ID NO: 768335 - protein, 16 aa, Homo sapiens
  CDR3 for alpha chain variable domain of TCR clone 384168 (TRAV17, TRAJ53)
CATDALSGGSNYKLTF

SEQ ID NO: 768336 - protein, 17 aa, Homo sapiens
  CDR3 for beta chain variable domain of TCR clone 384168 (TRBV18, TRBJ2-3)
CASSSRGPASSTDTQYF

SEQ ID NO: 768337 - protein, 14 aa, Homo sapiens
  CDR3 for alpha chain variable domain of TCR clone 384169 (TRAV1-2, TRAJ16)
CAVNRLSDGQKLLF

SEQ ID NO: 768338 - protein, 15 aa, Homo sapiens
  CDR3 for beta chain variable domain of TCR clone 384169 (TRBV27, TRBJ2-3)
CASRSLAGVIDTQYF

SEQ ID NO: 768339 - protein, 20 aa, Homo sapiens
  CDR3 for alpha chain variable domain of TCR clone 384170 (TRAV1-1, TRAJ39)
CLLLLRCESSAYNAGNMLTF

SEQ ID NO: 768340 - protein, 13 aa, Homo sapiens
  CDR3 for beta chain variable domain of TCR clone 384170 (TRBV12-4, TRBJ1-5)
CASSPDRAQPQHF

SEQ ID NO: 768341 - protein, 15 aa, Homo sapiens
  CDR3 for alpha chain variable domain of TCR clone 384171 (TRAV38-2/DV8, TRAJ28)
CAYRSRGAGSYQLTF

SEQ ID NO: 768342 - protein, 14 aa, Homo sapiens
  CDR3 for beta chain variable domain of TCR clone 384171 (TRBV7-9, TRBJ2-7)
CASSIGQWAGEQYF

SEQ ID NO: 768343 - protein, 13 aa, Homo sapiens
  CDR3 for alpha chain variable domain of TCR clone 384172 (TRAV17, TRAJ27)
CATSNPNAGKSTF

SEQ ID NO: 768344 - protein, 13 aa, Homo sapiens
  CDR3 for beta chain variable domain of TCR clone 384172 (TRBV11-2, TRBJ2-7)
CASSLGDSYEQYF

SEQ ID NO: 768345 - protein, 18 aa, Homo sapiens
  CDR3 for alpha chain variable domain of TCR clone 384173 (TRAV12-1, TRAJ52)
CVVKLINAGGTSYGKLTF

SEQ ID NO: 768346 - protein, 16 aa, Homo sapiens
  CDR3 for beta chain variable domain of TCR clone 384173 (TRBV7-6, TRBJ2-7)
CASSGGAGALSYEQYF

SEQ ID NO: 768347 - protein, 12 aa, Homo sapiens
  CDR3 for alpha chain variable domain of TCR clone 384174 (TRAV35, TRAJ30)
CAGQLADDKIIF

SEQ ID NO: 768348 - protein, 14 aa, Homo sapiens
  CDR3 for beta chain variable domain of TCR clone 384174 (TRBV11-2, TRBJ1-2)
CASSLGTANYGYTF

SEQ ID NO: 768349 - protein, 16 aa, Homo sapiens
  CDR3 for alpha chain variable domain of TCR clone 384175 (TRAV3, TRAJ10)
CAVRDMRAGGGNKLTS

SEQ ID NO: 768350 - protein, 14 aa, Homo sapiens
  CDR3 for beta chain variable domain of TCR clone 384175 (TRBV7-8, TRBJ2-7)
CASSPRDRVYEQYF

SEQ ID NO: 768351 - protein, 21 aa, Homo sapiens
  CDR3 for alpha chain variable domain of TCR clone 384176 (TRAV36/DV7, TRAJ39)
TATQTGDSAIYLPNAGNMLTF

SEQ ID NO: 768352 - protein, 12 aa, Homo sapiens
  CDR3 for beta chain variable domain of TCR clone 384176 (TRBV11-2, TRBJ2-1)
CASSPGNNEQFF

SEQ ID NO: 768353 - protein, 14 aa, Homo sapiens
  CDR3 for alpha chain variable domain of TCR clone 384177 (TRAV20, TRAJ13)
CAVLNSGGYEKVTF

SEQ ID NO: 768354 - protein, 14 aa, Homo sapiens
  CDR3 for beta chain variable domain of TCR clone 384177 (TRBV7-2, TRBJ1-1)
CASSFLTGTTEAFF

SEQ ID NO: 768355 - protein, 13 aa, Homo sapiens
  CDR3 for alpha chain variable domain of TCR clone 384178 (TRAV3, TRAJ20)
CAARSLNDYKLSF

SEQ ID NO: 768356 - protein, 12 aa, Homo sapiens
  CDR3 for beta chain variable domain of TCR clone 384178 (TRBV6-1, TRBJ2-1)
CASYSTYNEQFF

SEQ ID NO: 768357 - protein, 10 aa, Homo sapiens
  CDR3 for alpha chain variable domain of TCR clone 384179 (TRAV26-1, TRAJ40)
CIAGTYKYIF

SEQ ID NO: 768358 - protein, 13 aa, Homo sapiens
  CDR3 for beta chain variable domain of TCR clone 384179 (TRBV19, TRBJ1-2)
CASSQGQVYGYTF

SEQ ID NO: 768359 - protein, 13 aa, Homo sapiens
  CDR3 for alpha chain variable domain of TCR clone 384180 (TRAV12-3, TRAJ9)
CAMRNTGGIKTIF

SEQ ID NO: 768360 - protein, 16 aa, Homo sapiens
  CDR3 for beta chain variable domain of TCR clone 384180 (TRBV19, TRBJ2-1)
CASSIDGSFAYNEQFF

SEQ ID NO: 768361 - protein, 13 aa, Homo sapiens
  CDR3 for alpha chain variable domain of TCR clone 384181 (TRAV13-1, TRAJ39)
CSKYSNAGNMLTF

SEQ ID NO: 768362 - protein, 16 aa, Homo sapiens
  CDR3 for beta chain variable domain of TCR clone 384181 (TRBV7-2, TRBJ2-3)
CASSLVALYSTDKQYF

SEQ ID NO: 768363 - protein, 13 aa, Homo sapiens
  CDR3 for alpha chain variable domain of TCR clone 384182 (TRAV12-1, TRAJ37)
YVVNAGNTGKLIF

SEQ ID NO: 768364 - protein, 14 aa, Homo sapiens
  CDR3 for beta chain variable domain of TCR clone 384182 (TRBV7-2, TRBJ2-3)
CASRRGLAADTQYF

SEQ ID NO: 768365 - protein, 13 aa, Homo sapiens
  CDR3 for alpha chain variable domain of TCR clone 384183 (TRAV6, TRAJ12)
CALDPYSSYKLIF

SEQ ID NO: 768366 - protein, 15 aa, Homo sapiens
  CDR3 for beta chain variable domain of TCR clone 384183 (TRBV7-9, TRBJ2-2)
CASGPLDTFPGELFF

SEQ ID NO: 768367 - protein, 13 aa, Homo sapiens
  CDR3 for alpha chain variable domain of TCR clone 384184 (TRAV12-2, TRAJ52)
CAVSVTSYGKLTF

SEQ ID NO: 768368 - protein, 16 aa, Homo sapiens
  CDR3 for beta chain variable domain of TCR clone 384184 (TRBV7-2, TRBJ2-7)
CASTSQAASGGYEQYF

SEQ ID NO: 768369 - protein, 15 aa, Homo sapiens
  CDR3 for alpha chain variable domain of TCR clone 384185 (TRAV26-1, TRAJ37)
CIVRVAEGNTGKLIF

SEQ ID NO: 768370 - protein, 14 aa, Homo sapiens
  CDR3 for beta chain variable domain of TCR clone 384185 (TRBV10-3, TRBJ2-2)
CATFGQLNTGELFF

SEQ ID NO: 768371 - protein, 13 aa, Homo sapiens
  CDR3 for alpha chain variable domain of TCR clone 384186 (TRAV12-2, TRAJ36)
CRENIYWANNLFF

SEQ ID NO: 768372 - protein, 14 aa, Homo sapiens
  CDR3 for beta chain variable domain of TCR clone 384186 (TRBV25-1, TRBJ1-2)
CASSDTTGVVGYTF

SEQ ID NO: 768373 - protein, 15 aa, Homo sapiens
  CDR3 for alpha chain variable domain of TCR clone 384187 (TRAV2, TRAJ22)
CAVPSRGGSARQLTF

SEQ ID NO: 768374 - protein, 13 aa, Homo sapiens
  CDR3 for beta chain variable domain of TCR clone 384187 (TRBV20-1, TRBJ1-1)
CSARVGGNTEAFF

SEQ ID NO: 768375 - protein, 15 aa, Homo sapiens
  CDR3 for alpha chain variable domain of TCR clone 384188 (TRAV8-3, TRAJ40)
CAVGPYTSGTYKYIS

SEQ ID NO: 768376 - protein, 16 aa, Homo sapiens
  CDR3 for beta chain variable domain of TCR clone 384188 (TRBV7-2, TRBJ2-7)
CASSLDPGGGSGEQYF

SEQ ID NO: 768377 - protein, 15 aa, Homo sapiens
  CDR3 for alpha chain variable domain of TCR clone 384189 (TRAV13-1, TRAJ17)
CAASIERAAGNKLTF

SEQ ID NO: 768378 - protein, 14 aa, Homo sapiens
  CDR3 for beta chain variable domain of TCR clone 384189 (TRBV7-2, TRBJ1-1)
CASSFLTGTTEAFF

SEQ ID NO: 768379 - protein, 16 aa, Homo sapiens
  CDR3 for alpha chain variable domain of TCR clone 384190 (TRAV23/DV6, TRAJ9)
CAASIGGNTGGFKTIF

SEQ ID NO: 768380 - protein, 14 aa, Homo sapiens
  CDR3 for beta chain variable domain of TCR clone 384190 (TRBV2, TRBJ1-1)
CASRALLMNTEAFF

SEQ ID NO: 768381 - protein, 14 aa, Homo sapiens
  CDR3 for alpha chain variable domain of TCR clone 384191 (TRAV3, TRAJ37)
CAVKESGNTGKRIF

SEQ ID NO: 768382 - protein, 16 aa, Homo sapiens
  CDR3 for beta chain variable domain of TCR clone 384191 (TRBV10-3, TRBJ2-1)
CAISGVGDGGGGEQFF

SEQ ID NO: 768383 - protein, 15 aa, Homo sapiens
  CDR3 for alpha chain variable domain of TCR clone 384192 (TRAV21, TRAJ24)
CAARSSTDSWGKLQF

SEQ ID NO: 768384 - protein, 13 aa, Homo sapiens
  CDR3 for beta chain variable domain of TCR clone 384192 (TRBV11-2, TRBJ2-5)
CASSSTGEETPYF

SEQ ID NO: 768385 - protein, 15 aa, Homo sapiens
  CDR3 for alpha chain variable domain of TCR clone 384193 (TRAV8-4, TRAJ37)
CAVSTRSGNRGKLIL

SEQ ID NO: 768386 - protein, 20 aa, Homo sapiens
  CDR3 for beta chain variable domain of TCR clone 384193 (TRBV7-8, TRBJ2-2)
CASSHLFPGPTIHITGELFF

SEQ ID NO: 768387 - protein, 12 aa, Homo sapiens
  CDR3 for alpha chain variable domain of TCR clone 384194 (TRAV8-3, TRAJ26)
CAGDNYGQNFVF

SEQ ID NO: 768388 - protein, 11 aa, Homo sapiens
  CDR3 for beta chain variable domain of TCR clone 384194 (TRBV29-1, TRBJ2-5)
CSEDRTETQYF

SEQ ID NO: 768389 - protein, 14 aa, Homo sapiens
  CDR3 for alpha chain variable domain of TCR clone 384195 (TRAV12-2, TRAJ33)
CAVKRARSNYQLIW

SEQ ID NO: 768390 - protein, 14 aa, Homo sapiens
  CDR3 for beta chain variable domain of TCR clone 384195 (TRBV7-2, TRBJ2-7)
CASSPKTSFYEQYF

SEQ ID NO: 768391 - protein, 12 aa, Homo sapiens
  CDR3 for alpha chain variable domain of TCR clone 384196 (TRAV29/DV5, TRAJ31)
CVASSHNARLMF

SEQ ID NO: 768392 - protein, 17 aa, Homo sapiens
  CDR3 for beta chain variable domain of TCR clone 384196 (TRBV18, TRBJ2-6)
CASSPRQGAVGANVLAF

SEQ ID NO: 768393 - protein, 14 aa, Homo sapiens
  CDR3 for alpha chain variable domain of TCR clone 384197 (TRAV13-1, TRAJ13)
RAASRVGGYRKVTF

SEQ ID NO: 768394 - protein, 17 aa, Homo sapiens
  CDR3 for beta chain variable domain of TCR clone 384197 (TRBV15, TRBJ1-5)
CATSRAPPGTRNQPQHF

SEQ ID NO: 768395 - protein, 17 aa, Homo sapiens
  CDR3 for alpha chain variable domain of TCR clone 384198 (TRAV3, TRAJ42)
CAVRDRDYGGSQGNRIF

SEQ ID NO: 768396 - protein, 15 aa, Homo sapiens
  CDR3 for beta chain variable domain of TCR clone 384198 (TRBV3-1, TRBJ2-1)
CASSQVVDDGEEQFF

SEQ ID NO: 768397 - protein, 13 aa, Homo sapiens
  CDR3 for alpha chain variable domain of TCR clone 384199 (TRAV8-3, TRAJ44)
CAVVPGTASNIPF

SEQ ID NO: 768398 - protein, 14 aa, Homo sapiens
  CDR3 for beta chain variable domain of TCR clone 384199 (TRBV11-2, TRBJ2-3)
CASSRLARTDTQYF

SEQ ID NO: 768399 - protein, 12 aa, Homo sapiens
  CDR3 for alpha chain variable domain of TCR clone 384200 (TRAV16, TRAJ27)
CALNTNAGKSTF

SEQ ID NO: 768400 - protein, 15 aa, Homo sapiens
  CDR3 for beta chain variable domain of TCR clone 384200 (TRBV9, TRBJ1-6)
CASSVAGTGDSPLHF

SEQ ID NO: 768401 - protein, 13 aa, Homo sapiens
  CDR3 for alpha chain variable domain of TCR clone 384201 (TRAV12-1, TRAJ21)
CVVTLYNFNKFYF

SEQ ID NO: 768402 - protein, 14 aa, Homo sapiens
  CDR3 for beta chain variable domain of TCR clone 384201 (TRBV4-2, TRBJ2-1)
CASGLDRAYNEQFF

SEQ ID NO: 768403 - protein, 19 aa, Homo sapiens
  CDR3 for alpha chain variable domain of TCR clone 384202 (TRAV26-1, TRAJ50)
CCVLLHRQNPKTSYDKVIF

SEQ ID NO: 768404 - protein, 17 aa, Homo sapiens
  CDR3 for beta chain variable domain of TCR clone 384202 (TRBV4-1, TRBJ1-4)
CASSHEGPRGVAEKLFF

SEQ ID NO: 768405 - protein, 11 aa, Homo sapiens
  CDR3 for alpha chain variable domain of TCR clone 384203 (TRAV12-3, TRAJ20)
CAMSYDYKLSF

SEQ ID NO: 768406 - protein, 14 aa, Homo sapiens
  CDR3 for beta chain variable domain of TCR clone 384203 (TRBV6-1, TRBJ1-3)
CASVQGGGGNTMYF

SEQ ID NO: 768407 - protein, 14 aa, Homo sapiens
  CDR3 for alpha chain variable domain of TCR clone 384204 (TRAV2, TRAJ9)
CAVEERSGGFKTIF

SEQ ID NO: 768408 - protein, 14 aa, Homo sapiens
  CDR3 for beta chain variable domain of TCR clone 384204 (TRBV25-1, TRBJ1-1)
CASTHLGGNTEAFF

SEQ ID NO: 768409 - protein, 15 aa, Homo sapiens
  CDR3 for alpha chain variable domain of TCR clone 384205 (TRAV12-2, TRAJ43)
CAFDMRFGAGTRLTV

SEQ ID NO: 768410 - protein, 17 aa, Homo sapiens
  CDR3 for beta chain variable domain of TCR clone 384205 (TRBV7-3, TRBJ2-3)
CASSLMKRMRGADTQYF

SEQ ID NO: 768411 - protein, 14 aa, Homo sapiens
  CDR3 for alpha chain variable domain of TCR clone 384206 (TRAV6, TRAJ6)
CALPTSGGSYIPTF

SEQ ID NO: 768412 - protein, 17 aa, Homo sapiens
  CDR3 for beta chain variable domain of TCR clone 384206 (TRBV5-1, TRBJ2-5)
CASSPVALGQNQETPYF

SEQ ID NO: 768413 - protein, 12 aa, Homo sapiens
  CDR3 for alpha chain variable domain of TCR clone 384207 (TRAV1-1, TRAJ24)
CAVRGSWGKFPF

SEQ ID NO: 768414 - protein, 14 aa, Homo sapiens
  CDR3 for beta chain variable domain of TCR clone 384207 (TRBV20-1, TRBJ2-3)
CSARGGTSTDTQYF

SEQ ID NO: 768415 - protein, 13 aa, Homo sapiens
  CDR3 for alpha chain variable domain of TCR clone 384208 (TRAV22, TRAJ48)
CAVERFGNEKLTF

SEQ ID NO: 768416 - protein, 13 aa, Homo sapiens
  CDR3 for beta chain variable domain of TCR clone 384208 (TRBV20-1, TRBJ2-5)
CSDRGDYQETQYF

SEQ ID NO: 768417 - protein, 12 aa, Homo sapiens
  CDR3 for alpha chain variable domain of TCR clone 384209 (TRAV1-2, TRAJ20)
CAVISNDYKLSF

SEQ ID NO: 768418 - protein, 16 aa, Homo sapiens
  CDR3 for beta chain variable domain of TCR clone 384209 (TRBV5-5, TRBJ2-3)
CASSLEDRGVADTQYF

SEQ ID NO: 768419 - protein, 14 aa, Homo sapiens
  CDR3 for alpha chain variable domain of TCR clone 384210 (TRAV27, TRAJ15)
CAGFDNQAGTALIF

SEQ ID NO: 768420 - protein, 14 aa, Homo sapiens
  CDR3 for beta chain variable domain of TCR clone 384210 (TRBV25-1, TRBJ1-1)
CASTHLGGNTEAFF

SEQ ID NO: 768421 - protein, 13 aa, Homo sapiens
  CDR3 for alpha chain variable domain of TCR clone 384211 (TRAV13-1, TRAJ5)
CAARVTGRRALTF

SEQ ID NO: 768422 - protein, 18 aa, Homo sapiens
  CDR3 for beta chain variable domain of TCR clone 384211 (TRBV7-9, TRBJ2-7)
CASSLTTSGSRTWYEQYF

SEQ ID NO: 768423 - protein, 14 aa, Homo sapiens
  CDR3 for alpha chain variable domain of TCR clone 384212 (TRAV29/DV5, TRAJ36)
CAARRKTGANNLFF

SEQ ID NO: 768424 - protein, 19 aa, Homo sapiens
  CDR3 for beta chain variable domain of TCR clone 384212 (TRBV28, TRBJ2-4)
CASSFQPGGPAHSKNIQYF

SEQ ID NO: 768425 - protein, 13 aa, Homo sapiens
  CDR3 for alpha chain variable domain of TCR clone 384213 (TRAV17, TRAJ9)
CATAITGGFKTIF

SEQ ID NO: 768426 - protein, 16 aa, Homo sapiens
  CDR3 for beta chain variable domain of TCR clone 384213 (TRBV15, TRBJ2-1)
CATSRNLAGGYNEEFF

SEQ ID NO: 768427 - protein, 11 aa, Homo sapiens
  CDR3 for alpha chain variable domain of TCR clone 384214 (TRAV2, TRAJ13)
CASGGYQKVTF

SEQ ID NO: 768428 - protein, 13 aa, Homo sapiens
  CDR3 for beta chain variable domain of TCR clone 384214 (TRBV12-4, TRBJ2-1)
CASSLQIVNEQFF

SEQ ID NO: 768429 - protein, 16 aa, Homo sapiens
  CDR3 for alpha chain variable domain of TCR clone 384215 (TRAV23/DV6, TRAJ9)
CAASIGGNTGGFKTIF

SEQ ID NO: 768430 - protein, 20 aa, Homo sapiens
  CDR3 for beta chain variable domain of TCR clone 384215 (TRBV7-8, TRBJ2-2)
CASSHLFPGPTIHITGELFF

SEQ ID NO: 768431 - protein, 12 aa, Homo sapiens
  CDR3 for alpha chain variable domain of TCR clone 384216 (TRAV12-1, TRAJ40)
CVVSSGTYKYIF

SEQ ID NO: 768432 - protein, 14 aa, Homo sapiens
  CDR3 for beta chain variable domain of TCR clone 384216 (TRBV2, TRBJ1-2)
CASRRTGSPYGYTF

SEQ ID NO: 768433 - protein, 12 aa, Homo sapiens
  CDR3 for alpha chain variable domain of TCR clone 384217 (TRAV13-1, TRAJ49)
CAASIWGNQFYF

SEQ ID NO: 768434 - protein, 14 aa, Homo sapiens
  CDR3 for beta chain variable domain of TCR clone 384217 (TRBV7-8, TRBJ1-2)
CASSPDSLSYGYTF

SEQ ID NO: 768435 - protein, 13 aa, Homo sapiens
  CDR3 for alpha chain variable domain of TCR clone 384218 (TRAV8-6, TRAJ40)
CAVSVTGTYKYIF

SEQ ID NO: 768436 - protein, 15 aa, Homo sapiens
  CDR3 for beta chain variable domain of TCR clone 384218 (TRBV4-1, TRBJ2-3)
CASGRGQGIPDKQYF

SEQ ID NO: 768437 - protein, 16 aa, Homo sapiens
  CDR3 for alpha chain variable domain of TCR clone 384219 (TRAV20, TRAJ28)
CAVRDPSGAGSYQLTS

SEQ ID NO: 768438 - protein, 16 aa, Homo sapiens
  CDR3 for beta chain variable domain of TCR clone 384219 (TRBV6-1, TRBJ2-5)
CASSETLDRGAETQYF

SEQ ID NO: 768439 - protein, 18 aa, Homo sapiens
  CDR3 for alpha chain variable domain of TCR clone 384220 (TRAV12-3, TRAJ52)
CAMSVGGAGGTSYGKLTF

SEQ ID NO: 768440 - protein, 15 aa, Homo sapiens
  CDR3 for beta chain variable domain of TCR clone 384220 (TRBV27, TRBJ1-6)
CASSFDRGLGSHLHL

SEQ ID NO: 768441 - protein, 11 aa, Homo sapiens
  CDR3 for alpha chain variable domain of TCR clone 384221 (TRAV3, TRAJ21)
CAVGNFIKFYF

SEQ ID NO: 768442 - protein, 14 aa, Homo sapiens
  CDR3 for beta chain variable domain of TCR clone 384221 (TRBV7-2, TRBJ1-2)
CASSQTGSTYGYTF

SEQ ID NO: 768443 - protein, 15 aa, Homo sapiens
  CDR3 for alpha chain variable domain of TCR clone 384222 (TRAV12-3, TRAJ6)
CAMSPASGGSYIPTF

SEQ ID NO: 768444 - protein, 13 aa, Homo sapiens
  CDR3 for beta chain variable domain of TCR clone 384222 (TRBV7-9, TRBJ2-5)
CASLSPGQETQYF

SEQ ID NO: 768445 - protein, 12 aa, Homo sapiens
  CDR3 for alpha chain variable domain of TCR clone 384223 (TRAV27, TRAJ37)
CADSGNTGKLIF

SEQ ID NO: 768446 - protein, 13 aa, Homo sapiens
  CDR3 for beta chain variable domain of TCR clone 384223 (TRBV27, TRBJ1-1)
CASSLSIGAEAFF

SEQ ID NO: 768447 - protein, 16 aa, Homo sapiens
  CDR3 for alpha chain variable domain of TCR clone 384224 (TRAV20, TRAJ22)
CAVQASSSGSARQLTF

SEQ ID NO: 768448 - protein, 12 aa, Homo sapiens
  CDR3 for beta chain variable domain of TCR clone 384224 (TRBV7-2, TRBJ2-5)
CQQQTSVETQYF

SEQ ID NO: 768449 - protein, 13 aa, Homo sapiens
  CDR3 for alpha chain variable domain of TCR clone 384225 (TRAV3, TRAJ27)
CAVRPLGAGKSPF

SEQ ID NO: 768450 - protein, 15 aa, Homo sapiens
  CDR3 for beta chain variable domain of TCR clone 384225 (TRBV19, TRBJ1-1)
CASTSGQIQNTEAFF

SEQ ID NO: 768451 - protein, 14 aa, Homo sapiens
  CDR3 for alpha chain variable domain of TCR clone 384226 (TRAV12-2, TRAJ13)
CAVKKTGGYQKVTF

SEQ ID NO: 768452 - protein, 12 aa, Homo sapiens
  CDR3 for beta chain variable domain of TCR clone 384226 (TRBV6-3, TRBJ2-7)
CASSLTPYEQYL

SEQ ID NO: 768453 - protein, 14 aa, Homo sapiens
  CDR3 for alpha chain variable domain of TCR clone 384227 (TRAV13-2, TRAJ57)
CAENFQGGSEKLVF

SEQ ID NO: 768454 - protein, 13 aa, Homo sapiens
  CDR3 for beta chain variable domain of TCR clone 384227 (TRBV4-2, TRBJ1-1)
CASSQAGNTEAFF

SEQ ID NO: 768455 - protein, 15 aa, Homo sapiens
  CDR3 for alpha chain variable domain of TCR clone 384228 (TRAV27, TRAJ38)
CAARRNAGNNRKLIW

SEQ ID NO: 768456 - protein, 15 aa, Homo sapiens
  CDR3 for beta chain variable domain of TCR clone 384228 (TRBV2, TRBJ2-1)
CASSELAGCYNEQFF

SEQ ID NO: 768457 - protein, 13 aa, Homo sapiens
  CDR3 for alpha chain variable domain of TCR clone 384229 (TRAV12-2, TRAJ42)
CAVKRGSQGNLIF

SEQ ID NO: 768458 - protein, 16 aa, Homo sapiens
  CDR3 for beta chain variable domain of TCR clone 384229 (TRBV9, TRBJ2-2)
CASSARGKGNTGELFF

SEQ ID NO: 768459 - protein, 15 aa, Homo sapiens
  CDR3 for alpha chain variable domain of TCR clone 384230 (TRAV8-3, TRAJ41)
CAVGSNSNSGYALNF

SEQ ID NO: 768460 - protein, 14 aa, Homo sapiens
  CDR3 for beta chain variable domain of TCR clone 384230 (TRBV12-4, TRBJ2-3)
CASSLSGATDTQYF

SEQ ID NO: 768461 - protein, 16 aa, Homo sapiens
  CDR3 for alpha chain variable domain of TCR clone 384231 (TRAV30, TRAJ24)
CGTEIVDADSWGKFQF

SEQ ID NO: 768462 - protein, 14 aa, Homo sapiens
  CDR3 for beta chain variable domain of TCR clone 384231 (TRBV7-6, TRBJ2-3)
CASNSGGDANTQYF

SEQ ID NO: 768463 - protein, 13 aa, Homo sapiens
  CDR3 for alpha chain variable domain of TCR clone 384232 (TRAV35, TRAJ44)
CSGLSGTASKLTF

SEQ ID NO: 768464 - protein, 17 aa, Homo sapiens
  CDR3 for beta chain variable domain of TCR clone 384232 (TRBV7-8, TRBJ1-2)
CASSLRPLQGHLYGYTF

SEQ ID NO: 768465 - protein, 14 aa, Homo sapiens
  CDR3 for alpha chain variable domain of TCR clone 384233 (TRAV20, TRAJ26)
CAVQAAIYGQNFVF

SEQ ID NO: 768466 - protein, 14 aa, Homo sapiens
  CDR3 for beta chain variable domain of TCR clone 384233 (TRBV27, TRBJ2-2)
CASSLGDTTGELFV

SEQ ID NO: 768467 - protein, 14 aa, Homo sapiens
  CDR3 for alpha chain variable domain of TCR clone 384234 (TRAV12-2, TRAJ13)
CAVKQTGGYQKVTF

SEQ ID NO: 768468 - protein, 14 aa, Homo sapiens
  CDR3 for beta chain variable domain of TCR clone 384234 (TRBV6-1, TRBJ1-3)
CASVQGGGGNTIYF

SEQ ID NO: 768469 - protein, 14 aa, Homo sapiens
  CDR3 for alpha chain variable domain of TCR clone 384235 (TRAV12-2, TRAJ40)
CAVKIPSGHYKYIF

SEQ ID NO: 768470 - protein, 14 aa, Homo sapiens
  CDR3 for beta chain variable domain of TCR clone 384235 (TRBV20-1, TRBJ1-1)
CSAQTRIGGTEAFF

SEQ ID NO: 768471 - protein, 12 aa, Homo sapiens
  CDR3 for alpha chain variable domain of TCR clone 384236 (TRAV12-2, TRAJ10)
WGVTGGGNKLTF

SEQ ID NO: 768472 - protein, 16 aa, Homo sapiens
  CDR3 for beta chain variable domain of TCR clone 384236 (TRBV6-4, TRBJ1-2)
CASSEAVGDPNYSYTF

SEQ ID NO: 768473 - protein, 15 aa, Homo sapiens
  CDR3 for alpha chain variable domain of TCR clone 384237 (TRAV8-3, TRAJ21)
CAVGALPPRGYKFYF

SEQ ID NO: 768474 - protein, 20 aa, Homo sapiens
  CDR3 for beta chain variable domain of TCR clone 384237 (TRBV28, TRBJ2-1)
CASTPIGRSPGLAGGNEQFF

SEQ ID NO: 768475 - protein, 12 aa, Homo sapiens
  CDR3 for alpha chain variable domain of TCR clone 384238 (TRAV13-1, TRAJ11)
CAGPSGYSTLTF

SEQ ID NO: 768476 - protein, 13 aa, Homo sapiens
  CDR3 for beta chain variable domain of TCR clone 384238 (TRBV12-4, TRBJ2-1)
CASSLSPSKEQFF

SEQ ID NO: 768477 - protein, 14 aa, Homo sapiens
  CDR3 for alpha chain variable domain of TCR clone 384239 (TRAV12-2, TRAJ45)
CAVYSGGGADGLTF

SEQ ID NO: 768478 - protein, 14 aa, Homo sapiens
  CDR3 for beta chain variable domain of TCR clone 384239 (TRBV6-5, TRBJ1-2)
CASTRGGGSDGYYF

SEQ ID NO: 768479 - protein, 13 aa, Homo sapiens
  CDR3 for alpha chain variable domain of TCR clone 384240 (TRAV3, TRAJ41)
CAVSSNSGYALNF

SEQ ID NO: 768480 - protein, 12 aa, Homo sapiens
  CDR3 for beta chain variable domain of TCR clone 384240 (TRBV2, TRBJ2-1)
CASRPGRREQFF

SEQ ID NO: 768481 - protein, 15 aa, Homo sapiens
  CDR3 for alpha chain variable domain of TCR clone 384241 (TRAV27, TRAJ38)
CAARRNALNNRKLIW

SEQ ID NO: 768482 - protein, 13 aa, Homo sapiens
  CDR3 for beta chain variable domain of TCR clone 384241 (TRBV12-5, TRBJ2-3)
CASGGRQSDTQYF

SEQ ID NO: 768483 - protein, 11 aa, Homo sapiens
  CDR3 for alpha chain variable domain of TCR clone 384242 (TRAV3, TRAJ17)
PRGAAGNELTF

SEQ ID NO: 768484 - protein, 16 aa, Homo sapiens
  CDR3 for beta chain variable domain of TCR clone 384242 (TRBV7-6, TRBJ2-1)
CASSAPGPSSYNEQFF

SEQ ID NO: 768485 - protein, 14 aa, Homo sapiens
  CDR3 for alpha chain variable domain of TCR clone 384243 (TRAV12-2, TRAJ36)
CAVKISTGANNLFF

SEQ ID NO: 768486 - protein, 11 aa, Homo sapiens
  CDR3 for beta chain variable domain of TCR clone 384243 (TRBV25-1, TRBJ1-2)
CASSDTKGWSA

SEQ ID NO: 768487 - protein, 14 aa, Homo sapiens
  CDR3 for alpha chain variable domain of TCR clone 384244 (TRAV12-3, TRAJ10)
SHLPLTGGGNKLTF

SEQ ID NO: 768488 - protein, 14 aa, Homo sapiens
  CDR3 for beta chain variable domain of TCR clone 384244 (TRBV19, TRBJ2-1)
CVSGKSTQYNEQFF

SEQ ID NO: 768489 - protein, 14 aa, Homo sapiens
  CDR3 for alpha chain variable domain of TCR clone 384245 (TRAV12-1, TRAJ30)
CVVNIGGRDDKIIF

SEQ ID NO: 768490 - protein, 14 aa, Homo sapiens
  CDR3 for beta chain variable domain of TCR clone 384245 (TRBV20-1, TRBJ2-7)
CSAPELAGVGEQYF

SEQ ID NO: 768491 - protein, 23 aa, Homo sapiens
  CDR3 for alpha chain variable domain of TCR clone 384246 (TRAV12-2, TRAJ36)
SLLIRDSQPSDSATLERANNLFF

SEQ ID NO: 768492 - protein, 16 aa, Homo sapiens
  CDR3 for beta chain variable domain of TCR clone 384246 (TRBV11-2, TRBJ2-7)
CASSLGAGPTSSTSGR

SEQ ID NO: 768493 - protein, 13 aa, Homo sapiens
  CDR3 for alpha chain variable domain of TCR clone 384247 (TRAV12-1, TRAJ26)
CVVRRNYGQYFVF

SEQ ID NO: 768494 - protein, 15 aa, Homo sapiens
  CDR3 for beta chain variable domain of TCR clone 384247 (TRBV28, TRBJ2-1)
CASSIIAGGRSEQFL

SEQ ID NO: 768495 - protein, 16 aa, Homo sapiens
  CDR3 for alpha chain variable domain of TCR clone 384248 (TRAV30, TRAJ24)
CGTEIVDADSWGKFQF

SEQ ID NO: 768496 - protein, 16 aa, Homo sapiens
  CDR3 for beta chain variable domain of TCR clone 384248 (TRBV9, TRBJ1-2)
CASSVEEKVPPYGYTF

SEQ ID NO: 768497 - protein, 13 aa, Homo sapiens
  CDR3 for alpha chain variable domain of TCR clone 384249 (TRAV3, TRAJ15)
CAVRDQAGTALIF

SEQ ID NO: 768498 - protein, 14 aa, Homo sapiens
  CDR3 for beta chain variable domain of TCR clone 384249 (TRBV2, TRBJ2-5)
CASSEGSYQETQYF

SEQ ID NO: 768499 - protein, 16 aa, Homo sapiens
  CDR3 for alpha chain variable domain of TCR clone 384250 (TRAV1-2, TRAJ10)
WAVRGVLTGGGNKLTF

SEQ ID NO: 768500 - protein, 13 aa, Homo sapiens
  CDR3 for beta chain variable domain of TCR clone 384250 (TRBV20-1, TRBJ1-1)
CSAGTVGNTEAFF

SEQ ID NO: 768501 - protein, 11 aa, Homo sapiens
  CDR3 for alpha chain variable domain of TCR clone 384251 (TRAV6, TRAJ39)
CAPDAGNMLNF

SEQ ID NO: 768502 - protein, 14 aa, Homo sapiens
  CDR3 for beta chain variable domain of TCR clone 384251 (TRBV28, TRBJ1-5)
CASSRTGLNQPQHF

SEQ ID NO: 768503 - protein, 15 aa, Homo sapiens
  CDR3 for alpha chain variable domain of TCR clone 384252 (TRAV8-3, TRAJ38)
CAVVLRMLATTVSGF

SEQ ID NO: 768504 - protein, 15 aa, Homo sapiens
  CDR3 for beta chain variable domain of TCR clone 384252 (TRBV11-3, TRBJ1-3)
CASSLFGPSGNTIYF

SEQ ID NO: 768505 - protein, 17 aa, Homo sapiens
  CDR3 for alpha chain variable domain of TCR clone 384253 (TRAV3, TRAJ42)
CAVRDRDYGGSQGNLIF

SEQ ID NO: 768506 - protein, 12 aa, Homo sapiens
  CDR3 for beta chain variable domain of TCR clone 384253 (TRBV11-2, TRBJ2-1)
CASSPVNNEQFF

SEQ ID NO: 768507 - protein, 16 aa, Homo sapiens
  CDR3 for alpha chain variable domain of TCR clone 384254 (TRAV16, TRAJ52)
CALSAAGGTSYGKLTF

SEQ ID NO: 768508 - protein, 16 aa, Homo sapiens
  CDR3 for beta chain variable domain of TCR clone 384254 (TRBV2, TRBJ2-1)
CASRSPAGGKYNEQFF

SEQ ID NO: 768509 - protein, 14 aa, Homo sapiens
  CDR3 for alpha chain variable domain of TCR clone 384255 (TRAV35, TRAJ22)
CAGLRPGSARQLTF

SEQ ID NO: 768510 - protein, 14 aa, Homo sapiens
  CDR3 for beta chain variable domain of TCR clone 384255 (TRBV20-1, TRBJ2-3)
CSARGGTSTDTQYF

SEQ ID NO: 768511 - protein, 15 aa, Homo sapiens
  CDR3 for alpha chain variable domain of TCR clone 384256 (TRAV8-4, TRAJ12)
CAVSDRVDSSYKLIV

SEQ ID NO: 768512 - protein, 15 aa, Homo sapiens
  CDR3 for beta chain variable domain of TCR clone 384256 (TRBV11-3, TRBJ2-1)
CASSLAGQTYNEQFF

SEQ ID NO: 768513 - protein, 15 aa, Homo sapiens
  CDR3 for alpha chain variable domain of TCR clone 384257 (TRAV17, TRAJ56)
CATEPFTGANSKLTF

SEQ ID NO: 768514 - protein, 12 aa, Homo sapiens
  CDR3 for beta chain variable domain of TCR clone 384257 (TRBV7-9, TRBJ1-5)
CASSPQGQPQHF

SEQ ID NO: 768515 - protein, 15 aa, Homo sapiens
  CDR3 for alpha chain variable domain of TCR clone 384258 (TRAV3, TRAJ3)
CAVRDRDSSASKIIF

SEQ ID NO: 768516 - protein, 12 aa, Homo sapiens
  CDR3 for beta chain variable domain of TCR clone 384258 (TRBV29-1, TRBJ2-3)
CSVTGGPDTQYF

SEQ ID NO: 768517 - protein, 15 aa, Homo sapiens
  CDR3 for alpha chain variable domain of TCR clone 384259 (TRAV23/DV6, TRAJ18)
CAARYRGSTLGRLYF

SEQ ID NO: 768518 - protein, 16 aa, Homo sapiens
  CDR3 for beta chain variable domain of TCR clone 384259 (TRBV29-1, TRBJ1-2)
CSVEANRDIANYGYTF

SEQ ID NO: 768519 - protein, 13 aa, Homo sapiens
  CDR3 for alpha chain variable domain of TCR clone 384260 (TRAV2, TRAJ24)
CAVTTDSWGKLQF

SEQ ID NO: 768520 - protein, 11 aa, Homo sapiens
  CDR3 for beta chain variable domain of TCR clone 384260 (TRBV7-2, TRBJ2-7)
CASSSGLWQYF

SEQ ID NO: 768521 - protein, 15 aa, Homo sapiens
  CDR3 for alpha chain variable domain of TCR clone 384261 (TRAV12-1, TRAJ41)
CVVNSRTGSGYVLNF

SEQ ID NO: 768522 - protein, 11 aa, Homo sapiens
  CDR3 for beta chain variable domain of TCR clone 384261 (TRBV6-4, TRBJ2-1)
CASSGSYAQFF

SEQ ID NO: 768523 - protein, 16 aa, Homo sapiens
  CDR3 for alpha chain variable domain of TCR clone 384262 (TRAV16, TRAJ52)
CALSAAGGNSYGKLTF

SEQ ID NO: 768524 - protein, 16 aa, Homo sapiens
  CDR3 for beta chain variable domain of TCR clone 384262 (TRBV12-4, TRBJ1-5)
CASSRPVGGSNQPQHF

SEQ ID NO: 768525 - protein, 14 aa, Homo sapiens
  CDR3 for alpha chain variable domain of TCR clone 384263 (TRAV8-2, TRAJ37)
CVVSISGNTGKLIF

SEQ ID NO: 768526 - protein, 13 aa, Homo sapiens
  CDR3 for beta chain variable domain of TCR clone 384263 (TRBV6-6, TRBJ2-3)
CASSQGGRDTQYF

SEQ ID NO: 768527 - protein, 13 aa, Homo sapiens
  CDR3 for alpha chain variable domain of TCR clone 384264 (TRAV27, TRAJ6)
CAGGTRGSYIPTF

SEQ ID NO: 768528 - protein, 15 aa, Homo sapiens
  CDR3 for beta chain variable domain of TCR clone 384264 (TRBV12-4, TRBJ2-5)
CASSTPTGLQETQYF

SEQ ID NO: 768529 - protein, 14 aa, Homo sapiens
  CDR3 for alpha chain variable domain of TCR clone 384265 (TRAV26-1, TRAJ26)
CLVRAAFLGQNFVF

SEQ ID NO: 768530 - protein, 16 aa, Homo sapiens
  CDR3 for beta chain variable domain of TCR clone 384265 (TRBV12-4, TRBJ2-7)
CASRSTGTGPSYEQYF

SEQ ID NO: 768531 - protein, 12 aa, Homo sapiens
  CDR3 for alpha chain variable domain of TCR clone 384266 (TRAV1-2, TRAJ26)
CAVRYYGQNFVF

SEQ ID NO: 768532 - protein, 14 aa, Homo sapiens
  CDR3 for beta chain variable domain of TCR clone 384266 (TRBV25-1, TRBJ1-1)
CASTHLGGNTEAFF

SEQ ID NO: 768533 - protein, 15 aa, Homo sapiens
  CDR3 for alpha chain variable domain of TCR clone 384267 (TRAV2, TRAJ13)
CAVEPEFWGLPESYL

SEQ ID NO: 768534 - protein, 14 aa, Homo sapiens
  CDR3 for beta chain variable domain of TCR clone 384267 (TRBV28, TRBJ1-5)
CASSGQALYQHQHF

SEQ ID NO: 768535 - protein, 17 aa, Homo sapiens
  CDR3 for alpha chain variable domain of TCR clone 384268 (TRAV39, TRAJ32)
CAVDIKWVGGATNKLIV

SEQ ID NO: 768536 - protein, 11 aa, Homo sapiens
  CDR3 for beta chain variable domain of TCR clone 384268 (TRBV18, TRBJ1-2)
CASSPLNGYTF

SEQ ID NO: 768537 - protein, 14 aa, Homo sapiens
  CDR3 for alpha chain variable domain of TCR clone 384269 (TRAV1-2, TRAJ8)
CAVREDTGFQKLVF

SEQ ID NO: 768538 - protein, 12 aa, Homo sapiens
  CDR3 for beta chain variable domain of TCR clone 384269 (TRBV2, TRBJ2-1)
CASSYYLNEQFF

SEQ ID NO: 768539 - protein, 16 aa, Homo sapiens
  CDR3 for alpha chain variable domain of TCR clone 384270 (TRAV27, TRAJ52)
CAGAPAGGTSYGKLTF

SEQ ID NO: 768540 - protein, 12 aa, Homo sapiens
  CDR3 for beta chain variable domain of TCR clone 384270 (TRBV27, TRBJ2-1)
CASRGFYNEKFF

SEQ ID NO: 768541 - protein, 13 aa, Homo sapiens
  CDR3 for alpha chain variable domain of TCR clone 384271 (TRAV38-1, TRAJ42)
CARWGGSQGNLIF

SEQ ID NO: 768542 - protein, 17 aa, Homo sapiens
  CDR3 for beta chain variable domain of TCR clone 384271 (TRBV13, TRBJ2-3)
CASSLSRVAGGGNTQYF

SEQ ID NO: 768543 - protein, 13 aa, Homo sapiens
  CDR3 for alpha chain variable domain of TCR clone 384272 (TRAV12-2, TRAJ24)
CAVSTDSWGKLQF

SEQ ID NO: 768544 - protein, 15 aa, Homo sapiens
  CDR3 for beta chain variable domain of TCR clone 384272 (TRBV5-7, TRBJ2-7)
CASSLGPGRGHEQYF

SEQ ID NO: 768545 - protein, 18 aa, Homo sapiens
  CDR3 for alpha chain variable domain of TCR clone 384273 (TRAV26-1, TRAJ5)
CIVRVVPPRDTGRRALTF

SEQ ID NO: 768546 - protein, 13 aa, Homo sapiens
  CDR3 for beta chain variable domain of TCR clone 384273 (TRBV4-1, TRBJ2-5)
CASSLTRGETQYF

SEQ ID NO: 768547 - protein, 14 aa, Homo sapiens
  CDR3 for alpha chain variable domain of TCR clone 384274 (TRAV12-2, TRAJ44)
CAVNPAGTASKLTF

SEQ ID NO: 768548 - protein, 15 aa, Homo sapiens
  CDR3 for beta chain variable domain of TCR clone 384274 (TRBV5-1, TRBJ2-3)
CASSVTSGSTDTQYF

SEQ ID NO: 768549 - protein, 12 aa, Homo sapiens
  CDR3 for alpha chain variable domain of TCR clone 384275 (TRAV13-1, TRAJ21)
CAAKEGFKKFYF

SEQ ID NO: 768550 - protein, 14 aa, Homo sapiens
  CDR3 for beta chain variable domain of TCR clone 384275 (TRBV5-4, TRBJ1-1)
CASSLDSRRDEALF

SEQ ID NO: 768551 - protein, 15 aa, Homo sapiens
  CDR3 for alpha chain variable domain of TCR clone 384276 (TRAV8-3, TRAJ40)
CAAPSLGSGTYKYIF

SEQ ID NO: 768552 - protein, 15 aa, Homo sapiens
  CDR3 for beta chain variable domain of TCR clone 384276 (TRBV7-3, TRBJ2-1)
CASTHGTGIYNEQFF

SEQ ID NO: 768553 - protein, 12 aa, Homo sapiens
  CDR3 for alpha chain variable domain of TCR clone 384277 (TRAV21, TRAJ3)
CCFYSSASKIIF

SEQ ID NO: 768554 - protein, 11 aa, Homo sapiens
  CDR3 for beta chain variable domain of TCR clone 384277 (TRBV19, TRBJ1-1)
CASSIGSEAFF

SEQ ID NO: 768555 - protein, 14 aa, Homo sapiens
  CDR3 for alpha chain variable domain of TCR clone 384278 (TRAV8-2, TRAJ4)
CVVSPSGGYNKLLF

SEQ ID NO: 768556 - protein, 14 aa, Homo sapiens
  CDR3 for beta chain variable domain of TCR clone 384278 (TRBV19, TRBJ2-5)
CASSSSGIQETQYF

SEQ ID NO: 768557 - protein, 23 aa, Homo sapiens
  CDR3 for alpha chain variable domain of TCR clone 384279 (TRAV27, )
CAGDRAGNNHIQNPDPAVYQLRD

SEQ ID NO: 768558 - protein, 17 aa, Homo sapiens
  CDR3 for beta chain variable domain of TCR clone 384279 (TRBV13, TRBJ2-3)
CASSLSRVAGGRNTQYF

SEQ ID NO: 768559 - protein, 13 aa, Homo sapiens
  CDR3 for alpha chain variable domain of TCR clone 384280 (TRAV2, TRAJ40)
CAVVTSGTYKYIF

SEQ ID NO: 768560 - protein, 14 aa, Homo sapiens
  CDR3 for beta chain variable domain of TCR clone 384280 (TRBV19, TRBJ2-7)
CASPTVVLSGEQFF

SEQ ID NO: 768561 - protein, 16 aa, Homo sapiens
  CDR3 for alpha chain variable domain of TCR clone 384281 (TRAV12-3, TRAJ53)
CAMSPGSGGSNYKLTF

SEQ ID NO: 768562 - protein, 11 aa, Homo sapiens
  CDR3 for beta chain variable domain of TCR clone 384281 (TRBV29-1, TRBJ2-5)
CSEDRAGTQCF

SEQ ID NO: 768563 - protein, 15 aa, Homo sapiens
  CDR3 for alpha chain variable domain of TCR clone 384282 (TRAV21, TRAJ53)
CDTLNSGGSNYKLTF

SEQ ID NO: 768564 - protein, 15 aa, Homo sapiens
  CDR3 for beta chain variable domain of TCR clone 384282 (TRBV9, TRBJ1-6)
CASSVAGTGDSPLHF

SEQ ID NO: 768565 - protein, 16 aa, Homo sapiens
  CDR3 for alpha chain variable domain of TCR clone 384283 (TRAV30, TRAJ24)
CGPEIVGADSWGKFQF

SEQ ID NO: 768566 - protein, 14 aa, Homo sapiens
  CDR3 for beta chain variable domain of TCR clone 384283 (TRBV12-5, TRBJ2-5)
CASGSRTHQETQYF

SEQ ID NO: 768567 - protein, 13 aa, Homo sapiens
  CDR3 for alpha chain variable domain of TCR clone 384284 (TRAV1-1, TRAJ9)
CAAKNTGGFKTLF

SEQ ID NO: 768568 - protein, 15 aa, Homo sapiens
  CDR3 for beta chain variable domain of TCR clone 384284 (TRBV7-3, TRBJ2-1)
CASSLGQGPFGEQFF

SEQ ID NO: 768569 - protein, 14 aa, Homo sapiens
  CDR3 for alpha chain variable domain of TCR clone 384285 (TRAV13-1, TRAJ15)
CAASTNQAGTALIL

SEQ ID NO: 768570 - protein, 11 aa, Homo sapiens
  CDR3 for beta chain variable domain of TCR clone 384285 (TRBV7-2, TRBJ2-1)
CASSLRDNEFF

SEQ ID NO: 768571 - protein, 13 aa, Homo sapiens
  CDR3 for alpha chain variable domain of TCR clone 384286 (TRAV3, TRAJ21)
CAVREPDLNKFYF

SEQ ID NO: 768572 - protein, 16 aa, Homo sapiens
  CDR3 for beta chain variable domain of TCR clone 384286 (TRBV27, TRBJ2-2)
CASSFRGLVRTGELFF

SEQ ID NO: 768573 - protein, 14 aa, Homo sapiens
  CDR3 for alpha chain variable domain of TCR clone 384287 (TRAV4, TRAJ22)
CLARLSGSARQLTF

SEQ ID NO: 768574 - protein, 15 aa, Homo sapiens
  CDR3 for beta chain variable domain of TCR clone 384287 (TRBV3-1, TRBJ2-7)
CASSQVRQGAYEQYF

SEQ ID NO: 768575 - protein, 15 aa, Homo sapiens
  CDR3 for alpha chain variable domain of TCR clone 384288 (TRAV12-2, TRAJ53)
CAVNGGGGSNYKLTF

SEQ ID NO: 768576 - protein, 14 aa, Homo sapiens
  CDR3 for beta chain variable domain of TCR clone 384288 (TRBV7-2, TRBJ2-1)
CASSLGVGYNEQFF

SEQ ID NO: 768577 - protein, 10 aa, Homo sapiens
  CDR3 for alpha chain variable domain of TCR clone 384289 (TRAV21, TRAJ43)
CAVRIGDMRF

SEQ ID NO: 768578 - protein, 14 aa, Homo sapiens
  CDR3 for beta chain variable domain of TCR clone 384289 (TRBV19, TRBJ2-1)
CASPTFVLSGEQFF

SEQ ID NO: 768579 - protein, 15 aa, Homo sapiens
  CDR3 for alpha chain variable domain of TCR clone 384290 (TRAV12-3, TRAJ13)
CAMSARSGGYQTVTF

SEQ ID NO: 768580 - protein, 18 aa, Homo sapiens
  CDR3 for beta chain variable domain of TCR clone 384290 (TRBV3-1, TRBJ2-7)
GASSQEGGGRSWHYEQYF

SEQ ID NO: 768581 - protein, 11 aa, Homo sapiens
  CDR3 for alpha chain variable domain of TCR clone 384291 (TRAV6, TRAJ31)
CALRDNARLMF

SEQ ID NO: 768582 - protein, 12 aa, Homo sapiens
  CDR3 for beta chain variable domain of TCR clone 384291 (TRBV11-2, TRBJ2-2)
CASILGGGELFF

SEQ ID NO: 768583 - protein, 17 aa, Homo sapiens
  CDR3 for alpha chain variable domain of TCR clone 384292 (TRAV38-1, TRAJ45)
CAFMRSHSGGGADGLTF

SEQ ID NO: 768584 - protein, 15 aa, Homo sapiens
  CDR3 for beta chain variable domain of TCR clone 384292 (TRBV7-2, TRBJ1-2)
CASSPRAGWNYGYTF

SEQ ID NO: 768585 - protein, 14 aa, Homo sapiens
  CDR3 for alpha chain variable domain of TCR clone 384293 (TRAV8-4, TRAJ54)
CAVSEVLGAKKLVF

SEQ ID NO: 768586 - protein, 15 aa, Homo sapiens
  CDR3 for beta chain variable domain of TCR clone 384293 (TRBV6-1, TRBJ2-6)
CASSSRPSGANVLTF

SEQ ID NO: 768587 - protein, 11 aa, Homo sapiens
  CDR3 for alpha chain variable domain of TCR clone 384294 (TRAV3, TRAJ21)
CAVVNFNKFYF

SEQ ID NO: 768588 - protein, 17 aa, Homo sapiens
  CDR3 for beta chain variable domain of TCR clone 384294 (TRBV13, TRBJ2-3)
CASSLSRVAGGRNTQYF

SEQ ID NO: 768589 - protein, 13 aa, Homo sapiens
  CDR3 for alpha chain variable domain of TCR clone 384295 (TRAV24, TRAJ5)
CACCGAGRRALTF

SEQ ID NO: 768590 - protein, 18 aa, Homo sapiens
  CDR3 for beta chain variable domain of TCR clone 384295 (TRBV4-3, TRBJ2-6)
CSSSQDIQGGPGANVLTF

SEQ ID NO: 768591 - protein, 14 aa, Homo sapiens
  CDR3 for alpha chain variable domain of TCR clone 384296 (TRAV3, TRAJ33)
CAVIDMDSNYQLIL

SEQ ID NO: 768592 - protein, 19 aa, Homo sapiens
  CDR3 for beta chain variable domain of TCR clone 384296 (TRBV7-3, TRBJ1-2)
CASSFPQGNDGELWLHLRF

SEQ ID NO: 768593 - protein, 14 aa, Homo sapiens
  CDR3 for alpha chain variable domain of TCR clone 384297 (TRAV6, TRAJ6)
CALPTSGGSYIPTF

SEQ ID NO: 768594 - protein, 17 aa, Homo sapiens
  CDR3 for beta chain variable domain of TCR clone 384297 (TRBV5-1, TRBJ2-5)
CASSPVALGQNQETKYF

SEQ ID NO: 768595 - protein, 12 aa, Homo sapiens
  CDR3 for alpha chain variable domain of TCR clone 384298 (TRAV20, TRAJ56)
CAVTGANSKLTF

SEQ ID NO: 768596 - protein, 11 aa, Homo sapiens
  CDR3 for beta chain variable domain of TCR clone 384298 (TRBV29-1, TRBJ2-5)
CSEERTGTQNF

SEQ ID NO: 768597 - protein, 14 aa, Homo sapiens
  CDR3 for alpha chain variable domain of TCR clone 384299 (TRAV3, TRAJ34)
CAVRAPGNTDRLIF

SEQ ID NO: 768598 - protein, 14 aa, Homo sapiens
  CDR3 for beta chain variable domain of TCR clone 384299 (TRBV11-2, TRBJ2-5)
CASSRTGGIETQYF

SEQ ID NO: 768599 - protein, 13 aa, Homo sapiens
  CDR3 for alpha chain variable domain of TCR clone 384300 (TRAV27, TRAJ39)
CAGEGNAGNMLTF

SEQ ID NO: 768600 - protein, 12 aa, Homo sapiens
  CDR3 for beta chain variable domain of TCR clone 384300 (TRBV11-2, TRBJ2-2)
CASSLPTGELFF

SEQ ID NO: 768601 - protein, 14 aa, Homo sapiens
  CDR3 for alpha chain variable domain of TCR clone 384301 (TRAV8-3, TRAJ36)
CALGPITGPNNLFF

SEQ ID NO: 768602 - protein, 15 aa, Homo sapiens
  CDR3 for beta chain variable domain of TCR clone 384301 (TRBV4-1, TRBJ2-1)
CASSQDPGNYNEQFF

SEQ ID NO: 768603 - protein, 15 aa, Homo sapiens
  CDR3 for alpha chain variable domain of TCR clone 384302 (TRAV4, TRAJ24)
CLVGPKNNAGNMLTF

SEQ ID NO: 768604 - protein, 13 aa, Homo sapiens
  CDR3 for beta chain variable domain of TCR clone 384302 (TRBV11-2, TRBJ2-5)
CASSSTGEETQYF

SEQ ID NO: 768605 - protein, 14 aa, Homo sapiens
  CDR3 for alpha chain variable domain of TCR clone 384303 (TRAV1-1, TRAJ23)
CAVSIVNQGGKLIF

SEQ ID NO: 768606 - protein, 15 aa, Homo sapiens
  CDR3 for beta chain variable domain of TCR clone 384303 (TRBV5-8, TRBJ2-2)
CASSLDRGATGELFF

SEQ ID NO: 768607 - protein, 15 aa, Homo sapiens
  CDR3 for alpha chain variable domain of TCR clone 384304 (TRAV34, TRAJ38)
CGADFTPGNNRKRIW

SEQ ID NO: 768608 - protein, 16 aa, Homo sapiens
  CDR3 for beta chain variable domain of TCR clone 384304 (TRBV12-5, TRBJ2-5)
CASGPRTSGDKETQYF

SEQ ID NO: 768609 - protein, 14 aa, Homo sapiens
  CDR3 for alpha chain variable domain of TCR clone 384305 (TRAV13-2, TRAJ9)
CAENLETGGFKTIF

SEQ ID NO: 768610 - protein, 16 aa, Homo sapiens
  CDR3 for beta chain variable domain of TCR clone 384305 (TRBV28, TRBJ2-5)
CASSFSPAGGWETEYF

SEQ ID NO: 768611 - protein, 15 aa, Homo sapiens
  CDR3 for alpha chain variable domain of TCR clone 384306 (TRAV20, TRAJ41)
CAVQANSNSGYALNF

SEQ ID NO: 768612 - protein, 14 aa, Homo sapiens
  CDR3 for beta chain variable domain of TCR clone 384306 (TRBV25-1, TRBJ1-1)
CASAHLGGNTEAFF

SEQ ID NO: 768613 - protein, 16 aa, Homo sapiens
  CDR3 for alpha chain variable domain of TCR clone 384307 (TRAV17, TRAJ53)
CATDALSGGSNYKLTF

SEQ ID NO: 768614 - protein, 14 aa, Homo sapiens
  CDR3 for beta chain variable domain of TCR clone 384307 (TRBV7-8, TRBJ2-3)
CASSLEAGTDTQYF

SEQ ID NO: 768615 - protein, 10 aa, Homo sapiens
  CDR3 for alpha chain variable domain of TCR clone 384308 (TRAV13-1, TRAJ43)
CAASKNDMRF

SEQ ID NO: 768616 - protein, 12 aa, Homo sapiens
  CDR3 for beta chain variable domain of TCR clone 384308 (TRBV20-1, TRBJ1-5)
SARTGVNQPQHF

SEQ ID NO: 768617 - protein, 12 aa, Homo sapiens
  CDR3 for alpha chain variable domain of TCR clone 384309 (TRAV8-3, TRAJ41)
CAVALSGYARNS

SEQ ID NO: 768618 - protein, 16 aa, Homo sapiens
  CDR3 for beta chain variable domain of TCR clone 384309 (TRBV27, TRBJ2-7)
CASSSERRDSAYEQYF

SEQ ID NO: 768619 - protein, 13 aa, Homo sapiens
  CDR3 for alpha chain variable domain of TCR clone 384310 (TRAV12-1, TRAJ40)
CVVPTSVTYKYIF

SEQ ID NO: 768620 - protein, 16 aa, Homo sapiens
  CDR3 for beta chain variable domain of TCR clone 384310 (TRBV7-9, TRBJ1-2)
CASSLGFSSGEDGYTF

SEQ ID NO: 768621 - protein, 15 aa, Homo sapiens
  CDR3 for alpha chain variable domain of TCR clone 384311 (TRAV3, TRAJ22)
CAVRDRGGSARQLTF

SEQ ID NO: 768622 - protein, 14 aa, Homo sapiens
  CDR3 for beta chain variable domain of TCR clone 384311 (TRBV20-1, TRBJ2-5)
CSALVPGYQETEYF

SEQ ID NO: 768623 - protein, 17 aa, Homo sapiens
  CDR3 for alpha chain variable domain of TCR clone 384312 (TRAV12-3, TRAJ6)
CAMSARGGAGGSYIATF

SEQ ID NO: 768624 - protein, 12 aa, Homo sapiens
  CDR3 for beta chain variable domain of TCR clone 384312 (TRBV12-4, TRBJ2-3)
CASSTLPDTQYF

SEQ ID NO: 768625 - protein, 14 aa, Homo sapiens
  CDR3 for alpha chain variable domain of TCR clone 384313 (TRAV12-3, TRAJ10)
SHLPLTGGGNKLTF

SEQ ID NO: 768626 - protein, 16 aa, Homo sapiens
  CDR3 for beta chain variable domain of TCR clone 384313 (TRBV12-4, TRBJ2-7)
CASSPEGQGSSYEQYF

SEQ ID NO: 768627 - protein, 10 aa, Homo sapiens
  CDR3 for alpha chain variable domain of TCR clone 384314 (TRAV27, TRAJ57)
CAGGSEKLVF

SEQ ID NO: 768628 - protein, 11 aa, Homo sapiens
  CDR3 for beta chain variable domain of TCR clone 384314 (TRBV11-2, TRBJ1-1)
CASSINTEAFF

SEQ ID NO: 768629 - protein, 15 aa, Homo sapiens
  CDR3 for alpha chain variable domain of TCR clone 384315 (TRAV21, TRAJ40)
CAVRPQTSGTYKYIF

SEQ ID NO: 768630 - protein, 13 aa, Homo sapiens
  CDR3 for beta chain variable domain of TCR clone 384315 (TRBV15, TRBJ2-7)
CATSTTGHYEQYF

SEQ ID NO: 768631 - protein, 13 aa, Homo sapiens
  CDR3 for alpha chain variable domain of TCR clone 384316 (TRAV3, TRAJ27)
CAVRHLGAGKSTF

SEQ ID NO: 768632 - protein, 12 aa, Homo sapiens
  CDR3 for beta chain variable domain of TCR clone 384316 (TRBV7-9, TRBJ2-7)
CASSLEGYEQYF

SEQ ID NO: 768633 - protein, 13 aa, Homo sapiens
  CDR3 for alpha chain variable domain of TCR clone 384317 (TRAV2, TRAJ40)
CAVVTSGTYKYIF

SEQ ID NO: 768634 - protein, 15 aa, Homo sapiens
  CDR3 for beta chain variable domain of TCR clone 384317 (TRBV11-3, TRBJ2-3)
CASLKDGREGNTQYF

SEQ ID NO: 768635 - protein, 13 aa, Homo sapiens
  CDR3 for alpha chain variable domain of TCR clone 384318 (TRAV12-1, TRAJ9)
CVVLNTGGFKTIF

SEQ ID NO: 768636 - protein, 12 aa, Homo sapiens
  CDR3 for beta chain variable domain of TCR clone 384318 (TRBV29-1, TRBJ2-3)
CSVTGGADTQYF

SEQ ID NO: 768637 - protein, 15 aa, Homo sapiens
  CDR3 for alpha chain variable domain of TCR clone 384319 (TRAV13-2, TRAJ6)
CAENIGAGGSYIPTF

SEQ ID NO: 768638 - protein, 15 aa, Homo sapiens
  CDR3 for beta chain variable domain of TCR clone 384319 (TRBV7-2, TRBJ1-2)
CASSFTQGAKYGYSF

SEQ ID NO: 768639 - protein, 18 aa, Homo sapiens
  CDR3 for alpha chain variable domain of TCR clone 384320 (TRAV26-1, TRAJ23)
CIVRVGLEVWNQGGKLIF

SEQ ID NO: 768640 - protein, 15 aa, Homo sapiens
  CDR3 for beta chain variable domain of TCR clone 384320 (TRBV11-2, TRBJ2-2)
CASRGLAANTGELFF

SEQ ID NO: 768641 - protein, 11 aa, Homo sapiens
  CDR3 for alpha chain variable domain of TCR clone 384321 (TRAV21, TRAJ31)
CAVRNNARLMF

SEQ ID NO: 768642 - protein, 20 aa, Homo sapiens
  CDR3 for beta chain variable domain of TCR clone 384321 (TRBV28, TRBJ2-1)
CASTPIGRSPGLAGGNEQFF

SEQ ID NO: 768643 - protein, 12 aa, Homo sapiens
  CDR3 for alpha chain variable domain of TCR clone 384322 (TRAV13-1, TRAJ21)
CAAKEGCNKFYF

SEQ ID NO: 768644 - protein, 15 aa, Homo sapiens
  CDR3 for beta chain variable domain of TCR clone 384322 (TRBV6-1, TRBJ2-4)
CASSEAVWTINMQYF

SEQ ID NO: 768645 - protein, 19 aa, Homo sapiens
  CDR3 for alpha chain variable domain of TCR clone 384323 (TRAV26-1, TRAJ52)
CIVRAHRNSGGTSYGKLTF

SEQ ID NO: 768646 - protein, 13 aa, Homo sapiens
  CDR3 for beta chain variable domain of TCR clone 384323 (TRBV20-1, TRBJ1-6)
CSAPLGVGSPLHF

SEQ ID NO: 768647 - protein, 13 aa, Homo sapiens
  CDR3 for alpha chain variable domain of TCR clone 384324 (TRAV3, TRAJ16)
CAVRDRNGQKLLF

SEQ ID NO: 768648 - protein, 13 aa, Homo sapiens
  CDR3 for beta chain variable domain of TCR clone 384324 (TRBV7-9, TRBJ1-2)
CASSLKQNYGYTF

SEQ ID NO: 768649 - protein, 14 aa, Homo sapiens
  CDR3 for alpha chain variable domain of TCR clone 384325 (TRAV12-3, TRAJ10)
SHLPLTGGGNKLTF

SEQ ID NO: 768650 - protein, 13 aa, Homo sapiens
  CDR3 for beta chain variable domain of TCR clone 384325 (TRBV29-1, TRBJ2-7)
CSVKRGGNYEQYF

SEQ ID NO: 768651 - protein, 16 aa, Homo sapiens
  CDR3 for alpha chain variable domain of TCR clone 384326 (TRAV20, TRAJ10)
CAVLRGLTGGGNKLTF

SEQ ID NO: 768652 - protein, 15 aa, Homo sapiens
  CDR3 for beta chain variable domain of TCR clone 384326 (TRBV18, TRBJ2-1)
CASSPPSASYNEQFF

SEQ ID NO: 768653 - protein, 15 aa, Homo sapiens
  CDR3 for alpha chain variable domain of TCR clone 384327 (TRAV21, TRAJ40)
CAVRPQTSGTYKYIF

SEQ ID NO: 768654 - protein, 13 aa, Homo sapiens
  CDR3 for beta chain variable domain of TCR clone 384327 (TRBV7-2, TRBJ2-2)
CASSSVRAGELIF

SEQ ID NO: 768655 - protein, 14 aa, Homo sapiens
  CDR3 for alpha chain variable domain of TCR clone 384328 (TRAV8-1, TRAJ34)
CAVNPSYNTDKLIF

SEQ ID NO: 768656 - protein, 13 aa, Homo sapiens
  CDR3 for beta chain variable domain of TCR clone 384328 (TRBV7-3, TRBJ1-2)
CASSLKRGYGYTF

SEQ ID NO: 768657 - protein, 12 aa, Homo sapiens
  CDR3 for alpha chain variable domain of TCR clone 384329 (TRAV2, TRAJ36)
CAELTGASNLFF

SEQ ID NO: 768658 - protein, 14 aa, Homo sapiens
  CDR3 for beta chain variable domain of TCR clone 384329 (TRBV18, TRBJ2-7)
CASSPRGGAYEQYF

SEQ ID NO: 768659 - protein, 14 aa, Homo sapiens
  CDR3 for alpha chain variable domain of TCR clone 384330 (TRAV8-1, TRAJ30)
CAVNNMNRDDKIIF

SEQ ID NO: 768660 - protein, 12 aa, Homo sapiens
  CDR3 for beta chain variable domain of TCR clone 384330 (TRBV11-2, TRBJ2-2)
CASSLGGGELFF

SEQ ID NO: 768661 - protein, 14 aa, Homo sapiens
  CDR3 for alpha chain variable domain of TCR clone 384331 (TRAV26-1, TRAJ38)
CIADNAGNNRKLIW

SEQ ID NO: 768662 - protein, 15 aa, Homo sapiens
  CDR3 for beta chain variable domain of TCR clone 384331 (TRBV4-1, TRBJ1-1)
CTSSQEWGHYTEAFS

SEQ ID NO: 768663 - protein, 14 aa, Homo sapiens
  CDR3 for alpha chain variable domain of TCR clone 384332 (TRAV12-2, TRAJ13)
CAVKKTGGYQNVTF

SEQ ID NO: 768664 - protein, 15 aa, Homo sapiens
  CDR3 for beta chain variable domain of TCR clone 384332 (TRBV20-1, TRBJ2-7)
CSARDRVSGMDEQYF

SEQ ID NO: 768665 - protein, 14 aa, Homo sapiens
  CDR3 for alpha chain variable domain of TCR clone 384333 (TRAV12-2, TRAJ17)
CAVNIKAAGNKLTF

SEQ ID NO: 768666 - protein, 15 aa, Homo sapiens
  CDR3 for beta chain variable domain of TCR clone 384333 (TRBV7-2, TRBJ2-1)
RASTHGTGIYNEQFF

SEQ ID NO: 768667 - protein, 14 aa, Homo sapiens
  CDR3 for alpha chain variable domain of TCR clone 384334 (TRAV17, TRAJ42)
CATSPPGSQGNLIF

SEQ ID NO: 768668 - protein, 17 aa, Homo sapiens
  CDR3 for beta chain variable domain of TCR clone 384334 (TRBV25-1, TRBJ2-7)
CASSDARVVFSSYEQYF

SEQ ID NO: 768669 - protein, 12 aa, Homo sapiens
  CDR3 for alpha chain variable domain of TCR clone 384335 (TRAV29/DV5, TRAJ26)
CAAIPSGQNFVF

SEQ ID NO: 768670 - protein, 15 aa, Homo sapiens
  CDR3 for beta chain variable domain of TCR clone 384335 (TRBV19, TRBJ1-5)
YASSDSGPRNQPQHF

SEQ ID NO: 768671 - protein, 16 aa, Homo sapiens
  CDR3 for alpha chain variable domain of TCR clone 384336 (TRAV12-3, TRAJ58)
CAMTDTEETSGPRLTF

SEQ ID NO: 768672 - protein, 15 aa, Homo sapiens
  CDR3 for beta chain variable domain of TCR clone 384336 (TRBV11-3, TRBJ2-3)
CASLKDGREGDTQYF

SEQ ID NO: 768673 - protein, 14 aa, Homo sapiens
  CDR3 for alpha chain variable domain of TCR clone 384337 (TRAV12-1, TRAJ12)
CVVNGMDSSYKLIF

SEQ ID NO: 768674 - protein, 16 aa, Homo sapiens
  CDR3 for beta chain variable domain of TCR clone 384337 (TRBV12-5, TRBJ2-5)
CASGPRTSGNQETQYF

SEQ ID NO: 768675 - protein, 11 aa, Homo sapiens
  CDR3 for alpha chain variable domain of TCR clone 384338 (TRAV1-1, TRAJ3)
CAVRSASKIIF

SEQ ID NO: 768676 - protein, 15 aa, Homo sapiens
  CDR3 for beta chain variable domain of TCR clone 384338 (TRBV9, TRBJ1-6)
CASSVAGTGDSPLHF

SEQ ID NO: 768677 - protein, 17 aa, Homo sapiens
  CDR3 for alpha chain variable domain of TCR clone 384339 (TRAV3, TRAJ28)
CAVREAYSGAGSYQLTF

SEQ ID NO: 768678 - protein, 13 aa, Homo sapiens
  CDR3 for beta chain variable domain of TCR clone 384339 (TRBV27, TRBJ1-1)
CASSLSIGAEAFF

SEQ ID NO: 768679 - protein, 15 aa, Homo sapiens
  CDR3 for alpha chain variable domain of TCR clone 384340 (TRAV3, TRAJ7)
CAVRDKDNGNNRLAS

SEQ ID NO: 768680 - protein, 14 aa, Homo sapiens
  CDR3 for beta chain variable domain of TCR clone 384340 (TRBV19, TRBJ2-1)
CASPTVVLSGEQFF

SEQ ID NO: 768681 - protein, 11 aa, Homo sapiens
  CDR3 for alpha chain variable domain of TCR clone 384341 (TRAV2, TRAJ33)
CAVDSDYQLIW

SEQ ID NO: 768682 - protein, 17 aa, Homo sapiens
  CDR3 for beta chain variable domain of TCR clone 384341 (TRBV7-8, TRBJ1-2)
CASSLRPLQGHLYGYTF

SEQ ID NO: 768683 - protein, 13 aa, Homo sapiens
  CDR3 for alpha chain variable domain of TCR clone 384342 (TRAV17, TRAJ31)
CATDENNNARLMF

SEQ ID NO: 768684 - protein, 14 aa, Homo sapiens
  CDR3 for beta chain variable domain of TCR clone 384342 (TRBV11-3, TRBJ2-1)
CASSPSRQGGGQFF

SEQ ID NO: 768685 - protein, 11 aa, Homo sapiens
  CDR3 for alpha chain variable domain of TCR clone 384343 (TRAV13-1, TRAJ34)
CAASETDKLIF

SEQ ID NO: 768686 - protein, 13 aa, Homo sapiens
  CDR3 for beta chain variable domain of TCR clone 384343 (TRBV19, TRBJ1-4)
CASPTQGNEKLFF

SEQ ID NO: 768687 - protein, 17 aa, Homo sapiens
  CDR3 for alpha chain variable domain of TCR clone 384344 (TRAV2, TRAJ8)
CAVESLRMNTGFQKLVF

SEQ ID NO: 768688 - protein, 16 aa, Homo sapiens
  CDR3 for beta chain variable domain of TCR clone 384344 (TRBV15, TRBJ2-3)
CATSRDLGIVTDTQYF

SEQ ID NO: 768689 - protein, 12 aa, Homo sapiens
  CDR3 for alpha chain variable domain of TCR clone 384345 (TRAV13-1, TRAJ21)
CAAKEGFNKFYF

SEQ ID NO: 768690 - protein, 15 aa, Homo sapiens
  CDR3 for beta chain variable domain of TCR clone 384345 (TRBV7-6, TRBJ2-7)
CASSLVPLLDGEQYF

SEQ ID NO: 768691 - protein, 14 aa, Homo sapiens
  CDR3 for alpha chain variable domain of TCR clone 384346 (TRAV27, TRAJ23)
CAGFSYNQGGKLIF

SEQ ID NO: 768692 - protein, 15 aa, Homo sapiens
  CDR3 for beta chain variable domain of TCR clone 384346 (TRBV19, TRBJ2-2)
CASSLNRGVTGELFF

SEQ ID NO: 768693 - protein, 14 aa, Homo sapiens
  CDR3 for alpha chain variable domain of TCR clone 384347 (TRAV39, TRAJ42)
CAVDIARSQGNLNF

SEQ ID NO: 768694 - protein, 15 aa, Homo sapiens
  CDR3 for beta chain variable domain of TCR clone 384347 (TRBV27, TRBJ2-7)
CASSLFGTGLDEQYF

SEQ ID NO: 768695 - protein, 15 aa, Homo sapiens
  CDR3 for alpha chain variable domain of TCR clone 384348 (TRAV17, TRAJ56)
CATDAIPGATSKLTF

SEQ ID NO: 768696 - protein, 15 aa, Homo sapiens
  CDR3 for beta chain variable domain of TCR clone 384348 (TRBV6-3, TRBJ2-2)
CASSRFGGNTGELFF

SEQ ID NO: 768697 - protein, 17 aa, Homo sapiens
  CDR3 for alpha chain variable domain of TCR clone 384349 (TRAV3, TRAJ42)
RAVRDRDYGGSQGNLIF

SEQ ID NO: 768698 - protein, 15 aa, Homo sapiens
  CDR3 for beta chain variable domain of TCR clone 384349 (TRBV6-5, TRBJ2-1)
CASSYDAGAGNEQFF

SEQ ID NO: 768699 - protein, 19 aa, Homo sapiens
  CDR3 for alpha chain variable domain of TCR clone 384350 (TRAV2, TRAJ20)
ILQVREADAAVYRDCKLSF

SEQ ID NO: 768700 - protein, 12 aa, Homo sapiens
  CDR3 for beta chain variable domain of TCR clone 384350 (TRBV19, TRBJ1-5)
CASSIAQQPQHF

SEQ ID NO: 768701 - protein, 14 aa, Homo sapiens
  CDR3 for alpha chain variable domain of TCR clone 384351 (TRAV13-1, TRAJ13)
CAAIRVGGYQKVTF

SEQ ID NO: 768702 - protein, 17 aa, Homo sapiens
  CDR3 for beta chain variable domain of TCR clone 384351 (TRBV15, TRBJ1-5)
CATSRAPPGTRNQPQHF

SEQ ID NO: 768703 - protein, 13 aa, Homo sapiens
  CDR3 for alpha chain variable domain of TCR clone 384352 (TRAV12-2, TRAJ37)
CAGGSGNTGKLTF

SEQ ID NO: 768704 - protein, 17 aa, Homo sapiens
  CDR3 for beta chain variable domain of TCR clone 384352 (TRBV11-2, TRBJ2-1)
CASSLYPPGVEYNEQFF

SEQ ID NO: 768705 - protein, 14 aa, Homo sapiens
  CDR3 for alpha chain variable domain of TCR clone 384353 (TRAV1-1, TRAJ28)
CAAPSGAGSYQLPF

SEQ ID NO: 768706 - protein, 12 aa, Homo sapiens
  CDR3 for beta chain variable domain of TCR clone 384353 (TRBV7-3, TRBJ2-1)
CASSFINNEQFF

SEQ ID NO: 768707 - protein, 16 aa, Homo sapiens
  CDR3 for alpha chain variable domain of TCR clone 384354 (TRAV3, TRAJ37)
CAVRGKGSGNTGKLIF

SEQ ID NO: 768708 - protein, 14 aa, Homo sapiens
  CDR3 for beta chain variable domain of TCR clone 384354 (TRBV28, TRBJ2-1)
CASSRPGLRDEQFF

SEQ ID NO: 768709 - protein, 13 aa, Homo sapiens
  CDR3 for alpha chain variable domain of TCR clone 384355 (TRAV17, TRAJ13)
CATDSGGYQKVTF

SEQ ID NO: 768710 - protein, 18 aa, Homo sapiens
  CDR3 for beta chain variable domain of TCR clone 384355 (TRBV11-2, TRBJ2-3)
CASSLGGASRGAPNTQYF

SEQ ID NO: 768711 - protein, 15 aa, Homo sapiens
  CDR3 for alpha chain variable domain of TCR clone 384356 (TRAV3, TRAJ36)
CAVRPDQTGANNLFF

SEQ ID NO: 768712 - protein, 12 aa, Homo sapiens
  CDR3 for beta chain variable domain of TCR clone 384356 (TRBV6-3, TRBJ2-7)
CASSEPGFEQYF

SEQ ID NO: 768713 - protein, 12 aa, Homo sapiens
  CDR3 for alpha chain variable domain of TCR clone 384357 (TRAV12-3, TRAJ20)
CAMVRGDYKLSF

SEQ ID NO: 768714 - protein, 13 aa, Homo sapiens
  CDR3 for beta chain variable domain of TCR clone 384357 (TRBV23-1, TRBJ1-4)
CASRGRFNEKLFF

SEQ ID NO: 768715 - protein, 15 aa, Homo sapiens
  CDR3 for alpha chain variable domain of TCR clone 384358 (TRAV38-1, TRAJ37)
CAFIFGSGNTGILIF

SEQ ID NO: 768716 - protein, 12 aa, Homo sapiens
  CDR3 for beta chain variable domain of TCR clone 384358 (TRBV7-9, TRBJ2-7)
CASSLEGYEQYF

SEQ ID NO: 768717 - protein, 14 aa, Homo sapiens
  CDR3 for alpha chain variable domain of TCR clone 384359 (TRAV38-1, TRAJ29)
CAFITPSGNTPLVF

SEQ ID NO: 768718 - protein, 12 aa, Homo sapiens
  CDR3 for beta chain variable domain of TCR clone 384359 (TRBV12-5, TRBJ2-5)
CASGQGVETQYF

SEQ ID NO: 768719 - protein, 17 aa, Homo sapiens
  CDR3 for alpha chain variable domain of TCR clone 384360 (TRAV38-2/DV8, TRAJ23)
CALSRKFIFGQGTELSV

SEQ ID NO: 768720 - protein, 17 aa, Homo sapiens
  CDR3 for beta chain variable domain of TCR clone 384360 (TRBV5-4, TRBJ2-1)
CASSSAGGRGPYNEQFF

SEQ ID NO: 768721 - protein, 20 aa, Homo sapiens
  CDR3 for alpha chain variable domain of TCR clone 384361 (TRAV12-1, TRAJ42)
SSVIQPPTSVKGGSQGNLIF

SEQ ID NO: 768722 - protein, 18 aa, Homo sapiens
  CDR3 for beta chain variable domain of TCR clone 384361 (TRBV11-2, TRBJ2-3)
CVSSLGGASRGAPNTQYF

SEQ ID NO: 768723 - protein, 15 aa, Homo sapiens
  CDR3 for alpha chain variable domain of TCR clone 384362 (TRAV13-2, TRAJ45)
CAESDSGGGADGLTF

SEQ ID NO: 768724 - protein, 16 aa, Homo sapiens
  CDR3 for beta chain variable domain of TCR clone 384362 (TRBV27, TRBJ2-2)
CASSFRGLVRTGELFF

SEQ ID NO: 768725 - protein, 14 aa, Homo sapiens
  CDR3 for alpha chain variable domain of TCR clone 384363 (TRAV29/DV5, TRAJ32)
CAAAYGGASNKLIF

SEQ ID NO: 768726 - protein, 11 aa, Homo sapiens
  CDR3 for beta chain variable domain of TCR clone 384363 (TRBV11-2, TRBJ2-2)
CASSLPGELFF

SEQ ID NO: 768727 - protein, 15 aa, Homo sapiens
  CDR3 for alpha chain variable domain of TCR clone 384364 (TRAV13-2, TRAJ24)
CAENSATDSWGKLQF

SEQ ID NO: 768728 - protein, 16 aa, Homo sapiens
  CDR3 for beta chain variable domain of TCR clone 384364 (TRBV7-9, TRBJ2-3)
CASSPWREVGTDTQYF

SEQ ID NO: 768729 - protein, 15 aa, Homo sapiens
  CDR3 for alpha chain variable domain of TCR clone 384365 (TRAV12-2, TRAJ43)
CAFDMRFGAGTRLTV

SEQ ID NO: 768730 - protein, 13 aa, Homo sapiens
  CDR3 for beta chain variable domain of TCR clone 384365 (TRBV20-1, TRBJ1-1)
CSARVGGNTEAFF

SEQ ID NO: 768731 - protein, 15 aa, Homo sapiens
  CDR3 for alpha chain variable domain of TCR clone 384366 (TRAV8-2, TRAJ15)
CVVTMGNQAGTALIF

SEQ ID NO: 768732 - protein, 14 aa, Homo sapiens
  CDR3 for beta chain variable domain of TCR clone 384366 (TRBV7-6, TRBJ2-7)
CASSFRQGADEQYF

SEQ ID NO: 768733 - protein, 14 aa, Homo sapiens
  CDR3 for alpha chain variable domain of TCR clone 384367 (TRAV12-2, TRAJ24)
CAVTPADSWGKLQF

SEQ ID NO: 768734 - protein, 12 aa, Homo sapiens
  CDR3 for beta chain variable domain of TCR clone 384367 (TRBV3-1, TRBJ2-1)
CASSQGSSGEFF

SEQ ID NO: 768735 - protein, 14 aa, Homo sapiens
  CDR3 for alpha chain variable domain of TCR clone 384368 (TRAV12-2, TRAJ13)
CTVKKTGGYQKVTF

SEQ ID NO: 768736 - protein, 15 aa, Homo sapiens
  CDR3 for beta chain variable domain of TCR clone 384368 (TRBV7-2, TRBJ2-1)
CASSLASGRVNEQFF

SEQ ID NO: 768737 - protein, 15 aa, Homo sapiens
  CDR3 for alpha chain variable domain of TCR clone 384369 (TRAV3, TRAJ22)
CAVRDRGGSARQLTF

SEQ ID NO: 768738 - protein, 16 aa, Homo sapiens
  CDR3 for beta chain variable domain of TCR clone 384369 (TRBV9, TRBJ2-1)
CASSVGGGGNYNEQFF

SEQ ID NO: 768739 - protein, 22 aa, Homo sapiens
  CDR3 for alpha chain variable domain of TCR clone 384370 (TRAV39, TRAJ49)
PCMASLPPTSVPWTNTGNQFYF

SEQ ID NO: 768740 - protein, 17 aa, Homo sapiens
  CDR3 for beta chain variable domain of TCR clone 384370 (TRBV20-1, TRBJ2-1)
CSARDRRRASSYNEQFF

SEQ ID NO: 768741 - protein, 14 aa, Homo sapiens
  CDR3 for alpha chain variable domain of TCR clone 384371 (TRAV12-2, TRAJ13)
CAVKKTGGYQNVTF

SEQ ID NO: 768742 - protein, 15 aa, Homo sapiens
  CDR3 for beta chain variable domain of TCR clone 384371 (TRBV28, TRBJ2-1)
CASSIIAGGRSEQFF

SEQ ID NO: 768743 - protein, 12 aa, Homo sapiens
  CDR3 for alpha chain variable domain of TCR clone 384372 (TRAV21, TRAJ26)
CAVDNYGQNFVF

SEQ ID NO: 768744 - protein, 13 aa, Homo sapiens
  CDR3 for beta chain variable domain of TCR clone 384372 (TRBV20-1, TRBJ1-1)
CSARGGGNTEAFF

SEQ ID NO: 768745 - protein, 14 aa, Homo sapiens
  CDR3 for alpha chain variable domain of TCR clone 384373 (TRAV12-2, TRAJ13)
CAVKKTGGYQKVNF

SEQ ID NO: 768746 - protein, 13 aa, Homo sapiens
  CDR3 for beta chain variable domain of TCR clone 384373 (TRBV28, TRBJ2-7)
CASKAGGVYEQYF

SEQ ID NO: 768747 - protein, 14 aa, Homo sapiens
  CDR3 for alpha chain variable domain of TCR clone 384374 (TRAV23/DV6, TRAJ27)
CAVSRDTNEGKSTF

SEQ ID NO: 768748 - protein, 13 aa, Homo sapiens
  CDR3 for beta chain variable domain of TCR clone 384374 (TRBV20-1, TRBJ1-5)
CSASGRGNQPQHF

SEQ ID NO: 768749 - protein, 13 aa, Homo sapiens
  CDR3 for alpha chain variable domain of TCR clone 384375 (TRAV27, TRAJ49)
CAPRPYTGNQFYF

SEQ ID NO: 768750 - protein, 16 aa, Homo sapiens
  CDR3 for beta chain variable domain of TCR clone 384375 (TRBV4-1, TRBJ1-2)
CASSQGAGQVLYGYIF

SEQ ID NO: 768751 - protein, 14 aa, Homo sapiens
  CDR3 for alpha chain variable domain of TCR clone 384376 (TRAV35, TRAJ42)
CCVPYVGSQGNLIF

SEQ ID NO: 768752 - protein, 18 aa, Homo sapiens
  CDR3 for beta chain variable domain of TCR clone 384376 (TRBV13, TRBJ2-6)
CASSPMTSGGSGANVLTF

SEQ ID NO: 768753 - protein, 12 aa, Homo sapiens
  CDR3 for alpha chain variable domain of TCR clone 384377 (TRAV12-1, TRAJ23)
CVVNNQGGKLIF

SEQ ID NO: 768754 - protein, 16 aa, Homo sapiens
  CDR3 for beta chain variable domain of TCR clone 384377 (TRBV11-1, TRBJ2-7)
CASSAQTGTLSYERYF

SEQ ID NO: 768755 - protein, 15 aa, Homo sapiens
  CDR3 for alpha chain variable domain of TCR clone 384378 (TRAV4, TRAJ10)
CLVGDPPGGGNKLTF

SEQ ID NO: 768756 - protein, 16 aa, Homo sapiens
  CDR3 for beta chain variable domain of TCR clone 384378 (TRBV28, TRBJ2-7)
CASSLRGLAGAYEQYF

SEQ ID NO: 768757 - protein, 14 aa, Homo sapiens
  CDR3 for alpha chain variable domain of TCR clone 384379 (TRAV1-2, TRAJ16)
CAVSRFSAGQKLLF

SEQ ID NO: 768758 - protein, 15 aa, Homo sapiens
  CDR3 for beta chain variable domain of TCR clone 384379 (TRBV7-9, TRBJ1-6)
CASSSPGRGNSPLHF

SEQ ID NO: 768759 - protein, 11 aa, Homo sapiens
  CDR3 for alpha chain variable domain of TCR clone 384380 (TRAV12-1, TRAJ30)
CAVNGQDKIIF

SEQ ID NO: 768760 - protein, 12 aa, Homo sapiens
  CDR3 for beta chain variable domain of TCR clone 384380 (TRBV11-1, TRBJ2-2)
CASKLFTGELFF

SEQ ID NO: 768761 - protein, 14 aa, Homo sapiens
  CDR3 for alpha chain variable domain of TCR clone 384381 (TRAV23/DV6, TRAJ8)
CAASKATGFQKLVF

SEQ ID NO: 768762 - protein, 15 aa, Homo sapiens
  CDR3 for beta chain variable domain of TCR clone 384381 (TRBV28, TRBJ2-3)
CASSPYRQGANTQYF

SEQ ID NO: 768763 - protein, 14 aa, Homo sapiens
  CDR3 for alpha chain variable domain of TCR clone 384382 (TRAV13-1, TRAJ35)
CAASKGGFGNVLHC

SEQ ID NO: 768764 - protein, 13 aa, Homo sapiens
  CDR3 for beta chain variable domain of TCR clone 384382 (TRBV7-3, TRBJ1-1)
CASSQDWEAEAVF

SEQ ID NO: 768765 - protein, 14 aa, Homo sapiens
  CDR3 for alpha chain variable domain of TCR clone 384383 (TRAV12-3, TRAJ10)
SNLPLTGGGNKLTF

SEQ ID NO: 768766 - protein, 17 aa, Homo sapiens
  CDR3 for beta chain variable domain of TCR clone 384383 (TRBV13, TRBJ2-3)
CASSLSRVAGGRNTQYF

SEQ ID NO: 768767 - protein, 15 aa, Homo sapiens
  CDR3 for alpha chain variable domain of TCR clone 384384 (TRAV21, TRAJ24)
SAARSSTDSWGKLQF

SEQ ID NO: 768768 - protein, 11 aa, Homo sapiens
  CDR3 for beta chain variable domain of TCR clone 384384 (TRBV11-2, TRBJ2-2)
CASSLPGELFF

SEQ ID NO: 768769 - protein, 14 aa, Homo sapiens
  CDR3 for alpha chain variable domain of TCR clone 384385 (TRAV12-3, TRAJ10)
SHLPLTGGGNKLTF

SEQ ID NO: 768770 - protein, 14 aa, Homo sapiens
  CDR3 for beta chain variable domain of TCR clone 384385 (TRBV19, TRBJ2-1)
CASSKDRGQDEQFF

SEQ ID NO: 768771 - protein, 14 aa, Homo sapiens
  CDR3 for alpha chain variable domain of TCR clone 384386 (TRAV1-2, TRAJ8)
CAVREDTGFKKLVF

SEQ ID NO: 768772 - protein, 13 aa, Homo sapiens
  CDR3 for beta chain variable domain of TCR clone 384386 (TRBV15, TRBJ2-7)
CATSTTGHYEQYF

SEQ ID NO: 768773 - protein, 14 aa, Homo sapiens
  CDR3 for alpha chain variable domain of TCR clone 384387 (TRAV13-2, TRAJ43)
CAEIHPYYNNDMRF

SEQ ID NO: 768774 - protein, 15 aa, Homo sapiens
  CDR3 for beta chain variable domain of TCR clone 384387 (TRBV7-9, TRBJ2-2)
CASGPLDTFPGELFF

SEQ ID NO: 768775 - protein, 14 aa, Homo sapiens
  CDR3 for alpha chain variable domain of TCR clone 384388 (TRAV4, TRAJ26)
CLVGPQNYGQNFVF

SEQ ID NO: 768776 - protein, 17 aa, Homo sapiens
  CDR3 for beta chain variable domain of TCR clone 384388 (TRBV20-1, TRBJ2-1)
CSASSSGLAGSYNEQFF

SEQ ID NO: 768777 - protein, 18 aa, Homo sapiens
  CDR3 for alpha chain variable domain of TCR clone 384389 (TRAV21, TRAJ52)
CAVSPSPAGGTSYGKLTF

SEQ ID NO: 768778 - protein, 12 aa, Homo sapiens
  CDR3 for beta chain variable domain of TCR clone 384389 (TRBV12-4, TRBJ2-4)
CASSSSGNIQYF

SEQ ID NO: 768779 - protein, 11 aa, Homo sapiens
  CDR3 for alpha chain variable domain of TCR clone 384390 (TRAV12-1, TRAJ8)
CVVTGFQELVF

SEQ ID NO: 768780 - protein, 14 aa, Homo sapiens
  CDR3 for beta chain variable domain of TCR clone 384390 (TRBV19, TRBJ2-1)
CASRKSTQYNEQFF

SEQ ID NO: 768781 - protein, 14 aa, Homo sapiens
  CDR3 for alpha chain variable domain of TCR clone 384391 (TRAV27, TRAJ22)
CAGVVPGSARQLTF

SEQ ID NO: 768782 - protein, 17 aa, Homo sapiens
  CDR3 for beta chain variable domain of TCR clone 384391 (TRBV11-2, TRBJ2-1)
CASSLYPPGVEYNEQFF

SEQ ID NO: 768783 - protein, 15 aa, Homo sapiens
  CDR3 for alpha chain variable domain of TCR clone 384392 (TRAV13-1, TRAJ5)
CAVSPIDTGRRALTF

SEQ ID NO: 768784 - protein, 16 aa, Homo sapiens
  CDR3 for beta chain variable domain of TCR clone 384392 (TRBV7-3, TRBJ2-2)
CASSLKRGTLSGELFF

SEQ ID NO: 768785 - protein, 14 aa, Homo sapiens
  CDR3 for alpha chain variable domain of TCR clone 384393 (TRAV26-1, TRAJ48)
CIVRVARGNEKLTF

SEQ ID NO: 768786 - protein, 14 aa, Homo sapiens
  CDR3 for beta chain variable domain of TCR clone 384393 (TRBV19, TRBJ2-1)
CASPTFVLSGEQFF

SEQ ID NO: 768787 - protein, 13 aa, Homo sapiens
  CDR3 for alpha chain variable domain of TCR clone 384394 (TRAV13-2, TRAJ48)
CAEMDFGNEKLTF

SEQ ID NO: 768788 - protein, 16 aa, Homo sapiens
  CDR3 for beta chain variable domain of TCR clone 384394 (TRBV27, TRBJ2-2)
CDSSFRGLVRTGELFF

SEQ ID NO: 768789 - protein, 11 aa, Homo sapiens
  CDR3 for alpha chain variable domain of TCR clone 384395 (TRAV13-1, TRAJ39)
CASHAGNMLTF

SEQ ID NO: 768790 - protein, 12 aa, Homo sapiens
  CDR3 for beta chain variable domain of TCR clone 384395 (TRBV7-9, TRBJ2-7)
CASSLQGYEQYF

SEQ ID NO: 768791 - protein, 13 aa, Homo sapiens
  CDR3 for alpha chain variable domain of TCR clone 384396 (TRAV1-2, TRAJ9)
CASLNTGGFKTIF

SEQ ID NO: 768792 - protein, 14 aa, Homo sapiens
  CDR3 for beta chain variable domain of TCR clone 384396 (TRBV7-3, TRBJ2-1)
CASSLAGGTNEQFF

SEQ ID NO: 768793 - protein, 16 aa, Homo sapiens
  CDR3 for alpha chain variable domain of TCR clone 384397 (TRAV14/DV4, TRAJ54)
CAMREGRIQGAQKLVF

SEQ ID NO: 768794 - protein, 18 aa, Homo sapiens
  CDR3 for beta chain variable domain of TCR clone 384397 (TRBV18, TRBJ1-3)
CDSSPRGGAGPSGNTIYF

SEQ ID NO: 768795 - protein, 12 aa, Homo sapiens
  CDR3 for alpha chain variable domain of TCR clone 384398 (TRAV25, TRAJ35)
CAGIGFGNVLHC

SEQ ID NO: 768796 - protein, 12 aa, Homo sapiens
  CDR3 for beta chain variable domain of TCR clone 384398 (TRBV6-3, TRBJ2-7)
FASSRQGYEQYF

SEQ ID NO: 768797 - protein, 14 aa, Homo sapiens
  CDR3 for alpha chain variable domain of TCR clone 384399 (TRAV23/DV6, TRAJ37)
CAASTSSNTGKLIF

SEQ ID NO: 768798 - protein, 15 aa, Homo sapiens
  CDR3 for beta chain variable domain of TCR clone 384399 (TRBV7-9, TRBJ2-7)
CASSPGGGLSYEQYF

SEQ ID NO: 768799 - protein, 10 aa, Homo sapiens
  CDR3 for alpha chain variable domain of TCR clone 384400 (TRAV16, TRAJ20)
CALKRLQAQL

SEQ ID NO: 768800 - protein, 14 aa, Homo sapiens
  CDR3 for beta chain variable domain of TCR clone 384400 (TRBV12-5, TRBJ2-5)
CASGSRTHQETQYF

SEQ ID NO: 768801 - protein, 13 aa, Homo sapiens
  CDR3 for alpha chain variable domain of TCR clone 384401 (TRAV12-1, TRAJ26)
SATYLYYGQNFVF

SEQ ID NO: 768802 - protein, 15 aa, Homo sapiens
  CDR3 for beta chain variable domain of TCR clone 384401 (TRBV5-1, TRBJ2-6)
CASSLDSAGANVLTV

SEQ ID NO: 768803 - protein, 14 aa, Homo sapiens
  CDR3 for alpha chain variable domain of TCR clone 384402 (TRAV13-1, TRAJ52)
CAAAGGTSYGKLTF

SEQ ID NO: 768804 - protein, 19 aa, Homo sapiens
  CDR3 for beta chain variable domain of TCR clone 384402 (TRBV19, TRBJ1-1)
CASSKSGTGGPTLKLSLDK

SEQ ID NO: 768805 - protein, 14 aa, Homo sapiens
  CDR3 for alpha chain variable domain of TCR clone 384403 (TRAV38-1, TRAJ45)
CASHSGGGADGLTV

SEQ ID NO: 768806 - protein, 16 aa, Homo sapiens
  CDR3 for beta chain variable domain of TCR clone 384403 (TRBV27, TRBJ2-2)
CASSFRGLVRTGELFF

SEQ ID NO: 768807 - protein, 15 aa, Homo sapiens
  CDR3 for alpha chain variable domain of TCR clone 384404 (TRAV30, TRAJ32)
CGTEILGGATNKLIF

SEQ ID NO: 768808 - protein, 13 aa, Homo sapiens
  CDR3 for beta chain variable domain of TCR clone 384404 (TRBV6-3, TRBJ2-7)
CASSFSGCYEQYF

SEQ ID NO: 768809 - protein, 13 aa, Homo sapiens
  CDR3 for alpha chain variable domain of TCR clone 384405 (TRAV3, TRAJ21)
CAVREPDFNKFYF

SEQ ID NO: 768810 - protein, 16 aa, Homo sapiens
  CDR3 for beta chain variable domain of TCR clone 384405 (TRBV6-6, TRBJ2-7)
CASRASGRARSYEQYF

SEQ ID NO: 768811 - protein, 16 aa, Homo sapiens
  CDR3 for alpha chain variable domain of TCR clone 384406 (TRAV20, TRAJ28)
CAVRDPSGAGSYQLTF

SEQ ID NO: 768812 - protein, 13 aa, Homo sapiens
  CDR3 for beta chain variable domain of TCR clone 384406 (TRBV12-4, TRBJ1-5)
CASSPDRAQPQHF

SEQ ID NO: 768813 - protein, 13 aa, Homo sapiens
  CDR3 for alpha chain variable domain of TCR clone 384407 (TRAV8-1, TRAJ34)
CAVGGYNTDKLIF

SEQ ID NO: 768814 - protein, 13 aa, Homo sapiens
  CDR3 for beta chain variable domain of TCR clone 384407 (TRBV19, TRBJ2-7)
CASSPRQSYEQYF

SEQ ID NO: 768815 - protein, 11 aa, Homo sapiens
  CDR3 for alpha chain variable domain of TCR clone 384408 (TRAV12-3, TRAJ27)
FAIANAGKSTF

SEQ ID NO: 768816 - protein, 13 aa, Homo sapiens
  CDR3 for beta chain variable domain of TCR clone 384408 (TRBV20-1, TRBJ1-1)
CSARVGGNTEAFF

SEQ ID NO: 768817 - protein, 14 aa, Homo sapiens
  CDR3 for alpha chain variable domain of TCR clone 384409 (TRAV8-3, TRAJ48)
CCGCGQFGNEKLTF

SEQ ID NO: 768818 - protein, 15 aa, Homo sapiens
  CDR3 for beta chain variable domain of TCR clone 384409 (TRBV18, TRBJ2-7)
CASSPLQGRTYEQYF

SEQ ID NO: 768819 - protein, 13 aa, Homo sapiens
  CDR3 for alpha chain variable domain of TCR clone 384410 (TRAV3, TRAJ40)
CAVRGSGAYKYIF

SEQ ID NO: 768820 - protein, 16 aa, Homo sapiens
  CDR3 for beta chain variable domain of TCR clone 384410 (TRBV10-3, TRBJ2-1)
CAIRGGGRGDYNEQFF

SEQ ID NO: 768821 - protein, 16 aa, Homo sapiens
  CDR3 for alpha chain variable domain of TCR clone 384411 (TRAV30, TRAJ24)
CGTEIVDADSWGKFQF

SEQ ID NO: 768822 - protein, 14 aa, Homo sapiens
  CDR3 for beta chain variable domain of TCR clone 384411 (TRBV12-5, TRBJ2-5)
CASSSRTQQETQYF

SEQ ID NO: 768823 - protein, 14 aa, Homo sapiens
  CDR3 for alpha chain variable domain of TCR clone 384412 (TRAV23/DV6, TRAJ27)
CAASSDTNAGKSTF

SEQ ID NO: 768824 - protein, 13 aa, Homo sapiens
  CDR3 for beta chain variable domain of TCR clone 384412 (TRBV20-1, TRBJ1-5)
CSASGRGNQPQHF

SEQ ID NO: 768825 - protein, 13 aa, Homo sapiens
  CDR3 for alpha chain variable domain of TCR clone 384413 (TRAV38-1, TRAJ52)
CAFRGTSYGKLTF

SEQ ID NO: 768826 - protein, 15 aa, Homo sapiens
  CDR3 for beta chain variable domain of TCR clone 384413 (TRBV7-8, TRBJ2-5)
CASSDAASSQETHYF

SEQ ID NO: 768827 - protein, 19 aa, Homo sapiens
  CDR3 for alpha chain variable domain of TCR clone 384414 (TRAV26-1, TRAJ22)
CCVLLHRWVFSGSARQLTF

SEQ ID NO: 768828 - protein, 12 aa, Homo sapiens
  CDR3 for beta chain variable domain of TCR clone 384414 (TRBV7-9, TRBJ2-7)
CASSIKREEQYF

SEQ ID NO: 768829 - protein, 14 aa, Homo sapiens
  CDR3 for alpha chain variable domain of TCR clone 384415 (TRAV20, TRAJ29)
CAVQAWVGNTPLVF

SEQ ID NO: 768830 - protein, 15 aa, Homo sapiens
  CDR3 for beta chain variable domain of TCR clone 384415 (TRBV29-1, TRBJ2-7)
GSVEFFDRGSYEQYF

SEQ ID NO: 768831 - protein, 13 aa, Homo sapiens
  CDR3 for alpha chain variable domain of TCR clone 384416 (TRAV8-3, TRAJ28)
CPVGAVGSYQLTF

SEQ ID NO: 768832 - protein, 14 aa, Homo sapiens
  CDR3 for beta chain variable domain of TCR clone 384416 (TRBV7-2, TRBJ2-7)
CASSPKTSFYEQYF

SEQ ID NO: 768833 - protein, 12 aa, Homo sapiens
  CDR3 for alpha chain variable domain of TCR clone 384417 (TRAV13-1, TRAJ21)
CAAKEGSNKFYF

SEQ ID NO: 768834 - protein, 19 aa, Homo sapiens
  CDR3 for beta chain variable domain of TCR clone 384417 (TRBV2, TRBJ2-7)
CASSDDETSGRANDYEQYF

SEQ ID NO: 768835 - protein, 14 aa, Homo sapiens
  CDR3 for alpha chain variable domain of TCR clone 384418 (TRAV30, TRAJ26)
CGTEIVSYGQNFVF

SEQ ID NO: 768836 - protein, 13 aa, Homo sapiens
  CDR3 for beta chain variable domain of TCR clone 384418 (TRBV10-3, TRBJ2-7)
CASKLAENYEQYF

SEQ ID NO: 768837 - protein, 16 aa, Homo sapiens
  CDR3 for alpha chain variable domain of TCR clone 384419 (TRAV30, TRAJ24)
CGTEIEDADSWGKFLF

SEQ ID NO: 768838 - protein, 14 aa, Homo sapiens
  CDR3 for beta chain variable domain of TCR clone 384419 (TRBV12-5, TRBJ2-5)
CASGSRTHQETQYF

SEQ ID NO: 768839 - protein, 15 aa, Homo sapiens
  CDR3 for alpha chain variable domain of TCR clone 384420 (TRAV17, TRAJ52)
CATEAGGTSYGKLTF

SEQ ID NO: 768840 - protein, 17 aa, Homo sapiens
  CDR3 for beta chain variable domain of TCR clone 384420 (TRBV13, TRBJ2-3)
CASSLSRVAGGRNTQYF

SEQ ID NO: 768841 - protein, 15 aa, Homo sapiens
  CDR3 for alpha chain variable domain of TCR clone 384421 (TRAV3, TRAJ3)
CAVRDRDSSASKIIF

SEQ ID NO: 768842 - protein, 17 aa, Homo sapiens
  CDR3 for beta chain variable domain of TCR clone 384421 (TRBV25-1, TRBJ1-2)
CQQWAQNGQGLIFGYTF

SEQ ID NO: 768843 - protein, 13 aa, Homo sapiens
  CDR3 for alpha chain variable domain of TCR clone 384422 (TRAV21, TRAJ27)
CAARPGNAGKSTF

SEQ ID NO: 768844 - protein, 13 aa, Homo sapiens
  CDR3 for beta chain variable domain of TCR clone 384422 (TRBV7-7, TRBJ2-2)
CASSLTSAGELFF

SEQ ID NO: 768845 - protein, 12 aa, Homo sapiens
  CDR3 for alpha chain variable domain of TCR clone 384423 (TRAV8-6, TRAJ43)
CAVSNNNNDMRF

SEQ ID NO: 768846 - protein, 14 aa, Homo sapiens
  CDR3 for beta chain variable domain of TCR clone 384423 (TRBV7-9, TRBJ2-5)
CASSFPQGVETQYF

SEQ ID NO: 768847 - protein, 14 aa, Homo sapiens
  CDR3 for alpha chain variable domain of TCR clone 384424 (TRAV30, TRAJ33)
CGTVAPRSNYQLIW

SEQ ID NO: 768848 - protein, 14 aa, Homo sapiens
  CDR3 for beta chain variable domain of TCR clone 384424 (TRBV12-4, TRBJ2-3)
CASSLGQGTDTQYF

SEQ ID NO: 768849 - protein, 14 aa, Homo sapiens
  CDR3 for alpha chain variable domain of TCR clone 384425 (TRAV26-1, TRAJ39)
CIVRGSRSGNLLTF

SEQ ID NO: 768850 - protein, 15 aa, Homo sapiens
  CDR3 for beta chain variable domain of TCR clone 384425 (TRBV7-9, TRBJ1-5)
CASSQGHQPNQPQHF

SEQ ID NO: 768851 - protein, 15 aa, Homo sapiens
  CDR3 for alpha chain variable domain of TCR clone 384426 (TRAV8-4, TRAJ36)
CAVRKSWTGANNLFF

SEQ ID NO: 768852 - protein, 17 aa, Homo sapiens
  CDR3 for beta chain variable domain of TCR clone 384426 (TRBV3-1, TRBJ2-2)
CASSHDSPGPNTGELFF

SEQ ID NO: 768853 - protein, 13 aa, Homo sapiens
  CDR3 for alpha chain variable domain of TCR clone 384427 (TRAV8-3, TRAJ36)
CAVGATGANSLFF

SEQ ID NO: 768854 - protein, 15 aa, Homo sapiens
  CDR3 for beta chain variable domain of TCR clone 384427 (TRBV7-2, TRBJ1-2)
CTSGLRAGWNYGYTF

SEQ ID NO: 768855 - protein, 14 aa, Homo sapiens
  CDR3 for alpha chain variable domain of TCR clone 384428 (TRAV1-2, TRAJ16)
CAVNRFSDVQKLLF

SEQ ID NO: 768856 - protein, 14 aa, Homo sapiens
  CDR3 for beta chain variable domain of TCR clone 384428 (TRBV7-2, TRBJ1-2)
CASSQTGSTYGYTF

SEQ ID NO: 768857 - protein, 14 aa, Homo sapiens
  CDR3 for alpha chain variable domain of TCR clone 384429 (TRAV26-2, TRAJ32)
CILFRGGATNKLIF

SEQ ID NO: 768858 - protein, 14 aa, Homo sapiens
  CDR3 for beta chain variable domain of TCR clone 384429 (TRBV28, TRBJ2-2)
CASSMQGYTGELFF

SEQ ID NO: 768859 - protein, 13 aa, Homo sapiens
  CDR3 for alpha chain variable domain of TCR clone 384430 (TRAV21, TRAJ27)
CAALNTNAGKSTF

SEQ ID NO: 768860 - protein, 15 aa, Homo sapiens
  CDR3 for beta chain variable domain of TCR clone 384430 (TRBV11-3, TRBJ2-3)
CASLKDGREGDTQYF

SEQ ID NO: 768861 - protein, 15 aa, Homo sapiens
  CDR3 for alpha chain variable domain of TCR clone 384431 (TRAV21, TRAJ24)
CAARSSTDSWGKLTF

SEQ ID NO: 768862 - protein, 13 aa, Homo sapiens
  CDR3 for beta chain variable domain of TCR clone 384431 (TRBV11-2, TRBJ2-5)
CASSSTGEETQYF

SEQ ID NO: 768863 - protein, 15 aa, Homo sapiens
  CDR3 for alpha chain variable domain of TCR clone 384432 (TRAV8-4, TRAJ3)
CAVSEPDSSASKIIF

SEQ ID NO: 768864 - protein, 11 aa, Homo sapiens
  CDR3 for beta chain variable domain of TCR clone 384432 (TRBV29-1, TRBJ2-5)
CSEDRTGTQYF

SEQ ID NO: 768865 - protein, 14 aa, Homo sapiens
  CDR3 for alpha chain variable domain of TCR clone 384433 (TRAV2, TRAJ37)
CAVEDQGNTGKLIF

SEQ ID NO: 768866 - protein, 14 aa, Homo sapiens
  CDR3 for beta chain variable domain of TCR clone 384433 (TRBV18, TRBJ2-1)
CARSPQGRFNEQFF

SEQ ID NO: 768867 - protein, 11 aa, Homo sapiens
  CDR3 for alpha chain variable domain of TCR clone 384434 (TRAV2, TRAJ16)
CAVGDGQKLLF

SEQ ID NO: 768868 - protein, 15 aa, Homo sapiens
  CDR3 for beta chain variable domain of TCR clone 384434 (TRBV25-1, TRBJ1-4)
CASSPGDSTNEKLFF

SEQ ID NO: 768869 - protein, 15 aa, Homo sapiens
  CDR3 for alpha chain variable domain of TCR clone 384435 (TRAV3, TRAJ3)
CAVRDRDSSTSKIIF

SEQ ID NO: 768870 - protein, 12 aa, Homo sapiens
  CDR3 for beta chain variable domain of TCR clone 384435 (TRBV29-1, TRBJ2-3)
CSVTGGADTQYF

SEQ ID NO: 768871 - protein, 14 aa, Homo sapiens
  CDR3 for alpha chain variable domain of TCR clone 384436 (TRAV8-4, TRAJ34)
CAVSDPGDTDKLIF

SEQ ID NO: 768872 - protein, 17 aa, Homo sapiens
  CDR3 for beta chain variable domain of TCR clone 384436 (TRBV7-8, TRBJ2-6)
CASSAGTGGAGANVLTF

SEQ ID NO: 768873 - protein, 15 aa, Homo sapiens
  CDR3 for alpha chain variable domain of TCR clone 384437 (TRAV1-1, TRAJ23)
CAVREGDNQGGKLIF

SEQ ID NO: 768874 - protein, 13 aa, Homo sapiens
  CDR3 for beta chain variable domain of TCR clone 384437 (TRBV10-3, TRBJ2-7)
CAISEKGGYEQYL

SEQ ID NO: 768875 - protein, 17 aa, Homo sapiens
  CDR3 for alpha chain variable domain of TCR clone 384438 (TRAV26-1, TRAJ53)
CIVRVDDSGGSNYKLTF

SEQ ID NO: 768876 - protein, 15 aa, Homo sapiens
  CDR3 for beta chain variable domain of TCR clone 384438 (TRBV20-1, TRBJ2-7)
CSARVPAAYFYEHYF

SEQ ID NO: 768877 - protein, 12 aa, Homo sapiens
  CDR3 for alpha chain variable domain of TCR clone 384439 (TRAV8-3, TRAJ20)
CAVGANDYKRSC

SEQ ID NO: 768878 - protein, 16 aa, Homo sapiens
  CDR3 for beta chain variable domain of TCR clone 384439 (TRBV19, TRBJ2-2)
CASRSPGTGATGELFF

SEQ ID NO: 768879 - protein, 15 aa, Homo sapiens
  CDR3 for alpha chain variable domain of TCR clone 384440 (TRAV26-1, TRAJ23)
CIVSVAGYQGGKLIF

SEQ ID NO: 768880 - protein, 18 aa, Homo sapiens
  CDR3 for beta chain variable domain of TCR clone 384440 (TRBV28, TRBJ2-1)
CASSSTSGRANSYNEQFF

SEQ ID NO: 768881 - protein, 14 aa, Homo sapiens
  CDR3 for alpha chain variable domain of TCR clone 384441 (TRAV26-1, TRAJ39)
CIVRGSRAGNMLTF

SEQ ID NO: 768882 - protein, 15 aa, Homo sapiens
  CDR3 for beta chain variable domain of TCR clone 384441 (TRBV7-9, TRBJ1-5)
CASSQGHQPNQPQHF

SEQ ID NO: 768883 - protein, 13 aa, Homo sapiens
  CDR3 for alpha chain variable domain of TCR clone 384442 (TRAV8-3, TRAJ5)
CAVGPRGRRALTF

SEQ ID NO: 768884 - protein, 14 aa, Homo sapiens
  CDR3 for beta chain variable domain of TCR clone 384442 (TRBV6-6, TRBJ2-7)
CASSVSGAGYEQYF

SEQ ID NO: 768885 - protein, 17 aa, Homo sapiens
  CDR3 for alpha chain variable domain of TCR clone 384443 (TRAV17, TRAJ28)
CATDPRRGGAGGYQLTF

SEQ ID NO: 768886 - protein, 16 aa, Homo sapiens
  CDR3 for beta chain variable domain of TCR clone 384443 (TRBV25-1, TRBJ1-1)
CASSGDRDGGRIEAFF

SEQ ID NO: 768887 - protein, 15 aa, Homo sapiens
  CDR3 for alpha chain variable domain of TCR clone 384444 (TRAV2, TRAJ15)
CAVEDRNQAGTALIF

SEQ ID NO: 768888 - protein, 12 aa, Homo sapiens
  CDR3 for beta chain variable domain of TCR clone 384444 (TRBV2, TRBJ2-1)
CAKREGYNEQFF

SEQ ID NO: 768889 - protein, 14 aa, Homo sapiens
  CDR3 for alpha chain variable domain of TCR clone 384445 (TRAV8-4, TRAJ8)
CAVSVCTGFQQLVF

SEQ ID NO: 768890 - protein, 15 aa, Homo sapiens
  CDR3 for beta chain variable domain of TCR clone 384445 (TRBV2, TRBJ2-3)
CASSGEGTGTDTQYF

SEQ ID NO: 768891 - protein, 15 aa, Homo sapiens
  CDR3 for alpha chain variable domain of TCR clone 384446 (TRAV2, TRAJ9)
CAVEDRGTGGFKTIF

SEQ ID NO: 768892 - protein, 16 aa, Homo sapiens
  CDR3 for beta chain variable domain of TCR clone 384446 (TRBV24-1, TRBJ2-3)
CATSDPGKGATDTQYF

SEQ ID NO: 768893 - protein, 12 aa, Homo sapiens
  CDR3 for alpha chain variable domain of TCR clone 384447 (TRAV26-1, TRAJ35)
CIGLSFGNVLHC

SEQ ID NO: 768894 - protein, 14 aa, Homo sapiens
  CDR3 for beta chain variable domain of TCR clone 384447 (TRBV12-5, TRBJ2-5)
CASGSRTHQETQYF

SEQ ID NO: 768895 - protein, 11 aa, Homo sapiens
  CDR3 for alpha chain variable domain of TCR clone 384448 (TRAV17, TRAJ9)
CATTGGFKNIF

SEQ ID NO: 768896 - protein, 13 aa, Homo sapiens
  CDR3 for beta chain variable domain of TCR clone 384448 (TRBV20-1, TRBJ1-1)
CSAPLGGGTEAFF

SEQ ID NO: 768897 - protein, 16 aa, Homo sapiens
  CDR3 for alpha chain variable domain of TCR clone 384449 (TRAV12-3, TRAJ53)
CAMSPGSGGSNYKLTF

SEQ ID NO: 768898 - protein, 20 aa, Homo sapiens
  CDR3 for beta chain variable domain of TCR clone 384449 (TRBV7-8, TRBJ2-2)
CASSHLFPGPTSHITGELFF

SEQ ID NO: 768899 - protein, 13 aa, Homo sapiens
  CDR3 for alpha chain variable domain of TCR clone 384450 (TRAV8-3, TRAJ44)
CAVVPGTASKRTF

SEQ ID NO: 768900 - protein, 14 aa, Homo sapiens
  CDR3 for beta chain variable domain of TCR clone 384450 (TRBV11-2, TRBJ2-3)
CASSRLARTDTQYF

SEQ ID NO: 768901 - protein, 14 aa, Homo sapiens
  CDR3 for alpha chain variable domain of TCR clone 384451 (TRAV2, TRAJ39)
FAVEGDNAGNMLTF

SEQ ID NO: 768902 - protein, 14 aa, Homo sapiens
  CDR3 for beta chain variable domain of TCR clone 384451 (TRBV28, TRBJ2-7)
CASSLRARGNEQYF

SEQ ID NO: 768903 - protein, 14 aa, Homo sapiens
  CDR3 for alpha chain variable domain of TCR clone 384452 (TRAV23/DV6, TRAJ27)
CAASRDTNAGKSTF

SEQ ID NO: 768904 - protein, 12 aa, Homo sapiens
  CDR3 for beta chain variable domain of TCR clone 384452 (TRBV11-2, TRBJ2-2)
CASSLPTGELFF

SEQ ID NO: 768905 - protein, 13 aa, Homo sapiens
  CDR3 for alpha chain variable domain of TCR clone 384453 (TRAV35, TRAJ40)
CAGTSSGTYKYIF

SEQ ID NO: 768906 - protein, 14 aa, Homo sapiens
  CDR3 for beta chain variable domain of TCR clone 384453 (TRBV4-2, TRBJ1-2)
CASSLGQMAYGYTF

SEQ ID NO: 768907 - protein, 17 aa, Homo sapiens
  CDR3 for alpha chain variable domain of TCR clone 384454 (TRAV3, TRAJ6)
CAVRDGPRAGGSYIPTF

SEQ ID NO: 768908 - protein, 12 aa, Homo sapiens
  CDR3 for beta chain variable domain of TCR clone 384454 (TRBV6-3, TRBJ2-7)
CASSEPGFEQYF

SEQ ID NO: 768909 - protein, 13 aa, Homo sapiens
  CDR3 for alpha chain variable domain of TCR clone 384455 (TRAV3, TRAJ21)
CAVREPDFNKFYF

SEQ ID NO: 768910 - protein, 15 aa, Homo sapiens
  CDR3 for beta chain variable domain of TCR clone 384455 (TRBV28, TRBJ2-1)
CASSIIAGGRSEQFF

SEQ ID NO: 768911 - protein, 12 aa, Homo sapiens
  CDR3 for alpha chain variable domain of TCR clone 384456 (TRAV12-2, TRAJ4)
GWPEGGYNKLIF

SEQ ID NO: 768912 - protein, 13 aa, Homo sapiens
  CDR3 for beta chain variable domain of TCR clone 384456 (TRBV19, TRBJ2-7)
CASSGQGVHEQYF

SEQ ID NO: 768913 - protein, 15 aa, Homo sapiens
  CDR3 for alpha chain variable domain of TCR clone 384457 (TRAV26-1, TRAJ29)
CIVRVEGSGNTTLVF

SEQ ID NO: 768914 - protein, 13 aa, Homo sapiens
  CDR3 for beta chain variable domain of TCR clone 384457 (TRBV7-9, TRBJ1-2)
CASSLKQNYGYTF

SEQ ID NO: 768915 - protein, 14 aa, Homo sapiens
  CDR3 for alpha chain variable domain of TCR clone 384458 (TRAV12-2, TRAJ17)
CAVNIKAAGNKLTF

SEQ ID NO: 768916 - protein, 13 aa, Homo sapiens
  CDR3 for beta chain variable domain of TCR clone 384458 (TRBV4-1, TRBJ2-2)
CASSQENTGELFF

SEQ ID NO: 768917 - protein, 14 aa, Homo sapiens
  CDR3 for alpha chain variable domain of TCR clone 384459 (TRAV38-1, TRAJ35)
CAFLTIGFGDVLHC

SEQ ID NO: 768918 - protein, 17 aa, Homo sapiens
  CDR3 for beta chain variable domain of TCR clone 384459 (TRBV28, TRBJ1-1)
CASSGDLRTESNTEAFF

SEQ ID NO: 768919 - protein, 13 aa, Homo sapiens
  CDR3 for alpha chain variable domain of TCR clone 384460 (TRAV12-1, TRAJ33)
CGDAPDSNYQLIC

SEQ ID NO: 768920 - protein, 14 aa, Homo sapiens
  CDR3 for beta chain variable domain of TCR clone 384460 (TRBV7-9, TRBJ2-1)
CASSPRDSLYEQFF

SEQ ID NO: 768921 - protein, 12 aa, Homo sapiens
  CDR3 for alpha chain variable domain of TCR clone 384461 (TRAV13-1, TRAJ21)
CAAKEGVNKFYF

SEQ ID NO: 768922 - protein, 20 aa, Homo sapiens
  CDR3 for beta chain variable domain of TCR clone 384461 (TRBV7-8, TRBJ2-2)
CASSHLFPGPTIHITGELFF

SEQ ID NO: 768923 - protein, 15 aa, Homo sapiens
  CDR3 for alpha chain variable domain of TCR clone 384462 (TRAV16, TRAJ17)
CALSGNKAAGNKLTF

SEQ ID NO: 768924 - protein, 16 aa, Homo sapiens
  CDR3 for beta chain variable domain of TCR clone 384462 (TRBV7-6, TRBJ1-6)
GASSSLPAGEYSPLHF

SEQ ID NO: 768925 - protein, 14 aa, Homo sapiens
  CDR3 for alpha chain variable domain of TCR clone 384463 (TRAV12-3, TRAJ7)
CAMREIGGNNRLAF

SEQ ID NO: 768926 - protein, 12 aa, Homo sapiens
  CDR3 for beta chain variable domain of TCR clone 384463 (TRBV5-4, TRBJ1-1)
CASSLDRREAFF

SEQ ID NO: 768927 - protein, 13 aa, Homo sapiens
  CDR3 for alpha chain variable domain of TCR clone 384464 (TRAV20, TRAJ49)
CAVQARTGNQFYF

SEQ ID NO: 768928 - protein, 14 aa, Homo sapiens
  CDR3 for beta chain variable domain of TCR clone 384464 (TRBV7-2, TRBJ2-7)
CASSPKTSCYEQYV

SEQ ID NO: 768929 - protein, 12 aa, Homo sapiens
  CDR3 for alpha chain variable domain of TCR clone 384465 (TRAV12-3, TRAJ17)
CALTLTGNKLTF

SEQ ID NO: 768930 - protein, 15 aa, Homo sapiens
  CDR3 for beta chain variable domain of TCR clone 384465 (TRBV20-1, TRBJ2-7)
GSARDRVSGMDEQYF

SEQ ID NO: 768931 - protein, 16 aa, Homo sapiens
  CDR3 for alpha chain variable domain of TCR clone 384466 (TRAV1-2, TRAJ10)
CAVRGVLTGGGNKLTF

SEQ ID NO: 768932 - protein, 12 aa, Homo sapiens
  CDR3 for beta chain variable domain of TCR clone 384466 (TRBV7-8, TRBJ2-7)
CASSRGDREQYV

SEQ ID NO: 768933 - protein, 18 aa, Homo sapiens
  CDR3 for alpha chain variable domain of TCR clone 384467 (TRAV1-2, TRAJ18)
CAVRDMGDRGSTLGRLYF

SEQ ID NO: 768934 - protein, 16 aa, Homo sapiens
  CDR3 for beta chain variable domain of TCR clone 384467 (TRBV29-1, TRBJ1-2)
CSVEANRDIANYGYTV

SEQ ID NO: 768935 - protein, 12 aa, Homo sapiens
  CDR3 for alpha chain variable domain of TCR clone 384468 (TRAV13-1, TRAJ53)
AASGGSNYKLTF

SEQ ID NO: 768936 - protein, 16 aa, Homo sapiens
  CDR3 for beta chain variable domain of TCR clone 384468 (TRBV6-6, TRBJ1-5)
CASSYSTLVGNQPQHF

SEQ ID NO: 768937 - protein, 17 aa, Homo sapiens
  CDR3 for alpha chain variable domain of TCR clone 384469 (TRAV3, TRAJ6)
CAVSDGPRAGGSDIPTF

SEQ ID NO: 768938 - protein, 14 aa, Homo sapiens
  CDR3 for beta chain variable domain of TCR clone 384469 (TRBV20-1, TRBJ2-2)
CSAPDTANTGELFF

SEQ ID NO: 768939 - protein, 17 aa, Homo sapiens
  CDR3 for alpha chain variable domain of TCR clone 384470 (TRAV12-3, TRAJ6)
CAMSARGGGRRKLHTYI

SEQ ID NO: 768940 - protein, 12 aa, Homo sapiens
  CDR3 for beta chain variable domain of TCR clone 384470 (TRBV12-4, TRBJ2-3)
CASSTLPDTQYF

SEQ ID NO: 768941 - protein, 16 aa, Homo sapiens
  CDR3 for alpha chain variable domain of TCR clone 384471 (TRAV23/DV6, TRAJ9)
CAASIGGKTGGFKTIF

SEQ ID NO: 768942 - protein, 14 aa, Homo sapiens
  CDR3 for beta chain variable domain of TCR clone 384471 (TRBV7-2, TRBJ2-7)
CASSPKTSFYEQYF

SEQ ID NO: 768943 - protein, 12 aa, Homo sapiens
  CDR3 for alpha chain variable domain of TCR clone 384472 (TRAV14/DV4, TRAJ11)
CAMSLYDSTLTF

SEQ ID NO: 768944 - protein, 14 aa, Homo sapiens
  CDR3 for beta chain variable domain of TCR clone 384472 (TRBV25-1, TRBJ1-1)
CASTHLGGNTEASF

SEQ ID NO: 768945 - protein, 14 aa, Homo sapiens
  CDR3 for alpha chain variable domain of TCR clone 384473 (TRAV2, TRAJ37)
CAVVFTSNTGKLIF

SEQ ID NO: 768946 - protein, 14 aa, Homo sapiens
  CDR3 for beta chain variable domain of TCR clone 384473 (TRBV7-6, TRBJ2-3)
CASSLGTVTDTQYF

SEQ ID NO: 768947 - protein, 16 aa, Homo sapiens
  CDR3 for alpha chain variable domain of TCR clone 384474 (TRAV38-1, TRAJ56)
CAFMKRQTGANSKLTF

SEQ ID NO: 768948 - protein, 15 aa, Homo sapiens
  CDR3 for beta chain variable domain of TCR clone 384474 (TRBV11-3, TRBJ2-3)
CASLKDGREGDTQYF

SEQ ID NO: 768949 - protein, 14 aa, Homo sapiens
  CDR3 for alpha chain variable domain of TCR clone 384475 (TRAV12-3, TRAJ10)
SHLPLTGGGNKLTF

SEQ ID NO: 768950 - protein, 16 aa, Homo sapiens
  CDR3 for beta chain variable domain of TCR clone 384475 (TRBV10-3, TRBJ2-1)
FAISLTSGNSYNEQFF

SEQ ID NO: 768951 - protein, 13 aa, Homo sapiens
  CDR3 for alpha chain variable domain of TCR clone 384476 (TRAV20, TRAJ35)
CSVQEGFGNVLHC

SEQ ID NO: 768952 - protein, 14 aa, Homo sapiens
  CDR3 for beta chain variable domain of TCR clone 384476 (TRBV5-1, TRBJ1-1)
CASSSATGGTEAFF

SEQ ID NO: 768953 - protein, 12 aa, Homo sapiens
  CDR3 for alpha chain variable domain of TCR clone 384477 (TRAV13-1, TRAJ15)
CAATQAGTALIF

SEQ ID NO: 768954 - protein, 18 aa, Homo sapiens
  CDR3 for beta chain variable domain of TCR clone 384477 (TRBV7-9, TRBJ2-3)
CASSLPINGQISTDTQYF

SEQ ID NO: 768955 - protein, 13 aa, Homo sapiens
  CDR3 for alpha chain variable domain of TCR clone 384478 (TRAV3, TRAJ21)
CAVREPDFNKFYF

SEQ ID NO: 768956 - protein, 13 aa, Homo sapiens
  CDR3 for beta chain variable domain of TCR clone 384478 (TRBV20-1, TRBJ1-1)
CSARGGGSTEAFF

SEQ ID NO: 768957 - protein, 16 aa, Homo sapiens
  CDR3 for alpha chain variable domain of TCR clone 384479 (TRAV30, TRAJ24)
CGTEIVDADSWGKFQF

SEQ ID NO: 768958 - protein, 14 aa, Homo sapiens
  CDR3 for beta chain variable domain of TCR clone 384479 (TRBV5-5, TRBJ1-2)
CASSLDPYNYGDTF

SEQ ID NO: 768959 - protein, 14 aa, Homo sapiens
  CDR3 for alpha chain variable domain of TCR clone 384480 (TRAV12-2, TRAJ45)
CAVNIGGGTDGLTF

SEQ ID NO: 768960 - protein, 13 aa, Homo sapiens
  CDR3 for beta chain variable domain of TCR clone 384480 (TRBV19, TRBJ2-2)
CASSIWSTGELFF

SEQ ID NO: 768961 - protein, 13 aa, Homo sapiens
  CDR3 for alpha chain variable domain of TCR clone 384481 (TRAV12-1, TRAJ6)
CVVFPGGSYIPTF

SEQ ID NO: 768962 - protein, 12 aa, Homo sapiens
  CDR3 for beta chain variable domain of TCR clone 384481 (TRBV11-3, TRBJ2-2)
CASSLGGGELFF

SEQ ID NO: 768963 - protein, 10 aa, Homo sapiens
  CDR3 for alpha chain variable domain of TCR clone 384482 (TRAV26-1, TRAJ40)
CIAGTYKYIF

SEQ ID NO: 768964 - protein, 16 aa, Homo sapiens
  CDR3 for beta chain variable domain of TCR clone 384482 (TRBV11-2, TRBJ2-7)
CASSPTTGGVSYEQYF

SEQ ID NO: 768965 - protein, 11 aa, Homo sapiens
  CDR3 for alpha chain variable domain of TCR clone 384483 (TRAV2, TRAJ21)
CAVFNFNKFYF

SEQ ID NO: 768966 - protein, 13 aa, Homo sapiens
  CDR3 for beta chain variable domain of TCR clone 384483 (TRBV5-7, TRBJ2-7)
CASSLGQTYEQYF

SEQ ID NO: 768967 - protein, 14 aa, Homo sapiens
  CDR3 for alpha chain variable domain of TCR clone 384484 (TRAV12-2, TRAJ9)
CAVNLNTGGFKTIF

SEQ ID NO: 768968 - protein, 15 aa, Homo sapiens
  CDR3 for beta chain variable domain of TCR clone 384484 (TRBV12-4, TRBJ2-5)
CASSPPTGLQETQYF

SEQ ID NO: 768969 - protein, 13 aa, Homo sapiens
  CDR3 for alpha chain variable domain of TCR clone 384485 (TRAV12-3, TRAJ13)
CAMTSGGYQKVTF

SEQ ID NO: 768970 - protein, 15 aa, Homo sapiens
  CDR3 for beta chain variable domain of TCR clone 384485 (TRBV20-1, TRBJ2-6)
CSARDRGPGANVLTF

SEQ ID NO: 768971 - protein, 15 aa, Homo sapiens
  CDR3 for alpha chain variable domain of TCR clone 384486 (TRAV2, TRAJ9)
CAVEDRGTGGFKTIF

SEQ ID NO: 768972 - protein, 14 aa, Homo sapiens
  CDR3 for beta chain variable domain of TCR clone 384486 (TRBV2, TRBJ2-7)
CASSRDRSSYEQYF

SEQ ID NO: 768973 - protein, 16 aa, Homo sapiens
  CDR3 for alpha chain variable domain of TCR clone 384487 (TRAV30, TRAJ24)
CGTEIGDADSWGKFQF

SEQ ID NO: 768974 - protein, 14 aa, Homo sapiens
  CDR3 for beta chain variable domain of TCR clone 384487 (TRBV12-5, TRBJ2-5)
CASGSRAHQETQYF

SEQ ID NO: 768975 - protein, 12 aa, Homo sapiens
  CDR3 for alpha chain variable domain of TCR clone 384488 (TRAV12-1, TRAJ40)
CVVYSGTYNYIF

SEQ ID NO: 768976 - protein, 11 aa, Homo sapiens
  CDR3 for beta chain variable domain of TCR clone 384488 (TRBV29-1, TRBJ2-5)
CSEDRTGTQYF

SEQ ID NO: 768977 - protein, 11 aa, Homo sapiens
  CDR3 for alpha chain variable domain of TCR clone 384489 (TRAV21, TRAJ9)
CAVPGGFTTIF

SEQ ID NO: 768978 - protein, 17 aa, Homo sapiens
  CDR3 for beta chain variable domain of TCR clone 384489 (TRBV7-9, TRBJ2-5)
CATSAGARDPLLRARHA

SEQ ID NO: 768979 - protein, 11 aa, Homo sapiens
  CDR3 for alpha chain variable domain of TCR clone 384490 (TRAV2, TRAJ20)
CAVLNDYKLSF

SEQ ID NO: 768980 - protein, 15 aa, Homo sapiens
  CDR3 for beta chain variable domain of TCR clone 384490 (TRBV19, TRBJ2-1)
CASSSPGVPLDEQFF

SEQ ID NO: 768981 - protein, 18 aa, Homo sapiens
  CDR3 for alpha chain variable domain of TCR clone 384491 (TRAV26-2, TRAJ33)
CCVLLHPEEPASNYQLIW

SEQ ID NO: 768982 - protein, 13 aa, Homo sapiens
  CDR3 for beta chain variable domain of TCR clone 384491 (TRBV7-9, TRBJ1-2)
CASSLKQNYGYTF

SEQ ID NO: 768983 - protein, 12 aa, Homo sapiens
  CDR3 for alpha chain variable domain of TCR clone 384492 (TRAV16, TRAJ26)
CASKDGGQNFVF

SEQ ID NO: 768984 - protein, 13 aa, Homo sapiens
  CDR3 for beta chain variable domain of TCR clone 384492 (TRBV25-1, TRBJ1-1)
CASSDRGRVEAFF

SEQ ID NO: 768985 - protein, 14 aa, Homo sapiens
  CDR3 for alpha chain variable domain of TCR clone 384493 (TRAV12-2, TRAJ40)
CAVTIPSGTYKYIS

SEQ ID NO: 768986 - protein, 14 aa, Homo sapiens
  CDR3 for beta chain variable domain of TCR clone 384493 (TRBV18, TRBJ2-7)
CASSPRGGAYEQYF

SEQ ID NO: 768987 - protein, 14 aa, Homo sapiens
  CDR3 for alpha chain variable domain of TCR clone 384494 (TRAV12-2, TRAJ33)
CAVKRARSNYQLIW

SEQ ID NO: 768988 - protein, 14 aa, Homo sapiens
  CDR3 for beta chain variable domain of TCR clone 384494 (TRBV13, TRBJ2-7)
CASSLKGASYEQYF

SEQ ID NO: 768989 - protein, 14 aa, Homo sapiens
  CDR3 for alpha chain variable domain of TCR clone 384495 (TRAV21, TRAJ35)
CAVMPIGFGNVLHC

SEQ ID NO: 768990 - protein, 16 aa, Homo sapiens
  CDR3 for beta chain variable domain of TCR clone 384495 (TRBV7-8, TRBJ2-4)
CASSAERTLAKNIQYF

SEQ ID NO: 768991 - protein, 11 aa, Homo sapiens
  CDR3 for alpha chain variable domain of TCR clone 384496 (TRAV12-3, TRAJ43)
CAMSVSNDMRF

SEQ ID NO: 768992 - protein, 20 aa, Homo sapiens
  CDR3 for beta chain variable domain of TCR clone 384496 (TRBV28, TRBJ2-1)
CASTPIGRSPGLAGGNEQYF

SEQ ID NO: 768993 - protein, 16 aa, Homo sapiens
  CDR3 for alpha chain variable domain of TCR clone 384497 (TRAV12-3, TRAJ53)
CAMSPVSGGSNDKLTF

SEQ ID NO: 768994 - protein, 11 aa, Homo sapiens
  CDR3 for beta chain variable domain of TCR clone 384497 (TRBV29-1, TRBJ2-5)
CSEDRTGTQYF

SEQ ID NO: 768995 - protein, 14 aa, Homo sapiens
  CDR3 for alpha chain variable domain of TCR clone 384498 (TRAV2, TRAJ9)
CAVEDRSGGFKTIF

SEQ ID NO: 768996 - protein, 16 aa, Homo sapiens
  CDR3 for beta chain variable domain of TCR clone 384498 (TRBV28, TRBJ1-4)
CASSSRTGAANEKLFF

SEQ ID NO: 768997 - protein, 15 aa, Homo sapiens
  CDR3 for alpha chain variable domain of TCR clone 384499 (TRAV2, TRAJ22)
CAVPPRGGSAGQLTF

SEQ ID NO: 768998 - protein, 11 aa, Homo sapiens
  CDR3 for beta chain variable domain of TCR clone 384499 (TRBV27, TRBJ2-3)
CASSLGDTQYF

SEQ ID NO: 768999 - protein, 12 aa, Homo sapiens
  CDR3 for alpha chain variable domain of TCR clone 384500 (TRAV12-3, TRAJ40)
CAMTSGTYKYIF

SEQ ID NO: 769000 - protein, 15 aa, Homo sapiens
  CDR3 for beta chain variable domain of TCR clone 384500 (TRBV7-3, TRBJ2-2)
CASSVTGQGTGELFF

SEQ ID NO: 769001 - protein, 14 aa, Homo sapiens
  CDR3 for alpha chain variable domain of TCR clone 384501 (TRAV1-2, TRAJ16)
CAVNRSSDGQKLLF

SEQ ID NO: 769002 - protein, 13 aa, Homo sapiens
  CDR3 for beta chain variable domain of TCR clone 384501 (TRBV14, TRBJ2-7)
CASSQDRRYEQYF

SEQ ID NO: 769003 - protein, 16 aa, Homo sapiens
  CDR3 for alpha chain variable domain of TCR clone 384502 (TRAV12-2, TRAJ43)
CAGDDMRFGAGTRLTV

SEQ ID NO: 769004 - protein, 16 aa, Homo sapiens
  CDR3 for beta chain variable domain of TCR clone 384502 (TRBV2, TRBJ2-4)
CASREAPGGEQNIQYF

SEQ ID NO: 769005 - protein, 13 aa, Homo sapiens
  CDR3 for alpha chain variable domain of TCR clone 384503 (TRAV12-1, TRAJ47)
CVVNMEYGNKLVF

SEQ ID NO: 769006 - protein, 12 aa, Homo sapiens
  CDR3 for beta chain variable domain of TCR clone 384503 (TRBV3-1, TRBJ2-1)
CASSQGSSGQFF

SEQ ID NO: 769007 - protein, 13 aa, Homo sapiens
  CDR3 for alpha chain variable domain of TCR clone 384504 (TRAV21, TRAJ20)
CAVGLRVDYKLSF

SEQ ID NO: 769008 - protein, 18 aa, Homo sapiens
  CDR3 for beta chain variable domain of TCR clone 384504 (TRBV20-1, TRBJ2-3)
CSARDPWGQGLSTDTQYF

SEQ ID NO: 769009 - protein, 14 aa, Homo sapiens
  CDR3 for alpha chain variable domain of TCR clone 384505 (TRAV3, TRAJ34)
CAVRAPGNTDKLIF

SEQ ID NO: 769010 - protein, 17 aa, Homo sapiens
  CDR3 for beta chain variable domain of TCR clone 384505 (TRBV20-1, TRBJ2-7)
CSADPGLARGISYEQYF

SEQ ID NO: 769011 - protein, 15 aa, Homo sapiens
  CDR3 for alpha chain variable domain of TCR clone 384506 (TRAV26-1, TRAJ39)
CIVRVARNAGNMLTF

SEQ ID NO: 769012 - protein, 16 aa, Homo sapiens
  CDR3 for beta chain variable domain of TCR clone 384506 (TRBV5-1, TRBJ2-1)
CGSSLTLAGGRNEQFF

SEQ ID NO: 769013 - protein, 14 aa, Homo sapiens
  CDR3 for alpha chain variable domain of TCR clone 384507 (TRAV1-2, TRAJ16)
CAVNRFSDGQKLLF

SEQ ID NO: 769014 - protein, 14 aa, Homo sapiens
  CDR3 for beta chain variable domain of TCR clone 384507 (TRBV7-2, TRBJ2-5)
CASSFTQGQETQYF

SEQ ID NO: 769015 - protein, 17 aa, Homo sapiens
  CDR3 for alpha chain variable domain of TCR clone 384508 (TRAV26-1, TRAJ28)
CIVRVPDSGAGSYQLTI

SEQ ID NO: 769016 - protein, 17 aa, Homo sapiens
  CDR3 for beta chain variable domain of TCR clone 384508 (TRBV28, TRBJ2-7)
CASSPLPAGGKSYEQYF

SEQ ID NO: 769017 - protein, 15 aa, Homo sapiens
  CDR3 for alpha chain variable domain of TCR clone 384509 (TRAV16, TRAJ10)
CALAGLTGGGNKLTF

SEQ ID NO: 769018 - protein, 14 aa, Homo sapiens
  CDR3 for beta chain variable domain of TCR clone 384509 (TRBV7-6, TRBJ2-3)
CASSLGTVTDTQYF

SEQ ID NO: 769019 - protein, 12 aa, Homo sapiens
  CDR3 for alpha chain variable domain of TCR clone 384510 (TRAV12-3, TRAJ17)
CAMTLTGNKLTF

SEQ ID NO: 769020 - protein, 13 aa, Homo sapiens
  CDR3 for beta chain variable domain of TCR clone 384510 (TRBV20-1, TRBJ1-1)
CSAPEGGNTEAFF

SEQ ID NO: 769021 - protein, 14 aa, Homo sapiens
  CDR3 for alpha chain variable domain of TCR clone 384511 (TRAV26-1, TRAJ44)
CIVSNTGTAGKLTF

SEQ ID NO: 769022 - protein, 11 aa, Homo sapiens
  CDR3 for beta chain variable domain of TCR clone 384511 (TRBV19, TRBJ2-7)
CASSILGEQYF

SEQ ID NO: 769023 - protein, 16 aa, Homo sapiens
  CDR3 for alpha chain variable domain of TCR clone 384512 (TRAV3, TRAJ10)
CAVRDMNAGGGNKLTF

SEQ ID NO: 769024 - protein, 17 aa, Homo sapiens
  CDR3 for beta chain variable domain of TCR clone 384512 (TRBV18, TRBJ1-5)
CASSPTMGQGTNQPQHF

SEQ ID NO: 769025 - protein, 14 aa, Homo sapiens
  CDR3 for alpha chain variable domain of TCR clone 384513 (TRAV13-2, TRAJ11)
CAETGNSGYSTLTF

SEQ ID NO: 769026 - protein, 11 aa, Homo sapiens
  CDR3 for beta chain variable domain of TCR clone 384513 (TRBV10-3, TRBJ2-7)
CAISEGLGQYF

SEQ ID NO: 769027 - protein, 12 aa, Homo sapiens
  CDR3 for alpha chain variable domain of TCR clone 384514 (TRAV21, TRAJ8)
CALNTGFQKLVF

SEQ ID NO: 769028 - protein, 12 aa, Homo sapiens
  CDR3 for beta chain variable domain of TCR clone 384514 (TRBV7-2, TRBJ2-3)
CASSLAGDTQYF

SEQ ID NO: 769029 - protein, 16 aa, Homo sapiens
  CDR3 for alpha chain variable domain of TCR clone 384515 (TRAV12-3, TRAJ53)
CAMSPGSGGSNYNMTF

SEQ ID NO: 769030 - protein, 13 aa, Homo sapiens
  CDR3 for beta chain variable domain of TCR clone 384515 (TRBV19, TRBJ1-2)
CASSVPGQDGYTF

SEQ ID NO: 769031 - protein, 15 aa, Homo sapiens
  CDR3 for alpha chain variable domain of TCR clone 384516 (TRAV2, TRAJ15)
CVVEDRNQAGTALIF

SEQ ID NO: 769032 - protein, 13 aa, Homo sapiens
  CDR3 for beta chain variable domain of TCR clone 384516 (TRBV10-2, TRBJ2-7)
CASSESGVYEQYF

SEQ ID NO: 769033 - protein, 14 aa, Homo sapiens
  CDR3 for alpha chain variable domain of TCR clone 384517 (TRAV12-1, TRAJ42)
CGVIYGGSQGNLIF

SEQ ID NO: 769034 - protein, 13 aa, Homo sapiens
  CDR3 for beta chain variable domain of TCR clone 384517 (TRBV18, TRBJ2-5)
CASSPPGKETQYF

SEQ ID NO: 769035 - protein, 12 aa, Homo sapiens
  CDR3 for alpha chain variable domain of TCR clone 384518 (TRAV12-2, TRAJ21)
CAVNRNFNTFYF

SEQ ID NO: 769036 - protein, 14 aa, Homo sapiens
  CDR3 for beta chain variable domain of TCR clone 384518 (TRBV12-4, TRBJ2-3)
CASSLSGATDTQYF

SEQ ID NO: 769037 - protein, 13 aa, Homo sapiens
  CDR3 for alpha chain variable domain of TCR clone 384519 (TRAV20, TRAJ17)
CAVLRDAGQKLTF

SEQ ID NO: 769038 - protein, 12 aa, Homo sapiens
  CDR3 for beta chain variable domain of TCR clone 384519 (TRBV5-7, TRBJ2-7)
CASSLGRYEQYF

SEQ ID NO: 769039 - protein, 13 aa, Homo sapiens
  CDR3 for alpha chain variable domain of TCR clone 384520 (TRAV20, TRAJ37)
CAGCSSNTGKLIF

SEQ ID NO: 769040 - protein, 14 aa, Homo sapiens
  CDR3 for beta chain variable domain of TCR clone 384520 (TRBV20-1, TRBJ2-5)
CSARGGRAGETQYF

SEQ ID NO: 769041 - protein, 12 aa, Homo sapiens
  CDR3 for alpha chain variable domain of TCR clone 384521 (TRAV16, TRAJ10)
CSRTGGGNKLPF

SEQ ID NO: 769042 - protein, 17 aa, Homo sapiens
  CDR3 for beta chain variable domain of TCR clone 384521 (TRBV29-1, TRBJ2-1)
CSVEGPQGKSSYNEQFF

SEQ ID NO: 769043 - protein, 14 aa, Homo sapiens
  CDR3 for alpha chain variable domain of TCR clone 384522 (TRAV1-2, TRAJ16)
CAVNRFTDGQKLLF

SEQ ID NO: 769044 - protein, 15 aa, Homo sapiens
  CDR3 for beta chain variable domain of TCR clone 384522 (TRBV7-9, TRBJ1-6)
CASSSPGRGNSTLHF

SEQ ID NO: 769045 - protein, 11 aa, Homo sapiens
  CDR3 for alpha chain variable domain of TCR clone 384523 (TRAV3, TRAJ21)
CAVGNLNKFYF

SEQ ID NO: 769046 - protein, 16 aa, Homo sapiens
  CDR3 for beta chain variable domain of TCR clone 384523 (TRBV19, TRBJ2-1)
CACSKAGPSSYNEQFF

SEQ ID NO: 769047 - protein, 16 aa, Homo sapiens
  CDR3 for alpha chain variable domain of TCR clone 384524 (TRAV12-3, TRAJ53)
CAMSVGSGGSNYKLTF

SEQ ID NO: 769048 - protein, 14 aa, Homo sapiens
  CDR3 for beta chain variable domain of TCR clone 384524 (TRBV11-2, TRBJ2-5)
CASSRTGGIETQYF

SEQ ID NO: 769049 - protein, 13 aa, Homo sapiens
  CDR3 for alpha chain variable domain of TCR clone 384525 (TRAV21, TRAJ27)
CASRPGNAGKSTF

SEQ ID NO: 769050 - protein, 14 aa, Homo sapiens
  CDR3 for beta chain variable domain of TCR clone 384525 (TRBV5-4, TRBJ1-1)
CASSLDRRRDEAFF

SEQ ID NO: 769051 - protein, 14 aa, Homo sapiens
  CDR3 for alpha chain variable domain of TCR clone 384526 (TRAV1-2, TRAJ15)
CAVRDRQAGTALIF

SEQ ID NO: 769052 - protein, 12 aa, Homo sapiens
  CDR3 for beta chain variable domain of TCR clone 384526 (TRBV7-2, TRBJ2-5)
CASSLYQETQYF

SEQ ID NO: 769053 - protein, 14 aa, Homo sapiens
  CDR3 for alpha chain variable domain of TCR clone 384527 (TRAV12-2, TRAJ13)
CAVKKTGGYQKVTF

SEQ ID NO: 769054 - protein, 14 aa, Homo sapiens
  CDR3 for beta chain variable domain of TCR clone 384527 (TRBV6-1, TRBJ1-3)
CASAQGGGGNTIYF

SEQ ID NO: 769055 - protein, 17 aa, Homo sapiens
  CDR3 for alpha chain variable domain of TCR clone 384528 (TRAV3, TRAJ38)
CAVRDCLNAGNNRKLIW

SEQ ID NO: 769056 - protein, 13 aa, Homo sapiens
  CDR3 for beta chain variable domain of TCR clone 384528 (TRBV12-4, TRBJ2-5)
CASSPGTEETQYF

SEQ ID NO: 769057 - protein, 11 aa, Homo sapiens
  CDR3 for alpha chain variable domain of TCR clone 384529 (TRAV21, TRAJ23)
CAPQRRGKLIF

SEQ ID NO: 769058 - protein, 16 aa, Homo sapiens
  CDR3 for beta chain variable domain of TCR clone 384529 (TRBV3-1, TRBJ1-6)
CASSQEFQGSYSPLHF

SEQ ID NO: 769059 - protein, 14 aa, Homo sapiens
  CDR3 for alpha chain variable domain of TCR clone 384530 (TRAV12-2, TRAJ13)
WAVKKTGGYQKVTF

SEQ ID NO: 769060 - protein, 14 aa, Homo sapiens
  CDR3 for beta chain variable domain of TCR clone 384530 (TRBV12-5, TRBJ2-5)
CASGSRTHQETQYF

SEQ ID NO: 769061 - protein, 15 aa, Homo sapiens
  CDR3 for alpha chain variable domain of TCR clone 384531 (TRAV26-1, TRAJ40)
CIVRAVPSGTYTYIF

SEQ ID NO: 769062 - protein, 15 aa, Homo sapiens
  CDR3 for beta chain variable domain of TCR clone 384531 (TRBV20-1, TRBJ2-7)
CSARDRVSGMDEQYF

SEQ ID NO: 769063 - protein, 15 aa, Homo sapiens
  CDR3 for alpha chain variable domain of TCR clone 384532 (TRAV17, TRAJ37)
CATDGGSSNTGKLIF

SEQ ID NO: 769064 - protein, 15 aa, Homo sapiens
  CDR3 for beta chain variable domain of TCR clone 384532 (TRBV28, TRBJ2-5)
CASSSGRTIQETQYF

SEQ ID NO: 769065 - protein, 13 aa, Homo sapiens
  CDR3 for alpha chain variable domain of TCR clone 384533 (TRAV16, TRAJ31)
CALSAHNNARHMF

SEQ ID NO: 769066 - protein, 17 aa, Homo sapiens
  CDR3 for beta chain variable domain of TCR clone 384533 (TRBV12-4, TRBJ2-1)
CASSPGLAGGRINEQFF

SEQ ID NO: 769067 - protein, 15 aa, Homo sapiens
  CDR3 for alpha chain variable domain of TCR clone 384534 (TRAV25, TRAJ53)
CAATGGGGSNYKLTF

SEQ ID NO: 769068 - protein, 13 aa, Homo sapiens
  CDR3 for beta chain variable domain of TCR clone 384534 (TRBV20-1, TRBJ1-1)
CSARGGGNTEAFF

SEQ ID NO: 769069 - protein, 13 aa, Homo sapiens
  CDR3 for alpha chain variable domain of TCR clone 384535 (TRAV8-3, TRAJ13)
CAVVPGTASKLTF

SEQ ID NO: 769070 - protein, 16 aa, Homo sapiens
  CDR3 for beta chain variable domain of TCR clone 384535 (TRBV6-1, TRBJ2-5)
RASSETLDRGAETQYF

SEQ ID NO: 769071 - protein, 11 aa, Homo sapiens
  CDR3 for alpha chain variable domain of TCR clone 384536 (TRAV2, TRAJ23)
CAVETRGKLIF

SEQ ID NO: 769072 - protein, 15 aa, Homo sapiens
  CDR3 for beta chain variable domain of TCR clone 384536 (TRBV7-2, TRBJ1-4)
CASSLGLRGREKLFF

SEQ ID NO: 769073 - protein, 15 aa, Homo sapiens
  CDR3 for alpha chain variable domain of TCR clone 384537 (TRAV9-2, TRAJ8)
CALRGLNTGFQKLVF

SEQ ID NO: 769074 - protein, 17 aa, Homo sapiens
  CDR3 for beta chain variable domain of TCR clone 384537 (TRBV20-1, TRBJ2-1)
CSASSSGLAGSYNEQFF

SEQ ID NO: 769075 - protein, 14 aa, Homo sapiens
  CDR3 for alpha chain variable domain of TCR clone 384538 (TRAV13-2, TRAJ32)
CAESLGGATNKLIF

SEQ ID NO: 769076 - protein, 15 aa, Homo sapiens
  CDR3 for beta chain variable domain of TCR clone 384538 (TRBV19, TRBJ1-1)
CASTSGQIQNTEAFF

SEQ ID NO: 769077 - protein, 14 aa, Homo sapiens
  CDR3 for alpha chain variable domain of TCR clone 384539 (TRAV20, TRAJ29)
CAVQAWVGNTPLVF

SEQ ID NO: 769078 - protein, 14 aa, Homo sapiens
  CDR3 for beta chain variable domain of TCR clone 384539 (TRBV19, TRBJ1-5)
CASGTEVYNQPQHF

SEQ ID NO: 769079 - protein, 11 aa, Homo sapiens
  CDR3 for alpha chain variable domain of TCR clone 384540 (TRAV8-3, TRAJ49)
CAVDTGNQFYF

SEQ ID NO: 769080 - protein, 12 aa, Homo sapiens
  CDR3 for beta chain variable domain of TCR clone 384540 (TRBV11-2, TRBJ2-7)
CASSPPADEQYF

SEQ ID NO: 769081 - protein, 11 aa, Homo sapiens
  CDR3 for alpha chain variable domain of TCR clone 384541 (TRAV12-2, TRAJ31)
CAVSNNARLMF

SEQ ID NO: 769082 - protein, 15 aa, Homo sapiens
  CDR3 for beta chain variable domain of TCR clone 384541 (TRBV20-1, TRBJ2-7)
CSARDRVSGMDEQYF

SEQ ID NO: 769083 - protein, 16 aa, Homo sapiens
  CDR3 for alpha chain variable domain of TCR clone 384542 (TRAV30, TRAJ24)
CGTEIVDADSWGKFQF

SEQ ID NO: 769084 - protein, 12 aa, Homo sapiens
  CDR3 for beta chain variable domain of TCR clone 384542 (TRBV19, TRBJ1-1)
CASAQGANEAFF

SEQ ID NO: 769085 - protein, 12 aa, Homo sapiens
  CDR3 for alpha chain variable domain of TCR clone 384543 (TRAV12-1, TRAJ50)
CVGRTSYAKVIF

SEQ ID NO: 769086 - protein, 12 aa, Homo sapiens
  CDR3 for beta chain variable domain of TCR clone 384543 (TRBV5-7, TRBJ1-1)
CASSLVGTEAFF

SEQ ID NO: 769087 - protein, 14 aa, Homo sapiens
  CDR3 for alpha chain variable domain of TCR clone 384544 (TRAV1-2, TRAJ8)
CAVREDTGFQKLVF

SEQ ID NO: 769088 - protein, 15 aa, Homo sapiens
  CDR3 for beta chain variable domain of TCR clone 384544 (TRBV20-1, TRBJ2-7)
CSARDRVSGMDEQYY

SEQ ID NO: 769089 - protein, 12 aa, Homo sapiens
  CDR3 for alpha chain variable domain of TCR clone 384545 (TRAV16, TRAJ27)
CALNTNAGKSTF

SEQ ID NO: 769090 - protein, 14 aa, Homo sapiens
  CDR3 for beta chain variable domain of TCR clone 384545 (TRBV5-1, TRBJ2-7)
CASSLGVRAYEQYS

SEQ ID NO: 769091 - protein, 15 aa, Homo sapiens
  CDR3 for alpha chain variable domain of TCR clone 384546 (TRAV8-3, TRAJ45)
CASSYSGGGADGLTF

SEQ ID NO: 769092 - protein, 13 aa, Homo sapiens
  CDR3 for beta chain variable domain of TCR clone 384546 (TRBV10-2, TRBJ2-7)
CASGASGGYEQYF

SEQ ID NO: 769093 - protein, 11 aa, Homo sapiens
  CDR3 for alpha chain variable domain of TCR clone 384547 (TRAV12-3, TRAJ26)
CAMSHGQNFVF

SEQ ID NO: 769094 - protein, 15 aa, Homo sapiens
  CDR3 for beta chain variable domain of TCR clone 384547 (TRBV5-5, TRBJ2-5)
CASSLGQIFQETQYF

SEQ ID NO: 769095 - protein, 12 aa, Homo sapiens
  CDR3 for alpha chain variable domain of TCR clone 384548 (TRAV12-3, TRAJ17)
CAMTLTGNKLTF

SEQ ID NO: 769096 - protein, 14 aa, Homo sapiens
  CDR3 for beta chain variable domain of TCR clone 384548 (TRBV2, TRBJ2-5)
CASTWGRAQETQYF

SEQ ID NO: 769097 - protein, 14 aa, Homo sapiens
  CDR3 for alpha chain variable domain of TCR clone 384549 (TRAV17, TRAJ54)
CATDANQGAQKLVV

SEQ ID NO: 769098 - protein, 14 aa, Homo sapiens
  CDR3 for beta chain variable domain of TCR clone 384549 (TRBV25-1, TRBJ1-1)
CASTHLGGNTEAFF

SEQ ID NO: 769099 - protein, 12 aa, Homo sapiens
  CDR3 for alpha chain variable domain of TCR clone 384550 (TRAV17, TRAJ12)
FATLRSSYKLIF

SEQ ID NO: 769100 - protein, 14 aa, Homo sapiens
  CDR3 for beta chain variable domain of TCR clone 384550 (TRBV19, TRBJ2-1)
CARGARSFQWEQFF

SEQ ID NO: 769101 - protein, 19 aa, Homo sapiens
  CDR3 for alpha chain variable domain of TCR clone 384551 (TRAV29/DV5, TRAJ49)
CSVPLCSKLTVDTGNQFYF

SEQ ID NO: 769102 - protein, 16 aa, Homo sapiens
  CDR3 for beta chain variable domain of TCR clone 384551 (TRBV7-9, TRBJ1-2)
CASSLGFSSGEDGYTF

SEQ ID NO: 769103 - protein, 12 aa, Homo sapiens
  CDR3 for alpha chain variable domain of TCR clone 384552 (TRAV17, TRAJ57)
CATDGGSEKLVF

SEQ ID NO: 769104 - protein, 12 aa, Homo sapiens
  CDR3 for beta chain variable domain of TCR clone 384552 (TRBV29-1, TRBJ2-2)
CSVDKYAGELFF

SEQ ID NO: 769105 - protein, 15 aa, Homo sapiens
  CDR3 for alpha chain variable domain of TCR clone 384553 (TRAV27, TRAJ56)
CAGRDGTGANSKLTF

SEQ ID NO: 769106 - protein, 17 aa, Homo sapiens
  CDR3 for beta chain variable domain of TCR clone 384553 (TRBV24-1, TRBJ2-1)
CATSDVSTSGTYNEQFF

SEQ ID NO: 769107 - protein, 12 aa, Homo sapiens
  CDR3 for alpha chain variable domain of TCR clone 384554 (TRAV21, TRAJ13)
PGPSGGYKKVTF

SEQ ID NO: 769108 - protein, 13 aa, Homo sapiens
  CDR3 for beta chain variable domain of TCR clone 384554 (TRBV7-9, TRBJ1-2)
CASSLKQNYGYTF

SEQ ID NO: 769109 - protein, 15 aa, Homo sapiens
  CDR3 for alpha chain variable domain of TCR clone 384555 (TRAV12-1, TRAJ48)
CVVNKVNFGNEKLTF

SEQ ID NO: 769110 - protein, 18 aa, Homo sapiens
  CDR3 for beta chain variable domain of TCR clone 384555 (TRBV11-2, TRBJ1-3)
CASTPRVTTLGSGNTIYF

SEQ ID NO: 769111 - protein, 16 aa, Homo sapiens
  CDR3 for alpha chain variable domain of TCR clone 384556 (TRAV35, TRAJ28)
CAGYLYSGAGSYQLTF

SEQ ID NO: 769112 - protein, 16 aa, Homo sapiens
  CDR3 for beta chain variable domain of TCR clone 384556 (TRBV5-1, TRBJ2-1)
CASSPGLAGPQNEQFF

SEQ ID NO: 769113 - protein, 14 aa, Homo sapiens
  CDR3 for alpha chain variable domain of TCR clone 384557 (TRAV29/DV5, TRAJ36)
CAARRKTGANNLFF

SEQ ID NO: 769114 - protein, 15 aa, Homo sapiens
  CDR3 for beta chain variable domain of TCR clone 384557 (TRBV27, TRBJ2-3)
CASSLGLAGPDTQYF

SEQ ID NO: 769115 - protein, 15 aa, Homo sapiens
  CDR3 for alpha chain variable domain of TCR clone 384558 (TRAV36/DV7, TRAJ21)
CALKFYFGSGTKLSV

SEQ ID NO: 769116 - protein, 13 aa, Homo sapiens
  CDR3 for beta chain variable domain of TCR clone 384558 (TRBV11-3, TRBJ2-5)
CASSSGLQETQYF

SEQ ID NO: 769117 - protein, 15 aa, Homo sapiens
  CDR3 for alpha chain variable domain of TCR clone 384559 (TRAV3, TRAJ5)
CAVRDIDTGRRALTF

SEQ ID NO: 769118 - protein, 14 aa, Homo sapiens
  CDR3 for beta chain variable domain of TCR clone 384559 (TRBV25-1, TRBJ1-1)
CASTHLGGNTEAFF

SEQ ID NO: 769119 - protein, 13 aa, Homo sapiens
  CDR3 for alpha chain variable domain of TCR clone 384560 (TRAV13-1, TRAJ21)
CAARIYNFNKFYF

SEQ ID NO: 769120 - protein, 13 aa, Homo sapiens
  CDR3 for beta chain variable domain of TCR clone 384560 (TRBV27, TRBJ1-4)
CASSLMGDEKLFF

SEQ ID NO: 769121 - protein, 12 aa, Homo sapiens
  CDR3 for alpha chain variable domain of TCR clone 384561 (TRAV13-1, TRAJ21)
RAAKEGFNKFYF

SEQ ID NO: 769122 - protein, 20 aa, Homo sapiens
  CDR3 for beta chain variable domain of TCR clone 384561 (TRBV7-8, TRBJ2-2)
CASSHLFPGPTIHITGELFF

SEQ ID NO: 769123 - protein, 13 aa, Homo sapiens
  CDR3 for alpha chain variable domain of TCR clone 384562 (TRAV26-1, TRAJ39)
CIVRVVAGNMLTF

SEQ ID NO: 769124 - protein, 12 aa, Homo sapiens
  CDR3 for beta chain variable domain of TCR clone 384562 (TRBV11-2, TRBJ2-2)
CASSLGGGELFF

SEQ ID NO: 769125 - protein, 14 aa, Homo sapiens
  CDR3 for alpha chain variable domain of TCR clone 384563 (TRAV26-1, TRAJ22)
CIVRVYGSARQLTF

SEQ ID NO: 769126 - protein, 14 aa, Homo sapiens
  CDR3 for beta chain variable domain of TCR clone 384563 (TRBV3-1, TRBJ2-5)
CASSQAVRQETQYF

SEQ ID NO: 769127 - protein, 12 aa, Homo sapiens
  CDR3 for alpha chain variable domain of TCR clone 384564 (TRAV13-1, TRAJ21)
CAAKEGFNKFYL

SEQ ID NO: 769128 - protein, 13 aa, Homo sapiens
  CDR3 for beta chain variable domain of TCR clone 384564 (TRBV7-3, TRBJ1-1)
CASSQDWGAEAFF

SEQ ID NO: 769129 - protein, 13 aa, Homo sapiens
  CDR3 for alpha chain variable domain of TCR clone 384565 (TRAV27, TRAJ45)
CRSSEGGADGLTL

SEQ ID NO: 769130 - protein, 17 aa, Homo sapiens
  CDR3 for beta chain variable domain of TCR clone 384565 (TRBV11-2, TRBJ2-1)
CASSLYPPGVEYNEQFF

SEQ ID NO: 769131 - protein, 17 aa, Homo sapiens
  CDR3 for alpha chain variable domain of TCR clone 384566 (TRAV12-2, TRAJ22)
CAVNRIPFSGSARQLTF

SEQ ID NO: 769132 - protein, 12 aa, Homo sapiens
  CDR3 for beta chain variable domain of TCR clone 384566 (TRBV11-2, TRBJ2-1)
CASSPGNNEQFF

SEQ ID NO: 769133 - protein, 15 aa, Homo sapiens
  CDR3 for alpha chain variable domain of TCR clone 384567 (TRAV27, TRAJ38)
CAARRNAGDNRTLIW

SEQ ID NO: 769134 - protein, 11 aa, Homo sapiens
  CDR3 for beta chain variable domain of TCR clone 384567 (TRBV12-4, TRBJ2-2)
CASSSAGELFF

SEQ ID NO: 769135 - protein, 13 aa, Homo sapiens
  CDR3 for alpha chain variable domain of TCR clone 384568 (TRAV27, TRAJ41)
CAGEGNSGYALNF

SEQ ID NO: 769136 - protein, 14 aa, Homo sapiens
  CDR3 for beta chain variable domain of TCR clone 384568 (TRBV7-2, TRBJ2-2)
CASSSGGYTGELFF

SEQ ID NO: 769137 - protein, 12 aa, Homo sapiens
  CDR3 for alpha chain variable domain of TCR clone 384569 (TRAV12-3, TRAJ17)
RAMTLTGNKLTF

SEQ ID NO: 769138 - protein, 15 aa, Homo sapiens
  CDR3 for beta chain variable domain of TCR clone 384569 (TRBV20-1, TRBJ2-7)
CSARARVSGMDEQYF

SEQ ID NO: 769139 - protein, 15 aa, Homo sapiens
  CDR3 for alpha chain variable domain of TCR clone 384570 (TRAV27, TRAJ38)
CAARRNAVNNRKLFW

SEQ ID NO: 769140 - protein, 13 aa, Homo sapiens
  CDR3 for beta chain variable domain of TCR clone 384570 (TRBV12-5, TRBJ2-3)
CASGDRQSDTQYF

SEQ ID NO: 769141 - protein, 16 aa, Homo sapiens
  CDR3 for alpha chain variable domain of TCR clone 384571 (TRAV30, TRAJ24)
CGTEIVDADSWGKCQF

SEQ ID NO: 769142 - protein, 16 aa, Homo sapiens
  CDR3 for beta chain variable domain of TCR clone 384571 (TRBV2, TRBJ1-3)
CASSGGAGRSGNTIYF

SEQ ID NO: 769143 - protein, 14 aa, Homo sapiens
  CDR3 for alpha chain variable domain of TCR clone 384572 (TRAV20, TRAJ36)
CAVQAGTGANNLFF

SEQ ID NO: 769144 - protein, 15 aa, Homo sapiens
  CDR3 for beta chain variable domain of TCR clone 384572 (TRBV28, TRBJ2-3)
CASSQELGGTDTQYF

SEQ ID NO: 769145 - protein, 14 aa, Homo sapiens
  CDR3 for alpha chain variable domain of TCR clone 384573 (TRAV26-1, TRAJ38)
CIVVGAGNNRKLIW

SEQ ID NO: 769146 - protein, 12 aa, Homo sapiens
  CDR3 for beta chain variable domain of TCR clone 384573 (TRBV5-1, TRBJ2-5)
CASSWDEETQYF

SEQ ID NO: 769147 - protein, 14 aa, Homo sapiens
  CDR3 for alpha chain variable domain of TCR clone 384574 (TRAV9-2, TRAJ39)
CALYIYNAGNMLTF

SEQ ID NO: 769148 - protein, 13 aa, Homo sapiens
  CDR3 for beta chain variable domain of TCR clone 384574 (TRBV3-1, TRBJ2-3)
CASSQGGGDTQYF

SEQ ID NO: 769149 - protein, 12 aa, Homo sapiens
  CDR3 for alpha chain variable domain of TCR clone 384575 (TRAV16, TRAJ22)
CALEVSARQLTF

SEQ ID NO: 769150 - protein, 14 aa, Homo sapiens
  CDR3 for beta chain variable domain of TCR clone 384575 (TRBV11-2, TRBJ2-3)
CASSSIESTDTQYF

SEQ ID NO: 769151 - protein, 11 aa, Homo sapiens
  CDR3 for alpha chain variable domain of TCR clone 384576 (TRAV2, TRAJ13)
CASGGYQNVTF

SEQ ID NO: 769152 - protein, 16 aa, Homo sapiens
  CDR3 for beta chain variable domain of TCR clone 384576 (TRBV6-1, TRBJ2-5)
CASSETLDRGPETQYF

SEQ ID NO: 769153 - protein, 12 aa, Homo sapiens
  CDR3 for alpha chain variable domain of TCR clone 384577 (TRAV17, TRAJ30)
CVPERRDDKIIF

SEQ ID NO: 769154 - protein, 14 aa, Homo sapiens
  CDR3 for beta chain variable domain of TCR clone 384577 (TRBV7-7, TRBJ2-2)
CGSSRDRSTGELFF

SEQ ID NO: 769155 - protein, 12 aa, Homo sapiens
  CDR3 for alpha chain variable domain of TCR clone 384578 (TRAV27, TRAJ33)
CAGDGSNDQLIW

SEQ ID NO: 769156 - protein, 15 aa, Homo sapiens
  CDR3 for beta chain variable domain of TCR clone 384578 (TRBV6-5, TRBJ2-7)
CASSYSTSGNYEQYF

SEQ ID NO: 769157 - protein, 11 aa, Homo sapiens
  CDR3 for alpha chain variable domain of TCR clone 384579 (TRAV17, TRAJ31)
CATDRTARLMF

SEQ ID NO: 769158 - protein, 14 aa, Homo sapiens
  CDR3 for beta chain variable domain of TCR clone 384579 (TRBV4-2, TRBJ2-3)
CASSQERGTDTLYF

SEQ ID NO: 769159 - protein, 12 aa, Homo sapiens
  CDR3 for alpha chain variable domain of TCR clone 384580 (TRAV16, TRAJ53)
CALRGSNYKLTF

SEQ ID NO: 769160 - protein, 13 aa, Homo sapiens
  CDR3 for beta chain variable domain of TCR clone 384580 (TRBV28, TRBJ2-7)
CASSLFRGDEQYF

SEQ ID NO: 769161 - protein, 12 aa, Homo sapiens
  CDR3 for alpha chain variable domain of TCR clone 384581 (TRAV12-2, TRAJ10)
WGVTGGGNKLNF

SEQ ID NO: 769162 - protein, 14 aa, Homo sapiens
  CDR3 for beta chain variable domain of TCR clone 384581 (TRBV20-1, TRBJ2-1)
CSAQIGGSANEQFF

SEQ ID NO: 769163 - protein, 12 aa, Homo sapiens
  CDR3 for alpha chain variable domain of TCR clone 384582 (TRAV12-2, TRAJ4)
GWPEGGYNKLIF

SEQ ID NO: 769164 - protein, 16 aa, Homo sapiens
  CDR3 for beta chain variable domain of TCR clone 384582 (TRBV6-1, TRBJ2-5)
CASSETLDRGAETKYF

SEQ ID NO: 769165 - protein, 14 aa, Homo sapiens
  CDR3 for alpha chain variable domain of TCR clone 384583 (TRAV3, TRAJ8)
CAVSLNTGFQKLVF

SEQ ID NO: 769166 - protein, 16 aa, Homo sapiens
  CDR3 for beta chain variable domain of TCR clone 384583 (TRBV12-5, TRBJ2-5)
CASGPRASGNQETQYL

SEQ ID NO: 769167 - protein, 13 aa, Homo sapiens
  CDR3 for alpha chain variable domain of TCR clone 384584 (TRAV3, TRAJ10)
CAVRDMRAGRKQT

SEQ ID NO: 769168 - protein, 13 aa, Homo sapiens
  CDR3 for beta chain variable domain of TCR clone 384584 (TRBV7-9, TRBJ2-7)
CASSAGLQYEQYF

SEQ ID NO: 769169 - protein, 12 aa, Homo sapiens
  CDR3 for alpha chain variable domain of TCR clone 384585 (TRAV12-3, TRAJ17)
CAMTLTGNKLTF

SEQ ID NO: 769170 - protein, 15 aa, Homo sapiens
  CDR3 for beta chain variable domain of TCR clone 384585 (TRBV7-9, TRBJ2-2)
CASSPETGAGGELFF

SEQ ID NO: 769171 - protein, 13 aa, Homo sapiens
  CDR3 for alpha chain variable domain of TCR clone 384586 (TRAV35, TRAJ57)
CAGFQGGSEKLVF

SEQ ID NO: 769172 - protein, 14 aa, Homo sapiens
  CDR3 for beta chain variable domain of TCR clone 384586 (TRBV25-1, TRBJ1-1)
CASTHLGGNTEAFF

SEQ ID NO: 769173 - protein, 15 aa, Homo sapiens
  CDR3 for alpha chain variable domain of TCR clone 384587 (TRAV3, TRAJ5)
CAVRDLDTGRRALNF

SEQ ID NO: 769174 - protein, 14 aa, Homo sapiens
  CDR3 for beta chain variable domain of TCR clone 384587 (TRBV25-1, TRBJ1-1)
CASTHLGGNTEAFF

SEQ ID NO: 769175 - protein, 16 aa, Homo sapiens
  CDR3 for alpha chain variable domain of TCR clone 384588 (TRAV19, TRAJ17)
CAPWGQIKAAGSKLTF

SEQ ID NO: 769176 - protein, 16 aa, Homo sapiens
  CDR3 for beta chain variable domain of TCR clone 384588 (TRBV7-3, TRBJ2-1)
CASSLSSGRGAKEQFF

SEQ ID NO: 769177 - protein, 16 aa, Homo sapiens
  CDR3 for alpha chain variable domain of TCR clone 384589 (TRAV21, TRAJ37)
CAVRPRGSSNTGKLIF

SEQ ID NO: 769178 - protein, 15 aa, Homo sapiens
  CDR3 for beta chain variable domain of TCR clone 384589 (TRBV19, TRBJ2-3)
CASSIAGGSTDTQYF

SEQ ID NO: 769179 - protein, 15 aa, Homo sapiens
  CDR3 for alpha chain variable domain of TCR clone 384590 (TRAV12-2, TRAJ53)
CAVNGGGGSNYKLTF

SEQ ID NO: 769180 - protein, 14 aa, Homo sapiens
  CDR3 for beta chain variable domain of TCR clone 384590 (TRBV20-1, TRBJ2-2)
CSAPDTANTGELFF

SEQ ID NO: 769181 - protein, 14 aa, Homo sapiens
  CDR3 for alpha chain variable domain of TCR clone 384591 (TRAV16, TRAJ17)
CAPRIKAAGNKLTC

SEQ ID NO: 769182 - protein, 13 aa, Homo sapiens
  CDR3 for beta chain variable domain of TCR clone 384591 (TRBV14, TRBJ2-7)
CASSQDRRYEQYF

SEQ ID NO: 769183 - protein, 13 aa, Homo sapiens
  CDR3 for alpha chain variable domain of TCR clone 384592 (TRAV23/DV6, TRAJ22)
CASRAGSARQLTF

SEQ ID NO: 769184 - protein, 14 aa, Homo sapiens
  CDR3 for beta chain variable domain of TCR clone 384592 (TRBV7-2, TRBJ2-7)
CASSPKTSFYEQYY

SEQ ID NO: 769185 - protein, 13 aa, Homo sapiens
  CDR3 for alpha chain variable domain of TCR clone 384593 (TRAV3, TRAJ21)
CAVIPPPFNKFYF

SEQ ID NO: 769186 - protein, 14 aa, Homo sapiens
  CDR3 for beta chain variable domain of TCR clone 384593 (TRBV18, TRBJ2-7)
CASSPRGGAYEQYF

SEQ ID NO: 769187 - protein, 11 aa, Homo sapiens
  CDR3 for alpha chain variable domain of TCR clone 384594 (TRAV1-1, TRAJ20)
CAVFNDYKLSF

SEQ ID NO: 769188 - protein, 12 aa, Homo sapiens
  CDR3 for beta chain variable domain of TCR clone 384594 (TRBV7-3, TRBJ2-1)
CASSFINNEQFF

SEQ ID NO: 769189 - protein, 14 aa, Homo sapiens
  CDR3 for alpha chain variable domain of TCR clone 384595 (TRAV20, TRAJ32)
CCGRYGGATNKLIF

SEQ ID NO: 769190 - protein, 14 aa, Homo sapiens
  CDR3 for beta chain variable domain of TCR clone 384595 (TRBV25-1, TRBJ1-1)
CASTHLGGNTEAFF

SEQ ID NO: 769191 - protein, 15 aa, Homo sapiens
  CDR3 for alpha chain variable domain of TCR clone 384596 (TRAV26-1, TRAJ29)
CIVRVEGSGNTTLVF

SEQ ID NO: 769192 - protein, 13 aa, Homo sapiens
  CDR3 for beta chain variable domain of TCR clone 384596 (TRBV7-9, TRBJ1-2)
CACSLKQNYGYTF

SEQ ID NO: 769193 - protein, 15 aa, Homo sapiens
  CDR3 for alpha chain variable domain of TCR clone 384597 (TRAV26-1, TRAJ22)
CIVRVSFWFCKATDL

SEQ ID NO: 769194 - protein, 13 aa, Homo sapiens
  CDR3 for beta chain variable domain of TCR clone 384597 (TRBV24-1, TRBJ1-4)
CDTNNGRSEKLFF

SEQ ID NO: 769195 - protein, 14 aa, Homo sapiens
  CDR3 for alpha chain variable domain of TCR clone 384598 (TRAV26-1, TRAJ49)
CIVRLTNTGNQFYF

SEQ ID NO: 769196 - protein, 13 aa, Homo sapiens
  CDR3 for beta chain variable domain of TCR clone 384598 (TRBV10-3, TRBJ1-2)
CAISERDSYGYTF

SEQ ID NO: 769197 - protein, 15 aa, Homo sapiens
  CDR3 for alpha chain variable domain of TCR clone 384599 (TRAV8-3, TRAJ27)
CAVGPSKTNAGKSTF

SEQ ID NO: 769198 - protein, 13 aa, Homo sapiens
  CDR3 for beta chain variable domain of TCR clone 384599 (TRBV11-2, TRBJ2-5)
CASSSTGEETQYF

SEQ ID NO: 769199 - protein, 14 aa, Homo sapiens
  CDR3 for alpha chain variable domain of TCR clone 384600 (TRAV13-1, TRAJ5)
CAASGGTSRRALTF

SEQ ID NO: 769200 - protein, 16 aa, Homo sapiens
  CDR3 for beta chain variable domain of TCR clone 384600 (TRBV7-3, TRBJ2-2)
CASSLKRGTLSGELFF

SEQ ID NO: 769201 - protein, 11 aa, Homo sapiens
  CDR3 for alpha chain variable domain of TCR clone 384601 (TRAV1-2, TRAJ11)
CAVRGYSTLTF

SEQ ID NO: 769202 - protein, 18 aa, Homo sapiens
  CDR3 for beta chain variable domain of TCR clone 384601 (TRBV4-1, TRBJ2-3)
CASSHQLAGGRSTDTQYF

SEQ ID NO: 769203 - protein, 14 aa, Homo sapiens
  CDR3 for alpha chain variable domain of TCR clone 384602 (TRAV29/DV5, TRAJ34)
CAASASGNTDKLIF

SEQ ID NO: 769204 - protein, 14 aa, Homo sapiens
  CDR3 for beta chain variable domain of TCR clone 384602 (TRBV11-2, TRBJ2-5)
CASSRTGGIETQYF

SEQ ID NO: 769205 - protein, 13 aa, Homo sapiens
  CDR3 for alpha chain variable domain of TCR clone 384603 (TRAV12-3, TRAJ49)
CAMRRNTGNQFYF

SEQ ID NO: 769206 - protein, 16 aa, Homo sapiens
  CDR3 for beta chain variable domain of TCR clone 384603 (TRBV5-8, TRBJ2-2)
CASSLINPGGAGELFF

SEQ ID NO: 769207 - protein, 14 aa, Homo sapiens
  CDR3 for alpha chain variable domain of TCR clone 384604 (TRAV12-2, TRAJ24)
CAVIPADNWGKLQF

SEQ ID NO: 769208 - protein, 16 aa, Homo sapiens
  CDR3 for beta chain variable domain of TCR clone 384604 (TRBV6-4, TRBJ2-3)
APSEGGRAWGTDTQYF

SEQ ID NO: 769209 - protein, 14 aa, Homo sapiens
  CDR3 for alpha chain variable domain of TCR clone 384605 (TRAV1-2, TRAJ8)
CAVREDTGFQKLVV

SEQ ID NO: 769210 - protein, 15 aa, Homo sapiens
  CDR3 for beta chain variable domain of TCR clone 384605 (TRBV27, TRBJ2-1)
CASSNGGGSSNEQFF

SEQ ID NO: 769211 - protein, 14 aa, Homo sapiens
  CDR3 for alpha chain variable domain of TCR clone 384606 (TRAV2, TRAJ9)
CAVEDRSGGFKTIF

SEQ ID NO: 769212 - protein, 13 aa, Homo sapiens
  CDR3 for beta chain variable domain of TCR clone 384606 (TRBV19, TRBJ1-2)
CASSVPGQDGDTF

SEQ ID NO: 769213 - protein, 12 aa, Homo sapiens
  CDR3 for alpha chain variable domain of TCR clone 384607 (TRAV36/DV7, TRAJ37)
CACYGNTGKLIF

SEQ ID NO: 769214 - protein, 13 aa, Homo sapiens
  CDR3 for beta chain variable domain of TCR clone 384607 (TRBV10-3, TRBJ2-7)
CPSKLAVNYEQYF

SEQ ID NO: 769215 - protein, 11 aa, Homo sapiens
  CDR3 for alpha chain variable domain of TCR clone 384608 (TRAV2, TRAJ33)
CAVDSNYQLIW

SEQ ID NO: 769216 - protein, 13 aa, Homo sapiens
  CDR3 for beta chain variable domain of TCR clone 384608 (TRBV7-2, TRBJ2-4)
CASSREHANTQYF

SEQ ID NO: 769217 - protein, 15 aa, Homo sapiens
  CDR3 for alpha chain variable domain of TCR clone 384609 (TRAV26-1, TRAJ44)
CIVRANTGTASQLTF

SEQ ID NO: 769218 - protein, 15 aa, Homo sapiens
  CDR3 for beta chain variable domain of TCR clone 384609 (TRBV15, TRBJ1-5)
CATSREQGGNQPQHF

SEQ ID NO: 769219 - protein, 12 aa, Homo sapiens
  CDR3 for alpha chain variable domain of TCR clone 384610 (TRAV1-1, TRAJ8)
CAAGTGFQKLVF

SEQ ID NO: 769220 - protein, 16 aa, Homo sapiens
  CDR3 for beta chain variable domain of TCR clone 384610 (TRBV12-5, TRBJ2-5)
CASGPRTSGNQETQYF

SEQ ID NO: 769221 - protein, 16 aa, Homo sapiens
  CDR3 for alpha chain variable domain of TCR clone 384611 (TRAV30, TRAJ24)
CGTEIVGADSWGKFQF

SEQ ID NO: 769222 - protein, 15 aa, Homo sapiens
  CDR3 for beta chain variable domain of TCR clone 384611 (TRBV7-9, TRBJ1-4)
CASSARAGGNEKLFF

SEQ ID NO: 769223 - protein, 16 aa, Homo sapiens
  CDR3 for alpha chain variable domain of TCR clone 384612 (TRAV4, TRAJ22)
CLVGDLYSGSARQLTF

SEQ ID NO: 769224 - protein, 16 aa, Homo sapiens
  CDR3 for beta chain variable domain of TCR clone 384612 (TRBV7-9, TRBJ2-1)
RASSNVAGGSYNEQFF

SEQ ID NO: 769225 - protein, 14 aa, Homo sapiens
  CDR3 for alpha chain variable domain of TCR clone 384613 (TRAV26-1, TRAJ54)
CIVRRTQGAQKLVF

SEQ ID NO: 769226 - protein, 14 aa, Homo sapiens
  CDR3 for beta chain variable domain of TCR clone 384613 (TRBV5-1, TRBJ1-1)
CASSLAVGSGEAFF

SEQ ID NO: 769227 - protein, 14 aa, Homo sapiens
  CDR3 for alpha chain variable domain of TCR clone 384614 (TRAV8-3, TRAJ31)
CAVGRGLNNARLMF

SEQ ID NO: 769228 - protein, 15 aa, Homo sapiens
  CDR3 for beta chain variable domain of TCR clone 384614 (TRBV7-2, TRBJ2-2)
CASSFAGGLTGELFF

SEQ ID NO: 769229 - protein, 13 aa, Homo sapiens
  CDR3 for alpha chain variable domain of TCR clone 384615 (TRAV27, TRAJ45)
CRSSGGGADGLTF

SEQ ID NO: 769230 - protein, 15 aa, Homo sapiens
  CDR3 for beta chain variable domain of TCR clone 384615 (TRBV6-3, TRBJ2-2)
CASSFLATLTGELFF

SEQ ID NO: 769231 - protein, 11 aa, Homo sapiens
  CDR3 for alpha chain variable domain of TCR clone 384616 (TRAV2, TRAJ21)
CAVFNSNKFYF

SEQ ID NO: 769232 - protein, 17 aa, Homo sapiens
  CDR3 for beta chain variable domain of TCR clone 384616 (TRBV20-1, TRBJ2-1)
CSASSSGLAGSYNEQFF

SEQ ID NO: 769233 - protein, 13 aa, Homo sapiens
  CDR3 for alpha chain variable domain of TCR clone 384617 (TRAV13-1, TRAJ27)
CAASIHQCRQINL

SEQ ID NO: 769234 - protein, 14 aa, Homo sapiens
  CDR3 for beta chain variable domain of TCR clone 384617 (TRBV28, TRBJ2-5)
CASSRLACGETQYF

SEQ ID NO: 769235 - protein, 15 aa, Homo sapiens
  CDR3 for alpha chain variable domain of TCR clone 384618 (TRAV26-1, TRAJ29)
CIVRVEGSGNTPLVF

SEQ ID NO: 769236 - protein, 11 aa, Homo sapiens
  CDR3 for beta chain variable domain of TCR clone 384618 (TRBV12-4, TRBJ2-2)
CASSSAGELFF

SEQ ID NO: 769237 - protein, 10 aa, Homo sapiens
  CDR3 for alpha chain variable domain of TCR clone 384619 (TRAV23/DV6, TRAJ57)
CAASSTLSQG

SEQ ID NO: 769238 - protein, 14 aa, Homo sapiens
  CDR3 for beta chain variable domain of TCR clone 384619 (TRBV11-2, TRBJ1-5)
CASSLDRGRQPQHF

SEQ ID NO: 769239 - protein, 13 aa, Homo sapiens
  CDR3 for alpha chain variable domain of TCR clone 384620 (TRAV9-2, TRAJ23)
CALNGDQGGKLIF

SEQ ID NO: 769240 - protein, 13 aa, Homo sapiens
  CDR3 for beta chain variable domain of TCR clone 384620 (TRBV20-1, TRBJ2-5)
CSARRGTGATQYF

SEQ ID NO: 769241 - protein, 17 aa, Homo sapiens
  CDR3 for alpha chain variable domain of TCR clone 384621 (TRAV26-1, TRAJ53)
CIVRVDDSGGSNYKLTF

SEQ ID NO: 769242 - protein, 17 aa, Homo sapiens
  CDR3 for beta chain variable domain of TCR clone 384621 (TRBV5-4, TRBJ2-3)
CISVPAVLTASTDTQYF

SEQ ID NO: 769243 - protein, 14 aa, Homo sapiens
  CDR3 for alpha chain variable domain of TCR clone 384622 (TRAV26-1, TRAJ38)
CIADNAGNNRKLIW

SEQ ID NO: 769244 - protein, 13 aa, Homo sapiens
  CDR3 for beta chain variable domain of TCR clone 384622 (TRBV5-1, TRBJ2-4)
CASSLEGGMNQYF

SEQ ID NO: 769245 - protein, 12 aa, Homo sapiens
  CDR3 for alpha chain variable domain of TCR clone 384623 (TRAV1-2, TRAJ17)
CAVRAAGNKLTF

SEQ ID NO: 769246 - protein, 16 aa, Homo sapiens
  CDR3 for beta chain variable domain of TCR clone 384623 (TRBV20-1, TRBJ2-1)
CSARDLKQGMNNEQFF

SEQ ID NO: 769247 - protein, 15 aa, Homo sapiens
  CDR3 for alpha chain variable domain of TCR clone 384624 (TRAV12-1, TRAJ44)
CVVFVNTGTASKLTF

SEQ ID NO: 769248 - protein, 15 aa, Homo sapiens
  CDR3 for beta chain variable domain of TCR clone 384624 (TRBV5-4, TRBJ1-3)
CASSSGGRSGNTIYF

SEQ ID NO: 769249 - protein, 14 aa, Homo sapiens
  CDR3 for alpha chain variable domain of TCR clone 384625 (TRAV12-2, TRAJ40)
CAVKIPSGTYKYIF

SEQ ID NO: 769250 - protein, 13 aa, Homo sapiens
  CDR3 for beta chain variable domain of TCR clone 384625 (TRBV18, TRBJ2-7)
CASQPGGGYEQYF

SEQ ID NO: 769251 - protein, 16 aa, Homo sapiens
  CDR3 for alpha chain variable domain of TCR clone 384626 (TRAV30, TRAJ24)
CGTEIVDADSWGKFQF

SEQ ID NO: 769252 - protein, 14 aa, Homo sapiens
  CDR3 for beta chain variable domain of TCR clone 384626 (TRBV19, TRBJ1-6)
CASSSGTGYSPLHF

SEQ ID NO: 769253 - protein, 11 aa, Homo sapiens
  CDR3 for alpha chain variable domain of TCR clone 384627 (TRAV35, TRAJ30)
CAPGWDDKIIF

SEQ ID NO: 769254 - protein, 14 aa, Homo sapiens
  CDR3 for beta chain variable domain of TCR clone 384627 (TRBV7-6, TRBJ2-1)
CASSLGGGADEQFF

SEQ ID NO: 769255 - protein, 15 aa, Homo sapiens
  CDR3 for alpha chain variable domain of TCR clone 384628 (TRAV2, TRAJ15)
CAVEARGQAETALIF

SEQ ID NO: 769256 - protein, 13 aa, Homo sapiens
  CDR3 for beta chain variable domain of TCR clone 384628 (TRBV10-2, TRBJ2-7)
CASGASGGYEQYF

SEQ ID NO: 769257 - protein, 15 aa, Homo sapiens
  CDR3 for alpha chain variable domain of TCR clone 384629 (TRAV4, TRAJ15)
CLVGDIRRAGTALIF

SEQ ID NO: 769258 - protein, 17 aa, Homo sapiens
  CDR3 for beta chain variable domain of TCR clone 384629 (TRBV7-8, TRBJ2-6)
CASSAGTGGAGANVLTF

SEQ ID NO: 769259 - protein, 13 aa, Homo sapiens
  CDR3 for alpha chain variable domain of TCR clone 384630 (TRAV13-1, TRAJ10)
CAALEGGGNKLTF

SEQ ID NO: 769260 - protein, 13 aa, Homo sapiens
  CDR3 for beta chain variable domain of TCR clone 384630 (TRBV7-9, TRBJ1-2)
CASSLKQNYGYSF

SEQ ID NO: 769261 - protein, 13 aa, Homo sapiens
  CDR3 for alpha chain variable domain of TCR clone 384631 (TRAV13-1, TRAJ4)
CAASIGGYNKLIF

SEQ ID NO: 769262 - protein, 16 aa, Homo sapiens
  CDR3 for beta chain variable domain of TCR clone 384631 (TRBV20-1, TRBJ2-1)
CSAPGLAGSYGDEQFF

SEQ ID NO: 769263 - protein, 14 aa, Homo sapiens
  CDR3 for alpha chain variable domain of TCR clone 384632 (TRAV13-1, TRAJ48)
CAASRSFGNEKLTF

SEQ ID NO: 769264 - protein, 13 aa, Homo sapiens
  CDR3 for beta chain variable domain of TCR clone 384632 (TRBV24-1, TRBJ2-2)
CATSDWSTGELFF

SEQ ID NO: 769265 - protein, 14 aa, Homo sapiens
  CDR3 for alpha chain variable domain of TCR clone 384633 (TRAV12-3, TRAJ47)
CAMSVREYGNKLVF

SEQ ID NO: 769266 - protein, 12 aa, Homo sapiens
  CDR3 for beta chain variable domain of TCR clone 384633 (TRBV7-8, TRBJ2-7)
CASSLGDREQYF

SEQ ID NO: 769267 - protein, 16 aa, Homo sapiens
  CDR3 for alpha chain variable domain of TCR clone 384634 (TRAV30, TRAJ24)
CGTEIVDADSWGKFQF

SEQ ID NO: 769268 - protein, 16 aa, Homo sapiens
  CDR3 for beta chain variable domain of TCR clone 384634 (TRBV20-1, TRBJ2-6)
CSASSQGYDGANVLTF

SEQ ID NO: 769269 - protein, 13 aa, Homo sapiens
  CDR3 for alpha chain variable domain of TCR clone 384635 (TRAV26-1, TRAJ29)
CIVRRSGNTPLVC

SEQ ID NO: 769270 - protein, 14 aa, Homo sapiens
  CDR3 for beta chain variable domain of TCR clone 384635 (TRBV25-1, TRBJ1-1)
CASTHLGGNTEAFY

SEQ ID NO: 769271 - protein, 15 aa, Homo sapiens
  CDR3 for alpha chain variable domain of TCR clone 384636 (TRAV17, TRAJ45)
CATAYAGGGADGLTF

SEQ ID NO: 769272 - protein, 17 aa, Homo sapiens
  CDR3 for beta chain variable domain of TCR clone 384636 (TRBV5-1, TRBJ1-5)
CASSLVGREEGNQPQHF

SEQ ID NO: 769273 - protein, 15 aa, Homo sapiens
  CDR3 for alpha chain variable domain of TCR clone 384637 (TRAV12-3, TRAJ49)
CAMAVTPNTGNQFYF

SEQ ID NO: 769274 - protein, 14 aa, Homo sapiens
  CDR3 for beta chain variable domain of TCR clone 384637 (TRBV7-8, TRBJ2-3)
CASSLEAGTDTQYC

SEQ ID NO: 769275 - protein, 14 aa, Homo sapiens
  CDR3 for alpha chain variable domain of TCR clone 384638 (TRAV12-2, TRAJ9)
CAVNMEGGGFKTIF

SEQ ID NO: 769276 - protein, 13 aa, Homo sapiens
  CDR3 for beta chain variable domain of TCR clone 384638 (TRBV7-9, TRBJ1-2)
CASSLKQNYGYTF

SEQ ID NO: 769277 - protein, 16 aa, Homo sapiens
  CDR3 for alpha chain variable domain of TCR clone 384639 (TRAV3, TRAJ37)
CAVRPHGSVYTGKLIF

SEQ ID NO: 769278 - protein, 16 aa, Homo sapiens
  CDR3 for beta chain variable domain of TCR clone 384639 (TRBV7-3, TRBJ2-2)
CASSLKRGTLSGELFF

SEQ ID NO: 769279 - protein, 11 aa, Homo sapiens
  CDR3 for alpha chain variable domain of TCR clone 384640 (TRAV2, TRAJ21)
CAVFNFNKFYF

SEQ ID NO: 769280 - protein, 17 aa, Homo sapiens
  CDR3 for beta chain variable domain of TCR clone 384640 (TRBV19, TRBJ1-1)
CASSIAGRGLMNTEAFF

SEQ ID NO: 769281 - protein, 13 aa, Homo sapiens
  CDR3 for alpha chain variable domain of TCR clone 384641 (TRAV12-1, TRAJ26)
SATYLYYGQNFVF

SEQ ID NO: 769282 - protein, 15 aa, Homo sapiens
  CDR3 for beta chain variable domain of TCR clone 384641 (TRBV10-3, TRBJ2-3)
CAISLTSGGTDTQYF

SEQ ID NO: 769283 - protein, 17 aa, Homo sapiens
  CDR3 for alpha chain variable domain of TCR clone 384642 (TRAV12-1, TRAJ53)
CVAGAIVGGGSNYKLTF

SEQ ID NO: 769284 - protein, 14 aa, Homo sapiens
  CDR3 for beta chain variable domain of TCR clone 384642 (TRBV5-1, TRBJ1-4)
CASSLERTHEKLFF

SEQ ID NO: 769285 - protein, 12 aa, Homo sapiens
  CDR3 for alpha chain variable domain of TCR clone 384643 (TRAV1-2, TRAJ29)
CAVPSGNTPLVF

SEQ ID NO: 769286 - protein, 15 aa, Homo sapiens
  CDR3 for beta chain variable domain of TCR clone 384643 (TRBV11-2, TRBJ2-1)
CASSRNRGLMYEQFF

SEQ ID NO: 769287 - protein, 11 aa, Homo sapiens
  CDR3 for alpha chain variable domain of TCR clone 384644 (TRAV21, TRAJ39)
LLVNAGNMLTF

SEQ ID NO: 769288 - protein, 16 aa, Homo sapiens
  CDR3 for beta chain variable domain of TCR clone 384644 (TRBV9, TRBJ2-7)
CASSVGIGGGTYEQYF

SEQ ID NO: 769289 - protein, 12 aa, Homo sapiens
  CDR3 for alpha chain variable domain of TCR clone 384645 (TRAV12-3, TRAJ17)
CAMTLTGNKLTF

SEQ ID NO: 769290 - protein, 14 aa, Homo sapiens
  CDR3 for beta chain variable domain of TCR clone 384645 (TRBV20-1, TRBJ2-5)
CSAHRQGLWETQYF

SEQ ID NO: 769291 - protein, 14 aa, Homo sapiens
  CDR3 for alpha chain variable domain of TCR clone 384646 (TRAV27, TRAJ49)
CAGRPEGTGNQFYF

SEQ ID NO: 769292 - protein, 17 aa, Homo sapiens
  CDR3 for beta chain variable domain of TCR clone 384646 (TRBV10-2, TRBJ2-2)
CISAPAVKGLTPGSCFF

SEQ ID NO: 769293 - protein, 11 aa, Homo sapiens
  CDR3 for alpha chain variable domain of TCR clone 384647 (TRAV2, TRAJ33)
CAVESNYQLIW

SEQ ID NO: 769294 - protein, 14 aa, Homo sapiens
  CDR3 for beta chain variable domain of TCR clone 384647 (TRBV7-2, TRBJ2-7)
CASRSQGAAYEQYF

SEQ ID NO: 769295 - protein, 13 aa, Homo sapiens
  CDR3 for alpha chain variable domain of TCR clone 384648 (TRAV2, TRAJ26)
CAVVGNYGQNFVF

SEQ ID NO: 769296 - protein, 14 aa, Homo sapiens
  CDR3 for beta chain variable domain of TCR clone 384648 (TRBV25-1, TRBJ1-1)
CASTHLGGNTEAFF

SEQ ID NO: 769297 - protein, 16 aa, Homo sapiens
  CDR3 for alpha chain variable domain of TCR clone 384649 (TRAV12-3, TRAJ53)
CAKSPGSGGSNYKLTF

SEQ ID NO: 769298 - protein, 15 aa, Homo sapiens
  CDR3 for beta chain variable domain of TCR clone 384649 (TRBV25-1, TRBJ1-4)
CASSKRIATNEKLFF

SEQ ID NO: 769299 - protein, 15 aa, Homo sapiens
  CDR3 for alpha chain variable domain of TCR clone 384650 (TRAV26-1, TRAJ40)
CIVRVTTSGTYKYIF

SEQ ID NO: 769300 - protein, 15 aa, Homo sapiens
  CDR3 for beta chain variable domain of TCR clone 384650 (TRBV13, TRBJ1-5)
CASSFGQGGVQPQHF

SEQ ID NO: 769301 - protein, 14 aa, Homo sapiens
  CDR3 for alpha chain variable domain of TCR clone 384651 (TRAV35, TRAJ22)
CAGLRPGSARQLTF

SEQ ID NO: 769302 - protein, 15 aa, Homo sapiens
  CDR3 for beta chain variable domain of TCR clone 384651 (TRBV12-4, TRBJ2-5)
CASSPLTGLQETQDF

SEQ ID NO: 769303 - protein, 14 aa, Homo sapiens
  CDR3 for alpha chain variable domain of TCR clone 384652 (TRAV12-1, TRAJ17)
CVVNYKAAGNKLTF

SEQ ID NO: 769304 - protein, 15 aa, Homo sapiens
  CDR3 for beta chain variable domain of TCR clone 384652 (TRBV12-4, TRBJ1-5)
CQQPTGRGSNQPQHF

SEQ ID NO: 769305 - protein, 17 aa, Homo sapiens
  CDR3 for alpha chain variable domain of TCR clone 384653 (TRAV3, TRAJ42)
CAVRDRDYGGSQGNLFF

SEQ ID NO: 769306 - protein, 13 aa, Homo sapiens
  CDR3 for beta chain variable domain of TCR clone 384653 (TRBV20-1, TRBJ2-5)
CSARRGTGATQYF

SEQ ID NO: 769307 - protein, 16 aa, Homo sapiens
  CDR3 for alpha chain variable domain of TCR clone 384654 (TRAV26-1, TRAJ32)
CIVRTNYGGAINKPIF

SEQ ID NO: 769308 - protein, 14 aa, Homo sapiens
  CDR3 for beta chain variable domain of TCR clone 384654 (TRBV27, TRBJ1-1)
CASSLLSGLSEAFF

SEQ ID NO: 769309 - protein, 13 aa, Homo sapiens
  CDR3 for alpha chain variable domain of TCR clone 384655 (TRAV3, TRAJ21)
CAVREPDFNKFYF

SEQ ID NO: 769310 - protein, 12 aa, Homo sapiens
  CDR3 for beta chain variable domain of TCR clone 384655 (TRBV9, TRBJ2-1)
CQQSLWGNEQFF

SEQ ID NO: 769311 - protein, 16 aa, Homo sapiens
  CDR3 for alpha chain variable domain of TCR clone 384656 (TRAV26-1, TRAJ53)
CIVRVAMGGSNYILTF

SEQ ID NO: 769312 - protein, 12 aa, Homo sapiens
  CDR3 for beta chain variable domain of TCR clone 384656 (TRBV7-9, TRBJ1-5)
CASSPQGQPQHF

SEQ ID NO: 769313 - protein, 16 aa, Homo sapiens
  CDR3 for alpha chain variable domain of TCR clone 384657 (TRAV30, TRAJ24)
CGTEIVDADSWVKFQF

SEQ ID NO: 769314 - protein, 14 aa, Homo sapiens
  CDR3 for beta chain variable domain of TCR clone 384657 (TRBV12-5, TRBJ2-5)
CAGGSRTHQETQYF

SEQ ID NO: 769315 - protein, 13 aa, Homo sapiens
  CDR3 for alpha chain variable domain of TCR clone 384658 (TRAV13-2, TRAJ48)
CAEMDFGDEKLTF

SEQ ID NO: 769316 - protein, 15 aa, Homo sapiens
  CDR3 for beta chain variable domain of TCR clone 384658 (TRBV7-9, TRBJ1-6)
CASSSPGRRNSPLHF

SEQ ID NO: 769317 - protein, 13 aa, Homo sapiens
  CDR3 for alpha chain variable domain of TCR clone 384659 (TRAV12-2, TRAJ21)
CVVTLYNFNKFYF

SEQ ID NO: 769318 - protein, 20 aa, Homo sapiens
  CDR3 for beta chain variable domain of TCR clone 384659 (TRBV7-8, TRBJ2-1)
WASSLAHRLAGVRSYNEQFF

SEQ ID NO: 769319 - protein, 13 aa, Homo sapiens
  CDR3 for alpha chain variable domain of TCR clone 384660 (TRAV2, TRAJ47)
CAVDREYGNKLVF

SEQ ID NO: 769320 - protein, 17 aa, Homo sapiens
  CDR3 for beta chain variable domain of TCR clone 384660 (TRBV15, TRBJ1-5)
CATSRVKGIYSKQPQHF

SEQ ID NO: 769321 - protein, 15 aa, Homo sapiens
  CDR3 for alpha chain variable domain of TCR clone 384661 (TRAV12-2, TRAJ43)
CAFDMRFGAGTRLTV

SEQ ID NO: 769322 - protein, 15 aa, Homo sapiens
  CDR3 for beta chain variable domain of TCR clone 384661 (TRBV10-2, TRBJ1-4)
CASTPIDRGNEKLFF

SEQ ID NO: 769323 - protein, 17 aa, Homo sapiens
  CDR3 for alpha chain variable domain of TCR clone 384662 (TRAV3, TRAJ6)
CAERDGPRAGGSYIPTF

SEQ ID NO: 769324 - protein, 15 aa, Homo sapiens
  CDR3 for beta chain variable domain of TCR clone 384662 (TRBV7-9, TRBJ1-6)
CASSSPGRGNSPLHF

SEQ ID NO: 769325 - protein, 14 aa, Homo sapiens
  CDR3 for alpha chain variable domain of TCR clone 384663 (TRAV8-4, TRAJ23)
CAVSAPGSGGKLIF

SEQ ID NO: 769326 - protein, 21 aa, Homo sapiens
  CDR3 for beta chain variable domain of TCR clone 384663 (TRBV4-3, TRBJ2-3)
GPVSLRQQPDPLAGAVDTQYF

SEQ ID NO: 769327 - protein, 12 aa, Homo sapiens
  CDR3 for alpha chain variable domain of TCR clone 384664 (TRAV1-1, TRAJ39)
CAVPVVGNMLTF

SEQ ID NO: 769328 - protein, 16 aa, Homo sapiens
  CDR3 for beta chain variable domain of TCR clone 384664 (TRBV28, TRBJ2-7)
CASSLFFETGGPEQYF

SEQ ID NO: 769329 - protein, 15 aa, Homo sapiens
  CDR3 for alpha chain variable domain of TCR clone 384665 (TRAV13-1, TRAJ52)
SYYNAGGTSYGKLTF

SEQ ID NO: 769330 - protein, 15 aa, Homo sapiens
  CDR3 for beta chain variable domain of TCR clone 384665 (TRBV6-3, TRBJ2-7)
CASSSPGTVFYEQYF

SEQ ID NO: 769331 - protein, 11 aa, Homo sapiens
  CDR3 for alpha chain variable domain of TCR clone 384666 (TRAV3, TRAJ21)
CAVGNFNKFHF

SEQ ID NO: 769332 - protein, 16 aa, Homo sapiens
  CDR3 for beta chain variable domain of TCR clone 384666 (TRBV19, TRBJ2-1)
CASSEAGPSSYNEQFF

SEQ ID NO: 769333 - protein, 14 aa, Homo sapiens
  CDR3 for alpha chain variable domain of TCR clone 384667 (TRAV4, TRAJ6)
CLVGEAGGSYIPTF

SEQ ID NO: 769334 - protein, 16 aa, Homo sapiens
  CDR3 for beta chain variable domain of TCR clone 384667 (TRBV7-7, TRBJ2-1)
CASSLASGTSYNEQFF

SEQ ID NO: 769335 - protein, 14 aa, Homo sapiens
  CDR3 for alpha chain variable domain of TCR clone 384668 (TRAV2, TRAJ20)
CAVVDVVKDYKLSF

SEQ ID NO: 769336 - protein, 13 aa, Homo sapiens
  CDR3 for beta chain variable domain of TCR clone 384668 (TRBV19, TRBJ2-7)
CASRKAGGSEQYF

SEQ ID NO: 769337 - protein, 12 aa, Homo sapiens
  CDR3 for alpha chain variable domain of TCR clone 384669 (TRAV16, TRAJ9)
CALCSGGFKTIF

SEQ ID NO: 769338 - protein, 14 aa, Homo sapiens
  CDR3 for beta chain variable domain of TCR clone 384669 (TRBV7-9, TRBJ2-1)
CASSLAGPYNEQFF

SEQ ID NO: 769339 - protein, 14 aa, Homo sapiens
  CDR3 for alpha chain variable domain of TCR clone 384670 (TRAV23/DV6, TRAJ6)
CAASRAGGSYIPTF

SEQ ID NO: 769340 - protein, 17 aa, Homo sapiens
  CDR3 for beta chain variable domain of TCR clone 384670 (TRBV20-1, TRBJ2-1)
CSASASGIAGSYNEQFF

SEQ ID NO: 769341 - protein, 15 aa, Homo sapiens
  CDR3 for alpha chain variable domain of TCR clone 384671 (TRAV8-3, TRAJ11)
CAVGLLNSGYSTLTF

SEQ ID NO: 769342 - protein, 14 aa, Homo sapiens
  CDR3 for beta chain variable domain of TCR clone 384671 (TRBV12-5, TRBJ2-5)
CASGSRTHQEAQYF

SEQ ID NO: 769343 - protein, 14 aa, Homo sapiens
  CDR3 for alpha chain variable domain of TCR clone 384672 (TRAV8-3, TRAJ20)
CAVVGGSNDYKLSF

SEQ ID NO: 769344 - protein, 14 aa, Homo sapiens
  CDR3 for beta chain variable domain of TCR clone 384672 (TRBV24-1, TRBJ2-5)
CATSDALKGETQYF

SEQ ID NO: 769345 - protein, 14 aa, Homo sapiens
  CDR3 for alpha chain variable domain of TCR clone 384673 (TRAV12-2, TRAJ17)
CAVLFKAAGNKLTF

SEQ ID NO: 769346 - protein, 15 aa, Homo sapiens
  CDR3 for beta chain variable domain of TCR clone 384673 (TRBV11-2, TRBJ1-3)
CASSLDGTVGNTIYF

SEQ ID NO: 769347 - protein, 14 aa, Homo sapiens
  CDR3 for alpha chain variable domain of TCR clone 384674 (TRAV12-2, TRAJ44)
CAVNKAGTASKLTF

SEQ ID NO: 769348 - protein, 14 aa, Homo sapiens
  CDR3 for beta chain variable domain of TCR clone 384674 (TRBV19, TRBJ1-4)
CASKDWPGGLFLAV

SEQ ID NO: 769349 - protein, 18 aa, Homo sapiens
  CDR3 for alpha chain variable domain of TCR clone 384675 (TRAV38-2/DV8, TRAJ42)
CAYRSADLTGGSQGNLIF

SEQ ID NO: 769350 - protein, 12 aa, Homo sapiens
  CDR3 for beta chain variable domain of TCR clone 384675 (TRBV11-2, TRBJ2-2)
CASSLGGGELFL

SEQ ID NO: 769351 - protein, 12 aa, Homo sapiens
  CDR3 for alpha chain variable domain of TCR clone 384676 (TRAV12-1, TRAJ16)
CVVFRDGQKLLF

SEQ ID NO: 769352 - protein, 14 aa, Homo sapiens
  CDR3 for beta chain variable domain of TCR clone 384676 (TRBV12-5, TRBJ2-5)
CASGSRTHQETQYF

SEQ ID NO: 769353 - protein, 21 aa, Homo sapiens
  CDR3 for alpha chain variable domain of TCR clone 384677 (TRAV25, TRAJ47)
TATQTTDVGTYFWEYGNKLAF

SEQ ID NO: 769354 - protein, 13 aa, Homo sapiens
  CDR3 for beta chain variable domain of TCR clone 384677 (TRBV20-1, TRBJ2-5)
CSAREAFQETQYF

SEQ ID NO: 769355 - protein, 14 aa, Homo sapiens
  CDR3 for alpha chain variable domain of TCR clone 384678 (TRAV8-3, TRAJ4)
CAVGASGGYNKRIF

SEQ ID NO: 769356 - protein, 13 aa, Homo sapiens
  CDR3 for beta chain variable domain of TCR clone 384678 (TRBV27, TRBJ2-7)
CASGRGGAYEQYF

SEQ ID NO: 769357 - protein, 13 aa, Homo sapiens
  CDR3 for alpha chain variable domain of TCR clone 384679 (TRAV29/DV5, TRAJ31)
CAASRNNNARLMF

SEQ ID NO: 769358 - protein, 16 aa, Homo sapiens
  CDR3 for beta chain variable domain of TCR clone 384679 (TRBV7-3, TRBJ2-1)
CASSFTGRRSYNEQFF

SEQ ID NO: 769359 - protein, 12 aa, Homo sapiens
  CDR3 for alpha chain variable domain of TCR clone 384680 (TRAV21, TRAJ37)
CAVRGNTGKLIF

SEQ ID NO: 769360 - protein, 14 aa, Homo sapiens
  CDR3 for beta chain variable domain of TCR clone 384680 (TRBV19, TRBJ2-1)
CAREVTGARNEQFF

SEQ ID NO: 769361 - protein, 16 aa, Homo sapiens
  CDR3 for alpha chain variable domain of TCR clone 384681 (TRAV38-1, TRAJ32)
CAFMPFLGGATNKLIF

SEQ ID NO: 769362 - protein, 14 aa, Homo sapiens
  CDR3 for beta chain variable domain of TCR clone 384681 (TRBV7-3, TRBJ2-1)
CASSLAGGTNEQFF

SEQ ID NO: 769363 - protein, 15 aa, Homo sapiens
  CDR3 for alpha chain variable domain of TCR clone 384682 (TRAV8-3, TRAJ11)
CAVGLLSSGYSNLTF

SEQ ID NO: 769364 - protein, 16 aa, Homo sapiens
  CDR3 for beta chain variable domain of TCR clone 384682 (TRBV7-9, TRBJ1-2)
CASSLGFSSGEDGYTF

SEQ ID NO: 769365 - protein, 15 aa, Homo sapiens
  CDR3 for alpha chain variable domain of TCR clone 384683 (TRAV3, TRAJ22)
CAVRDRGGAARQLTF

SEQ ID NO: 769366 - protein, 16 aa, Homo sapiens
  CDR3 for beta chain variable domain of TCR clone 384683 (TRBV5-4, TRBJ2-3)
CASQQPGAGGADTQYF

SEQ ID NO: 769367 - protein, 15 aa, Homo sapiens
  CDR3 for alpha chain variable domain of TCR clone 384684 (TRAV2, TRAJ9)
CAVSALNTGGFKTIF

SEQ ID NO: 769368 - protein, 14 aa, Homo sapiens
  CDR3 for beta chain variable domain of TCR clone 384684 (TRBV7-2, TRBJ2-7)
CASSPKTSFYEQYF

SEQ ID NO: 769369 - protein, 16 aa, Homo sapiens
  CDR3 for alpha chain variable domain of TCR clone 384685 (TRAV20, TRAJ10)
CAVLRGLTGGGNKLTF

SEQ ID NO: 769370 - protein, 13 aa, Homo sapiens
  CDR3 for beta chain variable domain of TCR clone 384685 (TRBV11-3, TRBJ1-1)
CATEEGLNTEAFF

SEQ ID NO: 769371 - protein, 15 aa, Homo sapiens
  CDR3 for alpha chain variable domain of TCR clone 384686 (TRAV26-1, TRAJ22)
CIVRVSFWFCKATDF

SEQ ID NO: 769372 - protein, 13 aa, Homo sapiens
  CDR3 for beta chain variable domain of TCR clone 384686 (TRBV7-3, TRBJ1-1)
CASSQDWGAEAFF

SEQ ID NO: 769373 - protein, 16 aa, Homo sapiens
  CDR3 for alpha chain variable domain of TCR clone 384687 (TRAV27, TRAJ13)
CAGAKSDSGGYQKVNF

SEQ ID NO: 769374 - protein, 15 aa, Homo sapiens
  CDR3 for beta chain variable domain of TCR clone 384687 (TRBV29-1, TRBJ2-1)
CSVGRHALFYNEKFF

SEQ ID NO: 769375 - protein, 13 aa, Homo sapiens
  CDR3 for alpha chain variable domain of TCR clone 384688 (TRAV8-3, TRAJ36)
CAVGATGANNIFF

SEQ ID NO: 769376 - protein, 14 aa, Homo sapiens
  CDR3 for beta chain variable domain of TCR clone 384688 (TRBV7-8, TRBJ2-3)
CASSLEAGTDTQYF

SEQ ID NO: 769377 - protein, 15 aa, Homo sapiens
  CDR3 for alpha chain variable domain of TCR clone 384689 (TRAV2, TRAJ24)
CAVEVLTDSLGKFQF

SEQ ID NO: 769378 - protein, 12 aa, Homo sapiens
  CDR3 for beta chain variable domain of TCR clone 384689 (TRBV7-3, TRBJ2-5)
RASSPGKETQYF

SEQ ID NO: 769379 - protein, 13 aa, Homo sapiens
  CDR3 for alpha chain variable domain of TCR clone 384690 (TRAV21, TRAJ20)
CAVGLRVDYKLSF

SEQ ID NO: 769380 - protein, 15 aa, Homo sapiens
  CDR3 for beta chain variable domain of TCR clone 384690 (TRBV2, TRBJ2-7)
CASSEGLARSYEQYF

SEQ ID NO: 769381 - protein, 23 aa, Homo sapiens
  CDR3 for alpha chain variable domain of TCR clone 384691 (TRAV12-2, TRAJ52)
PAIQPPTSVPLIGCGTSYGKLTF

SEQ ID NO: 769382 - protein, 13 aa, Homo sapiens
  CDR3 for beta chain variable domain of TCR clone 384691 (TRBV15, TRBJ2-7)
CATSTTGHYEQYF

SEQ ID NO: 769383 - protein, 12 aa, Homo sapiens
  CDR3 for alpha chain variable domain of TCR clone 384692 (TRAV1-1, TRAJ39)
CAVPVVGNMLAF

SEQ ID NO: 769384 - protein, 15 aa, Homo sapiens
  CDR3 for beta chain variable domain of TCR clone 384692 (TRBV19, TRBJ1-6)
CASSTQGAVGSPLHF

SEQ ID NO: 769385 - protein, 13 aa, Homo sapiens
  CDR3 for alpha chain variable domain of TCR clone 384693 (TRAV2, TRAJ40)
CAVVISGTYKYSF

SEQ ID NO: 769386 - protein, 14 aa, Homo sapiens
  CDR3 for beta chain variable domain of TCR clone 384693 (TRBV19, TRBJ2-1)
CASPTFVLSGEQFF

SEQ ID NO: 769387 - protein, 15 aa, Homo sapiens
  CDR3 for alpha chain variable domain of TCR clone 384694 (TRAV17, TRAJ57)
CATGPFQGGSEKLFF

SEQ ID NO: 769388 - protein, 14 aa, Homo sapiens
  CDR3 for beta chain variable domain of TCR clone 384694 (TRBV12-5, TRBJ2-5)
CASGSRTHQETQYF

SEQ ID NO: 769389 - protein, 15 aa, Homo sapiens
  CDR3 for alpha chain variable domain of TCR clone 384695 (TRAV3, TRAJ5)
CAVRDFNTGRRALTF

SEQ ID NO: 769390 - protein, 13 aa, Homo sapiens
  CDR3 for beta chain variable domain of TCR clone 384695 (TRBV12-4, TRBJ2-7)
CASSPTETYEQYF

SEQ ID NO: 769391 - protein, 12 aa, Homo sapiens
  CDR3 for alpha chain variable domain of TCR clone 384696 (TRAV3, TRAJ26)
CAVRDYGQNFVF

SEQ ID NO: 769392 - protein, 23 aa, Homo sapiens
  CDR3 for beta chain variable domain of TCR clone 384696 (TRBV11-2, TRBJ1-2)
LRTRPCISVPSPSGREANYGYTF

SEQ ID NO: 769393 - protein, 15 aa, Homo sapiens
  CDR3 for alpha chain variable domain of TCR clone 384697 (TRAV8-3, TRAJ40)
CAAPSLGSVAYKYIF

SEQ ID NO: 769394 - protein, 16 aa, Homo sapiens
  CDR3 for beta chain variable domain of TCR clone 384697 (TRBV7-3, TRBJ2-3)
CASSLSGYRPEDTQYF

SEQ ID NO: 769395 - protein, 15 aa, Homo sapiens
  CDR3 for alpha chain variable domain of TCR clone 384698 (TRAV35, TRAJ24)
CAGQSAQGSWGKLQF

SEQ ID NO: 769396 - protein, 16 aa, Homo sapiens
  CDR3 for beta chain variable domain of TCR clone 384698 (TRBV12-5, TRBJ2-5)
CASGPRTSGNQETQYF

SEQ ID NO: 769397 - protein, 14 aa, Homo sapiens
  CDR3 for alpha chain variable domain of TCR clone 384699 (TRAV12-2, TRAJ40)
CAVKIPSGTYKYIF

SEQ ID NO: 769398 - protein, 11 aa, Homo sapiens
  CDR3 for beta chain variable domain of TCR clone 384699 (TRBV2, TRBJ2-3)
CASSATDTQYF

SEQ ID NO: 769399 - protein, 11 aa, Homo sapiens
  CDR3 for alpha chain variable domain of TCR clone 384700 (TRAV2, TRAJ13)
CASGGYQKVTF

SEQ ID NO: 769400 - protein, 14 aa, Homo sapiens
  CDR3 for beta chain variable domain of TCR clone 384700 (TRBV12-4, TRBJ1-1)
CASSLRSSGTEAFF

SEQ ID NO: 769401 - protein, 12 aa, Homo sapiens
  CDR3 for alpha chain variable domain of TCR clone 384701 (TRAV3, TRAJ27)
CAVRDGAGKSIS

SEQ ID NO: 769402 - protein, 13 aa, Homo sapiens
  CDR3 for beta chain variable domain of TCR clone 384701 (TRBV10-3, TRBJ1-2)
CAINADLNYGYTF

SEQ ID NO: 769403 - protein, 13 aa, Homo sapiens
  CDR3 for alpha chain variable domain of TCR clone 384702 (TRAV12-2, TRAJ50)
CAVIVTSYDKVIF

SEQ ID NO: 769404 - protein, 15 aa, Homo sapiens
  CDR3 for beta chain variable domain of TCR clone 384702 (TRBV6-1, TRBJ2-2)
CAILTGTRDTGELFF

SEQ ID NO: 769405 - protein, 14 aa, Homo sapiens
  CDR3 for alpha chain variable domain of TCR clone 384703 (TRAV12-2, TRAJ13)
CAVKKTGRYQKVTF

SEQ ID NO: 769406 - protein, 16 aa, Homo sapiens
  CDR3 for beta chain variable domain of TCR clone 384703 (TRBV20-1, TRBJ2-2)
CSASASGIPGAGELFF

SEQ ID NO: 769407 - protein, 16 aa, Homo sapiens
  CDR3 for alpha chain variable domain of TCR clone 384704 (TRAV14/DV4, TRAJ53)
CAMREGGGGSNYKLTF

SEQ ID NO: 769408 - protein, 16 aa, Homo sapiens
  CDR3 for beta chain variable domain of TCR clone 384704 (TRBV4-2, TRBJ2-1)
CASSQDGTGGYNEQFF

SEQ ID NO: 769409 - protein, 13 aa, Homo sapiens
  CDR3 for alpha chain variable domain of TCR clone 384705 (TRAV1-2, TRAJ9)
CAALNTGGFKTIF

SEQ ID NO: 769410 - protein, 14 aa, Homo sapiens
  CDR3 for beta chain variable domain of TCR clone 384705 (TRBV2, TRBJ2-1)
CASRTGSSYNEQFF

SEQ ID NO: 769411 - protein, 10 aa, Homo sapiens
  CDR3 for alpha chain variable domain of TCR clone 384706 (TRAV12-1, TRAJ40)
CVVYSGTYKY

SEQ ID NO: 769412 - protein, 18 aa, Homo sapiens
  CDR3 for beta chain variable domain of TCR clone 384706 (TRBV11-2, TRBJ2-3)
RASSLGGASRGAPNTQYF

SEQ ID NO: 769413 - protein, 15 aa, Homo sapiens
  CDR3 for alpha chain variable domain of TCR clone 384707 (TRAV12-3, TRAJ49)
CAMAVTPNTGNQFYF

SEQ ID NO: 769414 - protein, 18 aa, Homo sapiens
  CDR3 for beta chain variable domain of TCR clone 384707 (TRBV4-1, TRBJ1-5)
CASSQDPRGHGLNQPQHF

SEQ ID NO: 769415 - protein, 14 aa, Homo sapiens
  CDR3 for alpha chain variable domain of TCR clone 384708 (TRAV25, TRAJ6)
CAGRESGGSYIPTF

SEQ ID NO: 769416 - protein, 13 aa, Homo sapiens
  CDR3 for beta chain variable domain of TCR clone 384708 (TRBV12-4, TRBJ2-7)
CASSLSGVYEQYC

SEQ ID NO: 769417 - protein, 23 aa, Homo sapiens
  CDR3 for alpha chain variable domain of TCR clone 384709 (TRAV8-3, TRAJ6)
CAVGGEEATYLHLEEEPASLFIR

SEQ ID NO: 769418 - protein, 14 aa, Homo sapiens
  CDR3 for beta chain variable domain of TCR clone 384709 (TRBV5-1, TRBJ2-7)
CASSRGESLYEQYL

SEQ ID NO: 769419 - protein, 16 aa, Homo sapiens
  CDR3 for alpha chain variable domain of TCR clone 384710 (TRAV3, TRAJ42)
CCERQDYGGSQGNLIF

SEQ ID NO: 769420 - protein, 15 aa, Homo sapiens
  CDR3 for beta chain variable domain of TCR clone 384710 (TRBV6-6, TRBJ2-7)
CASSYSYGGSYEQYF

SEQ ID NO: 769421 - protein, 16 aa, Homo sapiens
  CDR3 for alpha chain variable domain of TCR clone 384711 (TRAV38-1, TRAJ37)
CAFKGDGSNNTGKLIF

SEQ ID NO: 769422 - protein, 13 aa, Homo sapiens
  CDR3 for beta chain variable domain of TCR clone 384711 (TRBV12-4, TRBJ2-5)
CASSLLRRETQYF

SEQ ID NO: 769423 - protein, 14 aa, Homo sapiens
  CDR3 for alpha chain variable domain of TCR clone 384712 (TRAV14/DV4, TRAJ26)
CAMREGTYGQNFVF

SEQ ID NO: 769424 - protein, 16 aa, Homo sapiens
  CDR3 for beta chain variable domain of TCR clone 384712 (TRBV9, TRBJ1-2)
CASSVVEKVSPYGYTF

SEQ ID NO: 769425 - protein, 15 aa, Homo sapiens
  CDR3 for alpha chain variable domain of TCR clone 384713 (TRAV8-4, TRAJ13)
WAVSDRGGGYQKVTF

SEQ ID NO: 769426 - protein, 17 aa, Homo sapiens
  CDR3 for beta chain variable domain of TCR clone 384713 (TRBV25-1, TRBJ1-2)
CASSEFGSATTNYGYTF

SEQ ID NO: 769427 - protein, 12 aa, Homo sapiens
  CDR3 for alpha chain variable domain of TCR clone 384714 (TRAV29/DV5, TRAJ15)
CASNQAGTALIL

SEQ ID NO: 769428 - protein, 15 aa, Homo sapiens
  CDR3 for beta chain variable domain of TCR clone 384714 (TRBV11-2, TRBJ2-2)
CASSSDRVNAGELFF

SEQ ID NO: 769429 - protein, 14 aa, Homo sapiens
  CDR3 for alpha chain variable domain of TCR clone 384715 (TRAV27, TRAJ33)
CRSGSRDSNYQLIW

SEQ ID NO: 769430 - protein, 13 aa, Homo sapiens
  CDR3 for beta chain variable domain of TCR clone 384715 (TRBV13, TRBJ2-2)
CASSPGLTGELFF

SEQ ID NO: 769431 - protein, 17 aa, Homo sapiens
  CDR3 for alpha chain variable domain of TCR clone 384716 (TRAV12-2, TRAJ6)
CAPQGPPRAGGSYIPTF

SEQ ID NO: 769432 - protein, 15 aa, Homo sapiens
  CDR3 for beta chain variable domain of TCR clone 384716 (TRBV27, TRBJ2-7)
CASSPDQGRLYEQYF

SEQ ID NO: 769433 - protein, 13 aa, Homo sapiens
  CDR3 for alpha chain variable domain of TCR clone 384717 (TRAV17, TRAJ29)
CATDAFRKHTSCL

SEQ ID NO: 769434 - protein, 13 aa, Homo sapiens
  CDR3 for beta chain variable domain of TCR clone 384717 (TRBV5-7, TRBJ2-6)
CASTSGGANVLTF

SEQ ID NO: 769435 - protein, 14 aa, Homo sapiens
  CDR3 for alpha chain variable domain of TCR clone 384718 (TRAV17, TRAJ6)
CATDASGGSYIPTF

SEQ ID NO: 769436 - protein, 19 aa, Homo sapiens
  CDR3 for beta chain variable domain of TCR clone 384718 (TRBV4-3, TRBJ2-7)
CASSQEFIGSQVTPYEQYF

SEQ ID NO: 769437 - protein, 14 aa, Homo sapiens
  CDR3 for alpha chain variable domain of TCR clone 384719 (TRAV8-2, TRAJ4)
CVVSLSSGYNKLIF

SEQ ID NO: 769438 - protein, 15 aa, Homo sapiens
  CDR3 for beta chain variable domain of TCR clone 384719 (TRBV2, TRBJ2-1)
CASSELAGSYNEQFF

SEQ ID NO: 769439 - protein, 14 aa, Homo sapiens
  CDR3 for alpha chain variable domain of TCR clone 384720 (TRAV2, TRAJ37)
CAVDFTSNTGNLIF

SEQ ID NO: 769440 - protein, 14 aa, Homo sapiens
  CDR3 for beta chain variable domain of TCR clone 384720 (TRBV7-7, TRBJ2-7)
CASSLGRGVGEQYF

SEQ ID NO: 769441 - protein, 17 aa, Homo sapiens
  CDR3 for alpha chain variable domain of TCR clone 384721 (TRAV26-1, TRAJ33)
CIVRGPLGRDSNYQLIW

SEQ ID NO: 769442 - protein, 14 aa, Homo sapiens
  CDR3 for beta chain variable domain of TCR clone 384721 (TRBV24-1, TRBJ1-4)
CATSDAGPNEKLFF

SEQ ID NO: 769443 - protein, 11 aa, Homo sapiens
  CDR3 for alpha chain variable domain of TCR clone 384722 (TRAV2, TRAJ23)
CAVETRGKLIF

SEQ ID NO: 769444 - protein, 14 aa, Homo sapiens
  CDR3 for beta chain variable domain of TCR clone 384722 (TRBV7-2, TRBJ2-7)
CASSPKTSFYEQYC

SEQ ID NO: 769445 - protein, 15 aa, Homo sapiens
  CDR3 for alpha chain variable domain of TCR clone 384723 (TRAV35, TRAJ30)
CAGQPEMNRDDKIIF

SEQ ID NO: 769446 - protein, 17 aa, Homo sapiens
  CDR3 for beta chain variable domain of TCR clone 384723 (TRBV15, TRBJ1-1)
CATSRVGGADGDTEAFF

SEQ ID NO: 769447 - protein, 11 aa, Homo sapiens
  CDR3 for alpha chain variable domain of TCR clone 384724 (TRAV1-2, TRAJ11)
CAVRGYSTLTF

SEQ ID NO: 769448 - protein, 17 aa, Homo sapiens
  CDR3 for beta chain variable domain of TCR clone 384724 (TRBV2, TRBJ1-5)
CASSVGTGMRGYQPQHF

SEQ ID NO: 769449 - protein, 14 aa, Homo sapiens
  CDR3 for alpha chain variable domain of TCR clone 384725 (TRAV2, TRAJ37)
CAVEDQGNTCKLIF

SEQ ID NO: 769450 - protein, 14 aa, Homo sapiens
  CDR3 for beta chain variable domain of TCR clone 384725 (TRBV18, TRBJ2-1)
CASSPQGRFNEQFF

SEQ ID NO: 769451 - protein, 13 aa, Homo sapiens
  CDR3 for alpha chain variable domain of TCR clone 384726 (TRAV26-1, TRAJ34)
CIVRPWITDKLIF

SEQ ID NO: 769452 - protein, 13 aa, Homo sapiens
  CDR3 for beta chain variable domain of TCR clone 384726 (TRBV5-1, TRBJ2-1)
CVSSMGSYNEQFF

SEQ ID NO: 769453 - protein, 14 aa, Homo sapiens
  CDR3 for alpha chain variable domain of TCR clone 384727 (TRAV17, TRAJ39)
CATDPVRAGNMLTF

SEQ ID NO: 769454 - protein, 13 aa, Homo sapiens
  CDR3 for beta chain variable domain of TCR clone 384727 (TRBV19, TRBJ1-2)
CASSVHGQDGYAF

SEQ ID NO: 769455 - protein, 12 aa, Homo sapiens
  CDR3 for alpha chain variable domain of TCR clone 384728 (TRAV27, TRAJ13)
CAGAGGYQKVTF

SEQ ID NO: 769456 - protein, 14 aa, Homo sapiens
  CDR3 for beta chain variable domain of TCR clone 384728 (TRBV7-3, TRBJ2-1)
CASSLAGGTNEHFF

SEQ ID NO: 769457 - protein, 14 aa, Homo sapiens
  CDR3 for alpha chain variable domain of TCR clone 384729 (TRAV1-2, TRAJ8)
CAVGEDTGFQKLVL

SEQ ID NO: 769458 - protein, 15 aa, Homo sapiens
  CDR3 for beta chain variable domain of TCR clone 384729 (TRBV27, TRBJ2-1)
CASSNGGGSSNEQFF

SEQ ID NO: 769459 - protein, 12 aa, Homo sapiens
  CDR3 for alpha chain variable domain of TCR clone 384730 (TRAV12-3, TRAJ17)
CAMTLTGNKLTF

SEQ ID NO: 769460 - protein, 13 aa, Homo sapiens
  CDR3 for beta chain variable domain of TCR clone 384730 (TRBV27, TRBJ2-1)
CASRTRGIGEQFF

SEQ ID NO: 769461 - protein, 17 aa, Homo sapiens
  CDR3 for alpha chain variable domain of TCR clone 384731 (TRAV3, TRAJ6)
CAVRDCPRAGGSHIPTF

SEQ ID NO: 769462 - protein, 14 aa, Homo sapiens
  CDR3 for beta chain variable domain of TCR clone 384731 (TRBV7-2, TRBJ2-7)
CASSPKTSFYEQYF

SEQ ID NO: 769463 - protein, 18 aa, Homo sapiens
  CDR3 for alpha chain variable domain of TCR clone 384732 (TRAV21, TRAJ52)
CAVRPSPAGGTSYGKLTF

SEQ ID NO: 769464 - protein, 13 aa, Homo sapiens
  CDR3 for beta chain variable domain of TCR clone 384732 (TRBV14, TRBJ1-1)
CASSREFGTEAFF

SEQ ID NO: 769465 - protein, 12 aa, Homo sapiens
  CDR3 for alpha chain variable domain of TCR clone 384733 (TRAV13-1, TRAJ53)
AASVGSNYKLTF

SEQ ID NO: 769466 - protein, 15 aa, Homo sapiens
  CDR3 for beta chain variable domain of TCR clone 384733 (TRBV5-1, TRBJ2-1)
CASSPPRAPYNEQFF

SEQ ID NO: 769467 - protein, 11 aa, Homo sapiens
  CDR3 for alpha chain variable domain of TCR clone 384734 (TRAV3, TRAJ21)
YAVGNFNKFYF

SEQ ID NO: 769468 - protein, 13 aa, Homo sapiens
  CDR3 for beta chain variable domain of TCR clone 384734 (TRBV7-3, TRBJ1-1)
CASSQDWGAEAFF

SEQ ID NO: 769469 - protein, 12 aa, Homo sapiens
  CDR3 for alpha chain variable domain of TCR clone 384735 (TRAV2, TRAJ9)
CAVGAGGFKTIL

SEQ ID NO: 769470 - protein, 15 aa, Homo sapiens
  CDR3 for beta chain variable domain of TCR clone 384735 (TRBV12-4, TRBJ2-5)
CASSPPTGLQETQYF

SEQ ID NO: 769471 - protein, 13 aa, Homo sapiens
  CDR3 for alpha chain variable domain of TCR clone 384736 (TRAV3, TRAJ27)
CAVRPLGAGKSTF

SEQ ID NO: 769472 - protein, 12 aa, Homo sapiens
  CDR3 for beta chain variable domain of TCR clone 384736 (TRBV12-4, TRBJ2-7)
CASSLGGYEQYF

SEQ ID NO: 769473 - protein, 13 aa, Homo sapiens
  CDR3 for alpha chain variable domain of TCR clone 384737 (TRAV8-4, TRAJ13)
CAVWSGGYQKVTF

SEQ ID NO: 769474 - protein, 15 aa, Homo sapiens
  CDR3 for beta chain variable domain of TCR clone 384737 (TRBV19, TRBJ2-1)
CASSSPGVPLDEQFF

SEQ ID NO: 769475 - protein, 12 aa, Homo sapiens
  CDR3 for alpha chain variable domain of TCR clone 384738 (TRAV4, TRAJ26)
CLVGDYDQNFVF

SEQ ID NO: 769476 - protein, 16 aa, Homo sapiens
  CDR3 for beta chain variable domain of TCR clone 384738 (TRBV7-2, TRBJ1-2)
CASSSNQDRRGHGYTF

SEQ ID NO: 769477 - protein, 13 aa, Homo sapiens
  CDR3 for alpha chain variable domain of TCR clone 384739 (TRAV8-3, TRAJ43)
CAVVPYNNNDRRF

SEQ ID NO: 769478 - protein, 17 aa, Homo sapiens
  CDR3 for beta chain variable domain of TCR clone 384739 (TRBV7-7, TRBJ1-1)
CASIGDRPNLGVTEAFF

SEQ ID NO: 769479 - protein, 14 aa, Homo sapiens
  CDR3 for alpha chain variable domain of TCR clone 384740 (TRAV12-1, TRAJ26)
WVVKGSNYGQNFVF

SEQ ID NO: 769480 - protein, 17 aa, Homo sapiens
  CDR3 for beta chain variable domain of TCR clone 384740 (TRBV11-2, TRBJ2-6)
CASSQRDIFSGANVLTF

SEQ ID NO: 769481 - protein, 17 aa, Homo sapiens
  CDR3 for alpha chain variable domain of TCR clone 384741 (TRAV3, TRAJ6)
CAVRDGPGAGGSYIPTF

SEQ ID NO: 769482 - protein, 14 aa, Homo sapiens
  CDR3 for beta chain variable domain of TCR clone 384741 (TRBV7-2, TRBJ2-7)
CASSPKTSSYEQYF

SEQ ID NO: 769483 - protein, 16 aa, Homo sapiens
  CDR3 for alpha chain variable domain of TCR clone 384742 (TRAV14/DV4, TRAJ54)
CAMREGRIQVAQKLVF

SEQ ID NO: 769484 - protein, 13 aa, Homo sapiens
  CDR3 for beta chain variable domain of TCR clone 384742 (TRBV4-2, TRBJ1-1)
CASSQAGNTEAFF

SEQ ID NO: 769485 - protein, 12 aa, Homo sapiens
  CDR3 for alpha chain variable domain of TCR clone 384743 (TRAV13-2, TRAJ23)
CAERHRGGKLIF

SEQ ID NO: 769486 - protein, 15 aa, Homo sapiens
  CDR3 for beta chain variable domain of TCR clone 384743 (TRBV25-1, TRBJ2-1)
CASSNGGGSSNEQFF

SEQ ID NO: 769487 - protein, 13 aa, Homo sapiens
  CDR3 for alpha chain variable domain of TCR clone 384744 (TRAV12-3, TRAJ40)
CAMSDSGTYKYIF

SEQ ID NO: 769488 - protein, 14 aa, Homo sapiens
  CDR3 for beta chain variable domain of TCR clone 384744 (TRBV7-2, TRBJ1-5)
CARSTQGAGQPQHF

SEQ ID NO: 769489 - protein, 19 aa, Homo sapiens
  CDR3 for alpha chain variable domain of TCR clone 384745 (TRAV1-2, TRAJ26)
CLLPLCCERPDNYGQNLVF

SEQ ID NO: 769490 - protein, 15 aa, Homo sapiens
  CDR3 for beta chain variable domain of TCR clone 384745 (TRBV27, TRBJ2-1)
CASSNGGGSSNEQFF

SEQ ID NO: 769491 - protein, 15 aa, Homo sapiens
  CDR3 for alpha chain variable domain of TCR clone 384746 (TRAV17, TRAJ37)
CATDGGSSYTGKLIF

SEQ ID NO: 769492 - protein, 15 aa, Homo sapiens
  CDR3 for beta chain variable domain of TCR clone 384746 (TRBV28, TRBJ2-5)
CASSSGRTIQETQYF

SEQ ID NO: 769493 - protein, 14 aa, Homo sapiens
  CDR3 for alpha chain variable domain of TCR clone 384747 (TRAV1-2, TRAJ16)
CAVNRFSDGQKLLF

SEQ ID NO: 769494 - protein, 12 aa, Homo sapiens
  CDR3 for beta chain variable domain of TCR clone 384747 (TRBV11-2, TRBJ2-2)
YASSLGGGELFF

SEQ ID NO: 769495 - protein, 15 aa, Homo sapiens
  CDR3 for alpha chain variable domain of TCR clone 384748 (TRAV26-1, TRAJ22)
CIVRVSFWFCKATDL

SEQ ID NO: 769496 - protein, 15 aa, Homo sapiens
  CDR3 for beta chain variable domain of TCR clone 384748 (TRBV20-1, TRBJ1-4)
CSARREWGVNEKLFF

SEQ ID NO: 769497 - protein, 17 aa, Homo sapiens
  CDR3 for alpha chain variable domain of TCR clone 384749 (TRAV21, TRAJ40)
CAVRPQSGTSGTYKYIF

SEQ ID NO: 769498 - protein, 13 aa, Homo sapiens
  CDR3 for beta chain variable domain of TCR clone 384749 (TRBV12-4, TRBJ2-7)
CASSPSRDTPRIF

SEQ ID NO: 769499 - protein, 14 aa, Homo sapiens
  CDR3 for alpha chain variable domain of TCR clone 384750 (TRAV1-2, TRAJ8)
CAVREDTGFQKLVF

SEQ ID NO: 769500 - protein, 13 aa, Homo sapiens
  CDR3 for beta chain variable domain of TCR clone 384750 (TRBV20-1, TRBJ1-1)
CSAPLGGGTEAFC

SEQ ID NO: 769501 - protein, 13 aa, Homo sapiens
  CDR3 for alpha chain variable domain of TCR clone 384751 (TRAV2, TRAJ29)
CAEQNSVNTPLVF

SEQ ID NO: 769502 - protein, 13 aa, Homo sapiens
  CDR3 for beta chain variable domain of TCR clone 384751 (TRBV28, TRBJ1-2)
CASSPGSRNGYTF

SEQ ID NO: 769503 - protein, 14 aa, Homo sapiens
  CDR3 for alpha chain variable domain of TCR clone 384752 (TRAV17, TRAJ57)
CATDPQGGSEKLVF

SEQ ID NO: 769504 - protein, 16 aa, Homo sapiens
  CDR3 for beta chain variable domain of TCR clone 384752 (TRBV12-4, TRBJ2-7)
CASRSTGTGPSYEQYF

SEQ ID NO: 769505 - protein, 16 aa, Homo sapiens
  CDR3 for alpha chain variable domain of TCR clone 384753 (TRAV8-3, TRAJ13)
CAVGAYPSGGYQKVTY

SEQ ID NO: 769506 - protein, 15 aa, Homo sapiens
  CDR3 for beta chain variable domain of TCR clone 384753 (TRBV19, TRBJ1-5)
CASSIVWADNQPQHF

SEQ ID NO: 769507 - protein, 12 aa, Homo sapiens
  CDR3 for alpha chain variable domain of TCR clone 384754 (TRAV27, TRAJ34)
CAGAKNTDTPIF

SEQ ID NO: 769508 - protein, 13 aa, Homo sapiens
  CDR3 for beta chain variable domain of TCR clone 384754 (TRBV4-1, TRBJ2-1)
CASSQEVQYEQFF

SEQ ID NO: 769509 - protein, 13 aa, Homo sapiens
  CDR3 for alpha chain variable domain of TCR clone 384755 (TRAV12-2, TRAJ37)
CAGGSGNTGQLIF

SEQ ID NO: 769510 - protein, 14 aa, Homo sapiens
  CDR3 for beta chain variable domain of TCR clone 384755 (TRBV6-1, TRBJ2-6)
CASQQGAGANVLTF

SEQ ID NO: 769511 - protein, 13 aa, Homo sapiens
  CDR3 for alpha chain variable domain of TCR clone 384756 (TRAV21, TRAJ27)
CAARPGNAGKSTF

SEQ ID NO: 769512 - protein, 15 aa, Homo sapiens
  CDR3 for beta chain variable domain of TCR clone 384756 (TRBV2, TRBJ2-3)
CASSDFEKATDTQYF

SEQ ID NO: 769513 - protein, 15 aa, Homo sapiens
  CDR3 for alpha chain variable domain of TCR clone 384757 (TRAV1-2, TRAJ24)
CAVRGSTDSWGKVQF

SEQ ID NO: 769514 - protein, 16 aa, Homo sapiens
  CDR3 for beta chain variable domain of TCR clone 384757 (TRBV20-1, TRBJ2-1)
CSAATQGPVSYNEQFF

SEQ ID NO: 769515 - protein, 16 aa, Homo sapiens
  CDR3 for alpha chain variable domain of TCR clone 384758 (TRAV38-2/DV8, TRAJ45)
RAYRGNSGGGADGLTF

SEQ ID NO: 769516 - protein, 17 aa, Homo sapiens
  CDR3 for beta chain variable domain of TCR clone 384758 (TRBV11-3, TRBJ2-5)
CASSLPGVRGGKETQYF

SEQ ID NO: 769517 - protein, 15 aa, Homo sapiens
  CDR3 for alpha chain variable domain of TCR clone 384759 (TRAV16, TRAJ10)
CALRELTGGGNKLTF

SEQ ID NO: 769518 - protein, 14 aa, Homo sapiens
  CDR3 for beta chain variable domain of TCR clone 384759 (TRBV5-5, TRBJ2-7)
CASSLGQGTHEQYF

SEQ ID NO: 769519 - protein, 12 aa, Homo sapiens
  CDR3 for alpha chain variable domain of TCR clone 384760 (TRAV8-4, TRAJ37)
CAKSSNTGKLIF

SEQ ID NO: 769520 - protein, 14 aa, Homo sapiens
  CDR3 for beta chain variable domain of TCR clone 384760 (TRBV2, TRBJ1-5)
CASSENRGGQPQHF

SEQ ID NO: 769521 - protein, 14 aa, Homo sapiens
  CDR3 for alpha chain variable domain of TCR clone 384761 (TRAV8-1, TRAJ30)
CAVNGYQRDDKIIF

SEQ ID NO: 769522 - protein, 15 aa, Homo sapiens
  CDR3 for beta chain variable domain of TCR clone 384761 (TRBV7-9, TRBJ1-5)
CASSQGHQPNQPQHF

SEQ ID NO: 769523 - protein, 14 aa, Homo sapiens
  CDR3 for alpha chain variable domain of TCR clone 384762 (TRAV35, TRAJ22)
CAGLRPGSARQLTF

SEQ ID NO: 769524 - protein, 14 aa, Homo sapiens
  CDR3 for beta chain variable domain of TCR clone 384762 (TRBV5-7, TRBJ1-2)
CASSAVGVSGGYTF

SEQ ID NO: 769525 - protein, 15 aa, Homo sapiens
  CDR3 for alpha chain variable domain of TCR clone 384763 (TRAV26-1, TRAJ29)
CIVRVEGSGNTPLGL

SEQ ID NO: 769526 - protein, 15 aa, Homo sapiens
  CDR3 for beta chain variable domain of TCR clone 384763 (TRBV7-9, TRBJ1-5)
CASSQGHQPNQPQHF

SEQ ID NO: 769527 - protein, 15 aa, Homo sapiens
  CDR3 for alpha chain variable domain of TCR clone 384764 (TRAV29/DV5, TRAJ42)
CAAKTDGGSTGNLIF

SEQ ID NO: 769528 - protein, 12 aa, Homo sapiens
  CDR3 for beta chain variable domain of TCR clone 384764 (TRBV11-2, TRBJ2-1)
CASSPGNNEQFF

SEQ ID NO: 769529 - protein, 17 aa, Homo sapiens
  CDR3 for alpha chain variable domain of TCR clone 384765 (TRAV3, TRAJ42)
CAVRDRDYGGSQGNLIF

SEQ ID NO: 769530 - protein, 14 aa, Homo sapiens
  CDR3 for beta chain variable domain of TCR clone 384765 (TRBV25-1, TRBJ1-1)
CASTHLGWNTEAFF

SEQ ID NO: 769531 - protein, 14 aa, Homo sapiens
  CDR3 for alpha chain variable domain of TCR clone 384766 (TRAV1-2, TRAJ8)
CAVGEDTGFQKLVF

SEQ ID NO: 769532 - protein, 11 aa, Homo sapiens
  CDR3 for beta chain variable domain of TCR clone 384766 (TRBV25-1, TRBJ2-2)
CASSAQGDEHR

SEQ ID NO: 769533 - protein, 15 aa, Homo sapiens
  CDR3 for alpha chain variable domain of TCR clone 384767 (TRAV23/DV6, TRAJ18)
CAARYRGSTLGRLYF

SEQ ID NO: 769534 - protein, 15 aa, Homo sapiens
  CDR3 for beta chain variable domain of TCR clone 384767 (TRBV6-1, TRBJ2-3)
CASSERGGITDTQYF

SEQ ID NO: 769535 - protein, 14 aa, Homo sapiens
  CDR3 for alpha chain variable domain of TCR clone 384768 (TRAV35, TRAJ42)
CCVPYGGSQGNLIF

SEQ ID NO: 769536 - protein, 18 aa, Homo sapiens
  CDR3 for beta chain variable domain of TCR clone 384768 (TRBV13, TRBJ2-6)
CASSPMSSGGSGANVLTF

SEQ ID NO: 769537 - protein, 14 aa, Homo sapiens
  CDR3 for alpha chain variable domain of TCR clone 384769 (TRAV12-3, TRAJ10)
SHLPLTGGGNKLTF

SEQ ID NO: 769538 - protein, 14 aa, Homo sapiens
  CDR3 for beta chain variable domain of TCR clone 384769 (TRBV3-1, TRBJ2-1)
CASSQAVCLGEQFF

SEQ ID NO: 769539 - protein, 18 aa, Homo sapiens
  CDR3 for alpha chain variable domain of TCR clone 384770 (TRAV13-1, TRAJ52)
CAAKNPNAGGTSYGKLTF

SEQ ID NO: 769540 - protein, 14 aa, Homo sapiens
  CDR3 for beta chain variable domain of TCR clone 384770 (TRBV4-1, TRBJ1-2)
CASSQSTQAYGYTF

SEQ ID NO: 769541 - protein, 12 aa, Homo sapiens
  CDR3 for alpha chain variable domain of TCR clone 384771 (TRAV12-2, TRAJ42)
CAVGGSQGNLIF

SEQ ID NO: 769542 - protein, 16 aa, Homo sapiens
  CDR3 for beta chain variable domain of TCR clone 384771 (TRBV12-5, TRBJ2-5)
CASGPRTSGNQETQYF

SEQ ID NO: 769543 - protein, 15 aa, Homo sapiens
  CDR3 for alpha chain variable domain of TCR clone 384772 (TRAV8-1, TRAJ23)
CAVNSHYNQGGKLIF

SEQ ID NO: 769544 - protein, 14 aa, Homo sapiens
  CDR3 for beta chain variable domain of TCR clone 384772 (TRBV11-2, TRBJ2-5)
CASSRTGGIETQYF

SEQ ID NO: 769545 - protein, 11 aa, Homo sapiens
  CDR3 for alpha chain variable domain of TCR clone 384773 (TRAV3, TRAJ21)
CAVGNFNKFYF

SEQ ID NO: 769546 - protein, 17 aa, Homo sapiens
  CDR3 for beta chain variable domain of TCR clone 384773 (TRBV24-1, TRBJ2-1)
CAISDVSTSGTYNEQFF

SEQ ID NO: 769547 - protein, 18 aa, Homo sapiens
  CDR3 for alpha chain variable domain of TCR clone 384774 (TRAV8-4, TRAJ52)
CAVTQANAGGTSYGKLTF

SEQ ID NO: 769548 - protein, 20 aa, Homo sapiens
  CDR3 for beta chain variable domain of TCR clone 384774 (TRBV19, TRBJ2-1)
CASSISRTVTSTRLNNEQFF

SEQ ID NO: 769549 - protein, 12 aa, Homo sapiens
  CDR3 for alpha chain variable domain of TCR clone 384775 (TRAV2, TRAJ32)
CAVGGATNKLIF

SEQ ID NO: 769550 - protein, 14 aa, Homo sapiens
  CDR3 for beta chain variable domain of TCR clone 384775 (TRBV15, TRBJ2-3)
CATRSGTSIDTQYF

SEQ ID NO: 769551 - protein, 11 aa, Homo sapiens
  CDR3 for alpha chain variable domain of TCR clone 384776 (TRAV29/DV5, TRAJ31)
CAAINNARLMF

SEQ ID NO: 769552 - protein, 13 aa, Homo sapiens
  CDR3 for beta chain variable domain of TCR clone 384776 (TRBV20-1, TRBJ2-2)
CSASAAGTGELFF

SEQ ID NO: 769553 - protein, 13 aa, Homo sapiens
  CDR3 for alpha chain variable domain of TCR clone 384777 (TRAV25, TRAJ30)
CAGRVDRDDNIIF

SEQ ID NO: 769554 - protein, 17 aa, Homo sapiens
  CDR3 for beta chain variable domain of TCR clone 384777 (TRBV7-9, TRBJ2-6)
CASSFGAGYFGANVLTF

SEQ ID NO: 769555 - protein, 15 aa, Homo sapiens
  CDR3 for alpha chain variable domain of TCR clone 384778 (TRAV36/DV7, TRAJ53)
WEGENSGGSNYKLTF

SEQ ID NO: 769556 - protein, 17 aa, Homo sapiens
  CDR3 for beta chain variable domain of TCR clone 384778 (TRBV7-2, TRBJ2-1)
CASSRGTSGAVGWEQFF

SEQ ID NO: 769557 - protein, 14 aa, Homo sapiens
  CDR3 for alpha chain variable domain of TCR clone 384779 (TRAV23/DV6, TRAJ4)
CAAPSSGGYNKLMF

SEQ ID NO: 769558 - protein, 16 aa, Homo sapiens
  CDR3 for beta chain variable domain of TCR clone 384779 (TRBV19, TRBJ1-1)
CASRFGGPVTGTEAFF

SEQ ID NO: 769559 - protein, 13 aa, Homo sapiens
  CDR3 for alpha chain variable domain of TCR clone 384780 (TRAV20, TRAJ45)
CAVKKRRCGRTHL

SEQ ID NO: 769560 - protein, 14 aa, Homo sapiens
  CDR3 for beta chain variable domain of TCR clone 384780 (TRBV15, TRBJ2-5)
CATSIGGLGETQYF

SEQ ID NO: 769561 - protein, 15 aa, Homo sapiens
  CDR3 for alpha chain variable domain of TCR clone 384781 (TRAV13-1, TRAJ5)
CAASKDDTGRRALTF

SEQ ID NO: 769562 - protein, 16 aa, Homo sapiens
  CDR3 for beta chain variable domain of TCR clone 384781 (TRBV7-2, TRBJ2-1)
CASSLGRTSGDNEQFF

SEQ ID NO: 769563 - protein, 16 aa, Homo sapiens
  CDR3 for alpha chain variable domain of TCR clone 384782 (TRAV13-1, TRAJ4)
CAASGIWSGGYNKLIF

SEQ ID NO: 769564 - protein, 13 aa, Homo sapiens
  CDR3 for beta chain variable domain of TCR clone 384782 (TRBV20-1, TRBJ1-1)
CSARVGGNTEAFF

SEQ ID NO: 769565 - protein, 14 aa, Homo sapiens
  CDR3 for alpha chain variable domain of TCR clone 384783 (TRAV38-2/DV8, TRAJ29)
CAYRSRSGNTPLGF

SEQ ID NO: 769566 - protein, 17 aa, Homo sapiens
  CDR3 for beta chain variable domain of TCR clone 384783 (TRBV6-1, TRBJ1-2)
CASSGTHSQRGNYGYTF

SEQ ID NO: 769567 - protein, 13 aa, Homo sapiens
  CDR3 for alpha chain variable domain of TCR clone 384784 (TRAV21, TRAJ57)
CAVTQGGSEKLVF

SEQ ID NO: 769568 - protein, 16 aa, Homo sapiens
  CDR3 for beta chain variable domain of TCR clone 384784 (TRBV4-3, TRBJ2-1)
CASSPALGRGVNEQFF

SEQ ID NO: 769569 - protein, 12 aa, Homo sapiens
  CDR3 for alpha chain variable domain of TCR clone 384785 (TRAV3, TRAJ31)
CAVRDGNGRLMF

SEQ ID NO: 769570 - protein, 18 aa, Homo sapiens
  CDR3 for beta chain variable domain of TCR clone 384785 (TRBV7-2, TRBJ2-3)
CASSLKREGSGITDTQYF

SEQ ID NO: 769571 - protein, 15 aa, Homo sapiens
  CDR3 for alpha chain variable domain of TCR clone 384786 (TRAV12-2, TRAJ53)
CAVNGGGGSNYKLTL

SEQ ID NO: 769572 - protein, 16 aa, Homo sapiens
  CDR3 for beta chain variable domain of TCR clone 384786 (TRBV7-3, TRBJ2-2)
CASSLKRGTLSGELFF

SEQ ID NO: 769573 - protein, 16 aa, Homo sapiens
  CDR3 for alpha chain variable domain of TCR clone 384787 (TRAV12-2, TRAJ28)
CAVIRGSGAGSYQLTF

SEQ ID NO: 769574 - protein, 14 aa, Homo sapiens
  CDR3 for beta chain variable domain of TCR clone 384787 (TRBV7-2, TRBJ2-7)
CASRSQGAAYEQYF

SEQ ID NO: 769575 - protein, 17 aa, Homo sapiens
  CDR3 for alpha chain variable domain of TCR clone 384788 (TRAV26-1, TRAJ11)
CIVRVGQSNSGYITLTF

SEQ ID NO: 769576 - protein, 15 aa, Homo sapiens
  CDR3 for beta chain variable domain of TCR clone 384788 (TRBV5-1, TRBJ2-1)
CASKGLAGVYNEQFF

SEQ ID NO: 769577 - protein, 14 aa, Homo sapiens
  CDR3 for alpha chain variable domain of TCR clone 384789 (TRAV12-2, TRAJ13)
CAVKKTGGYQKVTF

SEQ ID NO: 769578 - protein, 14 aa, Homo sapiens
  CDR3 for beta chain variable domain of TCR clone 384789 (TRBV10-3, TRBJ2-1)
CASSSDRAYNEQFF

SEQ ID NO: 769579 - protein, 13 aa, Homo sapiens
  CDR3 for alpha chain variable domain of TCR clone 384790 (TRAV17, TRAJ20)
CAPLGVDDYKLSF

SEQ ID NO: 769580 - protein, 12 aa, Homo sapiens
  CDR3 for beta chain variable domain of TCR clone 384790 (TRBV29-1, TRBJ2-3)
CSVTGGADTQYF

SEQ ID NO: 769581 - protein, 10 aa, Homo sapiens
  CDR3 for alpha chain variable domain of TCR clone 384791 (TRAV26-1, TRAJ22)
CIVSLNFYWF

SEQ ID NO: 769582 - protein, 15 aa, Homo sapiens
  CDR3 for beta chain variable domain of TCR clone 384791 (TRBV4-2, TRBJ1-2)
CASSQRTGGRDGYTF

SEQ ID NO: 769583 - protein, 14 aa, Homo sapiens
  CDR3 for alpha chain variable domain of TCR clone 384792 (TRAV26-1, TRAJ38)
CIADNAGNNRKLIW

SEQ ID NO: 769584 - protein, 14 aa, Homo sapiens
  CDR3 for beta chain variable domain of TCR clone 384792 (TRBV6-1, TRBJ1-3)
CASVQGGGGNTMYF

SEQ ID NO: 769585 - protein, 12 aa, Homo sapiens
  CDR3 for alpha chain variable domain of TCR clone 384793 (TRAV36/DV7, TRAJ54)
CAVVRGAQKLVF

SEQ ID NO: 769586 - protein, 11 aa, Homo sapiens
  CDR3 for beta chain variable domain of TCR clone 384793 (TRBV7-2, TRBJ2-7)
CASSSGLWQYF

SEQ ID NO: 769587 - protein, 17 aa, Homo sapiens
  CDR3 for alpha chain variable domain of TCR clone 384794 (TRAV17, TRAJ28)
CATDPRRGGAGSYQLTF

SEQ ID NO: 769588 - protein, 13 aa, Homo sapiens
  CDR3 for beta chain variable domain of TCR clone 384794 (TRBV19, TRBJ1-2)
CASSVPGQDGYTF

SEQ ID NO: 769589 - protein, 14 aa, Homo sapiens
  CDR3 for alpha chain variable domain of TCR clone 384795 (TRAV17, TRAJ49)
CATDARDTGNQFYV

SEQ ID NO: 769590 - protein, 14 aa, Homo sapiens
  CDR3 for beta chain variable domain of TCR clone 384795 (TRBV5-5, TRBJ1-2)
CASSFGQINYGYTF

SEQ ID NO: 769591 - protein, 18 aa, Homo sapiens
  CDR3 for alpha chain variable domain of TCR clone 384796 (TRAV13-1, TRAJ52)
CAAKNPNAGGTSYGKLTF

SEQ ID NO: 769592 - protein, 12 aa, Homo sapiens
  CDR3 for beta chain variable domain of TCR clone 384796 (TRBV12-4, TRBJ1-1)
CASSLVDTEAFF

SEQ ID NO: 769593 - protein, 16 aa, Homo sapiens
  CDR3 for alpha chain variable domain of TCR clone 384797 (TRAV29/DV5, TRAJ30)
QCTSVQQANRADKIIF

SEQ ID NO: 769594 - protein, 13 aa, Homo sapiens
  CDR3 for beta chain variable domain of TCR clone 384797 (TRBV12-5, TRBJ2-3)
CASQNRGTDTQYF

SEQ ID NO: 769595 - protein, 12 aa, Homo sapiens
  CDR3 for alpha chain variable domain of TCR clone 384798 (TRAV1-1, TRAJ39)
CAVPVVGNMLTF

SEQ ID NO: 769596 - protein, 14 aa, Homo sapiens
  CDR3 for beta chain variable domain of TCR clone 384798 (TRBV13, TRBJ2-5)
CASSLERVGETQYF

SEQ ID NO: 769597 - protein, 11 aa, Homo sapiens
  CDR3 for alpha chain variable domain of TCR clone 384799 (TRAV12-3, TRAJ41)
CSMNARGALNF

SEQ ID NO: 769598 - protein, 16 aa, Homo sapiens
  CDR3 for beta chain variable domain of TCR clone 384799 (TRBV7-8, TRBJ2-3)
CASSTEGQRETDTQYF

SEQ ID NO: 769599 - protein, 14 aa, Homo sapiens
  CDR3 for alpha chain variable domain of TCR clone 384800 (TRAV17, TRAJ22)
CATSPSGSARQLTF

SEQ ID NO: 769600 - protein, 15 aa, Homo sapiens
  CDR3 for beta chain variable domain of TCR clone 384800 (TRBV4-1, TRBJ2-5)
CASSQWDPYQETQYL

SEQ ID NO: 769601 - protein, 11 aa, Homo sapiens
  CDR3 for alpha chain variable domain of TCR clone 384801 (TRAV1-2, TRAJ20)
CAVANDYKLSF

SEQ ID NO: 769602 - protein, 14 aa, Homo sapiens
  CDR3 for beta chain variable domain of TCR clone 384801 (TRBV7-9, TRBJ2-2)
CASSLGHRTGELFF

SEQ ID NO: 769603 - protein, 11 aa, Homo sapiens
  CDR3 for alpha chain variable domain of TCR clone 384802 (TRAV12-2, TRAJ29)
CAVTLRSPLVF

SEQ ID NO: 769604 - protein, 16 aa, Homo sapiens
  CDR3 for beta chain variable domain of TCR clone 384802 (TRBV19, TRBJ1-5)
CASSIDRGGPTQPQHF

SEQ ID NO: 769605 - protein, 16 aa, Homo sapiens
  CDR3 for alpha chain variable domain of TCR clone 384803 (TRAV30, TRAJ24)
CGTEIVDADSWGKFQF

SEQ ID NO: 769606 - protein, 13 aa, Homo sapiens
  CDR3 for beta chain variable domain of TCR clone 384803 (TRBV4-3, TRBJ2-1)
CASSQEVPGKLYF

SEQ ID NO: 769607 - protein, 14 aa, Homo sapiens
  CDR3 for alpha chain variable domain of TCR clone 384804 (TRAV17, TRAJ26)
CATDASNYGQNFVF

SEQ ID NO: 769608 - protein, 14 aa, Homo sapiens
  CDR3 for beta chain variable domain of TCR clone 384804 (TRBV19, TRBJ2-1)
CARGARSFQWEQFF

SEQ ID NO: 769609 - protein, 13 aa, Homo sapiens
  CDR3 for alpha chain variable domain of TCR clone 384805 (TRAV12-3, TRAJ13)
CAMTSGGYQKVTF

SEQ ID NO: 769610 - protein, 20 aa, Homo sapiens
  CDR3 for beta chain variable domain of TCR clone 384805 (TRBV3-1, TRBJ2-6)
CASSPRPGLEGGAGANVLTF

SEQ ID NO: 769611 - protein, 14 aa, Homo sapiens
  CDR3 for alpha chain variable domain of TCR clone 384806 (TRAV16, TRAJ39)
CALSKNNAGNMLTF

SEQ ID NO: 769612 - protein, 17 aa, Homo sapiens
  CDR3 for beta chain variable domain of TCR clone 384806 (TRBV6-6, TRBJ2-1)
CASSYEQFRGPGTRLTV

SEQ ID NO: 769613 - protein, 17 aa, Homo sapiens
  CDR3 for alpha chain variable domain of TCR clone 384807 (TRAV23/DV6, TRAJ3)
CSNHFCFGWSSASKIIF

SEQ ID NO: 769614 - protein, 15 aa, Homo sapiens
  CDR3 for beta chain variable domain of TCR clone 384807 (TRBV19, TRBJ1-6)
CASSTQGAVGSPLLF

SEQ ID NO: 769615 - protein, 16 aa, Homo sapiens
  CDR3 for alpha chain variable domain of TCR clone 384808 (TRAV12-2, TRAJ10)
CAVNRVLTGGGNKLTF

SEQ ID NO: 769616 - protein, 16 aa, Homo sapiens
  CDR3 for beta chain variable domain of TCR clone 384808 (TRBV7-2, TRBJ1-2)
CASSSNQDRRGHGYTF

SEQ ID NO: 769617 - protein, 12 aa, Homo sapiens
  CDR3 for alpha chain variable domain of TCR clone 384809 (TRAV2, TRAJ33)
CAVPDSSYQLIW

SEQ ID NO: 769618 - protein, 17 aa, Homo sapiens
  CDR3 for beta chain variable domain of TCR clone 384809 (TRBV6-5, TRBJ2-3)
CASSYGTSLYKSDTQYF

SEQ ID NO: 769619 - protein, 16 aa, Homo sapiens
  CDR3 for alpha chain variable domain of TCR clone 384810 (TRAV12-2, TRAJ40)
CSVIRGGTSGTYKHIF

SEQ ID NO: 769620 - protein, 13 aa, Homo sapiens
  CDR3 for beta chain variable domain of TCR clone 384810 (TRBV7-9, TRBJ1-2)
CASSLKQNYGYTF

SEQ ID NO: 769621 - protein, 12 aa, Homo sapiens
  CDR3 for alpha chain variable domain of TCR clone 384811 (TRAV13-2, TRAJ8)
CAPWLGFHKLVF

SEQ ID NO: 769622 - protein, 13 aa, Homo sapiens
  CDR3 for beta chain variable domain of TCR clone 384811 (TRBV12-4, TRBJ1-5)
CASSPDRAQPQHF

SEQ ID NO: 769623 - protein, 13 aa, Homo sapiens
  CDR3 for alpha chain variable domain of TCR clone 384812 (TRAV26-1, TRAJ39)
CIVRVGAGNMLTF

SEQ ID NO: 769624 - protein, 14 aa, Homo sapiens
  CDR3 for beta chain variable domain of TCR clone 384812 (TRBV20-1, TRBJ2-5)
CSARRQGIRETQYF

SEQ ID NO: 769625 - protein, 16 aa, Homo sapiens
  CDR3 for alpha chain variable domain of TCR clone 384813 (TRAV12-3, TRAJ58)
CAMTDTEESSGSRLTF

SEQ ID NO: 769626 - protein, 22 aa, Homo sapiens
  CDR3 for beta chain variable domain of TCR clone 384813 (TRBV23-1, TRBJ2-7)
CASSRRLDSGQGYVGGGYEQYF

SEQ ID NO: 769627 - protein, 14 aa, Homo sapiens
  CDR3 for alpha chain variable domain of TCR clone 384814 (TRAV12-2, TRAJ40)
CAVKIPSGTYKYIF

SEQ ID NO: 769628 - protein, 17 aa, Homo sapiens
  CDR3 for beta chain variable domain of TCR clone 384814 (TRBV20-1, TRBJ2-1)
CSAFSGASGSLYNEQFF

SEQ ID NO: 769629 - protein, 14 aa, Homo sapiens
  CDR3 for alpha chain variable domain of TCR clone 384815 (TRAV12-1, TRAJ9)
CVVTGDTGGFITIF

SEQ ID NO: 769630 - protein, 16 aa, Homo sapiens
  CDR3 for beta chain variable domain of TCR clone 384815 (TRBV29-1, TRBJ1-2)
CSVEANRDIANYGYTF

SEQ ID NO: 769631 - protein, 13 aa, Homo sapiens
  CDR3 for alpha chain variable domain of TCR clone 384816 (TRAV21, TRAJ45)
CAAPGGGADGLTF

SEQ ID NO: 769632 - protein, 12 aa, Homo sapiens
  CDR3 for beta chain variable domain of TCR clone 384816 (TRBV11-2, TRBJ2-1)
CASSPGNNEQFF

SEQ ID NO: 769633 - protein, 15 aa, Homo sapiens
  CDR3 for alpha chain variable domain of TCR clone 384817 (TRAV8-3, TRAJ27)
CAVGPSKTNAGKSTF

SEQ ID NO: 769634 - protein, 14 aa, Homo sapiens
  CDR3 for beta chain variable domain of TCR clone 384817 (TRBV12-4, TRBJ1-1)
CASSLGTGGTEAFF

SEQ ID NO: 769635 - protein, 16 aa, Homo sapiens
  CDR3 for alpha chain variable domain of TCR clone 384818 (TRAV38-1, TRAJ56)
CAFMKRQTGANSKLTF

SEQ ID NO: 769636 - protein, 15 aa, Homo sapiens
  CDR3 for beta chain variable domain of TCR clone 384818 (TRBV6-6, TRBJ2-5)
CASSYGKIIQETQYF

SEQ ID NO: 769637 - protein, 16 aa, Homo sapiens
  CDR3 for alpha chain variable domain of TCR clone 384819 (TRAV30, TRAJ24)
CGTEAVDADSWGKFQF

SEQ ID NO: 769638 - protein, 14 aa, Homo sapiens
  CDR3 for beta chain variable domain of TCR clone 384819 (TRBV12-5, TRBJ2-5)
CASGSRTHQETQYF

SEQ ID NO: 769639 - protein, 12 aa, Homo sapiens
  CDR3 for alpha chain variable domain of TCR clone 384820 (TRAV13-1, TRAJ49)
CAASPMGNQFYF

SEQ ID NO: 769640 - protein, 15 aa, Homo sapiens
  CDR3 for beta chain variable domain of TCR clone 384820 (TRBV11-2, TRBJ1-6)
CASSLDPWAVSPLHF

SEQ ID NO: 769641 - protein, 14 aa, Homo sapiens
  CDR3 for alpha chain variable domain of TCR clone 384821 (TRAV2, TRAJ37)
CAVDFTSNTGKLIF

SEQ ID NO: 769642 - protein, 16 aa, Homo sapiens
  CDR3 for beta chain variable domain of TCR clone 384821 (TRBV19, TRBJ2-2)
CASRPPGTGATGELFF

SEQ ID NO: 769643 - protein, 14 aa, Homo sapiens
  CDR3 for alpha chain variable domain of TCR clone 384822 (TRAV26-1, TRAJ38)
CVADNAGNNRKLIW

SEQ ID NO: 769644 - protein, 14 aa, Homo sapiens
  CDR3 for beta chain variable domain of TCR clone 384822 (TRBV13, TRBJ2-5)
CASSLGTAQETQYF

SEQ ID NO: 769645 - protein, 11 aa, Homo sapiens
  CDR3 for alpha chain variable domain of TCR clone 384823 (TRAV2, TRAJ13)
CASGGYQKVTF

SEQ ID NO: 769646 - protein, 13 aa, Homo sapiens
  CDR3 for beta chain variable domain of TCR clone 384823 (TRBV12-4, TRBJ2-2)
CASSPLPPGELFF

SEQ ID NO: 769647 - protein, 12 aa, Homo sapiens
  CDR3 for alpha chain variable domain of TCR clone 384824 (TRAV12-3, TRAJ29)
CAAREGNTPLVF

SEQ ID NO: 769648 - protein, 17 aa, Homo sapiens
  CDR3 for beta chain variable domain of TCR clone 384824 (TRBV18, TRBJ2-1)
CASSPLAAGAGDKEQFF

SEQ ID NO: 769649 - protein, 11 aa, Homo sapiens
  CDR3 for alpha chain variable domain of TCR clone 384825 (TRAV2, TRAJ13)
CASGGYQQVTF

SEQ ID NO: 769650 - protein, 13 aa, Homo sapiens
  CDR3 for beta chain variable domain of TCR clone 384825 (TRBV27, TRBJ2-7)
CASSFVSSYEQYF

SEQ ID NO: 769651 - protein, 16 aa, Homo sapiens
  CDR3 for alpha chain variable domain of TCR clone 384826 (TRAV26-1, TRAJ23)
CIVRVERYNQGGKLIF

SEQ ID NO: 769652 - protein, 15 aa, Homo sapiens
  CDR3 for beta chain variable domain of TCR clone 384826 (TRBV18, TRBJ2-7)
CASSPRGGKGYEQSF

SEQ ID NO: 769653 - protein, 16 aa, Homo sapiens
  CDR3 for alpha chain variable domain of TCR clone 384827 (TRAV14/DV4, TRAJ53)
CAMREGGGGSNYKLTF

SEQ ID NO: 769654 - protein, 18 aa, Homo sapiens
  CDR3 for beta chain variable domain of TCR clone 384827 (TRBV11-2, TRBJ2-6)
CASSLNPFLGTGANVLTF

SEQ ID NO: 769655 - protein, 12 aa, Homo sapiens
  CDR3 for alpha chain variable domain of TCR clone 384828 (TRAV27, TRAJ35)
CAGADFGNVLHC

SEQ ID NO: 769656 - protein, 13 aa, Homo sapiens
  CDR3 for beta chain variable domain of TCR clone 384828 (TRBV3-1, TRBJ2-2)
CASRQTNTGELFF

SEQ ID NO: 769657 - protein, 16 aa, Homo sapiens
  CDR3 for alpha chain variable domain of TCR clone 384829 (TRAV26-1, TRAJ53)
CIVRVAMGGSNYKLTF

SEQ ID NO: 769658 - protein, 13 aa, Homo sapiens
  CDR3 for beta chain variable domain of TCR clone 384829 (TRBV2, TRBJ2-7)
CASSGGIAYEQYF

SEQ ID NO: 769659 - protein, 16 aa, Homo sapiens
  CDR3 for alpha chain variable domain of TCR clone 384830 (TRAV3, TRAJ37)
CAVRGKGSGNTGKLIF

SEQ ID NO: 769660 - protein, 11 aa, Homo sapiens
  CDR3 for beta chain variable domain of TCR clone 384830 (TRBV7-9, TRBJ2-3)
CASSGPDTQYF

SEQ ID NO: 769661 - protein, 15 aa, Homo sapiens
  CDR3 for alpha chain variable domain of TCR clone 384831 (TRAV12-3, TRAJ10)
CASYILTGGGNKLTF

SEQ ID NO: 769662 - protein, 17 aa, Homo sapiens
  CDR3 for beta chain variable domain of TCR clone 384831 (TRBV7-2, TRBJ1-6)
CASSLGPDRGCPSTLGT

SEQ ID NO: 769663 - protein, 12 aa, Homo sapiens
  CDR3 for alpha chain variable domain of TCR clone 384832 (TRAV1-1, TRAJ8)
CAGGTGFQKLVF

SEQ ID NO: 769664 - protein, 11 aa, Homo sapiens
  CDR3 for beta chain variable domain of TCR clone 384832 (TRBV29-1, TRBJ2-5)
CSEDRTGTQYF

SEQ ID NO: 769665 - protein, 18 aa, Homo sapiens
  CDR3 for alpha chain variable domain of TCR clone 384833 (TRAV26-2, TRAJ45)
CILRVDKYSGGGAVGLTF

SEQ ID NO: 769666 - protein, 16 aa, Homo sapiens
  CDR3 for beta chain variable domain of TCR clone 384833 (TRBV2, TRBJ1-4)
CASNLLQGATNEKLFF

SEQ ID NO: 769667 - protein, 14 aa, Homo sapiens
  CDR3 for alpha chain variable domain of TCR clone 384834 (TRAV8-3, TRAJ4)
CAVGASGGYNKLLF

SEQ ID NO: 769668 - protein, 16 aa, Homo sapiens
  CDR3 for beta chain variable domain of TCR clone 384834 (TRBV4-3, TRBJ2-2)
CASSHLQGSGTGELFF

SEQ ID NO: 769669 - protein, 11 aa, Homo sapiens
  CDR3 for alpha chain variable domain of TCR clone 384835 (TRAV23/DV6, TRAJ58)
CAARLLRGETS

SEQ ID NO: 769670 - protein, 15 aa, Homo sapiens
  CDR3 for beta chain variable domain of TCR clone 384835 (TRBV4-1, TRBJ1-2)
CASSQDRNRDYGYTF

SEQ ID NO: 769671 - protein, 15 aa, Homo sapiens
  CDR3 for alpha chain variable domain of TCR clone 384836 (TRAV3, TRAJ3)
CAVRDRDSSASKIIF

SEQ ID NO: 769672 - protein, 18 aa, Homo sapiens
  CDR3 for beta chain variable domain of TCR clone 384836 (TRBV25-1, TRBJ1-2)
RASSGLQNGQGLICGYTF

SEQ ID NO: 769673 - protein, 16 aa, Homo sapiens
  CDR3 for alpha chain variable domain of TCR clone 384837 (TRAV3, TRAJ37)
CAVRGKGSGNTGKLIF

SEQ ID NO: 769674 - protein, 13 aa, Homo sapiens
  CDR3 for beta chain variable domain of TCR clone 384837 (TRBV14, TRBJ2-7)
YASSQDRRYEQYF

SEQ ID NO: 769675 - protein, 12 aa, Homo sapiens
  CDR3 for alpha chain variable domain of TCR clone 384838 (TRAV8-3, TRAJ41)
CAVGALGYARNF

SEQ ID NO: 769676 - protein, 16 aa, Homo sapiens
  CDR3 for beta chain variable domain of TCR clone 384838 (TRBV7-6, TRBJ2-3)
CASSDSRGEGTDTQYF

SEQ ID NO: 769677 - protein, 18 aa, Homo sapiens
  CDR3 for alpha chain variable domain of TCR clone 384839 (TRAV21, TRAJ52)
CAVRPSPAGGTSYGKLTF

SEQ ID NO: 769678 - protein, 14 aa, Homo sapiens
  CDR3 for beta chain variable domain of TCR clone 384839 (TRBV7-9, TRBJ2-7)
CASSLVAGPYEQYF

SEQ ID NO: 769679 - protein, 14 aa, Homo sapiens
  CDR3 for alpha chain variable domain of TCR clone 384840 (TRAV29/DV5, TRAJ36)
CTARRTTGANNLFF

SEQ ID NO: 769680 - protein, 14 aa, Homo sapiens
  CDR3 for beta chain variable domain of TCR clone 384840 (TRBV12-5, TRBJ2-5)
CASGSRTHQETQYF

SEQ ID NO: 769681 - protein, 16 aa, Homo sapiens
  CDR3 for alpha chain variable domain of TCR clone 384841 (TRAV12-3, TRAJ53)
CAMNPGGGGSNYKLTF

SEQ ID NO: 769682 - protein, 17 aa, Homo sapiens
  CDR3 for beta chain variable domain of TCR clone 384841 (TRBV20-1, TRBJ2-2)
CSASGSGQGGLTGELFF

SEQ ID NO: 769683 - protein, 10 aa, Homo sapiens
  CDR3 for alpha chain variable domain of TCR clone 384842 (TRAV30, TRAJ48)
CGIGNEKLTF

SEQ ID NO: 769684 - protein, 14 aa, Homo sapiens
  CDR3 for beta chain variable domain of TCR clone 384842 (TRBV7-6, TRBJ2-3)
CASSVGGGTDTQYF

SEQ ID NO: 769685 - protein, 15 aa, Homo sapiens
  CDR3 for alpha chain variable domain of TCR clone 384843 (TRAV13-2, TRAJ5)
CAENPHWTGRRELTF

SEQ ID NO: 769686 - protein, 16 aa, Homo sapiens
  CDR3 for beta chain variable domain of TCR clone 384843 (TRBV7-9, TRBJ1-3)
CASSQTSGLRMGTIYF

SEQ ID NO: 769687 - protein, 16 aa, Homo sapiens
  CDR3 for alpha chain variable domain of TCR clone 384844 (TRAV8-3, TRAJ47)
CAVGEAGQEYGNKLVF

SEQ ID NO: 769688 - protein, 14 aa, Homo sapiens
  CDR3 for beta chain variable domain of TCR clone 384844 (TRBV4-1, TRBJ2-2)
CASSQAVNTGELFF

SEQ ID NO: 769689 - protein, 14 aa, Homo sapiens
  CDR3 for alpha chain variable domain of TCR clone 384845 (TRAV13-1, TRAJ26)
CTAPKGPDGQNFVF

SEQ ID NO: 769690 - protein, 15 aa, Homo sapiens
  CDR3 for beta chain variable domain of TCR clone 384845 (TRBV28, TRBJ2-5)
CASSFRQGALETQYF

SEQ ID NO: 769691 - protein, 13 aa, Homo sapiens
  CDR3 for alpha chain variable domain of TCR clone 384846 (TRAV21, TRAJ20)
CAVGVFADYKLSF

SEQ ID NO: 769692 - protein, 13 aa, Homo sapiens
  CDR3 for beta chain variable domain of TCR clone 384846 (TRBV20-1, TRBJ2-5)
CSAREGGKETQYF

SEQ ID NO: 769693 - protein, 14 aa, Homo sapiens
  CDR3 for alpha chain variable domain of TCR clone 384847 (TRAV8-3, TRAJ4)
CAVGAAGGYNKLIF

SEQ ID NO: 769694 - protein, 14 aa, Homo sapiens
  CDR3 for beta chain variable domain of TCR clone 384847 (TRBV19, TRBJ2-1)
CASQTFVLSGEQFF

SEQ ID NO: 769695 - protein, 12 aa, Homo sapiens
  CDR3 for alpha chain variable domain of TCR clone 384848 (TRAV27, TRAJ13)
CAGAGDYQKVTF

SEQ ID NO: 769696 - protein, 15 aa, Homo sapiens
  CDR3 for beta chain variable domain of TCR clone 384848 (TRBV20-1, TRBJ2-6)
CSARDRGPGANVLTF

SEQ ID NO: 769697 - protein, 16 aa, Homo sapiens
  CDR3 for alpha chain variable domain of TCR clone 384849 (TRAV6, TRAJ37)
CALDIFGPSNTGKLIF

SEQ ID NO: 769698 - protein, 14 aa, Homo sapiens
  CDR3 for beta chain variable domain of TCR clone 384849 (TRBV5-7, TRBJ2-7)
CASSLRSATYEQYF

SEQ ID NO: 769699 - protein, 16 aa, Homo sapiens
  CDR3 for alpha chain variable domain of TCR clone 384850 (TRAV16, TRAJ4)
CALSRMFSVGYNKLIF

SEQ ID NO: 769700 - protein, 13 aa, Homo sapiens
  CDR3 for beta chain variable domain of TCR clone 384850 (TRBV7-3, TRBJ2-7)
CASSQAGGYEQYF

SEQ ID NO: 769701 - protein, 14 aa, Homo sapiens
  CDR3 for alpha chain variable domain of TCR clone 384851 (TRAV13-1, TRAJ44)
CAAKATGTASKITF

SEQ ID NO: 769702 - protein, 16 aa, Homo sapiens
  CDR3 for beta chain variable domain of TCR clone 384851 (TRBV7-9, TRBJ2-6)
CASSLKGPLRANVLTF

SEQ ID NO: 769703 - protein, 14 aa, Homo sapiens
  CDR3 for alpha chain variable domain of TCR clone 384852 (TRAV23/DV6, TRAJ37)
CAASTSSNTGKLIF

SEQ ID NO: 769704 - protein, 13 aa, Homo sapiens
  CDR3 for beta chain variable domain of TCR clone 384852 (TRBV7-7, TRBJ1-1)
CDSSLGANTEAFF

SEQ ID NO: 769705 - protein, 15 aa, Homo sapiens
  CDR3 for alpha chain variable domain of TCR clone 384853 (TRAV4, TRAJ32)
CLVGGDGGATNKLIF

SEQ ID NO: 769706 - protein, 16 aa, Homo sapiens
  CDR3 for beta chain variable domain of TCR clone 384853 (TRBV13, TRBJ2-2)
CASSPRTGEHTGELFF

SEQ ID NO: 769707 - protein, 15 aa, Homo sapiens
  CDR3 for alpha chain variable domain of TCR clone 384854 (TRAV12-2, TRAJ53)
CAVNGGGGSNYKLTF

SEQ ID NO: 769708 - protein, 15 aa, Homo sapiens
  CDR3 for beta chain variable domain of TCR clone 384854 (TRBV20-1, TRBJ2-7)
CSARYRVSGMDEQYF

SEQ ID NO: 769709 - protein, 13 aa, Homo sapiens
  CDR3 for alpha chain variable domain of TCR clone 384855 (TRAV13-1, TRAJ45)
CAAKGGGADGLTF

SEQ ID NO: 769710 - protein, 11 aa, Homo sapiens
  CDR3 for beta chain variable domain of TCR clone 384855 (TRBV28, TRBJ2-3)
CASSFLDTQYF

SEQ ID NO: 769711 - protein, 13 aa, Homo sapiens
  CDR3 for alpha chain variable domain of TCR clone 384856 (TRAV12-1, TRAJ6)
CVVYPGGSYKPTF

SEQ ID NO: 769712 - protein, 13 aa, Homo sapiens
  CDR3 for beta chain variable domain of TCR clone 384856 (TRBV20-1, TRBJ1-3)
CSAGAYSGNTIYF

SEQ ID NO: 769713 - protein, 16 aa, Homo sapiens
  CDR3 for alpha chain variable domain of TCR clone 384857 (TRAV3, TRAJ32)
CAVRDMGGGATNKLIL

SEQ ID NO: 769714 - protein, 11 aa, Homo sapiens
  CDR3 for beta chain variable domain of TCR clone 384857 (TRBV12-4, TRBJ2-1)
CASSRLNEQFF

SEQ ID NO: 769715 - protein, 16 aa, Homo sapiens
  CDR3 for alpha chain variable domain of TCR clone 384858 (TRAV35, TRAJ29)
CAGPIRGISGNTPLVF

SEQ ID NO: 769716 - protein, 14 aa, Homo sapiens
  CDR3 for beta chain variable domain of TCR clone 384858 (TRBV11-2, TRBJ2-7)
CASSLGAGAYEQYF

SEQ ID NO: 769717 - protein, 12 aa, Homo sapiens
  CDR3 for alpha chain variable domain of TCR clone 384859 (TRAV12-3, TRAJ17)
CAMTLTGNKLTF

SEQ ID NO: 769718 - protein, 15 aa, Homo sapiens
  CDR3 for beta chain variable domain of TCR clone 384859 (TRBV11-2, TRBJ2-2)
CASSADRVNAGELFF

SEQ ID NO: 769719 - protein, 13 aa, Homo sapiens
  CDR3 for alpha chain variable domain of TCR clone 384860 (TRAV29/DV5, TRAJ34)
CAARVDNTDQLIF

SEQ ID NO: 769720 - protein, 17 aa, Homo sapiens
  CDR3 for beta chain variable domain of TCR clone 384860 (TRBV7-3, TRBJ2-5)
CASSLGSGRSGSETQYF

SEQ ID NO: 769721 - protein, 14 aa, Homo sapiens
  CDR3 for alpha chain variable domain of TCR clone 384861 (TRAV35, TRAJ50)
CAGHRKTSYDKVIF

SEQ ID NO: 769722 - protein, 12 aa, Homo sapiens
  CDR3 for beta chain variable domain of TCR clone 384861 (TRBV5-4, TRBJ2-5)
CASNRAGETQYF

SEQ ID NO: 769723 - protein, 16 aa, Homo sapiens
  CDR3 for alpha chain variable domain of TCR clone 384862 (TRAV21, TRAJ45)
CAVEAPRGDQEEVLTD

SEQ ID NO: 769724 - protein, 13 aa, Homo sapiens
  CDR3 for beta chain variable domain of TCR clone 384862 (TRBV4-1, TRBJ2-7)
LGVSRGDRHEQYF

SEQ ID NO: 769725 - protein, 13 aa, Homo sapiens
  CDR3 for alpha chain variable domain of TCR clone 384863 (TRAV21, TRAJ37)
CAVSSGNTGKLIF

SEQ ID NO: 769726 - protein, 15 aa, Homo sapiens
  CDR3 for beta chain variable domain of TCR clone 384863 (TRBV12-4, TRBJ1-2)
CASSFVDRGNYSYTF

SEQ ID NO: 769727 - protein, 13 aa, Homo sapiens
  CDR3 for alpha chain variable domain of TCR clone 384864 (TRAV8-3, TRAJ28)
CAVGAVGSYQLTF

SEQ ID NO: 769728 - protein, 12 aa, Homo sapiens
  CDR3 for beta chain variable domain of TCR clone 384864 (TRBV7-9, TRBJ2-7)
CASSVEGYEQYF

SEQ ID NO: 769729 - protein, 16 aa, Homo sapiens
  CDR3 for alpha chain variable domain of TCR clone 384865 (TRAV3, TRAJ10)
CAVGDMRAGGGKKLTF

SEQ ID NO: 769730 - protein, 14 aa, Homo sapiens
  CDR3 for beta chain variable domain of TCR clone 384865 (TRBV25-1, TRBJ1-1)
CASTHLGGNTEAFF

SEQ ID NO: 769731 - protein, 13 aa, Homo sapiens
  CDR3 for alpha chain variable domain of TCR clone 384866 (TRAV35, TRAJ36)
CGGPRIGANNLFF

SEQ ID NO: 769732 - protein, 15 aa, Homo sapiens
  CDR3 for beta chain variable domain of TCR clone 384866 (TRBV28, TRBJ2-5)
CASSPPWSYQETQYF

SEQ ID NO: 769733 - protein, 13 aa, Homo sapiens
  CDR3 for alpha chain variable domain of TCR clone 384867 (TRAV27, TRAJ57)
CRSAQGGSEKLFF

SEQ ID NO: 769734 - protein, 11 aa, Homo sapiens
  CDR3 for beta chain variable domain of TCR clone 384867 (TRBV11-2, TRBJ1-1)
CASSINTEAFF

SEQ ID NO: 769735 - protein, 12 aa, Homo sapiens
  CDR3 for alpha chain variable domain of TCR clone 384868 (TRAV16, TRAJ26)
CASKDGGQNFVF

SEQ ID NO: 769736 - protein, 14 aa, Homo sapiens
  CDR3 for beta chain variable domain of TCR clone 384868 (TRBV7-6, TRBJ2-3)
CASSVAGGTDTQYF

SEQ ID NO: 769737 - protein, 18 aa, Homo sapiens
  CDR3 for alpha chain variable domain of TCR clone 384869 (TRAV13-1, TRAJ52)
CAAKNPNAGDTSYGKLTF

SEQ ID NO: 769738 - protein, 12 aa, Homo sapiens
  CDR3 for beta chain variable domain of TCR clone 384869 (TRBV28, TRBJ2-3)
CASSLYRDTQYF

SEQ ID NO: 769739 - protein, 12 aa, Homo sapiens
  CDR3 for alpha chain variable domain of TCR clone 384870 (TRAV13-1, TRAJ21)
CAAKEGFNKFYF

SEQ ID NO: 769740 - protein, 20 aa, Homo sapiens
  CDR3 for beta chain variable domain of TCR clone 384870 (TRBV7-8, TRBJ2-2)
WASSHLLPGPTIHITGELFF

SEQ ID NO: 769741 - protein, 17 aa, Homo sapiens
  CDR3 for alpha chain variable domain of TCR clone 384871 (TRAV3, TRAJ6)
CAVSRRTDTGGSYIPTF

SEQ ID NO: 769742 - protein, 15 aa, Homo sapiens
  CDR3 for beta chain variable domain of TCR clone 384871 (TRBV18, TRBJ2-1)
CASSPPSASYNEQFF

SEQ ID NO: 769743 - protein, 15 aa, Homo sapiens
  CDR3 for alpha chain variable domain of TCR clone 384872 (TRAV23/DV6, TRAJ44)
CTARTLTGTASKLTF

SEQ ID NO: 769744 - protein, 17 aa, Homo sapiens
  CDR3 for beta chain variable domain of TCR clone 384872 (TRBV24-1, TRBJ2-1)
CATSDVSTSGTYNEQFF

SEQ ID NO: 769745 - protein, 22 aa, Homo sapiens
  CDR3 for alpha chain variable domain of TCR clone 384873 (TRAV8-3, TRAJ32)
CAVEVVLQKSSSLELALCLLSS

SEQ ID NO: 769746 - protein, 15 aa, Homo sapiens
  CDR3 for beta chain variable domain of TCR clone 384873 (TRBV6-3, TRBJ2-7)
CASSSPGTVFYEQYF

SEQ ID NO: 769747 - protein, 11 aa, Homo sapiens
  CDR3 for alpha chain variable domain of TCR clone 384874 (TRAV2, TRAJ13)
CASVGYQKVAF

SEQ ID NO: 769748 - protein, 14 aa, Homo sapiens
  CDR3 for beta chain variable domain of TCR clone 384874 (TRBV7-3, TRBJ2-1)
CASSLAGGTNEQFF

SEQ ID NO: 769749 - protein, 13 aa, Homo sapiens
  CDR3 for alpha chain variable domain of TCR clone 384875 (TRAV2, TRAJ29)
CAVYSSGNTPLVF

SEQ ID NO: 769750 - protein, 16 aa, Homo sapiens
  CDR3 for beta chain variable domain of TCR clone 384875 (TRBV7-3, TRBJ2-3)
CASSSLGGGSRDTQYF

SEQ ID NO: 769751 - protein, 18 aa, Homo sapiens
  CDR3 for alpha chain variable domain of TCR clone 384876 (TRAV9-2, TRAJ52)
CALSRHNAGCTSYGKLTF

SEQ ID NO: 769752 - protein, 16 aa, Homo sapiens
  CDR3 for beta chain variable domain of TCR clone 384876 (TRBV19, TRBJ2-1)
CASSKAGPSSYNEQFF

SEQ ID NO: 769753 - protein, 18 aa, Homo sapiens
  CDR3 for alpha chain variable domain of TCR clone 384877 (TRAV12-3, TRAJ52)
CAMSVGGAGGTSYGKLTF

SEQ ID NO: 769754 - protein, 15 aa, Homo sapiens
  CDR3 for beta chain variable domain of TCR clone 384877 (TRBV27, TRBJ1-6)
CASSVDRGLGSPLHL

SEQ ID NO: 769755 - protein, 11 aa, Homo sapiens
  CDR3 for alpha chain variable domain of TCR clone 384878 (TRAV4, TRAJ23)
CLLDQGGKLIF

SEQ ID NO: 769756 - protein, 14 aa, Homo sapiens
  CDR3 for beta chain variable domain of TCR clone 384878 (TRBV12-5, TRBJ2-5)
CASGSRTHQETQYF

SEQ ID NO: 769757 - protein, 14 aa, Homo sapiens
  CDR3 for alpha chain variable domain of TCR clone 384879 (TRAV8-6, TRAJ29)
CAVSRASGDTPLVF

SEQ ID NO: 769758 - protein, 13 aa, Homo sapiens
  CDR3 for beta chain variable domain of TCR clone 384879 (TRBV19, TRBJ1-5)
CASSEGSNKHQHF

SEQ ID NO: 769759 - protein, 12 aa, Homo sapiens
  CDR3 for alpha chain variable domain of TCR clone 384880 (TRAV12-3, TRAJ17)
CAMTLTGNKLTF

SEQ ID NO: 769760 - protein, 16 aa, Homo sapiens
  CDR3 for beta chain variable domain of TCR clone 384880 (TRBV7-6, TRBJ2-5)
CASGETSGRAVETQYF

SEQ ID NO: 769761 - protein, 12 aa, Homo sapiens
  CDR3 for alpha chain variable domain of TCR clone 384881 (TRAV35, TRAJ49)
CAGWNTGNQFYF

SEQ ID NO: 769762 - protein, 13 aa, Homo sapiens
  CDR3 for beta chain variable domain of TCR clone 384881 (TRBV7-9, TRBJ2-3)
CASSPGSTDTQYF

SEQ ID NO: 769763 - protein, 14 aa, Homo sapiens
  CDR3 for alpha chain variable domain of TCR clone 384882 (TRAV9-2, TRAJ39)
CALYIYNAGKMLTF

SEQ ID NO: 769764 - protein, 14 aa, Homo sapiens
  CDR3 for beta chain variable domain of TCR clone 384882 (TRBV19, TRBJ2-1)
CASPTFVLSGEQFF

SEQ ID NO: 769765 - protein, 13 aa, Homo sapiens
  CDR3 for alpha chain variable domain of TCR clone 384883 (TRAV23/DV6, TRAJ22)
CAPYSGSARQLTF

SEQ ID NO: 769766 - protein, 17 aa, Homo sapiens
  CDR3 for beta chain variable domain of TCR clone 384883 (TRBV20-1, TRBJ2-7)
CSAESQPRTSTSSTSGR

SEQ ID NO: 769767 - protein, 13 aa, Homo sapiens
  CDR3 for alpha chain variable domain of TCR clone 384884 (TRAV13-1, TRAJ10)
CAATAGGGNKLTF

SEQ ID NO: 769768 - protein, 14 aa, Homo sapiens
  CDR3 for beta chain variable domain of TCR clone 384884 (TRBV12-4, TRBJ2-7)
CASSPAGLKYEQHF

SEQ ID NO: 769769 - protein, 14 aa, Homo sapiens
  CDR3 for alpha chain variable domain of TCR clone 384885 (TRAV2, TRAJ37)
CAVGGSSNTGKLIF

SEQ ID NO: 769770 - protein, 15 aa, Homo sapiens
  CDR3 for beta chain variable domain of TCR clone 384885 (TRBV24-1, TRBJ2-4)
CATSDPRDRANIQYF

SEQ ID NO: 769771 - protein, 16 aa, Homo sapiens
  CDR3 for alpha chain variable domain of TCR clone 384886 (TRAV38-1, TRAJ42)
CAFMKLGGGSQGNLIF

SEQ ID NO: 769772 - protein, 14 aa, Homo sapiens
  CDR3 for beta chain variable domain of TCR clone 384886 (TRBV27, TRBJ1-1)
CASSLLSGLSEAFF

SEQ ID NO: 769773 - protein, 15 aa, Homo sapiens
  CDR3 for alpha chain variable domain of TCR clone 384887 (TRAV8-3, TRAJ23)
CAVGDRYNQGGKLIF

SEQ ID NO: 769774 - protein, 22 aa, Homo sapiens
  CDR3 for beta chain variable domain of TCR clone 384887 (TRBV29-1, TRBJ2-5)
TVSNMSPEDSSIHLCSAGTQYF

SEQ ID NO: 769775 - protein, 12 aa, Homo sapiens
  CDR3 for alpha chain variable domain of TCR clone 384888 (TRAV14/DV4, TRAJ50)
CAMREGNTKVIF

SEQ ID NO: 769776 - protein, 16 aa, Homo sapiens
  CDR3 for beta chain variable domain of TCR clone 384888 (TRBV28, TRBJ2-3)
CASSLSGQTSTDTQYF

SEQ ID NO: 769777 - protein, 13 aa, Homo sapiens
  CDR3 for alpha chain variable domain of TCR clone 384889 (TRAV2, TRAJ23)
CAVMGNQGGKLIF

SEQ ID NO: 769778 - protein, 14 aa, Homo sapiens
  CDR3 for beta chain variable domain of TCR clone 384889 (TRBV11-2, TRBJ2-1)
CASSRATSYNAQFF

SEQ ID NO: 769779 - protein, 11 aa, Homo sapiens
  CDR3 for alpha chain variable domain of TCR clone 384890 (TRAV3, TRAJ21)
CAVGNFKNFYF

SEQ ID NO: 769780 - protein, 17 aa, Homo sapiens
  CDR3 for beta chain variable domain of TCR clone 384890 (TRBV24-1, TRBJ2-1)
CATSDVSTSGTYNEQFF

SEQ ID NO: 769781 - protein, 15 aa, Homo sapiens
  CDR3 for alpha chain variable domain of TCR clone 384891 (TRAV25, TRAJ52)
CAGRPGGTSYGELTF

SEQ ID NO: 769782 - protein, 16 aa, Homo sapiens
  CDR3 for beta chain variable domain of TCR clone 384891 (TRBV7-2, TRBJ1-6)
CASSSFESSYNSPLHF

SEQ ID NO: 769783 - protein, 14 aa, Homo sapiens
  CDR3 for alpha chain variable domain of TCR clone 384892 (TRAV12-2, TRAJ11)
CAVNMNSGYGTLTF

SEQ ID NO: 769784 - protein, 13 aa, Homo sapiens
  CDR3 for beta chain variable domain of TCR clone 384892 (TRBV6-1, TRBJ1-2)
CASSDSPSYGYTF

SEQ ID NO: 769785 - protein, 14 aa, Homo sapiens
  CDR3 for alpha chain variable domain of TCR clone 384893 (TRAV1-2, TRAJ17)
CALRRRAAGNKLTF

SEQ ID NO: 769786 - protein, 13 aa, Homo sapiens
  CDR3 for beta chain variable domain of TCR clone 384893 (TRBV9, TRBJ2-1)
CASSVGQGGEQFF

SEQ ID NO: 769787 - protein, 18 aa, Homo sapiens
  CDR3 for alpha chain variable domain of TCR clone 384894 (TRAV12-3, TRAJ52)
CAMSVGGAGGTSYGKLTF

SEQ ID NO: 769788 - protein, 16 aa, Homo sapiens
  CDR3 for beta chain variable domain of TCR clone 384894 (TRBV4-1, TRBJ2-7)
CASSQEWTSGPLEQYF

SEQ ID NO: 769789 - protein, 13 aa, Homo sapiens
  CDR3 for alpha chain variable domain of TCR clone 384895 (TRAV2, TRAJ15)
CAVAAQAGTALIF

SEQ ID NO: 769790 - protein, 16 aa, Homo sapiens
  CDR3 for beta chain variable domain of TCR clone 384895 (TRBV5-1, TRBJ1-1)
CASSSGGNSLNTEAFF

SEQ ID NO: 769791 - protein, 13 aa, Homo sapiens
  CDR3 for alpha chain variable domain of TCR clone 384896 (TRAV27, TRAJ49)
CAPRPYTGNQFYF

SEQ ID NO: 769792 - protein, 14 aa, Homo sapiens
  CDR3 for beta chain variable domain of TCR clone 384896 (TRBV12-5, TRBJ2-5)
CASGSRTRQETQYF

SEQ ID NO: 769793 - protein, 14 aa, Homo sapiens
  CDR3 for alpha chain variable domain of TCR clone 384897 (TRAV26-1, TRAJ34)
CIVRESYNTDKLIF

SEQ ID NO: 769794 - protein, 13 aa, Homo sapiens
  CDR3 for beta chain variable domain of TCR clone 384897 (TRBV19, TRBJ2-7)
CASRKAGGSEQYF

SEQ ID NO: 769795 - protein, 12 aa, Homo sapiens
  CDR3 for alpha chain variable domain of TCR clone 384898 (TRAV13-1, TRAJ21)
CAAKEGFNKFYF

SEQ ID NO: 769796 - protein, 13 aa, Homo sapiens
  CDR3 for beta chain variable domain of TCR clone 384898 (TRBV7-9, TRBJ2-1)
CASSLGIVNEQFF

SEQ ID NO: 769797 - protein, 18 aa, Homo sapiens
  CDR3 for alpha chain variable domain of TCR clone 384899 (TRAV29/DV5, )
CAANTGNNHIQNPDPAVY

SEQ ID NO: 769798 - protein, 16 aa, Homo sapiens
  CDR3 for beta chain variable domain of TCR clone 384899 (TRBV7-3, TRBJ2-2)
CASSLKRGTLSGELFF

SEQ ID NO: 769799 - protein, 13 aa, Homo sapiens
  CDR3 for alpha chain variable domain of TCR clone 384900 (TRAV17, TRAJ13)
CATDSGGYQKVTF

SEQ ID NO: 769800 - protein, 15 aa, Homo sapiens
  CDR3 for beta chain variable domain of TCR clone 384900 (TRBV20-1, TRBJ2-1)
CSARVGGVGVLEQFF

SEQ ID NO: 769801 - protein, 22 aa, Homo sapiens
  CDR3 for alpha chain variable domain of TCR clone 384901 (TRAV39, TRAJ49)
PCMTSLPPTSVPWTNTGKQFYF

SEQ ID NO: 769802 - protein, 17 aa, Homo sapiens
  CDR3 for beta chain variable domain of TCR clone 384901 (TRBV20-1, TRBJ2-1)
CSARDRRRASSYNEQFF

SEQ ID NO: 769803 - protein, 13 aa, Homo sapiens
  CDR3 for alpha chain variable domain of TCR clone 384902 (TRAV8-1, TRAJ34)
CAVNGKGTDKLIL

SEQ ID NO: 769804 - protein, 13 aa, Homo sapiens
  CDR3 for beta chain variable domain of TCR clone 384902 (TRBV20-1, TRBJ2-5)
CSARLAGVETQYF

SEQ ID NO: 769805 - protein, 16 aa, Homo sapiens
  CDR3 for alpha chain variable domain of TCR clone 384903 (TRAV27, TRAJ13)
CAGAKSDSGGYQKVTF

SEQ ID NO: 769806 - protein, 12 aa, Homo sapiens
  CDR3 for beta chain variable domain of TCR clone 384903 (TRBV11-2, TRBJ2-2)
CASSLGGGELVF

SEQ ID NO: 769807 - protein, 21 aa, Homo sapiens
  CDR3 for alpha chain variable domain of TCR clone 384904 (TRAV8-3, TRAJ32)
CAVEVVLQTSSSLEPALCLLS

SEQ ID NO: 769808 - protein, 15 aa, Homo sapiens
  CDR3 for beta chain variable domain of TCR clone 384904 (TRBV7-2, TRBJ2-1)
CASSSRTSREDEQFF

SEQ ID NO: 769809 - protein, 16 aa, Homo sapiens
  CDR3 for alpha chain variable domain of TCR clone 384905 (TRAV8-3, TRAJ52)
CAVQPAGGTSYGKLTF

SEQ ID NO: 769810 - protein, 15 aa, Homo sapiens
  CDR3 for beta chain variable domain of TCR clone 384905 (TRBV11-2, TRBJ2-7)
CASSLAGGEATEQYF

SEQ ID NO: 769811 - protein, 16 aa, Homo sapiens
  CDR3 for alpha chain variable domain of TCR clone 384906 (TRAV16, TRAJ52)
CALSAAGGTSAGKLTF

SEQ ID NO: 769812 - protein, 12 aa, Homo sapiens
  CDR3 for beta chain variable domain of TCR clone 384906 (TRBV12-4, TRBJ1-3)
CASSFSGNTIYF

SEQ ID NO: 769813 - protein, 13 aa, Homo sapiens
  CDR3 for alpha chain variable domain of TCR clone 384907 (TRAV8-1, TRAJ32)
CAADGGATNMLIF

SEQ ID NO: 769814 - protein, 15 aa, Homo sapiens
  CDR3 for beta chain variable domain of TCR clone 384907 (TRBV28, TRBJ2-1)
CASSGLAEVDNEQFF

SEQ ID NO: 769815 - protein, 13 aa, Homo sapiens
  CDR3 for alpha chain variable domain of TCR clone 384908 (TRAV12-2, TRAJ20)
CAVNRFDDYKLSF

SEQ ID NO: 769816 - protein, 14 aa, Homo sapiens
  CDR3 for beta chain variable domain of TCR clone 384908 (TRBV6-1, TRBJ1-3)
CASVQGGGGNTIYF

SEQ ID NO: 769817 - protein, 15 aa, Homo sapiens
  CDR3 for alpha chain variable domain of TCR clone 384909 (TRAV3, TRAJ5)
CAVRDLDTGRRALPF

SEQ ID NO: 769818 - protein, 14 aa, Homo sapiens
  CDR3 for beta chain variable domain of TCR clone 384909 (TRBV25-1, TRBJ1-4)
CASSGGGQPEKLFF

SEQ ID NO: 769819 - protein, 13 aa, Homo sapiens
  CDR3 for alpha chain variable domain of TCR clone 384910 (TRAV2, TRAJ40)
CAVVASGTYKYIF

SEQ ID NO: 769820 - protein, 14 aa, Homo sapiens
  CDR3 for beta chain variable domain of TCR clone 384910 (TRBV19, TRBJ2-1)
CASPTLVLIGEQFF

SEQ ID NO: 769821 - protein, 14 aa, Homo sapiens
  CDR3 for alpha chain variable domain of TCR clone 384911 (TRAV17, TRAJ35)
CATDRLGLGNVLHC

SEQ ID NO: 769822 - protein, 14 aa, Homo sapiens
  CDR3 for beta chain variable domain of TCR clone 384911 (TRBV7-8, TRBJ2-3)
CASSLEAGTDTQYF

SEQ ID NO: 769823 - protein, 14 aa, Homo sapiens
  CDR3 for alpha chain variable domain of TCR clone 384912 (TRAV12-3, TRAJ10)
SHLPLTGGGNKLTF

SEQ ID NO: 769824 - protein, 17 aa, Homo sapiens
  CDR3 for beta chain variable domain of TCR clone 384912 (TRBV7-3, TRBJ2-3)
CASSLMKRMRGADTQNF

SEQ ID NO: 769825 - protein, 11 aa, Homo sapiens
  CDR3 for alpha chain variable domain of TCR clone 384913 (TRAV1-1, TRAJ23)
CAVRQGGKLIF

SEQ ID NO: 769826 - protein, 15 aa, Homo sapiens
  CDR3 for beta chain variable domain of TCR clone 384913 (TRBV7-8, TRBJ2-5)
CASSKPTGPQETQYF

SEQ ID NO: 769827 - protein, 14 aa, Homo sapiens
  CDR3 for alpha chain variable domain of TCR clone 384914 (TRAV23/DV6, TRAJ8)
CAASKATGFQQLVF

SEQ ID NO: 769828 - protein, 15 aa, Homo sapiens
  CDR3 for beta chain variable domain of TCR clone 384914 (TRBV28, TRBJ2-3)
CASSPDRLGANTQYF

SEQ ID NO: 769829 - protein, 12 aa, Homo sapiens
  CDR3 for alpha chain variable domain of TCR clone 384915 (TRAV2, TRAJ9)
CAVGAGGFKTIF

SEQ ID NO: 769830 - protein, 15 aa, Homo sapiens
  CDR3 for beta chain variable domain of TCR clone 384915 (TRBV29-1, TRBJ2-1)
CSVPTGLALYNEQFF

SEQ ID NO: 769831 - protein, 15 aa, Homo sapiens
  CDR3 for alpha chain variable domain of TCR clone 384916 (TRAV4, TRAJ39)
CLVGPNNNAGNMLTF

SEQ ID NO: 769832 - protein, 15 aa, Homo sapiens
  CDR3 for beta chain variable domain of TCR clone 384916 (TRBV5-1, TRBJ2-1)
CASSPARAPYNEQFF

SEQ ID NO: 769833 - protein, 12 aa, Homo sapiens
  CDR3 for alpha chain variable domain of TCR clone 384917 (TRAV13-1, TRAJ21)
CAAKEDFNKFYF

SEQ ID NO: 769834 - protein, 15 aa, Homo sapiens
  CDR3 for beta chain variable domain of TCR clone 384917 (TRBV11-2, TRBJ2-2)
CASSSDRVNAGELFF

SEQ ID NO: 769835 - protein, 12 aa, Homo sapiens
  CDR3 for alpha chain variable domain of TCR clone 384918 (TRAV8-6, TRAJ36)
CDVSDWLGQTTS

SEQ ID NO: 769836 - protein, 15 aa, Homo sapiens
  CDR3 for beta chain variable domain of TCR clone 384918 (TRBV6-1, TRBJ2-3)
CASSERGGITDTQYF

SEQ ID NO: 769837 - protein, 13 aa, Homo sapiens
  CDR3 for alpha chain variable domain of TCR clone 384919 (TRAV8-3, TRAJ21)
CAVGIYHFNKFYF

SEQ ID NO: 769838 - protein, 13 aa, Homo sapiens
  CDR3 for beta chain variable domain of TCR clone 384919 (TRBV7-7, TRBJ2-5)
CASSLRAIETQYF

SEQ ID NO: 769839 - protein, 10 aa, Homo sapiens
  CDR3 for alpha chain variable domain of TCR clone 384920 (TRAV12-1, TRAJ33)
CVASNYQLIW

SEQ ID NO: 769840 - protein, 15 aa, Homo sapiens
  CDR3 for beta chain variable domain of TCR clone 384920 (TRBV5-4, TRBJ1-4)
CASSHGDGENEKPFF

SEQ ID NO: 769841 - protein, 13 aa, Homo sapiens
  CDR3 for alpha chain variable domain of TCR clone 384921 (TRAV1-2, TRAJ27)
CAVFNTNAGKSTF

SEQ ID NO: 769842 - protein, 16 aa, Homo sapiens
  CDR3 for beta chain variable domain of TCR clone 384921 (TRBV7-9, TRBJ1-2)
CASSLGFSSGEDGYTF

SEQ ID NO: 769843 - protein, 14 aa, Homo sapiens
  CDR3 for alpha chain variable domain of TCR clone 384922 (TRAV21, TRAJ23)
CAIMIYNQGGKLIF

SEQ ID NO: 769844 - protein, 18 aa, Homo sapiens
  CDR3 for beta chain variable domain of TCR clone 384922 (TRBV20-1, TRBJ2-6)
CSAETRPTHGSGANVLTF

SEQ ID NO: 769845 - protein, 14 aa, Homo sapiens
  CDR3 for alpha chain variable domain of TCR clone 384923 (TRAV35, TRAJ42)
CCVPYGGSHGNLIF

SEQ ID NO: 769846 - protein, 18 aa, Homo sapiens
  CDR3 for beta chain variable domain of TCR clone 384923 (TRBV13, TRBJ2-6)
CASSPMTSGGSGANVLTF

SEQ ID NO: 769847 - protein, 14 aa, Homo sapiens
  CDR3 for alpha chain variable domain of TCR clone 384924 (TRAV8-3, TRAJ36)
CAVGPITGANNLFF

SEQ ID NO: 769848 - protein, 15 aa, Homo sapiens
  CDR3 for beta chain variable domain of TCR clone 384924 (TRBV4-1, TRBJ2-1)
CASSQDPGDYNEQFF

SEQ ID NO: 769849 - protein, 12 aa, Homo sapiens
  CDR3 for alpha chain variable domain of TCR clone 384925 (TRAV30, TRAJ43)
CGTEERGNDMRF

SEQ ID NO: 769850 - protein, 15 aa, Homo sapiens
  CDR3 for beta chain variable domain of TCR clone 384925 (TRBV5-1, TRBJ2-7)
CASSLNGGPAREQYF

SEQ ID NO: 769851 - protein, 14 aa, Homo sapiens
  CDR3 for alpha chain variable domain of TCR clone 384926 (TRAV26-1, TRAJ49)
CIVRPRNTGNQFYF

SEQ ID NO: 769852 - protein, 13 aa, Homo sapiens
  CDR3 for beta chain variable domain of TCR clone 384926 (TRBV12-4, TRBJ2-4)
CASSNLRGNLQYF

SEQ ID NO: 769853 - protein, 14 aa, Homo sapiens
  CDR3 for alpha chain variable domain of TCR clone 384927 (TRAV12-2, TRAJ40)
CAVKIPSGTYKYIF

SEQ ID NO: 769854 - protein, 15 aa, Homo sapiens
  CDR3 for beta chain variable domain of TCR clone 384927 (TRBV7-8, TRBJ1-1)
CASSLGDSRNTEAFC

SEQ ID NO: 769855 - protein, 11 aa, Homo sapiens
  CDR3 for alpha chain variable domain of TCR clone 384928 (TRAV12-2, TRAJ33)
CAVGSNYQLIW

SEQ ID NO: 769856 - protein, 17 aa, Homo sapiens
  CDR3 for beta chain variable domain of TCR clone 384928 (TRBV7-3, TRBJ2-3)
CASSLMKRMRGADTQYF

SEQ ID NO: 769857 - protein, 16 aa, Homo sapiens
  CDR3 for alpha chain variable domain of TCR clone 384929 (TRAV20, TRAJ28)
CAVRDPSGAGSYQLTF

SEQ ID NO: 769858 - protein, 14 aa, Homo sapiens
  CDR3 for beta chain variable domain of TCR clone 384929 (TRBV7-2, TRBJ2-7)
CASRSQGAAYEQYF

SEQ ID NO: 769859 - protein, 12 aa, Homo sapiens
  CDR3 for alpha chain variable domain of TCR clone 384930 (TRAV30, TRAJ43)
CGTEERGNDMRF

SEQ ID NO: 769860 - protein, 13 aa, Homo sapiens
  CDR3 for beta chain variable domain of TCR clone 384930 (TRBV27, TRBJ2-7)
CASSFSQGYEQNF

SEQ ID NO: 769861 - protein, 14 aa, Homo sapiens
  CDR3 for alpha chain variable domain of TCR clone 384931 (TRAV23/DV6, TRAJ58)
CAGMRETSGSRLIF

SEQ ID NO: 769862 - protein, 13 aa, Homo sapiens
  CDR3 for beta chain variable domain of TCR clone 384931 (TRBV28, TRBJ2-7)
CASRSSGVYEQYF

SEQ ID NO: 769863 - protein, 15 aa, Homo sapiens
  CDR3 for alpha chain variable domain of TCR clone 384932 (TRAV26-1, TRAJ40)
CIVRAVPSGTYKYIF

SEQ ID NO: 769864 - protein, 16 aa, Homo sapiens
  CDR3 for beta chain variable domain of TCR clone 384932 (TRBV7-2, TRBJ2-2)
CASSLRGQANAGELFF

SEQ ID NO: 769865 - protein, 11 aa, Homo sapiens
  CDR3 for alpha chain variable domain of TCR clone 384933 (TRAV2, TRAJ33)
CAVDSNYQLIW

SEQ ID NO: 769866 - protein, 20 aa, Homo sapiens
  CDR3 for beta chain variable domain of TCR clone 384933 (TRBV7-8, TRBJ2-2)
CASSNLFPGPTIHITGELFF

SEQ ID NO: 769867 - protein, 12 aa, Homo sapiens
  CDR3 for alpha chain variable domain of TCR clone 384934 (TRAV1-1, TRAJ23)
CVGYNQGGKLIF

SEQ ID NO: 769868 - protein, 17 aa, Homo sapiens
  CDR3 for beta chain variable domain of TCR clone 384934 (TRBV7-8, TRBJ2-6)
CASSAGTGGAGANVLTF

SEQ ID NO: 769869 - protein, 14 aa, Homo sapiens
  CDR3 for alpha chain variable domain of TCR clone 384935 (TRAV12-2, TRAJ45)
CAVYSGGGADGLTF

SEQ ID NO: 769870 - protein, 14 aa, Homo sapiens
  CDR3 for beta chain variable domain of TCR clone 384935 (TRBV4-2, TRBJ2-1)
CASGLDRAYNEQFF

SEQ ID NO: 769871 - protein, 14 aa, Homo sapiens
  CDR3 for alpha chain variable domain of TCR clone 384936 (TRAV1-2, TRAJ16)
CAVRGFSDGQRLLF

SEQ ID NO: 769872 - protein, 16 aa, Homo sapiens
  CDR3 for beta chain variable domain of TCR clone 384936 (TRBV20-1, TRBJ2-1)
CSARDHLAGGRGEQFF

SEQ ID NO: 769873 - protein, 18 aa, Homo sapiens
  CDR3 for alpha chain variable domain of TCR clone 384937 (TRAV21, TRAJ52)
CAVRPSPAGGTSYGKLTF

SEQ ID NO: 769874 - protein, 13 aa, Homo sapiens
  CDR3 for beta chain variable domain of TCR clone 384937 (TRBV24-1, TRBJ2-3)
CATSMGGTDTQYF

SEQ ID NO: 769875 - protein, 14 aa, Homo sapiens
  CDR3 for alpha chain variable domain of TCR clone 384938 (TRAV26-2, TRAJ31)
CILIPVNNNARLMF

SEQ ID NO: 769876 - protein, 16 aa, Homo sapiens
  CDR3 for beta chain variable domain of TCR clone 384938 (TRBV7-3, TRBJ2-1)
CASSLVSGSSNNEQFF

SEQ ID NO: 769877 - protein, 17 aa, Homo sapiens
  CDR3 for alpha chain variable domain of TCR clone 384939 (TRAV3, TRAJ42)
CAVRDRDYGGSQGNLIF

SEQ ID NO: 769878 - protein, 17 aa, Homo sapiens
  CDR3 for beta chain variable domain of TCR clone 384939 (TRBV7-9, TRBJ2-3)
CASSPTVSGDLTDTQYF

SEQ ID NO: 769879 - protein, 14 aa, Homo sapiens
  CDR3 for alpha chain variable domain of TCR clone 384940 (TRAV12-3, TRAJ10)
SHLPLTGGGNKLTF

SEQ ID NO: 769880 - protein, 15 aa, Homo sapiens
  CDR3 for beta chain variable domain of TCR clone 384940 (TRBV11-3, TRBJ2-7)
CASSPGPASSYEQYF

SEQ ID NO: 769881 - protein, 14 aa, Homo sapiens
  CDR3 for alpha chain variable domain of TCR clone 384941 (TRAV8-6, TRAJ53)
CAVTSGGSNYKMTF

SEQ ID NO: 769882 - protein, 11 aa, Homo sapiens
  CDR3 for beta chain variable domain of TCR clone 384941 (TRBV24-1, TRBJ2-3)
CATSDLDTQYF

SEQ ID NO: 769883 - protein, 12 aa, Homo sapiens
  CDR3 for alpha chain variable domain of TCR clone 384942 (TRAV8-3, TRAJ26)
CAGDNYGQNFVF

SEQ ID NO: 769884 - protein, 15 aa, Homo sapiens
  CDR3 for beta chain variable domain of TCR clone 384942 (TRBV7-2, TRBJ2-3)
CASSLAGAFIDTQYF

SEQ ID NO: 769885 - protein, 12 aa, Homo sapiens
  CDR3 for alpha chain variable domain of TCR clone 384943 (TRAV13-1, TRAJ21)
CAAKEGFNKFYF

SEQ ID NO: 769886 - protein, 16 aa, Homo sapiens
  CDR3 for beta chain variable domain of TCR clone 384943 (TRBV11-2, TRBJ1-2)
CASSLDRGGNNYGYTF

SEQ ID NO: 769887 - protein, 15 aa, Homo sapiens
  CDR3 for alpha chain variable domain of TCR clone 384944 (TRAV8-3, TRAJ27)
CAVGSSKTNAGKSTF

SEQ ID NO: 769888 - protein, 16 aa, Homo sapiens
  CDR3 for beta chain variable domain of TCR clone 384944 (TRBV6-6, TRBJ2-1)
CASSLLSDSSYNEQFF

SEQ ID NO: 769889 - protein, 18 aa, Homo sapiens
  CDR3 for alpha chain variable domain of TCR clone 384945 (TRAV21, TRAJ52)
CAVRPSPAGGTSHGTLTF

SEQ ID NO: 769890 - protein, 17 aa, Homo sapiens
  CDR3 for beta chain variable domain of TCR clone 384945 (TRBV13, TRBJ2-3)
CASSLSRVAGGRNTQYF

SEQ ID NO: 769891 - protein, 16 aa, Homo sapiens
  CDR3 for alpha chain variable domain of TCR clone 384946 (TRAV3, TRAJ23)
CAVKIGIYNQGGKLIF

SEQ ID NO: 769892 - protein, 17 aa, Homo sapiens
  CDR3 for beta chain variable domain of TCR clone 384946 (TRBV10-3, TRBJ2-6)
CASSESTAPAGANVLTF

SEQ ID NO: 769893 - protein, 15 aa, Homo sapiens
  CDR3 for alpha chain variable domain of TCR clone 384947 (TRAV21, TRAJ53)
CATLNSGGSNYKLTF

SEQ ID NO: 769894 - protein, 15 aa, Homo sapiens
  CDR3 for beta chain variable domain of TCR clone 384947 (TRBV4-2, TRBJ1-1)
CASSQQGAGDTEAFF

SEQ ID NO: 769895 - protein, 14 aa, Homo sapiens
  CDR3 for alpha chain variable domain of TCR clone 384948 (TRAV12-2, TRAJ13)
CAVKTTGGYQKVTF

SEQ ID NO: 769896 - protein, 16 aa, Homo sapiens
  CDR3 for beta chain variable domain of TCR clone 384948 (TRBV2, TRBJ2-1)
CASRSPAGGKYNEQFF

SEQ ID NO: 769897 - protein, 16 aa, Homo sapiens
  CDR3 for alpha chain variable domain of TCR clone 384949 (TRAV17, TRAJ28)
CATDEYSGAGSYQLTF

SEQ ID NO: 769898 - protein, 19 aa, Homo sapiens
  CDR3 for beta chain variable domain of TCR clone 384949 (TRBV7-9, TRBJ2-1)
CASSHNRGALLRSYNEQFF

SEQ ID NO: 769899 - protein, 14 aa, Homo sapiens
  CDR3 for alpha chain variable domain of TCR clone 384950 (TRAV1-2, TRAJ17)
CALSRGAAGNQLTF

SEQ ID NO: 769900 - protein, 14 aa, Homo sapiens
  CDR3 for beta chain variable domain of TCR clone 384950 (TRBV7-2, TRBJ2-7)
CASSLYPGRYEQYF

SEQ ID NO: 769901 - protein, 14 aa, Homo sapiens
  CDR3 for alpha chain variable domain of TCR clone 384951 (TRAV1-2, TRAJ16)
CAVNRFSDGQKLLF

SEQ ID NO: 769902 - protein, 17 aa, Homo sapiens
  CDR3 for beta chain variable domain of TCR clone 384951 (TRBV2, TRBJ2-1)
CASSEVREGGSYNEQFF

SEQ ID NO: 769903 - protein, 18 aa, Homo sapiens
  CDR3 for alpha chain variable domain of TCR clone 384952 (TRAV26-1, TRAJ22)
CIVRVSFWFCKATDPWIW

SEQ ID NO: 769904 - protein, 16 aa, Homo sapiens
  CDR3 for beta chain variable domain of TCR clone 384952 (TRBV24-1, TRBJ2-3)
CATSDPGTGATDTQYF

SEQ ID NO: 769905 - protein, 13 aa, Homo sapiens
  CDR3 for alpha chain variable domain of TCR clone 384953 (TRAV21, TRAJ27)
CAALNTNAGKSTF

SEQ ID NO: 769906 - protein, 20 aa, Homo sapiens
  CDR3 for beta chain variable domain of TCR clone 384953 (TRBV7-9, TRBJ2-1)
CASSSPRAPRTRSSYNEQFF

SEQ ID NO: 769907 - protein, 14 aa, Homo sapiens
  CDR3 for alpha chain variable domain of TCR clone 384954 (TRAV12-2, TRAJ9)
CAVNALEGGFKTIF

SEQ ID NO: 769908 - protein, 16 aa, Homo sapiens
  CDR3 for beta chain variable domain of TCR clone 384954 (TRBV19, TRBJ1-6)
CASSVAPVPGNSPLHF

SEQ ID NO: 769909 - protein, 15 aa, Homo sapiens
  CDR3 for alpha chain variable domain of TCR clone 384955 (TRAV35, TRAJ40)
CAGQLGTSGTYKYIF

SEQ ID NO: 769910 - protein, 15 aa, Homo sapiens
  CDR3 for beta chain variable domain of TCR clone 384955 (TRBV7-6, TRBJ2-5)
CASSKPTGPQETQYF

SEQ ID NO: 769911 - protein, 13 aa, Homo sapiens
  CDR3 for alpha chain variable domain of TCR clone 384956 (TRAV16, TRAJ54)
CALMVQGAQKLVF

SEQ ID NO: 769912 - protein, 11 aa, Homo sapiens
  CDR3 for beta chain variable domain of TCR clone 384956 (TRBV18, TRBJ2-7)
CQLDRHGEQYF

SEQ ID NO: 769913 - protein, 13 aa, Homo sapiens
  CDR3 for alpha chain variable domain of TCR clone 384957 (TRAV12-3, TRAJ33)
CAMSVNSNYQLIW

SEQ ID NO: 769914 - protein, 16 aa, Homo sapiens
  CDR3 for beta chain variable domain of TCR clone 384957 (TRBV13, TRBJ2-5)
CASSLRTGGSWETQHF

SEQ ID NO: 769915 - protein, 16 aa, Homo sapiens
  CDR3 for alpha chain variable domain of TCR clone 384958 (TRAV3, TRAJ10)
CAVRDMRSGGGTKLTF

SEQ ID NO: 769916 - protein, 15 aa, Homo sapiens
  CDR3 for beta chain variable domain of TCR clone 384958 (TRBV20-1, TRBJ2-1)
CSASSAGSSYNEQFF

SEQ ID NO: 769917 - protein, 14 aa, Homo sapiens
  CDR3 for alpha chain variable domain of TCR clone 384959 (TRAV2, TRAJ26)
CAGSPGRLWPEFCL

SEQ ID NO: 769918 - protein, 17 aa, Homo sapiens
  CDR3 for beta chain variable domain of TCR clone 384959 (TRBV11-2, TRBJ2-1)
CASSLYPPGVEYNEQFF

SEQ ID NO: 769919 - protein, 11 aa, Homo sapiens
  CDR3 for alpha chain variable domain of TCR clone 384960 (TRAV23/DV6, TRAJ58)
CAARLLSGETS

SEQ ID NO: 769920 - protein, 13 aa, Homo sapiens
  CDR3 for beta chain variable domain of TCR clone 384960 (TRBV4-1, TRBJ1-1)
CASSQLGTGEAFF

SEQ ID NO: 769921 - protein, 18 aa, Homo sapiens
  CDR3 for alpha chain variable domain of TCR clone 384961 (TRAV26-2, TRAJ45)
CILRLWGYSGGGADGLTF

SEQ ID NO: 769922 - protein, 17 aa, Homo sapiens
  CDR3 for beta chain variable domain of TCR clone 384961 (TRBV28, TRBJ2-3)
CASSPAPAGGRVDTQYF

SEQ ID NO: 769923 - protein, 13 aa, Homo sapiens
  CDR3 for alpha chain variable domain of TCR clone 384962 (TRAV17, TRAJ5)
CAPMDTGRRALTF

SEQ ID NO: 769924 - protein, 16 aa, Homo sapiens
  CDR3 for beta chain variable domain of TCR clone 384962 (TRBV27, TRBJ2-7)
CASSSEGRDSAYEQYF

SEQ ID NO: 769925 - protein, 10 aa, Homo sapiens
  CDR3 for alpha chain variable domain of TCR clone 384963 (TRAV30, TRAJ48)
CGIGNEKLTF

SEQ ID NO: 769926 - protein, 14 aa, Homo sapiens
  CDR3 for beta chain variable domain of TCR clone 384963 (TRBV4-2, TRBJ2-1)
CASGLYRAYNEQFF

SEQ ID NO: 769927 - protein, 14 aa, Homo sapiens
  CDR3 for alpha chain variable domain of TCR clone 384964 (TRAV2, TRAJ37)
CAVDFTSNTGKLIF

SEQ ID NO: 769928 - protein, 14 aa, Homo sapiens
  CDR3 for beta chain variable domain of TCR clone 384964 (TRBV28, TRBJ1-2)
CASRIQGANYGYTF

SEQ ID NO: 769929 - protein, 15 aa, Homo sapiens
  CDR3 for alpha chain variable domain of TCR clone 384965 (TRAV14/DV4, TRAJ22)
CAMSRLSGSARQLTF

SEQ ID NO: 769930 - protein, 12 aa, Homo sapiens
  CDR3 for beta chain variable domain of TCR clone 384965 (TRBV12-4, TRBJ2-1)
CASSPGRNEQFF

SEQ ID NO: 769931 - protein, 13 aa, Homo sapiens
  CDR3 for alpha chain variable domain of TCR clone 384966 (TRAV8-3, TRAJ28)
CAVVAVGSYQLTF

SEQ ID NO: 769932 - protein, 10 aa, Homo sapiens
  CDR3 for beta chain variable domain of TCR clone 384966 (TRBV7-9, TRBJ1-5)
CASSQGHQPN

SEQ ID NO: 769933 - protein, 15 aa, Homo sapiens
  CDR3 for alpha chain variable domain of TCR clone 384967 (TRAV2, TRAJ9)
CAVEDRGTGGFNTTF

SEQ ID NO: 769934 - protein, 13 aa, Homo sapiens
  CDR3 for beta chain variable domain of TCR clone 384967 (TRBV20-1, TRBJ1-1)
CSARGGGNTEAFF

SEQ ID NO: 769935 - protein, 11 aa, Homo sapiens
  CDR3 for alpha chain variable domain of TCR clone 384968 (TRAV39, TRAJ49)
CAVDISTQFYF

SEQ ID NO: 769936 - protein, 11 aa, Homo sapiens
  CDR3 for beta chain variable domain of TCR clone 384968 (TRBV7-8, TRBJ2-7)
CASSFSLEQYF

SEQ ID NO: 769937 - protein, 10 aa, Homo sapiens
  CDR3 for alpha chain variable domain of TCR clone 384969 (TRAV23/DV6, TRAJ57)
CAASATLSQG

SEQ ID NO: 769938 - protein, 11 aa, Homo sapiens
  CDR3 for beta chain variable domain of TCR clone 384969 (TRBV29-1, TRBJ2-5)
CSEDRTGTQYF

SEQ ID NO: 769939 - protein, 14 aa, Homo sapiens
  CDR3 for alpha chain variable domain of TCR clone 384970 (TRAV25, TRAJ6)
CAGRESGGSYIPTF

SEQ ID NO: 769940 - protein, 14 aa, Homo sapiens
  CDR3 for beta chain variable domain of TCR clone 384970 (TRBV12-4, TRBJ2-7)
CASTFGLSTYEQYF

SEQ ID NO: 769941 - protein, 11 aa, Homo sapiens
  CDR3 for alpha chain variable domain of TCR clone 384971 (TRAV2, TRAJ13)
CASGGCQKVTF

SEQ ID NO: 769942 - protein, 15 aa, Homo sapiens
  CDR3 for beta chain variable domain of TCR clone 384971 (TRBV6-1, TRBJ2-2)
CASSRLRGDTGELFF

SEQ ID NO: 769943 - protein, 12 aa, Homo sapiens
  CDR3 for alpha chain variable domain of TCR clone 384972 (TRAV13-1, TRAJ21)
CAAKEGFNKSYF

SEQ ID NO: 769944 - protein, 14 aa, Homo sapiens
  CDR3 for beta chain variable domain of TCR clone 384972 (TRBV11-2, TRBJ1-5)
CASSSRTGNQPQHF

SEQ ID NO: 769945 - protein, 15 aa, Homo sapiens
  CDR3 for alpha chain variable domain of TCR clone 384973 (TRAV12-2, TRAJ53)
CAVNGGGGSNYTLTF

SEQ ID NO: 769946 - protein, 13 aa, Homo sapiens
  CDR3 for beta chain variable domain of TCR clone 384973 (TRBV3-1, TRBJ1-1)
CASSPGVITEAFF

SEQ ID NO: 769947 - protein, 18 aa, Homo sapiens
  CDR3 for alpha chain variable domain of TCR clone 384974 (TRAV12-2, TRAJ13)
CAVGGGGTRKLPLELEQS

SEQ ID NO: 769948 - protein, 13 aa, Homo sapiens
  CDR3 for beta chain variable domain of TCR clone 384974 (TRBV12-5, TRBJ2-3)
CASGDRQSDTQYF

SEQ ID NO: 769949 - protein, 14 aa, Homo sapiens
  CDR3 for alpha chain variable domain of TCR clone 384975 (TRAV9-2, TRAJ15)
CALSDSQAGTALIF

SEQ ID NO: 769950 - protein, 15 aa, Homo sapiens
  CDR3 for beta chain variable domain of TCR clone 384975 (TRBV10-1, TRBJ2-3)
CASSATSGGFDTQYF

SEQ ID NO: 769951 - protein, 19 aa, Homo sapiens
  CDR3 for alpha chain variable domain of TCR clone 384976 (TRAV26-1, TRAJ52)
CIVRAHRNAGGTSDGKLTF

SEQ ID NO: 769952 - protein, 13 aa, Homo sapiens
  CDR3 for beta chain variable domain of TCR clone 384976 (TRBV19, TRBJ2-7)
CASRKAGGSEQYF

SEQ ID NO: 769953 - protein, 14 aa, Homo sapiens
  CDR3 for alpha chain variable domain of TCR clone 384977 (TRAV21, TRAJ9)
CCGGGGTGGFKTIF

SEQ ID NO: 769954 - protein, 13 aa, Homo sapiens
  CDR3 for beta chain variable domain of TCR clone 384977 (TRBV12-4, TRBJ1-2)
CASSSGLTVIYTF

SEQ ID NO: 769955 - protein, 15 aa, Homo sapiens
  CDR3 for alpha chain variable domain of TCR clone 384978 (TRAV2, TRAJ15)
CAVEDQGQAGTALIF

SEQ ID NO: 769956 - protein, 13 aa, Homo sapiens
  CDR3 for beta chain variable domain of TCR clone 384978 (TRBV10-2, TRBJ2-7)
CASGASGGYEQCF

SEQ ID NO: 769957 - protein, 16 aa, Homo sapiens
  CDR3 for alpha chain variable domain of TCR clone 384979 (TRAV12-3, TRAJ53)
CAMSPGSGGSDYKLTF

SEQ ID NO: 769958 - protein, 15 aa, Homo sapiens
  CDR3 for beta chain variable domain of TCR clone 384979 (TRBV18, TRBJ2-7)
CASSPSSTGNYEQYF

SEQ ID NO: 769959 - protein, 17 aa, Homo sapiens
  CDR3 for alpha chain variable domain of TCR clone 384980 (TRAV3, TRAJ6)
CAVRDGPRAGGSYIPPF

SEQ ID NO: 769960 - protein, 15 aa, Homo sapiens
  CDR3 for beta chain variable domain of TCR clone 384980 (TRBV7-8, TRBJ1-5)
CASSLERRGLEPQHF

SEQ ID NO: 769961 - protein, 13 aa, Homo sapiens
  CDR3 for alpha chain variable domain of TCR clone 384981 (TRAV13-1, TRAJ21)
CAASIYNFNKFYF

SEQ ID NO: 769962 - protein, 15 aa, Homo sapiens
  CDR3 for beta chain variable domain of TCR clone 384981 (TRBV7-8, TRBJ2-3)
CASRKLRDHTDTQYF

SEQ ID NO: 769963 - protein, 11 aa, Homo sapiens
  CDR3 for alpha chain variable domain of TCR clone 384982 (TRAV2, TRAJ13)
CASGGYQKVTF

SEQ ID NO: 769964 - protein, 16 aa, Homo sapiens
  CDR3 for beta chain variable domain of TCR clone 384982 (TRBV19, TRBJ2-1)
CASSRAGPSSYNEQFF

SEQ ID NO: 769965 - protein, 14 aa, Homo sapiens
  CDR3 for alpha chain variable domain of TCR clone 384983 (TRAV13-2, TRAJ10)
CAETFTGGGNKLTF

SEQ ID NO: 769966 - protein, 16 aa, Homo sapiens
  CDR3 for beta chain variable domain of TCR clone 384983 (TRBV18, TRBJ2-7)
CASSPRSKGISYEQYF

SEQ ID NO: 769967 - protein, 15 aa, Homo sapiens
  CDR3 for alpha chain variable domain of TCR clone 384984 (TRAV17, TRAJ57)
CAAGPSQGGSEKLGF

SEQ ID NO: 769968 - protein, 16 aa, Homo sapiens
  CDR3 for beta chain variable domain of TCR clone 384984 (TRBV12-4, TRBJ1-5)
CASSRPVGGSNQPQHF

SEQ ID NO: 769969 - protein, 12 aa, Homo sapiens
  CDR3 for alpha chain variable domain of TCR clone 384985 (TRAV35, TRAJ30)
CAGQLADDKIIV

SEQ ID NO: 769970 - protein, 17 aa, Homo sapiens
  CDR3 for beta chain variable domain of TCR clone 384985 (TRBV4-2, TRBJ2-5)
CASSPGRWRNFQETQYF

SEQ ID NO: 769971 - protein, 11 aa, Homo sapiens
  CDR3 for alpha chain variable domain of TCR clone 384986 (TRAV1-1, TRAJ20)
CAVFNDYKLSF

SEQ ID NO: 769972 - protein, 12 aa, Homo sapiens
  CDR3 for beta chain variable domain of TCR clone 384986 (TRBV12-4, TRBJ1-3)
CASSFSGNTIYF

SEQ ID NO: 769973 - protein, 15 aa, Homo sapiens
  CDR3 for alpha chain variable domain of TCR clone 384987 (TRAV17, TRAJ16)
CATALRFSDGQKLLF

SEQ ID NO: 769974 - protein, 13 aa, Homo sapiens
  CDR3 for beta chain variable domain of TCR clone 384987 (TRBV27, TRBJ1-1)
CASSLSIGAEAFF

SEQ ID NO: 769975 - protein, 14 aa, Homo sapiens
  CDR3 for alpha chain variable domain of TCR clone 384988 (TRAV12-2, TRAJ48)
CAVNACFGNEKLTF

SEQ ID NO: 769976 - protein, 13 aa, Homo sapiens
  CDR3 for beta chain variable domain of TCR clone 384988 (TRBV28, TRBJ2-7)
CAGAQQGLDEQYF

SEQ ID NO: 769977 - protein, 16 aa, Homo sapiens
  CDR3 for alpha chain variable domain of TCR clone 384989 (TRAV14/DV4, TRAJ54)
CAMREGRIQGAQNLVF

SEQ ID NO: 769978 - protein, 15 aa, Homo sapiens
  CDR3 for beta chain variable domain of TCR clone 384989 (TRBV20-1, TRBJ2-7)
CSARDRVSGMDEQYF

SEQ ID NO: 769979 - protein, 13 aa, Homo sapiens
  CDR3 for alpha chain variable domain of TCR clone 384990 (TRAV21, TRAJ27)
CAARHGNAGKSTF

SEQ ID NO: 769980 - protein, 14 aa, Homo sapiens
  CDR3 for beta chain variable domain of TCR clone 384990 (TRBV7-9, TRBJ2-5)
CASSLDTAQETQYF

SEQ ID NO: 769981 - protein, 14 aa, Homo sapiens
  CDR3 for alpha chain variable domain of TCR clone 384991 (TRAV34, TRAJ44)
CGADGTGTASKLTF

SEQ ID NO: 769982 - protein, 14 aa, Homo sapiens
  CDR3 for beta chain variable domain of TCR clone 384991 (TRBV2, TRBJ2-1)
YASRTGSSYNEQFF

SEQ ID NO: 769983 - protein, 16 aa, Homo sapiens
  CDR3 for alpha chain variable domain of TCR clone 384992 (TRAV12-2, TRAJ48)
CAVKSTSNFGNEKLTF

SEQ ID NO: 769984 - protein, 12 aa, Homo sapiens
  CDR3 for beta chain variable domain of TCR clone 384992 (TRBV9, TRBJ2-3)
CASSLRAGTQYF

SEQ ID NO: 769985 - protein, 15 aa, Homo sapiens
  CDR3 for alpha chain variable domain of TCR clone 384993 (TRAV8-6, TRAJ26)
CAVSDQSPGGQNFVF

SEQ ID NO: 769986 - protein, 13 aa, Homo sapiens
  CDR3 for beta chain variable domain of TCR clone 384993 (TRBV27, TRBJ2-7)
CASSLRHRYEQYC

SEQ ID NO: 769987 - protein, 15 aa, Homo sapiens
  CDR3 for alpha chain variable domain of TCR clone 384994 (TRAV26-2, TRAJ50)
CILRDEETSYDKVIF

SEQ ID NO: 769988 - protein, 14 aa, Homo sapiens
  CDR3 for beta chain variable domain of TCR clone 384994 (TRBV19, TRBJ2-1)
CASPTFVLSGEQFF

SEQ ID NO: 769989 - protein, 12 aa, Homo sapiens
  CDR3 for alpha chain variable domain of TCR clone 384995 (TRAV8-4, TRAJ43)
CAVSVNHNDMRF

SEQ ID NO: 769990 - protein, 14 aa, Homo sapiens
  CDR3 for beta chain variable domain of TCR clone 384995 (TRBV11-2, TRBJ1-2)
CASSLGTANYGYTF

SEQ ID NO: 769991 - protein, 11 aa, Homo sapiens
  CDR3 for alpha chain variable domain of TCR clone 384996 (TRAV4, TRAJ31)
CLVGDNARLMF

SEQ ID NO: 769992 - protein, 16 aa, Homo sapiens
  CDR3 for beta chain variable domain of TCR clone 384996 (TRBV6-1, TRBJ2-5)
CASSETLDRGAETQYF

SEQ ID NO: 769993 - protein, 13 aa, Homo sapiens
  CDR3 for alpha chain variable domain of TCR clone 384997 (TRAV3, TRAJ20)
CAVRDIGDYKPSF

SEQ ID NO: 769994 - protein, 12 aa, Homo sapiens
  CDR3 for beta chain variable domain of TCR clone 384997 (TRBV3-1, TRBJ1-2)
CASTSGLYGYTF

SEQ ID NO: 769995 - protein, 16 aa, Homo sapiens
  CDR3 for alpha chain variable domain of TCR clone 384998 (TRAV20, TRAJ38)
CAVQAVGAGNNRKLIW

SEQ ID NO: 769996 - protein, 13 aa, Homo sapiens
  CDR3 for beta chain variable domain of TCR clone 384998 (TRBV9, TRBJ2-1)
CASSPSGGNEQFF

SEQ ID NO: 769997 - protein, 14 aa, Homo sapiens
  CDR3 for alpha chain variable domain of TCR clone 384999 (TRAV8-2, TRAJ37)
CVVSISGNTGKLIF

SEQ ID NO: 769998 - protein, 15 aa, Homo sapiens
  CDR3 for beta chain variable domain of TCR clone 384999 (TRBV7-2, TRBJ1-2)
CASSLVSGGDYGYIF

SEQ ID NO: 769999 - protein, 12 aa, Homo sapiens
  CDR3 for alpha chain variable domain of TCR clone 385000 (TRAV25, TRAJ31)
CAGHLNNARLMF

SEQ ID NO: 770000 - protein, 15 aa, Homo sapiens
  CDR3 for beta chain variable domain of TCR clone 385000 (TRBV6-3, TRBJ2-7)
CASSSPGTVFYEQYF

SEQ ID NO: 770001 - protein, 15 aa, Homo sapiens
  CDR3 for alpha chain variable domain of TCR clone 385001 (TRAV26-1, TRAJ38)
CIVRAGGGNNRKLIW

SEQ ID NO: 770002 - protein, 17 aa, Homo sapiens
  CDR3 for beta chain variable domain of TCR clone 385001 (TRBV20-1, TRBJ2-2)
CSASGSGQGGLTGELFF

SEQ ID NO: 770003 - protein, 12 aa, Homo sapiens
  CDR3 for alpha chain variable domain of TCR clone 385002 (TRAV10, TRAJ6)
CVVSEGRYIHTF

SEQ ID NO: 770004 - protein, 15 aa, Homo sapiens
  CDR3 for beta chain variable domain of TCR clone 385002 (TRBV4-3, TRBJ2-7)
CASSQGGRGIYEQYF

SEQ ID NO: 770005 - protein, 12 aa, Homo sapiens
  CDR3 for alpha chain variable domain of TCR clone 385003 (TRAV13-1, TRAJ53)
AASGGSNYKLTF

SEQ ID NO: 770006 - protein, 13 aa, Homo sapiens
  CDR3 for beta chain variable domain of TCR clone 385003 (TRBV7-2, TRBJ2-2)
CASSSVRAGDLFF

SEQ ID NO: 770007 - protein, 14 aa, Homo sapiens
  CDR3 for alpha chain variable domain of TCR clone 385004 (TRAV13-1, TRAJ20)
CAARPGSNDYKLIF

SEQ ID NO: 770008 - protein, 15 aa, Homo sapiens
  CDR3 for beta chain variable domain of TCR clone 385004 (TRBV4-1, TRBJ2-7)
CASSQQGQGFDEQYF

SEQ ID NO: 770009 - protein, 14 aa, Homo sapiens
  CDR3 for alpha chain variable domain of TCR clone 385005 (TRAV26-1, TRAJ21)
CIVRPPYNFNKFYF

SEQ ID NO: 770010 - protein, 14 aa, Homo sapiens
  CDR3 for beta chain variable domain of TCR clone 385005 (TRBV19, TRBJ2-1)
FASPTFVLSGEQFF

SEQ ID NO: 770011 - protein, 15 aa, Homo sapiens
  CDR3 for alpha chain variable domain of TCR clone 385006 (TRAV8-4, TRAJ48)
CPVSAAYFGNEKLTF

SEQ ID NO: 770012 - protein, 12 aa, Homo sapiens
  CDR3 for beta chain variable domain of TCR clone 385006 (TRBV3-1, TRBJ2-5)
CASSQRGETQYF

SEQ ID NO: 770013 - protein, 11 aa, Homo sapiens
  CDR3 for alpha chain variable domain of TCR clone 385007 (TRAV12-2, TRAJ31)
CAVTRWARVMF

SEQ ID NO: 770014 - protein, 15 aa, Homo sapiens
  CDR3 for beta chain variable domain of TCR clone 385007 (TRBV19, TRBJ2-7)
CASSIGGGLVNEQFF

SEQ ID NO: 770015 - protein, 23 aa, Homo sapiens
  CDR3 for alpha chain variable domain of TCR clone 385008 (TRAV13-2, TRAJ6)
YAEEVHQEEATYLHLEEEPALLF

SEQ ID NO: 770016 - protein, 13 aa, Homo sapiens
  CDR3 for beta chain variable domain of TCR clone 385008 (TRBV9, TRBJ2-7)
WASSVAEYYEQYF

SEQ ID NO: 770017 - protein, 18 aa, Homo sapiens
  CDR3 for alpha chain variable domain of TCR clone 385009 (TRAV29/DV5, TRAJ52)
QCTSVQQADGTSYGKLPF

SEQ ID NO: 770018 - protein, 13 aa, Homo sapiens
  CDR3 for beta chain variable domain of TCR clone 385009 (TRBV7-2, TRBJ1-1)
CASNLKGAKVAFF

SEQ ID NO: 770019 - protein, 13 aa, Homo sapiens
  CDR3 for alpha chain variable domain of TCR clone 385010 (TRAV13-2, TRAJ13)
CAERPGGYQKVTS

SEQ ID NO: 770020 - protein, 16 aa, Homo sapiens
  CDR3 for beta chain variable domain of TCR clone 385010 (TRBV18, TRBJ2-5)
CASSPPSSGGAKTQYF

SEQ ID NO: 770021 - protein, 16 aa, Homo sapiens
  CDR3 for alpha chain variable domain of TCR clone 385011 (TRAV3, TRAJ10)
CAVRDMRAGGGNKLTF

SEQ ID NO: 770022 - protein, 17 aa, Homo sapiens
  CDR3 for beta chain variable domain of TCR clone 385011 (TRBV6-5, TRBJ2-4)
CASRHTPGQGSKNIQYF

SEQ ID NO: 770023 - protein, 14 aa, Homo sapiens
  CDR3 for alpha chain variable domain of TCR clone 385012 (TRAV17, TRAJ22)
CATSPSGSATQLTF

SEQ ID NO: 770024 - protein, 15 aa, Homo sapiens
  CDR3 for beta chain variable domain of TCR clone 385012 (TRBV4-1, TRBJ2-5)
RASSQWDLYQETQYF

SEQ ID NO: 770025 - protein, 13 aa, Homo sapiens
  CDR3 for alpha chain variable domain of TCR clone 385013 (TRAV8-2, TRAJ34)
CVVSDRRTAKLIF

SEQ ID NO: 770026 - protein, 15 aa, Homo sapiens
  CDR3 for beta chain variable domain of TCR clone 385013 (TRBV20-1, TRBJ2-3)
CSARVVGGSTDTQYF

SEQ ID NO: 770027 - protein, 13 aa, Homo sapiens
  CDR3 for alpha chain variable domain of TCR clone 385014 (TRAV13-1, TRAJ11)
CAASIRGYSTLTF

SEQ ID NO: 770028 - protein, 14 aa, Homo sapiens
  CDR3 for beta chain variable domain of TCR clone 385014 (TRBV7-8, TRBJ2-3)
CASSLEAGTDTQYF

SEQ ID NO: 770029 - protein, 16 aa, Homo sapiens
  CDR3 for alpha chain variable domain of TCR clone 385015 (TRAV3, TRAJ37)
CAVRGKGSGNTGKLIF

SEQ ID NO: 770030 - protein, 13 aa, Homo sapiens
  CDR3 for beta chain variable domain of TCR clone 385015 (TRBV19, TRBJ1-2)
CASSVPGQDGHTF

SEQ ID NO: 770031 - protein, 13 aa, Homo sapiens
  CDR3 for alpha chain variable domain of TCR clone 385016 (TRAV13-2, TRAJ48)
CADVDFGNEKLTF

SEQ ID NO: 770032 - protein, 15 aa, Homo sapiens
  CDR3 for beta chain variable domain of TCR clone 385016 (TRBV7-9, TRBJ1-6)
CASSPPGRGNSPLHF

SEQ ID NO: 770033 - protein, 11 aa, Homo sapiens
  CDR3 for alpha chain variable domain of TCR clone 385017 (TRAV12-1, TRAJ34)
CVANKGRELTF

SEQ ID NO: 770034 - protein, 12 aa, Homo sapiens
  CDR3 for beta chain variable domain of TCR clone 385017 (TRBV2, TRBJ2-1)
CAYGPPGNEQFF

SEQ ID NO: 770035 - protein, 11 aa, Homo sapiens
  CDR3 for alpha chain variable domain of TCR clone 385018 (TRAV2, TRAJ33)
CAVESNYQLIW

SEQ ID NO: 770036 - protein, 15 aa, Homo sapiens
  CDR3 for beta chain variable domain of TCR clone 385018 (TRBV27, TRBJ1-5)
CASSLGTGFDQPQHF

SEQ ID NO: 770037 - protein, 15 aa, Homo sapiens
  CDR3 for alpha chain variable domain of TCR clone 385019 (TRAV3, TRAJ32)
CAVSSYGGATNKLIF

SEQ ID NO: 770038 - protein, 13 aa, Homo sapiens
  CDR3 for beta chain variable domain of TCR clone 385019 (TRBV20-1, TRBJ2-7)
CSARPSTTYEQYF

SEQ ID NO: 770039 - protein, 15 aa, Homo sapiens
  CDR3 for alpha chain variable domain of TCR clone 385020 (TRAV3, TRAJ36)
CAVRASQTGANNPFF

SEQ ID NO: 770040 - protein, 15 aa, Homo sapiens
  CDR3 for beta chain variable domain of TCR clone 385020 (TRBV3-1, TRBJ2-1)
CASSQDYTPRGGQFF

SEQ ID NO: 770041 - protein, 14 aa, Homo sapiens
  CDR3 for alpha chain variable domain of TCR clone 385021 (TRAV35, TRAJ50)
CAGHRKTSYDKVIF

SEQ ID NO: 770042 - protein, 16 aa, Homo sapiens
  CDR3 for beta chain variable domain of TCR clone 385021 (TRBV7-9, TRBJ1-2)
CASSLGFSSGEDGYTF

SEQ ID NO: 770043 - protein, 14 aa, Homo sapiens
  CDR3 for alpha chain variable domain of TCR clone 385022 (TRAV1-2, TRAJ16)
CAVNRFSGGQKLLF

SEQ ID NO: 770044 - protein, 15 aa, Homo sapiens
  CDR3 for beta chain variable domain of TCR clone 385022 (TRBV20-1, TRBJ2-2)
SAVPRTPRTPGSCFF

SEQ ID NO: 770045 - protein, 14 aa, Homo sapiens
  CDR3 for alpha chain variable domain of TCR clone 385023 (TRAV34, TRAJ44)
CGADGTGTASKLTC

SEQ ID NO: 770046 - protein, 15 aa, Homo sapiens
  CDR3 for beta chain variable domain of TCR clone 385023 (TRBV5-1, TRBJ2-1)
CASSPPRAPYNEQFF

SEQ ID NO: 770047 - protein, 22 aa, Homo sapiens
  CDR3 for alpha chain variable domain of TCR clone 385024 (TRAV25, TRAJ6)
CEGGNQEEATYLHLEEEPALLF

SEQ ID NO: 770048 - protein, 13 aa, Homo sapiens
  CDR3 for beta chain variable domain of TCR clone 385024 (TRBV12-4, TRBJ2-7)
CASSLSGVYEQYF

SEQ ID NO: 770049 - protein, 14 aa, Homo sapiens
  CDR3 for alpha chain variable domain of TCR clone 385025 (TRAV9-2, TRAJ39)
CALYIYNAGNMLTF

SEQ ID NO: 770050 - protein, 13 aa, Homo sapiens
  CDR3 for beta chain variable domain of TCR clone 385025 (TRBV11-3, TRBJ1-1)
CASSCQPNTEAFF

SEQ ID NO: 770051 - protein, 11 aa, Homo sapiens
  CDR3 for alpha chain variable domain of TCR clone 385026 (TRAV1-1, TRAJ23)
CAVRQGGKLIF

SEQ ID NO: 770052 - protein, 15 aa, Homo sapiens
  CDR3 for beta chain variable domain of TCR clone 385026 (TRBV27, TRBJ2-1)
CASSNGGGSYNEQFF

SEQ ID NO: 770053 - protein, 10 aa, Homo sapiens
  CDR3 for alpha chain variable domain of TCR clone 385027 (TRAV12-2, TRAJ5)
CALSRRALTF

SEQ ID NO: 770054 - protein, 10 aa, Homo sapiens
  CDR3 for beta chain variable domain of TCR clone 385027 (TRBV20-1, TRBJ2-7)
CSATSYEQYF

SEQ ID NO: 770055 - protein, 14 aa, Homo sapiens
  CDR3 for alpha chain variable domain of TCR clone 385028 (TRAV12-2, TRAJ13)
CAVKKTGGYQKVTI

SEQ ID NO: 770056 - protein, 13 aa, Homo sapiens
  CDR3 for beta chain variable domain of TCR clone 385028 (TRBV20-1, TRBJ1-1)
CSARLGQGTEAFF

SEQ ID NO: 770057 - protein, 12 aa, Homo sapiens
  CDR3 for alpha chain variable domain of TCR clone 385029 (TRAV13-1, TRAJ20)
CAASRGDYKLSF

SEQ ID NO: 770058 - protein, 15 aa, Homo sapiens
  CDR3 for beta chain variable domain of TCR clone 385029 (TRBV7-9, TRBJ1-6)
CASSSPGRGNSPLHF

SEQ ID NO: 770059 - protein, 15 aa, Homo sapiens
  CDR3 for alpha chain variable domain of TCR clone 385030 (TRAV12-1, TRAJ9)
CVVSFGDTGGFKTIF

SEQ ID NO: 770060 - protein, 20 aa, Homo sapiens
  CDR3 for beta chain variable domain of TCR clone 385030 (TRBV28, TRBJ2-1)
CASTPIGRSPGLAGGDEQFF

SEQ ID NO: 770061 - protein, 18 aa, Homo sapiens
  CDR3 for alpha chain variable domain of TCR clone 385031 (TRAV23/DV6, TRAJ21)
CAASSGGGTTSPNFTLDL

SEQ ID NO: 770062 - protein, 11 aa, Homo sapiens
  CDR3 for beta chain variable domain of TCR clone 385031 (TRBV7-8, TRBJ2-7)
CASSLSLEQYF

SEQ ID NO: 770063 - protein, 20 aa, Homo sapiens
  CDR3 for alpha chain variable domain of TCR clone 385032 (TRAV26-1, TRAJ42)
CCVLLHRQTYYGGRQGNLIF

SEQ ID NO: 770064 - protein, 16 aa, Homo sapiens
  CDR3 for beta chain variable domain of TCR clone 385032 (TRBV4-1, TRBJ1-1)
CASSSMSERPNTEAFF

SEQ ID NO: 770065 - protein, 12 aa, Homo sapiens
  CDR3 for alpha chain variable domain of TCR clone 385033 (TRAV20, TRAJ20)
CAVRFNDFKLSF

SEQ ID NO: 770066 - protein, 14 aa, Homo sapiens
  CDR3 for beta chain variable domain of TCR clone 385033 (TRBV20-1, TRBJ2-1)
CSAQIGGSANEQFF

SEQ ID NO: 770067 - protein, 13 aa, Homo sapiens
  CDR3 for alpha chain variable domain of TCR clone 385034 (TRAV8-4, TRAJ48)
RSVSLFGNEKLTF

SEQ ID NO: 770068 - protein, 15 aa, Homo sapiens
  CDR3 for beta chain variable domain of TCR clone 385034 (TRBV20-1, TRBJ2-7)
CSARKGLAESYEQYF

SEQ ID NO: 770069 - protein, 14 aa, Homo sapiens
  CDR3 for alpha chain variable domain of TCR clone 385035 (TRAV8-4, TRAJ8)
CAVSVVPGFQKLVF

SEQ ID NO: 770070 - protein, 15 aa, Homo sapiens
  CDR3 for beta chain variable domain of TCR clone 385035 (TRBV2, TRBJ2-3)
CASSGEGTGTDTQYF

SEQ ID NO: 770071 - protein, 15 aa, Homo sapiens
  CDR3 for alpha chain variable domain of TCR clone 385036 (TRAV26-1, TRAJ38)
CIVRAEGGNNRKLIW

SEQ ID NO: 770072 - protein, 17 aa, Homo sapiens
  CDR3 for beta chain variable domain of TCR clone 385036 (TRBV7-7, TRBJ2-2)
CASSSVPAGGEIGELFF

SEQ ID NO: 770073 - protein, 15 aa, Homo sapiens
  CDR3 for alpha chain variable domain of TCR clone 385037 (TRAV8-3, TRAJ44)
CAVGAGAGTASKLTF

SEQ ID NO: 770074 - protein, 12 aa, Homo sapiens
  CDR3 for beta chain variable domain of TCR clone 385037 (TRBV7-8, TRBJ2-4)
CASSLGVNIQYF

SEQ ID NO: 770075 - protein, 15 aa, Homo sapiens
  CDR3 for alpha chain variable domain of TCR clone 385038 (TRAV8-3, TRAJ23)
CAVGDSYNQGGKLIF

SEQ ID NO: 770076 - protein, 17 aa, Homo sapiens
  CDR3 for beta chain variable domain of TCR clone 385038 (TRBV4-1, TRBJ1-4)
CASSQEGPRGVEEKLFF

SEQ ID NO: 770077 - protein, 14 aa, Homo sapiens
  CDR3 for alpha chain variable domain of TCR clone 385039 (TRAV3, TRAJ9)
CAVRQNTGGFKTIF

SEQ ID NO: 770078 - protein, 15 aa, Homo sapiens
  CDR3 for beta chain variable domain of TCR clone 385039 (TRBV7-2, TRBJ2-1)
CASSLASGRVNEQFF

SEQ ID NO: 770079 - protein, 14 aa, Homo sapiens
  CDR3 for alpha chain variable domain of TCR clone 385040 (TRAV23/DV6, TRAJ27)
CAASRDTSAGKSTF

SEQ ID NO: 770080 - protein, 13 aa, Homo sapiens
  CDR3 for beta chain variable domain of TCR clone 385040 (TRBV20-1, TRBJ1-5)
CSASGRGNKPQHF

SEQ ID NO: 770081 - protein, 15 aa, Homo sapiens
  CDR3 for alpha chain variable domain of TCR clone 385041 (TRAV3, TRAJ22)
CAVRDRGGSARQLTF

SEQ ID NO: 770082 - protein, 15 aa, Homo sapiens
  CDR3 for beta chain variable domain of TCR clone 385041 (TRBV4-2, TRBJ1-3)
CASSQDGAQGNTIYF

SEQ ID NO: 770083 - protein, 12 aa, Homo sapiens
  CDR3 for alpha chain variable domain of TCR clone 385042 (TRAV12-3, TRAJ17)
CAMTLKGNKLAF

SEQ ID NO: 770084 - protein, 15 aa, Homo sapiens
  CDR3 for beta chain variable domain of TCR clone 385042 (TRBV20-1, TRBJ2-7)
CSARDRVSGMDEQYF

SEQ ID NO: 770085 - protein, 15 aa, Homo sapiens
  CDR3 for alpha chain variable domain of TCR clone 385043 (TRAV12-3, TRAJ27)
CAMRAYNTNAGKSTF

SEQ ID NO: 770086 - protein, 15 aa, Homo sapiens
  CDR3 for beta chain variable domain of TCR clone 385043 (TRBV5-1, TRBJ2-2)
CASSLFGQNTGELFF

SEQ ID NO: 770087 - protein, 13 aa, Homo sapiens
  CDR3 for alpha chain variable domain of TCR clone 385044 (TRAV8-3, TRAJ43)
CAVVPYNNNDLRF

SEQ ID NO: 770088 - protein, 16 aa, Homo sapiens
  CDR3 for beta chain variable domain of TCR clone 385044 (TRBV7-2, TRBJ2-5)
CASSPFPTGGEETQYF

SEQ ID NO: 770089 - protein, 15 aa, Homo sapiens
  CDR3 for alpha chain variable domain of TCR clone 385045 (TRAV21, TRAJ53)
CATLNSGGSNYKLTF

SEQ ID NO: 770090 - protein, 17 aa, Homo sapiens
  CDR3 for beta chain variable domain of TCR clone 385045 (TRBV20-1, TRBJ2-2)
CSASRSGQGGLTGELFF

SEQ ID NO: 770091 - protein, 14 aa, Homo sapiens
  CDR3 for alpha chain variable domain of TCR clone 385046 (TRAV1-2, TRAJ16)
CAVRSASDGQKLLF

SEQ ID NO: 770092 - protein, 16 aa, Homo sapiens
  CDR3 for beta chain variable domain of TCR clone 385046 (TRBV19, TRBJ1-5)
CASSTWTGGGNQPQHF

SEQ ID NO: 770093 - protein, 18 aa, Homo sapiens
  CDR3 for alpha chain variable domain of TCR clone 385047 (TRAV1-2, TRAJ18)
CAVRDMGDRGSTLGRLYF

SEQ ID NO: 770094 - protein, 16 aa, Homo sapiens
  CDR3 for beta chain variable domain of TCR clone 385047 (TRBV29-1, TRBJ1-2)
CSVEANRDISNYGYTF

SEQ ID NO: 770095 - protein, 15 aa, Homo sapiens
  CDR3 for alpha chain variable domain of TCR clone 385048 (TRAV3, TRAJ3)
CCERPRYSSASKIIF

SEQ ID NO: 770096 - protein, 16 aa, Homo sapiens
  CDR3 for beta chain variable domain of TCR clone 385048 (TRBV19, TRBJ1-5)
CASSIDRGGPRQAQHF

SEQ ID NO: 770097 - protein, 16 aa, Homo sapiens
  CDR3 for alpha chain variable domain of TCR clone 385049 (TRAV12-3, TRAJ53)
CAMSPGSGGSNYKLTF

SEQ ID NO: 770098 - protein, 14 aa, Homo sapiens
  CDR3 for beta chain variable domain of TCR clone 385049 (TRBV7-8, TRBJ2-3)
CASSFPDGQDTQYF

SEQ ID NO: 770099 - protein, 13 aa, Homo sapiens
  CDR3 for alpha chain variable domain of TCR clone 385050 (TRAV8-2, TRAJ40)
CVAPSEGTYKYIF

SEQ ID NO: 770100 - protein, 18 aa, Homo sapiens
  CDR3 for beta chain variable domain of TCR clone 385050 (TRBV11-2, TRBJ2-3)
CASSLGGASRGAPNTQYF

SEQ ID NO: 770101 - protein, 16 aa, Homo sapiens
  CDR3 for alpha chain variable domain of TCR clone 385051 (TRAV30, TRAJ24)
CGTEIVDADSWGKFQF

SEQ ID NO: 770102 - protein, 16 aa, Homo sapiens
  CDR3 for beta chain variable domain of TCR clone 385051 (TRBV20-1, TRBJ2-4)
CSATSLAELAKNIQYF

SEQ ID NO: 770103 - protein, 16 aa, Homo sapiens
  CDR3 for alpha chain variable domain of TCR clone 385052 (TRAV3, TRAJ3)
CAVIDRAKSSSSKIIF

SEQ ID NO: 770104 - protein, 16 aa, Homo sapiens
  CDR3 for beta chain variable domain of TCR clone 385052 (TRBV20-1, TRBJ2-4)
CSATSLAELAKNIQYF

SEQ ID NO: 770105 - protein, 14 aa, Homo sapiens
  CDR3 for alpha chain variable domain of TCR clone 385053 (TRAV2, TRAJ37)
CTVDFTSNTGKLIF

SEQ ID NO: 770106 - protein, 13 aa, Homo sapiens
  CDR3 for beta chain variable domain of TCR clone 385053 (TRBV20-1, TRBJ1-1)
CSAPLGGGTEAFF

SEQ ID NO: 770107 - protein, 14 aa, Homo sapiens
  CDR3 for alpha chain variable domain of TCR clone 385054 (TRAV9-2, TRAJ39)
CALYIYNAGNMLPF

SEQ ID NO: 770108 - protein, 13 aa, Homo sapiens
  CDR3 for beta chain variable domain of TCR clone 385054 (TRBV19, TRBJ1-2)
CASSVPGQDGYTF

SEQ ID NO: 770109 - protein, 16 aa, Homo sapiens
  CDR3 for alpha chain variable domain of TCR clone 385055 (TRAV8-3, TRAJ10)
CAVGPILTGGGNKLTF

SEQ ID NO: 770110 - protein, 12 aa, Homo sapiens
  CDR3 for beta chain variable domain of TCR clone 385055 (TRBV5-1, TRBJ1-2)
CASSQDTYGYTF

SEQ ID NO: 770111 - protein, 15 aa, Homo sapiens
  CDR3 for alpha chain variable domain of TCR clone 385056 (TRAV14/DV4, TRAJ10)
CAMKELTGGGNKLTF

SEQ ID NO: 770112 - protein, 18 aa, Homo sapiens
  CDR3 for beta chain variable domain of TCR clone 385056 (TRBV7-9, TRBJ2-7)
CASSLTTSGSRTWYEQYF

SEQ ID NO: 770113 - protein, 15 aa, Homo sapiens
  CDR3 for alpha chain variable domain of TCR clone 385057 (TRAV8-3, TRAJ11)
CAVSLLNSGYSTLTF

SEQ ID NO: 770114 - protein, 16 aa, Homo sapiens
  CDR3 for beta chain variable domain of TCR clone 385057 (TRBV7-9, TRBJ1-2)
CASSLGFSSGEDCYTF

SEQ ID NO: 770115 - protein, 13 aa, Homo sapiens
  CDR3 for alpha chain variable domain of TCR clone 385058 (TRAV20, TRAJ48)
CAVQGVGNEKLTF

SEQ ID NO: 770116 - protein, 19 aa, Homo sapiens
  CDR3 for beta chain variable domain of TCR clone 385058 (TRBV2, TRBJ2-2)
CASSQRGLAGGGNTGELFF

SEQ ID NO: 770117 - protein, 12 aa, Homo sapiens
  CDR3 for alpha chain variable domain of TCR clone 385059 (TRAV10, TRAJ43)
CVVARVGNDMRF

SEQ ID NO: 770118 - protein, 15 aa, Homo sapiens
  CDR3 for beta chain variable domain of TCR clone 385059 (TRBV2, TRBJ2-7)
CASSEGLARSYEQYF

SEQ ID NO: 770119 - protein, 14 aa, Homo sapiens
  CDR3 for alpha chain variable domain of TCR clone 385060 (TRAV13-1, TRAJ44)
CAAKATGAASKLTF

SEQ ID NO: 770120 - protein, 17 aa, Homo sapiens
  CDR3 for beta chain variable domain of TCR clone 385060 (TRBV7-3, TRBJ2-3)
CASSLMKGMRGADTQYF

SEQ ID NO: 770121 - protein, 14 aa, Homo sapiens
  CDR3 for alpha chain variable domain of TCR clone 385061 (TRAV6, TRAJ40)
CALDATSGTYKYIF

SEQ ID NO: 770122 - protein, 16 aa, Homo sapiens
  CDR3 for beta chain variable domain of TCR clone 385061 (TRBV12-5, TRBJ2-5)
CASGPRTSGNQETQYF

SEQ ID NO: 770123 - protein, 16 aa, Homo sapiens
  CDR3 for alpha chain variable domain of TCR clone 385062 (TRAV3, TRAJ12)
CCERRRRMDSSYKLIF

SEQ ID NO: 770124 - protein, 16 aa, Homo sapiens
  CDR3 for beta chain variable domain of TCR clone 385062 (TRBV9, TRBJ2-2)
CASSAMGKGNTGELFF

SEQ ID NO: 770125 - protein, 14 aa, Homo sapiens
  CDR3 for alpha chain variable domain of TCR clone 385063 (TRAV17, TRAJ31)
CATVLRNNNARLMF

SEQ ID NO: 770126 - protein, 14 aa, Homo sapiens
  CDR3 for beta chain variable domain of TCR clone 385063 (TRBV7-9, TRBJ2-2)
CASSFDRGTGELFF

SEQ ID NO: 770127 - protein, 15 aa, Homo sapiens
  CDR3 for alpha chain variable domain of TCR clone 385064 (TRAV25, TRAJ53)
CAATGGGGSNYKLTF

SEQ ID NO: 770128 - protein, 12 aa, Homo sapiens
  CDR3 for beta chain variable domain of TCR clone 385064 (TRBV7-8, TRBJ2-7)
CASNLGDREQYF

SEQ ID NO: 770129 - protein, 14 aa, Homo sapiens
  CDR3 for alpha chain variable domain of TCR clone 385065 (TRAV8-1, TRAJ5)
CAVRTDTGRRALTF

SEQ ID NO: 770130 - protein, 15 aa, Homo sapiens
  CDR3 for beta chain variable domain of TCR clone 385065 (TRBV19, TRBJ1-2)
CASNLGGETPYGYTF

SEQ ID NO: 770131 - protein, 11 aa, Homo sapiens
  CDR3 for alpha chain variable domain of TCR clone 385066 (TRAV12-1, TRAJ30)
CVVNGQDKIIF

SEQ ID NO: 770132 - protein, 15 aa, Homo sapiens
  CDR3 for beta chain variable domain of TCR clone 385066 (TRBV19, TRBJ1-1)
CASTSGQIQNTEAFF

SEQ ID NO: 770133 - protein, 14 aa, Homo sapiens
  CDR3 for alpha chain variable domain of TCR clone 385067 (TRAV8-4, TRAJ5)
CAVCTDTGRRALTF

SEQ ID NO: 770134 - protein, 14 aa, Homo sapiens
  CDR3 for beta chain variable domain of TCR clone 385067 (TRBV5-1, TRBJ2-2)
CASSLGGGSGELFF

SEQ ID NO: 770135 - protein, 11 aa, Homo sapiens
  CDR3 for alpha chain variable domain of TCR clone 385068 (TRAV1-1, TRAJ23)
CAVRQGGQLIF

SEQ ID NO: 770136 - protein, 20 aa, Homo sapiens
  CDR3 for beta chain variable domain of TCR clone 385068 (TRBV7-8, TRBJ2-2)
WASSHLFPGPTIHITGELFF

SEQ ID NO: 770137 - protein, 14 aa, Homo sapiens
  CDR3 for alpha chain variable domain of TCR clone 385069 (TRAV12-3, TRAJ10)
SHLPLTGGGNKLTF

SEQ ID NO: 770138 - protein, 16 aa, Homo sapiens
  CDR3 for beta chain variable domain of TCR clone 385069 (TRBV12-5, TRBJ2-5)
CASGPRTSGNQEAQYF

SEQ ID NO: 770139 - protein, 18 aa, Homo sapiens
  CDR3 for alpha chain variable domain of TCR clone 385070 (TRAV26-1, TRAJ22)
CIVRVALISSGSARQLTF

SEQ ID NO: 770140 - protein, 12 aa, Homo sapiens
  CDR3 for beta chain variable domain of TCR clone 385070 (TRBV7-9, TRBJ1-4)
CASSTDREKLFF

SEQ ID NO: 770141 - protein, 12 aa, Homo sapiens
  CDR3 for alpha chain variable domain of TCR clone 385071 (TRAV21, TRAJ23)
CAVGPQGGKLIF

SEQ ID NO: 770142 - protein, 16 aa, Homo sapiens
  CDR3 for beta chain variable domain of TCR clone 385071 (TRBV20-1, TRBJ2-1)
CSASASGYSSYNEQFF

SEQ ID NO: 770143 - protein, 13 aa, Homo sapiens
  CDR3 for alpha chain variable domain of TCR clone 385072 (TRAV23/DV6, TRAJ12)
CAPRVDSSYKLIF

SEQ ID NO: 770144 - protein, 14 aa, Homo sapiens
  CDR3 for beta chain variable domain of TCR clone 385072 (TRBV5-1, TRBJ2-2)
CASSLGGGSGELFF

SEQ ID NO: 770145 - protein, 16 aa, Homo sapiens
  CDR3 for alpha chain variable domain of TCR clone 385073 (TRAV30, TRAJ24)
CGTEIVDADSWGKFQF

SEQ ID NO: 770146 - protein, 14 aa, Homo sapiens
  CDR3 for beta chain variable domain of TCR clone 385073 (TRBV7-9, TRBJ1-2)
CASSFPLREYGDTF

SEQ ID NO: 770147 - protein, 15 aa, Homo sapiens
  CDR3 for alpha chain variable domain of TCR clone 385074 (TRAV26-1, TRAJ44)
CIARVPFGTASKLTF

SEQ ID NO: 770148 - protein, 17 aa, Homo sapiens
  CDR3 for beta chain variable domain of TCR clone 385074 (TRBV24-1, TRBJ2-4)
CASSDAEARGVRNIQYF

SEQ ID NO: 770149 - protein, 17 aa, Homo sapiens
  CDR3 for alpha chain variable domain of TCR clone 385075 (TRAV3, TRAJ6)
CAVRDGPRARGSYIPTF

SEQ ID NO: 770150 - protein, 20 aa, Homo sapiens
  CDR3 for beta chain variable domain of TCR clone 385075 (TRBV28, TRBJ2-1)
CASTPIGRSPGLAGGNGQFV

SEQ ID NO: 770151 - protein, 14 aa, Homo sapiens
  CDR3 for alpha chain variable domain of TCR clone 385076 (TRAV1-2, TRAJ16)
CAVNWFSDGQKLLF

SEQ ID NO: 770152 - protein, 12 aa, Homo sapiens
  CDR3 for beta chain variable domain of TCR clone 385076 (TRBV11-2, TRBJ2-2)
CASSLGGGELFF

SEQ ID NO: 770153 - protein, 12 aa, Homo sapiens
  CDR3 for alpha chain variable domain of TCR clone 385077 (TRAV2, TRAJ33)
CAFMDSNYQLIW

SEQ ID NO: 770154 - protein, 11 aa, Homo sapiens
  CDR3 for beta chain variable domain of TCR clone 385077 (TRBV7-9, TRBJ2-3)
CASSPTDTQYF

SEQ ID NO: 770155 - protein, 14 aa, Homo sapiens
  CDR3 for alpha chain variable domain of TCR clone 385078 (TRAV27, TRAJ44)
CAAAFTGTASKLTF

SEQ ID NO: 770156 - protein, 13 aa, Homo sapiens
  CDR3 for beta chain variable domain of TCR clone 385078 (TRBV27, TRBJ2-3)
CATSRGGLYTQYF

SEQ ID NO: 770157 - protein, 22 aa, Homo sapiens
  CDR3 for alpha chain variable domain of TCR clone 385079 (TRAV21, )
CAVRQDAGNNHIQNPDPAVYQL

SEQ ID NO: 770158 - protein, 13 aa, Homo sapiens
  CDR3 for beta chain variable domain of TCR clone 385079 (TRBV7-2, TRBJ2-7)
CASSSPSGSEQYF

SEQ ID NO: 770159 - protein, 15 aa, Homo sapiens
  CDR3 for alpha chain variable domain of TCR clone 385080 (TRAV12-3, TRAJ11)
CAMSEENSGYSTLTF

SEQ ID NO: 770160 - protein, 14 aa, Homo sapiens
  CDR3 for beta chain variable domain of TCR clone 385080 (TRBV25-1, TRBJ1-1)
CAGTHLGGNTEAFI

SEQ ID NO: 770161 - protein, 13 aa, Homo sapiens
  CDR3 for alpha chain variable domain of TCR clone 385081 (TRAV8-3, TRAJ28)
CAVGAVGSDQLTF

SEQ ID NO: 770162 - protein, 16 aa, Homo sapiens
  CDR3 for beta chain variable domain of TCR clone 385081 (TRBV19, TRBJ2-1)
CASSKAGPSSYNEQFF

SEQ ID NO: 770163 - protein, 14 aa, Homo sapiens
  CDR3 for alpha chain variable domain of TCR clone 385082 (TRAV12-2, TRAJ13)
CAVKKTGGYQKVTS

SEQ ID NO: 770164 - protein, 13 aa, Homo sapiens
  CDR3 for beta chain variable domain of TCR clone 385082 (TRBV19, TRBJ1-2)
CASSVPGQDGYTF

SEQ ID NO: 770165 - protein, 15 aa, Homo sapiens
  CDR3 for alpha chain variable domain of TCR clone 385083 (TRAV21, TRAJ37)
CAVRPTLSNTGKLVF

SEQ ID NO: 770166 - protein, 16 aa, Homo sapiens
  CDR3 for beta chain variable domain of TCR clone 385083 (TRBV24-1, TRBJ2-3)
CATSDRRQDLTDTQYF

SEQ ID NO: 770167 - protein, 14 aa, Homo sapiens
  CDR3 for alpha chain variable domain of TCR clone 385084 (TRAV1-2, TRAJ16)
CAVNRFSDGQKLLF

SEQ ID NO: 770168 - protein, 12 aa, Homo sapiens
  CDR3 for beta chain variable domain of TCR clone 385084 (TRBV24-1, TRBJ1-1)
CATLYPDTEAVF

SEQ ID NO: 770169 - protein, 14 aa, Homo sapiens
  CDR3 for alpha chain variable domain of TCR clone 385085 (TRAV29/DV5, TRAJ45)
CAASFRGDADGLTF

SEQ ID NO: 770170 - protein, 11 aa, Homo sapiens
  CDR3 for beta chain variable domain of TCR clone 385085 (TRBV11-2, TRBJ2-2)
CASSLPGQLFF

SEQ ID NO: 770171 - protein, 15 aa, Homo sapiens
  CDR3 for alpha chain variable domain of TCR clone 385086 (TRAV12-3, TRAJ6)
CAMSATTGGSYIPTF

SEQ ID NO: 770172 - protein, 15 aa, Homo sapiens
  CDR3 for beta chain variable domain of TCR clone 385086 (TRBV5-1, TRBJ2-7)
CASSLHGGPAREQYF

SEQ ID NO: 770173 - protein, 19 aa, Homo sapiens
  CDR3 for alpha chain variable domain of TCR clone 385087 (TRAV26-1, TRAJ52)
CIVRAHRNAGGTSYGKLTF

SEQ ID NO: 770174 - protein, 15 aa, Homo sapiens
  CDR3 for beta chain variable domain of TCR clone 385087 (TRBV12-4, TRBJ2-5)
CARSPPTGLQETQYF

SEQ ID NO: 770175 - protein, 16 aa, Homo sapiens
  CDR3 for alpha chain variable domain of TCR clone 385088 (TRAV26-1, TRAJ23)
CIFRVHPYNQGGKLIF

SEQ ID NO: 770176 - protein, 15 aa, Homo sapiens
  CDR3 for beta chain variable domain of TCR clone 385088 (TRBV5-7, TRBJ2-7)
CASSPYFEGSYEQYF

SEQ ID NO: 770177 - protein, 14 aa, Homo sapiens
  CDR3 for alpha chain variable domain of TCR clone 385089 (TRAV26-1, TRAJ49)
CIVRLTNTGNQFYF

SEQ ID NO: 770178 - protein, 16 aa, Homo sapiens
  CDR3 for beta chain variable domain of TCR clone 385089 (TRBV4-1, TRBJ2-1)
CASSPGSGGNYNEQFF

SEQ ID NO: 770179 - protein, 14 aa, Homo sapiens
  CDR3 for alpha chain variable domain of TCR clone 385090 (TRAV9-2, TRAJ39)
CALYIYNAGNMLTF

SEQ ID NO: 770180 - protein, 13 aa, Homo sapiens
  CDR3 for beta chain variable domain of TCR clone 385090 (TRBV7-3, TRBJ2-1)
CASSLWPYNEQFF

SEQ ID NO: 770181 - protein, 14 aa, Homo sapiens
  CDR3 for alpha chain variable domain of TCR clone 385091 (TRAV13-2, TRAJ10)
CAEYITGGGNKLTF

SEQ ID NO: 770182 - protein, 15 aa, Homo sapiens
  CDR3 for beta chain variable domain of TCR clone 385091 (TRBV7-2, TRBJ2-7)
CASSLGGAKSGEQYF

SEQ ID NO: 770183 - protein, 15 aa, Homo sapiens
  CDR3 for alpha chain variable domain of TCR clone 385092 (TRAV26-1, TRAJ22)
CIVRVSFWFCKATDL

SEQ ID NO: 770184 - protein, 16 aa, Homo sapiens
  CDR3 for beta chain variable domain of TCR clone 385092 (TRBV24-1, TRBJ2-3)
GATSDPGTGATDTQYF

SEQ ID NO: 770185 - protein, 13 aa, Homo sapiens
  CDR3 for alpha chain variable domain of TCR clone 385093 (TRAV21, TRAJ27)
CAARPGNAGKATF

SEQ ID NO: 770186 - protein, 15 aa, Homo sapiens
  CDR3 for beta chain variable domain of TCR clone 385093 (TRBV11-3, TRBJ2-7)
CASSPGPASSYEQYF

SEQ ID NO: 770187 - protein, 13 aa, Homo sapiens
  CDR3 for alpha chain variable domain of TCR clone 385094 (TRAV17, TRAJ40)
CAGALGGTCKYIF

SEQ ID NO: 770188 - protein, 16 aa, Homo sapiens
  CDR3 for beta chain variable domain of TCR clone 385094 (TRBV7-2, TRBJ1-4)
CASSLAPGRRDEKLFF

SEQ ID NO: 770189 - protein, 14 aa, Homo sapiens
  CDR3 for alpha chain variable domain of TCR clone 385095 (TRAV13-1, TRAJ40)
CAASMTSGTYKYIF

SEQ ID NO: 770190 - protein, 12 aa, Homo sapiens
  CDR3 for beta chain variable domain of TCR clone 385095 (TRBV11-2, TRBJ2-2)
CASSLPTGELFF

SEQ ID NO: 770191 - protein, 14 aa, Homo sapiens
  CDR3 for alpha chain variable domain of TCR clone 385096 (TRAV26-1, TRAJ21)
CIVRPPYNFNKFYF

SEQ ID NO: 770192 - protein, 13 aa, Homo sapiens
  CDR3 for beta chain variable domain of TCR clone 385096 (TRBV20-1, TRBJ2-2)
CSASAAGTGELFF

SEQ ID NO: 770193 - protein, 16 aa, Homo sapiens
  CDR3 for alpha chain variable domain of TCR clone 385097 (TRAV3, TRAJ10)
CAVRDMRAGGRNKLTF

SEQ ID NO: 770194 - protein, 19 aa, Homo sapiens
  CDR3 for beta chain variable domain of TCR clone 385097 (TRBV4-1, TRBJ1-1)
CASSRIILTPRGVNTEAFS

SEQ ID NO: 770195 - protein, 14 aa, Homo sapiens
  CDR3 for alpha chain variable domain of TCR clone 385098 (TRAV35, TRAJ33)
CAGSSQDSNYQLIW

SEQ ID NO: 770196 - protein, 15 aa, Homo sapiens
  CDR3 for beta chain variable domain of TCR clone 385098 (TRBV12-4, TRBJ2-5)
CASSPPTGLQEIQYF

SEQ ID NO: 770197 - protein, 18 aa, Homo sapiens
  CDR3 for alpha chain variable domain of TCR clone 385099 (TRAV13-1, TRAJ52)
CAAKNPNAGGTSYGKLTF

SEQ ID NO: 770198 - protein, 13 aa, Homo sapiens
  CDR3 for beta chain variable domain of TCR clone 385099 (TRBV7-2, TRBJ2-7)
CASSSPSGSEQYF

SEQ ID NO: 770199 - protein, 19 aa, Homo sapiens
  CDR3 for alpha chain variable domain of TCR clone 385100 (TRAV35, TRAJ22)
CAGQLATVDASGSARQLTF

SEQ ID NO: 770200 - protein, 14 aa, Homo sapiens
  CDR3 for beta chain variable domain of TCR clone 385100 (TRBV7-9, TRBJ2-1)
CASSPRDSLYEQFF

SEQ ID NO: 770201 - protein, 10 aa, Homo sapiens
  CDR3 for alpha chain variable domain of TCR clone 385101 (TRAV1-2, TRAJ23)
CAGQGGKLIF

SEQ ID NO: 770202 - protein, 15 aa, Homo sapiens
  CDR3 for beta chain variable domain of TCR clone 385101 (TRBV29-1, TRBJ2-1)
CSGRDRKSSYNEQFF

SEQ ID NO: 770203 - protein, 14 aa, Homo sapiens
  CDR3 for alpha chain variable domain of TCR clone 385102 (TRAV1-2, TRAJ8)
CAVREDTGFQKLVF

SEQ ID NO: 770204 - protein, 13 aa, Homo sapiens
  CDR3 for beta chain variable domain of TCR clone 385102 (TRBV15, TRBJ1-6)
CATSGGLNSTLHF

SEQ ID NO: 770205 - protein, 15 aa, Homo sapiens
  CDR3 for alpha chain variable domain of TCR clone 385103 (TRAV27, TRAJ38)
CAARRSAGNNRKLIW

SEQ ID NO: 770206 - protein, 12 aa, Homo sapiens
  CDR3 for beta chain variable domain of TCR clone 385103 (TRBV28, TRBJ2-1)
CASSRLVGEQFF

SEQ ID NO: 770207 - protein, 14 aa, Homo sapiens
  CDR3 for alpha chain variable domain of TCR clone 385104 (TRAV1-2, TRAJ16)
CAVNRFSDGLKLLF

SEQ ID NO: 770208 - protein, 12 aa, Homo sapiens
  CDR3 for beta chain variable domain of TCR clone 385104 (TRBV11-2, TRBJ2-2)
CASSLGGGELFF

SEQ ID NO: 770209 - protein, 15 aa, Homo sapiens
  CDR3 for alpha chain variable domain of TCR clone 385105 (TRAV21, TRAJ32)
CAVNAYGGTTNKLIF

SEQ ID NO: 770210 - protein, 18 aa, Homo sapiens
  CDR3 for beta chain variable domain of TCR clone 385105 (TRBV7-9, TRBJ2-1)
CASSTGLAEGSSYNEQFF

SEQ ID NO: 770211 - protein, 15 aa, Homo sapiens
  CDR3 for alpha chain variable domain of TCR clone 385106 (TRAV21, TRAJ24)
CAARSSTDSWGILQF

SEQ ID NO: 770212 - protein, 13 aa, Homo sapiens
  CDR3 for beta chain variable domain of TCR clone 385106 (TRBV11-2, TRBJ2-5)
CASSSTGEETQYF

SEQ ID NO: 770213 - protein, 13 aa, Homo sapiens
  CDR3 for alpha chain variable domain of TCR clone 385107 (TRAV2, TRAJ40)
CAVVTSGTYKYIF

SEQ ID NO: 770214 - protein, 16 aa, Homo sapiens
  CDR3 for beta chain variable domain of TCR clone 385107 (TRBV29-1, TRBJ2-7)
CSVEDAEDGTAYEQYF

SEQ ID NO: 770215 - protein, 11 aa, Homo sapiens
  CDR3 for alpha chain variable domain of TCR clone 385108 (TRAV23/DV6, TRAJ58)
CAARLLRGETS

SEQ ID NO: 770216 - protein, 14 aa, Homo sapiens
  CDR3 for beta chain variable domain of TCR clone 385108 (TRBV7-8, TRBJ2-3)
CASSLEAGTDTQYF

SEQ ID NO: 770217 - protein, 12 aa, Homo sapiens
  CDR3 for alpha chain variable domain of TCR clone 385109 (TRAV13-2, TRAJ8)
CAPWLGFQKLVF

SEQ ID NO: 770218 - protein, 13 aa, Homo sapiens
  CDR3 for beta chain variable domain of TCR clone 385109 (TRBV7-9, TRBJ2-1)
CASSSSNFNEQFF

SEQ ID NO: 770219 - protein, 14 aa, Homo sapiens
  CDR3 for alpha chain variable domain of TCR clone 385110 (TRAV12-3, TRAJ54)
CAMRGIQGAQKLVF

SEQ ID NO: 770220 - protein, 13 aa, Homo sapiens
  CDR3 for beta chain variable domain of TCR clone 385110 (TRBV7-7, TRBJ2-2)
CASSLTSAGELFF

SEQ ID NO: 770221 - protein, 13 aa, Homo sapiens
  CDR3 for alpha chain variable domain of TCR clone 385111 (TRAV21, TRAJ27)
CAARPGNAGKSTF

SEQ ID NO: 770222 - protein, 14 aa, Homo sapiens
  CDR3 for beta chain variable domain of TCR clone 385111 (TRBV2, TRBJ2-1)
CASSEALDGNEQFF

SEQ ID NO: 770223 - protein, 16 aa, Homo sapiens
  CDR3 for alpha chain variable domain of TCR clone 385112 (TRAV12-2, TRAJ32)
CAVNLGQGGATNKLIF

SEQ ID NO: 770224 - protein, 15 aa, Homo sapiens
  CDR3 for beta chain variable domain of TCR clone 385112 (TRBV20-1, TRBJ2-7)
CSARGPLAGARERYF

SEQ ID NO: 770225 - protein, 14 aa, Homo sapiens
  CDR3 for alpha chain variable domain of TCR clone 385113 (TRAV13-1, TRAJ53)
CAARISGSNYKLTF

SEQ ID NO: 770226 - protein, 15 aa, Homo sapiens
  CDR3 for beta chain variable domain of TCR clone 385113 (TRBV4-1, TRBJ1-4)
CASSDTGGTNEKLFF

SEQ ID NO: 770227 - protein, 15 aa, Homo sapiens
  CDR3 for alpha chain variable domain of TCR clone 385114 (TRAV23/DV6, TRAJ32)
CAASKMGGATNKLIF

SEQ ID NO: 770228 - protein, 14 aa, Homo sapiens
  CDR3 for beta chain variable domain of TCR clone 385114 (TRBV19, TRBJ2-1)
CASPTFVLSGEQFF

SEQ ID NO: 770229 - protein, 13 aa, Homo sapiens
  CDR3 for alpha chain variable domain of TCR clone 385115 (TRAV3, TRAJ21)
CAVREPDFNEFYF

SEQ ID NO: 770230 - protein, 18 aa, Homo sapiens
  CDR3 for beta chain variable domain of TCR clone 385115 (TRBV11-2, TRBJ2-3)
CASSLGGASRGAPNTQYF

SEQ ID NO: 770231 - protein, 14 aa, Homo sapiens
  CDR3 for alpha chain variable domain of TCR clone 385116 (TRAV2, TRAJ37)
CAVDFTSNTGKRIF

SEQ ID NO: 770232 - protein, 15 aa, Homo sapiens
  CDR3 for beta chain variable domain of TCR clone 385116 (TRBV20-1, TRBJ1-1)
CSASRGVTGNTEALF

SEQ ID NO: 770233 - protein, 12 aa, Homo sapiens
  CDR3 for alpha chain variable domain of TCR clone 385117 (TRAV21, TRAJ11)
CAATSGYSTLTF

SEQ ID NO: 770234 - protein, 13 aa, Homo sapiens
  CDR3 for beta chain variable domain of TCR clone 385117 (TRBV12-5, TRBJ2-3)
CASGDRQSDTQYF

SEQ ID NO: 770235 - protein, 13 aa, Homo sapiens
  CDR3 for alpha chain variable domain of TCR clone 385118 (TRAV12-3, TRAJ33)
CAMSVNSNYQLIW

SEQ ID NO: 770236 - protein, 16 aa, Homo sapiens
  CDR3 for beta chain variable domain of TCR clone 385118 (TRBV6-6, TRBJ2-1)
CASSLLSDSSYNEQFF

SEQ ID NO: 770237 - protein, 15 aa, Homo sapiens
  CDR3 for alpha chain variable domain of TCR clone 385119 (TRAV21, TRAJ53)
CATLNSGGSNYKLPF

SEQ ID NO: 770238 - protein, 16 aa, Homo sapiens
  CDR3 for beta chain variable domain of TCR clone 385119 (TRBV12-4, TRBJ1-5)
CASSRPVGGSNQPQHF

SEQ ID NO: 770239 - protein, 15 aa, Homo sapiens
  CDR3 for alpha chain variable domain of TCR clone 385120 (TRAV8-3, TRAJ42)
CAGTNYGGSQGNLIF

SEQ ID NO: 770240 - protein, 12 aa, Homo sapiens
  CDR3 for beta chain variable domain of TCR clone 385120 (TRBV7-8, TRBJ2-7)
CASSLGDREQYF

SEQ ID NO: 770241 - protein, 14 aa, Homo sapiens
  CDR3 for alpha chain variable domain of TCR clone 385121 (TRAV1-2, TRAJ8)
CAVREDTGFQKLVF

SEQ ID NO: 770242 - protein, 15 aa, Homo sapiens
  CDR3 for beta chain variable domain of TCR clone 385121 (TRBV15, TRBJ2-7)
CATSRDRSPRNEQYF

SEQ ID NO: 770243 - protein, 13 aa, Homo sapiens
  CDR3 for alpha chain variable domain of TCR clone 385122 (TRAV3, TRAJ21)
CAVREPDFNKFYF

SEQ ID NO: 770244 - protein, 18 aa, Homo sapiens
  CDR3 for beta chain variable domain of TCR clone 385122 (TRBV7-9, TRBJ2-1)
CASSKTGFTTTGNNEQFF

SEQ ID NO: 770245 - protein, 13 aa, Homo sapiens
  CDR3 for alpha chain variable domain of TCR clone 385123 (TRAV12-1, TRAJ22)
CVGYSSSARQLTF

SEQ ID NO: 770246 - protein, 10 aa, Homo sapiens
  CDR3 for beta chain variable domain of TCR clone 385123 (TRBV6-3, TRBJ2-2)
CASRDGELFF

SEQ ID NO: 770247 - protein, 14 aa, Homo sapiens
  CDR3 for alpha chain variable domain of TCR clone 385124 (TRAV21, TRAJ58)
CAVRRRRSGSRLTF

SEQ ID NO: 770248 - protein, 13 aa, Homo sapiens
  CDR3 for beta chain variable domain of TCR clone 385124 (TRBV7-2, TRBJ1-6)
CASSLKFDSPLHF

SEQ ID NO: 770249 - protein, 13 aa, Homo sapiens
  CDR3 for alpha chain variable domain of TCR clone 385125 (TRAV20, TRAJ34)
CAVSSYNTNKLIF

SEQ ID NO: 770250 - protein, 13 aa, Homo sapiens
  CDR3 for beta chain variable domain of TCR clone 385125 (TRBV7-9, TRBJ1-2)
CASSLKQNYGYTF

SEQ ID NO: 770251 - protein, 14 aa, Homo sapiens
  CDR3 for alpha chain variable domain of TCR clone 385126 (TRAV13-1, TRAJ35)
CAASKGGFGNVLHC

SEQ ID NO: 770252 - protein, 17 aa, Homo sapiens
  CDR3 for beta chain variable domain of TCR clone 385126 (TRBV7-3, TRBJ2-7)
CASSDARVVFSSYEQYF

SEQ ID NO: 770253 - protein, 11 aa, Homo sapiens
  CDR3 for alpha chain variable domain of TCR clone 385127 (TRAV12-3, TRAJ43)
CAMSVSNDMRF

SEQ ID NO: 770254 - protein, 11 aa, Homo sapiens
  CDR3 for beta chain variable domain of TCR clone 385127 (TRBV29-1, TRBJ2-5)
CSEDRTGTQFF

SEQ ID NO: 770255 - protein, 12 aa, Homo sapiens
  CDR3 for alpha chain variable domain of TCR clone 385128 (TRAV1-1, TRAJ9)
CAVDTGGFKTIF

SEQ ID NO: 770256 - protein, 16 aa, Homo sapiens
  CDR3 for beta chain variable domain of TCR clone 385128 (TRBV19, TRBJ2-1)
CASSKAGPSSYNEQFF

SEQ ID NO: 770257 - protein, 13 aa, Homo sapiens
  CDR3 for alpha chain variable domain of TCR clone 385129 (TRAV3, TRAJ21)
CAVREPDFNKFYF

SEQ ID NO: 770258 - protein, 14 aa, Homo sapiens
  CDR3 for beta chain variable domain of TCR clone 385129 (TRBV4-1, TRBJ2-2)
CASSQVVNTGELFF

SEQ ID NO: 770259 - protein, 14 aa, Homo sapiens
  CDR3 for alpha chain variable domain of TCR clone 385130 (TRAV16, TRAJ29)
CALTRNSGNTPLDF

SEQ ID NO: 770260 - protein, 12 aa, Homo sapiens
  CDR3 for beta chain variable domain of TCR clone 385130 (TRBV2, TRBJ2-1)
CAKREGYNEQFF

SEQ ID NO: 770261 - protein, 14 aa, Homo sapiens
  CDR3 for alpha chain variable domain of TCR clone 385131 (TRAV35, TRAJ33)
CAGSSQDSNYQLIW

SEQ ID NO: 770262 - protein, 13 aa, Homo sapiens
  CDR3 for beta chain variable domain of TCR clone 385131 (TRBV2, TRBJ2-7)
CANGLAGDYEQYF

SEQ ID NO: 770263 - protein, 16 aa, Homo sapiens
  CDR3 for alpha chain variable domain of TCR clone 385132 (TRAV26-1, TRAJ37)
CIVRGDGAGNTGILIF

SEQ ID NO: 770264 - protein, 13 aa, Homo sapiens
  CDR3 for beta chain variable domain of TCR clone 385132 (TRBV4-1, TRBJ2-2)
CTSSQENTGELFF

SEQ ID NO: 770265 - protein, 13 aa, Homo sapiens
  CDR3 for alpha chain variable domain of TCR clone 385133 (TRAV12-2, TRAJ9)
CAVKWAGGFKTIF

SEQ ID NO: 770266 - protein, 15 aa, Homo sapiens
  CDR3 for beta chain variable domain of TCR clone 385133 (TRBV5-1, TRBJ1-4)
CASSLTAGSDEKLFF

SEQ ID NO: 770267 - protein, 12 aa, Homo sapiens
  CDR3 for alpha chain variable domain of TCR clone 385134 (TRAV8-3, TRAJ20)
CAVGGGDYKLSF

SEQ ID NO: 770268 - protein, 19 aa, Homo sapiens
  CDR3 for beta chain variable domain of TCR clone 385134 (TRBV25-1, TRBJ2-2)
CAILVYRVDRGRKTGELFF

SEQ ID NO: 770269 - protein, 16 aa, Homo sapiens
  CDR3 for alpha chain variable domain of TCR clone 385135 (TRAV30, TRAJ24)
CGTEIVDADSWGKFQF

SEQ ID NO: 770270 - protein, 15 aa, Homo sapiens
  CDR3 for beta chain variable domain of TCR clone 385135 (TRBV20-1, TRBJ2-7)
CSARDRVSGKDEQYF

SEQ ID NO: 770271 - protein, 14 aa, Homo sapiens
  CDR3 for alpha chain variable domain of TCR clone 385136 (TRAV26-1, TRAJ38)
CITDNAGNNRKLIW

SEQ ID NO: 770272 - protein, 17 aa, Homo sapiens
  CDR3 for beta chain variable domain of TCR clone 385136 (TRBV7-9, TRBJ2-3)
CASSPTVAGDLTDTQYF

SEQ ID NO: 770273 - protein, 15 aa, Homo sapiens
  CDR3 for alpha chain variable domain of TCR clone 385137 (TRAV2, TRAJ15)
CAVEDRGQAGTALIF

SEQ ID NO: 770274 - protein, 13 aa, Homo sapiens
  CDR3 for beta chain variable domain of TCR clone 385137 (TRBV10-2, TRBJ2-7)
CPSGASGGYEQYF

SEQ ID NO: 770275 - protein, 10 aa, Homo sapiens
  CDR3 for alpha chain variable domain of TCR clone 385138 (TRAV16, TRAJ22)
SAMYLRQLTF

SEQ ID NO: 770276 - protein, 14 aa, Homo sapiens
  CDR3 for beta chain variable domain of TCR clone 385138 (TRBV25-1, TRBJ1-1)
CASTHLGGNTEAFF

SEQ ID NO: 770277 - protein, 15 aa, Homo sapiens
  CDR3 for alpha chain variable domain of TCR clone 385139 (TRAV1-2, TRAJ28)
CAVQYSGAGSYQLTF

SEQ ID NO: 770278 - protein, 15 aa, Homo sapiens
  CDR3 for beta chain variable domain of TCR clone 385139 (TRBV7-8, TRBJ2-3)
CASSPRTGSTDTQYF

SEQ ID NO: 770279 - protein, 12 aa, Homo sapiens
  CDR3 for alpha chain variable domain of TCR clone 385140 (TRAV12-1, TRAJ40)
CVVYSGTYKYIF

SEQ ID NO: 770280 - protein, 15 aa, Homo sapiens
  CDR3 for beta chain variable domain of TCR clone 385140 (TRBV7-9, TRBJ1-6)
CASSSPGRGNSPLHV

SEQ ID NO: 770281 - protein, 16 aa, Homo sapiens
  CDR3 for alpha chain variable domain of TCR clone 385141 (TRAV3, TRAJ10)
CAVRDMRAGGGNKLTF

SEQ ID NO: 770282 - protein, 14 aa, Homo sapiens
  CDR3 for beta chain variable domain of TCR clone 385141 (TRBV12-4, TRBJ1-4)
CASRMTGRSETLFF

SEQ ID NO: 770283 - protein, 14 aa, Homo sapiens
  CDR3 for alpha chain variable domain of TCR clone 385142 (TRAV26-1, TRAJ15)
CIEAGNQAGTALIF

SEQ ID NO: 770284 - protein, 12 aa, Homo sapiens
  CDR3 for beta chain variable domain of TCR clone 385142 (TRBV2, TRBJ2-7)
CASSDPDYEQYF

SEQ ID NO: 770285 - protein, 17 aa, Homo sapiens
  CDR3 for alpha chain variable domain of TCR clone 385143 (TRAV13-1, TRAJ28)
CAASPPYSGAGSYQLTF

SEQ ID NO: 770286 - protein, 13 aa, Homo sapiens
  CDR3 for beta chain variable domain of TCR clone 385143 (TRBV19, TRBJ2-2)
CASSIWSTGELFF

SEQ ID NO: 770287 - protein, 14 aa, Homo sapiens
  CDR3 for alpha chain variable domain of TCR clone 385144 (TRAV2, TRAJ37)
CAVDFTSNTGKLIF

SEQ ID NO: 770288 - protein, 15 aa, Homo sapiens
  CDR3 for beta chain variable domain of TCR clone 385144 (TRBV20-1, TRBJ1-1)
CSARQGVTGNTEAFF

SEQ ID NO: 770289 - protein, 11 aa, Homo sapiens
  CDR3 for alpha chain variable domain of TCR clone 385145 (TRAV29/DV5, TRAJ49)
CAAVPGNQCYF

SEQ ID NO: 770290 - protein, 17 aa, Homo sapiens
  CDR3 for beta chain variable domain of TCR clone 385145 (TRBV4-2, TRBJ1-1)
CASTQFGGGSGNTEAFF

SEQ ID NO: 770291 - protein, 13 aa, Homo sapiens
  CDR3 for alpha chain variable domain of TCR clone 385146 (TRAV8-6, TRAJ49)
RAVITNTGNQFYF

SEQ ID NO: 770292 - protein, 14 aa, Homo sapiens
  CDR3 for beta chain variable domain of TCR clone 385146 (TRBV5-1, TRBJ2-7)
CASSRGVSLYEQYF

SEQ ID NO: 770293 - protein, 15 aa, Homo sapiens
  CDR3 for alpha chain variable domain of TCR clone 385147 (TRAV12-3, TRAJ6)
CAMSATTGGSYIPTF

SEQ ID NO: 770294 - protein, 15 aa, Homo sapiens
  CDR3 for beta chain variable domain of TCR clone 385147 (TRBV5-1, TRBJ2-7)
CASSMNGGPAREQYF

SEQ ID NO: 770295 - protein, 12 aa, Homo sapiens
  CDR3 for alpha chain variable domain of TCR clone 385148 (TRAV21, TRAJ11)
CAATSGYCTLTS

SEQ ID NO: 770296 - protein, 14 aa, Homo sapiens
  CDR3 for beta chain variable domain of TCR clone 385148 (TRBV20-1, TRBJ2-7)
CSAPELAGVGEQYF

SEQ ID NO: 770297 - protein, 13 aa, Homo sapiens
  CDR3 for alpha chain variable domain of TCR clone 385149 (TRAV8-3, TRAJ36)
CAVGATGANNLFV

SEQ ID NO: 770298 - protein, 15 aa, Homo sapiens
  CDR3 for beta chain variable domain of TCR clone 385149 (TRBV7-2, TRBJ1-2)
CASSPRAGGNYGYIF

SEQ ID NO: 770299 - protein, 19 aa, Homo sapiens
  CDR3 for alpha chain variable domain of TCR clone 385150 (TRAV1-2, TRAJ18)
CLLPLCCERRGSTLGRLYF

SEQ ID NO: 770300 - protein, 16 aa, Homo sapiens
  CDR3 for beta chain variable domain of TCR clone 385150 (TRBV12-4, TRBJ1-5)
CASSRPVGGSNQPQHF

SEQ ID NO: 770301 - protein, 17 aa, Homo sapiens
  CDR3 for alpha chain variable domain of TCR clone 385151 (TRAV3, TRAJ12)
CAVRDGGRMDSSYKLIF

SEQ ID NO: 770302 - protein, 12 aa, Homo sapiens
  CDR3 for beta chain variable domain of TCR clone 385151 (TRBV18, TRBJ1-4)
CASSPSREKLFF

SEQ ID NO: 770303 - protein, 14 aa, Homo sapiens
  CDR3 for alpha chain variable domain of TCR clone 385152 (TRAV12-1, TRAJ13)
CAVKKTGGYQKVTF

SEQ ID NO: 770304 - protein, 15 aa, Homo sapiens
  CDR3 for beta chain variable domain of TCR clone 385152 (TRBV27, TRBJ2-1)
CASSNGGGSSNGQFF

SEQ ID NO: 770305 - protein, 14 aa, Homo sapiens
  CDR3 for alpha chain variable domain of TCR clone 385153 (TRAV17, TRAJ32)
CATDPGGATNKLIF

SEQ ID NO: 770306 - protein, 18 aa, Homo sapiens
  CDR3 for beta chain variable domain of TCR clone 385153 (TRBV23-1, TRBJ2-3)
CASSLTFGLAVFTDTQYF

SEQ ID NO: 770307 - protein, 11 aa, Homo sapiens
  CDR3 for alpha chain variable domain of TCR clone 385154 (TRAV13-1, TRAJ39)
CASHAGNMLTF

SEQ ID NO: 770308 - protein, 15 aa, Homo sapiens
  CDR3 for beta chain variable domain of TCR clone 385154 (TRBV2, TRBJ2-1)
CATQARLVMIGEQFF

SEQ ID NO: 770309 - protein, 12 aa, Homo sapiens
  CDR3 for alpha chain variable domain of TCR clone 385155 (TRAV27, TRAJ33)
CAGDGRNYQLIW

SEQ ID NO: 770310 - protein, 15 aa, Homo sapiens
  CDR3 for beta chain variable domain of TCR clone 385155 (TRBV6-5, TRBJ2-7)
CASSYSTSGNYEQYF

SEQ ID NO: 770311 - protein, 12 aa, Homo sapiens
  CDR3 for alpha chain variable domain of TCR clone 385156 (TRAV23/DV6, TRAJ33)
CAAEDSNYQLIW

SEQ ID NO: 770312 - protein, 14 aa, Homo sapiens
  CDR3 for beta chain variable domain of TCR clone 385156 (TRBV28, TRBJ2-3)
CASSFVSGTDTQYF

SEQ ID NO: 770313 - protein, 18 aa, Homo sapiens
  CDR3 for alpha chain variable domain of TCR clone 385157 (TRAV13-1, TRAJ52)
CAASKRSAGGTSYGKLTF

SEQ ID NO: 770314 - protein, 13 aa, Homo sapiens
  CDR3 for beta chain variable domain of TCR clone 385157 (TRBV12-4, TRBJ1-2)
CASSLRQGEGYSF

SEQ ID NO: 770315 - protein, 12 aa, Homo sapiens
  CDR3 for alpha chain variable domain of TCR clone 385158 (TRAV3, TRAJ31)
CAVRDGNARLMF

SEQ ID NO: 770316 - protein, 15 aa, Homo sapiens
  CDR3 for beta chain variable domain of TCR clone 385158 (TRBV6-1, TRBJ2-1)
CASSEAAYSYNEQFF

SEQ ID NO: 770317 - protein, 16 aa, Homo sapiens
  CDR3 for alpha chain variable domain of TCR clone 385159 (TRAV23/DV6, TRAJ9)
CAASIGGNTGGFKTIF

SEQ ID NO: 770318 - protein, 12 aa, Homo sapiens
  CDR3 for beta chain variable domain of TCR clone 385159 (TRBV6-3, TRBJ2-7)
CASSEPGFEQYV

SEQ ID NO: 770319 - protein, 14 aa, Homo sapiens
  CDR3 for alpha chain variable domain of TCR clone 385160 (TRAV26-1, TRAJ39)
CIVRGSRAGNMLTF

SEQ ID NO: 770320 - protein, 14 aa, Homo sapiens
  CDR3 for beta chain variable domain of TCR clone 385160 (TRBV7-9, TRBJ2-1)
CASSPRDSLYEQFF

SEQ ID NO: 770321 - protein, 13 aa, Homo sapiens
  CDR3 for alpha chain variable domain of TCR clone 385161 (TRAV1-2, TRAJ9)
CAVLNTGGFKTIF

SEQ ID NO: 770322 - protein, 13 aa, Homo sapiens
  CDR3 for beta chain variable domain of TCR clone 385161 (TRBV3-1, TRBJ2-2)
CASRQTNTGELFF

SEQ ID NO: 770323 - protein, 13 aa, Homo sapiens
  CDR3 for alpha chain variable domain of TCR clone 385162 (TRAV3, TRAJ8)
CAVRFTGFQKLLF

SEQ ID NO: 770324 - protein, 15 aa, Homo sapiens
  CDR3 for beta chain variable domain of TCR clone 385162 (TRBV20-1, TRBJ2-7)
CSARDRVSGMDEQYF

SEQ ID NO: 770325 - protein, 17 aa, Homo sapiens
  CDR3 for alpha chain variable domain of TCR clone 385163 (TRAV3, TRAJ12)
CAVRDGGRMDSSYKLIF

SEQ ID NO: 770326 - protein, 16 aa, Homo sapiens
  CDR3 for beta chain variable domain of TCR clone 385163 (TRBV9, TRBJ1-2)
CASSVEEKVSPYGYTF

SEQ ID NO: 770327 - protein, 14 aa, Homo sapiens
  CDR3 for alpha chain variable domain of TCR clone 385164 (TRAV12-2, TRAJ13)
CAVNPSGGYQKGTF

SEQ ID NO: 770328 - protein, 14 aa, Homo sapiens
  CDR3 for beta chain variable domain of TCR clone 385164 (TRBV12-4, TRBJ1-1)
CASSLGTGGTEAFF

SEQ ID NO: 770329 - protein, 16 aa, Homo sapiens
  CDR3 for alpha chain variable domain of TCR clone 385165 (TRAV30, TRAJ24)
CGTEIVDVDSWGKFQF

SEQ ID NO: 770330 - protein, 15 aa, Homo sapiens
  CDR3 for beta chain variable domain of TCR clone 385165 (TRBV12-4, TRBJ2-1)
CASSLLGRTYNEQFF

SEQ ID NO: 770331 - protein, 17 aa, Homo sapiens
  CDR3 for alpha chain variable domain of TCR clone 385166 (TRAV4, TRAJ37)
CLVRQHRQTNLWARDNF

SEQ ID NO: 770332 - protein, 14 aa, Homo sapiens
  CDR3 for beta chain variable domain of TCR clone 385166 (TRBV4-1, TRBJ2-2)
CASSQAVNTGELFF

SEQ ID NO: 770333 - protein, 12 aa, Homo sapiens
  CDR3 for alpha chain variable domain of TCR clone 385167 (TRAV12-3, TRAJ42)
CAPGGSQGNLIF

SEQ ID NO: 770334 - protein, 13 aa, Homo sapiens
  CDR3 for beta chain variable domain of TCR clone 385167 (TRBV5-6, TRBJ2-6)
CASTSSGANVLNF

SEQ ID NO: 770335 - protein, 12 aa, Homo sapiens
  CDR3 for alpha chain variable domain of TCR clone 385168 (TRAV8-3, TRAJ26)
CAGDNYGQNFVF

SEQ ID NO: 770336 - protein, 14 aa, Homo sapiens
  CDR3 for beta chain variable domain of TCR clone 385168 (TRBV9, TRBJ2-1)
CQQPRGSSYNEQFF

SEQ ID NO: 770337 - protein, 15 aa, Homo sapiens
  CDR3 for alpha chain variable domain of TCR clone 385169 (TRAV13-1, TRAJ3)
CAASKLASRASKIIF

SEQ ID NO: 770338 - protein, 16 aa, Homo sapiens
  CDR3 for beta chain variable domain of TCR clone 385169 (TRBV25-1, TRBJ1-5)
CASGAPTVNSNQPQHF

SEQ ID NO: 770339 - protein, 14 aa, Homo sapiens
  CDR3 for alpha chain variable domain of TCR clone 385170 (TRAV26-1, TRAJ38)
CIADNAGHNRKLIW

SEQ ID NO: 770340 - protein, 13 aa, Homo sapiens
  CDR3 for beta chain variable domain of TCR clone 385170 (TRBV20-1, TRBJ1-1)
CSARGGGNTEAFF

SEQ ID NO: 770341 - protein, 10 aa, Homo sapiens
  CDR3 for alpha chain variable domain of TCR clone 385171 (TRAV23/DV6, TRAJ57)
CAASSTLSQG

SEQ ID NO: 770342 - protein, 11 aa, Homo sapiens
  CDR3 for beta chain variable domain of TCR clone 385171 (TRBV7-9, TRBJ2-3)
CASSPTDTQYF

SEQ ID NO: 770343 - protein, 14 aa, Homo sapiens
  CDR3 for alpha chain variable domain of TCR clone 385172 (TRAV38-1, TRAJ45)
CASHSGGGADGLTF

SEQ ID NO: 770344 - protein, 13 aa, Homo sapiens
  CDR3 for beta chain variable domain of TCR clone 385172 (TRBV2, TRBJ1-4)
CASSERAGEKLFF

SEQ ID NO: 770345 - protein, 12 aa, Homo sapiens
  CDR3 for alpha chain variable domain of TCR clone 385173 (TRAV29/DV5, TRAJ34)
CAASGNTDKLIF

SEQ ID NO: 770346 - protein, 15 aa, Homo sapiens
  CDR3 for beta chain variable domain of TCR clone 385173 (TRBV10-2, TRBJ2-6)
CASSEQGTGANVLTL

SEQ ID NO: 770347 - protein, 14 aa, Homo sapiens
  CDR3 for alpha chain variable domain of TCR clone 385174 (TRAV8-1, TRAJ27)
CAVNVGTNAGKSTF

SEQ ID NO: 770348 - protein, 19 aa, Homo sapiens
  CDR3 for beta chain variable domain of TCR clone 385174 (TRBV25-1, TRBJ2-2)
CAILVYRVDRGRKTGELFF

SEQ ID NO: 770349 - protein, 15 aa, Homo sapiens
  CDR3 for alpha chain variable domain of TCR clone 385175 (TRAV3, TRAJ4)
CAVRDGTGGYNKLIF

SEQ ID NO: 770350 - protein, 13 aa, Homo sapiens
  CDR3 for beta chain variable domain of TCR clone 385175 (TRBV27, TRBJ2-2)
VLAGYRTPGSCFF

SEQ ID NO: 770351 - protein, 15 aa, Homo sapiens
  CDR3 for alpha chain variable domain of TCR clone 385176 (TRAV27, TRAJ38)
FASRRNSGNNRKLIW

SEQ ID NO: 770352 - protein, 13 aa, Homo sapiens
  CDR3 for beta chain variable domain of TCR clone 385176 (TRBV12-5, TRBJ2-3)
CASGDRQSDTQYF

SEQ ID NO: 770353 - protein, 11 aa, Homo sapiens
  CDR3 for alpha chain variable domain of TCR clone 385177 (TRAV13-2, TRAJ26)
CAEIPGQNFVF

SEQ ID NO: 770354 - protein, 19 aa, Homo sapiens
  CDR3 for beta chain variable domain of TCR clone 385177 (TRBV19, TRBJ2-2)
CASTRPGLAGGRVTGELFC

SEQ ID NO: 770355 - protein, 15 aa, Homo sapiens
  CDR3 for alpha chain variable domain of TCR clone 385178 (TRAV14/DV4, TRAJ26)
CAMREGQNYGQNFVF

SEQ ID NO: 770356 - protein, 16 aa, Homo sapiens
  CDR3 for beta chain variable domain of TCR clone 385178 (TRBV4-1, TRBJ2-5)
CASSQAIAASSATQYF

SEQ ID NO: 770357 - protein, 16 aa, Homo sapiens
  CDR3 for alpha chain variable domain of TCR clone 385179 (TRAV12-3, TRAJ53)
CAMSPGSGGSNYKLPL

SEQ ID NO: 770358 - protein, 11 aa, Homo sapiens
  CDR3 for beta chain variable domain of TCR clone 385179 (TRBV29-1, TRBJ2-5)
CSEDRTGTQYF

SEQ ID NO: 770359 - protein, 11 aa, Homo sapiens
  CDR3 for alpha chain variable domain of TCR clone 385180 (TRAV3, TRAJ21)
CAVGNFNKFYF

SEQ ID NO: 770360 - protein, 13 aa, Homo sapiens
  CDR3 for beta chain variable domain of TCR clone 385180 (TRBV28, TRBJ2-7)
CASSLPSRYEQYF

SEQ ID NO: 770361 - protein, 21 aa, Homo sapiens
  CDR3 for alpha chain variable domain of TCR clone 385181 (TRAV30, TRAJ43)
GLPAQLLRNPLPLIELNDMRF

SEQ ID NO: 770362 - protein, 14 aa, Homo sapiens
  CDR3 for beta chain variable domain of TCR clone 385181 (TRBV27, TRBJ2-1)
CASRHLGGGKEQFF

SEQ ID NO: 770363 - protein, 11 aa, Homo sapiens
  CDR3 for alpha chain variable domain of TCR clone 385182 (TRAV2, TRAJ33)
CAVDSNYQLIW

SEQ ID NO: 770364 - protein, 13 aa, Homo sapiens
  CDR3 for beta chain variable domain of TCR clone 385182 (TRBV7-9, TRBJ2-7)
CASSFAGAYEQYF

SEQ ID NO: 770365 - protein, 14 aa, Homo sapiens
  CDR3 for alpha chain variable domain of TCR clone 385183 (TRAV12-1, TRAJ12)
CVVNGRDSSYKLIF

SEQ ID NO: 770366 - protein, 13 aa, Homo sapiens
  CDR3 for beta chain variable domain of TCR clone 385183 (TRBV28, TRBJ2-2)
CASIRESTGERFF

SEQ ID NO: 770367 - protein, 15 aa, Homo sapiens
  CDR3 for alpha chain variable domain of TCR clone 385184 (TRAV23/DV6, TRAJ18)
CAARYRGSPLRRLYF

SEQ ID NO: 770368 - protein, 16 aa, Homo sapiens
  CDR3 for beta chain variable domain of TCR clone 385184 (TRBV20-1, TRBJ1-2)
CSASMGQGVANYGYTF

SEQ ID NO: 770369 - protein, 14 aa, Homo sapiens
  CDR3 for alpha chain variable domain of TCR clone 385185 (TRAV12-2, TRAJ53)
CAVKGGGSNYKLTF

SEQ ID NO: 770370 - protein, 15 aa, Homo sapiens
  CDR3 for beta chain variable domain of TCR clone 385185 (TRBV11-2, TRBJ2-2)
CASSLDTGSTGELFF

SEQ ID NO: 770371 - protein, 16 aa, Homo sapiens
  CDR3 for alpha chain variable domain of TCR clone 385186 (TRAV3, TRAJ3)
CAVRDRAKSSASKIIF

SEQ ID NO: 770372 - protein, 16 aa, Homo sapiens
  CDR3 for beta chain variable domain of TCR clone 385186 (TRBV20-1, TRBJ2-4)
CSATSLAELAKNILYF

SEQ ID NO: 770373 - protein, 11 aa, Homo sapiens
  CDR3 for alpha chain variable domain of TCR clone 385187 (TRAV13-1, TRAJ40)
CAVSGTYKYIF

SEQ ID NO: 770374 - protein, 13 aa, Homo sapiens
  CDR3 for beta chain variable domain of TCR clone 385187 (TRBV19, TRBJ1-5)
CASSIGGSQPQHF

SEQ ID NO: 770375 - protein, 18 aa, Homo sapiens
  CDR3 for alpha chain variable domain of TCR clone 385188 (TRAV12-1, TRAJ52)
CVVKLINAGGTSYGKLTF

SEQ ID NO: 770376 - protein, 17 aa, Homo sapiens
  CDR3 for beta chain variable domain of TCR clone 385188 (TRBV18, TRBJ1-5)
CASSPTMGQGTNQPQHF

SEQ ID NO: 770377 - protein, 10 aa, Homo sapiens
  CDR3 for alpha chain variable domain of TCR clone 385189 (TRAV30, TRAJ48)
CGIGNEKLTF

SEQ ID NO: 770378 - protein, 16 aa, Homo sapiens
  CDR3 for beta chain variable domain of TCR clone 385189 (TRBV11-2, TRBJ2-2)
CASSLRTGNLIGELFF

SEQ ID NO: 770379 - protein, 17 aa, Homo sapiens
  CDR3 for alpha chain variable domain of TCR clone 385190 (TRAV2, TRAJ36)
CAVEDRGNWGRQPLLWD

SEQ ID NO: 770380 - protein, 14 aa, Homo sapiens
  CDR3 for beta chain variable domain of TCR clone 385190 (TRBV7-9, TRBJ2-5)
CASSLDTAQETQYF

SEQ ID NO: 770381 - protein, 13 aa, Homo sapiens
  CDR3 for alpha chain variable domain of TCR clone 385191 (TRAV27, TRAJ6)
CAGGTRASYIPTF

SEQ ID NO: 770382 - protein, 13 aa, Homo sapiens
  CDR3 for beta chain variable domain of TCR clone 385191 (TRBV4-1, TRBJ2-2)
CASSQENTGELFF

SEQ ID NO: 770383 - protein, 13 aa, Homo sapiens
  CDR3 for alpha chain variable domain of TCR clone 385192 (TRAV13-2, TRAJ10)
CEENTGGGNKLTF

SEQ ID NO: 770384 - protein, 15 aa, Homo sapiens
  CDR3 for beta chain variable domain of TCR clone 385192 (TRBV12-4, TRBJ2-2)
CASSRQGANTGELFF

SEQ ID NO: 770385 - protein, 13 aa, Homo sapiens
  CDR3 for alpha chain variable domain of TCR clone 385193 (TRAV13-2, TRAJ48)
CAEMDSGNEKLTF

SEQ ID NO: 770386 - protein, 17 aa, Homo sapiens
  CDR3 for beta chain variable domain of TCR clone 385193 (TRBV7-9, TRBJ1-6)
CARSAPGRGIHPSTLGT

SEQ ID NO: 770387 - protein, 15 aa, Homo sapiens
  CDR3 for alpha chain variable domain of TCR clone 385194 (TRAV25, TRAJ52)
CAGTSGGTSYGKLTF

SEQ ID NO: 770388 - protein, 13 aa, Homo sapiens
  CDR3 for beta chain variable domain of TCR clone 385194 (TRBV11-2, TRBJ2-5)
CASSRGPSETQYF

SEQ ID NO: 770389 - protein, 15 aa, Homo sapiens
  CDR3 for alpha chain variable domain of TCR clone 385195 (TRAV17, TRAJ4)
CATGTWSGGYNKLIF

SEQ ID NO: 770390 - protein, 14 aa, Homo sapiens
  CDR3 for beta chain variable domain of TCR clone 385195 (TRBV2, TRBJ2-3)
CASSEGQNTDTQYF

SEQ ID NO: 770391 - protein, 15 aa, Homo sapiens
  CDR3 for alpha chain variable domain of TCR clone 385196 (TRAV20, TRAJ53)
CAVQASGGSKYKLTF

SEQ ID NO: 770392 - protein, 12 aa, Homo sapiens
  CDR3 for beta chain variable domain of TCR clone 385196 (TRBV7-6, TRBJ2-5)
CASSLSQETQYF

SEQ ID NO: 770393 - protein, 13 aa, Homo sapiens
  CDR3 for alpha chain variable domain of TCR clone 385197 (TRAV3, TRAJ21)
CAVGNFNKFTLVL

SEQ ID NO: 770394 - protein, 16 aa, Homo sapiens
  CDR3 for beta chain variable domain of TCR clone 385197 (TRBV19, TRBJ2-1)
CASSKAGPSSYNEQFF

SEQ ID NO: 770395 - protein, 12 aa, Homo sapiens
  CDR3 for alpha chain variable domain of TCR clone 385198 (TRAV12-2, TRAJ10)
WGVTGGGNRLTF

SEQ ID NO: 770396 - protein, 16 aa, Homo sapiens
  CDR3 for beta chain variable domain of TCR clone 385198 (TRBV6-4, TRBJ1-2)
CASSEAVGDPNYGYTF

SEQ ID NO: 770397 - protein, 17 aa, Homo sapiens
  CDR3 for alpha chain variable domain of TCR clone 385199 (TRAV38-1, TRAJ45)
CAFMRSHSGGGADGLTF

SEQ ID NO: 770398 - protein, 15 aa, Homo sapiens
  CDR3 for beta chain variable domain of TCR clone 385199 (TRBV7-2, TRBJ2-3)
CASSLVVRGSDTQYF

SEQ ID NO: 770399 - protein, 13 aa, Homo sapiens
  CDR3 for alpha chain variable domain of TCR clone 385200 (TRAV38-1, TRAJ49)
CAFMKYTGNQFYF

SEQ ID NO: 770400 - protein, 14 aa, Homo sapiens
  CDR3 for beta chain variable domain of TCR clone 385200 (TRBV5-1, TRBJ1-1)
CASSFVQGGGEAFF

SEQ ID NO: 770401 - protein, 19 aa, Homo sapiens
  CDR3 for alpha chain variable domain of TCR clone 385201 (TRAV3, TRAJ6)
CAVRDRNPTRSGGSYIPTF

SEQ ID NO: 770402 - protein, 15 aa, Homo sapiens
  CDR3 for beta chain variable domain of TCR clone 385201 (TRBV18, TRBJ2-7)
CASSPTFMDSYEQYF

SEQ ID NO: 770403 - protein, 15 aa, Homo sapiens
  CDR3 for alpha chain variable domain of TCR clone 385202 (TRAV3, TRAJ5)
CAVRDLDTGRRALTF

SEQ ID NO: 770404 - protein, 15 aa, Homo sapiens
  CDR3 for beta chain variable domain of TCR clone 385202 (TRBV15, TRBJ1-3)
CATSRDRGPGNTIYF

SEQ ID NO: 770405 - protein, 14 aa, Homo sapiens
  CDR3 for alpha chain variable domain of TCR clone 385203 (TRAV12-3, TRAJ10)
SHLPLTGGGNKLTF

SEQ ID NO: 770406 - protein, 14 aa, Homo sapiens
  CDR3 for beta chain variable domain of TCR clone 385203 (TRBV7-2, TRBJ2-5)
CASSLSGWGETQYF

SEQ ID NO: 770407 - protein, 16 aa, Homo sapiens
  CDR3 for alpha chain variable domain of TCR clone 385204 (TRAV16, TRAJ52)
CALSAAGGTSYGKLTF

SEQ ID NO: 770408 - protein, 13 aa, Homo sapiens
  CDR3 for beta chain variable domain of TCR clone 385204 (TRBV4-1, TRBJ2-3)
CASSQPPTDTQYF

SEQ ID NO: 770409 - protein, 11 aa, Homo sapiens
  CDR3 for alpha chain variable domain of TCR clone 385205 (TRAV2, TRAJ34)
CAVGYTDKLIF

SEQ ID NO: 770410 - protein, 16 aa, Homo sapiens
  CDR3 for beta chain variable domain of TCR clone 385205 (TRBV4-1, TRBJ2-4)
CASSLLRGTAKNIQYF

SEQ ID NO: 770411 - protein, 12 aa, Homo sapiens
  CDR3 for alpha chain variable domain of TCR clone 385206 (TRAV12-1, TRAJ23)
CVVNNQGGKLIF

SEQ ID NO: 770412 - protein, 16 aa, Homo sapiens
  CDR3 for beta chain variable domain of TCR clone 385206 (TRBV11-1, TRBJ2-7)
CASSAQTGTLSYEQFF

SEQ ID NO: 770413 - protein, 18 aa, Homo sapiens
  CDR3 for alpha chain variable domain of TCR clone 385207 (TRAV17, TRAJ45)
CATSLDLYSGGGAVGLTF

SEQ ID NO: 770414 - protein, 15 aa, Homo sapiens
  CDR3 for beta chain variable domain of TCR clone 385207 (TRBV11-2, TRBJ2-1)
CASSKNRGLIYEQFF

SEQ ID NO: 770415 - protein, 17 aa, Homo sapiens
  CDR3 for alpha chain variable domain of TCR clone 385208 (TRAV4, TRAJ13)
CLVGVQGSSGGYQKVTF

SEQ ID NO: 770416 - protein, 13 aa, Homo sapiens
  CDR3 for beta chain variable domain of TCR clone 385208 (TRBV19, TRBJ2-2)
CASSIWSTGELFF

SEQ ID NO: 770417 - protein, 12 aa, Homo sapiens
  CDR3 for alpha chain variable domain of TCR clone 385209 (TRAV13-2, TRAJ23)
CAERHRGGKLIF

SEQ ID NO: 770418 - protein, 19 aa, Homo sapiens
  CDR3 for beta chain variable domain of TCR clone 385209 (TRBV4-3, TRBJ2-1)
CASSQEVVSSGMAAGEQFF

SEQ ID NO: 770419 - protein, 15 aa, Homo sapiens
  CDR3 for alpha chain variable domain of TCR clone 385210 (TRAV10, TRAJ39)
CAVSASGNAGNMLTF

SEQ ID NO: 770420 - protein, 13 aa, Homo sapiens
  CDR3 for beta chain variable domain of TCR clone 385210 (TRBV18, TRBJ2-7)
CASQSGGGYEQYF

SEQ ID NO: 770421 - protein, 14 aa, Homo sapiens
  CDR3 for alpha chain variable domain of TCR clone 385211 (TRAV12-3, TRAJ5)
CAMTWDTGRRALTF

SEQ ID NO: 770422 - protein, 14 aa, Homo sapiens
  CDR3 for beta chain variable domain of TCR clone 385211 (TRBV10-2, TRBJ1-5)
CASSSTGRNKPQHF

SEQ ID NO: 770423 - protein, 11 aa, Homo sapiens
  CDR3 for alpha chain variable domain of TCR clone 385212 (TRAV12-1, TRAJ15)
CVVNAGTALIF

SEQ ID NO: 770424 - protein, 16 aa, Homo sapiens
  CDR3 for beta chain variable domain of TCR clone 385212 (TRBV28, TRBJ2-1)
CASSSRGRDSYNEQFF

SEQ ID NO: 770425 - protein, 14 aa, Homo sapiens
  CDR3 for alpha chain variable domain of TCR clone 385213 (TRAV2, TRAJ9)
CAVEDRSGGFKTIF

SEQ ID NO: 770426 - protein, 15 aa, Homo sapiens
  CDR3 for beta chain variable domain of TCR clone 385213 (TRBV11-1, TRBJ2-7)
CASSLNYGASYEQYF

SEQ ID NO: 770427 - protein, 14 aa, Homo sapiens
  CDR3 for alpha chain variable domain of TCR clone 385214 (TRAV13-1, TRAJ48)
CAASRSFGNEKLTF

SEQ ID NO: 770428 - protein, 15 aa, Homo sapiens
  CDR3 for beta chain variable domain of TCR clone 385214 (TRBV12-4, TRBJ2-5)
CASSPPTGLQETQYF

SEQ ID NO: 770429 - protein, 17 aa, Homo sapiens
  CDR3 for alpha chain variable domain of TCR clone 385215 (TRAV3, TRAJ6)
CAVRDGPRAGGSYILTF

SEQ ID NO: 770430 - protein, 14 aa, Homo sapiens
  CDR3 for beta chain variable domain of TCR clone 385215 (TRBV7-2, TRBJ2-7)
CASSPKTSFHEQYF

SEQ ID NO: 770431 - protein, 12 aa, Homo sapiens
  CDR3 for alpha chain variable domain of TCR clone 385216 (TRAV8-3, TRAJ26)
CAGDNYGQNFVF

SEQ ID NO: 770432 - protein, 14 aa, Homo sapiens
  CDR3 for beta chain variable domain of TCR clone 385216 (TRBV20-1, TRBJ2-4)
CSASGRVGENIQYF

SEQ ID NO: 770433 - protein, 14 aa, Homo sapiens
  CDR3 for alpha chain variable domain of TCR clone 385217 (TRAV4, TRAJ17)
CLVGDMAAGNKLTF

SEQ ID NO: 770434 - protein, 14 aa, Homo sapiens
  CDR3 for beta chain variable domain of TCR clone 385217 (TRBV13, TRBJ2-5)
CASYRRLAEETQYF

SEQ ID NO: 770435 - protein, 16 aa, Homo sapiens
  CDR3 for alpha chain variable domain of TCR clone 385218 (TRAV12-2, TRAJ52)
CRLANAGGTRYGKMTF

SEQ ID NO: 770436 - protein, 14 aa, Homo sapiens
  CDR3 for beta chain variable domain of TCR clone 385218 (TRBV7-6, TRBJ2-3)
CASSLGTVTDTQYF

SEQ ID NO: 770437 - protein, 15 aa, Homo sapiens
  CDR3 for alpha chain variable domain of TCR clone 385219 (TRAV23/DV6, TRAJ18)
WAARYRGSTLGRLYF

SEQ ID NO: 770438 - protein, 11 aa, Homo sapiens
  CDR3 for beta chain variable domain of TCR clone 385219 (TRBV29-1, TRBJ2-5)
CSEDRTGTQYF

SEQ ID NO: 770439 - protein, 15 aa, Homo sapiens
  CDR3 for alpha chain variable domain of TCR clone 385220 (TRAV3, TRAJ22)
CAVRDRGGSARQLTF

SEQ ID NO: 770440 - protein, 13 aa, Homo sapiens
  CDR3 for beta chain variable domain of TCR clone 385220 (TRBV2, TRBJ1-5)
CANAGPGNQPQHF

SEQ ID NO: 770441 - protein, 15 aa, Homo sapiens
  CDR3 for alpha chain variable domain of TCR clone 385221 (TRAV12-2, TRAJ53)
CAVNGGGGSNYKLTF

SEQ ID NO: 770442 - protein, 13 aa, Homo sapiens
  CDR3 for beta chain variable domain of TCR clone 385221 (TRBV5-7, TRBJ1-2)
CASSLGTGYGYTF

SEQ ID NO: 770443 - protein, 10 aa, Homo sapiens
  CDR3 for alpha chain variable domain of TCR clone 385222 (TRAV21, TRAJ31)
SAVDNARLMF

SEQ ID NO: 770444 - protein, 13 aa, Homo sapiens
  CDR3 for beta chain variable domain of TCR clone 385222 (TRBV4-1, TRBJ1-1)
CASSRKMNTEAFF

SEQ ID NO: 770445 - protein, 12 aa, Homo sapiens
  CDR3 for alpha chain variable domain of TCR clone 385223 (TRAV17, TRAJ39)
CATGAAGNMLTF

SEQ ID NO: 770446 - protein, 14 aa, Homo sapiens
  CDR3 for beta chain variable domain of TCR clone 385223 (TRBV7-9, TRBJ1-2)
CASSRQGANYGYTI

SEQ ID NO: 770447 - protein, 13 aa, Homo sapiens
  CDR3 for alpha chain variable domain of TCR clone 385224 (TRAV16, TRAJ29)
CALSRRGNTPLVF

SEQ ID NO: 770448 - protein, 15 aa, Homo sapiens
  CDR3 for beta chain variable domain of TCR clone 385224 (TRBV7-2, TRBJ2-3)
CASSLRGGSTDTQYF

SEQ ID NO: 770449 - protein, 15 aa, Homo sapiens
  CDR3 for alpha chain variable domain of TCR clone 385225 (TRAV8-3, TRAJ41)
CAVGSNSNSGYALNF

SEQ ID NO: 770450 - protein, 17 aa, Homo sapiens
  CDR3 for beta chain variable domain of TCR clone 385225 (TRBV25-1, TRBJ2-1)
CASSAYGQGRGVYEQFC

SEQ ID NO: 770451 - protein, 14 aa, Homo sapiens
  CDR3 for alpha chain variable domain of TCR clone 385226 (TRAV13-1, TRAJ9)
CAASALTGGFKTIF

SEQ ID NO: 770452 - protein, 15 aa, Homo sapiens
  CDR3 for beta chain variable domain of TCR clone 385226 (TRBV7-8, TRBJ1-2)
CASSLVRDGGLGYTF

SEQ ID NO: 770453 - protein, 13 aa, Homo sapiens
  CDR3 for alpha chain variable domain of TCR clone 385227 (TRAV27, TRAJ41)
CAGEGNSGYALNF

SEQ ID NO: 770454 - protein, 16 aa, Homo sapiens
  CDR3 for beta chain variable domain of TCR clone 385227 (TRBV7-3, TRBJ2-1)
CASSKPLAGGYNEQFF

SEQ ID NO: 770455 - protein, 14 aa, Homo sapiens
  CDR3 for alpha chain variable domain of TCR clone 385228 (TRAV21, TRAJ35)
CAVMPIGFGNVPHC

SEQ ID NO: 770456 - protein, 12 aa, Homo sapiens
  CDR3 for beta chain variable domain of TCR clone 385228 (TRBV7-9, TRBJ2-7)
CASSIKWEEQYF

SEQ ID NO: 770457 - protein, 12 aa, Homo sapiens
  CDR3 for alpha chain variable domain of TCR clone 385229 (TRAV1-1, TRAJ43)
CAPRVSSNDVRF

SEQ ID NO: 770458 - protein, 15 aa, Homo sapiens
  CDR3 for beta chain variable domain of TCR clone 385229 (TRBV5-1, TRBJ2-7)
CASSLGDFTTYEQYF

SEQ ID NO: 770459 - protein, 12 aa, Homo sapiens
  CDR3 for alpha chain variable domain of TCR clone 385230 (TRAV21, TRAJ58)
GAAETSGSRLTF

SEQ ID NO: 770460 - protein, 15 aa, Homo sapiens
  CDR3 for beta chain variable domain of TCR clone 385230 (TRBV20-1, TRBJ2-7)
CSARDPVKGEGEQYF

SEQ ID NO: 770461 - protein, 17 aa, Homo sapiens
  CDR3 for alpha chain variable domain of TCR clone 385231 (TRAV3, TRAJ42)
CAVRDRDYGGSKGNLII

SEQ ID NO: 770462 - protein, 16 aa, Homo sapiens
  CDR3 for beta chain variable domain of TCR clone 385231 (TRBV7-3, TRBJ2-2)
CASSLKRGTLSGELFF

SEQ ID NO: 770463 - protein, 10 aa, Homo sapiens
  CDR3 for alpha chain variable domain of TCR clone 385232 (TRAV23/DV6, )
CAEPDIQNPD

SEQ ID NO: 770464 - protein, 15 aa, Homo sapiens
  CDR3 for beta chain variable domain of TCR clone 385232 (TRBV12-4, TRBJ2-5)
CASTLNSGRGETQYF

SEQ ID NO: 770465 - protein, 14 aa, Homo sapiens
  CDR3 for alpha chain variable domain of TCR clone 385233 (TRAV1-2, TRAJ16)
CAVNRFSDGQKLLF

SEQ ID NO: 770466 - protein, 15 aa, Homo sapiens
  CDR3 for beta chain variable domain of TCR clone 385233 (TRBV5-1, TRBJ2-2)
CASSSQGGNTGELFL

SEQ ID NO: 770467 - protein, 13 aa, Homo sapiens
  CDR3 for alpha chain variable domain of TCR clone 385234 (TRAV21, TRAJ27)
CAARPGNAGKATF

SEQ ID NO: 770468 - protein, 14 aa, Homo sapiens
  CDR3 for beta chain variable domain of TCR clone 385234 (TRBV7-6, TRBJ2-3)
CASSLGTVTDTQYL

SEQ ID NO: 770469 - protein, 11 aa, Homo sapiens
  CDR3 for alpha chain variable domain of TCR clone 385235 (TRAV2, TRAJ13)
CASAGYQKVTF

SEQ ID NO: 770470 - protein, 17 aa, Homo sapiens
  CDR3 for beta chain variable domain of TCR clone 385235 (TRBV20-1, TRBJ2-2)
CSASGSGQGGLTGELFF

SEQ ID NO: 770471 - protein, 11 aa, Homo sapiens
  CDR3 for alpha chain variable domain of TCR clone 385236 (TRAV13-1, TRAJ40)
CVVSGTYKYIF

SEQ ID NO: 770472 - protein, 13 aa, Homo sapiens
  CDR3 for beta chain variable domain of TCR clone 385236 (TRBV19, TRBJ1-5)
CASSIGGNQPQHF

SEQ ID NO: 770473 - protein, 13 aa, Homo sapiens
  CDR3 for alpha chain variable domain of TCR clone 385237 (TRAV35, TRAJ33)
FAGRHDSNYQLIW

SEQ ID NO: 770474 - protein, 19 aa, Homo sapiens
  CDR3 for beta chain variable domain of TCR clone 385237 (TRBV6-3, TRBJ2-1)
CASSYSWTSGRATYNEQFF

SEQ ID NO: 770475 - protein, 14 aa, Homo sapiens
  CDR3 for alpha chain variable domain of TCR clone 385238 (TRAV17, TRAJ56)
CATVPAGANSQLTF

SEQ ID NO: 770476 - protein, 13 aa, Homo sapiens
  CDR3 for beta chain variable domain of TCR clone 385238 (TRBV12-4, TRBJ2-2)
CASSITGSGELFF

SEQ ID NO: 770477 - protein, 18 aa, Homo sapiens
  CDR3 for alpha chain variable domain of TCR clone 385239 (TRAV16, TRAJ52)
CALSGVDAGGTSYGKLTF

SEQ ID NO: 770478 - protein, 14 aa, Homo sapiens
  CDR3 for beta chain variable domain of TCR clone 385239 (TRBV25-1, TRBJ1-1)
CASTHLGGNTEAFF

SEQ ID NO: 770479 - protein, 21 aa, Homo sapiens
  CDR3 for alpha chain variable domain of TCR clone 385240 (TRAV12-1, TRAJ32)
SSVIQPPTSMNYGGATNKLIF

SEQ ID NO: 770480 - protein, 15 aa, Homo sapiens
  CDR3 for beta chain variable domain of TCR clone 385240 (TRBV7-9, TRBJ2-2)
CASGLLDTFPGELFF

SEQ ID NO: 770481 - protein, 15 aa, Homo sapiens
  CDR3 for alpha chain variable domain of TCR clone 385241 (TRAV3, TRAJ12)
CAVRDIRDSSDKLIF

SEQ ID NO: 770482 - protein, 15 aa, Homo sapiens
  CDR3 for beta chain variable domain of TCR clone 385241 (TRBV27, TRBJ2-7)
CASSLRNEQGYEQYF

SEQ ID NO: 770483 - protein, 15 aa, Homo sapiens
  CDR3 for alpha chain variable domain of TCR clone 385242 (TRAV2, TRAJ16)
CAVEVSFSDGQKLLF

SEQ ID NO: 770484 - protein, 12 aa, Homo sapiens
  CDR3 for beta chain variable domain of TCR clone 385242 (TRBV19, TRBJ1-5)
CASSIAQQPQHF

SEQ ID NO: 770485 - protein, 16 aa, Homo sapiens
  CDR3 for alpha chain variable domain of TCR clone 385243 (TRAV13-1, TRAJ18)
CAASRMRGSTLGRLYF

SEQ ID NO: 770486 - protein, 16 aa, Homo sapiens
  CDR3 for beta chain variable domain of TCR clone 385243 (TRBV27, TRBJ1-1)
CASRSRGRTGYTEAFF

SEQ ID NO: 770487 - protein, 14 aa, Homo sapiens
  CDR3 for alpha chain variable domain of TCR clone 385244 (TRAV38-2/DV8, TRAJ30)
CAYMDGLGGDKIIF

SEQ ID NO: 770488 - protein, 15 aa, Homo sapiens
  CDR3 for beta chain variable domain of TCR clone 385244 (TRBV7-9, TRBJ2-2)
CASRPADRHTGELFF

SEQ ID NO: 770489 - protein, 16 aa, Homo sapiens
  CDR3 for alpha chain variable domain of TCR clone 385245 (TRAV35, TRAJ28)
CAGQRYSGAGSYQLTF

SEQ ID NO: 770490 - protein, 13 aa, Homo sapiens
  CDR3 for beta chain variable domain of TCR clone 385245 (TRBV19, TRBJ1-2)
CASSQGQVYAYTF

SEQ ID NO: 770491 - protein, 12 aa, Homo sapiens
  CDR3 for alpha chain variable domain of TCR clone 385246 (TRAV12-3, TRAJ40)
CAMSSGTYKYIF

SEQ ID NO: 770492 - protein, 15 aa, Homo sapiens
  CDR3 for beta chain variable domain of TCR clone 385246 (TRBV7-3, TRBJ2-2)
CASSETGEGTGELFC

SEQ ID NO: 770493 - protein, 16 aa, Homo sapiens
  CDR3 for alpha chain variable domain of TCR clone 385247 (TRAV21, TRAJ45)
CAVSWGSGGGADGLTF

SEQ ID NO: 770494 - protein, 12 aa, Homo sapiens
  CDR3 for beta chain variable domain of TCR clone 385247 (TRBV11-2, TRBJ2-2)
CASSLPTGELFF

SEQ ID NO: 770495 - protein, 12 aa, Homo sapiens
  CDR3 for alpha chain variable domain of TCR clone 385248 (TRAV8-3, TRAJ26)
CAGDNYGQDFVF

SEQ ID NO: 770496 - protein, 15 aa, Homo sapiens
  CDR3 for beta chain variable domain of TCR clone 385248 (TRBV6-6, TRBJ1-2)
CASSYADRGNYGYTF

SEQ ID NO: 770497 - protein, 16 aa, Homo sapiens
  CDR3 for alpha chain variable domain of TCR clone 385249 (TRAV12-3, TRAJ53)
CAMSPGSVGSNYKLTF

SEQ ID NO: 770498 - protein, 12 aa, Homo sapiens
  CDR3 for beta chain variable domain of TCR clone 385249 (TRBV7-8, TRBJ2-7)
CASSLGDREQYF

SEQ ID NO: 770499 - protein, 14 aa, Homo sapiens
  CDR3 for alpha chain variable domain of TCR clone 385250 (TRAV12-2, TRAJ13)
CAVKKIGGYQKVTF

SEQ ID NO: 770500 - protein, 14 aa, Homo sapiens
  CDR3 for beta chain variable domain of TCR clone 385250 (TRBV10-3, TRBJ2-1)
CAISSDLAYNEQFF

SEQ ID NO: 770501 - protein, 12 aa, Homo sapiens
  CDR3 for alpha chain variable domain of TCR clone 385251 (TRAV8-6, TRAJ33)
CALTDSNYQLIW

SEQ ID NO: 770502 - protein, 15 aa, Homo sapiens
  CDR3 for beta chain variable domain of TCR clone 385251 (TRBV4-3, TRBJ1-2)
CASSRGQGRNYGYTF

SEQ ID NO: 770503 - protein, 14 aa, Homo sapiens
  CDR3 for alpha chain variable domain of TCR clone 385252 (TRAV12-3, TRAJ43)
CAMSLGGAGTRLTV

SEQ ID NO: 770504 - protein, 13 aa, Homo sapiens
  CDR3 for beta chain variable domain of TCR clone 385252 (TRBV7-9, TRBJ1-2)
CASSLKQNYGYTS

SEQ ID NO: 770505 - protein, 13 aa, Homo sapiens
  CDR3 for alpha chain variable domain of TCR clone 385253 (TRAV1-2, TRAJ33)
CAVSEDSDYQLIW

SEQ ID NO: 770506 - protein, 16 aa, Homo sapiens
  CDR3 for beta chain variable domain of TCR clone 385253 (TRBV4-2, TRBJ2-7)
CASSQDGVERGYEQYF

SEQ ID NO: 770507 - protein, 15 aa, Homo sapiens
  CDR3 for alpha chain variable domain of TCR clone 385254 (TRAV3, TRAJ9)
CAVRDINTGGFTTIF

SEQ ID NO: 770508 - protein, 13 aa, Homo sapiens
  CDR3 for beta chain variable domain of TCR clone 385254 (TRBV10-3, TRBJ2-7)
CASKLAVNYEQYF

SEQ ID NO: 770509 - protein, 18 aa, Homo sapiens
  CDR3 for alpha chain variable domain of TCR clone 385255 (TRAV26-1, TRAJ23)
CIVRVGLDVWNQGGQLIF

SEQ ID NO: 770510 - protein, 16 aa, Homo sapiens
  CDR3 for beta chain variable domain of TCR clone 385255 (TRBV12-4, TRBJ2-5)
CASSFFVRGRQETQYF

SEQ ID NO: 770511 - protein, 11 aa, Homo sapiens
  CDR3 for alpha chain variable domain of TCR clone 385256 (TRAV21, TRAJ34)
CAVTNTDKLIF

SEQ ID NO: 770512 - protein, 13 aa, Homo sapiens
  CDR3 for beta chain variable domain of TCR clone 385256 (TRBV12-4, TRBJ1-2)
CASSLRQGKGYTF

SEQ ID NO: 770513 - protein, 16 aa, Homo sapiens
  CDR3 for alpha chain variable domain of TCR clone 385257 (TRAV20, TRAJ53)
CAVQGNSGGSNYKLTF

SEQ ID NO: 770514 - protein, 14 aa, Homo sapiens
  CDR3 for beta chain variable domain of TCR clone 385257 (TRBV6-5, TRBJ2-7)
CASNPHRGLREQYF

SEQ ID NO: 770515 - protein, 12 aa, Homo sapiens
  CDR3 for alpha chain variable domain of TCR clone 385258 (TRAV1-1, TRAJ39)
CAVPVVGNMLTF

SEQ ID NO: 770516 - protein, 16 aa, Homo sapiens
  CDR3 for beta chain variable domain of TCR clone 385258 (TRBV28, TRBJ2-7)
CASSRWVATGDLSQYF

SEQ ID NO: 770517 - protein, 15 aa, Homo sapiens
  CDR3 for alpha chain variable domain of TCR clone 385259 (TRAV3, TRAJ17)
CAVRDTGAAGNKLTF

SEQ ID NO: 770518 - protein, 15 aa, Homo sapiens
  CDR3 for beta chain variable domain of TCR clone 385259 (TRBV3-1, TRBJ2-5)
CASSANLGGPETQYF

SEQ ID NO: 770519 - protein, 11 aa, Homo sapiens
  CDR3 for alpha chain variable domain of TCR clone 385260 (TRAV21, TRAJ34)
CAVTNTDKLIF

SEQ ID NO: 770520 - protein, 13 aa, Homo sapiens
  CDR3 for beta chain variable domain of TCR clone 385260 (TRBV7-6, TRBJ1-2)
CASSLVADYGYTF

SEQ ID NO: 770521 - protein, 14 aa, Homo sapiens
  CDR3 for alpha chain variable domain of TCR clone 385261 (TRAV9-2, TRAJ39)
CALYIYNPGNMLTF

SEQ ID NO: 770522 - protein, 13 aa, Homo sapiens
  CDR3 for beta chain variable domain of TCR clone 385261 (TRBV7-9, TRBJ1-2)
CASSLKQNYGYTF

SEQ ID NO: 770523 - protein, 15 aa, Homo sapiens
  CDR3 for alpha chain variable domain of TCR clone 385262 (TRAV20, TRAJ52)
CAVQAGGTSYGKLTF

SEQ ID NO: 770524 - protein, 14 aa, Homo sapiens
  CDR3 for beta chain variable domain of TCR clone 385262 (TRBV11-2, TRBJ2-3)
CASSRLARTDTQYF

SEQ ID NO: 770525 - protein, 18 aa, Homo sapiens
  CDR3 for alpha chain variable domain of TCR clone 385263 (TRAV40, TRAJ42)
SSGSRLLNYGGSQGNPIF

SEQ ID NO: 770526 - protein, 13 aa, Homo sapiens
  CDR3 for beta chain variable domain of TCR clone 385263 (TRBV4-1, TRBJ2-2)
CASSQENTGELFF

SEQ ID NO: 770527 - protein, 12 aa, Homo sapiens
  CDR3 for alpha chain variable domain of TCR clone 385264 (TRAV4, TRAJ26)
CLVGDYGQNFVF

SEQ ID NO: 770528 - protein, 15 aa, Homo sapiens
  CDR3 for beta chain variable domain of TCR clone 385264 (TRBV18, TRBJ2-1)
CASSPPSASYNEQFF

SEQ ID NO: 770529 - protein, 12 aa, Homo sapiens
  CDR3 for alpha chain variable domain of TCR clone 385265 (TRAV2, TRAJ3)
CAVRSSASKLIF

SEQ ID NO: 770530 - protein, 15 aa, Homo sapiens
  CDR3 for beta chain variable domain of TCR clone 385265 (TRBV15, TRBJ2-5)
CATSRDGGPQETQYF

SEQ ID NO: 770531 - protein, 13 aa, Homo sapiens
  CDR3 for alpha chain variable domain of TCR clone 385266 (TRAV8-6, TRAJ5)
CAVLDTGRRALTF

SEQ ID NO: 770532 - protein, 12 aa, Homo sapiens
  CDR3 for beta chain variable domain of TCR clone 385266 (TRBV7-9, TRBJ1-6)
CASSASESHLHF

SEQ ID NO: 770533 - protein, 12 aa, Homo sapiens
  CDR3 for alpha chain variable domain of TCR clone 385267 (TRAV12-3, TRAJ17)
CAMTLKGNKLTF

SEQ ID NO: 770534 - protein, 20 aa, Homo sapiens
  CDR3 for beta chain variable domain of TCR clone 385267 (TRBV7-8, TRBJ2-2)
CASSHLFPGPTIHITGELFF

SEQ ID NO: 770535 - protein, 15 aa, Homo sapiens
  CDR3 for alpha chain variable domain of TCR clone 385268 (TRAV17, TRAJ54)
CATDAQIQGAQKLVF

SEQ ID NO: 770536 - protein, 18 aa, Homo sapiens
  CDR3 for beta chain variable domain of TCR clone 385268 (TRBV10-1, TRBJ2-1)
CASSWVGGALFSTMSSSS

SEQ ID NO: 770537 - protein, 15 aa, Homo sapiens
  CDR3 for alpha chain variable domain of TCR clone 385269 (TRAV17, TRAJ13)
CATDAGSGGYQQVTF

SEQ ID NO: 770538 - protein, 17 aa, Homo sapiens
  CDR3 for beta chain variable domain of TCR clone 385269 (TRBV11-2, TRBJ2-1)
CASSVYPPGVEYNEQFF

SEQ ID NO: 770539 - protein, 14 aa, Homo sapiens
  CDR3 for alpha chain variable domain of TCR clone 385270 (TRAV35, TRAJ33)
CAGSSQDSNCQLIW

SEQ ID NO: 770540 - protein, 15 aa, Homo sapiens
  CDR3 for beta chain variable domain of TCR clone 385270 (TRBV29-1, TRBJ2-7)
CSVEFFDRGSYEQYF

SEQ ID NO: 770541 - protein, 11 aa, Homo sapiens
  CDR3 for alpha chain variable domain of TCR clone 385271 (TRAV8-3, TRAJ49)
CAVNTGNQFYF

SEQ ID NO: 770542 - protein, 15 aa, Homo sapiens
  CDR3 for beta chain variable domain of TCR clone 385271 (TRBV10-2, TRBJ2-6)
CASSEQGTGANVLTF

SEQ ID NO: 770543 - protein, 13 aa, Homo sapiens
  CDR3 for alpha chain variable domain of TCR clone 385272 (TRAV27, TRAJ6)
WAGGTRGSNIPTF

SEQ ID NO: 770544 - protein, 14 aa, Homo sapiens
  CDR3 for beta chain variable domain of TCR clone 385272 (TRBV6-3, TRBJ1-1)
CASSYQRRDTEAFF

SEQ ID NO: 770545 - protein, 14 aa, Homo sapiens
  CDR3 for alpha chain variable domain of TCR clone 385273 (TRAV12-2, TRAJ13)
CAVKKTGGYQKVTF

SEQ ID NO: 770546 - protein, 13 aa, Homo sapiens
  CDR3 for beta chain variable domain of TCR clone 385273 (TRBV7-2, TRBJ1-6)
CASSLVGSSPLHF

SEQ ID NO: 770547 - protein, 14 aa, Homo sapiens
  CDR3 for alpha chain variable domain of TCR clone 385274 (TRAV1-2, TRAJ8)
CAVREDTGVQKLVF

SEQ ID NO: 770548 - protein, 15 aa, Homo sapiens
  CDR3 for beta chain variable domain of TCR clone 385274 (TRBV9, TRBJ1-6)
CASSVAGTGDSPLHF

SEQ ID NO: 770549 - protein, 12 aa, Homo sapiens
  CDR3 for alpha chain variable domain of TCR clone 385275 (TRAV2, TRAJ9)
CAVGAGGFTTIF

SEQ ID NO: 770550 - protein, 11 aa, Homo sapiens
  CDR3 for beta chain variable domain of TCR clone 385275 (TRBV13, TRBJ2-2)
CASSPRTGEHT

SEQ ID NO: 770551 - protein, 13 aa, Homo sapiens
  CDR3 for alpha chain variable domain of TCR clone 385276 (TRAV12-2, TRAJ30)
RAVNLNRDDKIIF

SEQ ID NO: 770552 - protein, 12 aa, Homo sapiens
  CDR3 for beta chain variable domain of TCR clone 385276 (TRBV11-3, TRBJ2-2)
CASSLGGGELFF

SEQ ID NO: 770553 - protein, 17 aa, Homo sapiens
  CDR3 for alpha chain variable domain of TCR clone 385277 (TRAV3, TRAJ28)
CAVRDLYSGAGSYQLTF

SEQ ID NO: 770554 - protein, 12 aa, Homo sapiens
  CDR3 for beta chain variable domain of TCR clone 385277 (TRBV14, TRBJ2-5)
CASSQLKETQYF

SEQ ID NO: 770555 - protein, 15 aa, Homo sapiens
  CDR3 for alpha chain variable domain of TCR clone 385278 (TRAV8-3, TRAJ6)
SAVGPLGGGSYIPTF

SEQ ID NO: 770556 - protein, 14 aa, Homo sapiens
  CDR3 for beta chain variable domain of TCR clone 385278 (TRBV19, TRBJ2-2)
CASSTGQGAGELFF

SEQ ID NO: 770557 - protein, 15 aa, Homo sapiens
  CDR3 for alpha chain variable domain of TCR clone 385279 (TRAV13-1, TRAJ45)
CAASGSGGGADGLTF

SEQ ID NO: 770558 - protein, 17 aa, Homo sapiens
  CDR3 for beta chain variable domain of TCR clone 385279 (TRBV24-1, TRBJ2-4)
CATSDAEARGVRNIQYF

SEQ ID NO: 770559 - protein, 14 aa, Homo sapiens
  CDR3 for alpha chain variable domain of TCR clone 385280 (TRAV1-2, TRAJ8)
CAEKEDTGFQELVF

SEQ ID NO: 770560 - protein, 17 aa, Homo sapiens
  CDR3 for beta chain variable domain of TCR clone 385280 (TRBV11-2, TRBJ2-1)
CASSLYPPGVEYNEQFF

SEQ ID NO: 770561 - protein, 12 aa, Homo sapiens
  CDR3 for alpha chain variable domain of TCR clone 385281 (TRAV12-3, TRAJ20)
CSMVRGDYKLSF

SEQ ID NO: 770562 - protein, 14 aa, Homo sapiens
  CDR3 for beta chain variable domain of TCR clone 385281 (TRBV5-5, TRBJ1-5)
CASSGQGVDQPQHF

SEQ ID NO: 770563 - protein, 13 aa, Homo sapiens
  CDR3 for alpha chain variable domain of TCR clone 385282 (TRAV23/DV6, TRAJ9)
CASSTTGGFKTIF

SEQ ID NO: 770564 - protein, 14 aa, Homo sapiens
  CDR3 for beta chain variable domain of TCR clone 385282 (TRBV5-1, TRBJ2-3)
CASRVDGVSDTQYF

SEQ ID NO: 770565 - protein, 10 aa, Homo sapiens
  CDR3 for alpha chain variable domain of TCR clone 385283 (TRAV12-1, TRAJ43)
CVVHNNDMRF

SEQ ID NO: 770566 - protein, 13 aa, Homo sapiens
  CDR3 for beta chain variable domain of TCR clone 385283 (TRBV12-4, TRBJ1-2)
CASSSGLTVRATF

SEQ ID NO: 770567 - protein, 12 aa, Homo sapiens
  CDR3 for alpha chain variable domain of TCR clone 385284 (TRAV25, TRAJ5)
CAGGGGRRTLTF

SEQ ID NO: 770568 - protein, 15 aa, Homo sapiens
  CDR3 for beta chain variable domain of TCR clone 385284 (TRBV19, TRBJ2-4)
CASRGPRRGENIQYF

SEQ ID NO: 770569 - protein, 13 aa, Homo sapiens
  CDR3 for alpha chain variable domain of TCR clone 385285 (TRAV21, TRAJ27)
CAARPGNAGKSTF

SEQ ID NO: 770570 - protein, 14 aa, Homo sapiens
  CDR3 for beta chain variable domain of TCR clone 385285 (TRBV7-6, TRBJ2-1)
GASSLGGGADEQFF

SEQ ID NO: 770571 - protein, 15 aa, Homo sapiens
  CDR3 for alpha chain variable domain of TCR clone 385286 (TRAV3, TRAJ20)
CAVRDIKLSDYKLSF

SEQ ID NO: 770572 - protein, 16 aa, Homo sapiens
  CDR3 for beta chain variable domain of TCR clone 385286 (TRBV20-1, TRBJ2-2)
CSARDDRVGLTGELFF

SEQ ID NO: 770573 - protein, 13 aa, Homo sapiens
  CDR3 for alpha chain variable domain of TCR clone 385287 (TRAV2, TRAJ29)
FAAQNSGNTPLVF

SEQ ID NO: 770574 - protein, 14 aa, Homo sapiens
  CDR3 for beta chain variable domain of TCR clone 385287 (TRBV7-9, TRBJ2-4)
CASSLAMGGNIQYF

SEQ ID NO: 770575 - protein, 16 aa, Homo sapiens
  CDR3 for alpha chain variable domain of TCR clone 385288 (TRAV3, TRAJ21)
CAVRDIERGNFNKFYF

SEQ ID NO: 770576 - protein, 13 aa, Homo sapiens
  CDR3 for beta chain variable domain of TCR clone 385288 (TRBV2, TRBJ2-7)
CASSVGGSGEQYF

SEQ ID NO: 770577 - protein, 11 aa, Homo sapiens
  CDR3 for alpha chain variable domain of TCR clone 385289 (TRAV17, TRAJ31)
CATSNNARLMF

SEQ ID NO: 770578 - protein, 16 aa, Homo sapiens
  CDR3 for beta chain variable domain of TCR clone 385289 (TRBV7-8, TRBJ2-4)
CARSAERTLAKNIQYF

SEQ ID NO: 770579 - protein, 13 aa, Homo sapiens
  CDR3 for alpha chain variable domain of TCR clone 385290 (TRAV17, TRAJ4)
CATTSGGYNKLIF

SEQ ID NO: 770580 - protein, 14 aa, Homo sapiens
  CDR3 for beta chain variable domain of TCR clone 385290 (TRBV20-1, TRBJ1-5)
CSARDDRGNQPQHF

SEQ ID NO: 770581 - protein, 14 aa, Homo sapiens
  CDR3 for alpha chain variable domain of TCR clone 385291 (TRAV9-2, TRAJ39)
CALYIYNAGNMLTF

SEQ ID NO: 770582 - protein, 17 aa, Homo sapiens
  CDR3 for beta chain variable domain of TCR clone 385291 (TRBV20-1, TRBJ2-3)
CSASLLGRGGSADTQYF

SEQ ID NO: 770583 - protein, 13 aa, Homo sapiens
  CDR3 for alpha chain variable domain of TCR clone 385292 (TRAV8-3, TRAJ36)
CAVGATGANNLFF

SEQ ID NO: 770584 - protein, 15 aa, Homo sapiens
  CDR3 for beta chain variable domain of TCR clone 385292 (TRBV7-2, TRBJ1-2)
CASSPRASWNYGYTL

SEQ ID NO: 770585 - protein, 17 aa, Homo sapiens
  CDR3 for alpha chain variable domain of TCR clone 385293 (TRAV3, TRAJ6)
CAVRDGPRAGGSYIPTF

SEQ ID NO: 770586 - protein, 14 aa, Homo sapiens
  CDR3 for beta chain variable domain of TCR clone 385293 (TRBV7-3, TRBJ2-2)
CASSSGGYTGELFF

SEQ ID NO: 770587 - protein, 12 aa, Homo sapiens
  CDR3 for alpha chain variable domain of TCR clone 385294 (TRAV2, TRAJ31)
CAVADNNARLMF

SEQ ID NO: 770588 - protein, 15 aa, Homo sapiens
  CDR3 for beta chain variable domain of TCR clone 385294 (TRBV9, TRBJ1-6)
CASSVAGTGDSPQHF

SEQ ID NO: 770589 - protein, 15 aa, Homo sapiens
  CDR3 for alpha chain variable domain of TCR clone 385295 (TRAV12-3, TRAJ27)
CAMRAYNTNAGKSTF

SEQ ID NO: 770590 - protein, 14 aa, Homo sapiens
  CDR3 for beta chain variable domain of TCR clone 385295 (TRBV25-1, TRBJ1-1)
CVSTHLGGNTEAFF

SEQ ID NO: 770591 - protein, 13 aa, Homo sapiens
  CDR3 for alpha chain variable domain of TCR clone 385296 (TRAV21, TRAJ10)
CVVPTGGGNKLTF

SEQ ID NO: 770592 - protein, 22 aa, Homo sapiens
  CDR3 for beta chain variable domain of TCR clone 385296 (TRBV19, TRBJ2-1)
CASSVRDRVTGTSGRIYNEQFF

SEQ ID NO: 770593 - protein, 12 aa, Homo sapiens
  CDR3 for alpha chain variable domain of TCR clone 385297 (TRAV4, TRAJ26)
CLVGDYGQNFIF

SEQ ID NO: 770594 - protein, 16 aa, Homo sapiens
  CDR3 for beta chain variable domain of TCR clone 385297 (TRBV7-2, TRBJ1-2)
CASSSNQDRRGHGYTF

SEQ ID NO: 770595 - protein, 13 aa, Homo sapiens
  CDR3 for alpha chain variable domain of TCR clone 385298 (TRAV1-1, TRAJ6)
CAVRLGGSYIPAF

SEQ ID NO: 770596 - protein, 14 aa, Homo sapiens
  CDR3 for beta chain variable domain of TCR clone 385298 (TRBV7-2, TRBJ2-5)
CASSLAPDQETQYF

SEQ ID NO: 770597 - protein, 15 aa, Homo sapiens
  CDR3 for alpha chain variable domain of TCR clone 385299 (TRAV38-1, TRAJ57)
CAFMDSQGGSEKLFF

SEQ ID NO: 770598 - protein, 16 aa, Homo sapiens
  CDR3 for beta chain variable domain of TCR clone 385299 (TRBV10-3, TRBJ2-1)
CAIRGGGRGDYSEQFF

SEQ ID NO: 770599 - protein, 15 aa, Homo sapiens
  CDR3 for alpha chain variable domain of TCR clone 385300 (TRAV12-2, TRAJ43)
CAFDMRFGAGTRLIV

SEQ ID NO: 770600 - protein, 15 aa, Homo sapiens
  CDR3 for beta chain variable domain of TCR clone 385300 (TRBV20-1, TRBJ2-7)
CSARDRVSGMDEQYF

SEQ ID NO: 770601 - protein, 13 aa, Homo sapiens
  CDR3 for alpha chain variable domain of TCR clone 385301 (TRAV35, TRAJ36)
CAGPRIGANNLFF

SEQ ID NO: 770602 - protein, 15 aa, Homo sapiens
  CDR3 for beta chain variable domain of TCR clone 385301 (TRBV28, TRBJ2-5)
CASSPSGSYQEAQYF

SEQ ID NO: 770603 - protein, 12 aa, Homo sapiens
  CDR3 for alpha chain variable domain of TCR clone 385302 (TRAV17, TRAJ36)
CATLTGASNLFF

SEQ ID NO: 770604 - protein, 15 aa, Homo sapiens
  CDR3 for beta chain variable domain of TCR clone 385302 (TRBV19, TRBJ1-2)
CASSTKTDTNYGYTF

SEQ ID NO: 770605 - protein, 14 aa, Homo sapiens
  CDR3 for alpha chain variable domain of TCR clone 385303 (TRAV1-2, TRAJ16)
CAVNRFSDGQKLLF

SEQ ID NO: 770606 - protein, 16 aa, Homo sapiens
  CDR3 for beta chain variable domain of TCR clone 385303 (TRBV4-2, TRBJ2-1)
CASSQGEGRTVNEQFF

SEQ ID NO: 770607 - protein, 13 aa, Homo sapiens
  CDR3 for alpha chain variable domain of TCR clone 385304 (TRAV12-1, TRAJ26)
CVVRRNYGQNFVF

SEQ ID NO: 770608 - protein, 14 aa, Homo sapiens
  CDR3 for beta chain variable domain of TCR clone 385304 (TRBV5-4, TRBJ2-2)
CASRLDGGTGELFF

SEQ ID NO: 770609 - protein, 13 aa, Homo sapiens
  CDR3 for alpha chain variable domain of TCR clone 385305 (TRAV3, TRAJ21)
CAVREPDFNKFHF

SEQ ID NO: 770610 - protein, 16 aa, Homo sapiens
  CDR3 for beta chain variable domain of TCR clone 385305 (TRBV19, TRBJ2-1)
CASSKAGPSSYNEQFF

SEQ ID NO: 770611 - protein, 15 aa, Homo sapiens
  CDR3 for alpha chain variable domain of TCR clone 385306 (TRAV25, TRAJ52)
CAGTSGGTSYGKLTF

SEQ ID NO: 770612 - protein, 12 aa, Homo sapiens
  CDR3 for beta chain variable domain of TCR clone 385306 (TRBV6-1, TRBJ2-1)
CASRGPGDEQFF

SEQ ID NO: 770613 - protein, 11 aa, Homo sapiens
  CDR3 for alpha chain variable domain of TCR clone 385307 (TRAV1-2, TRAJ20)
CAVANDYKLSF

SEQ ID NO: 770614 - protein, 13 aa, Homo sapiens
  CDR3 for beta chain variable domain of TCR clone 385307 (TRBV19, TRBJ1-2)
CASSVPGQDGYTF

SEQ ID NO: 770615 - protein, 14 aa, Homo sapiens
  CDR3 for alpha chain variable domain of TCR clone 385308 (TRAV12-3, TRAJ10)
SHLPLTGGGNKLTF

SEQ ID NO: 770616 - protein, 13 aa, Homo sapiens
  CDR3 for beta chain variable domain of TCR clone 385308 (TRBV27, TRBJ1-1)
CARSLSIGAEAFF

SEQ ID NO: 770617 - protein, 14 aa, Homo sapiens
  CDR3 for alpha chain variable domain of TCR clone 385309 (TRAV12-3, TRAJ10)
SHLPLTGGGNKLTF

SEQ ID NO: 770618 - protein, 13 aa, Homo sapiens
  CDR3 for beta chain variable domain of TCR clone 385309 (TRBV11-2, TRBJ2-7)
CASSPLGSYEQYF

SEQ ID NO: 770619 - protein, 17 aa, Homo sapiens
  CDR3 for alpha chain variable domain of TCR clone 385310 (TRAV29/DV5, TRAJ52)
CAASARSGGTSYGKLTF

SEQ ID NO: 770620 - protein, 15 aa, Homo sapiens
  CDR3 for beta chain variable domain of TCR clone 385310 (TRBV4-2, TRBJ1-1)
CASSQRSSGRTEAFF

SEQ ID NO: 770621 - protein, 13 aa, Homo sapiens
  CDR3 for alpha chain variable domain of TCR clone 385311 (TRAV12-2, TRAJ20)
CAVYPSNDYKLSF

SEQ ID NO: 770622 - protein, 11 aa, Homo sapiens
  CDR3 for beta chain variable domain of TCR clone 385311 (TRBV7-2, TRBJ2-3)
CASSSSDTQYF

SEQ ID NO: 770623 - protein, 14 aa, Homo sapiens
  CDR3 for alpha chain variable domain of TCR clone 385312 (TRAV13-1, TRAJ44)
CAAKATGTASKLPF

SEQ ID NO: 770624 - protein, 16 aa, Homo sapiens
  CDR3 for beta chain variable domain of TCR clone 385312 (TRBV20-1, TRBJ1-4)
CSAPGQGLLTNEKLFF

SEQ ID NO: 770625 - protein, 16 aa, Homo sapiens
  CDR3 for alpha chain variable domain of TCR clone 385313 (TRAV12-2, TRAJ28)
CAVNEYSGAGSYQLTC

SEQ ID NO: 770626 - protein, 14 aa, Homo sapiens
  CDR3 for beta chain variable domain of TCR clone 385313 (TRBV18, TRBJ2-3)
CASSLGGGSDTQYF

SEQ ID NO: 770627 - protein, 15 aa, Homo sapiens
  CDR3 for alpha chain variable domain of TCR clone 385314 (TRAV21, TRAJ24)
CAARSSTDSWGKLQF

SEQ ID NO: 770628 - protein, 17 aa, Homo sapiens
  CDR3 for beta chain variable domain of TCR clone 385314 (TRBV7-3, TRBJ2-3)
CASSLAGGLAGTAGQYF

SEQ ID NO: 770629 - protein, 15 aa, Homo sapiens
  CDR3 for alpha chain variable domain of TCR clone 385315 (TRAV1-1, TRAJ20)
CAVKDNVANDYKLSF

SEQ ID NO: 770630 - protein, 13 aa, Homo sapiens
  CDR3 for beta chain variable domain of TCR clone 385315 (TRBV4-1, TRBJ2-2)
CASSQENTGELFF

SEQ ID NO: 770631 - protein, 12 aa, Homo sapiens
  CDR3 for alpha chain variable domain of TCR clone 385316 (TRAV1-1, TRAJ43)
CAPRVSSNDMRF

SEQ ID NO: 770632 - protein, 14 aa, Homo sapiens
  CDR3 for beta chain variable domain of TCR clone 385316 (TRBV19, TRBJ2-7)
CASSMGQGAIEQYF

SEQ ID NO: 770633 - protein, 13 aa, Homo sapiens
  CDR3 for alpha chain variable domain of TCR clone 385317 (TRAV38-1, TRAJ20)
CAFMRDNDYKLSF

SEQ ID NO: 770634 - protein, 12 aa, Homo sapiens
  CDR3 for beta chain variable domain of TCR clone 385317 (TRBV18, TRBJ2-5)
CASSHSKETQYF

SEQ ID NO: 770635 - protein, 18 aa, Homo sapiens
  CDR3 for alpha chain variable domain of TCR clone 385318 (TRAV21, TRAJ52)
CAVRPSPAGGTSYGKLTF

SEQ ID NO: 770636 - protein, 16 aa, Homo sapiens
  CDR3 for beta chain variable domain of TCR clone 385318 (TRBV7-6, TRBJ1-6)
CASSLSSRIGDSPLHF

SEQ ID NO: 770637 - protein, 22 aa, Homo sapiens
  CDR3 for alpha chain variable domain of TCR clone 385319 (TRAV39, TRAJ49)
PCMTSLPPPSVPWTNTSNQFYF

SEQ ID NO: 770638 - protein, 17 aa, Homo sapiens
  CDR3 for beta chain variable domain of TCR clone 385319 (TRBV20-1, TRBJ2-1)
CSARDRRRASSYNEQFF

SEQ ID NO: 770639 - protein, 16 aa, Homo sapiens
  CDR3 for alpha chain variable domain of TCR clone 385320 (TRAV12-2, TRAJ45)
CAVNRGSGGGADGLTF

SEQ ID NO: 770640 - protein, 15 aa, Homo sapiens
  CDR3 for beta chain variable domain of TCR clone 385320 (TRBV6-3, TRBJ2-7)
CASSSPGTVFYEQYF

SEQ ID NO: 770641 - protein, 14 aa, Homo sapiens
  CDR3 for alpha chain variable domain of TCR clone 385321 (TRAV5, TRAJ33)
CRGACMDSNYQLIW

SEQ ID NO: 770642 - protein, 12 aa, Homo sapiens
  CDR3 for beta chain variable domain of TCR clone 385321 (TRBV6-3, TRBJ2-7)
CASSLTPYEQYF

SEQ ID NO: 770643 - protein, 13 aa, Homo sapiens
  CDR3 for alpha chain variable domain of TCR clone 385322 (TRAV12-1, TRAJ29)
CVVNGPGDTPLVF

SEQ ID NO: 770644 - protein, 13 aa, Homo sapiens
  CDR3 for beta chain variable domain of TCR clone 385322 (TRBV7-2, TRBJ2-5)
CASSRGGLETQYF

SEQ ID NO: 770645 - protein, 12 aa, Homo sapiens
  CDR3 for alpha chain variable domain of TCR clone 385323 (TRAV4, TRAJ6)
CLAPGGSYIPTF

SEQ ID NO: 770646 - protein, 15 aa, Homo sapiens
  CDR3 for beta chain variable domain of TCR clone 385323 (TRBV9, TRBJ2-1)
CASSLAGSSYNEQFF

SEQ ID NO: 770647 - protein, 11 aa, Homo sapiens
  CDR3 for alpha chain variable domain of TCR clone 385324 (TRAV27, TRAJ47)
CRSNQGNKLVF

SEQ ID NO: 770648 - protein, 16 aa, Homo sapiens
  CDR3 for beta chain variable domain of TCR clone 385324 (TRBV7-9, TRBJ2-1)
CASSYVAGGSYNEQFF

SEQ ID NO: 770649 - protein, 16 aa, Homo sapiens
  CDR3 for alpha chain variable domain of TCR clone 385325 (TRAV30, TRAJ24)
CGTEIVDADSWGKFQF

SEQ ID NO: 770650 - protein, 13 aa, Homo sapiens
  CDR3 for beta chain variable domain of TCR clone 385325 (TRBV10-3, TRBJ2-7)
CASKLAVNYGQYF

SEQ ID NO: 770651 - protein, 14 aa, Homo sapiens
  CDR3 for alpha chain variable domain of TCR clone 385326 (TRAV2, TRAJ16)
CAVERGSAGQKLLF

SEQ ID NO: 770652 - protein, 12 aa, Homo sapiens
  CDR3 for beta chain variable domain of TCR clone 385326 (TRBV6-5, TRBJ2-7)
CASYIYGYEQYF

SEQ ID NO: 770653 - protein, 15 aa, Homo sapiens
  CDR3 for alpha chain variable domain of TCR clone 385327 (TRAV13-1, TRAJ42)
CAASIAGGSQGNRIF

SEQ ID NO: 770654 - protein, 15 aa, Homo sapiens
  CDR3 for beta chain variable domain of TCR clone 385327 (TRBV19, TRBJ2-1)
CASSIVRGEGREQFF

SEQ ID NO: 770655 - protein, 11 aa, Homo sapiens
  CDR3 for alpha chain variable domain of TCR clone 385328 (TRAV1-1, TRAJ23)
CAVRQGGKLIF

SEQ ID NO: 770656 - protein, 13 aa, Homo sapiens
  CDR3 for beta chain variable domain of TCR clone 385328 (TRBV7-2, TRBJ2-5)
CASSQTSVETQYF

SEQ ID NO: 770657 - protein, 14 aa, Homo sapiens
  CDR3 for alpha chain variable domain of TCR clone 385329 (TRAV27, TRAJ23)
WAGAFDNQGGKLIF

SEQ ID NO: 770658 - protein, 15 aa, Homo sapiens
  CDR3 for beta chain variable domain of TCR clone 385329 (TRBV7-3, TRBJ2-7)
CASSLTGQGKYEQYF

SEQ ID NO: 770659 - protein, 15 aa, Homo sapiens
  CDR3 for alpha chain variable domain of TCR clone 385330 (TRAV3, TRAJ5)
CAVRDLDTGRRALTF

SEQ ID NO: 770660 - protein, 13 aa, Homo sapiens
  CDR3 for beta chain variable domain of TCR clone 385330 (TRBV12-4, TRBJ2-7)
CASSPTETYEEYF

SEQ ID NO: 770661 - protein, 13 aa, Homo sapiens
  CDR3 for alpha chain variable domain of TCR clone 385331 (TRAV12-2, TRAJ4)
CAVRSGGHNKLMF

SEQ ID NO: 770662 - protein, 15 aa, Homo sapiens
  CDR3 for beta chain variable domain of TCR clone 385331 (TRBV10-3, TRBJ2-1)
CAISDVQDRAYEQFF

SEQ ID NO: 770663 - protein, 18 aa, Homo sapiens
  CDR3 for alpha chain variable domain of TCR clone 385332 (TRAV13-1, TRAJ52)
CAASKRSAGGTSYGKLTF

SEQ ID NO: 770664 - protein, 15 aa, Homo sapiens
  CDR3 for beta chain variable domain of TCR clone 385332 (TRBV7-8, TRBJ1-1)
CASSLGDSRNTEAFF

SEQ ID NO: 770665 - protein, 17 aa, Homo sapiens
  CDR3 for alpha chain variable domain of TCR clone 385333 (TRAV26-2, TRAJ52)
CILSSSSGGTSYGQLTF

SEQ ID NO: 770666 - protein, 11 aa, Homo sapiens
  CDR3 for beta chain variable domain of TCR clone 385333 (TRBV19, TRBJ1-1)
CATLRNTEAFF

SEQ ID NO: 770667 - protein, 15 aa, Homo sapiens
  CDR3 for alpha chain variable domain of TCR clone 385334 (TRAV25, TRAJ53)
CAATGGGGSNYKLTF

SEQ ID NO: 770668 - protein, 14 aa, Homo sapiens
  CDR3 for beta chain variable domain of TCR clone 385334 (TRBV11-3, TRBJ2-7)
CASSPKTSFYEQYF

SEQ ID NO: 770669 - protein, 12 aa, Homo sapiens
  CDR3 for alpha chain variable domain of TCR clone 385335 (TRAV12-3, TRAJ40)
CAMSSGTYKYIF

SEQ ID NO: 770670 - protein, 17 aa, Homo sapiens
  CDR3 for beta chain variable domain of TCR clone 385335 (TRBV28, TRBJ2-1)
CASSSARQALTYNEQFF

SEQ ID NO: 770671 - protein, 12 aa, Homo sapiens
  CDR3 for alpha chain variable domain of TCR clone 385336 (TRAV12-3, TRAJ20)
CAMVRGDYKLSF

SEQ ID NO: 770672 - protein, 12 aa, Homo sapiens
  CDR3 for beta chain variable domain of TCR clone 385336 (TRBV11-2, TRBJ2-3)
CASSPPEDTQYF

SEQ ID NO: 770673 - protein, 15 aa, Homo sapiens
  CDR3 for alpha chain variable domain of TCR clone 385337 (TRAV26-1, TRAJ29)
CIVRVEGSGNTPLVF

SEQ ID NO: 770674 - protein, 13 aa, Homo sapiens
  CDR3 for beta chain variable domain of TCR clone 385337 (TRBV18, TRBJ1-1)
CASSPGRNTEAFF

SEQ ID NO: 770675 - protein, 13 aa, Homo sapiens
  CDR3 for alpha chain variable domain of TCR clone 385338 (TRAV23/DV6, TRAJ12)
CAPRVDSSYKLIF

SEQ ID NO: 770676 - protein, 12 aa, Homo sapiens
  CDR3 for beta chain variable domain of TCR clone 385338 (TRBV7-6, TRBJ2-5)
CASSLSQENQYF

SEQ ID NO: 770677 - protein, 17 aa, Homo sapiens
  CDR3 for alpha chain variable domain of TCR clone 385339 (TRAV3, TRAJ6)
CAVRDGPTAGGSYVPTF

SEQ ID NO: 770678 - protein, 14 aa, Homo sapiens
  CDR3 for beta chain variable domain of TCR clone 385339 (TRBV7-2, TRBJ2-7)
CASSPKTSFYEQYF

SEQ ID NO: 770679 - protein, 14 aa, Homo sapiens
  CDR3 for alpha chain variable domain of TCR clone 385340 (TRAV38-1, TRAJ45)
CASHSGGGADGLTF

SEQ ID NO: 770680 - protein, 17 aa, Homo sapiens
  CDR3 for beta chain variable domain of TCR clone 385340 (TRBV15, TRBJ1-4)
CATSRYGTGDPNEKLFV

SEQ ID NO: 770681 - protein, 11 aa, Homo sapiens
  CDR3 for alpha chain variable domain of TCR clone 385341 (TRAV13-2, TRAJ54)
RAVLGAQKLVF

SEQ ID NO: 770682 - protein, 15 aa, Homo sapiens
  CDR3 for beta chain variable domain of TCR clone 385341 (TRBV20-1, TRBJ2-7)
CSAESGTSGAYEQYF

SEQ ID NO: 770683 - protein, 13 aa, Homo sapiens
  CDR3 for alpha chain variable domain of TCR clone 385342 (TRAV8-1, TRAJ28)
CAVSGVGSYQLTF

SEQ ID NO: 770684 - protein, 14 aa, Homo sapiens
  CDR3 for beta chain variable domain of TCR clone 385342 (TRBV7-2, TRBJ2-2)
CASRGQGAAGELFF

SEQ ID NO: 770685 - protein, 18 aa, Homo sapiens
  CDR3 for alpha chain variable domain of TCR clone 385343 (TRAV21, TRAJ52)
CAVRPSPAGGTSYGKLTF

SEQ ID NO: 770686 - protein, 17 aa, Homo sapiens
  CDR3 for beta chain variable domain of TCR clone 385343 (TRBV28, TRBJ2-7)
CASSPLHRASGVYEQYF

SEQ ID NO: 770687 - protein, 14 aa, Homo sapiens
  CDR3 for alpha chain variable domain of TCR clone 385344 (TRAV21, TRAJ28)
CAVGSGAGSYQPTF

SEQ ID NO: 770688 - protein, 14 aa, Homo sapiens
  CDR3 for beta chain variable domain of TCR clone 385344 (TRBV18, TRBJ1-4)
CASSPGPNGENLFF

SEQ ID NO: 770689 - protein, 14 aa, Homo sapiens
  CDR3 for alpha chain variable domain of TCR clone 385345 (TRAV16, TRAJ57)
CALPTQGGSEKLVF

SEQ ID NO: 770690 - protein, 15 aa, Homo sapiens
  CDR3 for beta chain variable domain of TCR clone 385345 (TRBV28, TRBJ1-3)
CASWGWHLSGNTIYF

SEQ ID NO: 770691 - protein, 15 aa, Homo sapiens
  CDR3 for alpha chain variable domain of TCR clone 385346 (TRAV17, TRAJ56)
CATEPFTGANSKLTF

SEQ ID NO: 770692 - protein, 15 aa, Homo sapiens
  CDR3 for beta chain variable domain of TCR clone 385346 (TRBV28, TRBJ1-5)
CASSRTGGYVQPQHS

SEQ ID NO: 770693 - protein, 13 aa, Homo sapiens
  CDR3 for alpha chain variable domain of TCR clone 385347 (TRAV2, TRAJ40)
CAVVTSGTYKYIF

SEQ ID NO: 770694 - protein, 13 aa, Homo sapiens
  CDR3 for beta chain variable domain of TCR clone 385347 (TRBV10-2, TRBJ2-1)
CASGASGDAKQFF

SEQ ID NO: 770695 - protein, 14 aa, Homo sapiens
  CDR3 for alpha chain variable domain of TCR clone 385348 (TRAV12-2, TRAJ13)
CAVKTTGGYQKFTF

SEQ ID NO: 770696 - protein, 14 aa, Homo sapiens
  CDR3 for beta chain variable domain of TCR clone 385348 (TRBV19, TRBJ2-1)
CASPTVVVSGEQFF

SEQ ID NO: 770697 - protein, 13 aa, Homo sapiens
  CDR3 for alpha chain variable domain of TCR clone 385349 (TRAV12-2, TRAJ9)
CAVIRGGGFKTIF

SEQ ID NO: 770698 - protein, 12 aa, Homo sapiens
  CDR3 for beta chain variable domain of TCR clone 385349 (TRBV7-2, TRBJ2-7)
CASSIKREEQYF

SEQ ID NO: 770699 - protein, 15 aa, Homo sapiens
  CDR3 for alpha chain variable domain of TCR clone 385350 (TRAV21, TRAJ52)
CAVRGGGTSYGKLTF

SEQ ID NO: 770700 - protein, 12 aa, Homo sapiens
  CDR3 for beta chain variable domain of TCR clone 385350 (TRBV24-1, TRBJ2-7)
CATGTGTYEQYF

SEQ ID NO: 770701 - protein, 16 aa, Homo sapiens
  CDR3 for alpha chain variable domain of TCR clone 385351 (TRAV16, TRAJ57)
CAPYLITQGGSEKLVF

SEQ ID NO: 770702 - protein, 17 aa, Homo sapiens
  CDR3 for beta chain variable domain of TCR clone 385351 (TRBV24-1, TRBJ2-4)
GATSDAEARGVRNIQYF

SEQ ID NO: 770703 - protein, 18 aa, Homo sapiens
  CDR3 for alpha chain variable domain of TCR clone 385352 (TRAV13-1, TRAJ52)
CAASKSSASGTSYGKLTF

SEQ ID NO: 770704 - protein, 14 aa, Homo sapiens
  CDR3 for beta chain variable domain of TCR clone 385352 (TRBV19, TRBJ2-1)
CASPTFVLSGEQFF

SEQ ID NO: 770705 - protein, 14 aa, Homo sapiens
  CDR3 for alpha chain variable domain of TCR clone 385353 (TRAV38-2/DV8, TRAJ54)
AAMYQIQGAQKLVF

SEQ ID NO: 770706 - protein, 13 aa, Homo sapiens
  CDR3 for beta chain variable domain of TCR clone 385353 (TRBV27, TRBJ2-7)
CASSLTTGYEQYF

SEQ ID NO: 770707 - protein, 12 aa, Homo sapiens
  CDR3 for alpha chain variable domain of TCR clone 385354 (TRAV13-1, TRAJ49)
CAASIRSNQFYF

SEQ ID NO: 770708 - protein, 14 aa, Homo sapiens
  CDR3 for beta chain variable domain of TCR clone 385354 (TRBV7-2, TRBJ2-1)
CAGSPGLAGNEQFF

SEQ ID NO: 770709 - protein, 19 aa, Homo sapiens
  CDR3 for alpha chain variable domain of TCR clone 385355 (TRAV2, TRAJ20)
ILQVREADAAVYRDCKLSF

SEQ ID NO: 770710 - protein, 12 aa, Homo sapiens
  CDR3 for beta chain variable domain of TCR clone 385355 (TRBV11-2, TRBJ2-2)
CASSLGCGELFF

SEQ ID NO: 770711 - protein, 14 aa, Homo sapiens
  CDR3 for alpha chain variable domain of TCR clone 385356 (TRAV8-4, TRAJ15)
CAVTIREAGTAMIF

SEQ ID NO: 770712 - protein, 16 aa, Homo sapiens
  CDR3 for beta chain variable domain of TCR clone 385356 (TRBV29-1, TRBJ2-6)
CSVEDITYSGANVLTF

SEQ ID NO: 770713 - protein, 13 aa, Homo sapiens
  CDR3 for alpha chain variable domain of TCR clone 385357 (TRAV12-3, TRAJ9)
CAMRNTGGFKTIF

SEQ ID NO: 770714 - protein, 13 aa, Homo sapiens
  CDR3 for beta chain variable domain of TCR clone 385357 (TRBV19, TRBJ2-7)
CASSIDRTYEQYF

SEQ ID NO: 770715 - protein, 13 aa, Homo sapiens
  CDR3 for alpha chain variable domain of TCR clone 385358 (TRAV2, TRAJ15)
CDVASQAGTALIF

SEQ ID NO: 770716 - protein, 16 aa, Homo sapiens
  CDR3 for beta chain variable domain of TCR clone 385358 (TRBV11-3, TRBJ2-3)
CASSSGSGGGTDTQYF

SEQ ID NO: 770717 - protein, 13 aa, Homo sapiens
  CDR3 for alpha chain variable domain of TCR clone 385359 (TRAV21, TRAJ56)
CSVRTGANSKLTF

SEQ ID NO: 770718 - protein, 15 aa, Homo sapiens
  CDR3 for beta chain variable domain of TCR clone 385359 (TRBV7-9, TRBJ1-1)
CASSHRGTVNTEAFF

SEQ ID NO: 770719 - protein, 20 aa, Homo sapiens
  CDR3 for alpha chain variable domain of TCR clone 385360 (TRAV12-1, TRAJ42)
SSVIQPPTSVKGGSQGNLIF

SEQ ID NO: 770720 - protein, 18 aa, Homo sapiens
  CDR3 for beta chain variable domain of TCR clone 385360 (TRBV11-2, TRBJ2-3)
CASSLGGASRGAPNTQYV

SEQ ID NO: 770721 - protein, 14 aa, Homo sapiens
  CDR3 for alpha chain variable domain of TCR clone 385361 (TRAV12-3, TRAJ10)
SHLPPAGGGNKLTF

SEQ ID NO: 770722 - protein, 14 aa, Homo sapiens
  CDR3 for beta chain variable domain of TCR clone 385361 (TRBV25-1, TRBJ1-1)
CASTHLGGNTEAFF

SEQ ID NO: 770723 - protein, 11 aa, Homo sapiens
  CDR3 for alpha chain variable domain of TCR clone 385362 (TRAV2, TRAJ33)
CAVESNYQLIW

SEQ ID NO: 770724 - protein, 12 aa, Homo sapiens
  CDR3 for beta chain variable domain of TCR clone 385362 (TRBV11-2, TRBJ2-2)
CASSLGGGELFI

SEQ ID NO: 770725 - protein, 15 aa, Homo sapiens
  CDR3 for alpha chain variable domain of TCR clone 385363 (TRAV26-1, TRAJ29)
CIVRDEGSGNTPLVF

SEQ ID NO: 770726 - protein, 15 aa, Homo sapiens
  CDR3 for beta chain variable domain of TCR clone 385363 (TRBV28, TRBJ2-5)
FASSPGQGSIETQYF

SEQ ID NO: 770727 - protein, 15 aa, Homo sapiens
  CDR3 for alpha chain variable domain of TCR clone 385364 (TRAV1-1, TRAJ23)
CAVRDGDNQGGKLIF

SEQ ID NO: 770728 - protein, 18 aa, Homo sapiens
  CDR3 for beta chain variable domain of TCR clone 385364 (TRBV11-2, TRBJ2-6)
CASSLNPFLGTGANVLTF

SEQ ID NO: 770729 - protein, 12 aa, Homo sapiens
  CDR3 for alpha chain variable domain of TCR clone 385365 (TRAV12-3, TRAJ17)
CAMKLTGNKLTV

SEQ ID NO: 770730 - protein, 15 aa, Homo sapiens
  CDR3 for beta chain variable domain of TCR clone 385365 (TRBV20-1, TRBJ2-7)
CSARDRVSGMDEQYF

SEQ ID NO: 770731 - protein, 16 aa, Homo sapiens
  CDR3 for alpha chain variable domain of TCR clone 385366 (TRAV3, TRAJ42)
CAVRDIEGGSQGNLIF

SEQ ID NO: 770732 - protein, 16 aa, Homo sapiens
  CDR3 for beta chain variable domain of TCR clone 385366 (TRBV4-2, TRBJ1-5)
CASSQGQGASNQPQHF

SEQ ID NO: 770733 - protein, 13 aa, Homo sapiens
  CDR3 for alpha chain variable domain of TCR clone 385367 (TRAV3, TRAJ27)
CAVRPLGAGKSTF

SEQ ID NO: 770734 - protein, 11 aa, Homo sapiens
  CDR3 for beta chain variable domain of TCR clone 385367 (TRBV6-4, TRBJ2-1)
CASSDSYAQFF

SEQ ID NO: 770735 - protein, 14 aa, Homo sapiens
  CDR3 for alpha chain variable domain of TCR clone 385368 (TRAV12-2, TRAJ41)
CAVNRANSGDALNF

SEQ ID NO: 770736 - protein, 13 aa, Homo sapiens
  CDR3 for beta chain variable domain of TCR clone 385368 (TRBV7-9, TRBJ1-2)
CASSLKQNYGYTF

SEQ ID NO: 770737 - protein, 15 aa, Homo sapiens
  CDR3 for alpha chain variable domain of TCR clone 385369 (TRAV21, TRAJ53)
CATLNSGGSNYKLTF

SEQ ID NO: 770738 - protein, 16 aa, Homo sapiens
  CDR3 for beta chain variable domain of TCR clone 385369 (TRBV9, TRBJ2-2)
CASSAMGKGNTGELFF

SEQ ID NO: 770739 - protein, 16 aa, Homo sapiens
  CDR3 for alpha chain variable domain of TCR clone 385370 (TRAV2, TRAJ10)
CCLLLCFHGRRNKLTF

SEQ ID NO: 770740 - protein, 14 aa, Homo sapiens
  CDR3 for beta chain variable domain of TCR clone 385370 (TRBV7-2, TRBJ2-2)
CASRGQGAAGELFF

SEQ ID NO: 770741 - protein, 12 aa, Homo sapiens
  CDR3 for alpha chain variable domain of TCR clone 385371 (TRAV13-1, TRAJ21)
CAANEGFNKFYF

SEQ ID NO: 770742 - protein, 14 aa, Homo sapiens
  CDR3 for beta chain variable domain of TCR clone 385371 (TRBV18, TRBJ2-7)
CASSPRGGAYEQYF

SEQ ID NO: 770743 - protein, 16 aa, Homo sapiens
  CDR3 for alpha chain variable domain of TCR clone 385372 (TRAV3, TRAJ18)
CAVRDGRGSTLGRRYF

SEQ ID NO: 770744 - protein, 13 aa, Homo sapiens
  CDR3 for beta chain variable domain of TCR clone 385372 (TRBV7-9, TRBJ2-5)
CASLPSGRETQYF

SEQ ID NO: 770745 - protein, 13 aa, Homo sapiens
  CDR3 for alpha chain variable domain of TCR clone 385373 (TRAV1-1, TRAJ9)
CAATNTGGFKTIF

SEQ ID NO: 770746 - protein, 14 aa, Homo sapiens
  CDR3 for beta chain variable domain of TCR clone 385373 (TRBV12-5, TRBJ2-5)
CASGSRTHQETQYF

SEQ ID NO: 770747 - protein, 12 aa, Homo sapiens
  CDR3 for alpha chain variable domain of TCR clone 385374 (TRAV27, TRAJ33)
CAGDGSNYQLIW

SEQ ID NO: 770748 - protein, 15 aa, Homo sapiens
  CDR3 for beta chain variable domain of TCR clone 385374 (TRBV20-1, TRBJ2-7)
CSARDRVSGMDGQYF

SEQ ID NO: 770749 - protein, 15 aa, Homo sapiens
  CDR3 for alpha chain variable domain of TCR clone 385375 (TRAV3, TRAJ4)
CAVRDGTGGYNKLIF

SEQ ID NO: 770750 - protein, 14 aa, Homo sapiens
  CDR3 for beta chain variable domain of TCR clone 385375 (TRBV7-6, TRBJ2-7)
CASSFRQGADEQYF

SEQ ID NO: 770751 - protein, 13 aa, Homo sapiens
  CDR3 for alpha chain variable domain of TCR clone 385376 (TRAV26-1, TRAJ20)
CIVRVDSDYKLSF

SEQ ID NO: 770752 - protein, 17 aa, Homo sapiens
  CDR3 for beta chain variable domain of TCR clone 385376 (TRBV13, TRBJ2-3)
CASSLSRVAGGRNTQYF

SEQ ID NO: 770753 - protein, 16 aa, Homo sapiens
  CDR3 for alpha chain variable domain of TCR clone 385377 (TRAV3, TRAJ37)
CAVRPHGSGNTGKLIF

SEQ ID NO: 770754 - protein, 13 aa, Homo sapiens
  CDR3 for beta chain variable domain of TCR clone 385377 (TRBV2, TRBJ1-5)
CASGTGVYQPQHF

SEQ ID NO: 770755 - protein, 15 aa, Homo sapiens
  CDR3 for alpha chain variable domain of TCR clone 385378 (TRAV23/DV6, TRAJ18)
CAAGYRGSTLGRLYF

SEQ ID NO: 770756 - protein, 13 aa, Homo sapiens
  CDR3 for beta chain variable domain of TCR clone 385378 (TRBV7-2, TRBJ2-7)
CASSAPSGSEQYF

SEQ ID NO: 770757 - protein, 13 aa, Homo sapiens
  CDR3 for alpha chain variable domain of TCR clone 385379 (TRAV13-1, TRAJ33)
CAASRAGNYQLIW

SEQ ID NO: 770758 - protein, 12 aa, Homo sapiens
  CDR3 for beta chain variable domain of TCR clone 385379 (TRBV11-2, TRBJ1-2)
CASSREGDGDTF

SEQ ID NO: 770759 - protein, 15 aa, Homo sapiens
  CDR3 for alpha chain variable domain of TCR clone 385380 (TRAV12-1, TRAJ44)
CVVDTPQGTASKLTF

SEQ ID NO: 770760 - protein, 14 aa, Homo sapiens
  CDR3 for beta chain variable domain of TCR clone 385380 (TRBV7-2, TRBJ2-7)
CASRSQGAAYEQYF

SEQ ID NO: 770761 - protein, 12 aa, Homo sapiens
  CDR3 for alpha chain variable domain of TCR clone 385381 (TRAV8-3, TRAJ26)
CAGYNYGQNFVF

SEQ ID NO: 770762 - protein, 13 aa, Homo sapiens
  CDR3 for beta chain variable domain of TCR clone 385381 (TRBV20-1, TRBJ2-5)
CSARGDYQETQYF

SEQ ID NO: 770763 - protein, 16 aa, Homo sapiens
  CDR3 for alpha chain variable domain of TCR clone 385382 (TRAV30, TRAJ24)
CGTEIVDADSWGNFQF

SEQ ID NO: 770764 - protein, 13 aa, Homo sapiens
  CDR3 for beta chain variable domain of TCR clone 385382 (TRBV12-4, TRBJ2-5)
CASSPGTEETQYF

SEQ ID NO: 770765 - protein, 14 aa, Homo sapiens
  CDR3 for alpha chain variable domain of TCR clone 385383 (TRAV1-2, TRAJ13)
CAVKHSGGYQKVTF

SEQ ID NO: 770766 - protein, 14 aa, Homo sapiens
  CDR3 for beta chain variable domain of TCR clone 385383 (TRBV7-9, TRBJ2-1)
CASSPRDPLYEQFF

SEQ ID NO: 770767 - protein, 16 aa, Homo sapiens
  CDR3 for alpha chain variable domain of TCR clone 385384 (TRAV14/DV4, TRAJ54)
CAMREGRIQGAQKLVF

SEQ ID NO: 770768 - protein, 14 aa, Homo sapiens
  CDR3 for beta chain variable domain of TCR clone 385384 (TRBV11-2, TRBJ2-7)
CASSLGAGAYEQYF

SEQ ID NO: 770769 - protein, 16 aa, Homo sapiens
  CDR3 for alpha chain variable domain of TCR clone 385385 (TRAV17, TRAJ28)
CATASVSGAGGYQLTF

SEQ ID NO: 770770 - protein, 11 aa, Homo sapiens
  CDR3 for beta chain variable domain of TCR clone 385385 (TRBV7-9, TRBJ2-5)
CASGLGETQYF

SEQ ID NO: 770771 - protein, 13 aa, Homo sapiens
  CDR3 for alpha chain variable domain of TCR clone 385386 (TRAV21, TRAJ27)
CAARTGNAGKSTF

SEQ ID NO: 770772 - protein, 14 aa, Homo sapiens
  CDR3 for beta chain variable domain of TCR clone 385386 (TRBV11-2, TRBJ2-7)
CASSLGAGAYEQYF

SEQ ID NO: 770773 - protein, 13 aa, Homo sapiens
  CDR3 for alpha chain variable domain of TCR clone 385387 (TRAV8-3, TRAJ43)
CAVVPYNNNDMRF

SEQ ID NO: 770774 - protein, 15 aa, Homo sapiens
  CDR3 for beta chain variable domain of TCR clone 385387 (TRBV4-3, TRBJ2-7)
CASSQDLGSSYEQYF

SEQ ID NO: 770775 - protein, 13 aa, Homo sapiens
  CDR3 for alpha chain variable domain of TCR clone 385388 (TRAV17, TRAJ26)
CATVDNYGQNFVF

SEQ ID NO: 770776 - protein, 13 aa, Homo sapiens
  CDR3 for beta chain variable domain of TCR clone 385388 (TRBV3-1, TRBJ1-2)
CASSQIQGHGYTF

SEQ ID NO: 770777 - protein, 16 aa, Homo sapiens
  CDR3 for alpha chain variable domain of TCR clone 385389 (TRAV27, TRAJ13)
FAGAKSESGGYQKVTF

SEQ ID NO: 770778 - protein, 15 aa, Homo sapiens
  CDR3 for beta chain variable domain of TCR clone 385389 (TRBV29-1, TRBJ2-1)
CSVGRHALFYNEQFF

SEQ ID NO: 770779 - protein, 16 aa, Homo sapiens
  CDR3 for alpha chain variable domain of TCR clone 385390 (TRAV3, TRAJ27)
CAVRDPQGTNAGKSTF

SEQ ID NO: 770780 - protein, 17 aa, Homo sapiens
  CDR3 for beta chain variable domain of TCR clone 385390 (TRBV13, TRBJ2-3)
CASSLSRVAGGRNTQYF

SEQ ID NO: 770781 - protein, 12 aa, Homo sapiens
  CDR3 for alpha chain variable domain of TCR clone 385391 (TRAV2, TRAJ34)
CAVERNTDKLIF

SEQ ID NO: 770782 - protein, 20 aa, Homo sapiens
  CDR3 for beta chain variable domain of TCR clone 385391 (TRBV7-2, TRBJ2-5)
CASSFLRGGRRDPVLRARHA

SEQ ID NO: 770783 - protein, 17 aa, Homo sapiens
  CDR3 for alpha chain variable domain of TCR clone 385392 (TRAV3, TRAJ42)
CAVRDRDYGGSQGNLLF

SEQ ID NO: 770784 - protein, 18 aa, Homo sapiens
  CDR3 for beta chain variable domain of TCR clone 385392 (TRBV20-1, TRBJ2-3)
CSASGLAGGPGTTDTQYF

SEQ ID NO: 770785 - protein, 14 aa, Homo sapiens
  CDR3 for alpha chain variable domain of TCR clone 385393 (TRAV12-2, TRAJ45)
CAVNLGGGADGLTF

SEQ ID NO: 770786 - protein, 13 aa, Homo sapiens
  CDR3 for beta chain variable domain of TCR clone 385393 (TRBV19, TRBJ2-2)
CASSIWSTGELFF

SEQ ID NO: 770787 - protein, 21 aa, Homo sapiens
  CDR3 for alpha chain variable domain of TCR clone 385394 (TRAV3, TRAJ17)
CAVRASRGGRSCRQQANFWRR

SEQ ID NO: 770788 - protein, 14 aa, Homo sapiens
  CDR3 for beta chain variable domain of TCR clone 385394 (TRBV4-1, TRBJ2-2)
CASSQAVNTGELVF

SEQ ID NO: 770789 - protein, 16 aa, Homo sapiens
  CDR3 for alpha chain variable domain of TCR clone 385395 (TRAV12-3, TRAJ58)
CAMTDTEETSGSRLNF

SEQ ID NO: 770790 - protein, 22 aa, Homo sapiens
  CDR3 for beta chain variable domain of TCR clone 385395 (TRBV23-1, TRBJ2-7)
CASSRRLDSGQGYVGGGYEQYF

SEQ ID NO: 770791 - protein, 14 aa, Homo sapiens
  CDR3 for alpha chain variable domain of TCR clone 385396 (TRAV8-3, TRAJ15)
CAVGRHQAGTALIF

SEQ ID NO: 770792 - protein, 14 aa, Homo sapiens
  CDR3 for beta chain variable domain of TCR clone 385396 (TRBV6-1, TRBJ1-3)
CASVQGGGGNTIYF

SEQ ID NO: 770793 - protein, 14 aa, Homo sapiens
  CDR3 for alpha chain variable domain of TCR clone 385397 (TRAV25, TRAJ27)
CAGQGNTNEGKSTF

SEQ ID NO: 770794 - protein, 16 aa, Homo sapiens
  CDR3 for beta chain variable domain of TCR clone 385397 (TRBV4-1, TRBJ2-6)
CASNQDGGPGANVLTF

SEQ ID NO: 770795 - protein, 12 aa, Homo sapiens
  CDR3 for alpha chain variable domain of TCR clone 385398 (TRAV13-2, TRAJ48)
CRDGLGNEKLTF

SEQ ID NO: 770796 - protein, 15 aa, Homo sapiens
  CDR3 for beta chain variable domain of TCR clone 385398 (TRBV7-9, TRBJ1-6)
CASSSPGSGNSPLHF

SEQ ID NO: 770797 - protein, 14 aa, Homo sapiens
  CDR3 for alpha chain variable domain of TCR clone 385399 (TRAV12-3, TRAJ10)
SHLPLTGGGNKLTF

SEQ ID NO: 770798 - protein, 14 aa, Homo sapiens
  CDR3 for beta chain variable domain of TCR clone 385399 (TRBV7-3, TRBJ2-2)
CASSRGGDTGELFF

SEQ ID NO: 770799 - protein, 14 aa, Homo sapiens
  CDR3 for alpha chain variable domain of TCR clone 385400 (TRAV1-2, TRAJ16)
CAVNRFSDSQKLLF

SEQ ID NO: 770800 - protein, 15 aa, Homo sapiens
  CDR3 for beta chain variable domain of TCR clone 385400 (TRBV27, TRBJ2-1)
CASSNGGGSSNEQFF

SEQ ID NO: 770801 - protein, 14 aa, Homo sapiens
  CDR3 for alpha chain variable domain of TCR clone 385401 (TRAV3, TRAJ34)
CAVIAPGNTDKLIF

SEQ ID NO: 770802 - protein, 17 aa, Homo sapiens
  CDR3 for beta chain variable domain of TCR clone 385401 (TRBV20-1, TRBJ2-7)
CSAAPGLARGISYEQYF

SEQ ID NO: 770803 - protein, 10 aa, Homo sapiens
  CDR3 for alpha chain variable domain of TCR clone 385402 (TRAV8-4, TRAJ43)
CAVSADDMRF

SEQ ID NO: 770804 - protein, 15 aa, Homo sapiens
  CDR3 for beta chain variable domain of TCR clone 385402 (TRBV9, TRBJ1-6)
CASSVAGTGDPPLHF

SEQ ID NO: 770805 - protein, 14 aa, Homo sapiens
  CDR3 for alpha chain variable domain of TCR clone 385403 (TRAV16, TRAJ17)
CALREGAAGNKLTF

SEQ ID NO: 770806 - protein, 14 aa, Homo sapiens
  CDR3 for beta chain variable domain of TCR clone 385403 (TRBV28, TRBJ2-2)
CASRIRSGTGELFF

SEQ ID NO: 770807 - protein, 15 aa, Homo sapiens
  CDR3 for alpha chain variable domain of TCR clone 385404 (TRAV12-3, TRAJ52)
CNGGAGGTIYGKLTF

SEQ ID NO: 770808 - protein, 13 aa, Homo sapiens
  CDR3 for beta chain variable domain of TCR clone 385404 (TRBV20-1, TRBJ2-5)
CSARGDYQETQYF

SEQ ID NO: 770809 - protein, 14 aa, Homo sapiens
  CDR3 for alpha chain variable domain of TCR clone 385405 (TRAV16, TRAJ48)
CALTPGFGNDKLTF

SEQ ID NO: 770810 - protein, 14 aa, Homo sapiens
  CDR3 for beta chain variable domain of TCR clone 385405 (TRBV7-2, TRBJ2-7)
CASSSISGFSEQYF

SEQ ID NO: 770811 - protein, 13 aa, Homo sapiens
  CDR3 for alpha chain variable domain of TCR clone 385406 (TRAV8-3, TRAJ20)
CAVGRPNDYRLSF

SEQ ID NO: 770812 - protein, 14 aa, Homo sapiens
  CDR3 for beta chain variable domain of TCR clone 385406 (TRBV12-5, TRBJ2-5)
CASGPRTHQETQYF

SEQ ID NO: 770813 - protein, 13 aa, Homo sapiens
  CDR3 for alpha chain variable domain of TCR clone 385407 (TRAV29/DV5, TRAJ31)
CAASRNNNARLMF

SEQ ID NO: 770814 - protein, 13 aa, Homo sapiens
  CDR3 for beta chain variable domain of TCR clone 385407 (TRBV7-2, TRBJ2-4)
CASSREHANMQYF

SEQ ID NO: 770815 - protein, 13 aa, Homo sapiens
  CDR3 for alpha chain variable domain of TCR clone 385408 (TRAV23/DV6, TRAJ21)
CAASREQLQQILL

SEQ ID NO: 770816 - protein, 14 aa, Homo sapiens
  CDR3 for beta chain variable domain of TCR clone 385408 (TRBV5-1, TRBJ2-7)
CASSRGESLYEQYF

SEQ ID NO: 770817 - protein, 16 aa, Homo sapiens
  CDR3 for alpha chain variable domain of TCR clone 385409 (TRAV12-3, TRAJ53)
CAMSVGSGGSNYKLTF

SEQ ID NO: 770818 - protein, 15 aa, Homo sapiens
  CDR3 for beta chain variable domain of TCR clone 385409 (TRBV5-1, TRBJ2-3)
CASSVTSGSTDTQYF

SEQ ID NO: 770819 - protein, 15 aa, Homo sapiens
  CDR3 for alpha chain variable domain of TCR clone 385410 (TRAV14/DV4, TRAJ12)
RAMREERDSSYKLIF

SEQ ID NO: 770820 - protein, 17 aa, Homo sapiens
  CDR3 for beta chain variable domain of TCR clone 385410 (TRBV7-3, TRBJ2-3)
CASSPRGQGYGTDTQYF

SEQ ID NO: 770821 - protein, 16 aa, Homo sapiens
  CDR3 for alpha chain variable domain of TCR clone 385411 (TRAV3, TRAJ10)
CAVRDMRAGGGNKLPF

SEQ ID NO: 770822 - protein, 15 aa, Homo sapiens
  CDR3 for beta chain variable domain of TCR clone 385411 (TRBV20-1, TRBJ2-1)
CSAEGGLLAGDEQFF

SEQ ID NO: 770823 - protein, 11 aa, Homo sapiens
  CDR3 for alpha chain variable domain of TCR clone 385412 (TRAV21, TRAJ34)
CAVTNTDKLIF

SEQ ID NO: 770824 - protein, 17 aa, Homo sapiens
  CDR3 for beta chain variable domain of TCR clone 385412 (TRBV20-1, TRBJ2-1)
CSAGSPSGGPATMSSSS

SEQ ID NO: 770825 - protein, 11 aa, Homo sapiens
  CDR3 for alpha chain variable domain of TCR clone 385413 (TRAV1-1, TRAJ23)
CAVRQGGKLIF

SEQ ID NO: 770826 - protein, 20 aa, Homo sapiens
  CDR3 for beta chain variable domain of TCR clone 385413 (TRBV7-8, TRBJ2-2)
CASSHLFTGQTVHITGELFF

SEQ ID NO: 770827 - protein, 16 aa, Homo sapiens
  CDR3 for alpha chain variable domain of TCR clone 385414 (TRAV12-3, TRAJ53)
CAMSPGSGGSNYKLTF

SEQ ID NO: 770828 - protein, 14 aa, Homo sapiens
  CDR3 for beta chain variable domain of TCR clone 385414 (TRBV7-9, TRBJ2-5)
CASSLVGGEETQYF

SEQ ID NO: 770829 - protein, 14 aa, Homo sapiens
  CDR3 for alpha chain variable domain of TCR clone 385415 (TRAV8-2, TRAJ6)
GVVISAGGSYIPTF

SEQ ID NO: 770830 - protein, 16 aa, Homo sapiens
  CDR3 for beta chain variable domain of TCR clone 385415 (TRBV7-6, TRBJ2-6)
CASSLPGLSGANVLTF

SEQ ID NO: 770831 - protein, 14 aa, Homo sapiens
  CDR3 for alpha chain variable domain of TCR clone 385416 (TRAV12-2, TRAJ38)
CAPQTAGNNRKLIW

SEQ ID NO: 770832 - protein, 18 aa, Homo sapiens
  CDR3 for beta chain variable domain of TCR clone 385416 (TRBV28, TRBJ1-3)
CASKTPVGQIGSGNIIYF

SEQ ID NO: 770833 - protein, 13 aa, Homo sapiens
  CDR3 for alpha chain variable domain of TCR clone 385417 (TRAV16, TRAJ58)
CALSIPSVSRLTF

SEQ ID NO: 770834 - protein, 14 aa, Homo sapiens
  CDR3 for beta chain variable domain of TCR clone 385417 (TRBV6-5, TRBJ2-7)
CASSPHRGLREQYF

SEQ ID NO: 770835 - protein, 14 aa, Homo sapiens
  CDR3 for alpha chain variable domain of TCR clone 385418 (TRAV13-2, TRAJ57)
CAESTQGGSEKLVF

SEQ ID NO: 770836 - protein, 14 aa, Homo sapiens
  CDR3 for beta chain variable domain of TCR clone 385418 (TRBV10-3, TRBJ2-2)
CAISEVSHSGELFL

SEQ ID NO: 770837 - protein, 13 aa, Homo sapiens
  CDR3 for alpha chain variable domain of TCR clone 385419 (TRAV8-3, TRAJ28)
CGVGAVGSYQLTF

SEQ ID NO: 770838 - protein, 14 aa, Homo sapiens
  CDR3 for beta chain variable domain of TCR clone 385419 (TRBV7-2, TRBJ2-7)
CASRSQGAAYEQYF

SEQ ID NO: 770839 - protein, 16 aa, Homo sapiens
  CDR3 for alpha chain variable domain of TCR clone 385420 (TRAV3, TRAJ10)
CAVSDMRAGGGNKLTF

SEQ ID NO: 770840 - protein, 16 aa, Homo sapiens
  CDR3 for beta chain variable domain of TCR clone 385420 (TRBV20-1, TRBJ1-4)
CSAPGQGLLTNEKLFF

SEQ ID NO: 770841 - protein, 15 aa, Homo sapiens
  CDR3 for alpha chain variable domain of TCR clone 385421 (TRAV4, TRAJ39)
CLVGPNNNAGNMLTF

SEQ ID NO: 770842 - protein, 12 aa, Homo sapiens
  CDR3 for beta chain variable domain of TCR clone 385421 (TRBV2, TRBJ2-1)
CAKREGYNEQFF

SEQ ID NO: 770843 - protein, 14 aa, Homo sapiens
  CDR3 for alpha chain variable domain of TCR clone 385422 (TRAV12-2, TRAJ40)
CAVKIPSGTYKYIF

SEQ ID NO: 770844 - protein, 12 aa, Homo sapiens
  CDR3 for beta chain variable domain of TCR clone 385422 (TRBV20-1, TRBJ1-1)
QCTNTDWGQAFF

SEQ ID NO: 770845 - protein, 14 aa, Homo sapiens
  CDR3 for alpha chain variable domain of TCR clone 385423 (TRAV12-2, TRAJ45)
CALPERGGADGLTF

SEQ ID NO: 770846 - protein, 14 aa, Homo sapiens
  CDR3 for beta chain variable domain of TCR clone 385423 (TRBV18, TRBJ1-5)
CASSTGNSNQPQHF

SEQ ID NO: 770847 - protein, 12 aa, Homo sapiens
  CDR3 for alpha chain variable domain of TCR clone 385424 (TRAV8-6, TRAJ8)
CAVTPGFQKLVF

SEQ ID NO: 770848 - protein, 16 aa, Homo sapiens
  CDR3 for beta chain variable domain of TCR clone 385424 (TRBV7-3, TRBJ2-2)
CASSLQRGTLSGELFF

SEQ ID NO: 770849 - protein, 15 aa, Homo sapiens
  CDR3 for alpha chain variable domain of TCR clone 385425 (TRAV3, TRAJ4)
CAVRDGTGGYNKLIF

SEQ ID NO: 770850 - protein, 14 aa, Homo sapiens
  CDR3 for beta chain variable domain of TCR clone 385425 (TRBV18, TRBJ2-5)
CASSPGVSQETQYF

SEQ ID NO: 770851 - protein, 14 aa, Homo sapiens
  CDR3 for alpha chain variable domain of TCR clone 385426 (TRAV1-1, TRAJ8)
CAVVTNTGFQQLVF

SEQ ID NO: 770852 - protein, 16 aa, Homo sapiens
  CDR3 for beta chain variable domain of TCR clone 385426 (TRBV19, TRBJ2-1)
CASSKAGPSSYNEQFF

SEQ ID NO: 770853 - protein, 14 aa, Homo sapiens
  CDR3 for alpha chain variable domain of TCR clone 385427 (TRAV16, TRAJ39)
CALSKNNAGKMLTF

SEQ ID NO: 770854 - protein, 17 aa, Homo sapiens
  CDR3 for beta chain variable domain of TCR clone 385427 (TRBV23-1, TRBJ1-2)
CASSNTGGGLLWLHLRF

SEQ ID NO: 770855 - protein, 14 aa, Homo sapiens
  CDR3 for alpha chain variable domain of TCR clone 385428 (TRAV1-2, TRAJ16)
CAVNRFSDGQKLLF

SEQ ID NO: 770856 - protein, 15 aa, Homo sapiens
  CDR3 for beta chain variable domain of TCR clone 385428 (TRBV23-1, TRBJ2-2)
CASRGQGVYTGELFF

SEQ ID NO: 770857 - protein, 12 aa, Homo sapiens
  CDR3 for alpha chain variable domain of TCR clone 385429 (TRAV12-3, TRAJ17)
CAMTLTGNKLTF

SEQ ID NO: 770858 - protein, 12 aa, Homo sapiens
  CDR3 for beta chain variable domain of TCR clone 385429 (TRBV11-2, TRBJ2-7)
CASSLPAYEQYF

SEQ ID NO: 770859 - protein, 13 aa, Homo sapiens
  CDR3 for alpha chain variable domain of TCR clone 385430 (TRAV27, TRAJ39)
CAGVNNAGNMLTF

SEQ ID NO: 770860 - protein, 19 aa, Homo sapiens
  CDR3 for beta chain variable domain of TCR clone 385430 (TRBV5-1, TRBJ2-3)
CASSLWLAGGITTTDTQHF

SEQ ID NO: 770861 - protein, 21 aa, Homo sapiens
  CDR3 for alpha chain variable domain of TCR clone 385431 (TRAV8-3, TRAJ21)
CAGPPIQLQQISAQEFNKFYF

SEQ ID NO: 770862 - protein, 14 aa, Homo sapiens
  CDR3 for beta chain variable domain of TCR clone 385431 (TRBV7-8, TRBJ2-3)
CASSLEAGTDTQYF

SEQ ID NO: 770863 - protein, 14 aa, Homo sapiens
  CDR3 for alpha chain variable domain of TCR clone 385432 (TRAV14/DV4, TRAJ58)
CAMMKETSGSRLPF

SEQ ID NO: 770864 - protein, 12 aa, Homo sapiens
  CDR3 for beta chain variable domain of TCR clone 385432 (TRBV12-4, TRBJ2-1)
CASTYVLNEQFF

SEQ ID NO: 770865 - protein, 14 aa, Homo sapiens
  CDR3 for alpha chain variable domain of TCR clone 385433 (TRAV27, TRAJ22)
CAGLPSGSARQLTF

SEQ ID NO: 770866 - protein, 13 aa, Homo sapiens
  CDR3 for beta chain variable domain of TCR clone 385433 (TRBV6-3, TRBJ2-3)
CASEGELKDTQYF

SEQ ID NO: 770867 - protein, 14 aa, Homo sapiens
  CDR3 for alpha chain variable domain of TCR clone 385434 (TRAV23/DV6, TRAJ4)
CAANLSGGYNKLIL

SEQ ID NO: 770868 - protein, 11 aa, Homo sapiens
  CDR3 for beta chain variable domain of TCR clone 385434 (TRBV7-9, TRBJ2-3)
CASSPTDTQYF

SEQ ID NO: 770869 - protein, 11 aa, Homo sapiens
  CDR3 for alpha chain variable domain of TCR clone 385435 (TRAV12-2, TRAJ29)
CAVTLRSPLVF

SEQ ID NO: 770870 - protein, 16 aa, Homo sapiens
  CDR3 for beta chain variable domain of TCR clone 385435 (TRBV5-1, TRBJ2-2)
CASSSGGTGSTGELFF

SEQ ID NO: 770871 - protein, 15 aa, Homo sapiens
  CDR3 for alpha chain variable domain of TCR clone 385436 (TRAV3, TRAJ5)
CAVRGLDTGRRELTF

SEQ ID NO: 770872 - protein, 13 aa, Homo sapiens
  CDR3 for beta chain variable domain of TCR clone 385436 (TRBV20-1, TRBJ2-5)
CSARDSKQATQYF

SEQ ID NO: 770873 - protein, 19 aa, Homo sapiens
  CDR3 for alpha chain variable domain of TCR clone 385437 (TRAV16, )
CALSGDIQNPYPAVYQLIA

SEQ ID NO: 770874 - protein, 16 aa, Homo sapiens
  CDR3 for beta chain variable domain of TCR clone 385437 (TRBV12-5, TRBJ2-5)
CASGPRTSGNQETQYF

SEQ ID NO: 770875 - protein, 15 aa, Homo sapiens
  CDR3 for alpha chain variable domain of TCR clone 385438 (TRAV26-1, TRAJ39)
CIVRDGSNAGNMLTF

SEQ ID NO: 770876 - protein, 14 aa, Homo sapiens
  CDR3 for beta chain variable domain of TCR clone 385438 (TRBV10-3, TRBJ1-2)
CAIRAGTVDYGYTF

SEQ ID NO: 770877 - protein, 14 aa, Homo sapiens
  CDR3 for alpha chain variable domain of TCR clone 385439 (TRAV12-2, TRAJ44)
CAVNPAGTVSKLTF

SEQ ID NO: 770878 - protein, 19 aa, Homo sapiens
  CDR3 for beta chain variable domain of TCR clone 385439 (TRBV7-9, TRBJ2-6)
CASSLESATVLPGANVLTF

SEQ ID NO: 770879 - protein, 12 aa, Homo sapiens
  CDR3 for alpha chain variable domain of TCR clone 385440 (TRAV25, TRAJ53)
CHSGGRNYKLTF

SEQ ID NO: 770880 - protein, 15 aa, Homo sapiens
  CDR3 for beta chain variable domain of TCR clone 385440 (TRBV5-1, TRBJ2-2)
CASSWTSPNTGELFF

SEQ ID NO: 770881 - protein, 14 aa, Homo sapiens
  CDR3 for alpha chain variable domain of TCR clone 385441 (TRAV12-3, TRAJ10)
SHLPLTGGGNKLTF

SEQ ID NO: 770882 - protein, 16 aa, Homo sapiens
  CDR3 for beta chain variable domain of TCR clone 385441 (TRBV15, TRBJ2-7)
CATSRDGGIPSYEQYF

SEQ ID NO: 770883 - protein, 12 aa, Homo sapiens
  CDR3 for alpha chain variable domain of TCR clone 385442 (TRAV1-1, TRAJ20)
CAVREDDYKLSF

SEQ ID NO: 770884 - protein, 14 aa, Homo sapiens
  CDR3 for beta chain variable domain of TCR clone 385442 (TRBV7-9, TRBJ2-1)
CASSLASGSNEQFF

SEQ ID NO: 770885 - protein, 14 aa, Homo sapiens
  CDR3 for alpha chain variable domain of TCR clone 385443 (TRAV30, TRAJ44)
CGTESAGTASKLTF

SEQ ID NO: 770886 - protein, 13 aa, Homo sapiens
  CDR3 for beta chain variable domain of TCR clone 385443 (TRBV2, TRBJ1-1)
CARNPTGGFHAFF

SEQ ID NO: 770887 - protein, 14 aa, Homo sapiens
  CDR3 for alpha chain variable domain of TCR clone 385444 (TRAV26-1, TRAJ45)
CIVRVVGGADGLHF

SEQ ID NO: 770888 - protein, 16 aa, Homo sapiens
  CDR3 for beta chain variable domain of TCR clone 385444 (TRBV7-9, TRBJ1-1)
CASSLTQVRSNTEAFF

SEQ ID NO: 770889 - protein, 12 aa, Homo sapiens
  CDR3 for alpha chain variable domain of TCR clone 385445 (TRAV13-1, TRAJ21)
CAAKEGFNKFYF

SEQ ID NO: 770890 - protein, 13 aa, Homo sapiens
  CDR3 for beta chain variable domain of TCR clone 385445 (TRBV23-1, TRBJ2-3)
PAEVAGAGDTQYF

SEQ ID NO: 770891 - protein, 13 aa, Homo sapiens
  CDR3 for alpha chain variable domain of TCR clone 385446 (TRAV35, TRAJ13)
CAGRAGGYQKVAF

SEQ ID NO: 770892 - protein, 13 aa, Homo sapiens
  CDR3 for beta chain variable domain of TCR clone 385446 (TRBV12-4, TRBJ1-1)
CASTPRMNTEAFF

SEQ ID NO: 770893 - protein, 15 aa, Homo sapiens
  CDR3 for alpha chain variable domain of TCR clone 385447 (TRAV13-1, TRAJ57)
QVPPLSQGGSEKMVF

SEQ ID NO: 770894 - protein, 17 aa, Homo sapiens
  CDR3 for beta chain variable domain of TCR clone 385447 (TRBV7-3, TRBJ2-3)
CASSLMKRMRGADTQYF

SEQ ID NO: 770895 - protein, 17 aa, Homo sapiens
  CDR3 for alpha chain variable domain of TCR clone 385448 (TRAV36/DV7, TRAJ52)
CAVAQRAGGTSYGKLTF

SEQ ID NO: 770896 - protein, 15 aa, Homo sapiens
  CDR3 for beta chain variable domain of TCR clone 385448 (TRBV6-5, TRBJ1-2)
CASIYSQAFNYGYTF

SEQ ID NO: 770897 - protein, 12 aa, Homo sapiens
  CDR3 for alpha chain variable domain of TCR clone 385449 (TRAV12-2, TRAJ43)
CAVNVNKNDMRF

SEQ ID NO: 770898 - protein, 16 aa, Homo sapiens
  CDR3 for beta chain variable domain of TCR clone 385449 (TRBV7-6, TRBJ2-6)
CASSLPGLSGANVLTF

SEQ ID NO: 770899 - protein, 14 aa, Homo sapiens
  CDR3 for alpha chain variable domain of TCR clone 385450 (TRAV8-4, TRAJ17)
CAGREGAAGNKLTF

SEQ ID NO: 770900 - protein, 13 aa, Homo sapiens
  CDR3 for beta chain variable domain of TCR clone 385450 (TRBV19, TRBJ2-1)
CASSMYMVNEQFF

SEQ ID NO: 770901 - protein, 11 aa, Homo sapiens
  CDR3 for alpha chain variable domain of TCR clone 385451 (TRAV8-1, TRAJ8)
CAMTGFPKLVF

SEQ ID NO: 770902 - protein, 14 aa, Homo sapiens
  CDR3 for beta chain variable domain of TCR clone 385451 (TRBV5-4, TRBJ1-2)
CASTRQTDNYGYTF

SEQ ID NO: 770903 - protein, 17 aa, Homo sapiens
  CDR3 for alpha chain variable domain of TCR clone 385452 (TRAV3, TRAJ6)
CAVRDGPRAGGSYIPTF

SEQ ID NO: 770904 - protein, 16 aa, Homo sapiens
  CDR3 for beta chain variable domain of TCR clone 385452 (TRBV10-3, TRBJ2-1)
CAIGGVGDGGGGEQFF

SEQ ID NO: 770905 - protein, 13 aa, Homo sapiens
  CDR3 for alpha chain variable domain of TCR clone 385453 (TRAV12-2, TRAJ20)
CAVYPSNDYKLSF

SEQ ID NO: 770906 - protein, 15 aa, Homo sapiens
  CDR3 for beta chain variable domain of TCR clone 385453 (TRBV18, TRBJ1-2)
CASAPGNGLGYGYTF

SEQ ID NO: 770907 - protein, 13 aa, Homo sapiens
  CDR3 for alpha chain variable domain of TCR clone 385454 (TRAV17, TRAJ5)
CAPMDTGRRALTF

SEQ ID NO: 770908 - protein, 15 aa, Homo sapiens
  CDR3 for beta chain variable domain of TCR clone 385454 (TRBV6-6, TRBJ2-5)
CASSPVGGLEETQYF

SEQ ID NO: 770909 - protein, 14 aa, Homo sapiens
  CDR3 for alpha chain variable domain of TCR clone 385455 (TRAV12-1, TRAJ34)
CVVNLDYNPDKLIF

SEQ ID NO: 770910 - protein, 13 aa, Homo sapiens
  CDR3 for beta chain variable domain of TCR clone 385455 (TRBV29-1, TRBJ2-1)
CSVEGVRANEQFF

SEQ ID NO: 770911 - protein, 14 aa, Homo sapiens
  CDR3 for alpha chain variable domain of TCR clone 385456 (TRAV1-2, TRAJ16)
CAVNRFPDGQKLLL

SEQ ID NO: 770912 - protein, 15 aa, Homo sapiens
  CDR3 for beta chain variable domain of TCR clone 385456 (TRBV9, TRBJ1-6)
CASSVAGTGDSPLHF

SEQ ID NO: 770913 - protein, 11 aa, Homo sapiens
  CDR3 for alpha chain variable domain of TCR clone 385457 (TRAV12-3, TRAJ27)
CAMPNAGKSTF

SEQ ID NO: 770914 - protein, 13 aa, Homo sapiens
  CDR3 for beta chain variable domain of TCR clone 385457 (TRBV20-1, TRBJ1-1)
CSARVGGNTEAFF

SEQ ID NO: 770915 - protein, 14 aa, Homo sapiens
  CDR3 for alpha chain variable domain of TCR clone 385458 (TRAV3, TRAJ33)
CAVRDMGSNYQLIW

SEQ ID NO: 770916 - protein, 17 aa, Homo sapiens
  CDR3 for beta chain variable domain of TCR clone 385458 (TRBV19, TRBJ2-1)
CASSIWSAQHTHNEQFF

SEQ ID NO: 770917 - protein, 13 aa, Homo sapiens
  CDR3 for alpha chain variable domain of TCR clone 385459 (TRAV26-1, TRAJ41)
CIVRINSGYALNS

SEQ ID NO: 770918 - protein, 13 aa, Homo sapiens
  CDR3 for beta chain variable domain of TCR clone 385459 (TRBV20-1, TRBJ1-5)
CSATAAGGQPQHF

SEQ ID NO: 770919 - protein, 11 aa, Homo sapiens
  CDR3 for alpha chain variable domain of TCR clone 385460 (TRAV21, TRAJ34)
CAHYNTDKLIF

SEQ ID NO: 770920 - protein, 16 aa, Homo sapiens
  CDR3 for beta chain variable domain of TCR clone 385460 (TRBV7-7, TRBJ2-1)
CASSLASGTSYNEQFF

SEQ ID NO: 770921 - protein, 13 aa, Homo sapiens
  CDR3 for alpha chain variable domain of TCR clone 385461 (TRAV12-3, TRAJ7)
CAMTPYGNNRLAF

SEQ ID NO: 770922 - protein, 15 aa, Homo sapiens
  CDR3 for beta chain variable domain of TCR clone 385461 (TRBV4-1, TRBJ1-4)
CASSDTGGTNEKLFF

SEQ ID NO: 770923 - protein, 14 aa, Homo sapiens
  CDR3 for alpha chain variable domain of TCR clone 385462 (TRAV30, TRAJ33)
CGTERRFSNCQLIW

SEQ ID NO: 770924 - protein, 16 aa, Homo sapiens
  CDR3 for beta chain variable domain of TCR clone 385462 (TRBV7-3, TRBJ2-2)
WASSLKRGTLSGELFF

SEQ ID NO: 770925 - protein, 16 aa, Homo sapiens
  CDR3 for alpha chain variable domain of TCR clone 385463 (TRAV12-1, TRAJ43)
CVVNPHSFGAGTRLTV

SEQ ID NO: 770926 - protein, 16 aa, Homo sapiens
  CDR3 for beta chain variable domain of TCR clone 385463 (TRBV27, TRBJ2-2)
CASSSTGGGDTGELFF

SEQ ID NO: 770927 - protein, 15 aa, Homo sapiens
  CDR3 for alpha chain variable domain of TCR clone 385464 (TRAV17, TRAJ37)
CATDGGSSSTGKLIF

SEQ ID NO: 770928 - protein, 15 aa, Homo sapiens
  CDR3 for beta chain variable domain of TCR clone 385464 (TRBV28, TRBJ2-5)
CASSSGRTIQETQYF

SEQ ID NO: 770929 - protein, 15 aa, Homo sapiens
  CDR3 for alpha chain variable domain of TCR clone 385465 (TRAV17, TRAJ42)
CATDHYGGSQGNLIF

SEQ ID NO: 770930 - protein, 13 aa, Homo sapiens
  CDR3 for beta chain variable domain of TCR clone 385465 (TRBV7-2, TRBJ1-5)
FASRFARNQPQHF

SEQ ID NO: 770931 - protein, 16 aa, Homo sapiens
  CDR3 for alpha chain variable domain of TCR clone 385466 (TRAV12-2, TRAJ32)
CAVNLGQGGATTKLIF

SEQ ID NO: 770932 - protein, 13 aa, Homo sapiens
  CDR3 for beta chain variable domain of TCR clone 385466 (TRBV9, TRBJ2-2)
CASSPRPAGELFF

SEQ ID NO: 770933 - protein, 15 aa, Homo sapiens
  CDR3 for alpha chain variable domain of TCR clone 385467 (TRAV8-6, TRAJ10)
CAVSSKGGGGIKLTF

SEQ ID NO: 770934 - protein, 18 aa, Homo sapiens
  CDR3 for beta chain variable domain of TCR clone 385467 (TRBV12-4, TRBJ2-4)
CASSRTGAVDVAKNIQYF

SEQ ID NO: 770935 - protein, 15 aa, Homo sapiens
  CDR3 for alpha chain variable domain of TCR clone 385468 (TRAV12-3, TRAJ6)
CAMSATTGGSYIPTF

SEQ ID NO: 770936 - protein, 17 aa, Homo sapiens
  CDR3 for beta chain variable domain of TCR clone 385468 (TRBV28, TRBJ1-3)
CASSMAGPLETPYILER

SEQ ID NO: 770937 - protein, 16 aa, Homo sapiens
  CDR3 for alpha chain variable domain of TCR clone 385469 (TRAV13-1, TRAJ42)
CAASINYGGSQGNLIF

SEQ ID NO: 770938 - protein, 16 aa, Homo sapiens
  CDR3 for beta chain variable domain of TCR clone 385469 (TRBV28, TRBJ2-1)
CASSSPEYPRDNEQFF

SEQ ID NO: 770939 - protein, 12 aa, Homo sapiens
  CDR3 for alpha chain variable domain of TCR clone 385470 (TRAV12-3, TRAJ40)
CAMSSGTYKYIF

SEQ ID NO: 770940 - protein, 14 aa, Homo sapiens
  CDR3 for beta chain variable domain of TCR clone 385470 (TRBV6-1, TRBJ1-3)
CASVQGGGGNTIYF

SEQ ID NO: 770941 - protein, 17 aa, Homo sapiens
  CDR3 for alpha chain variable domain of TCR clone 385471 (TRAV3, TRAJ6)
CAVRDGPRAGGSYIPTF

SEQ ID NO: 770942 - protein, 13 aa, Homo sapiens
  CDR3 for beta chain variable domain of TCR clone 385471 (TRBV11-3, TRBJ1-1)
CASSWDGNTEAFF

SEQ ID NO: 770943 - protein, 12 aa, Homo sapiens
  CDR3 for alpha chain variable domain of TCR clone 385472 (TRAV3, TRAJ20)
CAVRDGDYKLSF

SEQ ID NO: 770944 - protein, 15 aa, Homo sapiens
  CDR3 for beta chain variable domain of TCR clone 385472 (TRBV20-1, TRBJ2-7)
CSARDQLGGLNEQYF

SEQ ID NO: 770945 - protein, 15 aa, Homo sapiens
  CDR3 for alpha chain variable domain of TCR clone 385473 (TRAV12-2, TRAJ53)
CAVNGGGGSNYTLTF

SEQ ID NO: 770946 - protein, 14 aa, Homo sapiens
  CDR3 for beta chain variable domain of TCR clone 385473 (TRBV11-2, TRBJ2-5)
CASSRTGGIETQYF

SEQ ID NO: 770947 - protein, 15 aa, Homo sapiens
  CDR3 for alpha chain variable domain of TCR clone 385474 (TRAV12-3, TRAJ6)
CAMSATTGGSYIPTF

SEQ ID NO: 770948 - protein, 16 aa, Homo sapiens
  CDR3 for beta chain variable domain of TCR clone 385474 (TRBV20-1, TRBJ1-2)
CSASMGQGVANSGYTF

SEQ ID NO: 770949 - protein, 12 aa, Homo sapiens
  CDR3 for alpha chain variable domain of TCR clone 385475 (TRAV8-3, TRAJ26)
CAGVNYGQNFVF

SEQ ID NO: 770950 - protein, 15 aa, Homo sapiens
  CDR3 for beta chain variable domain of TCR clone 385475 (TRBV11-2, TRBJ2-1)
CASSLGTSGLNEQFF

SEQ ID NO: 770951 - protein, 12 aa, Homo sapiens
  CDR3 for alpha chain variable domain of TCR clone 385476 (TRAV2, TRAJ9)
CAVGAGGFKTIF

SEQ ID NO: 770952 - protein, 12 aa, Homo sapiens
  CDR3 for beta chain variable domain of TCR clone 385476 (TRBV3-1, TRBJ2-1)
CASSQGSSGQFF

SEQ ID NO: 770953 - protein, 15 aa, Homo sapiens
  CDR3 for alpha chain variable domain of TCR clone 385477 (TRAV26-1, TRAJ29)
CIVRVEGSGNKPLVF

SEQ ID NO: 770954 - protein, 15 aa, Homo sapiens
  CDR3 for beta chain variable domain of TCR clone 385477 (TRBV7-9, TRBJ1-5)
CASSQGHQPNQAQHF

SEQ ID NO: 770955 - protein, 17 aa, Homo sapiens
  CDR3 for alpha chain variable domain of TCR clone 385478 (TRAV13-1, TRAJ52)
CAASSGAGVTSYGKLTF

SEQ ID NO: 770956 - protein, 15 aa, Homo sapiens
  CDR3 for beta chain variable domain of TCR clone 385478 (TRBV2, TRBJ2-1)
CASSELAGSYNERFF

SEQ ID NO: 770957 - protein, 17 aa, Homo sapiens
  CDR3 for alpha chain variable domain of TCR clone 385479 (TRAV23/DV6, TRAJ28)
CAALLAYSGAGSYQITF

SEQ ID NO: 770958 - protein, 13 aa, Homo sapiens
  CDR3 for beta chain variable domain of TCR clone 385479 (TRBV4-2, TRBJ2-3)
CASSQGNTDTQYF

SEQ ID NO: 770959 - protein, 15 aa, Homo sapiens
  CDR3 for alpha chain variable domain of TCR clone 385480 (TRAV26-1, TRAJ44)
CIARVPFGTASKLTF

SEQ ID NO: 770960 - protein, 17 aa, Homo sapiens
  CDR3 for beta chain variable domain of TCR clone 385480 (TRBV24-1, TRBJ2-4)
CATSDAEARGVRNIQYC

SEQ ID NO: 770961 - protein, 14 aa, Homo sapiens
  CDR3 for alpha chain variable domain of TCR clone 385481 (TRAV8-6, TRAJ52)
CAVIGGPSYGKLTF

SEQ ID NO: 770962 - protein, 15 aa, Homo sapiens
  CDR3 for beta chain variable domain of TCR clone 385481 (TRBV11-2, TRBJ2-5)
CASSLGAGGVETQYF

SEQ ID NO: 770963 - protein, 13 aa, Homo sapiens
  CDR3 for alpha chain variable domain of TCR clone 385482 (TRAV12-2, TRAJ43)
CAVSGDNNNDMRF

SEQ ID NO: 770964 - protein, 12 aa, Homo sapiens
  CDR3 for beta chain variable domain of TCR clone 385482 (TRBV14, TRBJ2-7)
CASSLYKDEQYF

SEQ ID NO: 770965 - protein, 23 aa, Homo sapiens
  CDR3 for alpha chain variable domain of TCR clone 385483 (TRAV26-1, )
CIVRPLNAGDNHIQNPDPAVYQL

SEQ ID NO: 770966 - protein, 13 aa, Homo sapiens
  CDR3 for beta chain variable domain of TCR clone 385483 (TRBV18, TRBJ1-1)
CASSPNGDTEAFF

SEQ ID NO: 770967 - protein, 15 aa, Homo sapiens
  CDR3 for alpha chain variable domain of TCR clone 385484 (TRAV21, TRAJ52)
CATRGGGTSYGKLPF

SEQ ID NO: 770968 - protein, 14 aa, Homo sapiens
  CDR3 for beta chain variable domain of TCR clone 385484 (TRBV28, TRBJ2-3)
CASSSAPSTDTQYF

SEQ ID NO: 770969 - protein, 13 aa, Homo sapiens
  CDR3 for alpha chain variable domain of TCR clone 385485 (TRAV8-6, TRAJ13)
CAVSSGGYQKVTF

SEQ ID NO: 770970 - protein, 15 aa, Homo sapiens
  CDR3 for beta chain variable domain of TCR clone 385485 (TRBV12-4, TRBJ2-5)
CASSPPTGLQETQYF

SEQ ID NO: 770971 - protein, 15 aa, Homo sapiens
  CDR3 for alpha chain variable domain of TCR clone 385486 (TRAV17, TRAJ17)
CATDTSIIRRQQANF

SEQ ID NO: 770972 - protein, 13 aa, Homo sapiens
  CDR3 for beta chain variable domain of TCR clone 385486 (TRBV7-2, TRBJ2-2)
CASSLAVTGELFF

SEQ ID NO: 770973 - protein, 10 aa, Homo sapiens
  CDR3 for alpha chain variable domain of TCR clone 385487 (TRAV13-2, TRAJ5)
CAESVVIVGH

SEQ ID NO: 770974 - protein, 18 aa, Homo sapiens
  CDR3 for beta chain variable domain of TCR clone 385487 (TRBV4-1, TRBJ2-3)
CASSHQLAGGRSTDTQYF

SEQ ID NO: 770975 - protein, 17 aa, Homo sapiens
  CDR3 for alpha chain variable domain of TCR clone 385488 (TRAV4, TRAJ18)
CLVGERSVGSTLGRLYF

SEQ ID NO: 770976 - protein, 14 aa, Homo sapiens
  CDR3 for beta chain variable domain of TCR clone 385488 (TRBV12-4, TRBJ1-4)
CASSRQGANEKLFF

SEQ ID NO: 770977 - protein, 14 aa, Homo sapiens
  CDR3 for alpha chain variable domain of TCR clone 385489 (TRAV16, TRAJ54)
CALSLIQGAQKLVV

SEQ ID NO: 770978 - protein, 19 aa, Homo sapiens
  CDR3 for beta chain variable domain of TCR clone 385489 (TRBV11-2, TRBJ2-4)
CASSSVGPGAIETFSTSAP

SEQ ID NO: 770979 - protein, 14 aa, Homo sapiens
  CDR3 for alpha chain variable domain of TCR clone 385490 (TRAV12-1, TRAJ6)
CVVARIRRKLHTYI

SEQ ID NO: 770980 - protein, 17 aa, Homo sapiens
  CDR3 for beta chain variable domain of TCR clone 385490 (TRBV7-8, TRBJ2-6)
CASSAGTGGAGANVLTF

SEQ ID NO: 770981 - protein, 11 aa, Homo sapiens
  CDR3 for alpha chain variable domain of TCR clone 385491 (TRAV8-3, TRAJ49)
CAVGGGNQFYF

SEQ ID NO: 770982 - protein, 10 aa, Homo sapiens
  CDR3 for beta chain variable domain of TCR clone 385491 (TRBV23-1, TRBJ2-1)
KWSSYNEQFF

SEQ ID NO: 770983 - protein, 14 aa, Homo sapiens
  CDR3 for alpha chain variable domain of TCR clone 385492 (TRAV1-2, TRAJ16)
CAVNRFSDVQKLLF

SEQ ID NO: 770984 - protein, 14 aa, Homo sapiens
  CDR3 for beta chain variable domain of TCR clone 385492 (TRBV6-1, TRBJ1-3)
CASVQGGGGNTIYF

SEQ ID NO: 770985 - protein, 12 aa, Homo sapiens
  CDR3 for alpha chain variable domain of TCR clone 385493 (TRAV8-3, TRAJ20)
CAVGGGDYKLSF

SEQ ID NO: 770986 - protein, 16 aa, Homo sapiens
  CDR3 for beta chain variable domain of TCR clone 385493 (TRBV4-1, TRBJ2-5)
CASSSGLAGVLGTQYF

SEQ ID NO: 770987 - protein, 13 aa, Homo sapiens
  CDR3 for alpha chain variable domain of TCR clone 385494 (TRAV8-3, TRAJ44)
CAVVPGTASKLTF

SEQ ID NO: 770988 - protein, 12 aa, Homo sapiens
  CDR3 for beta chain variable domain of TCR clone 385494 (TRBV27, TRBJ2-7)
CASSGGFYEQYF

SEQ ID NO: 770989 - protein, 13 aa, Homo sapiens
  CDR3 for alpha chain variable domain of TCR clone 385495 (TRAV30, TRAJ6)
CGFIEGGSYILTL

SEQ ID NO: 770990 - protein, 13 aa, Homo sapiens
  CDR3 for beta chain variable domain of TCR clone 385495 (TRBV5-4, TRBJ2-5)
CASSPVSQETQYF

SEQ ID NO: 770991 - protein, 13 aa, Homo sapiens
  CDR3 for alpha chain variable domain of TCR clone 385496 (TRAV13-2, TRAJ11)
CAEGDSGYSTLTF

SEQ ID NO: 770992 - protein, 12 aa, Homo sapiens
  CDR3 for beta chain variable domain of TCR clone 385496 (TRBV7-9, TRBJ1-1)
CASSLDGTEAFF

SEQ ID NO: 770993 - protein, 11 aa, Homo sapiens
  CDR3 for alpha chain variable domain of TCR clone 385497 (TRAV1-2, TRAJ20)
CAVANDYKLSC

SEQ ID NO: 770994 - protein, 18 aa, Homo sapiens
  CDR3 for beta chain variable domain of TCR clone 385497 (TRBV20-1, TRBJ2-6)
CSAETTTTHGSGANVLTF

SEQ ID NO: 770995 - protein, 12 aa, Homo sapiens
  CDR3 for alpha chain variable domain of TCR clone 385498 (TRAV3, TRAJ20)
CAVRDRDYKLSF

SEQ ID NO: 770996 - protein, 15 aa, Homo sapiens
  CDR3 for beta chain variable domain of TCR clone 385498 (TRBV9, TRBJ1-6)
CASSVAGTGDSPLHF

SEQ ID NO: 770997 - protein, 14 aa, Homo sapiens
  CDR3 for alpha chain variable domain of TCR clone 385499 (TRAV13-1, TRAJ8)
CAASMSTGIQKLVF

SEQ ID NO: 770998 - protein, 13 aa, Homo sapiens
  CDR3 for beta chain variable domain of TCR clone 385499 (TRBV13, TRBJ2-1)
CASTPGSYNEQCF

SEQ ID NO: 770999 - protein, 14 aa, Homo sapiens
  CDR3 for alpha chain variable domain of TCR clone 385500 (TRAV8-3, TRAJ13)
CAVGAQEGYQKVTF

SEQ ID NO: 771000 - protein, 17 aa, Homo sapiens
  CDR3 for beta chain variable domain of TCR clone 385500 (TRBV25-1, TRBJ2-7)
CASSDARVVFSSYEQYF

SEQ ID NO: 771001 - protein, 17 aa, Homo sapiens
  CDR3 for alpha chain variable domain of TCR clone 385501 (TRAV3, TRAJ6)
CAVRDGPRDGGSYIPTS

SEQ ID NO: 771002 - protein, 20 aa, Homo sapiens
  CDR3 for beta chain variable domain of TCR clone 385501 (TRBV28, TRBJ2-1)
CASTPIGRSPGLAGGNEQFF

SEQ ID NO: 771003 - protein, 11 aa, Homo sapiens
  CDR3 for alpha chain variable domain of TCR clone 385502 (TRAV13-1, TRAJ24)
CAASGWGKLQV

SEQ ID NO: 771004 - protein, 15 aa, Homo sapiens
  CDR3 for beta chain variable domain of TCR clone 385502 (TRBV11-2, TRBJ2-2)
CASSLDTGNTGELFF

SEQ ID NO: 771005 - protein, 11 aa, Homo sapiens
  CDR3 for alpha chain variable domain of TCR clone 385503 (TRAV17, TRAJ9)
CATTGGFKTIF

SEQ ID NO: 771006 - protein, 12 aa, Homo sapiens
  CDR3 for beta chain variable domain of TCR clone 385503 (TRBV24-1, TRBJ1-1)
CATLYPDTEAFF

SEQ ID NO: 771007 - protein, 17 aa, Homo sapiens
  CDR3 for alpha chain variable domain of TCR clone 385504 (TRAV3, TRAJ42)
CAVRDRDYGGSQGNLIF

SEQ ID NO: 771008 - protein, 13 aa, Homo sapiens
  CDR3 for beta chain variable domain of TCR clone 385504 (TRBV10-2, TRBJ2-7)
CASGTSGGYEQYF

SEQ ID NO: 771009 - protein, 12 aa, Homo sapiens
  CDR3 for alpha chain variable domain of TCR clone 385505 (TRAV20, TRAJ20)
CVVRFNDYKLSF

SEQ ID NO: 771010 - protein, 14 aa, Homo sapiens
  CDR3 for beta chain variable domain of TCR clone 385505 (TRBV20-1, TRBJ2-1)
CSAQIGGSANEQFF

SEQ ID NO: 771011 - protein, 15 aa, Homo sapiens
  CDR3 for alpha chain variable domain of TCR clone 385506 (TRAV2, TRAJ11)
CAVRGRNSGYSTLTF

SEQ ID NO: 771012 - protein, 14 aa, Homo sapiens
  CDR3 for beta chain variable domain of TCR clone 385506 (TRBV4-1, TRBJ2-2)
CASSQAVNTGELFF

SEQ ID NO: 771013 - protein, 16 aa, Homo sapiens
  CDR3 for alpha chain variable domain of TCR clone 385507 (TRAV3, TRAJ10)
CAVRDMRAGGGNKLTL

SEQ ID NO: 771014 - protein, 14 aa, Homo sapiens
  CDR3 for beta chain variable domain of TCR clone 385507 (TRBV19, TRBJ2-1)
CASPTFVLSGEQFF

SEQ ID NO: 771015 - protein, 14 aa, Homo sapiens
  CDR3 for alpha chain variable domain of TCR clone 385508 (TRAV8-3, TRAJ39)
CAVGAWGAGNMLTF

SEQ ID NO: 771016 - protein, 15 aa, Homo sapiens
  CDR3 for beta chain variable domain of TCR clone 385508 (TRBV6-3, TRBJ2-7)
CASSSPGTVFYEQYF

SEQ ID NO: 771017 - protein, 15 aa, Homo sapiens
  CDR3 for alpha chain variable domain of TCR clone 385509 (TRAV12-2, TRAJ53)
CAVNGGGGSNYKLTF

SEQ ID NO: 771018 - protein, 14 aa, Homo sapiens
  CDR3 for beta chain variable domain of TCR clone 385509 (TRBV15, TRBJ1-2)
CATSRASVNYGYTF

SEQ ID NO: 771019 - protein, 18 aa, Homo sapiens
  CDR3 for alpha chain variable domain of TCR clone 385510 (TRAV29/DV5, TRAJ52)
CAAGFRGAGGTSSGKLTF

SEQ ID NO: 771020 - protein, 19 aa, Homo sapiens
  CDR3 for beta chain variable domain of TCR clone 385510 (TRBV19, TRBJ2-2)
CASTRPGLAGGRVTGELFF

SEQ ID NO: 771021 - protein, 14 aa, Homo sapiens
  CDR3 for alpha chain variable domain of TCR clone 385511 (TRAV29/DV5, TRAJ20)
CAAAIRSNDYKLSF

SEQ ID NO: 771022 - protein, 15 aa, Homo sapiens
  CDR3 for beta chain variable domain of TCR clone 385511 (TRBV20-1, TRBJ2-1)
CSASSAGSSYNEQFF

SEQ ID NO: 771023 - protein, 14 aa, Homo sapiens
  CDR3 for alpha chain variable domain of TCR clone 385512 (TRAV1-2, TRAJ16)
CAVNRFSDSQKLLF

SEQ ID NO: 771024 - protein, 13 aa, Homo sapiens
  CDR3 for beta chain variable domain of TCR clone 385512 (TRBV7-2, TRBJ1-1)
CASNLKGAKVAFF

SEQ ID NO: 771025 - protein, 13 aa, Homo sapiens
  CDR3 for alpha chain variable domain of TCR clone 385513 (TRAV22, TRAJ26)
CAVEHNYGQNVVF

SEQ ID NO: 771026 - protein, 16 aa, Homo sapiens
  CDR3 for beta chain variable domain of TCR clone 385513 (TRBV7-2, TRBJ2-6)
CASSERRASGANVLTF

SEQ ID NO: 771027 - protein, 14 aa, Homo sapiens
  CDR3 for alpha chain variable domain of TCR clone 385514 (TRAV20, TRAJ22)
CAVHVSGSARQLTS

SEQ ID NO: 771028 - protein, 13 aa, Homo sapiens
  CDR3 for beta chain variable domain of TCR clone 385514 (TRBV20-1, TRBJ2-5)
CSAREGGKETQYF

SEQ ID NO: 771029 - protein, 23 aa, Homo sapiens
  CDR3 for alpha chain variable domain of TCR clone 385515 (TRAV12-2, TRAJ36)
SLLIRDSQPSDSATLERANNLFF

SEQ ID NO: 771030 - protein, 14 aa, Homo sapiens
  CDR3 for beta chain variable domain of TCR clone 385515 (TRBV16, TRBJ1-1)
CASSQAGPNTEAFF

SEQ ID NO: 771031 - protein, 14 aa, Homo sapiens
  CDR3 for alpha chain variable domain of TCR clone 385516 (TRAV12-3, TRAJ9)
CAMSPNTGGFKTIF

SEQ ID NO: 771032 - protein, 17 aa, Homo sapiens
  CDR3 for beta chain variable domain of TCR clone 385516 (TRBV28, TRBJ2-3)
CASSPTPAGGRVDTQYF

SEQ ID NO: 771033 - protein, 12 aa, Homo sapiens
  CDR3 for alpha chain variable domain of TCR clone 385517 (TRAV12-3, TRAJ17)
CAMTLTGNKLTF

SEQ ID NO: 771034 - protein, 14 aa, Homo sapiens
  CDR3 for beta chain variable domain of TCR clone 385517 (TRBV19, TRBJ2-7)
CASSIGGAVAEQYF

SEQ ID NO: 771035 - protein, 12 aa, Homo sapiens
  CDR3 for alpha chain variable domain of TCR clone 385518 (TRAV12-2, TRAJ21)
CAPSDNFNKFYF

SEQ ID NO: 771036 - protein, 15 aa, Homo sapiens
  CDR3 for beta chain variable domain of TCR clone 385518 (TRBV5-1, TRBJ2-1)
CASSPPRAPYNEQFF

SEQ ID NO: 771037 - protein, 13 aa, Homo sapiens
  CDR3 for alpha chain variable domain of TCR clone 385519 (TRAV12-3, TRAJ43)
CAMIRPNNNDMRF

SEQ ID NO: 771038 - protein, 13 aa, Homo sapiens
  CDR3 for beta chain variable domain of TCR clone 385519 (TRBV7-9, TRBJ1-2)
CASSLKQNYGYTF

SEQ ID NO: 771039 - protein, 14 aa, Homo sapiens
  CDR3 for alpha chain variable domain of TCR clone 385520 (TRAV20, TRAJ56)
CAVQFGGANSKLTF

SEQ ID NO: 771040 - protein, 15 aa, Homo sapiens
  CDR3 for beta chain variable domain of TCR clone 385520 (TRBV11-2, TRBJ2-1)
CASSLGTSGLNEQFF

SEQ ID NO: 771041 - protein, 12 aa, Homo sapiens
  CDR3 for alpha chain variable domain of TCR clone 385521 (TRAV12-3, TRAJ17)
CAMTLTGNKLTF

SEQ ID NO: 771042 - protein, 20 aa, Homo sapiens
  CDR3 for beta chain variable domain of TCR clone 385521 (TRBV7-8, TRBJ2-2)
CASSHLFPGPTIHITGELFF

SEQ ID NO: 771043 - protein, 13 aa, Homo sapiens
  CDR3 for alpha chain variable domain of TCR clone 385522 (TRAV17, TRAJ34)
SATDLYNTDKLIF

SEQ ID NO: 771044 - protein, 15 aa, Homo sapiens
  CDR3 for beta chain variable domain of TCR clone 385522 (TRBV20-1, TRBJ2-3)
CSATGTSGFTDTQYF

SEQ ID NO: 771045 - protein, 13 aa, Homo sapiens
  CDR3 for alpha chain variable domain of TCR clone 385523 (TRAV38-1, TRAJ42)
CARGGGSQGNLIF

SEQ ID NO: 771046 - protein, 17 aa, Homo sapiens
  CDR3 for beta chain variable domain of TCR clone 385523 (TRBV11-2, TRBJ2-1)
CASILYPPGVEYNEQFF

SEQ ID NO: 771047 - protein, 13 aa, Homo sapiens
  CDR3 for alpha chain variable domain of TCR clone 385524 (TRAV12-3, TRAJ49)
RAMSRNTGNQFYF

SEQ ID NO: 771048 - protein, 16 aa, Homo sapiens
  CDR3 for beta chain variable domain of TCR clone 385524 (TRBV5-8, TRBJ2-2)
CASSLINPGGAGELFF

SEQ ID NO: 771049 - protein, 13 aa, Homo sapiens
  CDR3 for alpha chain variable domain of TCR clone 385525 (TRAV13-1, TRAJ4)
CAASIGGYNKLIF

SEQ ID NO: 771050 - protein, 16 aa, Homo sapiens
  CDR3 for beta chain variable domain of TCR clone 385525 (TRBV20-1, TRBJ2-1)
CGAPGLAGSYSDEQFL

SEQ ID NO: 771051 - protein, 11 aa, Homo sapiens
  CDR3 for alpha chain variable domain of TCR clone 385526 (TRAV3, TRAJ21)
CAVGNFNKFYF

SEQ ID NO: 771052 - protein, 11 aa, Homo sapiens
  CDR3 for beta chain variable domain of TCR clone 385526 (TRBV6-3, TRBJ2-3)
CATGQADMQYF

SEQ ID NO: 771053 - protein, 14 aa, Homo sapiens
  CDR3 for alpha chain variable domain of TCR clone 385527 (TRAV12-2, TRAJ15)
CAPHTGQAGTALIF

SEQ ID NO: 771054 - protein, 13 aa, Homo sapiens
  CDR3 for beta chain variable domain of TCR clone 385527 (TRBV7-9, TRBJ1-5)
CASSLRNDQPQHF

SEQ ID NO: 771055 - protein, 19 aa, Homo sapiens
  CDR3 for alpha chain variable domain of TCR clone 385528 (TRAV29/DV5, TRAJ49)
CSVLLCSKLTVDTGNPFYF

SEQ ID NO: 771056 - protein, 17 aa, Homo sapiens
  CDR3 for beta chain variable domain of TCR clone 385528 (TRBV13, TRBJ2-3)
CASSLSRVAGGRNTQYF

SEQ ID NO: 771057 - protein, 13 aa, Homo sapiens
  CDR3 for alpha chain variable domain of TCR clone 385529 (TRAV1-2, TRAJ9)
CAVLNTGGFKTIF

SEQ ID NO: 771058 - protein, 14 aa, Homo sapiens
  CDR3 for beta chain variable domain of TCR clone 385529 (TRBV19, TRBJ2-7)
CASSIFAGTYEQYF

SEQ ID NO: 771059 - protein, 12 aa, Homo sapiens
  CDR3 for alpha chain variable domain of TCR clone 385530 (TRAV12-1, TRAJ40)
CVVYPGTYKYIF

SEQ ID NO: 771060 - protein, 14 aa, Homo sapiens
  CDR3 for beta chain variable domain of TCR clone 385530 (TRBV20-1, TRBJ2-3)
CSARGGTSTDTQYF

SEQ ID NO: 771061 - protein, 15 aa, Homo sapiens
  CDR3 for alpha chain variable domain of TCR clone 385531 (TRAV25, TRAJ52)
CAGRPGGTSYGELTF

SEQ ID NO: 771062 - protein, 17 aa, Homo sapiens
  CDR3 for beta chain variable domain of TCR clone 385531 (TRBV7-8, TRBJ2-6)
CASSAGTGGAGANFLTF

SEQ ID NO: 771063 - protein, 13 aa, Homo sapiens
  CDR3 for alpha chain variable domain of TCR clone 385532 (TRAV27, TRAJ49)
CAPRPYTGNQFYV

SEQ ID NO: 771064 - protein, 16 aa, Homo sapiens
  CDR3 for beta chain variable domain of TCR clone 385532 (TRBV4-1, TRBJ1-2)
CASSQDAGQVLYGYTF

SEQ ID NO: 771065 - protein, 14 aa, Homo sapiens
  CDR3 for alpha chain variable domain of TCR clone 385533 (TRAV12-2, TRAJ53)
CAVKGGGSNYKLTF

SEQ ID NO: 771066 - protein, 16 aa, Homo sapiens
  CDR3 for beta chain variable domain of TCR clone 385533 (TRBV29-1, TRBJ1-2)
CSVEANRDIANYGYTF

SEQ ID NO: 771067 - protein, 16 aa, Homo sapiens
  CDR3 for alpha chain variable domain of TCR clone 385534 (TRAV30, TRAJ24)
CGTEIVDDDSWGKFQF

SEQ ID NO: 771068 - protein, 14 aa, Homo sapiens
  CDR3 for beta chain variable domain of TCR clone 385534 (TRBV12-5, TRBJ2-5)
CASGSRTHQDTQYF

SEQ ID NO: 771069 - protein, 14 aa, Homo sapiens
  CDR3 for alpha chain variable domain of TCR clone 385535 (TRAV26-1, TRAJ38)
CIADNAGNNRKMIW

SEQ ID NO: 771070 - protein, 13 aa, Homo sapiens
  CDR3 for beta chain variable domain of TCR clone 385535 (TRBV7-9, TRBJ2-3)
CASSPGSTDTQYF

SEQ ID NO: 771071 - protein, 14 aa, Homo sapiens
  CDR3 for alpha chain variable domain of TCR clone 385536 (TRAV36/DV7, TRAJ40)
CSVETTSGTYKYIF

SEQ ID NO: 771072 - protein, 13 aa, Homo sapiens
  CDR3 for beta chain variable domain of TCR clone 385536 (TRBV10-3, TRBJ2-5)
CAMTSGAGETQYF

SEQ ID NO: 771073 - protein, 14 aa, Homo sapiens
  CDR3 for alpha chain variable domain of TCR clone 385537 (TRAV12-1, TRAJ4)
CVVNTAGGYNKLIF

SEQ ID NO: 771074 - protein, 16 aa, Homo sapiens
  CDR3 for beta chain variable domain of TCR clone 385537 (TRBV11-2, TRBJ1-2)
CASSPSGREANYGYTF

SEQ ID NO: 771075 - protein, 18 aa, Homo sapiens
  CDR3 for alpha chain variable domain of TCR clone 385538 (TRAV26-2, TRAJ33)
CCVLLHPEEPASNYQLIW

SEQ ID NO: 771076 - protein, 13 aa, Homo sapiens
  CDR3 for beta chain variable domain of TCR clone 385538 (TRBV24-1, TRBJ2-2)
CATGDWSTGELFF

SEQ ID NO: 771077 - protein, 11 aa, Homo sapiens
  CDR3 for alpha chain variable domain of TCR clone 385539 (TRAV12-2, TRAJ42)
CAPGSQGNLIF

SEQ ID NO: 771078 - protein, 18 aa, Homo sapiens
  CDR3 for beta chain variable domain of TCR clone 385539 (TRBV6-6, TRBJ1-3)
CASSYSRWDSISGNTIYF

SEQ ID NO: 771079 - protein, 16 aa, Homo sapiens
  CDR3 for alpha chain variable domain of TCR clone 385540 (TRAV8-3, TRAJ52)
CAVQPAGGISYGKLTF

SEQ ID NO: 771080 - protein, 15 aa, Homo sapiens
  CDR3 for beta chain variable domain of TCR clone 385540 (TRBV11-2, TRBJ2-7)
CASSLAGGVATEQYF

SEQ ID NO: 771081 - protein, 15 aa, Homo sapiens
  CDR3 for alpha chain variable domain of TCR clone 385541 (TRAV1-2, TRAJ28)
CAVQYSEAGSYQLTF

SEQ ID NO: 771082 - protein, 15 aa, Homo sapiens
  CDR3 for beta chain variable domain of TCR clone 385541 (TRBV9, TRBJ1-6)
CASSVAGTGDSPLHF

SEQ ID NO: 771083 - protein, 17 aa, Homo sapiens
  CDR3 for alpha chain variable domain of TCR clone 385542 (TRAV3, TRAJ6)
CAVRDGPRAGRSYIPTF

SEQ ID NO: 771084 - protein, 13 aa, Homo sapiens
  CDR3 for beta chain variable domain of TCR clone 385542 (TRBV19, TRBJ2-7)
CASSIDRTYEQYF

SEQ ID NO: 771085 - protein, 14 aa, Homo sapiens
  CDR3 for alpha chain variable domain of TCR clone 385543 (TRAV1-2, TRAJ16)
CAVNRFSDGQKLRF

SEQ ID NO: 771086 - protein, 13 aa, Homo sapiens
  CDR3 for beta chain variable domain of TCR clone 385543 (TRBV20-1, TRBJ1-1)
CSAPLGGGTEAFF

SEQ ID NO: 771087 - protein, 17 aa, Homo sapiens
  CDR3 for alpha chain variable domain of TCR clone 385544 (TRAV3, TRAJ42)
CAVRDRDYGGSQGNLIF

SEQ ID NO: 771088 - protein, 15 aa, Homo sapiens
  CDR3 for beta chain variable domain of TCR clone 385544 (TRBV2, TRBJ2-1)
CASSETGGNYNEQFF

SEQ ID NO: 771089 - protein, 14 aa, Homo sapiens
  CDR3 for alpha chain variable domain of TCR clone 385545 (TRAV2, TRAJ9)
CAVEDRSGGFKTIF

SEQ ID NO: 771090 - protein, 15 aa, Homo sapiens
  CDR3 for beta chain variable domain of TCR clone 385545 (TRBV7-2, TRBJ2-7)
CASSTPGLTRGEQYF

SEQ ID NO: 771091 - protein, 16 aa, Homo sapiens
  CDR3 for alpha chain variable domain of TCR clone 385546 (TRAV13-1, TRAJ48)
CAASICGNFGNEKLTF

SEQ ID NO: 771092 - protein, 16 aa, Homo sapiens
  CDR3 for beta chain variable domain of TCR clone 385546 (TRBV18, TRBJ1-5)
CASSPYRVEGNQPQHF

SEQ ID NO: 771093 - protein, 11 aa, Homo sapiens
  CDR3 for alpha chain variable domain of TCR clone 385547 (TRAV21, TRAJ11)
FAVNGYSTLTF

SEQ ID NO: 771094 - protein, 11 aa, Homo sapiens
  CDR3 for beta chain variable domain of TCR clone 385547 (TRBV19, TRBJ1-1)
CASSIGSDAFF

SEQ ID NO: 771095 - protein, 17 aa, Homo sapiens
  CDR3 for alpha chain variable domain of TCR clone 385548 (TRAV3, TRAJ6)
CAVRDGPRAGGSYIPTF

SEQ ID NO: 771096 - protein, 14 aa, Homo sapiens
  CDR3 for beta chain variable domain of TCR clone 385548 (TRBV6-1, TRBJ1-3)
CASVKGGGGNTMYF

SEQ ID NO: 771097 - protein, 12 aa, Homo sapiens
  CDR3 for alpha chain variable domain of TCR clone 385549 (TRAV12-2, TRAJ30)
CAVRNSDDKIIF

SEQ ID NO: 771098 - protein, 15 aa, Homo sapiens
  CDR3 for beta chain variable domain of TCR clone 385549 (TRBV6-3, TRBJ1-5)
CASRVDRWSNQPQHF

SEQ ID NO: 771099 - protein, 16 aa, Homo sapiens
  CDR3 for alpha chain variable domain of TCR clone 385550 (TRAV13-2, TRAJ45)
CAENRGSGGGANGLTF

SEQ ID NO: 771100 - protein, 14 aa, Homo sapiens
  CDR3 for beta chain variable domain of TCR clone 385550 (TRBV19, TRBJ2-2)
CASKRAPNTGELFF

SEQ ID NO: 771101 - protein, 14 aa, Homo sapiens
  CDR3 for alpha chain variable domain of TCR clone 385551 (TRAV16, TRAJ32)
CALKSGGATNKLIF

SEQ ID NO: 771102 - protein, 15 aa, Homo sapiens
  CDR3 for beta chain variable domain of TCR clone 385551 (TRBV15, TRBJ1-6)
CATSGGLNSPSTLGT

SEQ ID NO: 771103 - protein, 14 aa, Homo sapiens
  CDR3 for alpha chain variable domain of TCR clone 385552 (TRAV9-2, TRAJ39)
CSLYIYNAGNMLTF

SEQ ID NO: 771104 - protein, 12 aa, Homo sapiens
  CDR3 for beta chain variable domain of TCR clone 385552 (TRBV14, TRBJ2-1)
CASSQVDNEQFF

SEQ ID NO: 771105 - protein, 13 aa, Homo sapiens
  CDR3 for alpha chain variable domain of TCR clone 385553 (TRAV36/DV7, TRAJ49)
CAVAQTPVTSSIL

SEQ ID NO: 771106 - protein, 14 aa, Homo sapiens
  CDR3 for beta chain variable domain of TCR clone 385553 (TRBV5-1, TRBJ2-7)
CASSRGESLYEQYF

SEQ ID NO: 771107 - protein, 16 aa, Homo sapiens
  CDR3 for alpha chain variable domain of TCR clone 385554 (TRAV12-3, TRAJ53)
CAMSPGSGGSNYKLTF

SEQ ID NO: 771108 - protein, 16 aa, Homo sapiens
  CDR3 for beta chain variable domain of TCR clone 385554 (TRBV28, TRBJ2-7)
CASSPWVATGDLSQYF

SEQ ID NO: 771109 - protein, 14 aa, Homo sapiens
  CDR3 for alpha chain variable domain of TCR clone 385555 (TRAV12-3, TRAJ10)
SHLPLTGGGNKLTF

SEQ ID NO: 771110 - protein, 13 aa, Homo sapiens
  CDR3 for beta chain variable domain of TCR clone 385555 (TRBV13, TRBJ2-1)
CASILGGRGEQFF

SEQ ID NO: 771111 - protein, 14 aa, Homo sapiens
  CDR3 for alpha chain variable domain of TCR clone 385556 (TRAV1-2, TRAJ8)
CAVREDTGFQKLVF

SEQ ID NO: 771112 - protein, 13 aa, Homo sapiens
  CDR3 for beta chain variable domain of TCR clone 385556 (TRBV18, TRBJ2-3)
CASSTGRTDTQYF

SEQ ID NO: 771113 - protein, 12 aa, Homo sapiens
  CDR3 for alpha chain variable domain of TCR clone 385557 (TRAV1-1, TRAJ8)
CAVRPGFQKLVF

SEQ ID NO: 771114 - protein, 14 aa, Homo sapiens
  CDR3 for beta chain variable domain of TCR clone 385557 (TRBV11-3, TRBJ2-2)
CASSPRQDTGELFF

SEQ ID NO: 771115 - protein, 11 aa, Homo sapiens
  CDR3 for alpha chain variable domain of TCR clone 385558 (TRAV2, TRAJ13)
CASGGYQKVTF

SEQ ID NO: 771116 - protein, 17 aa, Homo sapiens
  CDR3 for beta chain variable domain of TCR clone 385558 (TRBV6-5, TRBJ2-4)
CASRPTPGQGSKNIQYF

SEQ ID NO: 771117 - protein, 13 aa, Homo sapiens
  CDR3 for alpha chain variable domain of TCR clone 385559 (TRAV12-3, TRAJ33)
CAMSVNSNYQLIW

SEQ ID NO: 771118 - protein, 14 aa, Homo sapiens
  CDR3 for beta chain variable domain of TCR clone 385559 (TRBV11-3, TRBJ2-1)
CASSATTSGSNQFF

SEQ ID NO: 771119 - protein, 15 aa, Homo sapiens
  CDR3 for alpha chain variable domain of TCR clone 385560 (TRAV17, TRAJ56)
CATEPFTGANSKLTF

SEQ ID NO: 771120 - protein, 13 aa, Homo sapiens
  CDR3 for beta chain variable domain of TCR clone 385560 (TRBV4-1, TRBJ2-7)
CASSQGQAYEQYF

SEQ ID NO: 771121 - protein, 17 aa, Homo sapiens
  CDR3 for alpha chain variable domain of TCR clone 385561 (TRAV36/DV7, TRAJ52)
CAVAQRAGGTSYGKLPF

SEQ ID NO: 771122 - protein, 13 aa, Homo sapiens
  CDR3 for beta chain variable domain of TCR clone 385561 (TRBV12-4, TRBJ1-2)
CASSLRQGKGYTF

SEQ ID NO: 771123 - protein, 12 aa, Homo sapiens
  CDR3 for alpha chain variable domain of TCR clone 385562 (TRAV4, TRAJ21)
CLVGDNFNKFYF

SEQ ID NO: 771124 - protein, 17 aa, Homo sapiens
  CDR3 for beta chain variable domain of TCR clone 385562 (TRBV3-1, TRBJ2-7)
CTSSQDLTGLSSYEQYF

SEQ ID NO: 771125 - protein, 10 aa, Homo sapiens
  CDR3 for alpha chain variable domain of TCR clone 385563 (TRAV1-1, TRAJ27)
CAAPAGKSTF

SEQ ID NO: 771126 - protein, 14 aa, Homo sapiens
  CDR3 for beta chain variable domain of TCR clone 385563 (TRBV5-5, TRBJ1-5)
CASSGQGVDQPQHF

SEQ ID NO: 771127 - protein, 15 aa, Homo sapiens
  CDR3 for alpha chain variable domain of TCR clone 385564 (TRAV8-4, TRAJ47)
CAVSDPEEYGNKLVF

SEQ ID NO: 771128 - protein, 19 aa, Homo sapiens
  CDR3 for beta chain variable domain of TCR clone 385564 (TRBV7-2, TRBJ2-3)
CASSFLSRNWGGGTDTQYF

SEQ ID NO: 771129 - protein, 12 aa, Homo sapiens
  CDR3 for alpha chain variable domain of TCR clone 385565 (TRAV13-1, TRAJ48)
CAANFGNEKLTF

SEQ ID NO: 771130 - protein, 15 aa, Homo sapiens
  CDR3 for beta chain variable domain of TCR clone 385565 (TRBV11-3, TRBJ2-3)
CASLKDGREGDTQYF

SEQ ID NO: 771131 - protein, 14 aa, Homo sapiens
  CDR3 for alpha chain variable domain of TCR clone 385566 (TRAV23/DV6, TRAJ4)
CAANLSVGYNKLIF

SEQ ID NO: 771132 - protein, 11 aa, Homo sapiens
  CDR3 for beta chain variable domain of TCR clone 385566 (TRBV7-9, TRBJ2-3)
CASSPTDTQYF

SEQ ID NO: 771133 - protein, 15 aa, Homo sapiens
  CDR3 for alpha chain variable domain of TCR clone 385567 (TRAV8-4, TRAJ53)
CAASDGGGSNYKLTF

SEQ ID NO: 771134 - protein, 15 aa, Homo sapiens
  CDR3 for beta chain variable domain of TCR clone 385567 (TRBV19, TRBJ2-5)
CASHGLAGAQETQYF

SEQ ID NO: 771135 - protein, 13 aa, Homo sapiens
  CDR3 for alpha chain variable domain of TCR clone 385568 (TRAV16, TRAJ28)
CALTGAGSYQLTF

SEQ ID NO: 771136 - protein, 12 aa, Homo sapiens
  CDR3 for beta chain variable domain of TCR clone 385568 (TRBV28, TRBJ2-7)
CASTGNHYEQYF

SEQ ID NO: 771137 - protein, 12 aa, Homo sapiens
  CDR3 for alpha chain variable domain of TCR clone 385569 (TRAV13-2, TRAJ23)
CAERHRGGKLIF

SEQ ID NO: 771138 - protein, 15 aa, Homo sapiens
  CDR3 for beta chain variable domain of TCR clone 385569 (TRBV7-9, TRBJ1-6)
CASSSPGRGNSPLHF

SEQ ID NO: 771139 - protein, 11 aa, Homo sapiens
  CDR3 for alpha chain variable domain of TCR clone 385570 (TRAV17, TRAJ49)
CATDAGTQFYF

SEQ ID NO: 771140 - protein, 16 aa, Homo sapiens
  CDR3 for beta chain variable domain of TCR clone 385570 (TRBV7-2, TRBJ1-2)
CASSPTSGTSLGGYTF

SEQ ID NO: 771141 - protein, 15 aa, Homo sapiens
  CDR3 for alpha chain variable domain of TCR clone 385571 (TRAV21, TRAJ22)
CAVRLFFWFCKATDV

SEQ ID NO: 771142 - protein, 14 aa, Homo sapiens
  CDR3 for beta chain variable domain of TCR clone 385571 (TRBV19, TRBJ1-5)
CASRAPDSFLSQHF

SEQ ID NO: 771143 - protein, 14 aa, Homo sapiens
  CDR3 for alpha chain variable domain of TCR clone 385572 (TRAV4, TRAJ26)
CLGGPHNYGQNFVF

SEQ ID NO: 771144 - protein, 17 aa, Homo sapiens
  CDR3 for beta chain variable domain of TCR clone 385572 (TRBV24-1, TRBJ2-1)
CATSDVSTSGTYNEQFF

SEQ ID NO: 771145 - protein, 13 aa, Homo sapiens
  CDR3 for alpha chain variable domain of TCR clone 385573 (TRAV35, TRAJ32)
CAGVGGATNKLIF

SEQ ID NO: 771146 - protein, 17 aa, Homo sapiens
  CDR3 for beta chain variable domain of TCR clone 385573 (TRBV4-3, TRBJ2-1)
CASSQFSSGRVSGEQFF

SEQ ID NO: 771147 - protein, 11 aa, Homo sapiens
  CDR3 for alpha chain variable domain of TCR clone 385574 (TRAV35, TRAJ30)
CAGERDDKIIF

SEQ ID NO: 771148 - protein, 15 aa, Homo sapiens
  CDR3 for beta chain variable domain of TCR clone 385574 (TRBV7-9, TRBJ1-6)
CASSSPGRGNSPLHF

SEQ ID NO: 771149 - protein, 14 aa, Homo sapiens
  CDR3 for alpha chain variable domain of TCR clone 385575 (TRAV1-2, TRAJ8)
CAVREDTGFQKLGF

SEQ ID NO: 771150 - protein, 15 aa, Homo sapiens
  CDR3 for beta chain variable domain of TCR clone 385575 (TRBV4-1, TRBJ2-7)
CASSQNTGRLYEQYF

SEQ ID NO: 771151 - protein, 14 aa, Homo sapiens
  CDR3 for alpha chain variable domain of TCR clone 385576 (TRAV12-2, TRAJ17)
CAVLFKAAGNKLPF

SEQ ID NO: 771152 - protein, 11 aa, Homo sapiens
  CDR3 for beta chain variable domain of TCR clone 385576 (TRBV29-1, TRBJ2-5)
CSEDRTGTQYF

SEQ ID NO: 771153 - protein, 16 aa, Homo sapiens
  CDR3 for alpha chain variable domain of TCR clone 385577 (TRAV8-6, TRAJ4)
CAVSPTFSGGYNNLIF

SEQ ID NO: 771154 - protein, 14 aa, Homo sapiens
  CDR3 for beta chain variable domain of TCR clone 385577 (TRBV29-1, TRBJ2-2)
CSVVTSGAPGELFF

SEQ ID NO: 771155 - protein, 18 aa, Homo sapiens
  CDR3 for alpha chain variable domain of TCR clone 385578 (TRAV21, TRAJ52)
CSVRPSPAGGTSYGKLTF

SEQ ID NO: 771156 - protein, 13 aa, Homo sapiens
  CDR3 for beta chain variable domain of TCR clone 385578 (TRBV10-3, TRBJ2-1)
CAISEFSGREQFF

SEQ ID NO: 771157 - protein, 11 aa, Homo sapiens
  CDR3 for alpha chain variable domain of TCR clone 385579 (TRAV12-3, TRAJ43)
CAMSVSNDMRF

SEQ ID NO: 771158 - protein, 16 aa, Homo sapiens
  CDR3 for beta chain variable domain of TCR clone 385579 (TRBV20-1, TRBJ2-1)
CSARDSLVAVYNEQFF

SEQ ID NO: 771159 - protein, 15 aa, Homo sapiens
  CDR3 for alpha chain variable domain of TCR clone 385580 (TRAV3, TRAJ22)
CAVRDRGGSARQLTF

SEQ ID NO: 771160 - protein, 12 aa, Homo sapiens
  CDR3 for beta chain variable domain of TCR clone 385580 (TRBV12-4, TRBJ1-2)
CASSFIWLQLRC

SEQ ID NO: 771161 - protein, 14 aa, Homo sapiens
  CDR3 for alpha chain variable domain of TCR clone 385581 (TRAV12-3, TRAJ10)
SHLPLTGGGNKLTF

SEQ ID NO: 771162 - protein, 15 aa, Homo sapiens
  CDR3 for beta chain variable domain of TCR clone 385581 (TRBV6-1, TRBJ2-3)
CASSERWDSTDTQYF

SEQ ID NO: 771163 - protein, 13 aa, Homo sapiens
  CDR3 for alpha chain variable domain of TCR clone 385582 (TRAV8-3, TRAJ43)
CAVVPYNNNDMRF

SEQ ID NO: 771164 - protein, 15 aa, Homo sapiens
  CDR3 for beta chain variable domain of TCR clone 385582 (TRBV5-1, TRBJ2-7)
CASSLNGGPAREQYF

SEQ ID NO: 771165 - protein, 15 aa, Homo sapiens
  CDR3 for alpha chain variable domain of TCR clone 385583 (TRAV8-4, TRAJ11)
CAVSRALSGYSPLPF

SEQ ID NO: 771166 - protein, 13 aa, Homo sapiens
  CDR3 for beta chain variable domain of TCR clone 385583 (TRBV10-3, TRBJ2-7)
CASKLAVNYEQYF

SEQ ID NO: 771167 - protein, 10 aa, Homo sapiens
  CDR3 for alpha chain variable domain of TCR clone 385584 (TRAV23/DV6, TRAJ57)
CAASSTLSQA

SEQ ID NO: 771168 - protein, 13 aa, Homo sapiens
  CDR3 for beta chain variable domain of TCR clone 385584 (TRBV7-3, TRBJ1-1)
CASSQDWGAEAFF

SEQ ID NO: 771169 - protein, 13 aa, Homo sapiens
  CDR3 for alpha chain variable domain of TCR clone 385585 (TRAV3, TRAJ21)
CAVREPDFNKFYF

SEQ ID NO: 771170 - protein, 15 aa, Homo sapiens
  CDR3 for beta chain variable domain of TCR clone 385585 (TRBV2, TRBJ2-2)
CASSEVGADTGELFF

SEQ ID NO: 771171 - protein, 13 aa, Homo sapiens
  CDR3 for alpha chain variable domain of TCR clone 385586 (TRAV21, TRAJ20)
CAVGLRVDYKLSF

SEQ ID NO: 771172 - protein, 14 aa, Homo sapiens
  CDR3 for beta chain variable domain of TCR clone 385586 (TRBV4-1, TRBJ2-7)
CASRLTSGSYEQYF

SEQ ID NO: 771173 - protein, 12 aa, Homo sapiens
  CDR3 for alpha chain variable domain of TCR clone 385587 (TRAV23/DV6, TRAJ49)
CAATYTGNQSYF

SEQ ID NO: 771174 - protein, 17 aa, Homo sapiens
  CDR3 for beta chain variable domain of TCR clone 385587 (TRBV4-1, TRBJ2-3)
CASSQVLQGGGTDTQYF

SEQ ID NO: 771175 - protein, 14 aa, Homo sapiens
  CDR3 for alpha chain variable domain of TCR clone 385588 (TRAV2, TRAJ23)
CAVMEDNQGGKLIF

SEQ ID NO: 771176 - protein, 22 aa, Homo sapiens
  CDR3 for beta chain variable domain of TCR clone 385588 (TRBV29-1, TRBJ2-5)
TVSNMSPEDSSIYLCSAGTQYF

SEQ ID NO: 771177 - protein, 14 aa, Homo sapiens
  CDR3 for alpha chain variable domain of TCR clone 385589 (TRAV26-1, TRAJ39)
CIVRGSRAGNMLTF

SEQ ID NO: 771178 - protein, 14 aa, Homo sapiens
  CDR3 for beta chain variable domain of TCR clone 385589 (TRBV7-9, TRBJ2-7)
CASSSTGEGYEQYF

SEQ ID NO: 771179 - protein, 15 aa, Homo sapiens
  CDR3 for alpha chain variable domain of TCR clone 385590 (TRAV17, TRAJ37)
CATDGGSSNTGKLIF

SEQ ID NO: 771180 - protein, 14 aa, Homo sapiens
  CDR3 for beta chain variable domain of TCR clone 385590 (TRBV7-2, TRBJ2-1)
CASSLDRRGGEQFF

SEQ ID NO: 771181 - protein, 14 aa, Homo sapiens
  CDR3 for alpha chain variable domain of TCR clone 385591 (TRAV16, TRAJ48)
CALTPGFGNEKLTF

SEQ ID NO: 771182 - protein, 15 aa, Homo sapiens
  CDR3 for beta chain variable domain of TCR clone 385591 (TRBV28, TRBJ2-1)
CASSIIAGGRSEQFF

SEQ ID NO: 771183 - protein, 12 aa, Homo sapiens
  CDR3 for alpha chain variable domain of TCR clone 385592 (TRAV23/DV6, TRAJ53)
CAASKLGSGGSN

SEQ ID NO: 771184 - protein, 14 aa, Homo sapiens
  CDR3 for beta chain variable domain of TCR clone 385592 (TRBV7-9, TRBJ2-3)
CACSLEQGTNTQYF

SEQ ID NO: 771185 - protein, 16 aa, Homo sapiens
  CDR3 for alpha chain variable domain of TCR clone 385593 (TRAV23/DV6, TRAJ9)
CAASIGGNTGGFKTIF

SEQ ID NO: 771186 - protein, 16 aa, Homo sapiens
  CDR3 for beta chain variable domain of TCR clone 385593 (TRBV20-1, TRBJ1-2)
CSASMGQGVANYGYTF

SEQ ID NO: 771187 - protein, 16 aa, Homo sapiens
  CDR3 for alpha chain variable domain of TCR clone 385594 (TRAV20, TRAJ22)
CAVQASSYGSARQLTF

SEQ ID NO: 771188 - protein, 13 aa, Homo sapiens
  CDR3 for beta chain variable domain of TCR clone 385594 (TRBV7-2, TRBJ2-5)
CASSQTSVETQYF

SEQ ID NO: 771189 - protein, 11 aa, Homo sapiens
  CDR3 for alpha chain variable domain of TCR clone 385595 (TRAV13-1, TRAJ52)
AGGTSYGKLTF

SEQ ID NO: 771190 - protein, 16 aa, Homo sapiens
  CDR3 for beta chain variable domain of TCR clone 385595 (TRBV19, TRBJ2-5)
CASSIGGLAAQETQYF

SEQ ID NO: 771191 - protein, 15 aa, Homo sapiens
  CDR3 for alpha chain variable domain of TCR clone 385596 (TRAV23/DV6, TRAJ44)
CAARTLTGTASKLTF

SEQ ID NO: 771192 - protein, 17 aa, Homo sapiens
  CDR3 for beta chain variable domain of TCR clone 385596 (TRBV24-1, TRBJ2-1)
CATSDVTTSGTYNEQFF

SEQ ID NO: 771193 - protein, 14 aa, Homo sapiens
  CDR3 for alpha chain variable domain of TCR clone 385597 (TRAV12-1, TRAJ12)
CVVTRMDSSYKLII

SEQ ID NO: 771194 - protein, 14 aa, Homo sapiens
  CDR3 for beta chain variable domain of TCR clone 385597 (TRBV4-1, TRBJ2-7)
CASSPVAGGDEQYF

SEQ ID NO: 771195 - protein, 17 aa, Homo sapiens
  CDR3 for alpha chain variable domain of TCR clone 385598 (TRAV12-2, TRAJ36)
CAVKDNLFFGTGTRLTV

SEQ ID NO: 771196 - protein, 15 aa, Homo sapiens
  CDR3 for beta chain variable domain of TCR clone 385598 (TRBV28, TRBJ2-2)
CAGTVAGANTGELFF

SEQ ID NO: 771197 - protein, 11 aa, Homo sapiens
  CDR3 for alpha chain variable domain of TCR clone 385599 (TRAV17, TRAJ9)
CGFTGGFRTIF

SEQ ID NO: 771198 - protein, 12 aa, Homo sapiens
  CDR3 for beta chain variable domain of TCR clone 385599 (TRBV29-1, TRBJ2-3)
CSVTGGADTQYF

SEQ ID NO: 771199 - protein, 13 aa, Homo sapiens
  CDR3 for alpha chain variable domain of TCR clone 385600 (TRAV3, TRAJ27)
CAVRPLGAGKSTF

SEQ ID NO: 771200 - protein, 12 aa, Homo sapiens
  CDR3 for beta chain variable domain of TCR clone 385600 (TRBV5-1, TRBJ1-2)
CASSQDTYGYTF

SEQ ID NO: 771201 - protein, 13 aa, Homo sapiens
  CDR3 for alpha chain variable domain of TCR clone 385601 (TRAV13-1, TRAJ21)
CAASIYNFNKFYF

SEQ ID NO: 771202 - protein, 14 aa, Homo sapiens
  CDR3 for beta chain variable domain of TCR clone 385601 (TRBV7-2, TRBJ2-7)
CASSGLAGRGEQYF

SEQ ID NO: 771203 - protein, 15 aa, Homo sapiens
  CDR3 for alpha chain variable domain of TCR clone 385602 (TRAV3, TRAJ9)
CAVRDINTGGFKTIF

SEQ ID NO: 771204 - protein, 14 aa, Homo sapiens
  CDR3 for beta chain variable domain of TCR clone 385602 (TRBV4-1, TRBJ2-3)
CASSQDWSTDTQYF

SEQ ID NO: 771205 - protein, 12 aa, Homo sapiens
  CDR3 for alpha chain variable domain of TCR clone 385603 (TRAV16, TRAJ56)
CAPTGANSKLTF

SEQ ID NO: 771206 - protein, 14 aa, Homo sapiens
  CDR3 for beta chain variable domain of TCR clone 385603 (TRBV7-9, TRBJ2-5)
CASSLAPDQETQYF

SEQ ID NO: 771207 - protein, 12 aa, Homo sapiens
  CDR3 for alpha chain variable domain of TCR clone 385604 (TRAV27, TRAJ41)
RAGRNSGYALNF

SEQ ID NO: 771208 - protein, 15 aa, Homo sapiens
  CDR3 for beta chain variable domain of TCR clone 385604 (TRBV6-3, TRBJ2-7)
CASSSPGTVFYEQYF

SEQ ID NO: 771209 - protein, 16 aa, Homo sapiens
  CDR3 for alpha chain variable domain of TCR clone 385605 (TRAV23/DV6, TRAJ9)
CAASIGGNTGGLKTIF

SEQ ID NO: 771210 - protein, 13 aa, Homo sapiens
  CDR3 for beta chain variable domain of TCR clone 385605 (TRBV7-9, TRBJ1-2)
CASSLKQNYGYTF

SEQ ID NO: 771211 - protein, 11 aa, Homo sapiens
  CDR3 for alpha chain variable domain of TCR clone 385606 (TRAV17, TRAJ9)
CGFTGGCKTIF

SEQ ID NO: 771212 - protein, 14 aa, Homo sapiens
  CDR3 for beta chain variable domain of TCR clone 385606 (TRBV7-9, TRBJ2-2)
CASSLVQDTGELFI

SEQ ID NO: 771213 - protein, 13 aa, Homo sapiens
  CDR3 for alpha chain variable domain of TCR clone 385607 (TRAV17, TRAJ54)
CVTVIQGAQKLVF

SEQ ID NO: 771214 - protein, 15 aa, Homo sapiens
  CDR3 for beta chain variable domain of TCR clone 385607 (TRBV13, TRBJ2-1)
CASSLLSGLNNEQFF

SEQ ID NO: 771215 - protein, 17 aa, Homo sapiens
  CDR3 for alpha chain variable domain of TCR clone 385608 (TRAV20, TRAJ42)
CDVQAWGSGGSQGNLIF

SEQ ID NO: 771216 - protein, 16 aa, Homo sapiens
  CDR3 for beta chain variable domain of TCR clone 385608 (TRBV29-1, TRBJ2-5)
CSVEGLAGDYQETQYF

SEQ ID NO: 771217 - protein, 23 aa, Homo sapiens
  CDR3 for alpha chain variable domain of TCR clone 385609 (TRAV26-1, )
CIADNVGNNHIQNPDPAVYQLRD

SEQ ID NO: 771218 - protein, 12 aa, Homo sapiens
  CDR3 for beta chain variable domain of TCR clone 385609 (TRBV11-2, TRBJ2-2)
CASSLGGGELFF

SEQ ID NO: 771219 - protein, 14 aa, Homo sapiens
  CDR3 for alpha chain variable domain of TCR clone 385610 (TRAV12-3, TRAJ10)
SHLPLTGGGNKLTF

SEQ ID NO: 771220 - protein, 15 aa, Homo sapiens
  CDR3 for beta chain variable domain of TCR clone 385610 (TRBV27, TRBJ2-7)
CASSLGRTGGYEQYF

SEQ ID NO: 771221 - protein, 13 aa, Homo sapiens
  CDR3 for alpha chain variable domain of TCR clone 385611 (TRAV20, TRAJ21)
CAVEGYNFNKFYF

SEQ ID NO: 771222 - protein, 15 aa, Homo sapiens
  CDR3 for beta chain variable domain of TCR clone 385611 (TRBV7-9, TRBJ1-6)
CASSSPGRGNSPLHF

SEQ ID NO: 771223 - protein, 15 aa, Homo sapiens
  CDR3 for alpha chain variable domain of TCR clone 385612 (TRAV3, TRAJ13)
CAVRDIAGGYQKVTF

SEQ ID NO: 771224 - protein, 13 aa, Homo sapiens
  CDR3 for beta chain variable domain of TCR clone 385612 (TRBV2, TRBJ2-2)
CASSKKNTDELFF

SEQ ID NO: 771225 - protein, 15 aa, Homo sapiens
  CDR3 for alpha chain variable domain of TCR clone 385613 (TRAV27, TRAJ38)
CAARRNAGNNRKLIW

SEQ ID NO: 771226 - protein, 15 aa, Homo sapiens
  CDR3 for beta chain variable domain of TCR clone 385613 (TRBV28, TRBJ1-1)
CASTSTRGLNTEAFF

SEQ ID NO: 771227 - protein, 12 aa, Homo sapiens
  CDR3 for alpha chain variable domain of TCR clone 385614 (TRAV12-3, TRAJ20)
CAMVRGDYKLSF

SEQ ID NO: 771228 - protein, 20 aa, Homo sapiens
  CDR3 for beta chain variable domain of TCR clone 385614 (TRBV19, TRBJ2-1)
CASSISRTVTSTRLNNEQFF

SEQ ID NO: 771229 - protein, 16 aa, Homo sapiens
  CDR3 for alpha chain variable domain of TCR clone 385615 (TRAV30, TRAJ24)
CGTEIVDANSWGKFQF

SEQ ID NO: 771230 - protein, 15 aa, Homo sapiens
  CDR3 for beta chain variable domain of TCR clone 385615 (TRBV20-1, TRBJ2-7)
CSARDRISGMDEQYF

SEQ ID NO: 771231 - protein, 16 aa, Homo sapiens
  CDR3 for alpha chain variable domain of TCR clone 385616 (TRAV12-3, TRAJ53)
CAMSPGSGGSNYKLTF

SEQ ID NO: 771232 - protein, 14 aa, Homo sapiens
  CDR3 for beta chain variable domain of TCR clone 385616 (TRBV12-4, TRBJ2-3)
CASSGQGSTDKQYF

SEQ ID NO: 771233 - protein, 14 aa, Homo sapiens
  CDR3 for alpha chain variable domain of TCR clone 385617 (TRAV17, TRAJ43)
CATDHPYNNNDMRF

SEQ ID NO: 771234 - protein, 13 aa, Homo sapiens
  CDR3 for beta chain variable domain of TCR clone 385617 (TRBV10-3, TRBJ1-2)
CAISERDSYGYTF

SEQ ID NO: 771235 - protein, 11 aa, Homo sapiens
  CDR3 for alpha chain variable domain of TCR clone 385618 (TRAV3, TRAJ21)
CAVGNFNKFYF

SEQ ID NO: 771236 - protein, 13 aa, Homo sapiens
  CDR3 for beta chain variable domain of TCR clone 385618 (TRBV28, TRBJ2-7)
CASTPGLAGEQYF

SEQ ID NO: 771237 - protein, 11 aa, Homo sapiens
  CDR3 for alpha chain variable domain of TCR clone 385619 (TRAV12-3, TRAJ27)
CAMANVGKSTF

SEQ ID NO: 771238 - protein, 13 aa, Homo sapiens
  CDR3 for beta chain variable domain of TCR clone 385619 (TRBV20-1, TRBJ1-1)
CSARVGGNTEAFF

SEQ ID NO: 771239 - protein, 13 aa, Homo sapiens
  CDR3 for alpha chain variable domain of TCR clone 385620 (TRAV27, TRAJ8)
CAVGPTGFQKLVF

SEQ ID NO: 771240 - protein, 15 aa, Homo sapiens
  CDR3 for beta chain variable domain of TCR clone 385620 (TRBV6-1, TRBJ2-7)
CASSESMGDFYEQYF

SEQ ID NO: 771241 - protein, 13 aa, Homo sapiens
  CDR3 for alpha chain variable domain of TCR clone 385621 (TRAV8-6, TRAJ49)
CAVITNTGNQFYF

SEQ ID NO: 771242 - protein, 14 aa, Homo sapiens
  CDR3 for beta chain variable domain of TCR clone 385621 (TRBV28, TRBJ2-7)
CAIVGEGNLYEQYF

SEQ ID NO: 771243 - protein, 11 aa, Homo sapiens
  CDR3 for alpha chain variable domain of TCR clone 385622 (TRAV2, TRAJ33)
CAVESNYQLIW

SEQ ID NO: 771244 - protein, 15 aa, Homo sapiens
  CDR3 for beta chain variable domain of TCR clone 385622 (TRBV12-4, TRBJ2-5)
CASSPPTGLQETQYF

SEQ ID NO: 771245 - protein, 12 aa, Homo sapiens
  CDR3 for alpha chain variable domain of TCR clone 385623 (TRAV12-3, TRAJ17)
RAMTLTGNKLTF

SEQ ID NO: 771246 - protein, 15 aa, Homo sapiens
  CDR3 for beta chain variable domain of TCR clone 385623 (TRBV20-1, TRBJ2-7)
CSAGDRVSGMDEQYF

SEQ ID NO: 771247 - protein, 18 aa, Homo sapiens
  CDR3 for alpha chain variable domain of TCR clone 385624 (TRAV17, TRAJ45)
CATSLDLYSGGGADGLTF

SEQ ID NO: 771248 - protein, 14 aa, Homo sapiens
  CDR3 for beta chain variable domain of TCR clone 385624 (TRBV19, TRBJ2-1)
CASGKSTQYNEQFF

SEQ ID NO: 771249 - protein, 15 aa, Homo sapiens
  CDR3 for alpha chain variable domain of TCR clone 385625 (TRAV21, TRAJ40)
CAVRPQTSGTYKYIF

SEQ ID NO: 771250 - protein, 15 aa, Homo sapiens
  CDR3 for beta chain variable domain of TCR clone 385625 (TRBV7-3, TRBJ2-1)
CASSLDGSSYNEQFF

SEQ ID NO: 771251 - protein, 16 aa, Homo sapiens
  CDR3 for alpha chain variable domain of TCR clone 385626 (TRAV14/DV4, TRAJ53)
CAMREGGGGSNYKLTF

SEQ ID NO: 771252 - protein, 15 aa, Homo sapiens
  CDR3 for beta chain variable domain of TCR clone 385626 (TRBV29-1, TRBJ2-1)
CSVRTSLSSYNEQFF

SEQ ID NO: 771253 - protein, 16 aa, Homo sapiens
  CDR3 for alpha chain variable domain of TCR clone 385627 (TRAV26-2, TRAJ45)
CTTASPIGGGADGLTF

SEQ ID NO: 771254 - protein, 20 aa, Homo sapiens
  CDR3 for beta chain variable domain of TCR clone 385627 (TRBV28, TRBJ2-1)
CDSTPIGRSPGLAGGNEQFF

SEQ ID NO: 771255 - protein, 13 aa, Homo sapiens
  CDR3 for alpha chain variable domain of TCR clone 385628 (TRAV6, TRAJ45)
SPFSGGGADGLTF

SEQ ID NO: 771256 - protein, 15 aa, Homo sapiens
  CDR3 for beta chain variable domain of TCR clone 385628 (TRBV4-1, TRBJ2-7)
CASSQQGQGFDEQYF

SEQ ID NO: 771257 - protein, 15 aa, Homo sapiens
  CDR3 for alpha chain variable domain of TCR clone 385629 (TRAV3, TRAJ20)
CAVRDIKLSDYKLSF

SEQ ID NO: 771258 - protein, 15 aa, Homo sapiens
  CDR3 for beta chain variable domain of TCR clone 385629 (TRBV7-9, TRBJ1-6)
CASSSQGRGNSPLHF

SEQ ID NO: 771259 - protein, 14 aa, Homo sapiens
  CDR3 for alpha chain variable domain of TCR clone 385630 (TRAV8-1, TRAJ23)
CAVGTYNKGGKLIF

SEQ ID NO: 771260 - protein, 16 aa, Homo sapiens
  CDR3 for beta chain variable domain of TCR clone 385630 (TRBV18, TRBJ1-5)
CASSPSTGNSNQPQHS

SEQ ID NO: 771261 - protein, 16 aa, Homo sapiens
  CDR3 for alpha chain variable domain of TCR clone 385631 (TRAV3, TRAJ37)
CAVRPHGSGNTGKLIF

SEQ ID NO: 771262 - protein, 13 aa, Homo sapiens
  CDR3 for beta chain variable domain of TCR clone 385631 (TRBV7-9, TRBJ2-5)
CASLPSGRETQYF

SEQ ID NO: 771263 - protein, 16 aa, Homo sapiens
  CDR3 for alpha chain variable domain of TCR clone 385632 (TRAV12-3, TRAJ53)
CAMSPGSGGSNYKLTF

SEQ ID NO: 771264 - protein, 14 aa, Homo sapiens
  CDR3 for beta chain variable domain of TCR clone 385632 (TRBV20-1, TRBJ2-1)
QCSRNRGDLNEQFF

SEQ ID NO: 771265 - protein, 13 aa, Homo sapiens
  CDR3 for alpha chain variable domain of TCR clone 385633 (TRAV16, TRAJ31)
CALSAHNNARLMF

SEQ ID NO: 771266 - protein, 11 aa, Homo sapiens
  CDR3 for beta chain variable domain of TCR clone 385633 (TRBV12-4, TRBJ2-3)
CASTATDTQYF

SEQ ID NO: 771267 - protein, 12 aa, Homo sapiens
  CDR3 for alpha chain variable domain of TCR clone 385634 (TRAV3, TRAJ31)
CAVRPRDPRLMF

SEQ ID NO: 771268 - protein, 17 aa, Homo sapiens
  CDR3 for beta chain variable domain of TCR clone 385634 (TRBV7-9, TRBJ1-5)
CASSASQGGYSNQPQHF

SEQ ID NO: 771269 - protein, 13 aa, Homo sapiens
  CDR3 for alpha chain variable domain of TCR clone 385635 (TRAV2, TRAJ40)
CAVVTSGAYKYIL

SEQ ID NO: 771270 - protein, 12 aa, Homo sapiens
  CDR3 for beta chain variable domain of TCR clone 385635 (TRBV14, TRBJ2-5)
CASSHLKETQYF

SEQ ID NO: 771271 - protein, 13 aa, Homo sapiens
  CDR3 for alpha chain variable domain of TCR clone 385636 (TRAV26-2, TRAJ43)
CMLRAGNNNDMRF

SEQ ID NO: 771272 - protein, 15 aa, Homo sapiens
  CDR3 for beta chain variable domain of TCR clone 385636 (TRBV7-2, TRBJ2-1)
CASTHGTGIYNEQFF

SEQ ID NO: 771273 - protein, 13 aa, Homo sapiens
  CDR3 for alpha chain variable domain of TCR clone 385637 (TRAV3, TRAJ43)
CAVKARNNNDMRF

SEQ ID NO: 771274 - protein, 16 aa, Homo sapiens
  CDR3 for beta chain variable domain of TCR clone 385637 (TRBV12-5, TRBJ2-5)
CASGPRTSGNQETQYF

SEQ ID NO: 771275 - protein, 19 aa, Homo sapiens
  CDR3 for alpha chain variable domain of TCR clone 385638 (TRAV26-1, TRAJ52)
CIVRSHRNAGGTSYGKLTF

SEQ ID NO: 771276 - protein, 15 aa, Homo sapiens
  CDR3 for beta chain variable domain of TCR clone 385638 (TRBV29-1, TRBJ2-1)
CSGRDRKSSYNEQFF

SEQ ID NO: 771277 - protein, 15 aa, Homo sapiens
  CDR3 for alpha chain variable domain of TCR clone 385639 (TRAV26-1, TRAJ40)
CIVRAVPSGTYKYIF

SEQ ID NO: 771278 - protein, 14 aa, Homo sapiens
  CDR3 for beta chain variable domain of TCR clone 385639 (TRBV19, TRBJ2-1)
CASKDTGLANEQFF

SEQ ID NO: 771279 - protein, 17 aa, Homo sapiens
  CDR3 for alpha chain variable domain of TCR clone 385640 (TRAV3, TRAJ6)
CAVRDGPRAGGSYIPTF

SEQ ID NO: 771280 - protein, 15 aa, Homo sapiens
  CDR3 for beta chain variable domain of TCR clone 385640 (TRBV5-1, TRBJ2-3)
CASSSTSGSTDTQYF

SEQ ID NO: 771281 - protein, 13 aa, Homo sapiens
  CDR3 for alpha chain variable domain of TCR clone 385641 (TRAV8-6, TRAJ49)
CAVITNTGNQFYF

SEQ ID NO: 771282 - protein, 17 aa, Homo sapiens
  CDR3 for beta chain variable domain of TCR clone 385641 (TRBV11-2, TRBJ2-1)
CASSFYPPGVEYNEQFF

SEQ ID NO: 771283 - protein, 14 aa, Homo sapiens
  CDR3 for alpha chain variable domain of TCR clone 385642 (TRAV17, TRAJ53)
CALNSGGSNYKLKF

SEQ ID NO: 771284 - protein, 15 aa, Homo sapiens
  CDR3 for beta chain variable domain of TCR clone 385642 (TRBV11-2, TRBJ2-5)
CASSPSTGGYETQYF

SEQ ID NO: 771285 - protein, 13 aa, Homo sapiens
  CDR3 for alpha chain variable domain of TCR clone 385643 (TRAV2, TRAJ29)
CAAGNSGNTPLVL

SEQ ID NO: 771286 - protein, 16 aa, Homo sapiens
  CDR3 for beta chain variable domain of TCR clone 385643 (TRBV7-9, TRBJ1-2)
CASSPGGGAINYGYTF

SEQ ID NO: 771287 - protein, 12 aa, Homo sapiens
  CDR3 for alpha chain variable domain of TCR clone 385644 (TRAV16, TRAJ26)
CASKDGGQNFVF

SEQ ID NO: 771288 - protein, 13 aa, Homo sapiens
  CDR3 for beta chain variable domain of TCR clone 385644 (TRBV25-1, TRBJ1-1)
CASSDRWRAEAFF

SEQ ID NO: 771289 - protein, 13 aa, Homo sapiens
  CDR3 for alpha chain variable domain of TCR clone 385645 (TRAV12-3, TRAJ33)
CAMSVNSNYQLIW

SEQ ID NO: 771290 - protein, 13 aa, Homo sapiens
  CDR3 for beta chain variable domain of TCR clone 385645 (TRBV7-3, TRBJ2-1)
CASSLDSYNEQFF

SEQ ID NO: 771291 - protein, 18 aa, Homo sapiens
  CDR3 for alpha chain variable domain of TCR clone 385646 (TRAV26-1, TRAJ37)
CIVRVDMHGSSNTGKLIF

SEQ ID NO: 771292 - protein, 15 aa, Homo sapiens
  CDR3 for beta chain variable domain of TCR clone 385646 (TRBV20-1, TRBJ2-7)
CSARVVASPLYEQYF

SEQ ID NO: 771293 - protein, 15 aa, Homo sapiens
  CDR3 for alpha chain variable domain of TCR clone 385647 (TRAV3, TRAJ5)
CAVRDRKTGRRALTF

SEQ ID NO: 771294 - protein, 15 aa, Homo sapiens
  CDR3 for beta chain variable domain of TCR clone 385647 (TRBV7-9, TRBJ2-2)
CASGPLDTFLGELFF

SEQ ID NO: 771295 - protein, 16 aa, Homo sapiens
  CDR3 for alpha chain variable domain of TCR clone 385648 (TRAV17, TRAJ52)
CATSNAGGTSYGKLTF

SEQ ID NO: 771296 - protein, 14 aa, Homo sapiens
  CDR3 for beta chain variable domain of TCR clone 385648 (TRBV4-2, TRBJ2-1)
CASGLDRAYNEQFF

SEQ ID NO: 771297 - protein, 15 aa, Homo sapiens
  CDR3 for alpha chain variable domain of TCR clone 385649 (TRAV3, TRAJ22)
CAVRVRGGSARQLTF

SEQ ID NO: 771298 - protein, 16 aa, Homo sapiens
  CDR3 for beta chain variable domain of TCR clone 385649 (TRBV25-1, TRBJ1-1)
CASSGDRDRGRIEAFF

SEQ ID NO: 771299 - protein, 16 aa, Homo sapiens
  CDR3 for alpha chain variable domain of TCR clone 385650 (TRAV35, TRAJ54)
SDVGIYPLQGAQKLVF

SEQ ID NO: 771300 - protein, 15 aa, Homo sapiens
  CDR3 for beta chain variable domain of TCR clone 385650 (TRBV4-1, TRBJ1-4)
CASSDTGGTNEKLFF

SEQ ID NO: 771301 - protein, 14 aa, Homo sapiens
  CDR3 for alpha chain variable domain of TCR clone 385651 (TRAV38-1, TRAJ45)
CASHSGGGDDGLPF

SEQ ID NO: 771302 - protein, 13 aa, Homo sapiens
  CDR3 for beta chain variable domain of TCR clone 385651 (TRBV10-3, TRBJ1-2)
CAISERDSYGYTF

SEQ ID NO: 771303 - protein, 12 aa, Homo sapiens
  CDR3 for alpha chain variable domain of TCR clone 385652 (TRAV17, TRAJ12)
CATLRSSYKLIF

SEQ ID NO: 771304 - protein, 16 aa, Homo sapiens
  CDR3 for beta chain variable domain of TCR clone 385652 (TRBV28, TRBJ2-7)
CASSLFFKTGGPEQYF

SEQ ID NO: 771305 - protein, 14 aa, Homo sapiens
  CDR3 for alpha chain variable domain of TCR clone 385653 (TRAV17, TRAJ37)
CATDGSSNTGKLIF

SEQ ID NO: 771306 - protein, 13 aa, Homo sapiens
  CDR3 for beta chain variable domain of TCR clone 385653 (TRBV11-2, TRBJ2-1)
CASSLDLVNEQCF

SEQ ID NO: 771307 - protein, 14 aa, Homo sapiens
  CDR3 for alpha chain variable domain of TCR clone 385654 (TRAV12-1, TRAJ23)
CVVIVYNQGGKLIF

SEQ ID NO: 771308 - protein, 17 aa, Homo sapiens
  CDR3 for beta chain variable domain of TCR clone 385654 (TRBV13, TRBJ2-3)
CASSLSRVAGGRNTQYF

SEQ ID NO: 771309 - protein, 14 aa, Homo sapiens
  CDR3 for alpha chain variable domain of TCR clone 385655 (TRAV2, TRAJ9)
CAVEDRSGGFKTIF

SEQ ID NO: 771310 - protein, 18 aa, Homo sapiens
  CDR3 for beta chain variable domain of TCR clone 385655 (TRBV25-1, TRBJ2-2)
CHPSLPGGQGAQNRGAVF

SEQ ID NO: 771311 - protein, 16 aa, Homo sapiens
  CDR3 for alpha chain variable domain of TCR clone 385656 (TRAV13-1, TRAJ10)
CAASRKRREEETNSPL

SEQ ID NO: 771312 - protein, 15 aa, Homo sapiens
  CDR3 for beta chain variable domain of TCR clone 385656 (TRBV5-1, TRBJ2-3)
CASGVTSGSTDTQYF

SEQ ID NO: 771313 - protein, 15 aa, Homo sapiens
  CDR3 for alpha chain variable domain of TCR clone 385657 (TRAV3, TRAJ17)
CAVSPKEAAGNKQTF

SEQ ID NO: 771314 - protein, 14 aa, Homo sapiens
  CDR3 for beta chain variable domain of TCR clone 385657 (TRBV5-1, TRBJ2-3)
CASSLFGPTDTQYF

SEQ ID NO: 771315 - protein, 16 aa, Homo sapiens
  CDR3 for alpha chain variable domain of TCR clone 385658 (TRAV3, TRAJ37)
CAVRGKGSGNTGKRIL

SEQ ID NO: 771316 - protein, 15 aa, Homo sapiens
  CDR3 for beta chain variable domain of TCR clone 385658 (TRBV5-1, TRBJ2-7)
CASSLNGGPAREQYF

SEQ ID NO: 771317 - protein, 11 aa, Homo sapiens
  CDR3 for alpha chain variable domain of TCR clone 385659 (TRAV2, TRAJ33)
CAVESNYQLIW

SEQ ID NO: 771318 - protein, 15 aa, Homo sapiens
  CDR3 for beta chain variable domain of TCR clone 385659 (TRBV19, TRBJ1-1)
CASTARQIQNTEAFF

SEQ ID NO: 771319 - protein, 14 aa, Homo sapiens
  CDR3 for alpha chain variable domain of TCR clone 385660 (TRAV8-3, TRAJ10)
CAVGNAGGGNKLTF

SEQ ID NO: 771320 - protein, 16 aa, Homo sapiens
  CDR3 for beta chain variable domain of TCR clone 385660 (TRBV11-2, TRBJ1-2)
CASSLDTGGADYGYAV

SEQ ID NO: 771321 - protein, 17 aa, Homo sapiens
  CDR3 for alpha chain variable domain of TCR clone 385661 (TRAV26-2, TRAJ42)
CILIDVGYGGSQGNLIF

SEQ ID NO: 771322 - protein, 16 aa, Homo sapiens
  CDR3 for beta chain variable domain of TCR clone 385661 (TRBV12-4, TRBJ2-7)
CASSLIGGTGTYEQYF

SEQ ID NO: 771323 - protein, 12 aa, Homo sapiens
  CDR3 for alpha chain variable domain of TCR clone 385662 (TRAV3, TRAJ43)
CAVRDPNNDMRF

SEQ ID NO: 771324 - protein, 16 aa, Homo sapiens
  CDR3 for beta chain variable domain of TCR clone 385662 (TRBV12-4, TRBJ2-1)
CASSAVGQGNGDEQFF

SEQ ID NO: 771325 - protein, 15 aa, Homo sapiens
  CDR3 for alpha chain variable domain of TCR clone 385663 (TRAV3, TRAJ22)
CAVRDRGGSARQLTF

SEQ ID NO: 771326 - protein, 17 aa, Homo sapiens
  CDR3 for beta chain variable domain of TCR clone 385663 (TRBV13, TRBJ2-3)
CAGSLSRVAGGRNTQYF

SEQ ID NO: 771327 - protein, 14 aa, Homo sapiens
  CDR3 for alpha chain variable domain of TCR clone 385664 (TRAV13-1, TRAJ48)
CAASTDFGNEKLIF

SEQ ID NO: 771328 - protein, 14 aa, Homo sapiens
  CDR3 for beta chain variable domain of TCR clone 385664 (TRBV7-2, TRBJ2-2)
CASSSDGHTGELFF

SEQ ID NO: 771329 - protein, 13 aa, Homo sapiens
  CDR3 for alpha chain variable domain of TCR clone 385665 (TRAV3, TRAJ29)
CAVRDIVDTPLVF

SEQ ID NO: 771330 - protein, 14 aa, Homo sapiens
  CDR3 for beta chain variable domain of TCR clone 385665 (TRBV27, TRBJ2-1)
CASSATGGYNEQVF

SEQ ID NO: 771331 - protein, 13 aa, Homo sapiens
  CDR3 for alpha chain variable domain of TCR clone 385666 (TRAV8-4, TRAJ48)
CAVSLFGNEKVTF

SEQ ID NO: 771332 - protein, 12 aa, Homo sapiens
  CDR3 for beta chain variable domain of TCR clone 385666 (TRBV14, TRBJ2-5)
CASSQLKETQYF

SEQ ID NO: 771333 - protein, 15 aa, Homo sapiens
  CDR3 for alpha chain variable domain of TCR clone 385667 (TRAV3, TRAJ3)
CAVRARDSSASKIIF

SEQ ID NO: 771334 - protein, 18 aa, Homo sapiens
  CDR3 for beta chain variable domain of TCR clone 385667 (TRBV25-1, TRBJ1-2)
CASSGLQNGQGLIFGYAF

SEQ ID NO: 771335 - protein, 16 aa, Homo sapiens
  CDR3 for alpha chain variable domain of TCR clone 385668 (TRAV3, TRAJ37)
FAVRGKGSGNTGKLIF

SEQ ID NO: 771336 - protein, 13 aa, Homo sapiens
  CDR3 for beta chain variable domain of TCR clone 385668 (TRBV19, TRBJ1-2)
CASSVPGQDGYTF

SEQ ID NO: 771337 - protein, 14 aa, Homo sapiens
  CDR3 for alpha chain variable domain of TCR clone 385669 (TRAV13-1, TRAJ40)
CAARSTSGTYKYIF

SEQ ID NO: 771338 - protein, 15 aa, Homo sapiens
  CDR3 for beta chain variable domain of TCR clone 385669 (TRBV18, TRBJ1-5)
CASSEPGGNNQPQHF

SEQ ID NO: 771339 - protein, 13 aa, Homo sapiens
  CDR3 for alpha chain variable domain of TCR clone 385670 (TRAV12-2, TRAJ9)
CAVKWAGGFKTIF

SEQ ID NO: 771340 - protein, 13 aa, Homo sapiens
  CDR3 for beta chain variable domain of TCR clone 385670 (TRBV7-2, TRBJ1-2)
CASSLKQNYGYTF

SEQ ID NO: 771341 - protein, 15 aa, Homo sapiens
  CDR3 for alpha chain variable domain of TCR clone 385671 (TRAV8-1, TRAJ42)
CAVRSYGGSQGNLIF

SEQ ID NO: 771342 - protein, 21 aa, Homo sapiens
  CDR3 for beta chain variable domain of TCR clone 385671 (TRBV5-1, TRBJ1-6)
CASSPRGGADSTGGVRSTLHF

SEQ ID NO: 771343 - protein, 14 aa, Homo sapiens
  CDR3 for alpha chain variable domain of TCR clone 385672 (TRAV17, TRAJ16)
CATADFSDGQKLLF

SEQ ID NO: 771344 - protein, 14 aa, Homo sapiens
  CDR3 for beta chain variable domain of TCR clone 385672 (TRBV11-2, TRBJ2-5)
CASSRTGGIETQYF

SEQ ID NO: 771345 - protein, 12 aa, Homo sapiens
  CDR3 for alpha chain variable domain of TCR clone 385673 (TRAV16, TRAJ22)
CALEVSARQLTF

SEQ ID NO: 771346 - protein, 14 aa, Homo sapiens
  CDR3 for beta chain variable domain of TCR clone 385673 (TRBV11-2, TRBJ2-3)
CSSSSIASTDTQYF

SEQ ID NO: 771347 - protein, 16 aa, Homo sapiens
  CDR3 for alpha chain variable domain of TCR clone 385674 (TRAV30, TRAJ24)
CGTEIVDADSWGKFQF

SEQ ID NO: 771348 - protein, 15 aa, Homo sapiens
  CDR3 for beta chain variable domain of TCR clone 385674 (TRBV7-3, TRBJ2-2)
CQQLKAGDLVRGAVF

SEQ ID NO: 771349 - protein, 11 aa, Homo sapiens
  CDR3 for alpha chain variable domain of TCR clone 385675 (TRAV17, TRAJ43)
CATPRSNDMRF

SEQ ID NO: 771350 - protein, 15 aa, Homo sapiens
  CDR3 for beta chain variable domain of TCR clone 385675 (TRBV11-3, TRBJ2-5)
CASSLRGRVQETQYF

SEQ ID NO: 771351 - protein, 19 aa, Homo sapiens
  CDR3 for alpha chain variable domain of TCR clone 385676 (TRAV26-1, TRAJ52)
CIVRAHRNAGGTSYGKLTF

SEQ ID NO: 771352 - protein, 15 aa, Homo sapiens
  CDR3 for beta chain variable domain of TCR clone 385676 (TRBV12-4, TRBJ2-5)
CASSPPTGLQETQCF

SEQ ID NO: 771353 - protein, 19 aa, Homo sapiens
  CDR3 for alpha chain variable domain of TCR clone 385677 (TRAV26-1, TRAJ52)
CIVRAHRNASGTSYGKLTF

SEQ ID NO: 771354 - protein, 15 aa, Homo sapiens
  CDR3 for beta chain variable domain of TCR clone 385677 (TRBV29-1, TRBJ2-1)
CSGRDRKSSYNKQFF

SEQ ID NO: 771355 - protein, 17 aa, Homo sapiens
  CDR3 for alpha chain variable domain of TCR clone 385678 (TRAV8-2, TRAJ17)
CVVSDRRFKAAGNKLTF

SEQ ID NO: 771356 - protein, 18 aa, Homo sapiens
  CDR3 for beta chain variable domain of TCR clone 385678 (TRBV7-9, TRBJ2-7)
CASSLTTSGSRTCYEQYF

SEQ ID NO: 771357 - protein, 16 aa, Homo sapiens
  CDR3 for alpha chain variable domain of TCR clone 385679 (TRAV3, TRAJ10)
CAVRDMRAGGGNKLTF

SEQ ID NO: 771358 - protein, 15 aa, Homo sapiens
  CDR3 for beta chain variable domain of TCR clone 385679 (TRBV7-3, TRBJ2-1)
CASSLGWGRANEQFF

SEQ ID NO: 771359 - protein, 14 aa, Homo sapiens
  CDR3 for alpha chain variable domain of TCR clone 385680 (TRAV12-3, TRAJ57)
CAMSAWGGSEKLVF

SEQ ID NO: 771360 - protein, 13 aa, Homo sapiens
  CDR3 for beta chain variable domain of TCR clone 385680 (TRBV7-3, TRBJ1-1)
CASSQDWGAEALF

SEQ ID NO: 771361 - protein, 13 aa, Homo sapiens
  CDR3 for alpha chain variable domain of TCR clone 385681 (TRAV16, TRAJ27)
FSLRRTNAGKSTF

SEQ ID NO: 771362 - protein, 15 aa, Homo sapiens
  CDR3 for beta chain variable domain of TCR clone 385681 (TRBV18, TRBJ2-1)
CASSPPSASYNEQFF

SEQ ID NO: 771363 - protein, 14 aa, Homo sapiens
  CDR3 for alpha chain variable domain of TCR clone 385682 (TRAV12-1, TRAJ13)
CVVIDSGGYQKVTF

SEQ ID NO: 771364 - protein, 12 aa, Homo sapiens
  CDR3 for beta chain variable domain of TCR clone 385682 (TRBV29-1, TRBJ2-3)
CSVTWGADTQYF

SEQ ID NO: 771365 - protein, 15 aa, Homo sapiens
  CDR3 for alpha chain variable domain of TCR clone 385683 (TRAV13-1, TRAJ32)
CAASIYGGATNKLIF

SEQ ID NO: 771366 - protein, 15 aa, Homo sapiens
  CDR3 for beta chain variable domain of TCR clone 385683 (TRBV5-5, TRBJ1-5)
CASSSTPGSNQPQHF

SEQ ID NO: 771367 - protein, 18 aa, Homo sapiens
  CDR3 for alpha chain variable domain of TCR clone 385684 (TRAV21, TRAJ52)
CAVMPSLAGGTSYGKLTF

SEQ ID NO: 771368 - protein, 17 aa, Homo sapiens
  CDR3 for beta chain variable domain of TCR clone 385684 (TRBV13, TRBJ2-3)
RASSLSRVAGGRNTQYF

SEQ ID NO: 771369 - protein, 17 aa, Homo sapiens
  CDR3 for alpha chain variable domain of TCR clone 385685 (TRAV21, TRAJ52)
CAVGVNAGGTSYGKLTF

SEQ ID NO: 771370 - protein, 16 aa, Homo sapiens
  CDR3 for beta chain variable domain of TCR clone 385685 (TRBV27, TRBJ2-2)
CASSFRGLVRTGELFF

SEQ ID NO: 771371 - protein, 17 aa, Homo sapiens
  CDR3 for alpha chain variable domain of TCR clone 385686 (TRAV4, TRAJ18)
CLVGERSVGSTRGRLYF

SEQ ID NO: 771372 - protein, 14 aa, Homo sapiens
  CDR3 for beta chain variable domain of TCR clone 385686 (TRBV6-5, TRBJ1-2)
CASSYDGTGGGYTV

SEQ ID NO: 771373 - protein, 14 aa, Homo sapiens
  CDR3 for alpha chain variable domain of TCR clone 385687 (TRAV12-3, TRAJ10)
SHLPLTGGGNKLTF

SEQ ID NO: 771374 - protein, 15 aa, Homo sapiens
  CDR3 for beta chain variable domain of TCR clone 385687 (TRBV4-2, TRBJ1-4)
CASSLWTGTNEKLFF

SEQ ID NO: 771375 - protein, 14 aa, Homo sapiens
  CDR3 for alpha chain variable domain of TCR clone 385688 (TRAV1-2, TRAJ8)
CAAREDTGFQKLVF

SEQ ID NO: 771376 - protein, 12 aa, Homo sapiens
  CDR3 for beta chain variable domain of TCR clone 385688 (TRBV11-2, TRBJ2-2)
CASSLGGGELFF

SEQ ID NO: 771377 - protein, 15 aa, Homo sapiens
  CDR3 for alpha chain variable domain of TCR clone 385689 (TRAV14/DV4, TRAJ20)
CTSAMRESNDYKLSF

SEQ ID NO: 771378 - protein, 15 aa, Homo sapiens
  CDR3 for beta chain variable domain of TCR clone 385689 (TRBV7-9, TRBJ1-1)
CASSRPGTANTEAFF

SEQ ID NO: 771379 - protein, 18 aa, Homo sapiens
  CDR3 for alpha chain variable domain of TCR clone 385690 (TRAV26-2, TRAJ54)
CILRDVEVGIQGAQKLVF

SEQ ID NO: 771380 - protein, 15 aa, Homo sapiens
  CDR3 for beta chain variable domain of TCR clone 385690 (TRBV7-9, TRBJ1-1)
CASSLLEQGGTEAFF

SEQ ID NO: 771381 - protein, 14 aa, Homo sapiens
  CDR3 for alpha chain variable domain of TCR clone 385691 (TRAV17, TRAJ16)
CATADFSDGQKLLF

SEQ ID NO: 771382 - protein, 13 aa, Homo sapiens
  CDR3 for beta chain variable domain of TCR clone 385691 (TRBV28, TRBJ2-7)
CASSPSGTYEQYF

SEQ ID NO: 771383 - protein, 15 aa, Homo sapiens
  CDR3 for alpha chain variable domain of TCR clone 385692 (TRAV12-2, TRAJ53)
CAVNGGGGSNYKLTF

SEQ ID NO: 771384 - protein, 14 aa, Homo sapiens
  CDR3 for beta chain variable domain of TCR clone 385692 (TRBV18, TRBJ2-7)
CSSSPRGGAYEQYF

SEQ ID NO: 771385 - protein, 14 aa, Homo sapiens
  CDR3 for alpha chain variable domain of TCR clone 385693 (TRAV20, TRAJ42)
CAVQAGGSQGNLIF

SEQ ID NO: 771386 - protein, 14 aa, Homo sapiens
  CDR3 for beta chain variable domain of TCR clone 385693 (TRBV28, TRBJ1-2)
CASRIQGENYGYTF

SEQ ID NO: 771387 - protein, 16 aa, Homo sapiens
  CDR3 for alpha chain variable domain of TCR clone 385694 (TRAV26-1, TRAJ23)
CIVRPHGTNQGGKLIF

SEQ ID NO: 771388 - protein, 13 aa, Homo sapiens
  CDR3 for beta chain variable domain of TCR clone 385694 (TRBV27, TRBJ2-7)
CASRLTTGYEQYF

SEQ ID NO: 771389 - protein, 14 aa, Homo sapiens
  CDR3 for alpha chain variable domain of TCR clone 385695 (TRAV20, TRAJ10)
CAVRVEGGGNKLTF

SEQ ID NO: 771390 - protein, 18 aa, Homo sapiens
  CDR3 for beta chain variable domain of TCR clone 385695 (TRBV24-1, TRBJ2-1)
CATSDLMFLRRGVHEQFF

SEQ ID NO: 771391 - protein, 15 aa, Homo sapiens
  CDR3 for alpha chain variable domain of TCR clone 385696 (TRAV4, TRAJ4)
CLVGPLSGGYNKLIF

SEQ ID NO: 771392 - protein, 12 aa, Homo sapiens
  CDR3 for beta chain variable domain of TCR clone 385696 (TRBV11-2, TRBJ2-2)
CASSLPTGELFF

SEQ ID NO: 771393 - protein, 15 aa, Homo sapiens
  CDR3 for alpha chain variable domain of TCR clone 385697 (TRAV8-2, TRAJ16)
CVGSDGFSDGQKLLF

SEQ ID NO: 771394 - protein, 15 aa, Homo sapiens
  CDR3 for beta chain variable domain of TCR clone 385697 (TRBV12-4, TRBJ2-5)
CASSPPTGLQETQYF

SEQ ID NO: 771395 - protein, 13 aa, Homo sapiens
  CDR3 for alpha chain variable domain of TCR clone 385698 (TRAV8-6, TRAJ21)
CAVSPSSLNKFYF

SEQ ID NO: 771396 - protein, 18 aa, Homo sapiens
  CDR3 for beta chain variable domain of TCR clone 385698 (TRBV11-2, TRBJ2-3)
CASSLGGASRGASNTQYF

SEQ ID NO: 771397 - protein, 15 aa, Homo sapiens
  CDR3 for alpha chain variable domain of TCR clone 385699 (TRAV21, TRAJ53)
CATLNSGGSNYKLTF

SEQ ID NO: 771398 - protein, 15 aa, Homo sapiens
  CDR3 for beta chain variable domain of TCR clone 385699 (TRBV6-3, TRBJ2-7)
CASSSPVTVFYEQYF

SEQ ID NO: 771399 - protein, 17 aa, Homo sapiens
  CDR3 for alpha chain variable domain of TCR clone 385700 (TRAV3, TRAJ42)
CAVRARDYGGSPGNLIF

SEQ ID NO: 771400 - protein, 14 aa, Homo sapiens
  CDR3 for beta chain variable domain of TCR clone 385700 (TRBV19, TRBJ2-5)
CASSMTGQQETQYF

SEQ ID NO: 771401 - protein, 14 aa, Homo sapiens
  CDR3 for alpha chain variable domain of TCR clone 385701 (TRAV9-2, TRAJ39)
CALYIYNAGNMLTF

SEQ ID NO: 771402 - protein, 15 aa, Homo sapiens
  CDR3 for beta chain variable domain of TCR clone 385701 (TRBV5-7, TRBJ2-6)
CASSHQVSGANVLTF

SEQ ID NO: 771403 - protein, 16 aa, Homo sapiens
  CDR3 for alpha chain variable domain of TCR clone 385702 (TRAV30, TRAJ24)
CGTEIVDADSWGNSSL

SEQ ID NO: 771404 - protein, 16 aa, Homo sapiens
  CDR3 for beta chain variable domain of TCR clone 385702 (TRBV6-1, TRBJ2-1)
CASILRQGSSYNEQFC

SEQ ID NO: 771405 - protein, 14 aa, Homo sapiens
  CDR3 for alpha chain variable domain of TCR clone 385703 (TRAV14/DV4, TRAJ34)
RAMREGRPHRQAHL

SEQ ID NO: 771406 - protein, 17 aa, Homo sapiens
  CDR3 for beta chain variable domain of TCR clone 385703 (TRBV11-2, TRBJ2-1)
CASSLYPPGVEYNEQFF

SEQ ID NO: 771407 - protein, 14 aa, Homo sapiens
  CDR3 for alpha chain variable domain of TCR clone 385704 (TRAV1-2, TRAJ16)
CAVNRFSDGQKLLL

SEQ ID NO: 771408 - protein, 15 aa, Homo sapiens
  CDR3 for beta chain variable domain of TCR clone 385704 (TRBV7-9, TRBJ1-6)
CASSSPGRGNSPLHV

SEQ ID NO: 771409 - protein, 13 aa, Homo sapiens
  CDR3 for alpha chain variable domain of TCR clone 385705 (TRAV38-1, TRAJ42)
CARWGGSQGNLIF

SEQ ID NO: 771410 - protein, 14 aa, Homo sapiens
  CDR3 for beta chain variable domain of TCR clone 385705 (TRBV4-2, TRBJ2-1)
CASGLDRAYNEQFF

SEQ ID NO: 771411 - protein, 14 aa, Homo sapiens
  CDR3 for alpha chain variable domain of TCR clone 385706 (TRAV8-3, TRAJ20)
CAVGHFSNDYKLRF

SEQ ID NO: 771412 - protein, 15 aa, Homo sapiens
  CDR3 for beta chain variable domain of TCR clone 385706 (TRBV6-5, TRBJ2-3)
CASSESGTGEDTQYF

SEQ ID NO: 771413 - protein, 17 aa, Homo sapiens
  CDR3 for alpha chain variable domain of TCR clone 385707 (TRAV3, TRAJ6)
CAVRDGPRAGGSYIPTF

SEQ ID NO: 771414 - protein, 14 aa, Homo sapiens
  CDR3 for beta chain variable domain of TCR clone 385707 (TRBV6-6, TRBJ2-5)
CASSYGGRGETQYF

SEQ ID NO: 771415 - protein, 13 aa, Homo sapiens
  CDR3 for alpha chain variable domain of TCR clone 385708 (TRAV12-1, TRAJ6)
CVVFPVGSYIPTF

SEQ ID NO: 771416 - protein, 14 aa, Homo sapiens
  CDR3 for beta chain variable domain of TCR clone 385708 (TRBV20-1, TRBJ1-3)
CSASPTGAGNTMYF

SEQ ID NO: 771417 - protein, 14 aa, Homo sapiens
  CDR3 for alpha chain variable domain of TCR clone 385709 (TRAV12-2, TRAJ52)
CRCAGGTSYGKLTS

SEQ ID NO: 771418 - protein, 13 aa, Homo sapiens
  CDR3 for beta chain variable domain of TCR clone 385709 (TRBV11-2, TRBJ2-1)
CASSLRLTHEQFF

SEQ ID NO: 771419 - protein, 12 aa, Homo sapiens
  CDR3 for alpha chain variable domain of TCR clone 385710 (TRAV2, TRAJ9)
CAVVAGGFKTIF

SEQ ID NO: 771420 - protein, 14 aa, Homo sapiens
  CDR3 for beta chain variable domain of TCR clone 385710 (TRBV4-2, TRBJ2-1)
CASGLDRAYNEQFF

SEQ ID NO: 771421 - protein, 11 aa, Homo sapiens
  CDR3 for alpha chain variable domain of TCR clone 385711 (TRAV21, TRAJ39)
LLVKAGNMLTF

SEQ ID NO: 771422 - protein, 16 aa, Homo sapiens
  CDR3 for beta chain variable domain of TCR clone 385711 (TRBV9, TRBJ2-7)
CASSVGLGGGTYEQYF

SEQ ID NO: 771423 - protein, 13 aa, Homo sapiens
  CDR3 for alpha chain variable domain of TCR clone 385712 (TRAV35, TRAJ57)
YAGSQGGSEKLVF

SEQ ID NO: 771424 - protein, 14 aa, Homo sapiens
  CDR3 for beta chain variable domain of TCR clone 385712 (TRBV25-1, TRBJ1-1)
CASTHLGGNTEAFF

SEQ ID NO: 771425 - protein, 15 aa, Homo sapiens
  CDR3 for alpha chain variable domain of TCR clone 385713 (TRAV26-1, TRAJ23)
FIVRVLNNQGGKLIF

SEQ ID NO: 771426 - protein, 15 aa, Homo sapiens
  CDR3 for beta chain variable domain of TCR clone 385713 (TRBV7-3, TRBJ2-1)
CASSFGQSNYNEQFF

SEQ ID NO: 771427 - protein, 13 aa, Homo sapiens
  CDR3 for alpha chain variable domain of TCR clone 385714 (TRAV16, TRAJ10)
CAPAREEETNSTL

SEQ ID NO: 771428 - protein, 15 aa, Homo sapiens
  CDR3 for beta chain variable domain of TCR clone 385714 (TRBV6-3, TRBJ2-7)
CASSSPGTVFYEQYF

SEQ ID NO: 771429 - protein, 15 aa, Homo sapiens
  CDR3 for alpha chain variable domain of TCR clone 385715 (TRAV25, TRAJ52)
CAGRPGGTSYGKLTF

SEQ ID NO: 771430 - protein, 14 aa, Homo sapiens
  CDR3 for beta chain variable domain of TCR clone 385715 (TRBV5-7, TRBJ2-3)
CASSYVGQVHTQYF

SEQ ID NO: 771431 - protein, 23 aa, Homo sapiens
  CDR3 for alpha chain variable domain of TCR clone 385716 (TRAV1-1, TRAJ11)
LLQELQMKDSASYFCAGYSTLTF

SEQ ID NO: 771432 - protein, 15 aa, Homo sapiens
  CDR3 for beta chain variable domain of TCR clone 385716 (TRBV28, TRBJ2-7)
CASSVRQVSSYEQYF

SEQ ID NO: 771433 - protein, 15 aa, Homo sapiens
  CDR3 for alpha chain variable domain of TCR clone 385717 (TRAV17, TRAJ6)
CATYLPSGGSYIPTF

SEQ ID NO: 771434 - protein, 16 aa, Homo sapiens
  CDR3 for beta chain variable domain of TCR clone 385717 (TRBV4-1, TRBJ2-7)
CASSHDPTGYSYEQYF

SEQ ID NO: 771435 - protein, 14 aa, Homo sapiens
  CDR3 for alpha chain variable domain of TCR clone 385718 (TRAV30, TRAJ33)
CGTVAPRSNYQLIW

SEQ ID NO: 771436 - protein, 16 aa, Homo sapiens
  CDR3 for beta chain variable domain of TCR clone 385718 (TRBV12-4, TRBJ2-7)
CASSPEGQGSSYEQYF

SEQ ID NO: 771437 - protein, 17 aa, Homo sapiens
  CDR3 for alpha chain variable domain of TCR clone 385719 (TRAV3, TRAJ12)
CAVRDGGRMDSSYKLIF

SEQ ID NO: 771438 - protein, 16 aa, Homo sapiens
  CDR3 for beta chain variable domain of TCR clone 385719 (TRBV10-2, TRBJ1-1)
CASSEFGEGASTEAFF

SEQ ID NO: 771439 - protein, 12 aa, Homo sapiens
  CDR3 for alpha chain variable domain of TCR clone 385720 (TRAV8-3, TRAJ26)
CAGDNYGQNFVS

SEQ ID NO: 771440 - protein, 13 aa, Homo sapiens
  CDR3 for beta chain variable domain of TCR clone 385720 (TRBV20-1, TRBJ1-1)
CSAGTVGNTEAFF

SEQ ID NO: 771441 - protein, 13 aa, Homo sapiens
  CDR3 for alpha chain variable domain of TCR clone 385721 (TRAV30, TRAJ24)
CGTVTDSWGKLQF

SEQ ID NO: 771442 - protein, 14 aa, Homo sapiens
  CDR3 for beta chain variable domain of TCR clone 385721 (TRBV7-2, TRBJ2-7)
CASSLRWEVNEQYF

SEQ ID NO: 771443 - protein, 14 aa, Homo sapiens
  CDR3 for alpha chain variable domain of TCR clone 385722 (TRAV27, TRAJ41)
CAVRTQIPGMRSTS

SEQ ID NO: 771444 - protein, 16 aa, Homo sapiens
  CDR3 for beta chain variable domain of TCR clone 385722 (TRBV5-1, TRBJ2-3)
CASSLGLAVYTDTQYF

SEQ ID NO: 771445 - protein, 12 aa, Homo sapiens
  CDR3 for alpha chain variable domain of TCR clone 385723 (TRAV23/DV6, TRAJ30)
CAASKGDDKIIS

SEQ ID NO: 771446 - protein, 15 aa, Homo sapiens
  CDR3 for beta chain variable domain of TCR clone 385723 (TRBV12-4, TRBJ2-1)
CASRPTRTGYNEQFF

SEQ ID NO: 771447 - protein, 15 aa, Homo sapiens
  CDR3 for alpha chain variable domain of TCR clone 385724 (TRAV8-3, TRAJ15)
CAVGAPNQAGTALIF

SEQ ID NO: 771448 - protein, 14 aa, Homo sapiens
  CDR3 for beta chain variable domain of TCR clone 385724 (TRBV20-1, TRBJ2-1)
CSPNDEASYNEQSF

SEQ ID NO: 771449 - protein, 14 aa, Homo sapiens
  CDR3 for alpha chain variable domain of TCR clone 385725 (TRAV13-1, TRAJ35)
CAASKGGFGNVLHC

SEQ ID NO: 771450 - protein, 14 aa, Homo sapiens
  CDR3 for beta chain variable domain of TCR clone 385725 (TRBV7-3, TRBJ1-1)
CASSLGTGYTEAFF

SEQ ID NO: 771451 - protein, 15 aa, Homo sapiens
  CDR3 for alpha chain variable domain of TCR clone 385726 (TRAV8-3, TRAJ45)
CASSYSGGGADGLTF

SEQ ID NO: 771452 - protein, 16 aa, Homo sapiens
  CDR3 for beta chain variable domain of TCR clone 385726 (TRBV4-1, TRBJ2-6)
CASSRSTGSGANVLTF

SEQ ID NO: 771453 - protein, 16 aa, Homo sapiens
  CDR3 for alpha chain variable domain of TCR clone 385727 (TRAV12-2, TRAJ32)
CAVNLGQGGATNKLIF

SEQ ID NO: 771454 - protein, 15 aa, Homo sapiens
  CDR3 for beta chain variable domain of TCR clone 385727 (TRBV20-1, TRBJ2-7)
CSASGPRAGGREQYF

SEQ ID NO: 771455 - protein, 11 aa, Homo sapiens
  CDR3 for alpha chain variable domain of TCR clone 385728 (TRAV2, TRAJ13)
CASGCYQKVTF

SEQ ID NO: 771456 - protein, 16 aa, Homo sapiens
  CDR3 for beta chain variable domain of TCR clone 385728 (TRBV12-5, TRBJ2-5)
CASGPRTSGNQETQYF

SEQ ID NO: 771457 - protein, 13 aa, Homo sapiens
  CDR3 for alpha chain variable domain of TCR clone 385729 (TRAV13-1, TRAJ39)
CSKYSNAGYMLTF

SEQ ID NO: 771458 - protein, 16 aa, Homo sapiens
  CDR3 for beta chain variable domain of TCR clone 385729 (TRBV20-1, TRBJ1-4)
CSAPGQGLLTNEKLFF

SEQ ID NO: 771459 - protein, 15 aa, Homo sapiens
  CDR3 for alpha chain variable domain of TCR clone 385730 (TRAV3, TRAJ42)
CAVRGGTGSQGNLIF

SEQ ID NO: 771460 - protein, 14 aa, Homo sapiens
  CDR3 for beta chain variable domain of TCR clone 385730 (TRBV12-4, TRBJ2-5)
CASSFGASGGTQYF

SEQ ID NO: 771461 - protein, 15 aa, Homo sapiens
  CDR3 for alpha chain variable domain of TCR clone 385731 (TRAV17, TRAJ57)
CATDWTPGGSEKLVF

SEQ ID NO: 771462 - protein, 13 aa, Homo sapiens
  CDR3 for beta chain variable domain of TCR clone 385731 (TRBV20-1, TRBJ2-5)
CSAATELQETQYF

SEQ ID NO: 771463 - protein, 14 aa, Homo sapiens
  CDR3 for alpha chain variable domain of TCR clone 385732 (TRAV21, TRAJ45)
CAVSSGGGADGLTF

SEQ ID NO: 771464 - protein, 16 aa, Homo sapiens
  CDR3 for beta chain variable domain of TCR clone 385732 (TRBV7-3, TRBJ2-2)
CASSLKRGTLTGELFF

SEQ ID NO: 771465 - protein, 12 aa, Homo sapiens
  CDR3 for alpha chain variable domain of TCR clone 385733 (TRAV16, TRAJ10)
CSRTGGGNKLTL

SEQ ID NO: 771466 - protein, 14 aa, Homo sapiens
  CDR3 for beta chain variable domain of TCR clone 385733 (TRBV19, TRBJ2-1)
CASPTFVLSGEQFF

SEQ ID NO: 771467 - protein, 16 aa, Homo sapiens
  CDR3 for alpha chain variable domain of TCR clone 385734 (TRAV30, TRAJ48)
CGTEIKSNFGNEKLTF

SEQ ID NO: 771468 - protein, 17 aa, Homo sapiens
  CDR3 for beta chain variable domain of TCR clone 385734 (TRBV27, TRBJ2-1)
WASSSGRGGQSADEQFF

SEQ ID NO: 771469 - protein, 13 aa, Homo sapiens
  CDR3 for alpha chain variable domain of TCR clone 385735 (TRAV13-1, TRAJ21)
CAASIYNFNKFYF

SEQ ID NO: 771470 - protein, 16 aa, Homo sapiens
  CDR3 for beta chain variable domain of TCR clone 385735 (TRBV20-1, TRBJ1-4)
CSAPGQGLLTNDKLFF

SEQ ID NO: 771471 - protein, 15 aa, Homo sapiens
  CDR3 for alpha chain variable domain of TCR clone 385736 (TRAV21, TRAJ45)
CAVSYSGGGADGLTF

SEQ ID NO: 771472 - protein, 16 aa, Homo sapiens
  CDR3 for beta chain variable domain of TCR clone 385736 (TRBV20-1, TRBJ1-4)
CSARPYGGELNEKLFF

SEQ ID NO: 771473 - protein, 15 aa, Homo sapiens
  CDR3 for alpha chain variable domain of TCR clone 385737 (TRAV3, TRAJ12)
CAVRDIRDGSYKLIF

SEQ ID NO: 771474 - protein, 15 aa, Homo sapiens
  CDR3 for beta chain variable domain of TCR clone 385737 (TRBV27, TRBJ2-7)
CASSLRNEQGCEQYF

SEQ ID NO: 771475 - protein, 14 aa, Homo sapiens
  CDR3 for alpha chain variable domain of TCR clone 385738 (TRAV1-2, TRAJ16)
CAVNRLSDGQKLLF

SEQ ID NO: 771476 - protein, 15 aa, Homo sapiens
  CDR3 for beta chain variable domain of TCR clone 385738 (TRBV11-3, TRBJ2-3)
CASLKDGREGDTQYF

SEQ ID NO: 771477 - protein, 14 aa, Homo sapiens
  CDR3 for alpha chain variable domain of TCR clone 385739 (TRAV26-1, TRAJ38)
CIADNAGNNSKLIW

SEQ ID NO: 771478 - protein, 13 aa, Homo sapiens
  CDR3 for beta chain variable domain of TCR clone 385739 (TRBV20-1, TRBJ1-1)
CSARGGGNTEASF

SEQ ID NO: 771479 - protein, 15 aa, Homo sapiens
  CDR3 for alpha chain variable domain of TCR clone 385740 (TRAV8-3, TRAJ32)
CAVDLYGGATNKLIF

SEQ ID NO: 771480 - protein, 16 aa, Homo sapiens
  CDR3 for beta chain variable domain of TCR clone 385740 (TRBV7-3, TRBJ2-2)
CASSLKRGTLSGELFF

SEQ ID NO: 771481 - protein, 15 aa, Homo sapiens
  CDR3 for alpha chain variable domain of TCR clone 385741 (TRAV8-3, TRAJ27)
CAVGPSKTNAGKSTF

SEQ ID NO: 771482 - protein, 15 aa, Homo sapiens
  CDR3 for beta chain variable domain of TCR clone 385741 (TRBV19, TRBJ2-7)
CASSPAGSGEALRYF

SEQ ID NO: 771483 - protein, 14 aa, Homo sapiens
  CDR3 for alpha chain variable domain of TCR clone 385742 (TRAV12-3, TRAJ10)
SHLPLTGGGNKLTF

SEQ ID NO: 771484 - protein, 18 aa, Homo sapiens
  CDR3 for beta chain variable domain of TCR clone 385742 (TRBV7-8, TRBJ2-1)
CASSPYLGQRGSNNEQFF

SEQ ID NO: 771485 - protein, 14 aa, Homo sapiens
  CDR3 for alpha chain variable domain of TCR clone 385743 (TRAV12-2, TRAJ17)
CAVLFKAAGNTLTF

SEQ ID NO: 771486 - protein, 17 aa, Homo sapiens
  CDR3 for beta chain variable domain of TCR clone 385743 (TRBV20-1, TRBJ2-2)
CSASGSGQGGLTGGLFF

SEQ ID NO: 771487 - protein, 14 aa, Homo sapiens
  CDR3 for alpha chain variable domain of TCR clone 385744 (TRAV6, TRAJ21)
CALEQGRNFNKFYF

SEQ ID NO: 771488 - protein, 13 aa, Homo sapiens
  CDR3 for beta chain variable domain of TCR clone 385744 (TRBV4-2, TRBJ1-1)
CASSQAGNTEAFF

SEQ ID NO: 771489 - protein, 13 aa, Homo sapiens
  CDR3 for alpha chain variable domain of TCR clone 385745 (TRAV21, TRAJ37)
CAVGSGNTGKLIF

SEQ ID NO: 771490 - protein, 17 aa, Homo sapiens
  CDR3 for beta chain variable domain of TCR clone 385745 (TRBV5-1, TRBJ2-5)
CASSLLGLAANQGTQYF

SEQ ID NO: 771491 - protein, 14 aa, Homo sapiens
  CDR3 for alpha chain variable domain of TCR clone 385746 (TRAV17, TRAJ56)
CATVPAGANSKLTC

SEQ ID NO: 771492 - protein, 15 aa, Homo sapiens
  CDR3 for beta chain variable domain of TCR clone 385746 (TRBV7-8, TRBJ2-1)
CASSLADSLYNEQFF

SEQ ID NO: 771493 - protein, 13 aa, Homo sapiens
  CDR3 for alpha chain variable domain of TCR clone 385747 (TRAV8-3, TRAJ44)
CAVVPGTASKLTF

SEQ ID NO: 771494 - protein, 14 aa, Homo sapiens
  CDR3 for beta chain variable domain of TCR clone 385747 (TRBV11-2, TRBJ2-3)
CASSILARTDTQHF

SEQ ID NO: 771495 - protein, 12 aa, Homo sapiens
  CDR3 for alpha chain variable domain of TCR clone 385748 (TRAV12-3, TRAJ20)
CAMVIGDYKPSF

SEQ ID NO: 771496 - protein, 14 aa, Homo sapiens
  CDR3 for beta chain variable domain of TCR clone 385748 (TRBV5-5, TRBJ1-5)
CASSGQGVDKPQHF

SEQ ID NO: 771497 - protein, 16 aa, Homo sapiens
  CDR3 for alpha chain variable domain of TCR clone 385749 (TRAV1-2, TRAJ10)
CAVRVVLTGGGNKLTF

SEQ ID NO: 771498 - protein, 14 aa, Homo sapiens
  CDR3 for beta chain variable domain of TCR clone 385749 (TRBV12-4, TRBJ1-1)
CASSLGTGGTEAFF

SEQ ID NO: 771499 - protein, 13 aa, Homo sapiens
  CDR3 for alpha chain variable domain of TCR clone 385750 (TRAV12-1, TRAJ6)
CLVFPGGSYIPTF

SEQ ID NO: 771500 - protein, 13 aa, Homo sapiens
  CDR3 for beta chain variable domain of TCR clone 385750 (TRBV7-9, TRBJ1-2)
CASSLKQNYGYTF

SEQ ID NO: 771501 - protein, 16 aa, Homo sapiens
  CDR3 for alpha chain variable domain of TCR clone 385751 (TRAV30, TRAJ24)
CGTEIVDADSWGKFHF

SEQ ID NO: 771502 - protein, 14 aa, Homo sapiens
  CDR3 for beta chain variable domain of TCR clone 385751 (TRBV7-2, TRBJ1-2)
CASSQTGSTYGYTF

SEQ ID NO: 771503 - protein, 14 aa, Homo sapiens
  CDR3 for alpha chain variable domain of TCR clone 385752 (TRAV2, TRAJ3)
CAVRPYSSASTIIF

SEQ ID NO: 771504 - protein, 17 aa, Homo sapiens
  CDR3 for beta chain variable domain of TCR clone 385752 (TRBV7-6, TRBJ2-5)
WSSSSPQAGDPSETQYF

SEQ ID NO: 771505 - protein, 13 aa, Homo sapiens
  CDR3 for alpha chain variable domain of TCR clone 385753 (TRAV8-1, TRAJ30)
CAVNGRRDDKIIC

SEQ ID NO: 771506 - protein, 15 aa, Homo sapiens
  CDR3 for beta chain variable domain of TCR clone 385753 (TRBV5-7, TRBJ1-5)
CASSYGKLWDQPQHF

SEQ ID NO: 771507 - protein, 16 aa, Homo sapiens
  CDR3 for alpha chain variable domain of TCR clone 385754 (TRAV1-2, TRAJ10)
CAVSGVLTGGGNKLTF

SEQ ID NO: 771508 - protein, 12 aa, Homo sapiens
  CDR3 for beta chain variable domain of TCR clone 385754 (TRBV7-8, TRBJ2-7)
CASSLGDREQSF

SEQ ID NO: 771509 - protein, 18 aa, Homo sapiens
  CDR3 for alpha chain variable domain of TCR clone 385755 (TRAV21, TRAJ52)
CAVRPSPAGGTSDGKLTF

SEQ ID NO: 771510 - protein, 15 aa, Homo sapiens
  CDR3 for beta chain variable domain of TCR clone 385755 (TRBV20-1, TRBJ2-5)
CSATPLTGDQETQYF

SEQ ID NO: 771511 - protein, 15 aa, Homo sapiens
  CDR3 for alpha chain variable domain of TCR clone 385756 (TRAV26-1, TRAJ44)
CITRVPFGTASKLTF

SEQ ID NO: 771512 - protein, 17 aa, Homo sapiens
  CDR3 for beta chain variable domain of TCR clone 385756 (TRBV24-1, TRBJ2-4)
CATSDAEARGVRNIQYF

SEQ ID NO: 771513 - protein, 13 aa, Homo sapiens
  CDR3 for alpha chain variable domain of TCR clone 385757 (TRAV8-1, TRAJ15)
CALKNQAGTALIF

SEQ ID NO: 771514 - protein, 15 aa, Homo sapiens
  CDR3 for beta chain variable domain of TCR clone 385757 (TRBV7-3, TRBJ2-7)
CASSLTPTGYDEQYF

SEQ ID NO: 771515 - protein, 17 aa, Homo sapiens
  CDR3 for alpha chain variable domain of TCR clone 385758 (TRAV3, TRAJ38)
CAVRDCLNAGNNRKLIW

SEQ ID NO: 771516 - protein, 16 aa, Homo sapiens
  CDR3 for beta chain variable domain of TCR clone 385758 (TRBV20-1, TRBJ1-4)
CSAPGQGLLTNEKLVF

SEQ ID NO: 771517 - protein, 14 aa, Homo sapiens
  CDR3 for alpha chain variable domain of TCR clone 385759 (TRAV29/DV5, TRAJ36)
CAARRKTGPNNLFF

SEQ ID NO: 771518 - protein, 19 aa, Homo sapiens
  CDR3 for beta chain variable domain of TCR clone 385759 (TRBV7-2, TRBJ2-3)
CASSFLSRNWGGGTDTQYF

SEQ ID NO: 771519 - protein, 13 aa, Homo sapiens
  CDR3 for alpha chain variable domain of TCR clone 385760 (TRAV8-6, TRAJ9)
CAVKNTGGFKTIF

SEQ ID NO: 771520 - protein, 13 aa, Homo sapiens
  CDR3 for beta chain variable domain of TCR clone 385760 (TRBV6-1, TRBJ1-1)
CASSRQGNTEAFF

SEQ ID NO: 771521 - protein, 16 aa, Homo sapiens
  CDR3 for alpha chain variable domain of TCR clone 385761 (TRAV17, TRAJ28)
CATASVSGAGSYQLTF

SEQ ID NO: 771522 - protein, 10 aa, Homo sapiens
  CDR3 for beta chain variable domain of TCR clone 385761 (TRBV7-9, TRBJ2-5)
CQQLGRDQYF

SEQ ID NO: 771523 - protein, 14 aa, Homo sapiens
  CDR3 for alpha chain variable domain of TCR clone 385762 (TRAV21, TRAJ35)
CAVMPIGFGNVLHC

SEQ ID NO: 771524 - protein, 13 aa, Homo sapiens
  CDR3 for beta chain variable domain of TCR clone 385762 (TRBV12-4, TRBJ2-7)
CASSLSGVYEQYF

SEQ ID NO: 771525 - protein, 13 aa, Homo sapiens
  CDR3 for alpha chain variable domain of TCR clone 385763 (TRAV12-2, TRAJ49)
CAVQSVTGNQFYF

SEQ ID NO: 771526 - protein, 12 aa, Homo sapiens
  CDR3 for beta chain variable domain of TCR clone 385763 (TRBV19, TRBJ1-2)
CASSNVGYGYTF

SEQ ID NO: 771527 - protein, 15 aa, Homo sapiens
  CDR3 for alpha chain variable domain of TCR clone 385764 (TRAV26-1, TRAJ58)
CIVRIQETSGSRLTF

SEQ ID NO: 771528 - protein, 13 aa, Homo sapiens
  CDR3 for beta chain variable domain of TCR clone 385764 (TRBV6-5, TRBJ2-1)
CAGIGETSKRESF

SEQ ID NO: 771529 - protein, 14 aa, Homo sapiens
  CDR3 for alpha chain variable domain of TCR clone 385765 (TRAV26-1, TRAJ48)
CNVRVGFGNEKLTF

SEQ ID NO: 771530 - protein, 13 aa, Homo sapiens
  CDR3 for beta chain variable domain of TCR clone 385765 (TRBV11-3, TRBJ2-3)
CASSHDTKDTQYF

SEQ ID NO: 771531 - protein, 12 aa, Homo sapiens
  CDR3 for alpha chain variable domain of TCR clone 385766 (TRAV27, TRAJ36)
CPGMTGANNLFF

SEQ ID NO: 771532 - protein, 14 aa, Homo sapiens
  CDR3 for beta chain variable domain of TCR clone 385766 (TRBV12-4, TRBJ2-3)
CASSLVPSTDTQYF

SEQ ID NO: 771533 - protein, 14 aa, Homo sapiens
  CDR3 for alpha chain variable domain of TCR clone 385767 (TRAV1-2, TRAJ16)
CAVNRFSDGQKLLF

SEQ ID NO: 771534 - protein, 15 aa, Homo sapiens
  CDR3 for beta chain variable domain of TCR clone 385767 (TRBV27, TRBJ2-1)
CASSNWGGSSNEQFF

SEQ ID NO: 771535 - protein, 11 aa, Homo sapiens
  CDR3 for alpha chain variable domain of TCR clone 385768 (TRAV12-3, TRAJ41)
CSMNAREALNF

SEQ ID NO: 771536 - protein, 16 aa, Homo sapiens
  CDR3 for beta chain variable domain of TCR clone 385768 (TRBV7-8, TRBJ2-3)
CASSTEGQRETDTQYF

SEQ ID NO: 771537 - protein, 15 aa, Homo sapiens
  CDR3 for alpha chain variable domain of TCR clone 385769 (TRAV12-1, TRAJ45)
CVVLSGGGGADGLTF

SEQ ID NO: 771538 - protein, 16 aa, Homo sapiens
  CDR3 for beta chain variable domain of TCR clone 385769 (TRBV11-2, TRBJ2-1)
CASSDVAGGSYNEQFF

SEQ ID NO: 771539 - protein, 14 aa, Homo sapiens
  CDR3 for alpha chain variable domain of TCR clone 385770 (TRAV30, TRAJ33)
CGTERRFSNYQLIW

SEQ ID NO: 771540 - protein, 15 aa, Homo sapiens
  CDR3 for beta chain variable domain of TCR clone 385770 (TRBV10-2, TRBJ2-6)
CASSEQGTGANVLTF

SEQ ID NO: 771541 - protein, 11 aa, Homo sapiens
  CDR3 for alpha chain variable domain of TCR clone 385771 (TRAV12-1, TRAJ21)
CVVYNFNKFYF

SEQ ID NO: 771542 - protein, 14 aa, Homo sapiens
  CDR3 for beta chain variable domain of TCR clone 385771 (TRBV19, TRBJ2-7)
CASSMGQGAIEQCF

SEQ ID NO: 771543 - protein, 15 aa, Homo sapiens
  CDR3 for alpha chain variable domain of TCR clone 385772 (TRAV35, TRAJ40)
CAGQLGTSGTYKYIF

SEQ ID NO: 771544 - protein, 14 aa, Homo sapiens
  CDR3 for beta chain variable domain of TCR clone 385772 (TRBV7-3, TRBJ2-1)
CASSLAGGTDEQFC

SEQ ID NO: 771545 - protein, 13 aa, Homo sapiens
  CDR3 for alpha chain variable domain of TCR clone 385773 (TRAV13-1, TRAJ49)
CAAMLYTGNHFYF

SEQ ID NO: 771546 - protein, 15 aa, Homo sapiens
  CDR3 for beta chain variable domain of TCR clone 385773 (TRBV12-4, TRBJ1-5)
CASTRGSGFGQPQHF

SEQ ID NO: 771547 - protein, 16 aa, Homo sapiens
  CDR3 for alpha chain variable domain of TCR clone 385774 (TRAV30, TRAJ24)
CGTEIVDADSWGKFQF

SEQ ID NO: 771548 - protein, 15 aa, Homo sapiens
  CDR3 for beta chain variable domain of TCR clone 385774 (TRBV11-2, TRBJ1-3)
CASSAHSSSGNTIYF

SEQ ID NO: 771549 - protein, 16 aa, Homo sapiens
  CDR3 for alpha chain variable domain of TCR clone 385775 (TRAV4, TRAJ5)
CLVGPEHGHGQGSTYF

SEQ ID NO: 771550 - protein, 15 aa, Homo sapiens
  CDR3 for beta chain variable domain of TCR clone 385775 (TRBV27, TRBJ2-5)
CASSLIPSGGETQYF

SEQ ID NO: 771551 - protein, 15 aa, Homo sapiens
  CDR3 for alpha chain variable domain of TCR clone 385776 (TRAV14/DV4, TRAJ26)
CAMREGQNYGQNFVF

SEQ ID NO: 771552 - protein, 20 aa, Homo sapiens
  CDR3 for beta chain variable domain of TCR clone 385776 (TRBV19, TRBJ2-1)
CASSISRTVTSTRLNNEQFF

SEQ ID NO: 771553 - protein, 13 aa, Homo sapiens
  CDR3 for alpha chain variable domain of TCR clone 385777 (TRAV14/DV4, TRAJ20)
CAMRESNDYKLSF

SEQ ID NO: 771554 - protein, 15 aa, Homo sapiens
  CDR3 for beta chain variable domain of TCR clone 385777 (TRBV7-9, TRBJ1-1)
CASSRPGTDNTEAFF

SEQ ID NO: 771555 - protein, 12 aa, Homo sapiens
  CDR3 for alpha chain variable domain of TCR clone 385778 (TRAV27, TRAJ35)
CAGADFGNVLHC

SEQ ID NO: 771556 - protein, 12 aa, Homo sapiens
  CDR3 for beta chain variable domain of TCR clone 385778 (TRBV20-1, TRBJ2-7)
CSASSGANEQYF

SEQ ID NO: 771557 - protein, 13 aa, Homo sapiens
  CDR3 for alpha chain variable domain of TCR clone 385779 (TRAV14/DV4, TRAJ26)
CAMREAYGQNFVF

SEQ ID NO: 771558 - protein, 19 aa, Homo sapiens
  CDR3 for beta chain variable domain of TCR clone 385779 (TRBV13, TRBJ2-6)
CASSIVHRDRGAGANVLTF

SEQ ID NO: 771559 - protein, 14 aa, Homo sapiens
  CDR3 for alpha chain variable domain of TCR clone 385780 (TRAV3, TRAJ7)
CAVREEEREQQPRF

SEQ ID NO: 771560 - protein, 12 aa, Homo sapiens
  CDR3 for beta chain variable domain of TCR clone 385780 (TRBV7-8, TRBJ2-7)
CASSLGDREQYF

SEQ ID NO: 771561 - protein, 14 aa, Homo sapiens
  CDR3 for alpha chain variable domain of TCR clone 385781 (TRAV12-1, TRAJ9)
CVVNRRTGGFKTIF

SEQ ID NO: 771562 - protein, 14 aa, Homo sapiens
  CDR3 for beta chain variable domain of TCR clone 385781 (TRBV28, TRBJ1-2)
CASRIQGANYGYTF

SEQ ID NO: 771563 - protein, 12 aa, Homo sapiens
  CDR3 for alpha chain variable domain of TCR clone 385782 (TRAV17, TRAJ20)
CATYSNDYKLSF

SEQ ID NO: 771564 - protein, 14 aa, Homo sapiens
  CDR3 for beta chain variable domain of TCR clone 385782 (TRBV19, TRBJ2-1)
CASPTFVLSGEQFF

SEQ ID NO: 771565 - protein, 14 aa, Homo sapiens
  CDR3 for alpha chain variable domain of TCR clone 385783 (TRAV9-2, TRAJ6)
CALSDPGGSYIPTF

SEQ ID NO: 771566 - protein, 12 aa, Homo sapiens
  CDR3 for beta chain variable domain of TCR clone 385783 (TRBV7-8, TRBJ2-7)
CASSLGDREQYF

SEQ ID NO: 771567 - protein, 16 aa, Homo sapiens
  CDR3 for alpha chain variable domain of TCR clone 385784 (TRAV3, TRAJ21)
CAVRDIERGNFNKFYF

SEQ ID NO: 771568 - protein, 13 aa, Homo sapiens
  CDR3 for beta chain variable domain of TCR clone 385784 (TRBV27, TRBJ2-7)
CASSLTTGYEHYF

SEQ ID NO: 771569 - protein, 17 aa, Homo sapiens
  CDR3 for alpha chain variable domain of TCR clone 385785 (TRAV3, TRAJ42)
CAVRDRDYGGSQGNLIF

SEQ ID NO: 771570 - protein, 13 aa, Homo sapiens
  CDR3 for beta chain variable domain of TCR clone 385785 (TRBV7-2, TRBJ2-2)
CASSSVRAGELFF

SEQ ID NO: 771571 - protein, 16 aa, Homo sapiens
  CDR3 for alpha chain variable domain of TCR clone 385786 (TRAV12-2, TRAJ13)
CAVKKTGGTRKLPFEL

SEQ ID NO: 771572 - protein, 16 aa, Homo sapiens
  CDR3 for beta chain variable domain of TCR clone 385786 (TRBV7-3, TRBJ2-3)
CASSLSGYRPEDTQYF

SEQ ID NO: 771573 - protein, 14 aa, Homo sapiens
  CDR3 for alpha chain variable domain of TCR clone 385787 (TRAV26-2, TRAJ56)
CILRATGANSKLTF

SEQ ID NO: 771574 - protein, 13 aa, Homo sapiens
  CDR3 for beta chain variable domain of TCR clone 385787 (TRBV27, TRBJ1-1)
CASSLSIGAEAFF

SEQ ID NO: 771575 - protein, 15 aa, Homo sapiens
  CDR3 for alpha chain variable domain of TCR clone 385788 (TRAV21, TRAJ43)
CAVRPSKAVFDDMRF

SEQ ID NO: 771576 - protein, 14 aa, Homo sapiens
  CDR3 for beta chain variable domain of TCR clone 385788 (TRBV11-2, TRBJ1-5)
CASSSRTGNQPQHF

SEQ ID NO: 771577 - protein, 13 aa, Homo sapiens
  CDR3 for alpha chain variable domain of TCR clone 385789 (TRAV20, TRAJ49)
CAVQARTGNQFYF

SEQ ID NO: 771578 - protein, 11 aa, Homo sapiens
  CDR3 for beta chain variable domain of TCR clone 385789 (TRBV7-2, TRBJ2-3)
CASSLGDTQYF

SEQ ID NO: 771579 - protein, 11 aa, Homo sapiens
  CDR3 for alpha chain variable domain of TCR clone 385790 (TRAV3, TRAJ21)
CAWGNFNKFYF

SEQ ID NO: 771580 - protein, 16 aa, Homo sapiens
  CDR3 for beta chain variable domain of TCR clone 385790 (TRBV19, TRBJ2-1)
CACSKAGPSSYNEQFF

SEQ ID NO: 771581 - protein, 13 aa, Homo sapiens
  CDR3 for alpha chain variable domain of TCR clone 385791 (TRAV21, TRAJ57)
RAVTQGGSEKLVF

SEQ ID NO: 771582 - protein, 13 aa, Homo sapiens
  CDR3 for beta chain variable domain of TCR clone 385791 (TRBV12-4, TRBJ1-1)
CASSPGTGFEAFF

SEQ ID NO: 771583 - protein, 15 aa, Homo sapiens
  CDR3 for alpha chain variable domain of TCR clone 385792 (TRAV17, TRAJ57)
CATGPSQGGSEKLVF

SEQ ID NO: 771584 - protein, 12 aa, Homo sapiens
  CDR3 for beta chain variable domain of TCR clone 385792 (TRBV5-4, TRBJ2-7)
CASSLEAYEQYF

SEQ ID NO: 771585 - protein, 14 aa, Homo sapiens
  CDR3 for alpha chain variable domain of TCR clone 385793 (TRAV12-2, TRAJ15)
CAPHTGQAGTALIF

SEQ ID NO: 771586 - protein, 13 aa, Homo sapiens
  CDR3 for beta chain variable domain of TCR clone 385793 (TRBV29-1, TRBJ2-1)
CSVEGGRVNEQFF

SEQ ID NO: 771587 - protein, 13 aa, Homo sapiens
  CDR3 for alpha chain variable domain of TCR clone 385794 (TRAV8-6, TRAJ49)
CAVITNTGSQFYF

SEQ ID NO: 771588 - protein, 14 aa, Homo sapiens
  CDR3 for beta chain variable domain of TCR clone 385794 (TRBV19, TRBJ2-1)
CASEVTGARNEQFF

SEQ ID NO: 771589 - protein, 11 aa, Homo sapiens
  CDR3 for alpha chain variable domain of TCR clone 385795 (TRAV12-1, TRAJ30)
CVVNGQDKIIF

SEQ ID NO: 771590 - protein, 14 aa, Homo sapiens
  CDR3 for beta chain variable domain of TCR clone 385795 (TRBV7-8, TRBJ2-3)
CASSLEAGTDTQYF

SEQ ID NO: 771591 - protein, 13 aa, Homo sapiens
  CDR3 for alpha chain variable domain of TCR clone 385796 (TRAV2, TRAJ11)
CAVEEIGYSTLSF

SEQ ID NO: 771592 - protein, 17 aa, Homo sapiens
  CDR3 for beta chain variable domain of TCR clone 385796 (TRBV7-2, TRBJ2-1)
CASSRGTSGAVGWEQFF

SEQ ID NO: 771593 - protein, 15 aa, Homo sapiens
  CDR3 for alpha chain variable domain of TCR clone 385797 (TRAV8-4, TRAJ37)
CAVSRGSGNTGKLIF

SEQ ID NO: 771594 - protein, 15 aa, Homo sapiens
  CDR3 for beta chain variable domain of TCR clone 385797 (TRBV7-2, TRBJ1-2)
CASSPRAGWNYGYTF

SEQ ID NO: 771595 - protein, 15 aa, Homo sapiens
  CDR3 for alpha chain variable domain of TCR clone 385798 (TRAV8-6, TRAJ6)
CAVSGESGGSYIHTF

SEQ ID NO: 771596 - protein, 14 aa, Homo sapiens
  CDR3 for beta chain variable domain of TCR clone 385798 (TRBV9, TRBJ2-4)
CASSPSGTSGFQYF

SEQ ID NO: 771597 - protein, 16 aa, Homo sapiens
  CDR3 for alpha chain variable domain of TCR clone 385799 (TRAV12-2, TRAJ32)
CAVNLGQGGATNKLIF

SEQ ID NO: 771598 - protein, 17 aa, Homo sapiens
  CDR3 for beta chain variable domain of TCR clone 385799 (TRBV18, TRBJ2-1)
CASSPLAAGAGDNEQFF

SEQ ID NO: 771599 - protein, 18 aa, Homo sapiens
  CDR3 for alpha chain variable domain of TCR clone 385800 (TRAV13-1, TRAJ52)
CAAKNPNAGGTSYGKMTF

SEQ ID NO: 771600 - protein, 15 aa, Homo sapiens
  CDR3 for beta chain variable domain of TCR clone 385800 (TRBV6-1, TRBJ2-3)
CASSERGGITDTQYV

SEQ ID NO: 771601 - protein, 12 aa, Homo sapiens
  CDR3 for alpha chain variable domain of TCR clone 385801 (TRAV12-3, TRAJ17)
CAMTLTGNKLTF

SEQ ID NO: 771602 - protein, 16 aa, Homo sapiens
  CDR3 for beta chain variable domain of TCR clone 385801 (TRBV7-3, TRBJ2-1)
CASSLSGGVHYNEQFF

SEQ ID NO: 771603 - protein, 15 aa, Homo sapiens
  CDR3 for alpha chain variable domain of TCR clone 385802 (TRAV8-4, TRAJ10)
CAVSDGPGGGNNLTF

SEQ ID NO: 771604 - protein, 13 aa, Homo sapiens
  CDR3 for beta chain variable domain of TCR clone 385802 (TRBV28, TRBJ1-3)
CASSFLGSGTIYF

SEQ ID NO: 771605 - protein, 13 aa, Homo sapiens
  CDR3 for alpha chain variable domain of TCR clone 385803 (TRAV27, TRAJ29)
CAGAHSGNSPLVF

SEQ ID NO: 771606 - protein, 14 aa, Homo sapiens
  CDR3 for beta chain variable domain of TCR clone 385803 (TRBV7-9, TRBJ2-7)
CASSIGQGAGEQYF

SEQ ID NO: 771607 - protein, 14 aa, Homo sapiens
  CDR3 for alpha chain variable domain of TCR clone 385804 (TRAV8-1, TRAJ4)
CAVKFSGGYNKLIF

SEQ ID NO: 771608 - protein, 14 aa, Homo sapiens
  CDR3 for beta chain variable domain of TCR clone 385804 (TRBV11-2, TRBJ1-1)
CASSTQRGRTEAFF

SEQ ID NO: 771609 - protein, 13 aa, Homo sapiens
  CDR3 for alpha chain variable domain of TCR clone 385805 (TRAV2, TRAJ29)
CAEQTSGNTPLVF

SEQ ID NO: 771610 - protein, 13 aa, Homo sapiens
  CDR3 for beta chain variable domain of TCR clone 385805 (TRBV28, TRBJ1-2)
CASSPGNRNGYTF

SEQ ID NO: 771611 - protein, 16 aa, Homo sapiens
  CDR3 for alpha chain variable domain of TCR clone 385806 (TRAV12-3, TRAJ18)
CAIRGSRGSTLGRLYF

SEQ ID NO: 771612 - protein, 19 aa, Homo sapiens
  CDR3 for beta chain variable domain of TCR clone 385806 (TRBV6-3, TRBJ2-7)
CASSYRTGLAGGVSGEQYF

SEQ ID NO: 771613 - protein, 14 aa, Homo sapiens
  CDR3 for alpha chain variable domain of TCR clone 385807 (TRAV30, TRAJ33)
CGTEMRFSNYQLIW

SEQ ID NO: 771614 - protein, 16 aa, Homo sapiens
  CDR3 for beta chain variable domain of TCR clone 385807 (TRBV7-3, TRBJ2-2)
CASSLKRGTLSGELFF

SEQ ID NO: 771615 - protein, 13 aa, Homo sapiens
  CDR3 for alpha chain variable domain of TCR clone 385808 (TRAV23/DV6, TRAJ47)
CAASIRNGIWQQT

SEQ ID NO: 771616 - protein, 13 aa, Homo sapiens
  CDR3 for beta chain variable domain of TCR clone 385808 (TRBV19, TRBJ1-2)
CASSQGQVYGYTF

SEQ ID NO: 771617 - protein, 16 aa, Homo sapiens
  CDR3 for alpha chain variable domain of TCR clone 385809 (TRAV12-3, TRAJ53)
CAMSPGSGGSNYKLTF

SEQ ID NO: 771618 - protein, 16 aa, Homo sapiens
  CDR3 for beta chain variable domain of TCR clone 385809 (TRBV7-3, TRBJ2-3)
CASSLSGYRPEDTQYF

SEQ ID NO: 771619 - protein, 14 aa, Homo sapiens
  CDR3 for alpha chain variable domain of TCR clone 385810 (TRAV16, TRAJ57)
CALSSPGGSEKLVF

SEQ ID NO: 771620 - protein, 14 aa, Homo sapiens
  CDR3 for beta chain variable domain of TCR clone 385810 (TRBV7-9, TRBJ1-2)
CASSRQGANYGYTI

SEQ ID NO: 771621 - protein, 14 aa, Homo sapiens
  CDR3 for alpha chain variable domain of TCR clone 385811 (TRAV23/DV6, TRAJ37)
CAASTSSNPGKLIF

SEQ ID NO: 771622 - protein, 12 aa, Homo sapiens
  CDR3 for beta chain variable domain of TCR clone 385811 (TRBV14, TRBJ2-5)
CASSHLKETQYF

SEQ ID NO: 771623 - protein, 13 aa, Homo sapiens
  CDR3 for alpha chain variable domain of TCR clone 385812 (TRAV21, TRAJ27)
CAALNTNAGKSAF

SEQ ID NO: 771624 - protein, 14 aa, Homo sapiens
  CDR3 for beta chain variable domain of TCR clone 385812 (TRBV27, TRBJ1-1)
CASSLLSGLSEAFF

SEQ ID NO: 771625 - protein, 10 aa, Homo sapiens
  CDR3 for alpha chain variable domain of TCR clone 385813 (TRAV12-2, TRAJ52)
RSTSYAKLTF

SEQ ID NO: 771626 - protein, 11 aa, Homo sapiens
  CDR3 for beta chain variable domain of TCR clone 385813 (TRBV11-2, TRBJ2-2)
CASSLPGELFF

SEQ ID NO: 771627 - protein, 15 aa, Homo sapiens
  CDR3 for alpha chain variable domain of TCR clone 385814 (TRAV3, TRAJ9)
CAVRARNTGGFKTIF

SEQ ID NO: 771628 - protein, 15 aa, Homo sapiens
  CDR3 for beta chain variable domain of TCR clone 385814 (TRBV27, TRBJ1-1)
RASSPYADPYTEAFF

SEQ ID NO: 771629 - protein, 14 aa, Homo sapiens
  CDR3 for alpha chain variable domain of TCR clone 385815 (TRAV12-3, TRAJ10)
SHLPLTGGGNKLTF

SEQ ID NO: 771630 - protein, 14 aa, Homo sapiens
  CDR3 for beta chain variable domain of TCR clone 385815 (TRBV12-5, TRBJ2-5)
CASGSRTHQETTYF

SEQ ID NO: 771631 - protein, 13 aa, Homo sapiens
  CDR3 for alpha chain variable domain of TCR clone 385816 (TRAV2, TRAJ12)
CAVRADSSYKLIF

SEQ ID NO: 771632 - protein, 13 aa, Homo sapiens
  CDR3 for beta chain variable domain of TCR clone 385816 (TRBV20-1, TRBJ2-1)
CSARSSPRDEQFF

SEQ ID NO: 771633 - protein, 13 aa, Homo sapiens
  CDR3 for alpha chain variable domain of TCR clone 385817 (TRAV35, TRAJ36)
CAGPRIGANNLFF

SEQ ID NO: 771634 - protein, 14 aa, Homo sapiens
  CDR3 for beta chain variable domain of TCR clone 385817 (TRBV28, TRBJ2-5)
CQQPPVVVPRDQYF

SEQ ID NO: 771635 - protein, 15 aa, Homo sapiens
  CDR3 for alpha chain variable domain of TCR clone 385818 (TRAV2, TRAJ9)
CAVEDRGTGGFKTIF

SEQ ID NO: 771636 - protein, 13 aa, Homo sapiens
  CDR3 for beta chain variable domain of TCR clone 385818 (TRBV19, TRBJ2-7)
CASSAGHGYEQYF

SEQ ID NO: 771637 - protein, 12 aa, Homo sapiens
  CDR3 for alpha chain variable domain of TCR clone 385819 (TRAV12-3, TRAJ37)
CAVRGNTGKLIF

SEQ ID NO: 771638 - protein, 14 aa, Homo sapiens
  CDR3 for beta chain variable domain of TCR clone 385819 (TRBV19, TRBJ2-1)
CASEVTGARNEQFF

SEQ ID NO: 771639 - protein, 11 aa, Homo sapiens
  CDR3 for alpha chain variable domain of TCR clone 385820 (TRAV35, TRAJ30)
CAPGGDDKIIF

SEQ ID NO: 771640 - protein, 13 aa, Homo sapiens
  CDR3 for beta chain variable domain of TCR clone 385820 (TRBV10-3, TRBJ2-7)
CASKLAVNYEQYF

SEQ ID NO: 771641 - protein, 11 aa, Homo sapiens
  CDR3 for alpha chain variable domain of TCR clone 385821 (TRAV12-1, TRAJ21)
CVVYNFNKFYF

SEQ ID NO: 771642 - protein, 14 aa, Homo sapiens
  CDR3 for beta chain variable domain of TCR clone 385821 (TRBV9, TRBJ2-4)
CASSPSGTSGVQYF

SEQ ID NO: 771643 - protein, 13 aa, Homo sapiens
  CDR3 for alpha chain variable domain of TCR clone 385822 (TRAV38-1, TRAJ7)
CAFMMDGNNRLAF

SEQ ID NO: 771644 - protein, 12 aa, Homo sapiens
  CDR3 for beta chain variable domain of TCR clone 385822 (TRBV7-8, TRBJ2-7)
CASSLGDREQYF

SEQ ID NO: 771645 - protein, 16 aa, Homo sapiens
  CDR3 for alpha chain variable domain of TCR clone 385823 (TRAV8-3, TRAJ28)
CAVPPQRGAGSYQLTF

SEQ ID NO: 771646 - protein, 13 aa, Homo sapiens
  CDR3 for beta chain variable domain of TCR clone 385823 (TRBV7-6, TRBJ2-3)
CASSLRSDKTQYF

SEQ ID NO: 771647 - protein, 14 aa, Homo sapiens
  CDR3 for alpha chain variable domain of TCR clone 385824 (TRAV1-2, TRAJ8)
CAVREDTGFQKLVF

SEQ ID NO: 771648 - protein, 15 aa, Homo sapiens
  CDR3 for beta chain variable domain of TCR clone 385824 (TRBV6-3, TRBJ2-7)
CASSSPGAVFCERDV

SEQ ID NO: 771649 - protein, 14 aa, Homo sapiens
  CDR3 for alpha chain variable domain of TCR clone 385825 (TRAV12-2, TRAJ40)
CAVKIPSGTYKYIF

SEQ ID NO: 771650 - protein, 18 aa, Homo sapiens
  CDR3 for beta chain variable domain of TCR clone 385825 (TRBV11-2, TRBJ2-3)
CASSLGGASRGAPNKQYF

SEQ ID NO: 771651 - protein, 14 aa, Homo sapiens
  CDR3 for alpha chain variable domain of TCR clone 385826 (TRAV2, TRAJ9)
CAVEDRSGGFKTIF

SEQ ID NO: 771652 - protein, 13 aa, Homo sapiens
  CDR3 for beta chain variable domain of TCR clone 385826 (TRBV12-4, TRBJ1-5)
RASSPDRAQPQHF

SEQ ID NO: 771653 - protein, 18 aa, Homo sapiens
  CDR3 for alpha chain variable domain of TCR clone 385827 (TRAV13-1, TRAJ52)
CAAKNPNAGGTSYGKLTF

SEQ ID NO: 771654 - protein, 11 aa, Homo sapiens
  CDR3 for beta chain variable domain of TCR clone 385827 (TRBV29-1, TRBJ2-5)
CSEDRTGTQSF

SEQ ID NO: 771655 - protein, 14 aa, Homo sapiens
  CDR3 for alpha chain variable domain of TCR clone 385828 (TRAV12-2, TRAJ40)
CAVRIPSGTYKYIF

SEQ ID NO: 771656 - protein, 14 aa, Homo sapiens
  CDR3 for beta chain variable domain of TCR clone 385828 (TRBV20-1, TRBJ1-1)
CSAQTRIGGTEAVF

SEQ ID NO: 771657 - protein, 12 aa, Homo sapiens
  CDR3 for alpha chain variable domain of TCR clone 385829 (TRAV17, TRAJ43)
CATDAFPADMRF

SEQ ID NO: 771658 - protein, 13 aa, Homo sapiens
  CDR3 for beta chain variable domain of TCR clone 385829 (TRBV19, TRBJ1-2)
CASSRGQVYGYTF

SEQ ID NO: 771659 - protein, 13 aa, Homo sapiens
  CDR3 for alpha chain variable domain of TCR clone 385830 (TRAV35, TRAJ48)
CAGHEFGNEKLTF

SEQ ID NO: 771660 - protein, 15 aa, Homo sapiens
  CDR3 for beta chain variable domain of TCR clone 385830 (TRBV27, TRBJ2-7)
CSSSPQREGQREQYF

SEQ ID NO: 771661 - protein, 13 aa, Homo sapiens
  CDR3 for alpha chain variable domain of TCR clone 385831 (TRAV8-3, TRAJ54)
CAVSIQGAQKLVF

SEQ ID NO: 771662 - protein, 13 aa, Homo sapiens
  CDR3 for beta chain variable domain of TCR clone 385831 (TRBV9, TRBJ2-1)
CASSPSGGSEQFF

SEQ ID NO: 771663 - protein, 14 aa, Homo sapiens
  CDR3 for alpha chain variable domain of TCR clone 385832 (TRAV1-2, TRAJ16)
CAVNRCSDGQKLLF

SEQ ID NO: 771664 - protein, 11 aa, Homo sapiens
  CDR3 for beta chain variable domain of TCR clone 385832 (TRBV11-2, TRBJ2-2)
CASSLPGELFF

SEQ ID NO: 771665 - protein, 12 aa, Homo sapiens
  CDR3 for alpha chain variable domain of TCR clone 385833 (TRAV16, TRAJ10)
CSRTGGGNKLTY

SEQ ID NO: 771666 - protein, 13 aa, Homo sapiens
  CDR3 for beta chain variable domain of TCR clone 385833 (TRBV7-3, TRBJ1-1)
CASSQDWGAEAFF

SEQ ID NO: 771667 - protein, 14 aa, Homo sapiens
  CDR3 for alpha chain variable domain of TCR clone 385834 (TRAV17, TRAJ57)
CATDPQGGSEKLVF

SEQ ID NO: 771668 - protein, 18 aa, Homo sapiens
  CDR3 for beta chain variable domain of TCR clone 385834 (TRBV6-6, TRBJ1-3)
CASSYSRWDSISGNTMYF

SEQ ID NO: 771669 - protein, 16 aa, Homo sapiens
  CDR3 for alpha chain variable domain of TCR clone 385835 (TRAV30, TRAJ24)
CGTEIVDADCWGKFQF

SEQ ID NO: 771670 - protein, 14 aa, Homo sapiens
  CDR3 for beta chain variable domain of TCR clone 385835 (TRBV7-9, TRBJ2-4)
CASSLAMGGNIQYF

SEQ ID NO: 771671 - protein, 14 aa, Homo sapiens
  CDR3 for alpha chain variable domain of TCR clone 385836 (TRAV26-1, TRAJ38)
CIADNAGNNRKLIW

SEQ ID NO: 771672 - protein, 16 aa, Homo sapiens
  CDR3 for beta chain variable domain of TCR clone 385836 (TRBV12-4, TRBJ1-4)
CASSLKGIGHGEKLFF

SEQ ID NO: 771673 - protein, 13 aa, Homo sapiens
  CDR3 for alpha chain variable domain of TCR clone 385837 (TRAV30, TRAJ34)
CGTVGYNTDKLIF

SEQ ID NO: 771674 - protein, 16 aa, Homo sapiens
  CDR3 for beta chain variable domain of TCR clone 385837 (TRBV7-9, TRBJ1-2)
CASSLGFSAGEDGYSF

SEQ ID NO: 771675 - protein, 15 aa, Homo sapiens
  CDR3 for alpha chain variable domain of TCR clone 385838 (TRAV38-1, TRAJ37)
CAFIHGSGNTGKLSF

SEQ ID NO: 771676 - protein, 12 aa, Homo sapiens
  CDR3 for beta chain variable domain of TCR clone 385838 (TRBV7-9, TRBJ2-7)
CASSLGSYEQYF

SEQ ID NO: 771677 - protein, 13 aa, Homo sapiens
  CDR3 for alpha chain variable domain of TCR clone 385839 (TRAV16, TRAJ34)
CALTGYNTDKPIF

SEQ ID NO: 771678 - protein, 13 aa, Homo sapiens
  CDR3 for beta chain variable domain of TCR clone 385839 (TRBV6-1, TRBJ2-1)
CASREDGGNEQFF

SEQ ID NO: 771679 - protein, 14 aa, Homo sapiens
  CDR3 for alpha chain variable domain of TCR clone 385840 (TRAV26-1, TRAJ34)
CIVRVAYNTDKLIF

SEQ ID NO: 771680 - protein, 17 aa, Homo sapiens
  CDR3 for beta chain variable domain of TCR clone 385840 (TRBV24-1, TRBJ2-1)
CATSDVSTSGTYNEQFF

SEQ ID NO: 771681 - protein, 16 aa, Homo sapiens
  CDR3 for alpha chain variable domain of TCR clone 385841 (TRAV30, TRAJ24)
CGTEIVDADSWGKFQF

SEQ ID NO: 771682 - protein, 16 aa, Homo sapiens
  CDR3 for beta chain variable domain of TCR clone 385841 (TRBV12-4, TRBJ2-7)
CASSLSGGTGTYEQYF

SEQ ID NO: 771683 - protein, 12 aa, Homo sapiens
  CDR3 for alpha chain variable domain of TCR clone 385842 (TRAV13-1, TRAJ21)
CAAKEGFNKFYF

SEQ ID NO: 771684 - protein, 12 aa, Homo sapiens
  CDR3 for beta chain variable domain of TCR clone 385842 (TRBV11-2, TRBJ2-2)
CASSLGGGELFL

SEQ ID NO: 771685 - protein, 17 aa, Homo sapiens
  CDR3 for alpha chain variable domain of TCR clone 385843 (TRAV3, TRAJ6)
CAVRDGPRAGGSYIPTI

SEQ ID NO: 771686 - protein, 13 aa, Homo sapiens
  CDR3 for beta chain variable domain of TCR clone 385843 (TRBV4-1, TRBJ2-2)
CASSQENTGELFF

SEQ ID NO: 771687 - protein, 10 aa, Homo sapiens
  CDR3 for alpha chain variable domain of TCR clone 385844 (TRAV23/DV6, TRAJ45)
TGGGADGLTF

SEQ ID NO: 771688 - protein, 12 aa, Homo sapiens
  CDR3 for beta chain variable domain of TCR clone 385844 (TRBV5-7, TRBJ1-1)
CASSLGRGKAFF

SEQ ID NO: 771689 - protein, 14 aa, Homo sapiens
  CDR3 for alpha chain variable domain of TCR clone 385845 (TRAV1-2, TRAJ8)
CAVREDTGFQTLAF

SEQ ID NO: 771690 - protein, 13 aa, Homo sapiens
  CDR3 for beta chain variable domain of TCR clone 385845 (TRBV7-6, TRBJ1-2)
CASSLVADYGYTF

SEQ ID NO: 771691 - protein, 20 aa, Homo sapiens
  CDR3 for alpha chain variable domain of TCR clone 385846 (TRAV26-1, TRAJ42)
CCVLLHRQTYYGGSQGNLIF

SEQ ID NO: 771692 - protein, 16 aa, Homo sapiens
  CDR3 for beta chain variable domain of TCR clone 385846 (TRBV7-3, TRBJ2-2)
CAISLKRGTLSGELFF

SEQ ID NO: 771693 - protein, 14 aa, Homo sapiens
  CDR3 for alpha chain variable domain of TCR clone 385847 (TRAV20, TRAJ56)
CAVQFGGANSKLTF

SEQ ID NO: 771694 - protein, 15 aa, Homo sapiens
  CDR3 for beta chain variable domain of TCR clone 385847 (TRBV6-6, TRBJ2-7)
CASSYSYGGSYEQYF

SEQ ID NO: 771695 - protein, 12 aa, Homo sapiens
  CDR3 for alpha chain variable domain of TCR clone 385848 (TRAV1-1, TRAJ39)
CAVPVVGNMLTF

SEQ ID NO: 771696 - protein, 15 aa, Homo sapiens
  CDR3 for beta chain variable domain of TCR clone 385848 (TRBV19, TRBJ2-4)
CASSIGLAGANIQYF

SEQ ID NO: 771697 - protein, 15 aa, Homo sapiens
  CDR3 for alpha chain variable domain of TCR clone 385849 (TRAV26-1, TRAJ29)
CIVRVEGSGNTPLVF

SEQ ID NO: 771698 - protein, 14 aa, Homo sapiens
  CDR3 for beta chain variable domain of TCR clone 385849 (TRBV18, TRBJ2-5)
CAGSPGVSQETQYF

SEQ ID NO: 771699 - protein, 13 aa, Homo sapiens
  CDR3 for alpha chain variable domain of TCR clone 385850 (TRAV23/DV6, TRAJ58)
CAASVIRGSRLTV

SEQ ID NO: 771700 - protein, 13 aa, Homo sapiens
  CDR3 for beta chain variable domain of TCR clone 385850 (TRBV2, TRBJ1-6)
CADSGSYNSPLHF

SEQ ID NO: 771701 - protein, 13 aa, Homo sapiens
  CDR3 for alpha chain variable domain of TCR clone 385851 (TRAV12-1, TRAJ33)
CGDAPDSNYQLIW

SEQ ID NO: 771702 - protein, 14 aa, Homo sapiens
  CDR3 for beta chain variable domain of TCR clone 385851 (TRBV13, TRBJ2-7)
CASSLKGASYEQNF

SEQ ID NO: 771703 - protein, 13 aa, Homo sapiens
  CDR3 for alpha chain variable domain of TCR clone 385852 (TRAV20, TRAJ33)
CAVRMHSNYQLIW

SEQ ID NO: 771704 - protein, 15 aa, Homo sapiens
  CDR3 for beta chain variable domain of TCR clone 385852 (TRBV7-9, TRBJ2-2)
CASGPLDTFPGELFF

SEQ ID NO: 771705 - protein, 15 aa, Homo sapiens
  CDR3 for alpha chain variable domain of TCR clone 385853 (TRAV8-3, TRAJ27)
CAVGPSKTNAGKSTF

SEQ ID NO: 771706 - protein, 15 aa, Homo sapiens
  CDR3 for beta chain variable domain of TCR clone 385853 (TRBV7-2, TRBJ2-1)
CASSSGLVGGNERFF

SEQ ID NO: 771707 - protein, 14 aa, Homo sapiens
  CDR3 for alpha chain variable domain of TCR clone 385854 (TRAV16, TRAJ3)
CALSQYSSASKIIF

SEQ ID NO: 771708 - protein, 15 aa, Homo sapiens
  CDR3 for beta chain variable domain of TCR clone 385854 (TRBV11-2, TRBJ1-3)
CASSIWGSYGNTIYF

SEQ ID NO: 771709 - protein, 18 aa, Homo sapiens
  CDR3 for alpha chain variable domain of TCR clone 385855 (TRAV13-1, TRAJ52)
CVAKNPNAGGTSYGKLTF

SEQ ID NO: 771710 - protein, 18 aa, Homo sapiens
  CDR3 for beta chain variable domain of TCR clone 385855 (TRBV4-1, TRBJ1-4)
CASSPRTGGAWTNEKLFF

SEQ ID NO: 771711 - protein, 15 aa, Homo sapiens
  CDR3 for alpha chain variable domain of TCR clone 385856 (TRAV13-1, TRAJ17)
CAASIERAAGNKLTF

SEQ ID NO: 771712 - protein, 14 aa, Homo sapiens
  CDR3 for beta chain variable domain of TCR clone 385856 (TRBV12-4, TRBJ1-1)
CASSLGTGGTEAFF

SEQ ID NO: 771713 - protein, 13 aa, Homo sapiens
  CDR3 for alpha chain variable domain of TCR clone 385857 (TRAV16, TRAJ31)
CALSAHNNARLMF

SEQ ID NO: 771714 - protein, 15 aa, Homo sapiens
  CDR3 for beta chain variable domain of TCR clone 385857 (TRBV12-4, TRBJ2-5)
CASSPPTGLQETQYF

SEQ ID NO: 771715 - protein, 15 aa, Homo sapiens
  CDR3 for alpha chain variable domain of TCR clone 385858 (TRAV8-3, TRAJ45)
CASSYSGGGADGLTF

SEQ ID NO: 771716 - protein, 14 aa, Homo sapiens
  CDR3 for beta chain variable domain of TCR clone 385858 (TRBV5-1, TRBJ2-5)
CASSLAGKQETQYF

SEQ ID NO: 771717 - protein, 14 aa, Homo sapiens
  CDR3 for alpha chain variable domain of TCR clone 385859 (TRAV12-2, TRAJ17)
CAVLFKAAGNKLTF

SEQ ID NO: 771718 - protein, 13 aa, Homo sapiens
  CDR3 for beta chain variable domain of TCR clone 385859 (TRBV7-9, TRBJ1-2)
CASSLKQNYGDTF

SEQ ID NO: 771719 - protein, 14 aa, Homo sapiens
  CDR3 for alpha chain variable domain of TCR clone 385860 (TRAV9-2, TRAJ39)
CDLYIYNAGNMLTF

SEQ ID NO: 771720 - protein, 13 aa, Homo sapiens
  CDR3 for beta chain variable domain of TCR clone 385860 (TRBV10-3, TRBJ2-7)
CASKLAVNYEQYF

SEQ ID NO: 771721 - protein, 14 aa, Homo sapiens
  CDR3 for alpha chain variable domain of TCR clone 385861 (TRAV1-2, TRAJ16)
CAVNRFSDGQKLLF

SEQ ID NO: 771722 - protein, 14 aa, Homo sapiens
  CDR3 for beta chain variable domain of TCR clone 385861 (TRBV27, TRBJ1-1)
CASSLLSDLSEAFF

SEQ ID NO: 771723 - protein, 14 aa, Homo sapiens
  CDR3 for alpha chain variable domain of TCR clone 385862 (TRAV12-2, TRAJ22)
CAVRVSGSARKLTF

SEQ ID NO: 771724 - protein, 13 aa, Homo sapiens
  CDR3 for beta chain variable domain of TCR clone 385862 (TRBV6-1, TRBJ2-1)
CAGAGTGLHEQFF

SEQ ID NO: 771725 - protein, 23 aa, Homo sapiens
  CDR3 for alpha chain variable domain of TCR clone 385863 (TRAV21, TRAJ32)
CAVEIMVVLQTSSSFELALCLLS

SEQ ID NO: 771726 - protein, 13 aa, Homo sapiens
  CDR3 for beta chain variable domain of TCR clone 385863 (TRBV2, TRBJ1-6)
CASGRGGISPLHF

SEQ ID NO: 771727 - protein, 15 aa, Homo sapiens
  CDR3 for alpha chain variable domain of TCR clone 385864 (TRAV35, TRAJ58)
CAGRRQETSGSRLTF

SEQ ID NO: 771728 - protein, 16 aa, Homo sapiens
  CDR3 for beta chain variable domain of TCR clone 385864 (TRBV2, TRBJ2-1)
CASSSGGSLSYNEQFF

SEQ ID NO: 771729 - protein, 10 aa, Homo sapiens
  CDR3 for alpha chain variable domain of TCR clone 385865 (TRAV30, TRAJ48)
CGIGNEKLTF

SEQ ID NO: 771730 - protein, 14 aa, Homo sapiens
  CDR3 for beta chain variable domain of TCR clone 385865 (TRBV19, TRBJ2-1)
CASSPGLAPNEQFF

SEQ ID NO: 771731 - protein, 15 aa, Homo sapiens
  CDR3 for alpha chain variable domain of TCR clone 385866 (TRAV2, TRAJ24)
CAVEVLSDSWGKFQF

SEQ ID NO: 771732 - protein, 17 aa, Homo sapiens
  CDR3 for beta chain variable domain of TCR clone 385866 (TRBV7-8, TRBJ2-6)
CASSAGTGGAGANVLTF

SEQ ID NO: 771733 - protein, 16 aa, Homo sapiens
  CDR3 for alpha chain variable domain of TCR clone 385867 (TRAV12-2, TRAJ37)
CAVKEKGSSKTGKLIF

SEQ ID NO: 771734 - protein, 12 aa, Homo sapiens
  CDR3 for beta chain variable domain of TCR clone 385867 (TRBV10-1, TRBJ1-5)
CASSDSNQPQHF

SEQ ID NO: 771735 - protein, 14 aa, Homo sapiens
  CDR3 for alpha chain variable domain of TCR clone 385868 (TRAV2, TRAJ9)
CAVEDRSGGFKTIF

SEQ ID NO: 771736 - protein, 14 aa, Homo sapiens
  CDR3 for beta chain variable domain of TCR clone 385868 (TRBV7-3, TRBJ1-1)
CASSPTCGVSEAFF

SEQ ID NO: 771737 - protein, 16 aa, Homo sapiens
  CDR3 for alpha chain variable domain of TCR clone 385869 (TRAV26-1, TRAJ32)
CIVRTNYGGATNKLIF

SEQ ID NO: 771738 - protein, 12 aa, Homo sapiens
  CDR3 for beta chain variable domain of TCR clone 385869 (TRBV12-4, TRBJ2-7)
CASSLGGYEQYF

SEQ ID NO: 771739 - protein, 13 aa, Homo sapiens
  CDR3 for alpha chain variable domain of TCR clone 385870 (TRAV2, TRAJ10)
CAVETGGGNKLTF

SEQ ID NO: 771740 - protein, 16 aa, Homo sapiens
  CDR3 for beta chain variable domain of TCR clone 385870 (TRBV4-3, TRBJ2-2)
CASSHLQGSGTGELFF

SEQ ID NO: 771741 - protein, 16 aa, Homo sapiens
  CDR3 for alpha chain variable domain of TCR clone 385871 (TRAV2, TRAJ4)
CAVADRVSGGYNKLIF

SEQ ID NO: 771742 - protein, 13 aa, Homo sapiens
  CDR3 for beta chain variable domain of TCR clone 385871 (TRBV7-7, TRBJ2-5)
CASSRSGQETQYF

SEQ ID NO: 771743 - protein, 14 aa, Homo sapiens
  CDR3 for alpha chain variable domain of TCR clone 385872 (TRAV8-6, TRAJ37)
CAVRSRSNTGKLIF

SEQ ID NO: 771744 - protein, 15 aa, Homo sapiens
  CDR3 for beta chain variable domain of TCR clone 385872 (TRBV7-9, TRBJ1-6)
CASSSPGRGNSPLHF

SEQ ID NO: 771745 - protein, 16 aa, Homo sapiens
  CDR3 for alpha chain variable domain of TCR clone 385873 (TRAV3, TRAJ37)
CAVRPHGSGNTGKLIF

SEQ ID NO: 771746 - protein, 11 aa, Homo sapiens
  CDR3 for beta chain variable domain of TCR clone 385873 (TRBV10-3, TRBJ2-7)
CAISEGLVQYF

SEQ ID NO: 771747 - protein, 15 aa, Homo sapiens
  CDR3 for alpha chain variable domain of TCR clone 385874 (TRAV21, TRAJ37)
CAVRPTLSNTGKLIF

SEQ ID NO: 771748 - protein, 16 aa, Homo sapiens
  CDR3 for beta chain variable domain of TCR clone 385874 (TRBV24-1, TRBJ2-3)
CATSDCRQDLTDTQYF

SEQ ID NO: 771749 - protein, 13 aa, Homo sapiens
  CDR3 for alpha chain variable domain of TCR clone 385875 (TRAV2, TRAJ15)
CAVASQAGTALIF

SEQ ID NO: 771750 - protein, 14 aa, Homo sapiens
  CDR3 for beta chain variable domain of TCR clone 385875 (TRBV5-8, TRBJ2-3)
CASSLGQGTDTQYF

SEQ ID NO: 771751 - protein, 13 aa, Homo sapiens
  CDR3 for alpha chain variable domain of TCR clone 385876 (TRAV12-2, TRAJ6)
CAVNVSRKLHTYI

SEQ ID NO: 771752 - protein, 15 aa, Homo sapiens
  CDR3 for beta chain variable domain of TCR clone 385876 (TRBV11-2, TRBJ2-1)
CASSSPSTRYNEQFF

SEQ ID NO: 771753 - protein, 13 aa, Homo sapiens
  CDR3 for alpha chain variable domain of TCR clone 385877 (TRAV12-1, TRAJ21)
CVLTLNNFNKFYF

SEQ ID NO: 771754 - protein, 20 aa, Homo sapiens
  CDR3 for beta chain variable domain of TCR clone 385877 (TRBV7-8, TRBJ2-1)
CASSLAHRLAGVRSYNEQFF

SEQ ID NO: 771755 - protein, 11 aa, Homo sapiens
  CDR3 for alpha chain variable domain of TCR clone 385878 (TRAV3, TRAJ21)
CAVGNFNKFYF

SEQ ID NO: 771756 - protein, 15 aa, Homo sapiens
  CDR3 for beta chain variable domain of TCR clone 385878 (TRBV15, TRBJ2-3)
CATSRDPRGTDTQYF

SEQ ID NO: 771757 - protein, 14 aa, Homo sapiens
  CDR3 for alpha chain variable domain of TCR clone 385879 (TRAV13-1, TRAJ23)
CAASRLGRGGKLSF

SEQ ID NO: 771758 - protein, 15 aa, Homo sapiens
  CDR3 for beta chain variable domain of TCR clone 385879 (TRBV7-2, TRBJ2-1)
CASSLVAGRYNEQFF

SEQ ID NO: 771759 - protein, 13 aa, Homo sapiens
  CDR3 for alpha chain variable domain of TCR clone 385880 (TRAV1-2, TRAJ31)
CAVRGYNNARLMS

SEQ ID NO: 771760 - protein, 14 aa, Homo sapiens
  CDR3 for beta chain variable domain of TCR clone 385880 (TRBV12-4, TRBJ1-3)
CASTLTGAGNTIYF

SEQ ID NO: 771761 - protein, 18 aa, Homo sapiens
  CDR3 for alpha chain variable domain of TCR clone 385881 (TRAV21, TRAJ53)
CAVKGEENRGGSNYKLTF

SEQ ID NO: 771762 - protein, 13 aa, Homo sapiens
  CDR3 for beta chain variable domain of TCR clone 385881 (TRBV9, TRBJ2-1)
CASSPSGGSEQFF

SEQ ID NO: 771763 - protein, 16 aa, Homo sapiens
  CDR3 for alpha chain variable domain of TCR clone 385882 (TRAV26-1, TRAJ36)
CIVRVSYQTGANNLFF

SEQ ID NO: 771764 - protein, 15 aa, Homo sapiens
  CDR3 for beta chain variable domain of TCR clone 385882 (TRBV28, TRBJ2-5)
CASSPPWSYQETQYF

SEQ ID NO: 771765 - protein, 11 aa, Homo sapiens
  CDR3 for alpha chain variable domain of TCR clone 385883 (TRAV12-3, TRAJ27)
CAMANAGKSTF

SEQ ID NO: 771766 - protein, 14 aa, Homo sapiens
  CDR3 for beta chain variable domain of TCR clone 385883 (TRBV12-4, TRBJ2-7)
CASSPAGLKYEQYF

SEQ ID NO: 771767 - protein, 15 aa, Homo sapiens
  CDR3 for alpha chain variable domain of TCR clone 385884 (TRAV12-3, TRAJ6)
CAMSAASGGSYIPPF

SEQ ID NO: 771768 - protein, 13 aa, Homo sapiens
  CDR3 for beta chain variable domain of TCR clone 385884 (TRBV20-1, TRBJ1-2)
CSASTERIYGYTF

SEQ ID NO: 771769 - protein, 15 aa, Homo sapiens
  CDR3 for alpha chain variable domain of TCR clone 385885 (TRAV8-3, TRAJ45)
CALSYSGGGADGVTF

SEQ ID NO: 771770 - protein, 13 aa, Homo sapiens
  CDR3 for beta chain variable domain of TCR clone 385885 (TRBV10-3, TRBJ2-7)
CASKLAVNYEQYF

SEQ ID NO: 771771 - protein, 15 aa, Homo sapiens
  CDR3 for alpha chain variable domain of TCR clone 385886 (TRAV2, TRAJ45)
CAVDGTGGGADGLTF

SEQ ID NO: 771772 - protein, 14 aa, Homo sapiens
  CDR3 for beta chain variable domain of TCR clone 385886 (TRBV7-2, TRBJ2-7)
CASSLPPGQGPQYF

SEQ ID NO: 771773 - protein, 12 aa, Homo sapiens
  CDR3 for alpha chain variable domain of TCR clone 385887 (TRAV3, TRAJ27)
CAVRDKAGKSPF

SEQ ID NO: 771774 - protein, 14 aa, Homo sapiens
  CDR3 for beta chain variable domain of TCR clone 385887 (TRBV5-1, TRBJ1-2)
CASSVDSTNYGYTF

SEQ ID NO: 771775 - protein, 13 aa, Homo sapiens
  CDR3 for alpha chain variable domain of TCR clone 385888 (TRAV27, TRAJ41)
CAGEGNSGYALNF

SEQ ID NO: 771776 - protein, 12 aa, Homo sapiens
  CDR3 for beta chain variable domain of TCR clone 385888 (TRBV14, TRBJ2-7)
CASSLYKDEQYF

SEQ ID NO: 771777 - protein, 14 aa, Homo sapiens
  CDR3 for alpha chain variable domain of TCR clone 385889 (TRAV12-2, TRAJ40)
CAVKIPSGTYKYIF

SEQ ID NO: 771778 - protein, 16 aa, Homo sapiens
  CDR3 for beta chain variable domain of TCR clone 385889 (TRBV28, TRBJ2-5)
CASSFSPAGGWETQYV

SEQ ID NO: 771779 - protein, 15 aa, Homo sapiens
  CDR3 for alpha chain variable domain of TCR clone 385890 (TRAV22, TRAJ45)
CAAKYSGGGADGLTF

SEQ ID NO: 771780 - protein, 18 aa, Homo sapiens
  CDR3 for beta chain variable domain of TCR clone 385890 (TRBV11-2, TRBJ2-3)
CASSLGGASRGAPNTQDF

SEQ ID NO: 771781 - protein, 16 aa, Homo sapiens
  CDR3 for alpha chain variable domain of TCR clone 385891 (TRAV12-2, TRAJ28)
CAVLTDSGAGSYKLTF

SEQ ID NO: 771782 - protein, 12 aa, Homo sapiens
  CDR3 for beta chain variable domain of TCR clone 385891 (TRBV9, TRBJ2-2)
CASSLVTGELFF

SEQ ID NO: 771783 - protein, 16 aa, Homo sapiens
  CDR3 for alpha chain variable domain of TCR clone 385892 (TRAV3, TRAJ4)
CAVRPSPSGGSNKLIF

SEQ ID NO: 771784 - protein, 12 aa, Homo sapiens
  CDR3 for beta chain variable domain of TCR clone 385892 (TRBV7-9, TRBJ2-7)
CDSSQGVYEQYF

SEQ ID NO: 771785 - protein, 15 aa, Homo sapiens
  CDR3 for alpha chain variable domain of TCR clone 385893 (TRAV12-2, TRAJ23)
CAVKPIYNQGGKLIF

SEQ ID NO: 771786 - protein, 14 aa, Homo sapiens
  CDR3 for beta chain variable domain of TCR clone 385893 (TRBV5-1, TRBJ2-3)
CASRGQTSTDTQYF

SEQ ID NO: 771787 - protein, 12 aa, Homo sapiens
  CDR3 for alpha chain variable domain of TCR clone 385894 (TRAV12-3, TRAJ17)
CAMTLTGNKLTF

SEQ ID NO: 771788 - protein, 18 aa, Homo sapiens
  CDR3 for beta chain variable domain of TCR clone 385894 (TRBV28, TRBJ2-3)
CASSFHRPGPTSTDTQYF

SEQ ID NO: 771789 - protein, 18 aa, Homo sapiens
  CDR3 for alpha chain variable domain of TCR clone 385895 (TRAV21, TRAJ52)
CAVMPSPAGGTSYGKLTF

SEQ ID NO: 771790 - protein, 14 aa, Homo sapiens
  CDR3 for beta chain variable domain of TCR clone 385895 (TRBV4-1, TRBJ2-2)
CASSQAVNTGELFF

SEQ ID NO: 771791 - protein, 15 aa, Homo sapiens
  CDR3 for alpha chain variable domain of TCR clone 385896 (TRAV27, TRAJ38)
CAGRFDAGNNRKLIW

SEQ ID NO: 771792 - protein, 17 aa, Homo sapiens
  CDR3 for beta chain variable domain of TCR clone 385896 (TRBV4-1, TRBJ2-7)
CASSRDPLGVRGGEQYF

SEQ ID NO: 771793 - protein, 13 aa, Homo sapiens
  CDR3 for alpha chain variable domain of TCR clone 385897 (TRAV36/DV7, TRAJ49)
CAVEANTGNQSYF

SEQ ID NO: 771794 - protein, 13 aa, Homo sapiens
  CDR3 for beta chain variable domain of TCR clone 385897 (TRBV10-3, TRBJ2-7)
CASKLAVNYEQYF

SEQ ID NO: 771795 - protein, 19 aa, Homo sapiens
  CDR3 for alpha chain variable domain of TCR clone 385898 (TRAV4, )
CLVGPHNYDIQNPDPAVSQ

SEQ ID NO: 771796 - protein, 17 aa, Homo sapiens
  CDR3 for beta chain variable domain of TCR clone 385898 (TRBV24-1, TRBJ2-1)
CATSDVSTSGTYNEQFF

SEQ ID NO: 771797 - protein, 15 aa, Homo sapiens
  CDR3 for alpha chain variable domain of TCR clone 385899 (TRAV3, TRAJ22)
CAVRDRGGSARQLTF

SEQ ID NO: 771798 - protein, 11 aa, Homo sapiens
  CDR3 for beta chain variable domain of TCR clone 385899 (TRBV6-3, TRBJ1-1)
CASSDRVGAFF

SEQ ID NO: 771799 - protein, 16 aa, Homo sapiens
  CDR3 for alpha chain variable domain of TCR clone 385900 (TRAV8-3, TRAJ13)
CAVGAYPSGGYQKVTF

SEQ ID NO: 771800 - protein, 13 aa, Homo sapiens
  CDR3 for beta chain variable domain of TCR clone 385900 (TRBV7-9, TRBJ1-2)
CASSLKQNYGHTF

SEQ ID NO: 771801 - protein, 11 aa, Homo sapiens
  CDR3 for alpha chain variable domain of TCR clone 385901 (TRAV2, TRAJ13)
CASGVYQKVTF

SEQ ID NO: 771802 - protein, 16 aa, Homo sapiens
  CDR3 for beta chain variable domain of TCR clone 385901 (TRBV19, TRBJ2-1)
CASSKAGPSSYNEQFF

SEQ ID NO: 771803 - protein, 13 aa, Homo sapiens
  CDR3 for alpha chain variable domain of TCR clone 385902 (TRAV8-3, TRAJ6)
CAVGSGGSYIPTF

SEQ ID NO: 771804 - protein, 14 aa, Homo sapiens
  CDR3 for beta chain variable domain of TCR clone 385902 (TRBV11-2, TRBJ1-1)
CASSTERGRTEAFF

SEQ ID NO: 771805 - protein, 14 aa, Homo sapiens
  CDR3 for alpha chain variable domain of TCR clone 385903 (TRAV8-3, TRAJ17)
CAVALQSCRQQANF

SEQ ID NO: 771806 - protein, 18 aa, Homo sapiens
  CDR3 for beta chain variable domain of TCR clone 385903 (TRBV7-6, TRBJ1-3)
CASSSPIGGDSSGNTIYF

SEQ ID NO: 771807 - protein, 14 aa, Homo sapiens
  CDR3 for alpha chain variable domain of TCR clone 385904 (TRAV35, TRAJ33)
CAGSSQDINYQLIW

SEQ ID NO: 771808 - protein, 14 aa, Homo sapiens
  CDR3 for beta chain variable domain of TCR clone 385904 (TRBV20-1, TRBJ2-1)
CSAQIGGSANEQFF

SEQ ID NO: 771809 - protein, 14 aa, Homo sapiens
  CDR3 for alpha chain variable domain of TCR clone 385905 (TRAV1-2, TRAJ16)
GAVNRFSDGQKLLF

SEQ ID NO: 771810 - protein, 13 aa, Homo sapiens
  CDR3 for beta chain variable domain of TCR clone 385905 (TRBV19, TRBJ2-7)
CASRKAGGSEQYF

SEQ ID NO: 771811 - protein, 12 aa, Homo sapiens
  CDR3 for alpha chain variable domain of TCR clone 385906 (TRAV16, TRAJ10)
CSRTGGGNKLTF

SEQ ID NO: 771812 - protein, 13 aa, Homo sapiens
  CDR3 for beta chain variable domain of TCR clone 385906 (TRBV7-3, TRBJ1-1)
CASSQNWGAEAFF

SEQ ID NO: 771813 - protein, 13 aa, Homo sapiens
  CDR3 for alpha chain variable domain of TCR clone 385907 (TRAV27, TRAJ41)
CAVEGNSGYALNC

SEQ ID NO: 771814 - protein, 14 aa, Homo sapiens
  CDR3 for beta chain variable domain of TCR clone 385907 (TRBV7-2, TRBJ1-1)
CASSFLTGTTEAFF

SEQ ID NO: 771815 - protein, 15 aa, Homo sapiens
  CDR3 for alpha chain variable domain of TCR clone 385908 (TRAV8-2, TRAJ7)
CVVSEGPYYEQQTRF

SEQ ID NO: 771816 - protein, 13 aa, Homo sapiens
  CDR3 for beta chain variable domain of TCR clone 385908 (TRBV19, TRBJ2-1)
CASSMYRVNEQFF

SEQ ID NO: 771817 - protein, 18 aa, Homo sapiens
  CDR3 for alpha chain variable domain of TCR clone 385909 (TRAV2, TRAJ8)
CCLLLCWRGNTGFQKLVF

SEQ ID NO: 771818 - protein, 13 aa, Homo sapiens
  CDR3 for beta chain variable domain of TCR clone 385909 (TRBV6-5, TRBJ2-7)
CASRTSGIHEQYF

SEQ ID NO: 771819 - protein, 15 aa, Homo sapiens
  CDR3 for alpha chain variable domain of TCR clone 385910 (TRAV6, TRAJ52)
LALTAGGTSYGKLTF

SEQ ID NO: 771820 - protein, 14 aa, Homo sapiens
  CDR3 for beta chain variable domain of TCR clone 385910 (TRBV11-2, TRBJ2-1)
CASTTGQGNNEQFF

SEQ ID NO: 771821 - protein, 13 aa, Homo sapiens
  CDR3 for alpha chain variable domain of TCR clone 385911 (TRAV20, TRAJ21)
CAVEGYNFNKFYF

SEQ ID NO: 771822 - protein, 15 aa, Homo sapiens
  CDR3 for beta chain variable domain of TCR clone 385911 (TRBV19, TRBJ2-1)
CASSLETSGYNEQFF

SEQ ID NO: 771823 - protein, 17 aa, Homo sapiens
  CDR3 for alpha chain variable domain of TCR clone 385912 (TRAV3, TRAJ42)
CAVRDRDYGGSQGNLIF

SEQ ID NO: 771824 - protein, 17 aa, Homo sapiens
  CDR3 for beta chain variable domain of TCR clone 385912 (TRBV11-1, TRBJ2-7)
CASSLLDGGDSAYEQYF

SEQ ID NO: 771825 - protein, 12 aa, Homo sapiens
  CDR3 for alpha chain variable domain of TCR clone 385913 (TRAV13-1, TRAJ27)
CAAHTNAGKSTF

SEQ ID NO: 771826 - protein, 14 aa, Homo sapiens
  CDR3 for beta chain variable domain of TCR clone 385913 (TRBV19, TRBJ2-2)
CASGGQGIAGELFF

SEQ ID NO: 771827 - protein, 14 aa, Homo sapiens
  CDR3 for alpha chain variable domain of TCR clone 385914 (TRAV20, TRAJ56)
CAVQFGGANRKLKF

SEQ ID NO: 771828 - protein, 14 aa, Homo sapiens
  CDR3 for beta chain variable domain of TCR clone 385914 (TRBV20-1, TRBJ2-7)
CSAKRGRSSYEQYF

SEQ ID NO: 771829 - protein, 16 aa, Homo sapiens
  CDR3 for alpha chain variable domain of TCR clone 385915 (TRAV3, TRAJ28)
CAVLPSSGAGSYQLTF

SEQ ID NO: 771830 - protein, 18 aa, Homo sapiens
  CDR3 for beta chain variable domain of TCR clone 385915 (TRBV23-1, TRBJ2-7)
CASSQYRRTDSTSSTSGR

SEQ ID NO: 771831 - protein, 11 aa, Homo sapiens
  CDR3 for alpha chain variable domain of TCR clone 385916 (TRAV3, TRAJ21)
CAVGNFNKFYF

SEQ ID NO: 771832 - protein, 16 aa, Homo sapiens
  CDR3 for beta chain variable domain of TCR clone 385916 (TRBV19, TRBJ2-1)
CAGSKAGPSPYNEQFF

SEQ ID NO: 771833 - protein, 16 aa, Homo sapiens
  CDR3 for alpha chain variable domain of TCR clone 385917 (TRAV3, TRAJ37)
CAVRGKGSGNTGKLIF

SEQ ID NO: 771834 - protein, 13 aa, Homo sapiens
  CDR3 for beta chain variable domain of TCR clone 385917 (TRBV12-4, TRBJ1-3)
CASSLASGNTIYF

SEQ ID NO: 771835 - protein, 23 aa, Homo sapiens
  CDR3 for alpha chain variable domain of TCR clone 385918 (TRAV26-1, TRAJ38)
CIADNAGNNHIQNPDPAVYQLRD

SEQ ID NO: 771836 - protein, 13 aa, Homo sapiens
  CDR3 for beta chain variable domain of TCR clone 385918 (TRBV7-2, TRBJ2-2)
CASSLAVTGELFF

SEQ ID NO: 771837 - protein, 14 aa, Homo sapiens
  CDR3 for alpha chain variable domain of TCR clone 385919 (TRAV17, TRAJ45)
CATASGGGADGLTF

SEQ ID NO: 771838 - protein, 17 aa, Homo sapiens
  CDR3 for beta chain variable domain of TCR clone 385919 (TRBV4-2, TRBJ1-1)
CASTQFGGGSGNTEAFF

SEQ ID NO: 771839 - protein, 14 aa, Homo sapiens
  CDR3 for alpha chain variable domain of TCR clone 385920 (TRAV12-1, TRAJ29)
CVVNEGSGNTPLVF

SEQ ID NO: 771840 - protein, 13 aa, Homo sapiens
  CDR3 for beta chain variable domain of TCR clone 385920 (TRBV7-9, TRBJ2-3)
CASSPGYTDTQYF

SEQ ID NO: 771841 - protein, 14 aa, Homo sapiens
  CDR3 for alpha chain variable domain of TCR clone 385921 (TRAV16, TRAJ42)
CALLAGGSQGNLIF

SEQ ID NO: 771842 - protein, 13 aa, Homo sapiens
  CDR3 for beta chain variable domain of TCR clone 385921 (TRBV7-9, TRBJ1-2)
CASSLKQNYGDTF

SEQ ID NO: 771843 - protein, 12 aa, Homo sapiens
  CDR3 for alpha chain variable domain of TCR clone 385922 (TRAV16, TRAJ21)
CALLCNFIKFYF

SEQ ID NO: 771844 - protein, 15 aa, Homo sapiens
  CDR3 for beta chain variable domain of TCR clone 385922 (TRBV3-1, TRBJ2-2)
CASSQAVRETGELFF

SEQ ID NO: 771845 - protein, 12 aa, Homo sapiens
  CDR3 for alpha chain variable domain of TCR clone 385923 (TRAV12-3, TRAJ40)
CAMSSGTYKYIF

SEQ ID NO: 771846 - protein, 20 aa, Homo sapiens
  CDR3 for beta chain variable domain of TCR clone 385923 (TRBV7-8, TRBJ2-2)
CASSHLFTGPTIHITGELFF

SEQ ID NO: 771847 - protein, 14 aa, Homo sapiens
  CDR3 for alpha chain variable domain of TCR clone 385924 (TRAV1-2, TRAJ8)
CAVRADTGFQKLVF

SEQ ID NO: 771848 - protein, 15 aa, Homo sapiens
  CDR3 for beta chain variable domain of TCR clone 385924 (TRBV4-1, TRBJ2-7)
CASSQNTGRLYEQYF

SEQ ID NO: 771849 - protein, 15 aa, Homo sapiens
  CDR3 for alpha chain variable domain of TCR clone 385925 (TRAV8-6, TRAJ6)
CAVSGESGGSYIPTF

SEQ ID NO: 771850 - protein, 13 aa, Homo sapiens
  CDR3 for beta chain variable domain of TCR clone 385925 (TRBV20-1, TRBJ2-5)
CSAATELQETQYF

SEQ ID NO: 771851 - protein, 12 aa, Homo sapiens
  CDR3 for alpha chain variable domain of TCR clone 385926 (TRAV12-3, TRAJ17)
CAMALTGNKLTF

SEQ ID NO: 771852 - protein, 14 aa, Homo sapiens
  CDR3 for beta chain variable domain of TCR clone 385926 (TRBV4-1, TRBJ2-2)
CASRQAVNTGELFF

SEQ ID NO: 771853 - protein, 17 aa, Homo sapiens
  CDR3 for alpha chain variable domain of TCR clone 385927 (TRAV3, TRAJ6)
CAVIDGPSAGGSYIPTF

SEQ ID NO: 771854 - protein, 14 aa, Homo sapiens
  CDR3 for beta chain variable domain of TCR clone 385927 (TRBV7-2, TRBJ2-7)
CASSPKTSFYEQYF

SEQ ID NO: 771855 - protein, 11 aa, Homo sapiens
  CDR3 for alpha chain variable domain of TCR clone 385928 (TRAV12-1, TRAJ30)
CVVNGQDKIIF

SEQ ID NO: 771856 - protein, 15 aa, Homo sapiens
  CDR3 for beta chain variable domain of TCR clone 385928 (TRBV4-1, TRBJ1-4)
CASSDTGGTNEILFF

SEQ ID NO: 771857 - protein, 16 aa, Homo sapiens
  CDR3 for alpha chain variable domain of TCR clone 385929 (TRAV30, TRAJ24)
CGTEIVDADSWGKFQF

SEQ ID NO: 771858 - protein, 14 aa, Homo sapiens
  CDR3 for beta chain variable domain of TCR clone 385929 (TRBV7-2, TRBJ2-7)
CASSPKTNFYEQYF

SEQ ID NO: 771859 - protein, 13 aa, Homo sapiens
  CDR3 for alpha chain variable domain of TCR clone 385930 (TRAV25, TRAJ10)
CAGRTGGGIKLTF

SEQ ID NO: 771860 - protein, 15 aa, Homo sapiens
  CDR3 for beta chain variable domain of TCR clone 385930 (TRBV19, TRBJ2-1)
CASSSPGVPLDEQFF

SEQ ID NO: 771861 - protein, 12 aa, Homo sapiens
  CDR3 for alpha chain variable domain of TCR clone 385931 (TRAV38-1, TRAJ20)
CAFIWNDYKLSF

SEQ ID NO: 771862 - protein, 14 aa, Homo sapiens
  CDR3 for beta chain variable domain of TCR clone 385931 (TRBV27, TRBJ1-1)
CVSSPQGKRAEAFF

SEQ ID NO: 771863 - protein, 14 aa, Homo sapiens
  CDR3 for alpha chain variable domain of TCR clone 385932 (TRAV13-1, TRAJ40)
CAASMTSGTYKYIF

SEQ ID NO: 771864 - protein, 17 aa, Homo sapiens
  CDR3 for beta chain variable domain of TCR clone 385932 (TRBV20-1, TRBJ2-3)
CSASLRGRGGSADTQYF

SEQ ID NO: 771865 - protein, 14 aa, Homo sapiens
  CDR3 for alpha chain variable domain of TCR clone 385933 (TRAV8-1, TRAJ39)
CAVNASNAGNMLTF

SEQ ID NO: 771866 - protein, 13 aa, Homo sapiens
  CDR3 for beta chain variable domain of TCR clone 385933 (TRBV12-4, TRBJ2-5)
CASSTGTEETQYF

SEQ ID NO: 771867 - protein, 12 aa, Homo sapiens
  CDR3 for alpha chain variable domain of TCR clone 385934 (TRAV12-1, TRAJ16)
CVVFRDGQKLIF

SEQ ID NO: 771868 - protein, 14 aa, Homo sapiens
  CDR3 for beta chain variable domain of TCR clone 385934 (TRBV19, TRBJ2-1)
CASPTFVLSGEKFF

SEQ ID NO: 771869 - protein, 11 aa, Homo sapiens
  CDR3 for alpha chain variable domain of TCR clone 385935 (TRAV3, TRAJ21)
CAVGNFNKFYF

SEQ ID NO: 771870 - protein, 14 aa, Homo sapiens
  CDR3 for beta chain variable domain of TCR clone 385935 (TRBV19, TRBJ2-2)
CASSTLHRSGELFF

SEQ ID NO: 771871 - protein, 22 aa, Homo sapiens
  CDR3 for alpha chain variable domain of TCR clone 385936 (TRAV8-2, TRAJ45)
HLTKPSAHMSDAAEYSADGLTF

SEQ ID NO: 771872 - protein, 13 aa, Homo sapiens
  CDR3 for beta chain variable domain of TCR clone 385936 (TRBV7-3, TRBJ2-1)
CASSPVAYNEQFI

SEQ ID NO: 771873 - protein, 13 aa, Homo sapiens
  CDR3 for alpha chain variable domain of TCR clone 385937 (TRAV36/DV7, TRAJ33)
CSVDMDSNYQLIW

SEQ ID NO: 771874 - protein, 16 aa, Homo sapiens
  CDR3 for beta chain variable domain of TCR clone 385937 (TRBV15, TRBJ2-3)
CATRLSGGRAPDTQYF

SEQ ID NO: 771875 - protein, 14 aa, Homo sapiens
  CDR3 for alpha chain variable domain of TCR clone 385938 (TRAV17, TRAJ54)
CATDANQGAQKQVF

SEQ ID NO: 771876 - protein, 12 aa, Homo sapiens
  CDR3 for beta chain variable domain of TCR clone 385938 (TRBV7-9, TRBJ2-7)
CASSIKREEQYF

SEQ ID NO: 771877 - protein, 21 aa, Homo sapiens
  CDR3 for alpha chain variable domain of TCR clone 385939 (TRAV29/DV5, TRAJ52)
CSVLLCSKREAGGTSYGKLTF

SEQ ID NO: 771878 - protein, 13 aa, Homo sapiens
  CDR3 for beta chain variable domain of TCR clone 385939 (TRBV4-1, TRBJ2-7)
CASSQGQAYEQYF

SEQ ID NO: 771879 - protein, 11 aa, Homo sapiens
  CDR3 for alpha chain variable domain of TCR clone 385940 (TRAV8-6, TRAJ23)
CALISGGKLIF

SEQ ID NO: 771880 - protein, 14 aa, Homo sapiens
  CDR3 for beta chain variable domain of TCR clone 385940 (TRBV12-5, TRBJ2-5)
CASGSRTHQETQYF

SEQ ID NO: 771881 - protein, 14 aa, Homo sapiens
  CDR3 for alpha chain variable domain of TCR clone 385941 (TRAV21, TRAJ35)
CAVMPIGFGNVLHC

SEQ ID NO: 771882 - protein, 12 aa, Homo sapiens
  CDR3 for beta chain variable domain of TCR clone 385941 (TRBV11-2, TRBJ2-2)
CASSLPTGELFF

SEQ ID NO: 771883 - protein, 12 aa, Homo sapiens
  CDR3 for alpha chain variable domain of TCR clone 385942 (TRAV17, TRAJ20)
CATDGDDYKLSF

SEQ ID NO: 771884 - protein, 14 aa, Homo sapiens
  CDR3 for beta chain variable domain of TCR clone 385942 (TRBV7-2, TRBJ2-2)
CASRGQGAAGELFF

SEQ ID NO: 771885 - protein, 15 aa, Homo sapiens
  CDR3 for alpha chain variable domain of TCR clone 385943 (TRAV8-3, TRAJ45)
CASSYSGGGAEGLTF

SEQ ID NO: 771886 - protein, 13 aa, Homo sapiens
  CDR3 for beta chain variable domain of TCR clone 385943 (TRBV10-3, TRBJ2-7)
CAAKLAVNYEQYF

SEQ ID NO: 771887 - protein, 16 aa, Homo sapiens
  CDR3 for alpha chain variable domain of TCR clone 385944 (TRAV16, TRAJ52)
CALSGVGGTSYGKLTF

SEQ ID NO: 771888 - protein, 14 aa, Homo sapiens
  CDR3 for beta chain variable domain of TCR clone 385944 (TRBV19, TRBJ1-2)
CASSLQGQAYCYTF

SEQ ID NO: 771889 - protein, 14 aa, Homo sapiens
  CDR3 for alpha chain variable domain of TCR clone 385945 (TRAV8-3, TRAJ6)
CAVGASGGSYIPTF

SEQ ID NO: 771890 - protein, 16 aa, Homo sapiens
  CDR3 for beta chain variable domain of TCR clone 385945 (TRBV18, TRBJ2-2)
CQLTIGSLAEHRELFF

SEQ ID NO: 771891 - protein, 13 aa, Homo sapiens
  CDR3 for alpha chain variable domain of TCR clone 385946 (TRAV2, TRAJ40)
CAVVTSGTYKYIF

SEQ ID NO: 771892 - protein, 15 aa, Homo sapiens
  CDR3 for beta chain variable domain of TCR clone 385946 (TRBV7-3, TRBJ2-2)
CQQLKAGDLVRGAVF

SEQ ID NO: 771893 - protein, 13 aa, Homo sapiens
  CDR3 for alpha chain variable domain of TCR clone 385947 (TRAV3, TRAJ27)
CAVRPLGAGKSTF

SEQ ID NO: 771894 - protein, 13 aa, Homo sapiens
  CDR3 for beta chain variable domain of TCR clone 385947 (TRBV20-1, TRBJ2-5)
CSARGDYQETQYF

SEQ ID NO: 771895 - protein, 13 aa, Homo sapiens
  CDR3 for alpha chain variable domain of TCR clone 385948 (TRAV12-1, TRAJ13)
CVVALLGYQKVTF

SEQ ID NO: 771896 - protein, 13 aa, Homo sapiens
  CDR3 for beta chain variable domain of TCR clone 385948 (TRBV20-1, TRBJ2-5)
CSAIRTGQETQYF

SEQ ID NO: 771897 - protein, 15 aa, Homo sapiens
  CDR3 for alpha chain variable domain of TCR clone 385949 (TRAV21, TRAJ38)
CAVRQDACNNRKLIW

SEQ ID NO: 771898 - protein, 16 aa, Homo sapiens
  CDR3 for beta chain variable domain of TCR clone 385949 (TRBV4-2, TRBJ1-1)
CASRPLDGGGDTEAFF

SEQ ID NO: 771899 - protein, 13 aa, Homo sapiens
  CDR3 for alpha chain variable domain of TCR clone 385950 (TRAV9-2, TRAJ53)
CALSGGSNYKLTF

SEQ ID NO: 771900 - protein, 12 aa, Homo sapiens
  CDR3 for beta chain variable domain of TCR clone 385950 (TRBV5-5, TRBJ2-5)
CASSYFGETQYF

SEQ ID NO: 771901 - protein, 14 aa, Homo sapiens
  CDR3 for alpha chain variable domain of TCR clone 385951 (TRAV23/DV6, TRAJ23)
CAAGPYNQGGKLIF

SEQ ID NO: 771902 - protein, 17 aa, Homo sapiens
  CDR3 for beta chain variable domain of TCR clone 385951 (TRBV4-2, TRBJ1-1)
CASSQVATGGMKTEAFF

SEQ ID NO: 771903 - protein, 17 aa, Homo sapiens
  CDR3 for alpha chain variable domain of TCR clone 385952 (TRAV14/DV4, TRAJ28)
GAMREVSSGAGSYQLTF

SEQ ID NO: 771904 - protein, 15 aa, Homo sapiens
  CDR3 for beta chain variable domain of TCR clone 385952 (TRBV11-2, TRBJ1-6)
CASTLRETGNSPLHF

SEQ ID NO: 771905 - protein, 13 aa, Homo sapiens
  CDR3 for alpha chain variable domain of TCR clone 385953 (TRAV21, TRAJ27)
CAARPGNAGKSTF

SEQ ID NO: 771906 - protein, 14 aa, Homo sapiens
  CDR3 for beta chain variable domain of TCR clone 385953 (TRBV7-8, TRBJ2-3)
CASSSRDSTDTQYF

SEQ ID NO: 771907 - protein, 15 aa, Homo sapiens
  CDR3 for alpha chain variable domain of TCR clone 385954 (TRAV12-3, TRAJ10)
CASYILTGGGNKLTF

SEQ ID NO: 771908 - protein, 17 aa, Homo sapiens
  CDR3 for beta chain variable domain of TCR clone 385954 (TRBV11-1, TRBJ2-7)
CASSLTGSFGLDYEQYF

SEQ ID NO: 771909 - protein, 11 aa, Homo sapiens
  CDR3 for alpha chain variable domain of TCR clone 385955 (TRAV21, TRAJ3)
CFYSSASKIIF

SEQ ID NO: 771910 - protein, 15 aa, Homo sapiens
  CDR3 for beta chain variable domain of TCR clone 385955 (TRBV20-1, TRBJ2-7)
CSARDRVSGMDEQYF

SEQ ID NO: 771911 - protein, 13 aa, Homo sapiens
  CDR3 for alpha chain variable domain of TCR clone 385956 (TRAV4, TRAJ22)
CLGGSGSARSLTF

SEQ ID NO: 771912 - protein, 15 aa, Homo sapiens
  CDR3 for beta chain variable domain of TCR clone 385956 (TRBV7-9, TRBJ1-6)
CASSSPGRGNSPLHF

SEQ ID NO: 771913 - protein, 16 aa, Homo sapiens
  CDR3 for alpha chain variable domain of TCR clone 385957 (TRAV20, TRAJ53)
CAVRRGSGGSNYKLTF

SEQ ID NO: 771914 - protein, 12 aa, Homo sapiens
  CDR3 for beta chain variable domain of TCR clone 385957 (TRBV29-1, TRBJ2-3)
CSVGLGADTQYF

SEQ ID NO: 771915 - protein, 14 aa, Homo sapiens
  CDR3 for alpha chain variable domain of TCR clone 385958 (TRAV38-1, TRAJ48)
CAFMANFGIEKLTF

SEQ ID NO: 771916 - protein, 16 aa, Homo sapiens
  CDR3 for beta chain variable domain of TCR clone 385958 (TRBV4-1, TRBJ2-7)
CASRPSGGGADNEQYF

SEQ ID NO: 771917 - protein, 13 aa, Homo sapiens
  CDR3 for alpha chain variable domain of TCR clone 385959 (TRAV4, TRAJ20)
CLVGSSNDYKLSF

SEQ ID NO: 771918 - protein, 15 aa, Homo sapiens
  CDR3 for beta chain variable domain of TCR clone 385959 (TRBV20-1, TRBJ2-1)
CSASSAGSSYNEQFF

SEQ ID NO: 771919 - protein, 17 aa, Homo sapiens
  CDR3 for alpha chain variable domain of TCR clone 385960 (TRAV38-2/DV8, TRAJ23)
CALSRKLIFGQGTELSV

SEQ ID NO: 771920 - protein, 18 aa, Homo sapiens
  CDR3 for beta chain variable domain of TCR clone 385960 (TRBV20-1, TRBJ2-6)
CSAETTPTHCSGANVLTF

SEQ ID NO: 771921 - protein, 15 aa, Homo sapiens
  CDR3 for alpha chain variable domain of TCR clone 385961 (TRAV26-1, TRAJ44)
CVARVPFGTASKLTF

SEQ ID NO: 771922 - protein, 17 aa, Homo sapiens
  CDR3 for beta chain variable domain of TCR clone 385961 (TRBV24-1, TRBJ2-4)
CATSDAEARGVRNIQYF

SEQ ID NO: 771923 - protein, 16 aa, Homo sapiens
  CDR3 for alpha chain variable domain of TCR clone 385962 (TRAV12-3, TRAJ53)
CAMSPGSGGSNYKLTF

SEQ ID NO: 771924 - protein, 15 aa, Homo sapiens
  CDR3 for beta chain variable domain of TCR clone 385962 (TRBV19, TRBJ2-1)
CASSIVRGEGREQFF

SEQ ID NO: 771925 - protein, 13 aa, Homo sapiens
  CDR3 for alpha chain variable domain of TCR clone 385963 (TRAV13-1, TRAJ9)
CAARGTGGFKTIS

SEQ ID NO: 771926 - protein, 12 aa, Homo sapiens
  CDR3 for beta chain variable domain of TCR clone 385963 (TRBV2, TRBJ2-1)
CAYGPPGNEQFF

SEQ ID NO: 771927 - protein, 13 aa, Homo sapiens
  CDR3 for alpha chain variable domain of TCR clone 385964 (TRAV3, TRAJ27)
CAVRPLGAGKSTL

SEQ ID NO: 771928 - protein, 13 aa, Homo sapiens
  CDR3 for beta chain variable domain of TCR clone 385964 (TRBV7-9, TRBJ2-3)
CASNPGSTDTQYF

SEQ ID NO: 771929 - protein, 12 aa, Homo sapiens
  CDR3 for alpha chain variable domain of TCR clone 385965 (TRAV17, TRAJ4)
CATDGGANKLIF

SEQ ID NO: 771930 - protein, 13 aa, Homo sapiens
  CDR3 for beta chain variable domain of TCR clone 385965 (TRBV29-1, TRBJ2-2)
CSTTGVNTGELFF

SEQ ID NO: 771931 - protein, 15 aa, Homo sapiens
  CDR3 for alpha chain variable domain of TCR clone 385966 (TRAV8-3, TRAJ11)
CAVGLLNSGYSTLTF

SEQ ID NO: 771932 - protein, 16 aa, Homo sapiens
  CDR3 for beta chain variable domain of TCR clone 385966 (TRBV7-9, TRBJ1-2)
CASSLGLSSGEDGDTF

SEQ ID NO: 771933 - protein, 17 aa, Homo sapiens
  CDR3 for alpha chain variable domain of TCR clone 385967 (TRAV38-2/DV8, TRAJ23)
CALSRKLIFGQGTELSV

SEQ ID NO: 771934 - protein, 15 aa, Homo sapiens
  CDR3 for beta chain variable domain of TCR clone 385967 (TRBV11-2, TRBJ1-2)
CASSLEGVQRNGYTF

SEQ ID NO: 771935 - protein, 16 aa, Homo sapiens
  CDR3 for alpha chain variable domain of TCR clone 385968 (TRAV3, TRAJ37)
CAVRGKGSGNTGKLIF

SEQ ID NO: 771936 - protein, 12 aa, Homo sapiens
  CDR3 for beta chain variable domain of TCR clone 385968 (TRBV6-3, TRBJ2-7)
CASSLGRRGLYF

SEQ ID NO: 771937 - protein, 15 aa, Homo sapiens
  CDR3 for alpha chain variable domain of TCR clone 385969 (TRAV12-1, TRAJ44)
CVVDPPQGTASKLTF

SEQ ID NO: 771938 - protein, 13 aa, Homo sapiens
  CDR3 for beta chain variable domain of TCR clone 385969 (TRBV27, TRBJ2-1)
CASSSGSYNEQFF

SEQ ID NO: 771939 - protein, 11 aa, Homo sapiens
  CDR3 for alpha chain variable domain of TCR clone 385970 (TRAV20, TRAJ23)
SACNQGGKLIF

SEQ ID NO: 771940 - protein, 16 aa, Homo sapiens
  CDR3 for beta chain variable domain of TCR clone 385970 (TRBV7-8, TRBJ2-5)
CASSFGGQPAQETQYF

SEQ ID NO: 771941 - protein, 11 aa, Homo sapiens
  CDR3 for alpha chain variable domain of TCR clone 385971 (TRAV35, TRAJ30)
CAGERDDKIIF

SEQ ID NO: 771942 - protein, 14 aa, Homo sapiens
  CDR3 for beta chain variable domain of TCR clone 385971 (TRBV4-2, TRBJ2-3)
CASSQPVLTDTQYF

SEQ ID NO: 771943 - protein, 13 aa, Homo sapiens
  CDR3 for alpha chain variable domain of TCR clone 385972 (TRAV8-3, TRAJ10)
CAVGHTHGRRKQT

SEQ ID NO: 771944 - protein, 10 aa, Homo sapiens
  CDR3 for beta chain variable domain of TCR clone 385972 (TRBV20-1, TRBJ2-5)
CSARFETQYF

SEQ ID NO: 771945 - protein, 14 aa, Homo sapiens
  CDR3 for alpha chain variable domain of TCR clone 385973 (TRAV12-1, TRAJ3)
CVVGRHSSASKIIF

SEQ ID NO: 771946 - protein, 15 aa, Homo sapiens
  CDR3 for beta chain variable domain of TCR clone 385973 (TRBV5-1, TRBJ2-1)
CASSLDRTVVNEQFF

SEQ ID NO: 771947 - protein, 13 aa, Homo sapiens
  CDR3 for alpha chain variable domain of TCR clone 385974 (TRAV3, TRAJ30)
CAVRDIPDDKIIF

SEQ ID NO: 771948 - protein, 14 aa, Homo sapiens
  CDR3 for beta chain variable domain of TCR clone 385974 (TRBV14, TRBJ1-1)
CASSQRPMNTEAFF

SEQ ID NO: 771949 - protein, 13 aa, Homo sapiens
  CDR3 for alpha chain variable domain of TCR clone 385975 (TRAV21, TRAJ15)
CAVANQAGTALIF

SEQ ID NO: 771950 - protein, 14 aa, Homo sapiens
  CDR3 for beta chain variable domain of TCR clone 385975 (TRBV27, TRBJ2-2)
CASSLGSATGELFF

SEQ ID NO: 771951 - protein, 14 aa, Homo sapiens
  CDR3 for alpha chain variable domain of TCR clone 385976 (TRAV17, TRAJ15)
CATCPNQAGTALIF

SEQ ID NO: 771952 - protein, 15 aa, Homo sapiens
  CDR3 for beta chain variable domain of TCR clone 385976 (TRBV11-2, TRBJ2-2)
CASSSDRVNAGELFF

SEQ ID NO: 771953 - protein, 12 aa, Homo sapiens
  CDR3 for alpha chain variable domain of TCR clone 385977 (TRAV12-2, TRAJ10)
WGVTGGGNKLTF

SEQ ID NO: 771954 - protein, 14 aa, Homo sapiens
  CDR3 for beta chain variable domain of TCR clone 385977 (TRBV4-1, TRBJ2-5)
CASSRSGSGETQYF

SEQ ID NO: 771955 - protein, 15 aa, Homo sapiens
  CDR3 for alpha chain variable domain of TCR clone 385978 (TRAV38-1, TRAJ37)
CAFIFGSGNTGKLIF

SEQ ID NO: 771956 - protein, 14 aa, Homo sapiens
  CDR3 for beta chain variable domain of TCR clone 385978 (TRBV7-2, TRBJ2-7)
CASSTKTSFYEQYF

SEQ ID NO: 771957 - protein, 12 aa, Homo sapiens
  CDR3 for alpha chain variable domain of TCR clone 385979 (TRAV2, TRAJ31)
CAVEDNNARLMF

SEQ ID NO: 771958 - protein, 14 aa, Homo sapiens
  CDR3 for beta chain variable domain of TCR clone 385979 (TRBV15, TRBJ2-5)
CATSGDRGQETQYF

SEQ ID NO: 771959 - protein, 16 aa, Homo sapiens
  CDR3 for alpha chain variable domain of TCR clone 385980 (TRAV3, TRAJ10)
CAVRDMNAGGGNKLTF

SEQ ID NO: 771960 - protein, 15 aa, Homo sapiens
  CDR3 for beta chain variable domain of TCR clone 385980 (TRBV2, TRBJ2-1)
CATQARLVMIGEQFF

SEQ ID NO: 771961 - protein, 11 aa, Homo sapiens
  CDR3 for alpha chain variable domain of TCR clone 385981 (TRAV8-1, TRAJ8)
CAMTGFQTLVF

SEQ ID NO: 771962 - protein, 14 aa, Homo sapiens
  CDR3 for beta chain variable domain of TCR clone 385981 (TRBV5-4, TRBJ1-2)
CASTRQTGNYGYTF

SEQ ID NO: 771963 - protein, 16 aa, Homo sapiens
  CDR3 for alpha chain variable domain of TCR clone 385982 (TRAV8-3, TRAJ52)
CAVQPACGTSYGKLTF

SEQ ID NO: 771964 - protein, 15 aa, Homo sapiens
  CDR3 for beta chain variable domain of TCR clone 385982 (TRBV11-2, TRBJ2-7)
CASSLAGGVATEQYF

SEQ ID NO: 771965 - protein, 13 aa, Homo sapiens
  CDR3 for alpha chain variable domain of TCR clone 385983 (TRAV8-4, TRAJ30)
CAVSVNRDDKIIF

SEQ ID NO: 771966 - protein, 14 aa, Homo sapiens
  CDR3 for beta chain variable domain of TCR clone 385983 (TRBV7-2, TRBJ1-1)
CASSFLTGTTEAFF

SEQ ID NO: 771967 - protein, 12 aa, Homo sapiens
  CDR3 for alpha chain variable domain of TCR clone 385984 (TRAV21, TRAJ33)
CAKMDSNYQLIW

SEQ ID NO: 771968 - protein, 13 aa, Homo sapiens
  CDR3 for beta chain variable domain of TCR clone 385984 (TRBV12-4, TRBJ2-5)
CASSPVTEETQYF

SEQ ID NO: 771969 - protein, 16 aa, Homo sapiens
  CDR3 for alpha chain variable domain of TCR clone 385985 (TRAV30, TRAJ24)
CGTEIVDADSWGKFQF

SEQ ID NO: 771970 - protein, 15 aa, Homo sapiens
  CDR3 for beta chain variable domain of TCR clone 385985 (TRBV11-3, TRBJ2-2)
CASSSDRVNARELFF

SEQ ID NO: 771971 - protein, 13 aa, Homo sapiens
  CDR3 for alpha chain variable domain of TCR clone 385986 (TRAV8-3, TRAJ43)
CAVGPDNNNDMRF

SEQ ID NO: 771972 - protein, 12 aa, Homo sapiens
  CDR3 for beta chain variable domain of TCR clone 385986 (TRBV7-2, TRBJ1-6)
CASSSSSSPLHF

SEQ ID NO: 771973 - protein, 15 aa, Homo sapiens
  CDR3 for alpha chain variable domain of TCR clone 385987 (TRAV8-3, TRAJ41)
CAVGSNSNSGYAVNF

SEQ ID NO: 771974 - protein, 17 aa, Homo sapiens
  CDR3 for beta chain variable domain of TCR clone 385987 (TRBV25-1, TRBJ2-1)
CASSAYGQGRGVYEQFF

SEQ ID NO: 771975 - protein, 16 aa, Homo sapiens
  CDR3 for alpha chain variable domain of TCR clone 385988 (TRAV16, TRAJ33)
CAPPQGAMDSNYQLIW

SEQ ID NO: 771976 - protein, 16 aa, Homo sapiens
  CDR3 for beta chain variable domain of TCR clone 385988 (TRBV12-4, TRBJ2-5)
CASSWRPSGDLETQYF

SEQ ID NO: 771977 - protein, 18 aa, Homo sapiens
  CDR3 for alpha chain variable domain of TCR clone 385989 (TRAV12-3, TRAJ52)
CAMSAGGAGGTSYGKLTF

SEQ ID NO: 771978 - protein, 14 aa, Homo sapiens
  CDR3 for beta chain variable domain of TCR clone 385989 (TRBV15, TRBJ2-3)
CATRSGTSTDTQYF

SEQ ID NO: 771979 - protein, 15 aa, Homo sapiens
  CDR3 for alpha chain variable domain of TCR clone 385990 (TRAV35, TRAJ38)
CAGFSNAGNNRKLIW

SEQ ID NO: 771980 - protein, 18 aa, Homo sapiens
  CDR3 for beta chain variable domain of TCR clone 385990 (TRBV3-1, TRBJ1-2)
CASSQDVIGLNGDYGYTF

SEQ ID NO: 771981 - protein, 14 aa, Homo sapiens
  CDR3 for alpha chain variable domain of TCR clone 385991 (TRAV12-2, TRAJ53)
CAVKGGGSNYKPTF

SEQ ID NO: 771982 - protein, 15 aa, Homo sapiens
  CDR3 for beta chain variable domain of TCR clone 385991 (TRBV10-3, TRBJ2-3)
CAISLTSGGTDTQYF

SEQ ID NO: 771983 - protein, 17 aa, Homo sapiens
  CDR3 for alpha chain variable domain of TCR clone 385992 (TRAV1-2, TRAJ27)
CAVRDKTGDTNAGKSTF

SEQ ID NO: 771984 - protein, 15 aa, Homo sapiens
  CDR3 for beta chain variable domain of TCR clone 385992 (TRBV2, TRBJ2-5)
CASSGTVAAGENQYF

SEQ ID NO: 771985 - protein, 13 aa, Homo sapiens
  CDR3 for alpha chain variable domain of TCR clone 385993 (TRAV8-3, TRAJ43)
CAVVPYKNNDMRF

SEQ ID NO: 771986 - protein, 16 aa, Homo sapiens
  CDR3 for beta chain variable domain of TCR clone 385993 (TRBV7-2, TRBJ2-5)
CASSPFPTGGEETQYF

SEQ ID NO: 771987 - protein, 11 aa, Homo sapiens
  CDR3 for alpha chain variable domain of TCR clone 385994 (TRAV3, TRAJ21)
CAVGNFNKFYF

SEQ ID NO: 771988 - protein, 16 aa, Homo sapiens
  CDR3 for beta chain variable domain of TCR clone 385994 (TRBV27, TRBJ2-2)
CASSSSGVSNTGELFV

SEQ ID NO: 771989 - protein, 11 aa, Homo sapiens
  CDR3 for alpha chain variable domain of TCR clone 385995 (TRAV12-3, TRAJ11)
CNATGYSTLTF

SEQ ID NO: 771990 - protein, 18 aa, Homo sapiens
  CDR3 for beta chain variable domain of TCR clone 385995 (TRBV7-2, TRBJ2-3)
CASSLKREGSGIKDTQYF

SEQ ID NO: 771991 - protein, 14 aa, Homo sapiens
  CDR3 for alpha chain variable domain of TCR clone 385996 (TRAV17, TRAJ5)
WATVALTGRRALTF

SEQ ID NO: 771992 - protein, 14 aa, Homo sapiens
  CDR3 for beta chain variable domain of TCR clone 385996 (TRBV28, TRBJ2-7)
CASSPYGMAYEQYF

SEQ ID NO: 771993 - protein, 14 aa, Homo sapiens
  CDR3 for alpha chain variable domain of TCR clone 385997 (TRAV13-1, TRAJ35)
CAASKGGFGNVLHC

SEQ ID NO: 771994 - protein, 15 aa, Homo sapiens
  CDR3 for beta chain variable domain of TCR clone 385997 (TRBV7-2, TRBJ2-1)
CASSLVAGRYNEQFF

SEQ ID NO: 771995 - protein, 15 aa, Homo sapiens
  CDR3 for alpha chain variable domain of TCR clone 385998 (TRAV30, TRAJ57)
CGTAIPQGGSEKLVF

SEQ ID NO: 771996 - protein, 14 aa, Homo sapiens
  CDR3 for beta chain variable domain of TCR clone 385998 (TRBV20-1, TRBJ2-4)
CSARDRGQGGIQYF

SEQ ID NO: 771997 - protein, 11 aa, Homo sapiens
  CDR3 for alpha chain variable domain of TCR clone 385999 (TRAV17, TRAJ54)
CATDANQGAQA

SEQ ID NO: 771998 - protein, 12 aa, Homo sapiens
  CDR3 for beta chain variable domain of TCR clone 385999 (TRBV6-3, TRBJ2-1)
CASSGSYNEQFF

SEQ ID NO: 771999 - protein, 16 aa, Homo sapiens
  CDR3 for alpha chain variable domain of TCR clone 386000 (TRAV27, TRAJ53)
CAAPEGSRGSNYKLTF

SEQ ID NO: 772000 - protein, 15 aa, Homo sapiens
  CDR3 for beta chain variable domain of TCR clone 386000 (TRBV20-1, TRBJ1-1)
CSASRGVTGNTEAFF

SEQ ID NO: 772001 - protein, 12 aa, Homo sapiens
  CDR3 for alpha chain variable domain of TCR clone 386001 (TRAV10, TRAJ33)
CVSGDSNYQLIW

SEQ ID NO: 772002 - protein, 15 aa, Homo sapiens
  CDR3 for beta chain variable domain of TCR clone 386001 (TRBV6-3, TRBJ2-7)
CASSSPGTVFYEQYS

SEQ ID NO: 772003 - protein, 11 aa, Homo sapiens
  CDR3 for alpha chain variable domain of TCR clone 386002 (TRAV23/DV6, TRAJ58)
CAAKLLRGETS

SEQ ID NO: 772004 - protein, 13 aa, Homo sapiens
  CDR3 for beta chain variable domain of TCR clone 386002 (TRBV11-2, TRBJ2-5)
CASSRGPAETQYF

SEQ ID NO: 772005 - protein, 15 aa, Homo sapiens
  CDR3 for alpha chain variable domain of TCR clone 386003 (TRAV13-1, TRAJ17)
CAASIERAAGNKLTF

SEQ ID NO: 772006 - protein, 18 aa, Homo sapiens
  CDR3 for beta chain variable domain of TCR clone 386003 (TRBV19, TRBJ2-2)
CASSSCSRENRDTGELFF

SEQ ID NO: 772007 - protein, 13 aa, Homo sapiens
  CDR3 for alpha chain variable domain of TCR clone 386004 (TRAV12-3, TRAJ29)
CAMTLSGNTPLVF

SEQ ID NO: 772008 - protein, 14 aa, Homo sapiens
  CDR3 for beta chain variable domain of TCR clone 386004 (TRBV19, TRBJ2-7)
CASTVQGRPYEQYF

SEQ ID NO: 772009 - protein, 16 aa, Homo sapiens
  CDR3 for alpha chain variable domain of TCR clone 386005 (TRAV3, TRAJ37)
CAVRVRGSGNTGKLIF

SEQ ID NO: 772010 - protein, 16 aa, Homo sapiens
  CDR3 for beta chain variable domain of TCR clone 386005 (TRBV19, TRBJ2-1)
CASGKAGPSSYNEQFF

SEQ ID NO: 772011 - protein, 13 aa, Homo sapiens
  CDR3 for alpha chain variable domain of TCR clone 386006 (TRAV17, TRAJ40)
CATAPGGTYKYIF

SEQ ID NO: 772012 - protein, 12 aa, Homo sapiens
  CDR3 for beta chain variable domain of TCR clone 386006 (TRBV2, TRBJ1-5)
CACSENRTPQHF

SEQ ID NO: 772013 - protein, 13 aa, Homo sapiens
  CDR3 for alpha chain variable domain of TCR clone 386007 (TRAV13-1, TRAJ10)
CAALEGGGNKLTF

SEQ ID NO: 772014 - protein, 13 aa, Homo sapiens
  CDR3 for beta chain variable domain of TCR clone 386007 (TRBV7-9, TRBJ1-2)
CASSLKQNYGYTC

SEQ ID NO: 772015 - protein, 15 aa, Homo sapiens
  CDR3 for alpha chain variable domain of TCR clone 386008 (TRAV21, TRAJ37)
CAVRPTLSNTGKLIF

SEQ ID NO: 772016 - protein, 14 aa, Homo sapiens
  CDR3 for beta chain variable domain of TCR clone 386008 (TRBV7-8, TRBJ2-7)
CASSPRDRVYEQYF

SEQ ID NO: 772017 - protein, 16 aa, Homo sapiens
  CDR3 for alpha chain variable domain of TCR clone 386009 (TRAV30, TRAJ24)
CGTEIVDADSWGKFQF

SEQ ID NO: 772018 - protein, 12 aa, Homo sapiens
  CDR3 for beta chain variable domain of TCR clone 386009 (TRBV7-9, TRBJ1-5)
CASSPQGQPQQF

SEQ ID NO: 772019 - protein, 13 aa, Homo sapiens
  CDR3 for alpha chain variable domain of TCR clone 386010 (TRAV36/DV7, TRAJ37)
CAFFSSNTGKLIF

SEQ ID NO: 772020 - protein, 18 aa, Homo sapiens
  CDR3 for beta chain variable domain of TCR clone 386010 (TRBV11-2, TRBJ2-3)
CASSLGGASRGAPNTQYF

SEQ ID NO: 772021 - protein, 11 aa, Homo sapiens
  CDR3 for alpha chain variable domain of TCR clone 386011 (TRAV35, TRAJ31)
CAESGDARLMF

SEQ ID NO: 772022 - protein, 11 aa, Homo sapiens
  CDR3 for beta chain variable domain of TCR clone 386011 (TRBV24-1, TRBJ2-3)
CATSDLDTQNF

SEQ ID NO: 772023 - protein, 14 aa, Homo sapiens
  CDR3 for alpha chain variable domain of TCR clone 386012 (TRAV16, TRAJ13)
CALRRSGGYQKVTF

SEQ ID NO: 772024 - protein, 15 aa, Homo sapiens
  CDR3 for beta chain variable domain of TCR clone 386012 (TRBV6-1, TRBJ1-5)
CASSEPREGNQPQHF

SEQ ID NO: 772025 - protein, 14 aa, Homo sapiens
  CDR3 for alpha chain variable domain of TCR clone 386013 (TRAV3, TRAJ36)
CAVRDGTGANNLFF

SEQ ID NO: 772026 - protein, 14 aa, Homo sapiens
  CDR3 for beta chain variable domain of TCR clone 386013 (TRBV7-2, TRBJ2-7)
CASSPKTSFYEQYF

SEQ ID NO: 772027 - protein, 15 aa, Homo sapiens
  CDR3 for alpha chain variable domain of TCR clone 386014 (TRAV20, TRAJ6)
CAVRLQSGGSYIPTF

SEQ ID NO: 772028 - protein, 16 aa, Homo sapiens
  CDR3 for beta chain variable domain of TCR clone 386014 (TRBV12-5, TRBJ2-5)
CASGPRTSGNQETQYF

SEQ ID NO: 772029 - protein, 13 aa, Homo sapiens
  CDR3 for alpha chain variable domain of TCR clone 386015 (TRAV12-1, TRAJ26)
CVVRRNYGQNFVF

SEQ ID NO: 772030 - protein, 17 aa, Homo sapiens
  CDR3 for beta chain variable domain of TCR clone 386015 (TRBV5-1, TRBJ2-7)
FAPAADNPGQIPYEQYF

SEQ ID NO: 772031 - protein, 13 aa, Homo sapiens
  CDR3 for alpha chain variable domain of TCR clone 386016 (TRAV12-3, TRAJ54)
FAMTLQGAQKLVV

SEQ ID NO: 772032 - protein, 14 aa, Homo sapiens
  CDR3 for beta chain variable domain of TCR clone 386016 (TRBV4-1, TRBJ2-2)
CASSQAVNTGELFF

SEQ ID NO: 772033 - protein, 15 aa, Homo sapiens
  CDR3 for alpha chain variable domain of TCR clone 386017 (TRAV16, TRAJ20)
CALKGGLRAAYKLSF

SEQ ID NO: 772034 - protein, 16 aa, Homo sapiens
  CDR3 for beta chain variable domain of TCR clone 386017 (TRBV11-3, TRBJ2-2)
CASSSRTSPGTGELFF

SEQ ID NO: 772035 - protein, 11 aa, Homo sapiens
  CDR3 for alpha chain variable domain of TCR clone 386018 (TRAV13-2, TRAJ15)
FSHQAGTALIF

SEQ ID NO: 772036 - protein, 15 aa, Homo sapiens
  CDR3 for beta chain variable domain of TCR clone 386018 (TRBV20-1, TRBJ1-5)
CSATSDRGLGQPQHF

SEQ ID NO: 772037 - protein, 13 aa, Homo sapiens
  CDR3 for alpha chain variable domain of TCR clone 386019 (TRAV8-3, TRAJ36)
CAVGATGANNLFF

SEQ ID NO: 772038 - protein, 16 aa, Homo sapiens
  CDR3 for beta chain variable domain of TCR clone 386019 (TRBV20-1, TRBJ1-4)
CSAPGQGLLTNDKLFF

SEQ ID NO: 772039 - protein, 17 aa, Homo sapiens
  CDR3 for alpha chain variable domain of TCR clone 386020 (TRAV8-1, TRAJ43)
CAVTNDMRFGAGTRLTV

SEQ ID NO: 772040 - protein, 14 aa, Homo sapiens
  CDR3 for beta chain variable domain of TCR clone 386020 (TRBV5-1, TRBJ2-3)
CASSLFGPTDTQYF

SEQ ID NO: 772041 - protein, 16 aa, Homo sapiens
  CDR3 for alpha chain variable domain of TCR clone 386021 (TRAV13-1, TRAJ48)
CAASIFGNFVNEKLTF

SEQ ID NO: 772042 - protein, 14 aa, Homo sapiens
  CDR3 for beta chain variable domain of TCR clone 386021 (TRBV7-3, TRBJ1-1)
CASSLKGGNTEAFF

SEQ ID NO: 772043 - protein, 15 aa, Homo sapiens
  CDR3 for alpha chain variable domain of TCR clone 386022 (TRAV3, TRAJ22)
CAVRDRVGSARQLTF

SEQ ID NO: 772044 - protein, 16 aa, Homo sapiens
  CDR3 for beta chain variable domain of TCR clone 386022 (TRBV4-2, TRBJ2-4)
CASSQELRRAKNTQYF

SEQ ID NO: 772045 - protein, 18 aa, Homo sapiens
  CDR3 for alpha chain variable domain of TCR clone 386023 (TRAV21, TRAJ52)
CAVRPSPAGGTSYGKLTF

SEQ ID NO: 772046 - protein, 16 aa, Homo sapiens
  CDR3 for beta chain variable domain of TCR clone 386023 (TRBV28, TRBJ2-2)
CASSLEGGSNTGELFF

SEQ ID NO: 772047 - protein, 14 aa, Homo sapiens
  CDR3 for alpha chain variable domain of TCR clone 386024 (TRAV35, TRAJ50)
CAGHRKTSYDKVIF

SEQ ID NO: 772048 - protein, 12 aa, Homo sapiens
  CDR3 for beta chain variable domain of TCR clone 386024 (TRBV11-2, TRBJ2-1)
CASSPGNNEQFF

SEQ ID NO: 772049 - protein, 14 aa, Homo sapiens
  CDR3 for alpha chain variable domain of TCR clone 386025 (TRAV12-2, TRAJ45)
CAVYSGGGADGLTF

SEQ ID NO: 772050 - protein, 15 aa, Homo sapiens
  CDR3 for beta chain variable domain of TCR clone 386025 (TRBV19, TRBJ1-1)
CASTSGQIQNTEAFF

SEQ ID NO: 772051 - protein, 17 aa, Homo sapiens
  CDR3 for alpha chain variable domain of TCR clone 386026 (TRAV17, TRAJ7)
CATLGRLAFGKGNQVVV

SEQ ID NO: 772052 - protein, 13 aa, Homo sapiens
  CDR3 for beta chain variable domain of TCR clone 386026 (TRBV12-4, TRBJ1-1)
CASSPGTGFEAFF

SEQ ID NO: 772053 - protein, 14 aa, Homo sapiens
  CDR3 for alpha chain variable domain of TCR clone 386027 (TRAV13-1, TRAJ39)
CAASKNNAGNMLTF

SEQ ID NO: 772054 - protein, 12 aa, Homo sapiens
  CDR3 for beta chain variable domain of TCR clone 386027 (TRBV18, TRBJ2-1)
CASSSDEDEQFF

SEQ ID NO: 772055 - protein, 15 aa, Homo sapiens
  CDR3 for alpha chain variable domain of TCR clone 386028 (TRAV12-2, TRAJ43)
CAFDIRFGAGTRLTV

SEQ ID NO: 772056 - protein, 18 aa, Homo sapiens
  CDR3 for beta chain variable domain of TCR clone 386028 (TRBV20-1, TRBJ2-3)
CSASGLAGGPGTTDAQYF

SEQ ID NO: 772057 - protein, 13 aa, Homo sapiens
  CDR3 for alpha chain variable domain of TCR clone 386029 (TRAV2, TRAJ15)
CAVASQAGTALIF

SEQ ID NO: 772058 - protein, 16 aa, Homo sapiens
  CDR3 for beta chain variable domain of TCR clone 386029 (TRBV7-3, TRBJ2-1)
CASSKPLAGGYNEQFF

SEQ ID NO: 772059 - protein, 14 aa, Homo sapiens
  CDR3 for alpha chain variable domain of TCR clone 386030 (TRAV1-2, TRAJ16)
CAVNRFSDGQKLRF

SEQ ID NO: 772060 - protein, 13 aa, Homo sapiens
  CDR3 for beta chain variable domain of TCR clone 386030 (TRBV5-7, TRBJ2-5)
CASSLRLQETQYF

SEQ ID NO: 772061 - protein, 12 aa, Homo sapiens
  CDR3 for alpha chain variable domain of TCR clone 386031 (TRAV13-1, TRAJ21)
CAAKEGFNKFYS

SEQ ID NO: 772062 - protein, 14 aa, Homo sapiens
  CDR3 for beta chain variable domain of TCR clone 386031 (TRBV5-7, TRBJ1-5)
CASSSTWGNQPQHF

SEQ ID NO: 772063 - protein, 15 aa, Homo sapiens
  CDR3 for alpha chain variable domain of TCR clone 386032 (TRAV26-2, TRAJ39)
CSLRGNNNAGNMLTF

SEQ ID NO: 772064 - protein, 15 aa, Homo sapiens
  CDR3 for beta chain variable domain of TCR clone 386032 (TRBV5-4, TRBJ1-1)
CARSSLGWANTEAFF

SEQ ID NO: 772065 - protein, 14 aa, Homo sapiens
  CDR3 for alpha chain variable domain of TCR clone 386033 (TRAV20, TRAJ42)
CAVQGWRSQGNLIF

SEQ ID NO: 772066 - protein, 12 aa, Homo sapiens
  CDR3 for beta chain variable domain of TCR clone 386033 (TRBV11-2, TRBJ2-2)
CASSLGGGELFF

SEQ ID NO: 772067 - protein, 14 aa, Homo sapiens
  CDR3 for alpha chain variable domain of TCR clone 386034 (TRAV1-2, TRAJ15)
CAVRDRQAGTALIF

SEQ ID NO: 772068 - protein, 13 aa, Homo sapiens
  CDR3 for beta chain variable domain of TCR clone 386034 (TRBV28, TRBJ2-7)
CASTPGLAGEQYF

SEQ ID NO: 772069 - protein, 15 aa, Homo sapiens
  CDR3 for alpha chain variable domain of TCR clone 386035 (TRAV3, TRAJ22)
CAVRDRGGSARQLTF

SEQ ID NO: 772070 - protein, 14 aa, Homo sapiens
  CDR3 for beta chain variable domain of TCR clone 386035 (TRBV25-1, TRBJ1-1)
CASTHLGANTEAFF

SEQ ID NO: 772071 - protein, 15 aa, Homo sapiens
  CDR3 for alpha chain variable domain of TCR clone 386036 (TRAV2, TRAJ15)
CAAEDREQAGTALIF

SEQ ID NO: 772072 - protein, 13 aa, Homo sapiens
  CDR3 for beta chain variable domain of TCR clone 386036 (TRBV10-2, TRBJ2-3)
CASSESGDHTQYF

SEQ ID NO: 772073 - protein, 12 aa, Homo sapiens
  CDR3 for alpha chain variable domain of TCR clone 386037 (TRAV12-2, TRAJ49)
CAVTNTGNQFYF

SEQ ID NO: 772074 - protein, 17 aa, Homo sapiens
  CDR3 for beta chain variable domain of TCR clone 386037 (TRBV13, TRBJ2-3)
CASSLSRVAGGRNTQYF

SEQ ID NO: 772075 - protein, 17 aa, Homo sapiens
  CDR3 for alpha chain variable domain of TCR clone 386038 (TRAV1-2, TRAJ27)
CAVRDKTGDTNEGNSTF

SEQ ID NO: 772076 - protein, 13 aa, Homo sapiens
  CDR3 for beta chain variable domain of TCR clone 386038 (TRBV7-3, TRBJ1-1)
CASSQDWGAEAFF

SEQ ID NO: 772077 - protein, 16 aa, Homo sapiens
  CDR3 for alpha chain variable domain of TCR clone 386039 (TRAV30, TRAJ24)
CGTEIVDADSWGKFQF

SEQ ID NO: 772078 - protein, 16 aa, Homo sapiens
  CDR3 for beta chain variable domain of TCR clone 386039 (TRBV12-4, TRBJ2-7)
CASSPEGQGSSYEQYF

SEQ ID NO: 772079 - protein, 12 aa, Homo sapiens
  CDR3 for alpha chain variable domain of TCR clone 386040 (TRAV1-1, TRAJ44)
CAVPVVGTMLTF

SEQ ID NO: 772080 - protein, 14 aa, Homo sapiens
  CDR3 for beta chain variable domain of TCR clone 386040 (TRBV11-2, TRBJ2-3)
CANSRLARTDTQYF

SEQ ID NO: 772081 - protein, 12 aa, Homo sapiens
  CDR3 for alpha chain variable domain of TCR clone 386041 (TRAV36/DV7, TRAJ54)
CAVVRGAQKRVF

SEQ ID NO: 772082 - protein, 13 aa, Homo sapiens
  CDR3 for beta chain variable domain of TCR clone 386041 (TRBV20-1, TRBJ1-1)
CSARGGGNTEAFF

SEQ ID NO: 772083 - protein, 10 aa, Homo sapiens
  CDR3 for alpha chain variable domain of TCR clone 386042 (TRAV12-3, TRAJ34)
CAMSADKLIF

SEQ ID NO: 772084 - protein, 15 aa, Homo sapiens
  CDR3 for beta chain variable domain of TCR clone 386042 (TRBV20-1, TRBJ2-3)
CSARRGEAITDTEYF

SEQ ID NO: 772085 - protein, 10 aa, Homo sapiens
  CDR3 for alpha chain variable domain of TCR clone 386043 (TRAV8-4, TRAJ47)
AAERGNKLVF

SEQ ID NO: 772086 - protein, 14 aa, Homo sapiens
  CDR3 for beta chain variable domain of TCR clone 386043 (TRBV7-9, TRBJ2-1)
CASSPRDSLYEQFF

SEQ ID NO: 772087 - protein, 11 aa, Homo sapiens
  CDR3 for alpha chain variable domain of TCR clone 386044 (TRAV13-2, TRAJ20)
CADSNDYKLSF

SEQ ID NO: 772088 - protein, 17 aa, Homo sapiens
  CDR3 for beta chain variable domain of TCR clone 386044 (TRBV4-1, TRBJ1-4)
CASSDRGELMKNCFLAV

SEQ ID NO: 772089 - protein, 15 aa, Homo sapiens
  CDR3 for alpha chain variable domain of TCR clone 386045 (TRAV3, TRAJ4)
CAVRDRGGSARQLTF

SEQ ID NO: 772090 - protein, 16 aa, Homo sapiens
  CDR3 for beta chain variable domain of TCR clone 386045 (TRBV28, TRBJ1-4)
CASSPPYRGRSEKLFF

SEQ ID NO: 772091 - protein, 12 aa, Homo sapiens
  CDR3 for alpha chain variable domain of TCR clone 386046 (TRAV26-1, TRAJ38)
CIVRPLNAGNNH

SEQ ID NO: 772092 - protein, 13 aa, Homo sapiens
  CDR3 for beta chain variable domain of TCR clone 386046 (TRBV18, TRBJ1-1)
CASSPNGDTEAFF

SEQ ID NO: 772093 - protein, 13 aa, Homo sapiens
  CDR3 for alpha chain variable domain of TCR clone 386047 (TRAV14/DV4, TRAJ23)
CAMREVKGGKLIF

SEQ ID NO: 772094 - protein, 13 aa, Homo sapiens
  CDR3 for beta chain variable domain of TCR clone 386047 (TRBV14, TRBJ2-7)
CASSQDRRYEQYF

SEQ ID NO: 772095 - protein, 12 aa, Homo sapiens
  CDR3 for alpha chain variable domain of TCR clone 386048 (TRAV13-1, TRAJ17)
CAARTAGNKLTF

SEQ ID NO: 772096 - protein, 16 aa, Homo sapiens
  CDR3 for beta chain variable domain of TCR clone 386048 (TRBV12-5, TRBJ2-5)
CASGPRTSGNQETQYF

SEQ ID NO: 772097 - protein, 16 aa, Homo sapiens
  CDR3 for alpha chain variable domain of TCR clone 386049 (TRAV8-3, TRAJ8)
CAVPRDGNTGFPKLVF

SEQ ID NO: 772098 - protein, 14 aa, Homo sapiens
  CDR3 for beta chain variable domain of TCR clone 386049 (TRBV4-1, TRBJ2-2)
CASSQAVNTGELFF

SEQ ID NO: 772099 - protein, 13 aa, Homo sapiens
  CDR3 for alpha chain variable domain of TCR clone 386050 (TRAV38-2/DV8, TRAJ29)
CAYRTPGNTPLVF

SEQ ID NO: 772100 - protein, 15 aa, Homo sapiens
  CDR3 for beta chain variable domain of TCR clone 386050 (TRBV6-4, TRBJ2-4)
CASPGTELAKNSQYF

SEQ ID NO: 772101 - protein, 12 aa, Homo sapiens
  CDR3 for alpha chain variable domain of TCR clone 386051 (TRAV3, TRAJ7)
CADLLWEQQTRF

SEQ ID NO: 772102 - protein, 16 aa, Homo sapiens
  CDR3 for beta chain variable domain of TCR clone 386051 (TRBV11-2, TRBJ2-1)
CASSVTADFSYNEQFF

SEQ ID NO: 772103 - protein, 14 aa, Homo sapiens
  CDR3 for alpha chain variable domain of TCR clone 386052 (TRAV1-2, TRAJ8)
CAVREDTGFQELVF

SEQ ID NO: 772104 - protein, 16 aa, Homo sapiens
  CDR3 for beta chain variable domain of TCR clone 386052 (TRBV7-6, TRBJ2-6)
CASSLPGLSGANVLTF

SEQ ID NO: 772105 - protein, 13 aa, Homo sapiens
  CDR3 for alpha chain variable domain of TCR clone 386053 (TRAV27, TRAJ42)
CAGARGSQGNLIF

SEQ ID NO: 772106 - protein, 12 aa, Homo sapiens
  CDR3 for beta chain variable domain of TCR clone 386053 (TRBV19, TRBJ1-5)
CASSIAQQPQHF

SEQ ID NO: 772107 - protein, 14 aa, Homo sapiens
  CDR3 for alpha chain variable domain of TCR clone 386054 (TRAV12-2, TRAJ48)
CAVNAFFGNDKLTF

SEQ ID NO: 772108 - protein, 13 aa, Homo sapiens
  CDR3 for beta chain variable domain of TCR clone 386054 (TRBV28, TRBJ2-7)
CAGAQQGLDEQYF

SEQ ID NO: 772109 - protein, 14 aa, Homo sapiens
  CDR3 for alpha chain variable domain of TCR clone 386055 (TRAV1-2, TRAJ8)
CAVREDTGFKKLVF

SEQ ID NO: 772110 - protein, 15 aa, Homo sapiens
  CDR3 for beta chain variable domain of TCR clone 386055 (TRBV9, TRBJ2-1)
CASSLAGSSYNEQFF

SEQ ID NO: 772111 - protein, 14 aa, Homo sapiens
  CDR3 for alpha chain variable domain of TCR clone 386056 (TRAV12-2, TRAJ45)
CAVYSGGGADGLTF

SEQ ID NO: 772112 - protein, 16 aa, Homo sapiens
  CDR3 for beta chain variable domain of TCR clone 386056 (TRBV19, TRBJ2-2)
CASRSPGTGATGELFF

SEQ ID NO: 772113 - protein, 17 aa, Homo sapiens
  CDR3 for alpha chain variable domain of TCR clone 386057 (TRAV8-6, TRAJ58)
CAVSSWVGETSGSRLTF

SEQ ID NO: 772114 - protein, 17 aa, Homo sapiens
  CDR3 for beta chain variable domain of TCR clone 386057 (TRBV19, TRBJ2-7)
CASSISFYDSYPYEQYF

SEQ ID NO: 772115 - protein, 11 aa, Homo sapiens
  CDR3 for alpha chain variable domain of TCR clone 386058 (TRAV2, TRAJ13)
CASGGYQKVTF

SEQ ID NO: 772116 - protein, 14 aa, Homo sapiens
  CDR3 for beta chain variable domain of TCR clone 386058 (TRBV6-3, TRBJ2-6)
CASNQPSGANVLTF

SEQ ID NO: 772117 - protein, 15 aa, Homo sapiens
  CDR3 for alpha chain variable domain of TCR clone 386059 (TRAV8-3, TRAJ42)
CAGTNYGGSQGNLIF

SEQ ID NO: 772118 - protein, 15 aa, Homo sapiens
  CDR3 for beta chain variable domain of TCR clone 386059 (TRBV6-1, TRBJ2-1)
CASSELRGQYNEQFF

SEQ ID NO: 772119 - protein, 15 aa, Homo sapiens
  CDR3 for alpha chain variable domain of TCR clone 386060 (TRAV38-1, TRAJ37)
CSFIFGSGNTGKLIF

SEQ ID NO: 772120 - protein, 12 aa, Homo sapiens
  CDR3 for beta chain variable domain of TCR clone 386060 (TRBV7-9, TRBJ2-7)
CASSLEGYEQYS

SEQ ID NO: 772121 - protein, 14 aa, Homo sapiens
  CDR3 for alpha chain variable domain of TCR clone 386061 (TRAV17, TRAJ6)
CATNPAGGSYIPTF

SEQ ID NO: 772122 - protein, 14 aa, Homo sapiens
  CDR3 for beta chain variable domain of TCR clone 386061 (TRBV4-1, TRBJ2-7)
CASSPVVGGDEQYF

SEQ ID NO: 772123 - protein, 15 aa, Homo sapiens
  CDR3 for alpha chain variable domain of TCR clone 386062 (TRAV12-3, TRAJ6)
CAMSATTGGSYIPTF

SEQ ID NO: 772124 - protein, 16 aa, Homo sapiens
  CDR3 for beta chain variable domain of TCR clone 386062 (TRBV4-1, TRBJ2-3)
CASSQSTSGAEDTQYF

SEQ ID NO: 772125 - protein, 11 aa, Homo sapiens
  CDR3 for alpha chain variable domain of TCR clone 386063 (TRAV3, TRAJ21)
CAVGNFNKFYF

SEQ ID NO: 772126 - protein, 14 aa, Homo sapiens
  CDR3 for beta chain variable domain of TCR clone 386063 (TRBV7-6, TRBJ2-7)
CASSYRQGADEQYF

SEQ ID NO: 772127 - protein, 20 aa, Homo sapiens
  CDR3 for alpha chain variable domain of TCR clone 386064 (TRAV14/DV4, TRAJ22)
CAMREVITLISSGSARQLTF

SEQ ID NO: 772128 - protein, 14 aa, Homo sapiens
  CDR3 for beta chain variable domain of TCR clone 386064 (TRBV4-1, TRBJ2-5)
CASSRSGSGETQYF

SEQ ID NO: 772129 - protein, 11 aa, Homo sapiens
  CDR3 for alpha chain variable domain of TCR clone 386065 (TRAV17, TRAJ31)
CATSNNARLMF

SEQ ID NO: 772130 - protein, 16 aa, Homo sapiens
  CDR3 for beta chain variable domain of TCR clone 386065 (TRBV7-8, TRBJ2-4)
CASSAERTLAKNIKYF

SEQ ID NO: 772131 - protein, 12 aa, Homo sapiens
  CDR3 for alpha chain variable domain of TCR clone 386066 (TRAV1-1, TRAJ39)
CAVPVVGNMLTF

SEQ ID NO: 772132 - protein, 15 aa, Homo sapiens
  CDR3 for beta chain variable domain of TCR clone 386066 (TRBV27, TRBJ2-1)
CASSNGGGASNEQFF

SEQ ID NO: 772133 - protein, 11 aa, Homo sapiens
  CDR3 for alpha chain variable domain of TCR clone 386067 (TRAV35, TRAJ57)
GPQGGSEKLVF

SEQ ID NO: 772134 - protein, 16 aa, Homo sapiens
  CDR3 for beta chain variable domain of TCR clone 386067 (TRBV7-2, TRBJ1-5)
CASSWTGGPGNQPQNF

SEQ ID NO: 772135 - protein, 17 aa, Homo sapiens
  CDR3 for alpha chain variable domain of TCR clone 386068 (TRAV12-2, TRAJ18)
CAVNPLDRGSTLGRLYF

SEQ ID NO: 772136 - protein, 14 aa, Homo sapiens
  CDR3 for beta chain variable domain of TCR clone 386068 (TRBV28, TRBJ2-1)
CASSLNGRNNEQFF

SEQ ID NO: 772137 - protein, 14 aa, Homo sapiens
  CDR3 for alpha chain variable domain of TCR clone 386069 (TRAV4, TRAJ9)
CPVGSGAGGFKTIF

SEQ ID NO: 772138 - protein, 15 aa, Homo sapiens
  CDR3 for beta chain variable domain of TCR clone 386069 (TRBV7-2, TRBJ2-1)
CASSLASGRVNEQFF

SEQ ID NO: 772139 - protein, 13 aa, Homo sapiens
  CDR3 for alpha chain variable domain of TCR clone 386070 (TRAV12-1, TRAJ16)
CVVTGPDGQKLLF

SEQ ID NO: 772140 - protein, 13 aa, Homo sapiens
  CDR3 for beta chain variable domain of TCR clone 386070 (TRBV2, TRBJ1-1)
CARNPTGGFHAFF

SEQ ID NO: 772141 - protein, 14 aa, Homo sapiens
  CDR3 for alpha chain variable domain of TCR clone 386071 (TRAV1-2, TRAJ8)
CAVREDTGFQELVF

SEQ ID NO: 772142 - protein, 14 aa, Homo sapiens
  CDR3 for beta chain variable domain of TCR clone 386071 (TRBV5-7, TRBJ2-7)
CASSGGLSSYEQYF

SEQ ID NO: 772143 - protein, 16 aa, Homo sapiens
  CDR3 for alpha chain variable domain of TCR clone 386072 (TRAV1-2, TRAJ10)
CAVRGVLTGGGNKLTF

SEQ ID NO: 772144 - protein, 11 aa, Homo sapiens
  CDR3 for beta chain variable domain of TCR clone 386072 (TRBV12-4, TRBJ2-2)
CASSSAGELFF

SEQ ID NO: 772145 - protein, 14 aa, Homo sapiens
  CDR3 for alpha chain variable domain of TCR clone 386073 (TRAV14/DV4, TRAJ15)
CAMRRAQAGTALIF

SEQ ID NO: 772146 - protein, 11 aa, Homo sapiens
  CDR3 for beta chain variable domain of TCR clone 386073 (TRBV7-2, TRBJ2-7)
CASSSGLWQYF

SEQ ID NO: 772147 - protein, 11 aa, Homo sapiens
  CDR3 for alpha chain variable domain of TCR clone 386074 (TRAV2, TRAJ23)
CAVETRGKLIF

SEQ ID NO: 772148 - protein, 14 aa, Homo sapiens
  CDR3 for beta chain variable domain of TCR clone 386074 (TRBV2, TRBJ2-3)
CASSEGQNTDTQDF

SEQ ID NO: 772149 - protein, 14 aa, Homo sapiens
  CDR3 for alpha chain variable domain of TCR clone 386075 (TRAV3, TRAJ22)
CAVRDYGSARQLTF

SEQ ID NO: 772150 - protein, 13 aa, Homo sapiens
  CDR3 for beta chain variable domain of TCR clone 386075 (TRBV11-2, TRBJ2-5)
CASGHGAEETQYF

SEQ ID NO: 772151 - protein, 10 aa, Homo sapiens
  CDR3 for alpha chain variable domain of TCR clone 386076 (TRAV25, TRAJ20)
CAVNDYKLSF

SEQ ID NO: 772152 - protein, 16 aa, Homo sapiens
  CDR3 for beta chain variable domain of TCR clone 386076 (TRBV19, TRBJ2-2)
CASRSPGTGATGELFF

SEQ ID NO: 772153 - protein, 13 aa, Homo sapiens
  CDR3 for alpha chain variable domain of TCR clone 386077 (TRAV13-2, TRAJ8)
CAFMNTGFQKLVF

SEQ ID NO: 772154 - protein, 20 aa, Homo sapiens
  CDR3 for beta chain variable domain of TCR clone 386077 (TRBV28, TRBJ2-1)
CASTPIGRSPGLAGGNEQFF

SEQ ID NO: 772155 - protein, 14 aa, Homo sapiens
  CDR3 for alpha chain variable domain of TCR clone 386078 (TRAV1-2, TRAJ8)
CAVREDTGFQKLVF

SEQ ID NO: 772156 - protein, 15 aa, Homo sapiens
  CDR3 for beta chain variable domain of TCR clone 386078 (TRBV15, TRBJ1-1)
CATSLQGGLNTEAFF

SEQ ID NO: 772157 - protein, 14 aa, Homo sapiens
  CDR3 for alpha chain variable domain of TCR clone 386079 (TRAV12-3, TRAJ30)
CAMSLLNRDDKINF

SEQ ID NO: 772158 - protein, 12 aa, Homo sapiens
  CDR3 for beta chain variable domain of TCR clone 386079 (TRBV11-2, TRBJ2-2)
CASSLGGGELFF

SEQ ID NO: 772159 - protein, 14 aa, Homo sapiens
  CDR3 for alpha chain variable domain of TCR clone 386080 (TRAV17, TRAJ15)
CATGPNQAGTALIF

SEQ ID NO: 772160 - protein, 15 aa, Homo sapiens
  CDR3 for beta chain variable domain of TCR clone 386080 (TRBV11-2, TRBJ2-2)
CASSSDRVNAGELFL

SEQ ID NO: 772161 - protein, 15 aa, Homo sapiens
  CDR3 for alpha chain variable domain of TCR clone 386081 (TRAV26-2, TRAJ13)
CILRDLSGVYQKVTF

SEQ ID NO: 772162 - protein, 11 aa, Homo sapiens
  CDR3 for beta chain variable domain of TCR clone 386081 (TRBV7-9, TRBJ2-3)
CASSYTDTQYF

SEQ ID NO: 772163 - protein, 15 aa, Homo sapiens
  CDR3 for alpha chain variable domain of TCR clone 386082 (TRAV3, TRAJ29)
CAVRDLYSGNTPLVF

SEQ ID NO: 772164 - protein, 17 aa, Homo sapiens
  CDR3 for beta chain variable domain of TCR clone 386082 (TRBV20-1, TRBJ2-1)
CSARDPLAGVGDNEQFF

SEQ ID NO: 772165 - protein, 15 aa, Homo sapiens
  CDR3 for alpha chain variable domain of TCR clone 386083 (TRAV8-4, TRAJ37)
CAVSRGSGNTGKLIF

SEQ ID NO: 772166 - protein, 16 aa, Homo sapiens
  CDR3 for beta chain variable domain of TCR clone 386083 (TRBV7-3, TRBJ2-3)
CASSLSGYRTEDTQYF

SEQ ID NO: 772167 - protein, 11 aa, Homo sapiens
  CDR3 for alpha chain variable domain of TCR clone 386084 (TRAV12-1, TRAJ3)
CVVNRQQCFQD

SEQ ID NO: 772168 - protein, 13 aa, Homo sapiens
  CDR3 for beta chain variable domain of TCR clone 386084 (TRBV7-9, TRBJ2-3)
CASSPGSTDTQYF

SEQ ID NO: 772169 - protein, 16 aa, Homo sapiens
  CDR3 for alpha chain variable domain of TCR clone 386085 (TRAV3, TRAJ10)
CAVRGMRAGGGNKLTF

SEQ ID NO: 772170 - protein, 14 aa, Homo sapiens
  CDR3 for beta chain variable domain of TCR clone 386085 (TRBV7-6, TRBJ2-3)
CASSLGTVTDTQYF

SEQ ID NO: 772171 - protein, 13 aa, Homo sapiens
  CDR3 for alpha chain variable domain of TCR clone 386086 (TRAV21, TRAJ57)
CAVIEGGSEKLVF

SEQ ID NO: 772172 - protein, 12 aa, Homo sapiens
  CDR3 for beta chain variable domain of TCR clone 386086 (TRBV11-2, TRBJ2-2)
CASSLPTGELFF

SEQ ID NO: 772173 - protein, 14 aa, Homo sapiens
  CDR3 for alpha chain variable domain of TCR clone 386087 (TRAV12-2, TRAJ32)
CAHPESGATNKLLF

SEQ ID NO: 772174 - protein, 14 aa, Homo sapiens
  CDR3 for beta chain variable domain of TCR clone 386087 (TRBV4-2, TRBJ2-3)
CASRETRAPGMQYL

SEQ ID NO: 772175 - protein, 14 aa, Homo sapiens
  CDR3 for alpha chain variable domain of TCR clone 386088 (TRAV30, TRAJ26)
CGTEIVSYGQNFVF

SEQ ID NO: 772176 - protein, 14 aa, Homo sapiens
  CDR3 for beta chain variable domain of TCR clone 386088 (TRBV15, TRBJ2-7)
CATSRVARGYEQYF

SEQ ID NO: 772177 - protein, 15 aa, Homo sapiens
  CDR3 for alpha chain variable domain of TCR clone 386089 (TRAV17, TRAJ57)
CATGPSQGGSEKLVF

SEQ ID NO: 772178 - protein, 14 aa, Homo sapiens
  CDR3 for beta chain variable domain of TCR clone 386089 (TRBV7-9, TRBJ2-1)
CASSLAGGTNEQFF

SEQ ID NO: 772179 - protein, 12 aa, Homo sapiens
  CDR3 for alpha chain variable domain of TCR clone 386090 (TRAV13-2, TRAJ23)
CAERHRGGKLIF

SEQ ID NO: 772180 - protein, 17 aa, Homo sapiens
  CDR3 for beta chain variable domain of TCR clone 386090 (TRBV4-1, TRBJ2-7)
CASSPFLTSGGVVEQYF

SEQ ID NO: 772181 - protein, 15 aa, Homo sapiens
  CDR3 for alpha chain variable domain of TCR clone 386091 (TRAV8-1, TRAJ23)
CAVNSHYNQGGKLIF

SEQ ID NO: 772182 - protein, 12 aa, Homo sapiens
  CDR3 for beta chain variable domain of TCR clone 386091 (TRBV11-2, TRBJ2-7)
CATRTDAYEQYF

SEQ ID NO: 772183 - protein, 13 aa, Homo sapiens
  CDR3 for alpha chain variable domain of TCR clone 386092 (TRAV36/DV7, TRAJ38)
CVANAGNNRKLIW

SEQ ID NO: 772184 - protein, 15 aa, Homo sapiens
  CDR3 for beta chain variable domain of TCR clone 386092 (TRBV7-9, TRBJ1-6)
CASSSPGRGNSPLHF

SEQ ID NO: 772185 - protein, 12 aa, Homo sapiens
  CDR3 for alpha chain variable domain of TCR clone 386093 (TRAV3, TRAJ20)
CAVRDPEYKLSF

SEQ ID NO: 772186 - protein, 13 aa, Homo sapiens
  CDR3 for beta chain variable domain of TCR clone 386093 (TRBV18, TRBJ1-1)
CASSPETKPEAFF

SEQ ID NO: 772187 - protein, 10 aa, Homo sapiens
  CDR3 for alpha chain variable domain of TCR clone 386094 (TRAV13-1, TRAJ41)
CAASGPRRTQ

SEQ ID NO: 772188 - protein, 13 aa, Homo sapiens
  CDR3 for beta chain variable domain of TCR clone 386094 (TRBV19, TRBJ2-2)
CASSQRSTGELFF

SEQ ID NO: 772189 - protein, 20 aa, Homo sapiens
  CDR3 for alpha chain variable domain of TCR clone 386095 (TRAV25, TRAJ21)
TATQTTDVGTYPLSFNKFYF

SEQ ID NO: 772190 - protein, 14 aa, Homo sapiens
  CDR3 for beta chain variable domain of TCR clone 386095 (TRBV6-1, TRBJ2-1)
CASAKDVFYNEQFF

SEQ ID NO: 772191 - protein, 10 aa, Homo sapiens
  CDR3 for alpha chain variable domain of TCR clone 386096 (TRAV12-1, TRAJ20)
CVVNPRKLSF

SEQ ID NO: 772192 - protein, 14 aa, Homo sapiens
  CDR3 for beta chain variable domain of TCR clone 386096 (TRBV4-1, TRBJ2-2)
CASSQAVNTGELFF

SEQ ID NO: 772193 - protein, 15 aa, Homo sapiens
  CDR3 for alpha chain variable domain of TCR clone 386097 (TRAV38-2/DV8, TRAJ48)
CAYRGGGFGNEKLTF

SEQ ID NO: 772194 - protein, 16 aa, Homo sapiens
  CDR3 for beta chain variable domain of TCR clone 386097 (TRBV28, TRBJ2-7)
CASSPWVATGDLSQYF

SEQ ID NO: 772195 - protein, 13 aa, Homo sapiens
  CDR3 for alpha chain variable domain of TCR clone 386098 (TRAV23/DV6, TRAJ39)
CAASTSCRQHAHL

SEQ ID NO: 772196 - protein, 15 aa, Homo sapiens
  CDR3 for beta chain variable domain of TCR clone 386098 (TRBV5-7, TRBJ1-5)
CASSYGKLWDQPQHF

SEQ ID NO: 772197 - protein, 15 aa, Homo sapiens
  CDR3 for alpha chain variable domain of TCR clone 386099 (TRAV3, TRAJ22)
CAVRDRGGSARPLTF

SEQ ID NO: 772198 - protein, 17 aa, Homo sapiens
  CDR3 for beta chain variable domain of TCR clone 386099 (TRBV13, TRBJ2-3)
CASSLSRVAGGRNTQYF

SEQ ID NO: 772199 - protein, 17 aa, Homo sapiens
  CDR3 for alpha chain variable domain of TCR clone 386100 (TRAV3, TRAJ42)
CAVRDRGYGGSQGNLIF

SEQ ID NO: 772200 - protein, 17 aa, Homo sapiens
  CDR3 for beta chain variable domain of TCR clone 386100 (TRBV7-9, TRBJ2-3)
CASSPTVAGDLTDTQYF

SEQ ID NO: 772201 - protein, 14 aa, Homo sapiens
  CDR3 for alpha chain variable domain of TCR clone 386101 (TRAV17, TRAJ54)
CAMDANHGAQKLVF

SEQ ID NO: 772202 - protein, 12 aa, Homo sapiens
  CDR3 for beta chain variable domain of TCR clone 386101 (TRBV7-9, TRBJ2-7)
CASSIKREEQYF

SEQ ID NO: 772203 - protein, 14 aa, Homo sapiens
  CDR3 for alpha chain variable domain of TCR clone 386102 (TRAV13-1, TRAJ35)
CEASKGGFGNVLHC

SEQ ID NO: 772204 - protein, 14 aa, Homo sapiens
  CDR3 for beta chain variable domain of TCR clone 386102 (TRBV4-1, TRBJ2-2)
CASSQAVNTGELFF

SEQ ID NO: 772205 - protein, 12 aa, Homo sapiens
  CDR3 for alpha chain variable domain of TCR clone 386103 (TRAV26-1, TRAJ43)
CIVRGNNNDMRF

SEQ ID NO: 772206 - protein, 13 aa, Homo sapiens
  CDR3 for beta chain variable domain of TCR clone 386103 (TRBV20-1, TRBJ2-3)
CSPIYPGADTQYF

SEQ ID NO: 772207 - protein, 14 aa, Homo sapiens
  CDR3 for alpha chain variable domain of TCR clone 386104 (TRAV8-2, TRAJ37)
CVVSISGNTGNLIF

SEQ ID NO: 772208 - protein, 14 aa, Homo sapiens
  CDR3 for beta chain variable domain of TCR clone 386104 (TRBV7-6, TRBJ2-3)
CASSLGTVTDTQYF

SEQ ID NO: 772209 - protein, 13 aa, Homo sapiens
  CDR3 for alpha chain variable domain of TCR clone 386105 (TRAV21, TRAJ27)
CAARPGNAGKSTF

SEQ ID NO: 772210 - protein, 17 aa, Homo sapiens
  CDR3 for beta chain variable domain of TCR clone 386105 (TRBV28, TRBJ2-5)
CASSTAEGDALQETQYF

SEQ ID NO: 772211 - protein, 13 aa, Homo sapiens
  CDR3 for alpha chain variable domain of TCR clone 386106 (TRAV6, TRAJ40)
CALVTSGTYKYIF

SEQ ID NO: 772212 - protein, 14 aa, Homo sapiens
  CDR3 for beta chain variable domain of TCR clone 386106 (TRBV11-2, TRBJ1-2)
CASSLYRGNYGYTF

SEQ ID NO: 772213 - protein, 12 aa, Homo sapiens
  CDR3 for alpha chain variable domain of TCR clone 386107 (TRAV12-2, TRAJ10)
WGVTGGRNKLTF

SEQ ID NO: 772214 - protein, 16 aa, Homo sapiens
  CDR3 for beta chain variable domain of TCR clone 386107 (TRBV6-4, TRBJ1-2)
CASSEAVGDPNYGYTF

SEQ ID NO: 772215 - protein, 14 aa, Homo sapiens
  CDR3 for alpha chain variable domain of TCR clone 386108 (TRAV26-1, TRAJ38)
CIAGNAGNNRKLIW

SEQ ID NO: 772216 - protein, 12 aa, Homo sapiens
  CDR3 for beta chain variable domain of TCR clone 386108 (TRBV27, TRBJ2-1)
CASRGFYNEQFF

SEQ ID NO: 772217 - protein, 14 aa, Homo sapiens
  CDR3 for alpha chain variable domain of TCR clone 386109 (TRAV14/DV4, TRAJ20)
CAMREGYNDYKLSF

SEQ ID NO: 772218 - protein, 15 aa, Homo sapiens
  CDR3 for beta chain variable domain of TCR clone 386109 (TRBV28, TRBJ2-7)
CASSLSSGGSYEQYF

SEQ ID NO: 772219 - protein, 15 aa, Homo sapiens
  CDR3 for alpha chain variable domain of TCR clone 386110 (TRAV8-3, TRAJ27)
CAVGPSKTNSGKSTF

SEQ ID NO: 772220 - protein, 12 aa, Homo sapiens
  CDR3 for beta chain variable domain of TCR clone 386110 (TRBV11-2, TRBJ2-2)
CASSLGGGELFF

SEQ ID NO: 772221 - protein, 12 aa, Homo sapiens
  CDR3 for alpha chain variable domain of TCR clone 386111 (TRAV1-1, TRAJ9)
CAVDTGGFKTIF

SEQ ID NO: 772222 - protein, 19 aa, Homo sapiens
  CDR3 for beta chain variable domain of TCR clone 386111 (TRBV9, TRBJ1-3)
CRQRRPGRNNDRSGNTIYF

SEQ ID NO: 772223 - protein, 11 aa, Homo sapiens
  CDR3 for alpha chain variable domain of TCR clone 386112 (TRAV16, TRAJ49)
CALRSGNQFYF

SEQ ID NO: 772224 - protein, 16 aa, Homo sapiens
  CDR3 for beta chain variable domain of TCR clone 386112 (TRBV20-1, TRBJ1-5)
CSARDVGGRWIQPQHF

SEQ ID NO: 772225 - protein, 12 aa, Homo sapiens
  CDR3 for alpha chain variable domain of TCR clone 386113 (TRAV5, TRAJ3)
CAVDSSASKIIF

SEQ ID NO: 772226 - protein, 15 aa, Homo sapiens
  CDR3 for beta chain variable domain of TCR clone 386113 (TRBV6-5, TRBJ2-1)
CASSYDAGAGNEQFF

SEQ ID NO: 772227 - protein, 12 aa, Homo sapiens
  CDR3 for alpha chain variable domain of TCR clone 386114 (TRAV13-1, TRAJ21)
CAAKEGFNKFYF

SEQ ID NO: 772228 - protein, 14 aa, Homo sapiens
  CDR3 for beta chain variable domain of TCR clone 386114 (TRBV18, TRBJ2-7)
CASSPRGGAYEQYS

SEQ ID NO: 772229 - protein, 16 aa, Homo sapiens
  CDR3 for alpha chain variable domain of TCR clone 386115 (TRAV26-1, TRAJ48)
CIVREPPNFGNEKLTF

SEQ ID NO: 772230 - protein, 12 aa, Homo sapiens
  CDR3 for beta chain variable domain of TCR clone 386115 (TRBV19, TRBJ2-1)
CASGRQGAEQFF

SEQ ID NO: 772231 - protein, 17 aa, Homo sapiens
  CDR3 for alpha chain variable domain of TCR clone 386116 (TRAV3, TRAJ6)
CAVRDGPRAGGRYMPTF

SEQ ID NO: 772232 - protein, 14 aa, Homo sapiens
  CDR3 for beta chain variable domain of TCR clone 386116 (TRBV7-2, TRBJ2-7)
CASSPKTSFYEQYF

SEQ ID NO: 772233 - protein, 12 aa, Homo sapiens
  CDR3 for alpha chain variable domain of TCR clone 386117 (TRAV13-1, TRAJ11)
CSSIRGYSTLTF

SEQ ID NO: 772234 - protein, 17 aa, Homo sapiens
  CDR3 for beta chain variable domain of TCR clone 386117 (TRBV4-3, TRBJ1-2)
CASSSRLQAGGSVGDTF

SEQ ID NO: 772235 - protein, 12 aa, Homo sapiens
  CDR3 for alpha chain variable domain of TCR clone 386118 (TRAV29/DV5, TRAJ43)
CAAPYNNNDMRF

SEQ ID NO: 772236 - protein, 17 aa, Homo sapiens
  CDR3 for beta chain variable domain of TCR clone 386118 (TRBV19, TRBJ2-6)
CASSTRQVFSGANVLTF

SEQ ID NO: 772237 - protein, 14 aa, Homo sapiens
  CDR3 for alpha chain variable domain of TCR clone 386119 (TRAV17, TRAJ57)
CATDPQGGSEKLVF

SEQ ID NO: 772238 - protein, 16 aa, Homo sapiens
  CDR3 for beta chain variable domain of TCR clone 386119 (TRBV20-1, TRBJ1-4)
CSALGQGLLTNEKLFF

SEQ ID NO: 772239 - protein, 12 aa, Homo sapiens
  CDR3 for alpha chain variable domain of TCR clone 386120 (TRAV26-1, TRAJ36)
CIVRVRADNLFF

SEQ ID NO: 772240 - protein, 12 aa, Homo sapiens
  CDR3 for beta chain variable domain of TCR clone 386120 (TRBV2, TRBJ2-1)
CAYGPPGNEQFF

SEQ ID NO: 772241 - protein, 14 aa, Homo sapiens
  CDR3 for alpha chain variable domain of TCR clone 386121 (TRAV12-2, TRAJ45)
CAVNIGGGADGLTF

SEQ ID NO: 772242 - protein, 15 aa, Homo sapiens
  CDR3 for beta chain variable domain of TCR clone 386121 (TRBV7-9, TRBJ1-6)
CASSSPGRGNSPLHF

SEQ ID NO: 772243 - protein, 12 aa, Homo sapiens
  CDR3 for alpha chain variable domain of TCR clone 386122 (TRAV8-3, TRAJ42)
CAVDPVQGNLIF

SEQ ID NO: 772244 - protein, 15 aa, Homo sapiens
  CDR3 for beta chain variable domain of TCR clone 386122 (TRBV11-2, TRBJ2-1)
CASSLGTSGLNEQFF

SEQ ID NO: 772245 - protein, 14 aa, Homo sapiens
  CDR3 for alpha chain variable domain of TCR clone 386123 (TRAV26-1, TRAJ38)
CIADNAGNNRKLIG

SEQ ID NO: 772246 - protein, 13 aa, Homo sapiens
  CDR3 for beta chain variable domain of TCR clone 386123 (TRBV4-1, TRBJ2-7)
CASSQGQAYEQYF

SEQ ID NO: 772247 - protein, 16 aa, Homo sapiens
  CDR3 for alpha chain variable domain of TCR clone 386124 (TRAV3, TRAJ37)
CAVRPHGSGNTGKLSF

SEQ ID NO: 772248 - protein, 11 aa, Homo sapiens
  CDR3 for beta chain variable domain of TCR clone 386124 (TRBV29-1, TRBJ2-5)
CSEDRTGTQYF

SEQ ID NO: 772249 - protein, 13 aa, Homo sapiens
  CDR3 for alpha chain variable domain of TCR clone 386125 (TRAV35, TRAJ22)
CAGLSGSARQLSF

SEQ ID NO: 772250 - protein, 16 aa, Homo sapiens
  CDR3 for beta chain variable domain of TCR clone 386125 (TRBV7-9, TRBJ2-1)
CASSLVLTGQGNEQFF

SEQ ID NO: 772251 - protein, 12 aa, Homo sapiens
  CDR3 for alpha chain variable domain of TCR clone 386126 (TRAV27, TRAJ35)
CAGADFGNVLHC

SEQ ID NO: 772252 - protein, 13 aa, Homo sapiens
  CDR3 for beta chain variable domain of TCR clone 386126 (TRBV4-1, TRBJ2-1)
CASSQAGGDEQSF

SEQ ID NO: 772253 - protein, 16 aa, Homo sapiens
  CDR3 for alpha chain variable domain of TCR clone 386127 (TRAV26-1, TRAJ38)
FIVRPLNAGNNRKLIW

SEQ ID NO: 772254 - protein, 13 aa, Homo sapiens
  CDR3 for beta chain variable domain of TCR clone 386127 (TRBV18, TRBJ1-1)
CASSPNGDTEAFF

SEQ ID NO: 772255 - protein, 14 aa, Homo sapiens
  CDR3 for alpha chain variable domain of TCR clone 386128 (TRAV12-2, TRAJ17)
CAVLFKAAGNKLTF

SEQ ID NO: 772256 - protein, 13 aa, Homo sapiens
  CDR3 for beta chain variable domain of TCR clone 386128 (TRBV18, TRBJ2-5)
CASSLQGQETQYF

SEQ ID NO: 772257 - protein, 16 aa, Homo sapiens
  CDR3 for alpha chain variable domain of TCR clone 386129 (TRAV8-3, TRAJ8)
CAVPRDGNTGFQKLLF

SEQ ID NO: 772258 - protein, 15 aa, Homo sapiens
  CDR3 for beta chain variable domain of TCR clone 386129 (TRBV6-1, TRBJ2-6)
CASSSRPSGANDLTF

SEQ ID NO: 772259 - protein, 14 aa, Homo sapiens
  CDR3 for alpha chain variable domain of TCR clone 386130 (TRAV1-2, TRAJ8)
CAVREDTGFQNLVF

SEQ ID NO: 772260 - protein, 13 aa, Homo sapiens
  CDR3 for beta chain variable domain of TCR clone 386130 (TRBV12-4, TRBJ1-5)
CASSPDRAQPQHF

SEQ ID NO: 772261 - protein, 23 aa, Homo sapiens
  CDR3 for alpha chain variable domain of TCR clone 386131 (TRAV26-1, TRAJ38)
CIADNAGNNHIQNPDPAVYQLRD

SEQ ID NO: 772262 - protein, 17 aa, Homo sapiens
  CDR3 for beta chain variable domain of TCR clone 386131 (TRBV11-2, TRBJ2-6)
CASSQRDIFSGANVPTF

SEQ ID NO: 772263 - protein, 13 aa, Homo sapiens
  CDR3 for alpha chain variable domain of TCR clone 386132 (TRAV38-1, TRAJ52)
CAFRGTSYGKLTF

SEQ ID NO: 772264 - protein, 15 aa, Homo sapiens
  CDR3 for beta chain variable domain of TCR clone 386132 (TRBV7-8, TRBJ2-5)
CARSDAAGSQETQYF

SEQ ID NO: 772265 - protein, 15 aa, Homo sapiens
  CDR3 for alpha chain variable domain of TCR clone 386133 (TRAV17, TRAJ45)
CATAYSGGGADGLTF

SEQ ID NO: 772266 - protein, 14 aa, Homo sapiens
  CDR3 for beta chain variable domain of TCR clone 386133 (TRBV7-2, TRBJ2-7)
CASSPKTSFYEQYF

SEQ ID NO: 772267 - protein, 16 aa, Homo sapiens
  CDR3 for alpha chain variable domain of TCR clone 386134 (TRAV14/DV4, TRAJ20)
CAMREGRSRDDYKLSF

SEQ ID NO: 772268 - protein, 14 aa, Homo sapiens
  CDR3 for beta chain variable domain of TCR clone 386134 (TRBV7-3, TRBJ1-1)
CASSLKGGNTEAFF

SEQ ID NO: 772269 - protein, 10 aa, Homo sapiens
  CDR3 for alpha chain variable domain of TCR clone 386135 (TRAV4, TRAJ15)
CLPFWTALTF

SEQ ID NO: 772270 - protein, 15 aa, Homo sapiens
  CDR3 for beta chain variable domain of TCR clone 386135 (TRBV5-1, TRBJ2-1)
CASSFSGTGYNEQFF

SEQ ID NO: 772271 - protein, 14 aa, Homo sapiens
  CDR3 for alpha chain variable domain of TCR clone 386136 (TRAV1-2, TRAJ8)
CAVREDTGFQQLVF

SEQ ID NO: 772272 - protein, 13 aa, Homo sapiens
  CDR3 for beta chain variable domain of TCR clone 386136 (TRBV23-1, TRBJ1-4)
CASRGKFNEKLFF

SEQ ID NO: 772273 - protein, 14 aa, Homo sapiens
  CDR3 for alpha chain variable domain of TCR clone 386137 (TRAV8-3, TRAJ35)
CAVVPQGFRNVLHC

SEQ ID NO: 772274 - protein, 15 aa, Homo sapiens
  CDR3 for beta chain variable domain of TCR clone 386137 (TRBV6-1, TRBJ2-2)
CASSAGQGYTGELFF

SEQ ID NO: 772275 - protein, 15 aa, Homo sapiens
  CDR3 for alpha chain variable domain of TCR clone 386138 (TRAV20, TRAJ43)
SAVQAGKSSNNDMRF

SEQ ID NO: 772276 - protein, 14 aa, Homo sapiens
  CDR3 for beta chain variable domain of TCR clone 386138 (TRBV27, TRBJ2-1)
CASRHLGGGKEQFF

SEQ ID NO: 772277 - protein, 16 aa, Homo sapiens
  CDR3 for alpha chain variable domain of TCR clone 386139 (TRAV8-3, TRAJ28)
CAVGATLGLGVTNSLS

SEQ ID NO: 772278 - protein, 14 aa, Homo sapiens
  CDR3 for beta chain variable domain of TCR clone 386139 (TRBV7-2, TRBJ2-1)
CASSLVVGYNEQFF

SEQ ID NO: 772279 - protein, 16 aa, Homo sapiens
  CDR3 for alpha chain variable domain of TCR clone 386140 (TRAV26-1, TRAJ53)
CIVRVAMGGSNYKLTF

SEQ ID NO: 772280 - protein, 12 aa, Homo sapiens
  CDR3 for beta chain variable domain of TCR clone 386140 (TRBV12-5, TRBJ2-5)
CASGQWVETQYF

SEQ ID NO: 772281 - protein, 14 aa, Homo sapiens
  CDR3 for alpha chain variable domain of TCR clone 386141 (TRAV12-1, TRAJ17)
CVVNYKAAGNKLTF

SEQ ID NO: 772282 - protein, 10 aa, Homo sapiens
  CDR3 for beta chain variable domain of TCR clone 386141 (TRBV20-1, TRBJ2-5)
CSARFETQYF

SEQ ID NO: 772283 - protein, 12 aa, Homo sapiens
  CDR3 for alpha chain variable domain of TCR clone 386142 (TRAV2, TRAJ31)
CAVEDNNARLMF

SEQ ID NO: 772284 - protein, 14 aa, Homo sapiens
  CDR3 for beta chain variable domain of TCR clone 386142 (TRBV7-8, TRBJ2-7)
CASSVGQGAYEQYF

SEQ ID NO: 772285 - protein, 14 aa, Homo sapiens
  CDR3 for alpha chain variable domain of TCR clone 386143 (TRAV1-1, TRAJ23)
CAVSIYNQGGKLIF

SEQ ID NO: 772286 - protein, 15 aa, Homo sapiens
  CDR3 for beta chain variable domain of TCR clone 386143 (TRBV5-8, TRBJ2-2)
CASSLDRGSTGELFF

SEQ ID NO: 772287 - protein, 12 aa, Homo sapiens
  CDR3 for alpha chain variable domain of TCR clone 386144 (TRAV21, TRAJ33)
CAKMDNNYQLIW

SEQ ID NO: 772288 - protein, 14 aa, Homo sapiens
  CDR3 for beta chain variable domain of TCR clone 386144 (TRBV2, TRBJ2-7)
CASSLTSGGYEQCF

SEQ ID NO: 772289 - protein, 18 aa, Homo sapiens
  CDR3 for alpha chain variable domain of TCR clone 386145 (TRAV12-3, TRAJ52)
CAMSRTNAGGTSYGKLTF

SEQ ID NO: 772290 - protein, 13 aa, Homo sapiens
  CDR3 for beta chain variable domain of TCR clone 386145 (TRBV4-2, TRBJ1-1)
CASSQAGNTEAFF

SEQ ID NO: 772291 - protein, 15 aa, Homo sapiens
  CDR3 for alpha chain variable domain of TCR clone 386146 (TRAV3, TRAJ44)
CAVRSNTGTASKLTF

SEQ ID NO: 772292 - protein, 19 aa, Homo sapiens
  CDR3 for beta chain variable domain of TCR clone 386146 (TRBV5-1, TRBJ2-3)
CASSLWLAGGITTTDTQYF

SEQ ID NO: 772293 - protein, 14 aa, Homo sapiens
  CDR3 for alpha chain variable domain of TCR clone 386147 (TRAV1-2, TRAJ33)
CAVRAPDSNYQLIW

SEQ ID NO: 772294 - protein, 15 aa, Homo sapiens
  CDR3 for beta chain variable domain of TCR clone 386147 (TRBV10-3, TRBJ2-3)
CAISLTSGGTGTQYF

SEQ ID NO: 772295 - protein, 11 aa, Homo sapiens
  CDR3 for alpha chain variable domain of TCR clone 386148 (TRAV1-2, TRAJ20)
CAVSNDYKLSF

SEQ ID NO: 772296 - protein, 15 aa, Homo sapiens
  CDR3 for beta chain variable domain of TCR clone 386148 (TRBV6-3, TRBJ2-7)
CASSSPGTVFYEQYF

SEQ ID NO: 772297 - protein, 14 aa, Homo sapiens
  CDR3 for alpha chain variable domain of TCR clone 386149 (TRAV24, TRAJ42)
CAQNYGGSQGNLIF

SEQ ID NO: 772298 - protein, 17 aa, Homo sapiens
  CDR3 for beta chain variable domain of TCR clone 386149 (TRBV19, TRBJ1-5)
CASSIPGARDSPSILVM

SEQ ID NO: 772299 - protein, 14 aa, Homo sapiens
  CDR3 for alpha chain variable domain of TCR clone 386150 (TRAV26-1, TRAJ8)
RIVRVDTGFQRLVF

SEQ ID NO: 772300 - protein, 15 aa, Homo sapiens
  CDR3 for beta chain variable domain of TCR clone 386150 (TRBV9, TRBJ1-6)
CASSVAGTGDSPLHF

SEQ ID NO: 772301 - protein, 14 aa, Homo sapiens
  CDR3 for alpha chain variable domain of TCR clone 386151 (TRAV38-1, TRAJ45)
CASHSVGGADGFTF

SEQ ID NO: 772302 - protein, 13 aa, Homo sapiens
  CDR3 for beta chain variable domain of TCR clone 386151 (TRBV10-3, TRBJ1-2)
CAISERDSYGYTF

SEQ ID NO: 772303 - protein, 16 aa, Homo sapiens
  CDR3 for alpha chain variable domain of TCR clone 386152 (TRAV26-1, TRAJ37)
CTVRGDGSGNTGKLIF

SEQ ID NO: 772304 - protein, 17 aa, Homo sapiens
  CDR3 for beta chain variable domain of TCR clone 386152 (TRBV4-1, TRBJ2-7)
CASSRDPLGVRGGEQYF

SEQ ID NO: 772305 - protein, 12 aa, Homo sapiens
  CDR3 for alpha chain variable domain of TCR clone 386153 (TRAV12-3, TRAJ17)
CAMTLTGNKRTF

SEQ ID NO: 772306 - protein, 15 aa, Homo sapiens
  CDR3 for beta chain variable domain of TCR clone 386153 (TRBV20-1, TRBJ2-7)
CGARDRVSGMDEQYF

SEQ ID NO: 772307 - protein, 13 aa, Homo sapiens
  CDR3 for alpha chain variable domain of TCR clone 386154 (TRAV8-6, TRAJ54)
CAVSEEGAQKLVF

SEQ ID NO: 772308 - protein, 15 aa, Homo sapiens
  CDR3 for beta chain variable domain of TCR clone 386154 (TRBV27, TRBJ2-5)
CASSLYPRGGETQYL

SEQ ID NO: 772309 - protein, 18 aa, Homo sapiens
  CDR3 for alpha chain variable domain of TCR clone 386155 (TRAV26-1, TRAJ23)
CIVRVGLEVWNQGGKRIF

SEQ ID NO: 772310 - protein, 12 aa, Homo sapiens
  CDR3 for beta chain variable domain of TCR clone 386155 (TRBV11-2, TRBJ2-5)
CASSLGQETQYF

SEQ ID NO: 772311 - protein, 13 aa, Homo sapiens
  CDR3 for alpha chain variable domain of TCR clone 386156 (TRAV17, TRAJ40)
CVGSLGGTYKYIF

SEQ ID NO: 772312 - protein, 16 aa, Homo sapiens
  CDR3 for beta chain variable domain of TCR clone 386156 (TRBV7-2, TRBJ1-4)
CASSLAPGRRDEKLFF

SEQ ID NO: 772313 - protein, 17 aa, Homo sapiens
  CDR3 for alpha chain variable domain of TCR clone 386157 (TRAV13-1, TRAJ31)
CAPRDRLMFGDGTQLVV

SEQ ID NO: 772314 - protein, 12 aa, Homo sapiens
  CDR3 for beta chain variable domain of TCR clone 386157 (TRBV7-9, TRBJ2-7)
CASSLEVYEQYF

SEQ ID NO: 772315 - protein, 15 aa, Homo sapiens
  CDR3 for alpha chain variable domain of TCR clone 386158 (TRAV3, TRAJ30)
CAVRDKYGRDDKIIF

SEQ ID NO: 772316 - protein, 16 aa, Homo sapiens
  CDR3 for beta chain variable domain of TCR clone 386158 (TRBV5-1, TRBJ2-5)
CASSLANHRGRETQYF

SEQ ID NO: 772317 - protein, 14 aa, Homo sapiens
  CDR3 for alpha chain variable domain of TCR clone 386159 (TRAV8-4, TRAJ13)
CAVTLSGGYQKVTF

SEQ ID NO: 772318 - protein, 14 aa, Homo sapiens
  CDR3 for beta chain variable domain of TCR clone 386159 (TRBV18, TRBJ2-7)
CASSPRGGAYEQYF

SEQ ID NO: 772319 - protein, 13 aa, Homo sapiens
  CDR3 for alpha chain variable domain of TCR clone 386160 (TRAV12-2, TRAJ10)
CAVPTGGGNKLTF

SEQ ID NO: 772320 - protein, 14 aa, Homo sapiens
  CDR3 for beta chain variable domain of TCR clone 386160 (TRBV7-6, TRBJ2-3)
CASSLGTVTDTQYF

SEQ ID NO: 772321 - protein, 14 aa, Homo sapiens
  CDR3 for alpha chain variable domain of TCR clone 386161 (TRAV10, TRAJ32)
CGEPRGGATHKLIF

SEQ ID NO: 772322 - protein, 14 aa, Homo sapiens
  CDR3 for beta chain variable domain of TCR clone 386161 (TRBV5-4, TRBJ2-2)
CASRLDGGTGELFF

SEQ ID NO: 772323 - protein, 10 aa, Homo sapiens
  CDR3 for alpha chain variable domain of TCR clone 386162 (TRAV26-1, TRAJ22)
CVVSLNFFWF

SEQ ID NO: 772324 - protein, 16 aa, Homo sapiens
  CDR3 for beta chain variable domain of TCR clone 386162 (TRBV15, TRBJ1-2)
CATSRGPRTGGGGYTF

SEQ ID NO: 772325 - protein, 15 aa, Homo sapiens
  CDR3 for alpha chain variable domain of TCR clone 386163 (TRAV3, TRAJ22)
CVVRDRGGSARQLTF

SEQ ID NO: 772326 - protein, 17 aa, Homo sapiens
  CDR3 for beta chain variable domain of TCR clone 386163 (TRBV7-8, TRBJ2-6)
CASSAGTGGAGANVLTF

SEQ ID NO: 772327 - protein, 13 aa, Homo sapiens
  CDR3 for alpha chain variable domain of TCR clone 386164 (TRAV2, TRAJ40)
CAVVISGTYKYIF

SEQ ID NO: 772328 - protein, 14 aa, Homo sapiens
  CDR3 for beta chain variable domain of TCR clone 386164 (TRBV19, TRBJ2-1)
RASPTFVLSGEQFF

SEQ ID NO: 772329 - protein, 18 aa, Homo sapiens
  CDR3 for alpha chain variable domain of TCR clone 386165 (TRAV13-1, TRAJ52)
CAASKRSAGGTSYGKLTF

SEQ ID NO: 772330 - protein, 15 aa, Homo sapiens
  CDR3 for beta chain variable domain of TCR clone 386165 (TRBV20-1, TRBJ2-3)
CSASPPQVSTDTQYF

SEQ ID NO: 772331 - protein, 13 aa, Homo sapiens
  CDR3 for alpha chain variable domain of TCR clone 386166 (TRAV26-1, TRAJ39)
CIVRVVAGNILTS

SEQ ID NO: 772332 - protein, 14 aa, Homo sapiens
  CDR3 for beta chain variable domain of TCR clone 386166 (TRBV20-1, TRBJ2-5)
CSARRQGIRETQYF

SEQ ID NO: 772333 - protein, 13 aa, Homo sapiens
  CDR3 for alpha chain variable domain of TCR clone 386167 (TRAV21, TRAJ20)
CAVGLRVDYKLSF

SEQ ID NO: 772334 - protein, 15 aa, Homo sapiens
  CDR3 for beta chain variable domain of TCR clone 386167 (TRBV6-1, TRBJ2-3)
CASSERGGITDTQYF

SEQ ID NO: 772335 - protein, 16 aa, Homo sapiens
  CDR3 for alpha chain variable domain of TCR clone 386168 (TRAV4, TRAJ18)
CCVLLIGGSTLGRLYF

SEQ ID NO: 772336 - protein, 15 aa, Homo sapiens
  CDR3 for beta chain variable domain of TCR clone 386168 (TRBV7-3, TRBJ2-1)
CASSLSSGSFDEQFF

SEQ ID NO: 772337 - protein, 15 aa, Homo sapiens
  CDR3 for alpha chain variable domain of TCR clone 386169 (TRAV27, TRAJ38)
CAARRNAGNNRNLIG

SEQ ID NO: 772338 - protein, 13 aa, Homo sapiens
  CDR3 for beta chain variable domain of TCR clone 386169 (TRBV12-5, TRBJ2-3)
CASGDRQSDTQYF

SEQ ID NO: 772339 - protein, 12 aa, Homo sapiens
  CDR3 for alpha chain variable domain of TCR clone 386170 (TRAV20, TRAJ39)
CAVGNAGNMLTF

SEQ ID NO: 772340 - protein, 17 aa, Homo sapiens
  CDR3 for beta chain variable domain of TCR clone 386170 (TRBV4-1, TRBJ2-3)
CASSQGYVSGGTDTQYC

SEQ ID NO: 772341 - protein, 14 aa, Homo sapiens
  CDR3 for alpha chain variable domain of TCR clone 386171 (TRAV12-3, TRAJ37)
WVSEGSSNTGKLIF

SEQ ID NO: 772342 - protein, 14 aa, Homo sapiens
  CDR3 for beta chain variable domain of TCR clone 386171 (TRBV20-1, TRBJ1-1)
CSAQTRIGGTEAFF

SEQ ID NO: 772343 - protein, 11 aa, Homo sapiens
  CDR3 for alpha chain variable domain of TCR clone 386172 (TRAV12-2, TRAJ49)
CALQGGNQFYF

SEQ ID NO: 772344 - protein, 11 aa, Homo sapiens
  CDR3 for beta chain variable domain of TCR clone 386172 (TRBV18, TRBJ1-2)
CAGSPLNGYTF

SEQ ID NO: 772345 - protein, 13 aa, Homo sapiens
  CDR3 for alpha chain variable domain of TCR clone 386173 (TRAV29/DV5, TRAJ31)
CAASRNNNARLMF

SEQ ID NO: 772346 - protein, 15 aa, Homo sapiens
  CDR3 for beta chain variable domain of TCR clone 386173 (TRBV11-2, TRBJ2-1)
CASSKNRGLIYEQFF

SEQ ID NO: 772347 - protein, 14 aa, Homo sapiens
  CDR3 for alpha chain variable domain of TCR clone 386174 (TRAV2, TRAJ9)
CAVEDRSGGFKTII

SEQ ID NO: 772348 - protein, 21 aa, Homo sapiens
  CDR3 for beta chain variable domain of TCR clone 386174 (TRBV12-5, TRBJ2-5)
CASGPRTREIKRPSTSGQARG

SEQ ID NO: 772349 - protein, 11 aa, Homo sapiens
  CDR3 for alpha chain variable domain of TCR clone 386175 (TRAV23/DV6, TRAJ49)
CAARAGNQFYF

SEQ ID NO: 772350 - protein, 14 aa, Homo sapiens
  CDR3 for beta chain variable domain of TCR clone 386175 (TRBV6-1, TRBJ2-7)
CASSRDRVGYEQYF

SEQ ID NO: 772351 - protein, 15 aa, Homo sapiens
  CDR3 for alpha chain variable domain of TCR clone 386176 (TRAV21, TRAJ24)
CAARSSTDSWGKLPF

SEQ ID NO: 772352 - protein, 13 aa, Homo sapiens
  CDR3 for beta chain variable domain of TCR clone 386176 (TRBV10-3, TRBJ2-7)
CASKLAVNYEQYF

SEQ ID NO: 772353 - protein, 13 aa, Homo sapiens
  CDR3 for alpha chain variable domain of TCR clone 386177 (TRAV20, TRAJ37)
CAGCSSNTGKLIF

SEQ ID NO: 772354 - protein, 19 aa, Homo sapiens
  CDR3 for beta chain variable domain of TCR clone 386177 (TRBV20-1, TRBJ2-1)
CSARGETSGNSPQIDEQFF

SEQ ID NO: 772355 - protein, 11 aa, Homo sapiens
  CDR3 for alpha chain variable domain of TCR clone 386178 (TRAV12-3, TRAJ43)
CAMSVSNDMRF

SEQ ID NO: 772356 - protein, 14 aa, Homo sapiens
  CDR3 for beta chain variable domain of TCR clone 386178 (TRBV28, TRBJ2-1)
CASSLVAPYNEQFF

SEQ ID NO: 772357 - protein, 14 aa, Homo sapiens
  CDR3 for alpha chain variable domain of TCR clone 386179 (TRAV13-1, TRAJ44)
CAAKATGTASKLPF

SEQ ID NO: 772358 - protein, 14 aa, Homo sapiens
  CDR3 for beta chain variable domain of TCR clone 386179 (TRBV25-1, TRBJ1-1)
CASTHLGGNTEAFF

SEQ ID NO: 772359 - protein, 14 aa, Homo sapiens
  CDR3 for alpha chain variable domain of TCR clone 386180 (TRAV1-2, TRAJ16)
CSVNRFSDGQQLLF

SEQ ID NO: 772360 - protein, 15 aa, Homo sapiens
  CDR3 for beta chain variable domain of TCR clone 386180 (TRBV9, TRBJ1-6)
CASSVAGTGDSPLHF

SEQ ID NO: 772361 - protein, 12 aa, Homo sapiens
  CDR3 for alpha chain variable domain of TCR clone 386181 (TRAV22, TRAJ29)
CAPPSGNTPLVF

SEQ ID NO: 772362 - protein, 14 aa, Homo sapiens
  CDR3 for beta chain variable domain of TCR clone 386181 (TRBV5-4, TRBJ1-1)
CASSLDSRRDEAFF

SEQ ID NO: 772363 - protein, 12 aa, Homo sapiens
  CDR3 for alpha chain variable domain of TCR clone 386182 (TRAV2, TRAJ9)
CAVGAGGFKTIF

SEQ ID NO: 772364 - protein, 10 aa, Homo sapiens
  CDR3 for beta chain variable domain of TCR clone 386182 (TRBV13, TRBJ2-2)
QGSTPGSCFF

SEQ ID NO: 772365 - protein, 13 aa, Homo sapiens
  CDR3 for alpha chain variable domain of TCR clone 386183 (TRAV12-2, TRAJ6)
CAVNVSRKLHTYI

SEQ ID NO: 772366 - protein, 12 aa, Homo sapiens
  CDR3 for beta chain variable domain of TCR clone 386183 (TRBV3-1, TRBJ1-2)
CASTSGLYGYTF

SEQ ID NO: 772367 - protein, 21 aa, Homo sapiens
  CDR3 for alpha chain variable domain of TCR clone 386184 (TRAV9-2, )
CALIQIGDIQNPDPAVYQLID

SEQ ID NO: 772368 - protein, 17 aa, Homo sapiens
  CDR3 for beta chain variable domain of TCR clone 386184 (TRBV7-8, TRBJ2-6)
CASSAGTGGAGANVLTF

SEQ ID NO: 772369 - protein, 19 aa, Homo sapiens
  CDR3 for alpha chain variable domain of TCR clone 386185 (TRAV26-1, TRAJ52)
CIVRAHRNAGGTSYGKLTF

SEQ ID NO: 772370 - protein, 15 aa, Homo sapiens
  CDR3 for beta chain variable domain of TCR clone 386185 (TRBV12-4, TRBJ2-5)
CASSPPTGLQATQYF

SEQ ID NO: 772371 - protein, 16 aa, Homo sapiens
  CDR3 for alpha chain variable domain of TCR clone 386186 (TRAV35, TRAJ28)
CAGQKYSGAGSYQLTF

SEQ ID NO: 772372 - protein, 16 aa, Homo sapiens
  CDR3 for beta chain variable domain of TCR clone 386186 (TRBV28, TRBJ2-7)
CASSSPQGRDVYEQYF

SEQ ID NO: 772373 - protein, 16 aa, Homo sapiens
  CDR3 for alpha chain variable domain of TCR clone 386187 (TRAV3, TRAJ28)
CAVLPRSGAGSYQLTF

SEQ ID NO: 772374 - protein, 11 aa, Homo sapiens
  CDR3 for beta chain variable domain of TCR clone 386187 (TRBV11-2, TRBJ2-2)
CASSLPGELFF

SEQ ID NO: 772375 - protein, 10 aa, Homo sapiens
  CDR3 for alpha chain variable domain of TCR clone 386188 (TRAV12-2, TRAJ49)
CAVRRNQFYF

SEQ ID NO: 772376 - protein, 14 aa, Homo sapiens
  CDR3 for beta chain variable domain of TCR clone 386188 (TRBV11-2, TRBJ2-5)
CASSRTGGIETQYF

SEQ ID NO: 772377 - protein, 13 aa, Homo sapiens
  CDR3 for alpha chain variable domain of TCR clone 386189 (TRAV36/DV7, TRAJ7)
CAGTRYGNNRLAF

SEQ ID NO: 772378 - protein, 14 aa, Homo sapiens
  CDR3 for beta chain variable domain of TCR clone 386189 (TRBV19, TRBJ2-1)
CASPTFVLSGGKFF

SEQ ID NO: 772379 - protein, 11 aa, Homo sapiens
  CDR3 for alpha chain variable domain of TCR clone 386190 (TRAV8-6, TRAJ34)
CAVWNTDKLIF

SEQ ID NO: 772380 - protein, 16 aa, Homo sapiens
  CDR3 for beta chain variable domain of TCR clone 386190 (TRBV5-1, TRBJ2-5)
CASSYASTSSGGEQYF

SEQ ID NO: 772381 - protein, 14 aa, Homo sapiens
  CDR3 for alpha chain variable domain of TCR clone 386191 (TRAV8-2, TRAJ4)
CVVSPSGGYHKLIF

SEQ ID NO: 772382 - protein, 14 aa, Homo sapiens
  CDR3 for beta chain variable domain of TCR clone 386191 (TRBV10-3, TRBJ2-2)
CAISEVSHSGELFF

SEQ ID NO: 772383 - protein, 19 aa, Homo sapiens
  CDR3 for alpha chain variable domain of TCR clone 386192 (TRAV26-1, TRAJ28)
CIVRVAHAYSGAGSYQLTF

SEQ ID NO: 772384 - protein, 14 aa, Homo sapiens
  CDR3 for beta chain variable domain of TCR clone 386192 (TRBV25-1, TRBJ1-1)
CASTHLGGNAEAFF

SEQ ID NO: 772385 - protein, 17 aa, Homo sapiens
  CDR3 for alpha chain variable domain of TCR clone 386193 (TRAV3, TRAJ38)
CAVRDCVNAGNNRKLIW

SEQ ID NO: 772386 - protein, 15 aa, Homo sapiens
  CDR3 for beta chain variable domain of TCR clone 386193 (TRBV27, TRBJ2-1)
CASSNGGGSSNEQFF

SEQ ID NO: 772387 - protein, 18 aa, Homo sapiens
  CDR3 for alpha chain variable domain of TCR clone 386194 (TRAV21, TRAJ52)
CAVRPSPAGGTSYGKLTF

SEQ ID NO: 772388 - protein, 15 aa, Homo sapiens
  CDR3 for beta chain variable domain of TCR clone 386194 (TRBV20-1, TRBJ2-7)
CSARGRVSGMDEQYF

SEQ ID NO: 772389 - protein, 15 aa, Homo sapiens
  CDR3 for alpha chain variable domain of TCR clone 386195 (TRAV17, TRAJ13)
CATDAGSGGYQKVTF

SEQ ID NO: 772390 - protein, 17 aa, Homo sapiens
  CDR3 for beta chain variable domain of TCR clone 386195 (TRBV11-2, TRBJ2-1)
CASRLYPPGVEYNEQFF

SEQ ID NO: 772391 - protein, 13 aa, Homo sapiens
  CDR3 for alpha chain variable domain of TCR clone 386196 (TRAV13-1, TRAJ39)
CSKDSNAGNMLTF

SEQ ID NO: 772392 - protein, 18 aa, Homo sapiens
  CDR3 for beta chain variable domain of TCR clone 386196 (TRBV10-2, TRBJ2-2)
CISAPAVHRQADAGELFF

SEQ ID NO: 772393 - protein, 13 aa, Homo sapiens
  CDR3 for alpha chain variable domain of TCR clone 386197 (TRAV21, TRAJ20)
CAVGLRVDYKLSF

SEQ ID NO: 772394 - protein, 16 aa, Homo sapiens
  CDR3 for beta chain variable domain of TCR clone 386197 (TRBV2, TRBJ2-1)
CASSVGGSLSYNEQFF

SEQ ID NO: 772395 - protein, 17 aa, Homo sapiens
  CDR3 for alpha chain variable domain of TCR clone 386198 (TRAV36/DV7, TRAJ44)
CAVEQIPALPVNSPLGL

SEQ ID NO: 772396 - protein, 15 aa, Homo sapiens
  CDR3 for beta chain variable domain of TCR clone 386198 (TRBV12-4, TRBJ2-5)
CASSPPTGLQETQYF

SEQ ID NO: 772397 - protein, 14 aa, Homo sapiens
  CDR3 for alpha chain variable domain of TCR clone 386199 (TRAV1-2, TRAJ15)
CAVRDRQSGTALIF

SEQ ID NO: 772398 - protein, 17 aa, Homo sapiens
  CDR3 for beta chain variable domain of TCR clone 386199 (TRBV5-5, TRBJ1-2)
CASSLGSLDGQSEGYTF

SEQ ID NO: 772399 - protein, 12 aa, Homo sapiens
  CDR3 for alpha chain variable domain of TCR clone 386200 (TRAV26-1, TRAJ53)
CIEGGSNYKLTF

SEQ ID NO: 772400 - protein, 14 aa, Homo sapiens
  CDR3 for beta chain variable domain of TCR clone 386200 (TRBV11-2, TRBJ2-3)
CASSRLARTDTQYF

SEQ ID NO: 772401 - protein, 15 aa, Homo sapiens
  CDR3 for alpha chain variable domain of TCR clone 386201 (TRAV12-2, TRAJ53)
CAVNGGGGSNYKLTF

SEQ ID NO: 772402 - protein, 14 aa, Homo sapiens
  CDR3 for beta chain variable domain of TCR clone 386201 (TRBV12-5, TRBJ2-5)
CASGSRTHQETQYC

SEQ ID NO: 772403 - protein, 17 aa, Homo sapiens
  CDR3 for alpha chain variable domain of TCR clone 386202 (TRAV12-2, TRAJ36)
CAVKDNLFVGTGTRLTV

SEQ ID NO: 772404 - protein, 15 aa, Homo sapiens
  CDR3 for beta chain variable domain of TCR clone 386202 (TRBV28, TRBJ2-2)
CASTVAGANTGELFF

SEQ ID NO: 772405 - protein, 10 aa, Homo sapiens
  CDR3 for alpha chain variable domain of TCR clone 386203 (TRAV25, TRAJ20)
CAVNDYKLSF

SEQ ID NO: 772406 - protein, 17 aa, Homo sapiens
  CDR3 for beta chain variable domain of TCR clone 386203 (TRBV11-3, TRBJ2-6)
CASSLDRTGSGANVLTF

SEQ ID NO: 772407 - protein, 13 aa, Homo sapiens
  CDR3 for alpha chain variable domain of TCR clone 386204 (TRAV30, TRAJ6)
CGFIQGGSYIPTF

SEQ ID NO: 772408 - protein, 16 aa, Homo sapiens
  CDR3 for beta chain variable domain of TCR clone 386204 (TRBV7-6, TRBJ2-3)
CASSARTSRGTDTQYF

SEQ ID NO: 772409 - protein, 11 aa, Homo sapiens
  CDR3 for alpha chain variable domain of TCR clone 386205 (TRAV1-1, TRAJ23)
CAVRQGGKLIF

SEQ ID NO: 772410 - protein, 11 aa, Homo sapiens
  CDR3 for beta chain variable domain of TCR clone 386205 (TRBV10-3, TRBJ2-7)
CAISEGLEQYF

SEQ ID NO: 772411 - protein, 11 aa, Homo sapiens
  CDR3 for alpha chain variable domain of TCR clone 386206 (TRAV39, TRAJ49)
CAVDISTQFYF

SEQ ID NO: 772412 - protein, 14 aa, Homo sapiens
  CDR3 for beta chain variable domain of TCR clone 386206 (TRBV7-2, TRBJ1-2)
CASSQTGSTYGYTF

SEQ ID NO: 772413 - protein, 14 aa, Homo sapiens
  CDR3 for alpha chain variable domain of TCR clone 386207 (TRAV12-1, TRAJ30)
CVVNIGGRDDKIIF

SEQ ID NO: 772414 - protein, 15 aa, Homo sapiens
  CDR3 for beta chain variable domain of TCR clone 386207 (TRBV5-8, TRBJ2-2)
CASSLDRGATGELFF

SEQ ID NO: 772415 - protein, 15 aa, Homo sapiens
  CDR3 for alpha chain variable domain of TCR clone 386208 (TRAV3, TRAJ5)
CAVRDLDTVRRALTF

SEQ ID NO: 772416 - protein, 14 aa, Homo sapiens
  CDR3 for beta chain variable domain of TCR clone 386208 (TRBV25-1, TRBJ1-4)
CASSGGGQPEKLFF

SEQ ID NO: 772417 - protein, 11 aa, Homo sapiens
  CDR3 for alpha chain variable domain of TCR clone 386209 (TRAV17, TRAJ9)
CGFTGGFKTIF

SEQ ID NO: 772418 - protein, 15 aa, Homo sapiens
  CDR3 for beta chain variable domain of TCR clone 386209 (TRBV28, TRBJ2-1)
CASSIIAGGRSEQFF

SEQ ID NO: 772419 - protein, 12 aa, Homo sapiens
  CDR3 for alpha chain variable domain of TCR clone 386210 (TRAV1-1, TRAJ8)
CAGGTGFQKLVF

SEQ ID NO: 772420 - protein, 17 aa, Homo sapiens
  CDR3 for beta chain variable domain of TCR clone 386210 (TRBV28, TRBJ2-5)
CASSRQGGLAGAETQYF

SEQ ID NO: 772421 - protein, 16 aa, Homo sapiens
  CDR3 for alpha chain variable domain of TCR clone 386211 (TRAV3, TRAJ10)
CAVRDMRAGGGNKLTF

SEQ ID NO: 772422 - protein, 17 aa, Homo sapiens
  CDR3 for beta chain variable domain of TCR clone 386211 (TRBV20-1, TRBJ2-2)
CSASGSGQGGLTGEVFF

SEQ ID NO: 772423 - protein, 12 aa, Homo sapiens
  CDR3 for alpha chain variable domain of TCR clone 386212 (TRAV8-3, TRAJ26)
CAGDNYGQIFVF

SEQ ID NO: 772424 - protein, 15 aa, Homo sapiens
  CDR3 for beta chain variable domain of TCR clone 386212 (TRBV6-3, TRBJ2-2)
CASSFLATLTGELFF

SEQ ID NO: 772425 - protein, 14 aa, Homo sapiens
  CDR3 for alpha chain variable domain of TCR clone 386213 (TRAV1-2, TRAJ8)
CAVREDTGFQKLVF

SEQ ID NO: 772426 - protein, 16 aa, Homo sapiens
  CDR3 for beta chain variable domain of TCR clone 386213 (TRBV2, TRBJ2-3)
CASSTSVEGVADTQYF

SEQ ID NO: 772427 - protein, 13 aa, Homo sapiens
  CDR3 for alpha chain variable domain of TCR clone 386214 (TRAV27, TRAJ49)
CALRPYTGKQFYF

SEQ ID NO: 772428 - protein, 16 aa, Homo sapiens
  CDR3 for beta chain variable domain of TCR clone 386214 (TRBV4-1, TRBJ1-2)
CASSQDAGQVLYGYTF

SEQ ID NO: 772429 - protein, 15 aa, Homo sapiens
  CDR3 for alpha chain variable domain of TCR clone 386215 (TRAV3, TRAJ47)
CAVRDIGEYGNKLVF

SEQ ID NO: 772430 - protein, 14 aa, Homo sapiens
  CDR3 for beta chain variable domain of TCR clone 386215 (TRBV13, TRBJ2-5)
CASSLELVGETQYF

SEQ ID NO: 772431 - protein, 18 aa, Homo sapiens
  CDR3 for alpha chain variable domain of TCR clone 386216 (TRAV8-4, TRAJ52)
CAVTRADAGGTSYGKLTF

SEQ ID NO: 772432 - protein, 20 aa, Homo sapiens
  CDR3 for beta chain variable domain of TCR clone 386216 (TRBV19, TRBJ2-1)
CASSISRTVTSTRLNNEQFF

SEQ ID NO: 772433 - protein, 21 aa, Homo sapiens
  CDR3 for alpha chain variable domain of TCR clone 386217 (TRAV12-1, TRAJ37)
CVVNGGLWQHRQTNLWSRDNF

SEQ ID NO: 772434 - protein, 12 aa, Homo sapiens
  CDR3 for beta chain variable domain of TCR clone 386217 (TRBV20-1, TRBJ1-2)
CSAPGFNYGYTF

SEQ ID NO: 772435 - protein, 13 aa, Homo sapiens
  CDR3 for alpha chain variable domain of TCR clone 386218 (TRAV1-1, TRAJ9)
CAAKNTGGFKTIF

SEQ ID NO: 772436 - protein, 14 aa, Homo sapiens
  CDR3 for beta chain variable domain of TCR clone 386218 (TRBV20-1, TRBJ2-1)
CSAQIGGSSNEQFF

SEQ ID NO: 772437 - protein, 12 aa, Homo sapiens
  CDR3 for alpha chain variable domain of TCR clone 386219 (TRAV13-1, TRAJ49)
CAASPMGNQFYF

SEQ ID NO: 772438 - protein, 15 aa, Homo sapiens
  CDR3 for beta chain variable domain of TCR clone 386219 (TRBV5-1, TRBJ2-3)
CASSVTSGSTDTQYF

SEQ ID NO: 772439 - protein, 12 aa, Homo sapiens
  CDR3 for alpha chain variable domain of TCR clone 386220 (TRAV21, TRAJ58)
CTLSASGSRLTF

SEQ ID NO: 772440 - protein, 13 aa, Homo sapiens
  CDR3 for beta chain variable domain of TCR clone 386220 (TRBV5-7, TRBJ1-2)
CASSLGVFNGYTF

SEQ ID NO: 772441 - protein, 15 aa, Homo sapiens
  CDR3 for alpha chain variable domain of TCR clone 386221 (TRAV35, TRAJ40)
CAGQLGQAGTYTYIF

SEQ ID NO: 772442 - protein, 14 aa, Homo sapiens
  CDR3 for beta chain variable domain of TCR clone 386221 (TRBV7-3, TRBJ2-1)
CASSLTGGANEQFF

SEQ ID NO: 772443 - protein, 13 aa, Homo sapiens
  CDR3 for alpha chain variable domain of TCR clone 386222 (TRAV2, TRAJ16)
CAVEFGDGRKLLF

SEQ ID NO: 772444 - protein, 14 aa, Homo sapiens
  CDR3 for beta chain variable domain of TCR clone 386222 (TRBV6-3, TRBJ2-5)
CASSYSLREKTQYF

SEQ ID NO: 772445 - protein, 11 aa, Homo sapiens
  CDR3 for alpha chain variable domain of TCR clone 386223 (TRAV2, TRAJ13)
CASGGYQKVTF

SEQ ID NO: 772446 - protein, 16 aa, Homo sapiens
  CDR3 for beta chain variable domain of TCR clone 386223 (TRBV5-1, TRBJ2-1)
CASSIRSGGSYNEQFF

SEQ ID NO: 772447 - protein, 14 aa, Homo sapiens
  CDR3 for alpha chain variable domain of TCR clone 386224 (TRAV12-3, TRAJ9)
CAMSVETGGFKTIF

SEQ ID NO: 772448 - protein, 14 aa, Homo sapiens
  CDR3 for beta chain variable domain of TCR clone 386224 (TRBV4-2, TRBJ2-1)
CASGLDRAYNEQFF

SEQ ID NO: 772449 - protein, 13 aa, Homo sapiens
  CDR3 for alpha chain variable domain of TCR clone 386225 (TRAV8-3, TRAJ43)
CAVVPYNHNDMRF

SEQ ID NO: 772450 - protein, 17 aa, Homo sapiens
  CDR3 for beta chain variable domain of TCR clone 386225 (TRBV7-7, TRBJ1-1)
CASIGDRPNLGVTEAFF

SEQ ID NO: 772451 - protein, 14 aa, Homo sapiens
  CDR3 for alpha chain variable domain of TCR clone 386226 (TRAV12-1, TRAJ30)
CVVNIGGRDDKIIF

SEQ ID NO: 772452 - protein, 14 aa, Homo sapiens
  CDR3 for beta chain variable domain of TCR clone 386226 (TRBV4-2, TRBJ2-3)
CASRETRAPGMQYF

SEQ ID NO: 772453 - protein, 10 aa, Homo sapiens
  CDR3 for alpha chain variable domain of TCR clone 386227 (TRAV26-1, TRAJ40)
CIAGTYKYIF

SEQ ID NO: 772454 - protein, 12 aa, Homo sapiens
  CDR3 for beta chain variable domain of TCR clone 386227 (TRBV11-3, TRBJ1-1)
CASSLRDSEAFF

SEQ ID NO: 772455 - protein, 14 aa, Homo sapiens
  CDR3 for alpha chain variable domain of TCR clone 386228 (TRAV13-1, TRAJ48)
CAASRSFGNEKLTF

SEQ ID NO: 772456 - protein, 17 aa, Homo sapiens
  CDR3 for beta chain variable domain of TCR clone 386228 (TRBV11-2, TRBJ2-1)
CASSLYPPGVEYNEQFF

SEQ ID NO: 772457 - protein, 15 aa, Homo sapiens
  CDR3 for alpha chain variable domain of TCR clone 386229 (TRAV3, TRAJ29)
CAVRAPLSGNTPLVF

SEQ ID NO: 772458 - protein, 16 aa, Homo sapiens
  CDR3 for beta chain variable domain of TCR clone 386229 (TRBV28, TRBJ2-7)
CASSSGTSGRGYEQYF

SEQ ID NO: 772459 - protein, 13 aa, Homo sapiens
  CDR3 for alpha chain variable domain of TCR clone 386230 (TRAV17, TRAJ9)
CATDGTGGFKTIF

SEQ ID NO: 772460 - protein, 17 aa, Homo sapiens
  CDR3 for beta chain variable domain of TCR clone 386230 (TRBV6-5, TRBJ2-7)
CASSYSFWGQGSYGQYF

SEQ ID NO: 772461 - protein, 18 aa, Homo sapiens
  CDR3 for alpha chain variable domain of TCR clone 386231 (TRAV21, TRAJ53)
CAVKGGENSGGGNYKLTF

SEQ ID NO: 772462 - protein, 13 aa, Homo sapiens
  CDR3 for beta chain variable domain of TCR clone 386231 (TRBV9, TRBJ2-1)
CASSPSGGSEQFF

SEQ ID NO: 772463 - protein, 13 aa, Homo sapiens
  CDR3 for alpha chain variable domain of TCR clone 386232 (TRAV27, TRAJ23)
CAGVLPKGGKLIF

SEQ ID NO: 772464 - protein, 14 aa, Homo sapiens
  CDR3 for beta chain variable domain of TCR clone 386232 (TRBV5-8, TRBJ2-3)
CASSLSPSSDTQYF

SEQ ID NO: 772465 - protein, 15 aa, Homo sapiens
  CDR3 for alpha chain variable domain of TCR clone 386233 (TRAV13-1, TRAJ57)
QVPPLSQGGSEKLVF

SEQ ID NO: 772466 - protein, 12 aa, Homo sapiens
  CDR3 for beta chain variable domain of TCR clone 386233 (TRBV7-3, TRBJ2-5)
CASSLAKETQYF

SEQ ID NO: 772467 - protein, 12 aa, Homo sapiens
  CDR3 for alpha chain variable domain of TCR clone 386234 (TRAV1-1, TRAJ9)
CAVDTGGFKTII

SEQ ID NO: 772468 - protein, 14 aa, Homo sapiens
  CDR3 for beta chain variable domain of TCR clone 386234 (TRBV7-8, TRBJ2-5)
CASSATGGQETQYF

SEQ ID NO: 772469 - protein, 22 aa, Homo sapiens
  CDR3 for alpha chain variable domain of TCR clone 386235 (TRAV21, )
CAVRQDAGNNHIQNPDPAVYQL

SEQ ID NO: 772470 - protein, 14 aa, Homo sapiens
  CDR3 for beta chain variable domain of TCR clone 386235 (TRBV11-3, TRBJ1-6)
CASSFSGGDSPLHF

SEQ ID NO: 772471 - protein, 12 aa, Homo sapiens
  CDR3 for alpha chain variable domain of TCR clone 386236 (TRAV13-2, TRAJ23)
CAERHRGGKLIF

SEQ ID NO: 772472 - protein, 13 aa, Homo sapiens
  CDR3 for beta chain variable domain of TCR clone 386236 (TRBV2, TRBJ1-6)
CADSVSYNSPLHF

SEQ ID NO: 772473 - protein, 15 aa, Homo sapiens
  CDR3 for alpha chain variable domain of TCR clone 386237 (TRAV8-4, TRAJ7)
CAVSGGNYGNNRLAF

SEQ ID NO: 772474 - protein, 15 aa, Homo sapiens
  CDR3 for beta chain variable domain of TCR clone 386237 (TRBV12-4, TRBJ2-2)
CASSFKSANTGELFF

SEQ ID NO: 772475 - protein, 14 aa, Homo sapiens
  CDR3 for alpha chain variable domain of TCR clone 386238 (TRAV35, TRAJ33)
CAGSSQDSNYQLIW

SEQ ID NO: 772476 - protein, 16 aa, Homo sapiens
  CDR3 for beta chain variable domain of TCR clone 386238 (TRBV20-1, TRBJ2-1)
CSARDLKQGMNNEQVL

SEQ ID NO: 772477 - protein, 17 aa, Homo sapiens
  CDR3 for alpha chain variable domain of TCR clone 386239 (TRAV26-1, TRAJ37)
CTVRVITVSSNTGNLIF

SEQ ID NO: 772478 - protein, 15 aa, Homo sapiens
  CDR3 for beta chain variable domain of TCR clone 386239 (TRBV10-1, TRBJ2-3)
CASSATSGGFDTQYF

SEQ ID NO: 772479 - protein, 12 aa, Homo sapiens
  CDR3 for alpha chain variable domain of TCR clone 386240 (TRAV20, TRAJ39)
CAVGNAGNMLTF

SEQ ID NO: 772480 - protein, 13 aa, Homo sapiens
  CDR3 for beta chain variable domain of TCR clone 386240 (TRBV4-1, TRBJ2-5)
CASSLTRGETQYF

SEQ ID NO: 772481 - protein, 14 aa, Homo sapiens
  CDR3 for alpha chain variable domain of TCR clone 386241 (TRAV22, TRAJ29)
CAVTRNSGNTPLVF

SEQ ID NO: 772482 - protein, 15 aa, Homo sapiens
  CDR3 for beta chain variable domain of TCR clone 386241 (TRBV19, TRBJ1-6)
CASSTQEAVGSPLHF

SEQ ID NO: 772483 - protein, 13 aa, Homo sapiens
  CDR3 for alpha chain variable domain of TCR clone 386242 (TRAV17, TRAJ6)
CATGFGGSYIPTF

SEQ ID NO: 772484 - protein, 14 aa, Homo sapiens
  CDR3 for beta chain variable domain of TCR clone 386242 (TRBV5-1, TRBJ2-5)
CASSSGGSQETQSF

SEQ ID NO: 772485 - protein, 12 aa, Homo sapiens
  CDR3 for alpha chain variable domain of TCR clone 386243 (TRAV12-3, TRAJ17)
CAMTLTGNKLTF

SEQ ID NO: 772486 - protein, 12 aa, Homo sapiens
  CDR3 for beta chain variable domain of TCR clone 386243 (TRBV12-4, TRBJ2-7)
CASSLGGGEQYF

SEQ ID NO: 772487 - protein, 14 aa, Homo sapiens
  CDR3 for alpha chain variable domain of TCR clone 386244 (TRAV26-1, TRAJ48)
CIVRVGFGNEKLTF

SEQ ID NO: 772488 - protein, 13 aa, Homo sapiens
  CDR3 for beta chain variable domain of TCR clone 386244 (TRBV11-3, TRBJ2-3)
CASSHDNKDTQYF

SEQ ID NO: 772489 - protein, 12 aa, Homo sapiens
  CDR3 for alpha chain variable domain of TCR clone 386245 (TRAV13-1, TRAJ9)
CASHTGGFKTIF

SEQ ID NO: 772490 - protein, 12 aa, Homo sapiens
  CDR3 for beta chain variable domain of TCR clone 386245 (TRBV11-2, TRBJ2-1)
CASSPGNNEQFF

SEQ ID NO: 772491 - protein, 13 aa, Homo sapiens
  CDR3 for alpha chain variable domain of TCR clone 386246 (TRAV36/DV7, TRAJ37)
CAVFSSNTGKLIF

SEQ ID NO: 772492 - protein, 13 aa, Homo sapiens
  CDR3 for beta chain variable domain of TCR clone 386246 (TRBV10-2, TRBJ2-3)
CASSESGDHTQYF

SEQ ID NO: 772493 - protein, 11 aa, Homo sapiens
  CDR3 for alpha chain variable domain of TCR clone 386247 (TRAV27, TRAJ47)
SFVEYGNKLVF

SEQ ID NO: 772494 - protein, 18 aa, Homo sapiens
  CDR3 for beta chain variable domain of TCR clone 386247 (TRBV2, TRBJ2-1)
CASRGLAGGPRTYNEQFF

SEQ ID NO: 772495 - protein, 17 aa, Homo sapiens
  CDR3 for alpha chain variable domain of TCR clone 386248 (TRAV26-2, TRAJ28)
CVLRPLLIVAGSYQLTF

SEQ ID NO: 772496 - protein, 14 aa, Homo sapiens
  CDR3 for beta chain variable domain of TCR clone 386248 (TRBV7-9, TRBJ2-1)
CASSLANYYNEQFF

SEQ ID NO: 772497 - protein, 13 aa, Homo sapiens
  CDR3 for alpha chain variable domain of TCR clone 386249 (TRAV13-1, TRAJ43)
CAASKNNNNDMRF

SEQ ID NO: 772498 - protein, 11 aa, Homo sapiens
  CDR3 for beta chain variable domain of TCR clone 386249 (TRBV7-3, TRBJ2-5)
CASSLSETQYF

SEQ ID NO: 772499 - protein, 14 aa, Homo sapiens
  CDR3 for alpha chain variable domain of TCR clone 386250 (TRAV9-2, TRAJ39)
CALYIYNAGNMLTF

SEQ ID NO: 772500 - protein, 13 aa, Homo sapiens
  CDR3 for beta chain variable domain of TCR clone 386250 (TRBV11-3, TRBJ1-1)
CASGRQHNNEAFF

SEQ ID NO: 772501 - protein, 14 aa, Homo sapiens
  CDR3 for alpha chain variable domain of TCR clone 386251 (TRAV1-2, TRAJ8)
CAVREDTGFQKLVF

SEQ ID NO: 772502 - protein, 13 aa, Homo sapiens
  CDR3 for beta chain variable domain of TCR clone 386251 (TRBV11-3, TRBJ1-1)
CASSLALGTEAFF

SEQ ID NO: 772503 - protein, 12 aa, Homo sapiens
  CDR3 for alpha chain variable domain of TCR clone 386252 (TRAV27, TRAJ9)
CSGESGGFKTIF

SEQ ID NO: 772504 - protein, 18 aa, Homo sapiens
  CDR3 for beta chain variable domain of TCR clone 386252 (TRBV10-2, TRBJ2-2)
CISAPAVHRQADDGELFF

SEQ ID NO: 772505 - protein, 14 aa, Homo sapiens
  CDR3 for alpha chain variable domain of TCR clone 386253 (TRAV8-4, TRAJ34)
CAVSDPGHTDKLIF

SEQ ID NO: 772506 - protein, 13 aa, Homo sapiens
  CDR3 for beta chain variable domain of TCR clone 386253 (TRBV7-9, TRBJ2-5)
CASLSPGQETQYF

SEQ ID NO: 772507 - protein, 15 aa, Homo sapiens
  CDR3 for alpha chain variable domain of TCR clone 386254 (TRAV1-2, TRAJ30)
CAVRPHGNRDDKIIF

SEQ ID NO: 772508 - protein, 14 aa, Homo sapiens
  CDR3 for beta chain variable domain of TCR clone 386254 (TRBV7-9, TRBJ2-7)
CASSLSQGSYEQYF

SEQ ID NO: 772509 - protein, 14 aa, Homo sapiens
  CDR3 for alpha chain variable domain of TCR clone 386255 (TRAV17, TRAJ16)
CATADFPDGQKLLF

SEQ ID NO: 772510 - protein, 15 aa, Homo sapiens
  CDR3 for beta chain variable domain of TCR clone 386255 (TRBV18, TRBJ2-1)
CASSPPSVSYNEQFF

SEQ ID NO: 772511 - protein, 16 aa, Homo sapiens
  CDR3 for alpha chain variable domain of TCR clone 386256 (TRAV16, TRAJ52)
CALSAAGGTSYGELTF

SEQ ID NO: 772512 - protein, 13 aa, Homo sapiens
  CDR3 for beta chain variable domain of TCR clone 386256 (TRBV3-1, TRBJ1-5)
CASSQFGDQPQHF

SEQ ID NO: 772513 - protein, 14 aa, Homo sapiens
  CDR3 for alpha chain variable domain of TCR clone 386257 (TRAV21, TRAJ52)
CGRAGGTSYGKLTF

SEQ ID NO: 772514 - protein, 14 aa, Homo sapiens
  CDR3 for beta chain variable domain of TCR clone 386257 (TRBV19, TRBJ1-2)
CASSLLGYNYGYTF

SEQ ID NO: 772515 - protein, 12 aa, Homo sapiens
  CDR3 for alpha chain variable domain of TCR clone 386258 (TRAV38-1, TRAJ32)
CAPLGATTTLIF

SEQ ID NO: 772516 - protein, 14 aa, Homo sapiens
  CDR3 for beta chain variable domain of TCR clone 386258 (TRBV29-1, TRBJ2-5)
CSVETSGSGETQYF

SEQ ID NO: 772517 - protein, 13 aa, Homo sapiens
  CDR3 for alpha chain variable domain of TCR clone 386259 (TRAV21, TRAJ27)
CAARPGNVGKSTF

SEQ ID NO: 772518 - protein, 13 aa, Homo sapiens
  CDR3 for beta chain variable domain of TCR clone 386259 (TRBV18, TRBJ2-7)
CASQSGGGYEQYF

SEQ ID NO: 772519 - protein, 15 aa, Homo sapiens
  CDR3 for alpha chain variable domain of TCR clone 386260 (TRAV38-1, TRAJ37)
CAFIFGSGNTGKLIF

SEQ ID NO: 772520 - protein, 14 aa, Homo sapiens
  CDR3 for beta chain variable domain of TCR clone 386260 (TRBV7-3, TRBJ1-1)
CASSLGTGYTEAFF

SEQ ID NO: 772521 - protein, 14 aa, Homo sapiens
  CDR3 for alpha chain variable domain of TCR clone 386261 (TRAV8-2, TRAJ23)
CVVSDDNQGGKLIF

SEQ ID NO: 772522 - protein, 15 aa, Homo sapiens
  CDR3 for beta chain variable domain of TCR clone 386261 (TRBV27, TRBJ2-1)
CASSNGGGSSNEQFF

SEQ ID NO: 772523 - protein, 12 aa, Homo sapiens
  CDR3 for alpha chain variable domain of TCR clone 386262 (TRAV1-1, TRAJ32)
CAKSGATNKTIF

SEQ ID NO: 772524 - protein, 18 aa, Homo sapiens
  CDR3 for beta chain variable domain of TCR clone 386262 (TRBV3-1, TRBJ2-1)
CASSQDRVDRGTYNEQFF

SEQ ID NO: 772525 - protein, 12 aa, Homo sapiens
  CDR3 for alpha chain variable domain of TCR clone 386263 (TRAV13-2, TRAJ8)
CAPWLGFQKLVF

SEQ ID NO: 772526 - protein, 13 aa, Homo sapiens
  CDR3 for beta chain variable domain of TCR clone 386263 (TRBV7-6, TRBJ1-2)
CASSLVADYGYTF

SEQ ID NO: 772527 - protein, 16 aa, Homo sapiens
  CDR3 for alpha chain variable domain of TCR clone 386264 (TRAV8-6, TRAJ58)
CAVGDHTETSGSRLTF

SEQ ID NO: 772528 - protein, 14 aa, Homo sapiens
  CDR3 for beta chain variable domain of TCR clone 386264 (TRBV7-2, TRBJ1-5)
CASSPRGGPQPQHF

SEQ ID NO: 772529 - protein, 15 aa, Homo sapiens
  CDR3 for alpha chain variable domain of TCR clone 386265 (TRAV35, TRAJ34)
CACTSIVRNTDKLIF

SEQ ID NO: 772530 - protein, 15 aa, Homo sapiens
  CDR3 for beta chain variable domain of TCR clone 386265 (TRBV6-1, TRBJ1-5)
CASSELREGNQPQHF

SEQ ID NO: 772531 - protein, 14 aa, Homo sapiens
  CDR3 for alpha chain variable domain of TCR clone 386266 (TRAV16, TRAJ32)
CALKSGGATNKLIF

SEQ ID NO: 772532 - protein, 13 aa, Homo sapiens
  CDR3 for beta chain variable domain of TCR clone 386266 (TRBV7-3, TRBJ1-1)
CASSQDWGAEAFF

SEQ ID NO: 772533 - protein, 13 aa, Homo sapiens
  CDR3 for alpha chain variable domain of TCR clone 386267 (TRAV30, TRAJ16)
CGTFGGDGQKLLF

SEQ ID NO: 772534 - protein, 13 aa, Homo sapiens
  CDR3 for beta chain variable domain of TCR clone 386267 (TRBV20-1, TRBJ2-5)
CSARGDYQETQYF

SEQ ID NO: 772535 - protein, 13 aa, Homo sapiens
  CDR3 for alpha chain variable domain of TCR clone 386268 (TRAV12-2, TRAJ7)
CAVSLYGHNRLAF

SEQ ID NO: 772536 - protein, 18 aa, Homo sapiens
  CDR3 for beta chain variable domain of TCR clone 386268 (TRBV4-2, TRBJ2-1)
CASSQQGLAASSYNEQFF

SEQ ID NO: 772537 - protein, 15 aa, Homo sapiens
  CDR3 for alpha chain variable domain of TCR clone 386269 (TRAV13-1, TRAJ50)
CAAKGSETSYDKVIF

SEQ ID NO: 772538 - protein, 18 aa, Homo sapiens
  CDR3 for beta chain variable domain of TCR clone 386269 (TRBV10-3, TRBJ2-1)
CTSVPSVSLRGGVDEQYF

SEQ ID NO: 772539 - protein, 12 aa, Homo sapiens
  CDR3 for alpha chain variable domain of TCR clone 386270 (TRAV12-3, TRAJ17)
CAMTLTGNELTF

SEQ ID NO: 772540 - protein, 15 aa, Homo sapiens
  CDR3 for beta chain variable domain of TCR clone 386270 (TRBV20-1, TRBJ2-7)
CSARDRVSGMYEQYF

SEQ ID NO: 772541 - protein, 10 aa, Homo sapiens
  CDR3 for alpha chain variable domain of TCR clone 386271 (TRAV8-4, TRAJ43)
CAVSADDMRF

SEQ ID NO: 772542 - protein, 15 aa, Homo sapiens
  CDR3 for beta chain variable domain of TCR clone 386271 (TRBV5-1, TRBJ2-6)
CASSLDPSGANVLTF

SEQ ID NO: 772543 - protein, 13 aa, Homo sapiens
  CDR3 for alpha chain variable domain of TCR clone 386272 (TRAV12-1, TRAJ7)
CVVNMRGNNRLAF

SEQ ID NO: 772544 - protein, 16 aa, Homo sapiens
  CDR3 for beta chain variable domain of TCR clone 386272 (TRBV7-9, TRBJ2-1)
CASSSPQGTTRNEQFF

SEQ ID NO: 772545 - protein, 15 aa, Homo sapiens
  CDR3 for alpha chain variable domain of TCR clone 386273 (TRAV8-2, TRAJ16)
CVVSDGFSDGQKLLF

SEQ ID NO: 772546 - protein, 14 aa, Homo sapiens
  CDR3 for beta chain variable domain of TCR clone 386273 (TRBV7-3, TRBJ1-1)
CASSLGTGYTEAFS

SEQ ID NO: 772547 - protein, 14 aa, Homo sapiens
  CDR3 for alpha chain variable domain of TCR clone 386274 (TRAV21, TRAJ45)
CAVSSGGGAHGLTF

SEQ ID NO: 772548 - protein, 15 aa, Homo sapiens
  CDR3 for beta chain variable domain of TCR clone 386274 (TRBV6-1, TRBJ2-4)
CASSEAVWTINIQYF

SEQ ID NO: 772549 - protein, 16 aa, Homo sapiens
  CDR3 for alpha chain variable domain of TCR clone 386275 (TRAV4, TRAJ5)
CLVGPDHGHGPERTYF

SEQ ID NO: 772550 - protein, 15 aa, Homo sapiens
  CDR3 for beta chain variable domain of TCR clone 386275 (TRBV27, TRBJ2-5)
CASSLIPSGGETQYF

SEQ ID NO: 772551 - protein, 14 aa, Homo sapiens
  CDR3 for alpha chain variable domain of TCR clone 386276 (TRAV8-2, TRAJ4)
CVVSPSGGYNKLIF

SEQ ID NO: 772552 - protein, 15 aa, Homo sapiens
  CDR3 for beta chain variable domain of TCR clone 386276 (TRBV7-9, TRBJ1-1)
CASSLLEQGGTEAFV

SEQ ID NO: 772553 - protein, 15 aa, Homo sapiens
  CDR3 for alpha chain variable domain of TCR clone 386277 (TRAV8-6, TRAJ48)
CAVSKANFGNEELTF

SEQ ID NO: 772554 - protein, 14 aa, Homo sapiens
  CDR3 for beta chain variable domain of TCR clone 386277 (TRBV20-1, TRBJ2-1)
CSASLLDGYNEQFF

SEQ ID NO: 772555 - protein, 13 aa, Homo sapiens
  CDR3 for alpha chain variable domain of TCR clone 386278 (TRAV8-3, TRAJ43)
CAVGIYNSNDMRF

SEQ ID NO: 772556 - protein, 16 aa, Homo sapiens
  CDR3 for beta chain variable domain of TCR clone 386278 (TRBV7-2, TRBJ2-5)
CASSLVLWTKQETQYF

SEQ ID NO: 772557 - protein, 12 aa, Homo sapiens
  CDR3 for alpha chain variable domain of TCR clone 386279 (TRAV12-3, TRAJ17)
CAMTLTGNKLTF

SEQ ID NO: 772558 - protein, 16 aa, Homo sapiens
  CDR3 for beta chain variable domain of TCR clone 386279 (TRBV20-1, TRBJ1-4)
CSAPGQGLLTNEKLFC

SEQ ID NO: 772559 - protein, 14 aa, Homo sapiens
  CDR3 for alpha chain variable domain of TCR clone 386280 (TRAV8-4, TRAJ9)
CAVRINTGGFKTIF

SEQ ID NO: 772560 - protein, 17 aa, Homo sapiens
  CDR3 for beta chain variable domain of TCR clone 386280 (TRBV11-2, TRBJ2-1)
CASSLYPPGVEYNEQFF

SEQ ID NO: 772561 - protein, 12 aa, Homo sapiens
  CDR3 for alpha chain variable domain of TCR clone 386281 (TRAV10, TRAJ43)
CVVVRVGNDMRF

SEQ ID NO: 772562 - protein, 16 aa, Homo sapiens
  CDR3 for beta chain variable domain of TCR clone 386281 (TRBV2, TRBJ1-4)
CASNLLQGATNEKLFF

SEQ ID NO: 772563 - protein, 19 aa, Homo sapiens
  CDR3 for alpha chain variable domain of TCR clone 386282 (TRAV3, TRAJ6)
CAVRDRNPSRSGGSYIPTF

SEQ ID NO: 772564 - protein, 12 aa, Homo sapiens
  CDR3 for beta chain variable domain of TCR clone 386282 (TRBV11-2, TRBJ2-2)
CASSLGGGELFF

SEQ ID NO: 772565 - protein, 14 aa, Homo sapiens
  CDR3 for alpha chain variable domain of TCR clone 386283 (TRAV17, TRAJ54)
CATDANQGAQKLVF

SEQ ID NO: 772566 - protein, 17 aa, Homo sapiens
  CDR3 for beta chain variable domain of TCR clone 386283 (TRBV19, TRBJ2-6)
CASSTGQVFSGANVLTF

SEQ ID NO: 772567 - protein, 13 aa, Homo sapiens
  CDR3 for alpha chain variable domain of TCR clone 386284 (TRAV5, TRAJ30)
CAEIANRDDKIIF

SEQ ID NO: 772568 - protein, 14 aa, Homo sapiens
  CDR3 for beta chain variable domain of TCR clone 386284 (TRBV4-1, TRBJ2-2)
CASSQAVNTGEMFF

SEQ ID NO: 772569 - protein, 12 aa, Homo sapiens
  CDR3 for alpha chain variable domain of TCR clone 386285 (TRAV25, TRAJ49)
CAGLLTGNQFYF

SEQ ID NO: 772570 - protein, 14 aa, Homo sapiens
  CDR3 for beta chain variable domain of TCR clone 386285 (TRBV7-3, TRBJ1-1)
CASSLKGGNTEAFF

SEQ ID NO: 772571 - protein, 18 aa, Homo sapiens
  CDR3 for alpha chain variable domain of TCR clone 386286 (TRAV35, TRAJ28)
CAGHNYPLSWAGSYQLTF

SEQ ID NO: 772572 - protein, 17 aa, Homo sapiens
  CDR3 for beta chain variable domain of TCR clone 386286 (TRBV11-3, TRBJ2-3)
CASSLGLTGGGTDTQYF

SEQ ID NO: 772573 - protein, 15 aa, Homo sapiens
  CDR3 for alpha chain variable domain of TCR clone 386287 (TRAV8-3, TRAJ45)
CASSYSGGGADGLPF

SEQ ID NO: 772574 - protein, 13 aa, Homo sapiens
  CDR3 for beta chain variable domain of TCR clone 386287 (TRBV10-3, TRBJ2-7)
CASKLAVNYEQYF

SEQ ID NO: 772575 - protein, 14 aa, Homo sapiens
  CDR3 for alpha chain variable domain of TCR clone 386288 (TRAV1-2, TRAJ16)
CAVNRVSDGQKLLF

SEQ ID NO: 772576 - protein, 16 aa, Homo sapiens
  CDR3 for beta chain variable domain of TCR clone 386288 (TRBV12-5, TRBJ2-5)
CASGPRTSGNQETQYF

SEQ ID NO: 772577 - protein, 14 aa, Homo sapiens
  CDR3 for alpha chain variable domain of TCR clone 386289 (TRAV1-1, TRAJ23)
CAVSIYNQGGKLIF

SEQ ID NO: 772578 - protein, 14 aa, Homo sapiens
  CDR3 for beta chain variable domain of TCR clone 386289 (TRBV7-8, TRBJ2-3)
CASSFKSSTDTQYF

SEQ ID NO: 772579 - protein, 16 aa, Homo sapiens
  CDR3 for alpha chain variable domain of TCR clone 386290 (TRAV1-2, TRAJ10)
CAVRGVLTGGGNKLTL

SEQ ID NO: 772580 - protein, 13 aa, Homo sapiens
  CDR3 for beta chain variable domain of TCR clone 386290 (TRBV29-1, TRBJ2-1)
CSVEGGRVNEQFF

SEQ ID NO: 772581 - protein, 12 aa, Homo sapiens
  CDR3 for alpha chain variable domain of TCR clone 386291 (TRAV38-1, TRAJ57)
CAFMKLPPTLVF

SEQ ID NO: 772582 - protein, 14 aa, Homo sapiens
  CDR3 for beta chain variable domain of TCR clone 386291 (TRBV2, TRBJ2-3)
CASSEGQNTDTQYF

SEQ ID NO: 772583 - protein, 14 aa, Homo sapiens
  CDR3 for alpha chain variable domain of TCR clone 386292 (TRAV17, TRAJ16)
CATADFSDGQKLLF

SEQ ID NO: 772584 - protein, 12 aa, Homo sapiens
  CDR3 for beta chain variable domain of TCR clone 386292 (TRBV24-1, TRBJ2-3)
CATSDSTDTQYF

SEQ ID NO: 772585 - protein, 14 aa, Homo sapiens
  CDR3 for alpha chain variable domain of TCR clone 386293 (TRAV12-2, TRAJ24)
CAVTPADSWGKLQF

SEQ ID NO: 772586 - protein, 14 aa, Homo sapiens
  CDR3 for beta chain variable domain of TCR clone 386293 (TRBV20-1, TRBJ2-1)
CSAQIGGSANEQFF

SEQ ID NO: 772587 - protein, 15 aa, Homo sapiens
  CDR3 for alpha chain variable domain of TCR clone 386294 (TRAV8-4, TRAJ40)
CAVSSITSGTYKYIF

SEQ ID NO: 772588 - protein, 13 aa, Homo sapiens
  CDR3 for beta chain variable domain of TCR clone 386294 (TRBV2, TRBJ2-1)
CAASRGTDNEQFF

SEQ ID NO: 772589 - protein, 15 aa, Homo sapiens
  CDR3 for alpha chain variable domain of TCR clone 386295 (TRAV36/DV7, TRAJ53)
CAVEGSGGSNYNLTF

SEQ ID NO: 772590 - protein, 16 aa, Homo sapiens
  CDR3 for beta chain variable domain of TCR clone 386295 (TRBV27, TRBJ2-2)
CASSLSGFWVTGELFF

SEQ ID NO: 772591 - protein, 12 aa, Homo sapiens
  CDR3 for alpha chain variable domain of TCR clone 386296 (TRAV13-1, TRAJ39)
YGPDNAGNMLTF

SEQ ID NO: 772592 - protein, 16 aa, Homo sapiens
  CDR3 for beta chain variable domain of TCR clone 386296 (TRBV18, TRBJ1-1)
CASSPGVGGRGGEAFF

SEQ ID NO: 772593 - protein, 14 aa, Homo sapiens
  CDR3 for alpha chain variable domain of TCR clone 386297 (TRAV8-4, TRAJ13)
CAVTLSGGHQKVTF

SEQ ID NO: 772594 - protein, 15 aa, Homo sapiens
  CDR3 for beta chain variable domain of TCR clone 386297 (TRBV11-3, TRBJ2-3)
CASLKDGREGDTQYF

SEQ ID NO: 772595 - protein, 15 aa, Homo sapiens
  CDR3 for alpha chain variable domain of TCR clone 386298 (TRAV26-1, TRAJ29)
CIVRVEGSGNTPLVF

SEQ ID NO: 772596 - protein, 15 aa, Homo sapiens
  CDR3 for beta chain variable domain of TCR clone 386298 (TRBV7-9, TRBJ1-5)
CASSQGHQPNQTRHF

SEQ ID NO: 772597 - protein, 15 aa, Homo sapiens
  CDR3 for alpha chain variable domain of TCR clone 386299 (TRAV29/DV5, TRAJ24)
CPASGATDSWGKFQF

SEQ ID NO: 772598 - protein, 12 aa, Homo sapiens
  CDR3 for beta chain variable domain of TCR clone 386299 (TRBV11-2, TRBJ2-2)
CASSLPTGELFF

SEQ ID NO: 772599 - protein, 14 aa, Homo sapiens
  CDR3 for alpha chain variable domain of TCR clone 386300 (TRAV17, TRAJ54)
CATDANQGAQKLVF

SEQ ID NO: 772600 - protein, 14 aa, Homo sapiens
  CDR3 for beta chain variable domain of TCR clone 386300 (TRBV28, TRBJ2-7)
CASSLIRGDYEQYF

SEQ ID NO: 772601 - protein, 12 aa, Homo sapiens
  CDR3 for alpha chain variable domain of TCR clone 386301 (TRAV13-1, TRAJ9)
CASHTGGFKTIF

SEQ ID NO: 772602 - protein, 18 aa, Homo sapiens
  CDR3 for beta chain variable domain of TCR clone 386301 (TRBV11-2, TRBJ2-3)
CASSLGGASRGAPSTQYF

SEQ ID NO: 772603 - protein, 14 aa, Homo sapiens
  CDR3 for alpha chain variable domain of TCR clone 386302 (TRAV1-2, TRAJ16)
CAVIRFSDGQKLLF

SEQ ID NO: 772604 - protein, 14 aa, Homo sapiens
  CDR3 for beta chain variable domain of TCR clone 386302 (TRBV7-8, TRBJ2-3)
CASSLEAGTDTQYF

SEQ ID NO: 772605 - protein, 11 aa, Homo sapiens
  CDR3 for alpha chain variable domain of TCR clone 386303 (TRAV1-1, TRAJ5)
SALWFRRALTF

SEQ ID NO: 772606 - protein, 12 aa, Homo sapiens
  CDR3 for beta chain variable domain of TCR clone 386303 (TRBV11-2, TRBJ2-2)
CASSLGGGELFF

SEQ ID NO: 772607 - protein, 14 aa, Homo sapiens
  CDR3 for alpha chain variable domain of TCR clone 386304 (TRAV35, TRAJ10)
CAGILTGGGNKLTF

SEQ ID NO: 772608 - protein, 13 aa, Homo sapiens
  CDR3 for beta chain variable domain of TCR clone 386304 (TRBV7-9, TRBJ1-2)
CASSLKQNYGYTF

SEQ ID NO: 772609 - protein, 14 aa, Homo sapiens
  CDR3 for alpha chain variable domain of TCR clone 386305 (TRAV20, TRAJ4)
CAVRLGGGYNKLIF

SEQ ID NO: 772610 - protein, 14 aa, Homo sapiens
  CDR3 for beta chain variable domain of TCR clone 386305 (TRBV7-3, TRBJ2-3)
CASSPGASRNTQYF

SEQ ID NO: 772611 - protein, 14 aa, Homo sapiens
  CDR3 for alpha chain variable domain of TCR clone 386306 (TRAV1-1, TRAJ27)
CAVSYNTNAVKSTF

SEQ ID NO: 772612 - protein, 15 aa, Homo sapiens
  CDR3 for beta chain variable domain of TCR clone 386306 (TRBV7-2, TRBJ2-1)
CASSSGLAGGNEQFF

SEQ ID NO: 772613 - protein, 13 aa, Homo sapiens
  CDR3 for alpha chain variable domain of TCR clone 386307 (TRAV36/DV7, TRAJ37)
CADFSSNTGKLIF

SEQ ID NO: 772614 - protein, 15 aa, Homo sapiens
  CDR3 for beta chain variable domain of TCR clone 386307 (TRBV12-4, TRBJ2-5)
CQQFFVRGRQETQYF

SEQ ID NO: 772615 - protein, 13 aa, Homo sapiens
  CDR3 for alpha chain variable domain of TCR clone 386308 (TRAV1-2, TRAJ9)
CAALNTGGFKTIF

SEQ ID NO: 772616 - protein, 14 aa, Homo sapiens
  CDR3 for beta chain variable domain of TCR clone 386308 (TRBV5-4, TRBJ1-1)
CASSLDSRRDEAFF

SEQ ID NO: 772617 - protein, 13 aa, Homo sapiens
  CDR3 for alpha chain variable domain of TCR clone 386309 (TRAV3, TRAJ4)
CAVRDGGYNKLMF

SEQ ID NO: 772618 - protein, 15 aa, Homo sapiens
  CDR3 for beta chain variable domain of TCR clone 386309 (TRBV5-1, TRBJ2-1)
CASSPPRAPYNEQFF

SEQ ID NO: 772619 - protein, 18 aa, Homo sapiens
  CDR3 for alpha chain variable domain of TCR clone 386310 (TRAV12-3, TRAJ52)
CAMSVGGAGGTSYGKLTF

SEQ ID NO: 772620 - protein, 16 aa, Homo sapiens
  CDR3 for beta chain variable domain of TCR clone 386310 (TRBV7-9, TRBJ1-2)
CASSISLDRGGYGYAF

SEQ ID NO: 772621 - protein, 14 aa, Homo sapiens
  CDR3 for alpha chain variable domain of TCR clone 386311 (TRAV3, TRAJ28)
CAVRRGAGIYQLTF

SEQ ID NO: 772622 - protein, 16 aa, Homo sapiens
  CDR3 for beta chain variable domain of TCR clone 386311 (TRBV4-1, TRBJ2-7)
CASSQEWTSGPLEQYF

SEQ ID NO: 772623 - protein, 14 aa, Homo sapiens
  CDR3 for alpha chain variable domain of TCR clone 386312 (TRAV12-2, TRAJ13)
CAVKTPGGYQKVTF

SEQ ID NO: 772624 - protein, 11 aa, Homo sapiens
  CDR3 for beta chain variable domain of TCR clone 386312 (TRBV12-4, TRBJ2-3)
CASTATDTQYF

SEQ ID NO: 772625 - protein, 15 aa, Homo sapiens
  CDR3 for alpha chain variable domain of TCR clone 386313 (TRAV17, TRAJ57)
CATCPSQGGSEKLVF

SEQ ID NO: 772626 - protein, 15 aa, Homo sapiens
  CDR3 for beta chain variable domain of TCR clone 386313 (TRBV25-1, TRBJ1-4)
CASSPGDSTNEKLFF

SEQ ID NO: 772627 - protein, 14 aa, Homo sapiens
  CDR3 for alpha chain variable domain of TCR clone 386314 (TRAV1-2, TRAJ8)
CAVREDTGFQKLVF

SEQ ID NO: 772628 - protein, 14 aa, Homo sapiens
  CDR3 for beta chain variable domain of TCR clone 386314 (TRBV29-1, TRBJ2-5)
CSVETSGNGETQYF

SEQ ID NO: 772629 - protein, 10 aa, Homo sapiens
  CDR3 for alpha chain variable domain of TCR clone 386315 (TRAV39, TRAJ49)
CAVAGNQVYF

SEQ ID NO: 772630 - protein, 14 aa, Homo sapiens
  CDR3 for beta chain variable domain of TCR clone 386315 (TRBV7-2, TRBJ2-7)
CASSPKTSFYEQYF

SEQ ID NO: 772631 - protein, 13 aa, Homo sapiens
  CDR3 for alpha chain variable domain of TCR clone 386316 (TRAV21, TRAJ37)
CAVSSGTTGKLIF

SEQ ID NO: 772632 - protein, 15 aa, Homo sapiens
  CDR3 for beta chain variable domain of TCR clone 386316 (TRBV12-4, TRBJ1-2)
CASSFVDRGNYGYTF

SEQ ID NO: 772633 - protein, 15 aa, Homo sapiens
  CDR3 for alpha chain variable domain of TCR clone 386317 (TRAV8-3, TRAJ27)
CAVGPSKTNAGKSTF

SEQ ID NO: 772634 - protein, 12 aa, Homo sapiens
  CDR3 for beta chain variable domain of TCR clone 386317 (TRBV11-2, TRBJ2-2)
CASSLGGGEMFF

SEQ ID NO: 772635 - protein, 13 aa, Homo sapiens
  CDR3 for alpha chain variable domain of TCR clone 386318 (TRAV21, TRAJ27)
CAARPGNAGKSTF

SEQ ID NO: 772636 - protein, 14 aa, Homo sapiens
  CDR3 for beta chain variable domain of TCR clone 386318 (TRBV7-6, TRBJ2-1)
FASSLGGGQMGSSS

SEQ ID NO: 772637 - protein, 11 aa, Homo sapiens
  CDR3 for alpha chain variable domain of TCR clone 386319 (TRAV13-1, TRAJ9)
CISYWRLKTIF

SEQ ID NO: 772638 - protein, 18 aa, Homo sapiens
  CDR3 for beta chain variable domain of TCR clone 386319 (TRBV11-2, TRBJ2-3)
CASSLGGASRGAPNTQYF

SEQ ID NO: 772639 - protein, 17 aa, Homo sapiens
  CDR3 for alpha chain variable domain of TCR clone 386320 (TRAV3, TRAJ42)
CALRARDYGGSQGNLIF

SEQ ID NO: 772640 - protein, 15 aa, Homo sapiens
  CDR3 for beta chain variable domain of TCR clone 386320 (TRBV10-3, TRBJ2-7)
CASSYSYGGSYEQYF

SEQ ID NO: 772641 - protein, 14 aa, Homo sapiens
  CDR3 for alpha chain variable domain of TCR clone 386321 (TRAV1-2, TRAJ8)
CAVREHTGFQKLVF

SEQ ID NO: 772642 - protein, 12 aa, Homo sapiens
  CDR3 for beta chain variable domain of TCR clone 386321 (TRBV11-2, TRBJ2-2)
CASSLPTGELFF

SEQ ID NO: 772643 - protein, 15 aa, Homo sapiens
  CDR3 for alpha chain variable domain of TCR clone 386322 (TRAV8-3, TRAJ45)
CASSYSGGGADGRTF

SEQ ID NO: 772644 - protein, 15 aa, Homo sapiens
  CDR3 for beta chain variable domain of TCR clone 386322 (TRBV18, TRBJ1-1)
CASSPRQGENTEAFF

SEQ ID NO: 772645 - protein, 10 aa, Homo sapiens
  CDR3 for alpha chain variable domain of TCR clone 386323 (TRAV3, TRAJ30)
CAVREIEIIF

SEQ ID NO: 772646 - protein, 12 aa, Homo sapiens
  CDR3 for beta chain variable domain of TCR clone 386323 (TRBV14, TRBJ2-5)
CASSQLKETQYF

SEQ ID NO: 772647 - protein, 13 aa, Homo sapiens
  CDR3 for alpha chain variable domain of TCR clone 386324 (TRAV20, TRAJ9)
CAVPDIGGFKTIF

SEQ ID NO: 772648 - protein, 15 aa, Homo sapiens
  CDR3 for beta chain variable domain of TCR clone 386324 (TRBV27, TRBJ2-7)
CASSKAGRGGYEQYF

SEQ ID NO: 772649 - protein, 23 aa, Homo sapiens
  CDR3 for alpha chain variable domain of TCR clone 386325 (TRAV12-2, TRAJ4)
PVIQPPTSVPLGWPEGGYNKLIF

SEQ ID NO: 772650 - protein, 16 aa, Homo sapiens
  CDR3 for beta chain variable domain of TCR clone 386325 (TRBV6-1, TRBJ2-5)
CASSETLDRGAETQYF

SEQ ID NO: 772651 - protein, 15 aa, Homo sapiens
  CDR3 for alpha chain variable domain of TCR clone 386326 (TRAV8-2, TRAJ16)
GVVSDGFSDGQKLPF

SEQ ID NO: 772652 - protein, 14 aa, Homo sapiens
  CDR3 for beta chain variable domain of TCR clone 386326 (TRBV7-3, TRBJ1-1)
CASSLGTGYTEAFF

SEQ ID NO: 772653 - protein, 11 aa, Homo sapiens
  CDR3 for alpha chain variable domain of TCR clone 386327 (TRAV16, TRAJ31)
CALFNNARLMF

SEQ ID NO: 772654 - protein, 13 aa, Homo sapiens
  CDR3 for beta chain variable domain of TCR clone 386327 (TRBV15, TRBJ1-6)
CATSGGLNSPLHF

SEQ ID NO: 772655 - protein, 13 aa, Homo sapiens
  CDR3 for alpha chain variable domain of TCR clone 386328 (TRAV12-2, TRAJ52)
CAVSGTSYRKLTF

SEQ ID NO: 772656 - protein, 16 aa, Homo sapiens
  CDR3 for beta chain variable domain of TCR clone 386328 (TRBV5-7, TRBJ2-7)
CASSPTSGRELDEQYF

SEQ ID NO: 772657 - protein, 14 aa, Homo sapiens
  CDR3 for alpha chain variable domain of TCR clone 386329 (TRAV13-1, TRAJ13)
CAASRVGGYQKVTF

SEQ ID NO: 772658 - protein, 17 aa, Homo sapiens
  CDR3 for beta chain variable domain of TCR clone 386329 (TRBV15, TRBJ1-5)
CATSRAPPGTRNQPQHV

SEQ ID NO: 772659 - protein, 11 aa, Homo sapiens
  CDR3 for alpha chain variable domain of TCR clone 386330 (TRAV12-2, TRAJ29)
CAVTLRSALVF

SEQ ID NO: 772660 - protein, 16 aa, Homo sapiens
  CDR3 for beta chain variable domain of TCR clone 386330 (TRBV11-2, TRBJ2-3)
CASSSRTSGGAGTQYF

SEQ ID NO: 772661 - protein, 15 aa, Homo sapiens
  CDR3 for alpha chain variable domain of TCR clone 386331 (TRAV8-3, TRAJ11)
CAVGLLNSGYSTLTF

SEQ ID NO: 772662 - protein, 16 aa, Homo sapiens
  CDR3 for beta chain variable domain of TCR clone 386331 (TRBV7-9, TRBJ1-2)
CASSLGFSSGEVGYTF

SEQ ID NO: 772663 - protein, 23 aa, Homo sapiens
  CDR3 for alpha chain variable domain of TCR clone 386332 (TRAV21, TRAJ20)
LQLLSLGTQPPTSVLPNDYKLSF

SEQ ID NO: 772664 - protein, 14 aa, Homo sapiens
  CDR3 for beta chain variable domain of TCR clone 386332 (TRBV7-2, TRBJ1-3)
CASSRLRSGNTIYF

SEQ ID NO: 772665 - protein, 12 aa, Homo sapiens
  CDR3 for alpha chain variable domain of TCR clone 386333 (TRAV27, TRAJ13)
CAGVRGYQKVIF

SEQ ID NO: 772666 - protein, 16 aa, Homo sapiens
  CDR3 for beta chain variable domain of TCR clone 386333 (TRBV28, TRBJ2-1)
CASSSSYSGSLNEQFF

SEQ ID NO: 772667 - protein, 12 aa, Homo sapiens
  CDR3 for alpha chain variable domain of TCR clone 386334 (TRAV35, TRAJ53)
CARLGSNYKLTF

SEQ ID NO: 772668 - protein, 15 aa, Homo sapiens
  CDR3 for beta chain variable domain of TCR clone 386334 (TRBV13, TRBJ2-5)
CASSLRPGRGETQYF

SEQ ID NO: 772669 - protein, 14 aa, Homo sapiens
  CDR3 for alpha chain variable domain of TCR clone 386335 (TRAV12-2, TRAJ17)
CAVLFKAAGNKLTF

SEQ ID NO: 772670 - protein, 14 aa, Homo sapiens
  CDR3 for beta chain variable domain of TCR clone 386335 (TRBV19, TRBJ2-1)
CASPTFFLSGEQFF

SEQ ID NO: 772671 - protein, 14 aa, Homo sapiens
  CDR3 for alpha chain variable domain of TCR clone 386336 (TRAV12-1, TRAJ22)
CVVTTSGSARQLTF

SEQ ID NO: 772672 - protein, 12 aa, Homo sapiens
  CDR3 for beta chain variable domain of TCR clone 386336 (TRBV5-1, TRBJ1-1)
CASSLTGAEAFF

SEQ ID NO: 772673 - protein, 12 aa, Homo sapiens
  CDR3 for alpha chain variable domain of TCR clone 386337 (TRAV21, TRAJ33)
CAKMDSNYQLIW

SEQ ID NO: 772674 - protein, 13 aa, Homo sapiens
  CDR3 for beta chain variable domain of TCR clone 386337 (TRBV29-1, TRBJ2-7)
CSVGPSGGYEQYF

SEQ ID NO: 772675 - protein, 14 aa, Homo sapiens
  CDR3 for alpha chain variable domain of TCR clone 386338 (TRAV21, TRAJ21)
CAVKGFGKFNKFYF

SEQ ID NO: 772676 - protein, 13 aa, Homo sapiens
  CDR3 for beta chain variable domain of TCR clone 386338 (TRBV18, TRBJ1-1)
CASSPETRPEAFF

SEQ ID NO: 772677 - protein, 10 aa, Homo sapiens
  CDR3 for alpha chain variable domain of TCR clone 386339 (TRAV26-2, TRAJ49)
CILLGNQFYF

SEQ ID NO: 772678 - protein, 13 aa, Homo sapiens
  CDR3 for beta chain variable domain of TCR clone 386339 (TRBV7-2, TRBJ2-4)
CASSREHANIQYF

SEQ ID NO: 772679 - protein, 14 aa, Homo sapiens
  CDR3 for alpha chain variable domain of TCR clone 386340 (TRAV35, TRAJ13)
CAGSPSGGNQKVTF

SEQ ID NO: 772680 - protein, 13 aa, Homo sapiens
  CDR3 for beta chain variable domain of TCR clone 386340 (TRBV29-1, TRBJ1-1)
CSVGDSRNTEAFF

SEQ ID NO: 772681 - protein, 19 aa, Homo sapiens
  CDR3 for alpha chain variable domain of TCR clone 386341 (TRAV26-1, TRAJ28)
CIVRVAHTYSGAGSYQLTF

SEQ ID NO: 772682 - protein, 17 aa, Homo sapiens
  CDR3 for beta chain variable domain of TCR clone 386341 (TRBV9, TRBJ2-2)
CASSVGGQGTDTGELFF

SEQ ID NO: 772683 - protein, 15 aa, Homo sapiens
  CDR3 for alpha chain variable domain of TCR clone 386342 (TRAV3, TRAJ17)
CAVSPKEAAGKKLTF

SEQ ID NO: 772684 - protein, 14 aa, Homo sapiens
  CDR3 for beta chain variable domain of TCR clone 386342 (TRBV5-1, TRBJ2-3)
CASSLFGPTDTQYF

SEQ ID NO: 772685 - protein, 15 aa, Homo sapiens
  CDR3 for alpha chain variable domain of TCR clone 386343 (TRAV3, TRAJ5)
CAVRAMDTGRRALTF

SEQ ID NO: 772686 - protein, 14 aa, Homo sapiens
  CDR3 for beta chain variable domain of TCR clone 386343 (TRBV20-1, TRBJ2-3)
CSARGGTSTDTQYF

SEQ ID NO: 772687 - protein, 13 aa, Homo sapiens
  CDR3 for alpha chain variable domain of TCR clone 386344 (TRAV2, TRAJ40)
CAVVTSGTYKYIF

SEQ ID NO: 772688 - protein, 17 aa, Homo sapiens
  CDR3 for beta chain variable domain of TCR clone 386344 (TRBV7-3, TRBJ2-3)
CASSLMKGMRGADTQYF

SEQ ID NO: 772689 - protein, 12 aa, Homo sapiens
  CDR3 for alpha chain variable domain of TCR clone 386345 (TRAV12-2, TRAJ47)
CAVAEYGNKLVF

SEQ ID NO: 772690 - protein, 14 aa, Homo sapiens
  CDR3 for beta chain variable domain of TCR clone 386345 (TRBV20-1, TRBJ1-1)
CSAMGGTANTKAFF

SEQ ID NO: 772691 - protein, 13 aa, Homo sapiens
  CDR3 for alpha chain variable domain of TCR clone 386346 (TRAV1-2, TRAJ9)
CAVLNTGGFKTIF

SEQ ID NO: 772692 - protein, 17 aa, Homo sapiens
  CDR3 for beta chain variable domain of TCR clone 386346 (TRBV20-1, TRBJ2-1)
CSAFSGTSGSLYNEQFF

SEQ ID NO: 772693 - protein, 14 aa, Homo sapiens
  CDR3 for alpha chain variable domain of TCR clone 386347 (TRAV12-1, TRAJ3)
CVVGRHSSASKIIF

SEQ ID NO: 772694 - protein, 13 aa, Homo sapiens
  CDR3 for beta chain variable domain of TCR clone 386347 (TRBV28, TRBJ2-5)
CASSFAGGETQYF

SEQ ID NO: 772695 - protein, 15 aa, Homo sapiens
  CDR3 for alpha chain variable domain of TCR clone 386348 (TRAV8-3, TRAJ45)
CASSYSGGGADGLTF

SEQ ID NO: 772696 - protein, 14 aa, Homo sapiens
  CDR3 for beta chain variable domain of TCR clone 386348 (TRBV7-8, TRBJ2-5)
CASSATGGQETQYF

SEQ ID NO: 772697 - protein, 14 aa, Homo sapiens
  CDR3 for alpha chain variable domain of TCR clone 386349 (TRAV1-2, TRAJ16)
CAVNRFSDGQKLLF

SEQ ID NO: 772698 - protein, 17 aa, Homo sapiens
  CDR3 for beta chain variable domain of TCR clone 386349 (TRBV9, TRBJ1-6)
CASSVAGTGDSPLTLGT

SEQ ID NO: 772699 - protein, 14 aa, Homo sapiens
  CDR3 for alpha chain variable domain of TCR clone 386350 (TRAV12-3, TRAJ57)
CAMSAWGGSEKLVF

SEQ ID NO: 772700 - protein, 16 aa, Homo sapiens
  CDR3 for beta chain variable domain of TCR clone 386350 (TRBV12-4, TRBJ2-5)
CASSFFVRGRQETQYF

SEQ ID NO: 772701 - protein, 15 aa, Homo sapiens
  CDR3 for alpha chain variable domain of TCR clone 386351 (TRAV27, TRAJ38)
CAARRNAGNNRQPIW

SEQ ID NO: 772702 - protein, 13 aa, Homo sapiens
  CDR3 for beta chain variable domain of TCR clone 386351 (TRBV12-5, TRBJ2-3)
CASGDRQSDTQYF

SEQ ID NO: 772703 - protein, 15 aa, Homo sapiens
  CDR3 for alpha chain variable domain of TCR clone 386352 (TRAV8-3, TRAJ11)
CAVGLLNSGYSTLTF

SEQ ID NO: 772704 - protein, 14 aa, Homo sapiens
  CDR3 for beta chain variable domain of TCR clone 386352 (TRBV7-9, TRBJ1-1)
CASSLGHGNTEAFF

SEQ ID NO: 772705 - protein, 14 aa, Homo sapiens
  CDR3 for alpha chain variable domain of TCR clone 386353 (TRAV1-2, TRAJ8)
CAVREDTGFPKIVF

SEQ ID NO: 772706 - protein, 15 aa, Homo sapiens
  CDR3 for beta chain variable domain of TCR clone 386353 (TRBV6-3, TRBJ2-7)
CASSSPGTVFYEQYF

SEQ ID NO: 772707 - protein, 11 aa, Homo sapiens
  CDR3 for alpha chain variable domain of TCR clone 386354 (TRAV35, TRAJ34)
CWARNTDKLIF

SEQ ID NO: 772708 - protein, 16 aa, Homo sapiens
  CDR3 for beta chain variable domain of TCR clone 386354 (TRBV24-1, TRBJ2-3)
CATSDPGTGATDTQYF

SEQ ID NO: 772709 - protein, 10 aa, Homo sapiens
  CDR3 for alpha chain variable domain of TCR clone 386355 (TRAV13-1, TRAJ30)
CAARDDKIIF

SEQ ID NO: 772710 - protein, 16 aa, Homo sapiens
  CDR3 for beta chain variable domain of TCR clone 386355 (TRBV28, TRBJ2-1)
CASSSPEYPRDNEQFF

SEQ ID NO: 772711 - protein, 20 aa, Homo sapiens
  CDR3 for alpha chain variable domain of TCR clone 386356 (TRAV26-1, TRAJ42)
CCVLLHRQTYYGGSQGNLIF

SEQ ID NO: 772712 - protein, 14 aa, Homo sapiens
  CDR3 for beta chain variable domain of TCR clone 386356 (TRBV11-2, TRBJ1-5)
CASSLDRGRQPQHF

SEQ ID NO: 772713 - protein, 14 aa, Homo sapiens
  CDR3 for alpha chain variable domain of TCR clone 386357 (TRAV2, TRAJ9)
CAVEDRSGGFKTIF

SEQ ID NO: 772714 - protein, 13 aa, Homo sapiens
  CDR3 for beta chain variable domain of TCR clone 386357 (TRBV4-1, TRBJ2-1)
CASSQAGGDEQFF

SEQ ID NO: 772715 - protein, 14 aa, Homo sapiens
  CDR3 for alpha chain variable domain of TCR clone 386358 (TRAV12-3, TRAJ13)
CAMRNSGGYQKVTF

SEQ ID NO: 772716 - protein, 13 aa, Homo sapiens
  CDR3 for beta chain variable domain of TCR clone 386358 (TRBV4-1, TRBJ2-7)
CASSQGQAYEQYF

SEQ ID NO: 772717 - protein, 15 aa, Homo sapiens
  CDR3 for alpha chain variable domain of TCR clone 386359 (TRAV17, TRAJ54)
CATEKLGQGAQKRVF

SEQ ID NO: 772718 - protein, 14 aa, Homo sapiens
  CDR3 for beta chain variable domain of TCR clone 386359 (TRBV7-3, TRBJ1-1)
CQQLRGQMNTEAFF

SEQ ID NO: 772719 - protein, 13 aa, Homo sapiens
  CDR3 for alpha chain variable domain of TCR clone 386360 (TRAV8-6, TRAJ49)
CAVITNTGNQFYF

SEQ ID NO: 772720 - protein, 17 aa, Homo sapiens
  CDR3 for beta chain variable domain of TCR clone 386360 (TRBV28, TRBJ2-5)
CASSTPEGDALQETQYF

SEQ ID NO: 772721 - protein, 12 aa, Homo sapiens
  CDR3 for alpha chain variable domain of TCR clone 386361 (TRAV3, TRAJ20)
CAVRDPDYKLSF

SEQ ID NO: 772722 - protein, 19 aa, Homo sapiens
  CDR3 for beta chain variable domain of TCR clone 386361 (TRBV19, TRBJ2-5)
CASSIGQVTDFFLGETQYF

SEQ ID NO: 772723 - protein, 12 aa, Homo sapiens
  CDR3 for alpha chain variable domain of TCR clone 386362 (TRAV12-1, TRAJ34)
CVVAGATDKRIF

SEQ ID NO: 772724 - protein, 12 aa, Homo sapiens
  CDR3 for beta chain variable domain of TCR clone 386362 (TRBV7-9, TRBJ1-1)
CASSLVRGEAFF

SEQ ID NO: 772725 - protein, 14 aa, Homo sapiens
  CDR3 for alpha chain variable domain of TCR clone 386363 (TRAV12-2, TRAJ40)
CAVKIPSGTYKYIF

SEQ ID NO: 772726 - protein, 20 aa, Homo sapiens
  CDR3 for beta chain variable domain of TCR clone 386363 (TRBV28, TRBJ2-1)
CASTPNGRSPGLAGGNEQFF

SEQ ID NO: 772727 - protein, 13 aa, Homo sapiens
  CDR3 for alpha chain variable domain of TCR clone 386364 (TRAV8-4, TRAJ10)
CAAFTGGGNKLTF

SEQ ID NO: 772728 - protein, 15 aa, Homo sapiens
  CDR3 for beta chain variable domain of TCR clone 386364 (TRBV2, TRBJ2-3)
CASSDFEKARDTQYF

SEQ ID NO: 772729 - protein, 15 aa, Homo sapiens
  CDR3 for alpha chain variable domain of TCR clone 386365 (TRAV6, TRAJ4)
CALGGFSGGYNKLLF

SEQ ID NO: 772730 - protein, 13 aa, Homo sapiens
  CDR3 for beta chain variable domain of TCR clone 386365 (TRBV19, TRBJ1-2)
CASSVPGQDGYTF

SEQ ID NO: 772731 - protein, 17 aa, Homo sapiens
  CDR3 for alpha chain variable domain of TCR clone 386366 (TRAV3, TRAJ42)
CAVRGRDYGGSQGNLIF

SEQ ID NO: 772732 - protein, 11 aa, Homo sapiens
  CDR3 for beta chain variable domain of TCR clone 386366 (TRBV19, TRBJ2-7)
CASGLSHEQYF

SEQ ID NO: 772733 - protein, 10 aa, Homo sapiens
  CDR3 for alpha chain variable domain of TCR clone 386367 (TRAV38-2/DV8, TRAJ40)
CASGTYKYIF

SEQ ID NO: 772734 - protein, 15 aa, Homo sapiens
  CDR3 for beta chain variable domain of TCR clone 386367 (TRBV7-2, TRBJ2-7)
CASSLKGALTYEQYF

SEQ ID NO: 772735 - protein, 10 aa, Homo sapiens
  CDR3 for alpha chain variable domain of TCR clone 386368 (TRAV23/DV6, TRAJ57)
CAASSTLSQG

SEQ ID NO: 772736 - protein, 15 aa, Homo sapiens
  CDR3 for beta chain variable domain of TCR clone 386368 (TRBV11-2, TRBJ2-1)
CASGLGTSGLNEQFF

SEQ ID NO: 772737 - protein, 17 aa, Homo sapiens
  CDR3 for alpha chain variable domain of TCR clone 386369 (TRAV3, TRAJ6)
CAVRDGPRAGGSYIPTF

SEQ ID NO: 772738 - protein, 15 aa, Homo sapiens
  CDR3 for beta chain variable domain of TCR clone 386369 (TRBV7-3, TRBJ2-7)
CASSLTGQGKYEQYF

SEQ ID NO: 772739 - protein, 12 aa, Homo sapiens
  CDR3 for alpha chain variable domain of TCR clone 386370 (TRAV10, TRAJ31)
CVVRAHRARLMF

SEQ ID NO: 772740 - protein, 17 aa, Homo sapiens
  CDR3 for beta chain variable domain of TCR clone 386370 (TRBV14, TRBJ2-1)
RDSSQDRRDSIYNEQFF

SEQ ID NO: 772741 - protein, 14 aa, Homo sapiens
  CDR3 for alpha chain variable domain of TCR clone 386371 (TRAV8-1, TRAJ5)
CAVRTDTGRRALTF

SEQ ID NO: 772742 - protein, 14 aa, Homo sapiens
  CDR3 for beta chain variable domain of TCR clone 386371 (TRBV19, TRBJ2-1)
CTSPTFVLSGEQFF

SEQ ID NO: 772743 - protein, 13 aa, Homo sapiens
  CDR3 for alpha chain variable domain of TCR clone 386372 (TRAV16, TRAJ26)
CALTRWSEFCLWF

SEQ ID NO: 772744 - protein, 16 aa, Homo sapiens
  CDR3 for beta chain variable domain of TCR clone 386372 (TRBV9, TRBJ2-1)
CASSVGGGGNYNEQFF

SEQ ID NO: 772745 - protein, 14 aa, Homo sapiens
  CDR3 for alpha chain variable domain of TCR clone 386373 (TRAV13-1, TRAJ35)
CAARRGGFGNVLHC

SEQ ID NO: 772746 - protein, 15 aa, Homo sapiens
  CDR3 for beta chain variable domain of TCR clone 386373 (TRBV28, TRBJ2-1)
CASSGLAEVDNEQFF

SEQ ID NO: 772747 - protein, 11 aa, Homo sapiens
  CDR3 for alpha chain variable domain of TCR clone 386374 (TRAV2, TRAJ33)
CAVESNYQLIW

SEQ ID NO: 772748 - protein, 19 aa, Homo sapiens
  CDR3 for beta chain variable domain of TCR clone 386374 (TRBV19, TRBJ2-2)
CASTRPGLAGRRVTGELLF

SEQ ID NO: 772749 - protein, 15 aa, Homo sapiens
  CDR3 for alpha chain variable domain of TCR clone 386375 (TRAV29/DV5, TRAJ24)
CAASGATDSWGKFQF

SEQ ID NO: 772750 - protein, 12 aa, Homo sapiens
  CDR3 for beta chain variable domain of TCR clone 386375 (TRBV11-2, TRBJ2-2)
CASSLPTGELFF

SEQ ID NO: 772751 - protein, 14 aa, Homo sapiens
  CDR3 for alpha chain variable domain of TCR clone 386376 (TRAV9-2, TRAJ39)
CALYIYNTGNMLTF

SEQ ID NO: 772752 - protein, 14 aa, Homo sapiens
  CDR3 for beta chain variable domain of TCR clone 386376 (TRBV7-9, TRBJ2-1)
CASSPRDSLYEQFF

SEQ ID NO: 772753 - protein, 14 aa, Homo sapiens
  CDR3 for alpha chain variable domain of TCR clone 386377 (TRAV2, TRAJ39)
CAVEGDNAGNMRTF

SEQ ID NO: 772754 - protein, 14 aa, Homo sapiens
  CDR3 for beta chain variable domain of TCR clone 386377 (TRBV28, TRBJ2-7)
CASSLRARGNEQYF

SEQ ID NO: 772755 - protein, 18 aa, Homo sapiens
  CDR3 for alpha chain variable domain of TCR clone 386378 (TRAV3, TRAJ42)
CAVRDEGTGGGSQGTLIF

SEQ ID NO: 772756 - protein, 16 aa, Homo sapiens
  CDR3 for beta chain variable domain of TCR clone 386378 (TRBV9, TRBJ1-2)
CASSVAKGRVDYGYTF

SEQ ID NO: 772757 - protein, 15 aa, Homo sapiens
  CDR3 for alpha chain variable domain of TCR clone 386379 (TRAV1-2, TRAJ16)
CAVRARFSDGQKLLF

SEQ ID NO: 772758 - protein, 19 aa, Homo sapiens
  CDR3 for beta chain variable domain of TCR clone 386379 (TRBV11-3, TRBJ2-3)
WASGFGTSGGPRGGGTQYF

SEQ ID NO: 772759 - protein, 11 aa, Homo sapiens
  CDR3 for alpha chain variable domain of TCR clone 386380 (TRAV2, TRAJ13)
CASGGYPKVTF

SEQ ID NO: 772760 - protein, 15 aa, Homo sapiens
  CDR3 for beta chain variable domain of TCR clone 386380 (TRBV29-1, TRBJ2-1)
CSVPTGLALYNEQFF

SEQ ID NO: 772761 - protein, 11 aa, Homo sapiens
  CDR3 for alpha chain variable domain of TCR clone 386381 (TRAV21, TRAJ34)
CAHYNTDKPIF

SEQ ID NO: 772762 - protein, 13 aa, Homo sapiens
  CDR3 for beta chain variable domain of TCR clone 386381 (TRBV12-4, TRBJ1-2)
CASSLRQGKGYTF

SEQ ID NO: 772763 - protein, 13 aa, Homo sapiens
  CDR3 for alpha chain variable domain of TCR clone 386382 (TRAV23/DV6, TRAJ22)
CAPWGGSARKLTF

SEQ ID NO: 772764 - protein, 14 aa, Homo sapiens
  CDR3 for beta chain variable domain of TCR clone 386382 (TRBV18, TRBJ2-7)
CASSPTSGGYEQYF

SEQ ID NO: 772765 - protein, 13 aa, Homo sapiens
  CDR3 for alpha chain variable domain of TCR clone 386383 (TRAV1-1, TRAJ9)
CAAKNTGGFKTIF

SEQ ID NO: 772766 - protein, 13 aa, Homo sapiens
  CDR3 for beta chain variable domain of TCR clone 386383 (TRBV27, TRBJ2-3)
CATSRGGLYTQYF

SEQ ID NO: 772767 - protein, 14 aa, Homo sapiens
  CDR3 for alpha chain variable domain of TCR clone 386384 (TRAV34, TRAJ44)
CGADGTGTASKLTF

SEQ ID NO: 772768 - protein, 20 aa, Homo sapiens
  CDR3 for beta chain variable domain of TCR clone 386384 (TRBV7-9, TRBJ1-5)
CISVSEAGQGAPYSNQTQHF

SEQ ID NO: 772769 - protein, 13 aa, Homo sapiens
  CDR3 for alpha chain variable domain of TCR clone 386385 (TRAV3, TRAJ21)
CAVREPDFNKFYF

SEQ ID NO: 772770 - protein, 17 aa, Homo sapiens
  CDR3 for beta chain variable domain of TCR clone 386385 (TRBV7-8, TRBJ2-6)
CASSAGTGGGGANVLTF

SEQ ID NO: 772771 - protein, 18 aa, Homo sapiens
  CDR3 for alpha chain variable domain of TCR clone 386386 (TRAV21, TRAJ53)
CAVKGGENSGGSNYKLTF

SEQ ID NO: 772772 - protein, 14 aa, Homo sapiens
  CDR3 for beta chain variable domain of TCR clone 386386 (TRBV7-3, TRBJ2-7)
CASSYDQDYYEQYF

SEQ ID NO: 772773 - protein, 12 aa, Homo sapiens
  CDR3 for alpha chain variable domain of TCR clone 386387 (TRAV8-3, TRAJ26)
CAGDNYGQNFVF

SEQ ID NO: 772774 - protein, 12 aa, Homo sapiens
  CDR3 for beta chain variable domain of TCR clone 386387 (TRBV11-2, TRBJ2-5)
CASSLGQETQYF

SEQ ID NO: 772775 - protein, 14 aa, Homo sapiens
  CDR3 for alpha chain variable domain of TCR clone 386388 (TRAV1-2, TRAJ8)
CAVREDTGFQKLVF

SEQ ID NO: 772776 - protein, 20 aa, Homo sapiens
  CDR3 for beta chain variable domain of TCR clone 386388 (TRBV28, TRBJ2-1)
SASTPIGRSPGLAGGNEQFF

SEQ ID NO: 772777 - protein, 13 aa, Homo sapiens
  CDR3 for alpha chain variable domain of TCR clone 386389 (TRAV16, TRAJ11)
CALTQSGYSTLTF

SEQ ID NO: 772778 - protein, 14 aa, Homo sapiens
  CDR3 for beta chain variable domain of TCR clone 386389 (TRBV19, TRBJ2-7)
CASSTTRSSYEQYV

SEQ ID NO: 772779 - protein, 10 aa, Homo sapiens
  CDR3 for alpha chain variable domain of TCR clone 386390 (TRAV12-3, TRAJ18)
CAMSAEAQPW

SEQ ID NO: 772780 - protein, 13 aa, Homo sapiens
  CDR3 for beta chain variable domain of TCR clone 386390 (TRBV15, TRBJ1-6)
GATSGGVNSPLHF

SEQ ID NO: 772781 - protein, 16 aa, Homo sapiens
  CDR3 for alpha chain variable domain of TCR clone 386391 (TRAV26-1, TRAJ32)
CLVRTNYGGATNKLIF

SEQ ID NO: 772782 - protein, 13 aa, Homo sapiens
  CDR3 for beta chain variable domain of TCR clone 386391 (TRBV7-9, TRBJ2-3)
CASSPGSTDTQYF

SEQ ID NO: 772783 - protein, 17 aa, Homo sapiens
  CDR3 for alpha chain variable domain of TCR clone 386392 (TRAV12-1, TRAJ53)
CVAGAIVGGGSNYKLTF

SEQ ID NO: 772784 - protein, 13 aa, Homo sapiens
  CDR3 for beta chain variable domain of TCR clone 386392 (TRBV7-3, TRBJ2-3)
CASSDQIGETQYF

SEQ ID NO: 772785 - protein, 19 aa, Homo sapiens
  CDR3 for alpha chain variable domain of TCR clone 386393 (TRAV27, TRAJ53)
ASTSVQSRNSGGSNYKLTF

SEQ ID NO: 772786 - protein, 14 aa, Homo sapiens
  CDR3 for beta chain variable domain of TCR clone 386393 (TRBV11-1, TRBJ2-7)
CARTFAVPSYEQYF

SEQ ID NO: 772787 - protein, 13 aa, Homo sapiens
  CDR3 for alpha chain variable domain of TCR clone 386394 (TRAV12-2, TRAJ52)
CAVDGTSYGKLTF

SEQ ID NO: 772788 - protein, 14 aa, Homo sapiens
  CDR3 for beta chain variable domain of TCR clone 386394 (TRBV19, TRBJ2-1)
CASPTFVLSGEQFF

SEQ ID NO: 772789 - protein, 16 aa, Homo sapiens
  CDR3 for alpha chain variable domain of TCR clone 386395 (TRAV20, TRAJ28)
CAVRDPSGAGSYQPTF

SEQ ID NO: 772790 - protein, 17 aa, Homo sapiens
  CDR3 for beta chain variable domain of TCR clone 386395 (TRBV28, TRBJ2-5)
CASSTPEGDALQETQYF

SEQ ID NO: 772791 - protein, 15 aa, Homo sapiens
  CDR3 for alpha chain variable domain of TCR clone 386396 (TRAV17, TRAJ22)
CATAPISGSARQLTF

SEQ ID NO: 772792 - protein, 13 aa, Homo sapiens
  CDR3 for beta chain variable domain of TCR clone 386396 (TRBV6-5, TRBJ1-2)
CASSLDTYYGYIF

SEQ ID NO: 772793 - protein, 10 aa, Homo sapiens
  CDR3 for alpha chain variable domain of TCR clone 386397 (TRAV23/DV6, TRAJ57)
CSASSTLSQV

SEQ ID NO: 772794 - protein, 14 aa, Homo sapiens
  CDR3 for beta chain variable domain of TCR clone 386397 (TRBV25-1, TRBJ1-1)
CASTHLGGNTEAFF

SEQ ID NO: 772795 - protein, 14 aa, Homo sapiens
  CDR3 for alpha chain variable domain of TCR clone 386398 (TRAV26-1, TRAJ43)
TAVYYCRKPYDMRF

SEQ ID NO: 772796 - protein, 12 aa, Homo sapiens
  CDR3 for beta chain variable domain of TCR clone 386398 (TRBV11-2, TRBJ2-2)
CASSLGGGELFF

SEQ ID NO: 772797 - protein, 15 aa, Homo sapiens
  CDR3 for alpha chain variable domain of TCR clone 386399 (TRAV4, TRAJ8)
CLVGEQHTGCQKLVF

SEQ ID NO: 772798 - protein, 15 aa, Homo sapiens
  CDR3 for beta chain variable domain of TCR clone 386399 (TRBV7-9, TRBJ2-5)
CASSNRDYLQETQYF

SEQ ID NO: 772799 - protein, 18 aa, Homo sapiens
  CDR3 for alpha chain variable domain of TCR clone 386400 (TRAV12-3, TRAJ52)
CAMSVGGAGGTSYGKLTF

SEQ ID NO: 772800 - protein, 15 aa, Homo sapiens
  CDR3 for beta chain variable domain of TCR clone 386400 (TRBV6-1, TRBJ1-3)
CASSDFGFSGNTIYF

SEQ ID NO: 772801 - protein, 14 aa, Homo sapiens
  CDR3 for alpha chain variable domain of TCR clone 386401 (TRAV8-4, TRAJ9)
CAVSDRTVGFKTIF

SEQ ID NO: 772802 - protein, 13 aa, Homo sapiens
  CDR3 for beta chain variable domain of TCR clone 386401 (TRBV11-2, TRBJ2-7)
CASSLGDSYEQYF

SEQ ID NO: 772803 - protein, 15 aa, Homo sapiens
  CDR3 for alpha chain variable domain of TCR clone 386402 (TRAV17, TRAJ29)
FLLCYASSGNTPLVF

SEQ ID NO: 772804 - protein, 13 aa, Homo sapiens
  CDR3 for beta chain variable domain of TCR clone 386402 (TRBV14, TRBJ2-7)
CASSQDRRYEQYF

SEQ ID NO: 772805 - protein, 14 aa, Homo sapiens
  CDR3 for alpha chain variable domain of TCR clone 386403 (TRAV8-3, TRAJ26)
CAVAPGNYGQNIVF

SEQ ID NO: 772806 - protein, 15 aa, Homo sapiens
  CDR3 for beta chain variable domain of TCR clone 386403 (TRBV27, TRBJ2-1)
CASSNGGGSSNEQFF

SEQ ID NO: 772807 - protein, 18 aa, Homo sapiens
  CDR3 for alpha chain variable domain of TCR clone 386404 (TRAV12-3, TRAJ52)
CAMSVGGAGGTSYGKLTF

SEQ ID NO: 772808 - protein, 15 aa, Homo sapiens
  CDR3 for beta chain variable domain of TCR clone 386404 (TRBV7-9, TRBJ2-3)
CASSQDRGITDTQYF

SEQ ID NO: 772809 - protein, 14 aa, Homo sapiens
  CDR3 for alpha chain variable domain of TCR clone 386405 (TRAV12-2, TRAJ17)
CAVLFKAAGNKLTF

SEQ ID NO: 772810 - protein, 12 aa, Homo sapiens
  CDR3 for beta chain variable domain of TCR clone 386405 (TRBV29-1, TRBJ2-3)
CSVTGGADAQYF

SEQ ID NO: 772811 - protein, 13 aa, Homo sapiens
  CDR3 for alpha chain variable domain of TCR clone 386406 (TRAV12-1, TRAJ22)
CVVYSGSARQLIF

SEQ ID NO: 772812 - protein, 16 aa, Homo sapiens
  CDR3 for beta chain variable domain of TCR clone 386406 (TRBV5-1, TRBJ2-1)
CASSLADIGSYNEQFF

SEQ ID NO: 772813 - protein, 13 aa, Homo sapiens
  CDR3 for alpha chain variable domain of TCR clone 386407 (TRAV35, TRAJ44)
CAGLSGTASKLTF

SEQ ID NO: 772814 - protein, 17 aa, Homo sapiens
  CDR3 for beta chain variable domain of TCR clone 386407 (TRBV7-8, TRBJ1-2)
CASSLRPLQGHLYGYTF

SEQ ID NO: 772815 - protein, 15 aa, Homo sapiens
  CDR3 for alpha chain variable domain of TCR clone 386408 (TRAV26-1, TRAJ22)
CIGRVSFWFCKATDL

SEQ ID NO: 772816 - protein, 15 aa, Homo sapiens
  CDR3 for beta chain variable domain of TCR clone 386408 (TRBV20-1, TRBJ2-7)
CSARDRVSGMDEQYF

SEQ ID NO: 772817 - protein, 11 aa, Homo sapiens
  CDR3 for alpha chain variable domain of TCR clone 386409 (TRAV13-2, TRAJ49)
CAVPTGNQFYF

SEQ ID NO: 772818 - protein, 13 aa, Homo sapiens
  CDR3 for beta chain variable domain of TCR clone 386409 (TRBV15, TRBJ1-6)
CATSGGLNSPLHF

SEQ ID NO: 772819 - protein, 14 aa, Homo sapiens
  CDR3 for alpha chain variable domain of TCR clone 386410 (TRAV25, TRAJ35)
CARRMEGFGNVLHC

SEQ ID NO: 772820 - protein, 13 aa, Homo sapiens
  CDR3 for beta chain variable domain of TCR clone 386410 (TRBV7-2, TRBJ1-4)
CASSLAGLEKLFF

SEQ ID NO: 772821 - protein, 11 aa, Homo sapiens
  CDR3 for alpha chain variable domain of TCR clone 386411 (TRAV13-1, TRAJ30)
CAASRDDKISF

SEQ ID NO: 772822 - protein, 15 aa, Homo sapiens
  CDR3 for beta chain variable domain of TCR clone 386411 (TRBV18, TRBJ1-1)
CASSPSSWVNTEAFF

SEQ ID NO: 772823 - protein, 16 aa, Homo sapiens
  CDR3 for alpha chain variable domain of TCR clone 386412 (TRAV20, TRAJ53)
CAVQGNSGGSNYKLTF

SEQ ID NO: 772824 - protein, 15 aa, Homo sapiens
  CDR3 for beta chain variable domain of TCR clone 386412 (TRBV9, TRBJ1-6)
CASSVAGTGDSPLHF

SEQ ID NO: 772825 - protein, 14 aa, Homo sapiens
  CDR3 for alpha chain variable domain of TCR clone 386413 (TRAV8-2, TRAJ4)
CVVSPSVGYNKLIF

SEQ ID NO: 772826 - protein, 16 aa, Homo sapiens
  CDR3 for beta chain variable domain of TCR clone 386413 (TRBV7-3, TRBJ2-1)
CASSVEGYRSYNEQFF

SEQ ID NO: 772827 - protein, 15 aa, Homo sapiens
  CDR3 for alpha chain variable domain of TCR clone 386414 (TRAV8-3, TRAJ40)
CAAPSLGSGTYKYIF

SEQ ID NO: 772828 - protein, 16 aa, Homo sapiens
  CDR3 for beta chain variable domain of TCR clone 386414 (TRBV19, TRBJ2-1)
CASSMGGGSSYNEQFF

SEQ ID NO: 772829 - protein, 15 aa, Homo sapiens
  CDR3 for alpha chain variable domain of TCR clone 386415 (TRAV12-2, TRAJ8)
CAVREENPGFQKLVF

SEQ ID NO: 772830 - protein, 15 aa, Homo sapiens
  CDR3 for beta chain variable domain of TCR clone 386415 (TRBV28, TRBJ2-4)
CAAGSGTLLMGIQYF

SEQ ID NO: 772831 - protein, 14 aa, Homo sapiens
  CDR3 for alpha chain variable domain of TCR clone 386416 (TRAV21, TRAJ21)
CAVGGEDNFNKFYF

SEQ ID NO: 772832 - protein, 17 aa, Homo sapiens
  CDR3 for beta chain variable domain of TCR clone 386416 (TRBV20-1, TRBJ2-2)
CSASGSGQGGLTGELFF

SEQ ID NO: 772833 - protein, 16 aa, Homo sapiens
  CDR3 for alpha chain variable domain of TCR clone 386417 (TRAV12-1, TRAJ48)
CVVNMVSNFGNEKLTF

SEQ ID NO: 772834 - protein, 18 aa, Homo sapiens
  CDR3 for beta chain variable domain of TCR clone 386417 (TRBV11-2, TRBJ2-6)
CSSSLNPFLGTGANVLTF

SEQ ID NO: 772835 - protein, 13 aa, Homo sapiens
  CDR3 for alpha chain variable domain of TCR clone 386418 (TRAV27, TRAJ41)
CAGEGNSGYALNL

SEQ ID NO: 772836 - protein, 14 aa, Homo sapiens
  CDR3 for beta chain variable domain of TCR clone 386418 (TRBV25-1, TRBJ1-1)
CASTHLGGNTEAFF

SEQ ID NO: 772837 - protein, 22 aa, Homo sapiens
  CDR3 for alpha chain variable domain of TCR clone 386419 (TRAV12-3, TRAJ42)
CAMTLTGNKLTFGGGSQGNLIF

SEQ ID NO: 772838 - protein, 15 aa, Homo sapiens
  CDR3 for beta chain variable domain of TCR clone 386419 (TRBV9, TRBJ1-6)
CASSVAGTGDSPLHF

SEQ ID NO: 772839 - protein, 11 aa, Homo sapiens
  CDR3 for alpha chain variable domain of TCR clone 386420 (TRAV17, TRAJ43)
CATPRSNDMRF

SEQ ID NO: 772840 - protein, 17 aa, Homo sapiens
  CDR3 for beta chain variable domain of TCR clone 386420 (TRBV20-1, TRBJ2-2)
CSASGSGQGGLTGELFF

SEQ ID NO: 772841 - protein, 13 aa, Homo sapiens
  CDR3 for alpha chain variable domain of TCR clone 386421 (TRAV13-2, TRAJ20)
CAEKSWNDYKLSF

SEQ ID NO: 772842 - protein, 11 aa, Homo sapiens
  CDR3 for beta chain variable domain of TCR clone 386421 (TRBV19, TRBJ1-1)
CASSIGSEAFF

SEQ ID NO: 772843 - protein, 15 aa, Homo sapiens
  CDR3 for alpha chain variable domain of TCR clone 386422 (TRAV13-1, TRAJ11)
CAASNRNSGYSNRTF

SEQ ID NO: 772844 - protein, 11 aa, Homo sapiens
  CDR3 for beta chain variable domain of TCR clone 386422 (TRBV20-1, TRBJ2-7)
CSARLSYEQYF

SEQ ID NO: 772845 - protein, 12 aa, Homo sapiens
  CDR3 for alpha chain variable domain of TCR clone 386423 (TRAV8-3, TRAJ26)
CAGDNFGQNFVF

SEQ ID NO: 772846 - protein, 15 aa, Homo sapiens
  CDR3 for beta chain variable domain of TCR clone 386423 (TRBV12-4, TRBJ2-1)
CASSLSGGASNEQFF

SEQ ID NO: 772847 - protein, 15 aa, Homo sapiens
  CDR3 for alpha chain variable domain of TCR clone 386424 (TRAV21, TRAJ53)
CAVRQSGGSHYKLTF

SEQ ID NO: 772848 - protein, 14 aa, Homo sapiens
  CDR3 for beta chain variable domain of TCR clone 386424 (TRBV18, TRBJ2-5)
CASSPGVSQETQYF

SEQ ID NO: 772849 - protein, 14 aa, Homo sapiens
  CDR3 for alpha chain variable domain of TCR clone 386425 (TRAV2, TRAJ9)
CAVDPNTGGFKTIF

SEQ ID NO: 772850 - protein, 14 aa, Homo sapiens
  CDR3 for beta chain variable domain of TCR clone 386425 (TRBV7-2, TRBJ2-7)
CASSPKTSFCEQYF

SEQ ID NO: 772851 - protein, 14 aa, Homo sapiens
  CDR3 for alpha chain variable domain of TCR clone 386426 (TRAV39, TRAJ42)
CAVDIARSRGNLIF

SEQ ID NO: 772852 - protein, 15 aa, Homo sapiens
  CDR3 for beta chain variable domain of TCR clone 386426 (TRBV27, TRBJ2-7)
CARSLFGTGLDEQYF

SEQ ID NO: 772853 - protein, 15 aa, Homo sapiens
  CDR3 for alpha chain variable domain of TCR clone 386427 (TRAV25, TRAJ52)
YAGRPGGTSYGKLTF

SEQ ID NO: 772854 - protein, 15 aa, Homo sapiens
  CDR3 for beta chain variable domain of TCR clone 386427 (TRBV28, TRBJ2-4)
CAAGSGTLLMGIQYF

SEQ ID NO: 772855 - protein, 17 aa, Homo sapiens
  CDR3 for alpha chain variable domain of TCR clone 386428 (TRAV23/DV6, TRAJ57)
CAASSTLSQGGSEKLVF

SEQ ID NO: 772856 - protein, 14 aa, Homo sapiens
  CDR3 for beta chain variable domain of TCR clone 386428 (TRBV7-8, TRBJ2-1)
CASSSQGTYNEQFL

SEQ ID NO: 772857 - protein, 13 aa, Homo sapiens
  CDR3 for alpha chain variable domain of TCR clone 386429 (TRAV27, TRAJ41)
CAGEGNSGYALNF

SEQ ID NO: 772858 - protein, 17 aa, Homo sapiens
  CDR3 for beta chain variable domain of TCR clone 386429 (TRBV4-1, TRBJ1-4)
CASSQEGPRGVEEKLFF

SEQ ID NO: 772859 - protein, 13 aa, Homo sapiens
  CDR3 for alpha chain variable domain of TCR clone 386430 (TRAV26-1, TRAJ29)
CIVRRSGNTPLVF

SEQ ID NO: 772860 - protein, 16 aa, Homo sapiens
  CDR3 for beta chain variable domain of TCR clone 386430 (TRBV19, TRBJ2-1)
CASSKAGPSSYNEQFF

SEQ ID NO: 772861 - protein, 16 aa, Homo sapiens
  CDR3 for alpha chain variable domain of TCR clone 386431 (TRAV16, TRAJ4)
CALSRMFSGGYNKLIF

SEQ ID NO: 772862 - protein, 14 aa, Homo sapiens
  CDR3 for beta chain variable domain of TCR clone 386431 (TRBV19, TRBJ2-7)
CASSIDGPRVEQYF

SEQ ID NO: 772863 - protein, 13 aa, Homo sapiens
  CDR3 for alpha chain variable domain of TCR clone 386432 (TRAV12-2, TRAJ30)
CAVNLNRDDKIIF

SEQ ID NO: 772864 - protein, 15 aa, Homo sapiens
  CDR3 for beta chain variable domain of TCR clone 386432 (TRBV20-1, TRBJ2-7)
CSARDRVSGMDEQYF

SEQ ID NO: 772865 - protein, 15 aa, Homo sapiens
  CDR3 for alpha chain variable domain of TCR clone 386433 (TRAV17, TRAJ57)
CATGPSQGGSEKLVF

SEQ ID NO: 772866 - protein, 14 aa, Homo sapiens
  CDR3 for beta chain variable domain of TCR clone 386433 (TRBV7-9, TRBJ1-1)
CASTPLQSYTEAFF

SEQ ID NO: 772867 - protein, 14 aa, Homo sapiens
  CDR3 for alpha chain variable domain of TCR clone 386434 (TRAV27, TRAJ23)
CAGLSYNQGGKLIF

SEQ ID NO: 772868 - protein, 15 aa, Homo sapiens
  CDR3 for beta chain variable domain of TCR clone 386434 (TRBV19, TRBJ2-2)
CASSLNRGVTGELFC

SEQ ID NO: 772869 - protein, 15 aa, Homo sapiens
  CDR3 for alpha chain variable domain of TCR clone 386435 (TRAV8-3, TRAJ41)
CAVGSNSNSGYALNF

SEQ ID NO: 772870 - protein, 18 aa, Homo sapiens
  CDR3 for beta chain variable domain of TCR clone 386435 (TRBV12-4, TRBJ2-2)
CASSLVAGTRGRTGELFF

SEQ ID NO: 772871 - protein, 14 aa, Homo sapiens
  CDR3 for alpha chain variable domain of TCR clone 386436 (TRAV12-2, TRAJ23)
CAVGCYNQGGKLIF

SEQ ID NO: 772872 - protein, 15 aa, Homo sapiens
  CDR3 for beta chain variable domain of TCR clone 386436 (TRBV20-1, TRBJ2-3)
CSASSGGPRTDTQYF

SEQ ID NO: 772873 - protein, 17 aa, Homo sapiens
  CDR3 for alpha chain variable domain of TCR clone 386437 (TRAV8-6, TRAJ58)
CAVSSWVGETSGSRLTF

SEQ ID NO: 772874 - protein, 15 aa, Homo sapiens
  CDR3 for beta chain variable domain of TCR clone 386437 (TRBV19, TRBJ2-1)
CASSSPGVPLDEQFV

SEQ ID NO: 772875 - protein, 13 aa, Homo sapiens
  CDR3 for alpha chain variable domain of TCR clone 386438 (TRAV2, TRAJ15)
CAVASQAGTALIF

SEQ ID NO: 772876 - protein, 17 aa, Homo sapiens
  CDR3 for beta chain variable domain of TCR clone 386438 (TRBV24-1, TRBJ2-1)
CATSDVSTSGTYNEQFF

SEQ ID NO: 772877 - protein, 14 aa, Homo sapiens
  CDR3 for alpha chain variable domain of TCR clone 386439 (TRAV12-3, TRAJ54)
CAMSALQGAQKLVF

SEQ ID NO: 772878 - protein, 13 aa, Homo sapiens
  CDR3 for beta chain variable domain of TCR clone 386439 (TRBV12-4, TRBJ2-5)
CASSLGGSRTQYF

SEQ ID NO: 772879 - protein, 14 aa, Homo sapiens
  CDR3 for alpha chain variable domain of TCR clone 386440 (TRAV13-2, TRAJ22)
CADGTLGSARQLTF

SEQ ID NO: 772880 - protein, 14 aa, Homo sapiens
  CDR3 for beta chain variable domain of TCR clone 386440 (TRBV19, TRBJ2-7)
CASTVQGRPYEQYF

SEQ ID NO: 772881 - protein, 14 aa, Homo sapiens
  CDR3 for alpha chain variable domain of TCR clone 386441 (TRAV1-2, TRAJ8)
CAVRADTGFQKLVF

SEQ ID NO: 772882 - protein, 15 aa, Homo sapiens
  CDR3 for beta chain variable domain of TCR clone 386441 (TRBV9, TRBJ1-6)
CASSVAGTGDSPLHF

SEQ ID NO: 772883 - protein, 14 aa, Homo sapiens
  CDR3 for alpha chain variable domain of TCR clone 386442 (TRAV1-2, TRAJ16)
WAVNRFSDGQKLLF

SEQ ID NO: 772884 - protein, 15 aa, Homo sapiens
  CDR3 for beta chain variable domain of TCR clone 386442 (TRBV12-4, TRBJ2-5)
CASSPPTGLQETQYF

SEQ ID NO: 772885 - protein, 13 aa, Homo sapiens
  CDR3 for alpha chain variable domain of TCR clone 386443 (TRAV2, TRAJ40)
CAVVTSGTYKYIF

SEQ ID NO: 772886 - protein, 12 aa, Homo sapiens
  CDR3 for beta chain variable domain of TCR clone 386443 (TRBV5-1, TRBJ2-7)
CASSFRGYEQYF

SEQ ID NO: 772887 - protein, 14 aa, Homo sapiens
  CDR3 for alpha chain variable domain of TCR clone 386444 (TRAV35, TRAJ33)
CAGSSQDSNYQLIW

SEQ ID NO: 772888 - protein, 15 aa, Homo sapiens
  CDR3 for beta chain variable domain of TCR clone 386444 (TRBV20-1, TRBJ2-7)
CSSESGTSGAYEQYF

SEQ ID NO: 772889 - protein, 13 aa, Homo sapiens
  CDR3 for alpha chain variable domain of TCR clone 386445 (TRAV12-1, TRAJ33)
CGDAPDRNYQLIW

SEQ ID NO: 772890 - protein, 12 aa, Homo sapiens
  CDR3 for beta chain variable domain of TCR clone 386445 (TRBV11-2, TRBJ2-2)
CASSLGGGELFF

SEQ ID NO: 772891 - protein, 14 aa, Homo sapiens
  CDR3 for alpha chain variable domain of TCR clone 386446 (TRAV12-3, TRAJ10)
SHLPLTGGGNKLTF

SEQ ID NO: 772892 - protein, 17 aa, Homo sapiens
  CDR3 for beta chain variable domain of TCR clone 386446 (TRBV7-9, TRBJ2-1)
CASSLTPGHHPNNEQFF

SEQ ID NO: 772893 - protein, 11 aa, Homo sapiens
  CDR3 for alpha chain variable domain of TCR clone 386447 (TRAV38-1, TRAJ35)
CAFMSLDRLWE

SEQ ID NO: 772894 - protein, 13 aa, Homo sapiens
  CDR3 for beta chain variable domain of TCR clone 386447 (TRBV4-3, TRBJ2-5)
CASSQEVQETQYF

SEQ ID NO: 772895 - protein, 14 aa, Homo sapiens
  CDR3 for alpha chain variable domain of TCR clone 386448 (TRAV20, TRAJ29)
CAVQAWVGNTPLVF

SEQ ID NO: 772896 - protein, 12 aa, Homo sapiens
  CDR3 for beta chain variable domain of TCR clone 386448 (TRBV4-3, TRBJ2-1)
CASSLSGYEQFF

SEQ ID NO: 772897 - protein, 15 aa, Homo sapiens
  CDR3 for alpha chain variable domain of TCR clone 386449 (TRAV12-3, TRAJ13)
CAMSARSGGYQKVTF

SEQ ID NO: 772898 - protein, 13 aa, Homo sapiens
  CDR3 for beta chain variable domain of TCR clone 386449 (TRBV4-2, TRBJ1-1)
CASSQAGNTEAFF

SEQ ID NO: 772899 - protein, 16 aa, Homo sapiens
  CDR3 for alpha chain variable domain of TCR clone 386450 (TRAV17, TRAJ22)
CATGPISSGSARQLTF

SEQ ID NO: 772900 - protein, 20 aa, Homo sapiens
  CDR3 for beta chain variable domain of TCR clone 386450 (TRBV11-2, TRBJ2-1)
CASSLGLAGGVLRARDTAHR

SEQ ID NO: 772901 - protein, 18 aa, Homo sapiens
  CDR3 for alpha chain variable domain of TCR clone 386451 (TRAV13-1, TRAJ52)
CAAKNPNAGGTSYGKLTF

SEQ ID NO: 772902 - protein, 17 aa, Homo sapiens
  CDR3 for beta chain variable domain of TCR clone 386451 (TRBV11-2, TRBJ2-1)
CASSLYPPGVEYNEQFF

SEQ ID NO: 772903 - protein, 13 aa, Homo sapiens
  CDR3 for alpha chain variable domain of TCR clone 386452 (TRAV16, TRAJ52)
CALRGTSYGKLTF

SEQ ID NO: 772904 - protein, 14 aa, Homo sapiens
  CDR3 for beta chain variable domain of TCR clone 386452 (TRBV12-5, TRBJ2-5)
CASGSRTHQETQYF

SEQ ID NO: 772905 - protein, 12 aa, Homo sapiens
  CDR3 for alpha chain variable domain of TCR clone 386453 (TRAV21, TRAJ33)
CAKMDSNYQLIW

SEQ ID NO: 772906 - protein, 13 aa, Homo sapiens
  CDR3 for beta chain variable domain of TCR clone 386453 (TRBV7-9, TRBJ2-7)
CASSFAGAYEQYF

SEQ ID NO: 772907 - protein, 14 aa, Homo sapiens
  CDR3 for alpha chain variable domain of TCR clone 386454 (TRAV3, TRAJ17)
CAVIDAAAGNKLTF

SEQ ID NO: 772908 - protein, 15 aa, Homo sapiens
  CDR3 for beta chain variable domain of TCR clone 386454 (TRBV9, TRBJ1-6)
CASSVAGTGDSPLHF

SEQ ID NO: 772909 - protein, 17 aa, Homo sapiens
  CDR3 for alpha chain variable domain of TCR clone 386455 (TRAV3, TRAJ12)
CAVRDGGRMDSSYKLIF

SEQ ID NO: 772910 - protein, 17 aa, Homo sapiens
  CDR3 for beta chain variable domain of TCR clone 386455 (TRBV4-1, TRBJ1-4)
CASSQEGPRGVEEKLFF

SEQ ID NO: 772911 - protein, 14 aa, Homo sapiens
  CDR3 for alpha chain variable domain of TCR clone 386456 (TRAV12-2, TRAJ13)
CAVEKTGGYQKVTF

SEQ ID NO: 772912 - protein, 11 aa, Homo sapiens
  CDR3 for beta chain variable domain of TCR clone 386456 (TRBV12-4, TRBJ2-3)
CASTATDTQYF

SEQ ID NO: 772913 - protein, 13 aa, Homo sapiens
  CDR3 for alpha chain variable domain of TCR clone 386457 (TRAV12-1, TRAJ49)
CVVNTNTGNQFYF

SEQ ID NO: 772914 - protein, 12 aa, Homo sapiens
  CDR3 for beta chain variable domain of TCR clone 386457 (TRBV5-1, TRBJ1-1)
CASSFGNTEAFF

SEQ ID NO: 772915 - protein, 13 aa, Homo sapiens
  CDR3 for alpha chain variable domain of TCR clone 386458 (TRAV2, TRAJ40)
CAVVTSGTYKYIF

SEQ ID NO: 772916 - protein, 14 aa, Homo sapiens
  CDR3 for beta chain variable domain of TCR clone 386458 (TRBV7-2, TRBJ2-3)
CASSQTGSSYTQYF

SEQ ID NO: 772917 - protein, 12 aa, Homo sapiens
  CDR3 for alpha chain variable domain of TCR clone 386459 (TRAV13-1, TRAJ20)
CAASMGDYKLSF

SEQ ID NO: 772918 - protein, 11 aa, Homo sapiens
  CDR3 for beta chain variable domain of TCR clone 386459 (TRBV11-2, TRBJ2-2)
CASSLPGELFF

SEQ ID NO: 772919 - protein, 14 aa, Homo sapiens
  CDR3 for alpha chain variable domain of TCR clone 386460 (TRAV2, TRAJ9)
CAVDPNTGGFKTIF

SEQ ID NO: 772920 - protein, 12 aa, Homo sapiens
  CDR3 for beta chain variable domain of TCR clone 386460 (TRBV12-4, TRBJ2-7)
CASSLGGYEQYF

SEQ ID NO: 772921 - protein, 14 aa, Homo sapiens
  CDR3 for alpha chain variable domain of TCR clone 386461 (TRAV12-2, TRAJ44)
CAVNPAGTASKLTF

SEQ ID NO: 772922 - protein, 14 aa, Homo sapiens
  CDR3 for beta chain variable domain of TCR clone 386461 (TRBV4-1, TRBJ2-2)
CASSQAVNTGELFF

SEQ ID NO: 772923 - protein, 14 aa, Homo sapiens
  CDR3 for alpha chain variable domain of TCR clone 386462 (TRAV1-2, TRAJ16)
CAVNRFSDCQKLLF

SEQ ID NO: 772924 - protein, 13 aa, Homo sapiens
  CDR3 for beta chain variable domain of TCR clone 386462 (TRBV10-3, TRBJ1-2)
CAISERDSYGYTF

SEQ ID NO: 772925 - protein, 14 aa, Homo sapiens
  CDR3 for alpha chain variable domain of TCR clone 386463 (TRAV12-3, TRAJ10)
SHLPLTGGGNKLTF

SEQ ID NO: 772926 - protein, 14 aa, Homo sapiens
  CDR3 for beta chain variable domain of TCR clone 386463 (TRBV12-4, TRBJ1-6)
CASRPDGYNSPLHF

SEQ ID NO: 772927 - protein, 14 aa, Homo sapiens
  CDR3 for alpha chain variable domain of TCR clone 386464 (TRAV14/DV4, TRAJ26)
CAMREGTYGQNFVF

SEQ ID NO: 772928 - protein, 12 aa, Homo sapiens
  CDR3 for beta chain variable domain of TCR clone 386464 (TRBV29-1, TRBJ2-3)
CSVTGGADTQYF

SEQ ID NO: 772929 - protein, 13 aa, Homo sapiens
  CDR3 for alpha chain variable domain of TCR clone 386465 (TRAV12-2, TRAJ50)
CAVIVTSYDKVIF

SEQ ID NO: 772930 - protein, 14 aa, Homo sapiens
  CDR3 for beta chain variable domain of TCR clone 386465 (TRBV9, TRBJ2-1)
CASSVDPRWKEQFF

SEQ ID NO: 772931 - protein, 14 aa, Homo sapiens
  CDR3 for alpha chain variable domain of TCR clone 386466 (TRAV19, TRAJ16)
CALSEVSDVQKLLF

SEQ ID NO: 772932 - protein, 15 aa, Homo sapiens
  CDR3 for beta chain variable domain of TCR clone 386466 (TRBV20-1, TRBJ1-5)
CSASAWDRVNQPQHF

SEQ ID NO: 772933 - protein, 11 aa, Homo sapiens
  CDR3 for alpha chain variable domain of TCR clone 386467 (TRAV17, TRAJ49)
CATNTGNQFYF

SEQ ID NO: 772934 - protein, 15 aa, Homo sapiens
  CDR3 for beta chain variable domain of TCR clone 386467 (TRBV7-9, TRBJ1-6)
CASSSPGRGNSPLHF

SEQ ID NO: 772935 - protein, 13 aa, Homo sapiens
  CDR3 for alpha chain variable domain of TCR clone 386468 (TRAV1-1, TRAJ23)
CAVVANQGGKLIF

SEQ ID NO: 772936 - protein, 16 aa, Homo sapiens
  CDR3 for beta chain variable domain of TCR clone 386468 (TRBV12-4, TRBJ1-5)
CASSRPVGGSNQPQHF

SEQ ID NO: 772937 - protein, 13 aa, Homo sapiens
  CDR3 for alpha chain variable domain of TCR clone 386469 (TRAV36/DV7, TRAJ57)
CAVVPGGSEKLVF

SEQ ID NO: 772938 - protein, 14 aa, Homo sapiens
  CDR3 for beta chain variable domain of TCR clone 386469 (TRBV4-1, TRBJ1-2)
CASSQDGQVRGYTF

SEQ ID NO: 772939 - protein, 14 aa, Homo sapiens
  CDR3 for alpha chain variable domain of TCR clone 386470 (TRAV2, TRAJ37)
CAVDFTSHTGKLIF

SEQ ID NO: 772940 - protein, 15 aa, Homo sapiens
  CDR3 for beta chain variable domain of TCR clone 386470 (TRBV20-1, TRBJ1-1)
CSASRGVTGNTEAFL

SEQ ID NO: 772941 - protein, 15 aa, Homo sapiens
  CDR3 for alpha chain variable domain of TCR clone 386471 (TRAV27, TRAJ38)
CAARRNDGNNHKLIW

SEQ ID NO: 772942 - protein, 15 aa, Homo sapiens
  CDR3 for beta chain variable domain of TCR clone 386471 (TRBV2, TRBJ2-1)
CASSELAGSYNEQFF

SEQ ID NO: 772943 - protein, 13 aa, Homo sapiens
  CDR3 for alpha chain variable domain of TCR clone 386472 (TRAV36/DV7, TRAJ37)
CAVFSSNTGKLIF

SEQ ID NO: 772944 - protein, 15 aa, Homo sapiens
  CDR3 for beta chain variable domain of TCR clone 386472 (TRBV12-4, TRBJ2-5)
CQRFFVRGRKETQYF

SEQ ID NO: 772945 - protein, 13 aa, Homo sapiens
  CDR3 for alpha chain variable domain of TCR clone 386473 (TRAV21, TRAJ20)
CAVGLRVDYKLSF

SEQ ID NO: 772946 - protein, 13 aa, Homo sapiens
  CDR3 for beta chain variable domain of TCR clone 386473 (TRBV6-1, TRBJ1-1)
CASRRKGNTEAFF

SEQ ID NO: 772947 - protein, 15 aa, Homo sapiens
  CDR3 for alpha chain variable domain of TCR clone 386474 (TRAV21, TRAJ53)
CASLNSGGSNYKLTF

SEQ ID NO: 772948 - protein, 15 aa, Homo sapiens
  CDR3 for beta chain variable domain of TCR clone 386474 (TRBV6-3, TRBJ2-7)
CASSSPGTVCYEQYF

SEQ ID NO: 772949 - protein, 14 aa, Homo sapiens
  CDR3 for alpha chain variable domain of TCR clone 386475 (TRAV3, TRAJ17)
CAVRDAATGNKLTF

SEQ ID NO: 772950 - protein, 13 aa, Homo sapiens
  CDR3 for beta chain variable domain of TCR clone 386475 (TRBV2, TRBJ1-1)
CASSVSGYTEAFF

SEQ ID NO: 772951 - protein, 12 aa, Homo sapiens
  CDR3 for alpha chain variable domain of TCR clone 386476 (TRAV17, TRAJ57)
CSTDVGPEKLVF

SEQ ID NO: 772952 - protein, 13 aa, Homo sapiens
  CDR3 for beta chain variable domain of TCR clone 386476 (TRBV7-9, TRBJ2-7)
CASSFAGAYEQYF

SEQ ID NO: 772953 - protein, 14 aa, Homo sapiens
  CDR3 for alpha chain variable domain of TCR clone 386477 (TRAV38-1, TRAJ29)
SAFITPSGNTPLVF

SEQ ID NO: 772954 - protein, 14 aa, Homo sapiens
  CDR3 for beta chain variable domain of TCR clone 386477 (TRBV18, TRBJ2-7)
CASSPRGGAYEQYF

SEQ ID NO: 772955 - protein, 12 aa, Homo sapiens
  CDR3 for alpha chain variable domain of TCR clone 386478 (TRAV12-3, TRAJ40)
CAVSSGTYKYIF

SEQ ID NO: 772956 - protein, 12 aa, Homo sapiens
  CDR3 for beta chain variable domain of TCR clone 386478 (TRBV29-1, TRBJ2-3)
CSVTGGADTQYF

SEQ ID NO: 772957 - protein, 13 aa, Homo sapiens
  CDR3 for alpha chain variable domain of TCR clone 386479 (TRAV23/DV6, TRAJ16)
CAASISDGLKLLF

SEQ ID NO: 772958 - protein, 15 aa, Homo sapiens
  CDR3 for beta chain variable domain of TCR clone 386479 (TRBV2, TRBJ2-2)
CASSRETVGTGELFF

SEQ ID NO: 772959 - protein, 15 aa, Homo sapiens
  CDR3 for alpha chain variable domain of TCR clone 386480 (TRAV21, TRAJ53)
CATLNSGGSNYKLTF

SEQ ID NO: 772960 - protein, 13 aa, Homo sapiens
  CDR3 for beta chain variable domain of TCR clone 386480 (TRBV20-1, TRBJ2-2)
CSASAAGTGELFF

SEQ ID NO: 772961 - protein, 14 aa, Homo sapiens
  CDR3 for alpha chain variable domain of TCR clone 386481 (TRAV12-2, TRAJ40)
CAVKIPSGTYKYIF

SEQ ID NO: 772962 - protein, 20 aa, Homo sapiens
  CDR3 for beta chain variable domain of TCR clone 386481 (TRBV28, TRBJ2-1)
CASTPIGRSPGLPGGNEQFF

SEQ ID NO: 772963 - protein, 22 aa, Homo sapiens
  CDR3 for alpha chain variable domain of TCR clone 386482 (TRAV39, TRAJ49)
PCMTSLPPTSVPWTNTGNQFYF

SEQ ID NO: 772964 - protein, 17 aa, Homo sapiens
  CDR3 for beta chain variable domain of TCR clone 386482 (TRBV20-1, TRBJ2-1)
CSASDRRRASSYNEQFF

SEQ ID NO: 772965 - protein, 16 aa, Homo sapiens
  CDR3 for alpha chain variable domain of TCR clone 386483 (TRAV3, TRAJ21)
CAVKDIERGNFNKFYF

SEQ ID NO: 772966 - protein, 14 aa, Homo sapiens
  CDR3 for beta chain variable domain of TCR clone 386483 (TRBV19, TRBJ2-1)
CASPTFVLSGEQFF

SEQ ID NO: 772967 - protein, 14 aa, Homo sapiens
  CDR3 for alpha chain variable domain of TCR clone 386484 (TRAV8-1, TRAJ9)
CAVNAWTGGFKPIF

SEQ ID NO: 772968 - protein, 16 aa, Homo sapiens
  CDR3 for beta chain variable domain of TCR clone 386484 (TRBV28, TRBJ2-2)
CAGSLEGGSNTGELFF

SEQ ID NO: 772969 - protein, 15 aa, Homo sapiens
  CDR3 for alpha chain variable domain of TCR clone 386485 (TRAV1-2, TRAJ28)
CAVQYSGAGSYQLTF

SEQ ID NO: 772970 - protein, 13 aa, Homo sapiens
  CDR3 for beta chain variable domain of TCR clone 386485 (TRBV4-2, TRBJ1-1)
CASSQAGKTEAFF

SEQ ID NO: 772971 - protein, 15 aa, Homo sapiens
  CDR3 for alpha chain variable domain of TCR clone 386486 (TRAV26-1, TRAJ44)
CIVRVATGPASKLTF

SEQ ID NO: 772972 - protein, 18 aa, Homo sapiens
  CDR3 for beta chain variable domain of TCR clone 386486 (TRBV20-1, TRBJ2-3)
CSAKPLVRVARRTDTQYF

SEQ ID NO: 772973 - protein, 14 aa, Homo sapiens
  CDR3 for alpha chain variable domain of TCR clone 386487 (TRAV35, TRAJ53)
CAGNSGGSNYKLTF

SEQ ID NO: 772974 - protein, 11 aa, Homo sapiens
  CDR3 for beta chain variable domain of TCR clone 386487 (TRBV4-1, TRBJ1-4)
CASKENEKLFS

SEQ ID NO: 772975 - protein, 11 aa, Homo sapiens
  CDR3 for alpha chain variable domain of TCR clone 386488 (TRAV1-2, TRAJ31)
CAVNNNARLMF

SEQ ID NO: 772976 - protein, 14 aa, Homo sapiens
  CDR3 for beta chain variable domain of TCR clone 386488 (TRBV7-7, TRBJ2-2)
CASSPQLATGELFF

SEQ ID NO: 772977 - protein, 15 aa, Homo sapiens
  CDR3 for alpha chain variable domain of TCR clone 386489 (TRAV40, TRAJ45)
CLLGDLGGGADGLTF

SEQ ID NO: 772978 - protein, 17 aa, Homo sapiens
  CDR3 for beta chain variable domain of TCR clone 386489 (TRBV18, TRBJ1-5)
CASSPTMGQGTNQPQYC

SEQ ID NO: 772979 - protein, 14 aa, Homo sapiens
  CDR3 for alpha chain variable domain of TCR clone 386490 (TRAV3, TRAJ33)
CSVRDMGSNYQLIW

SEQ ID NO: 772980 - protein, 17 aa, Homo sapiens
  CDR3 for beta chain variable domain of TCR clone 386490 (TRBV19, TRBJ2-1)
CASSIWSAQPTHNEQFF

SEQ ID NO: 772981 - protein, 13 aa, Homo sapiens
  CDR3 for alpha chain variable domain of TCR clone 386491 (TRAV3, TRAJ21)
CAVREPDFNKVYF

SEQ ID NO: 772982 - protein, 13 aa, Homo sapiens
  CDR3 for beta chain variable domain of TCR clone 386491 (TRBV9, TRBJ2-1)
CASSPSGGNEKFF

SEQ ID NO: 772983 - protein, 16 aa, Homo sapiens
  CDR3 for alpha chain variable domain of TCR clone 386492 (TRAV30, TRAJ49)
SAAQRVGPNTGNQFYF

SEQ ID NO: 772984 - protein, 13 aa, Homo sapiens
  CDR3 for beta chain variable domain of TCR clone 386492 (TRBV7-3, TRBJ1-1)
CASSQDWGAEAFF

SEQ ID NO: 772985 - protein, 14 aa, Homo sapiens
  CDR3 for alpha chain variable domain of TCR clone 386493 (TRAV23/DV6, TRAJ37)
CAASTSSKTAKLIF

SEQ ID NO: 772986 - protein, 13 aa, Homo sapiens
  CDR3 for beta chain variable domain of TCR clone 386493 (TRBV18, TRBJ2-5)
CASSPIPGETQYF

SEQ ID NO: 772987 - protein, 18 aa, Homo sapiens
  CDR3 for alpha chain variable domain of TCR clone 386494 (TRAV13-1, TRAJ52)
CAAKHPNAGGTSYGKLTF

SEQ ID NO: 772988 - protein, 14 aa, Homo sapiens
  CDR3 for beta chain variable domain of TCR clone 386494 (TRBV7-2, TRBJ2-7)
CASSSISGFSEQYF

SEQ ID NO: 772989 - protein, 13 aa, Homo sapiens
  CDR3 for alpha chain variable domain of TCR clone 386495 (TRAV8-3, TRAJ28)
CAVGAVGSYQLTF

SEQ ID NO: 772990 - protein, 14 aa, Homo sapiens
  CDR3 for beta chain variable domain of TCR clone 386495 (TRBV7-2, TRBJ2-7)
CASRSQGAGDEQYF

SEQ ID NO: 772991 - protein, 23 aa, Homo sapiens
  CDR3 for alpha chain variable domain of TCR clone 386496 (TRAV26-1, TRAJ38)
CIADNAGNNHIQNPDPAVYQLRD

SEQ ID NO: 772992 - protein, 15 aa, Homo sapiens
  CDR3 for beta chain variable domain of TCR clone 386496 (TRBV27, TRBJ2-1)
CASSHGGGSSNEQFF

SEQ ID NO: 772993 - protein, 14 aa, Homo sapiens
  CDR3 for alpha chain variable domain of TCR clone 386497 (TRAV8-3, TRAJ4)
CAVGASGGYNKLIF

SEQ ID NO: 772994 - protein, 16 aa, Homo sapiens
  CDR3 for beta chain variable domain of TCR clone 386497 (TRBV19, TRBJ1-1)
CASSIAEGRMNTEAFF

SEQ ID NO: 772995 - protein, 14 aa, Homo sapiens
  CDR3 for alpha chain variable domain of TCR clone 386498 (TRAV1-2, TRAJ8)
CAVREDTGFQKLVF

SEQ ID NO: 772996 - protein, 16 aa, Homo sapiens
  CDR3 for beta chain variable domain of TCR clone 386498 (TRBV11-2, TRBJ2-2)
CASSLRTGNLIGELFF

SEQ ID NO: 772997 - protein, 13 aa, Homo sapiens
  CDR3 for alpha chain variable domain of TCR clone 386499 (TRAV2, TRAJ40)
CAVVISGTYKYIF

SEQ ID NO: 772998 - protein, 16 aa, Homo sapiens
  CDR3 for beta chain variable domain of TCR clone 386499 (TRBV12-5, TRBJ2-5)
CASGPRTSGNQETQYF

SEQ ID NO: 772999 - protein, 13 aa, Homo sapiens
  CDR3 for alpha chain variable domain of TCR clone 386500 (TRAV8-3, TRAJ37)
CAVTSSNTGKLIF

SEQ ID NO: 773000 - protein, 12 aa, Homo sapiens
  CDR3 for beta chain variable domain of TCR clone 386500 (TRBV11-2, TRBJ2-1)
CASSPGNNEQFF

SEQ ID NO: 773001 - protein, 14 aa, Homo sapiens
  CDR3 for alpha chain variable domain of TCR clone 386501 (TRAV26-1, TRAJ11)
CIVPLYSGYSTLTF

SEQ ID NO: 773002 - protein, 15 aa, Homo sapiens
  CDR3 for beta chain variable domain of TCR clone 386501 (TRBV7-9, TRBJ1-6)
CASSSPGRGNSPLHF

SEQ ID NO: 773003 - protein, 12 aa, Homo sapiens
  CDR3 for alpha chain variable domain of TCR clone 386502 (TRAV13-2, TRAJ23)
CAERHRGGKLIF

SEQ ID NO: 773004 - protein, 15 aa, Homo sapiens
  CDR3 for beta chain variable domain of TCR clone 386502 (TRBV28, TRBJ2-5)
CASSPGQGSIETQYF

SEQ ID NO: 773005 - protein, 11 aa, Homo sapiens
  CDR3 for alpha chain variable domain of TCR clone 386503 (TRAV2, TRAJ13)
CASGGYQKVTF

SEQ ID NO: 773006 - protein, 13 aa, Homo sapiens
  CDR3 for beta chain variable domain of TCR clone 386503 (TRBV24-1, TRBJ2-3)
CATSTGGTDAQYF

SEQ ID NO: 773007 - protein, 12 aa, Homo sapiens
  CDR3 for alpha chain variable domain of TCR clone 386504 (TRAV26-1, TRAJ13)
CIVSRGYQKVTF

SEQ ID NO: 773008 - protein, 13 aa, Homo sapiens
  CDR3 for beta chain variable domain of TCR clone 386504 (TRBV9, TRBJ2-7)
CASSVAEYYEQYF

SEQ ID NO: 773009 - protein, 15 aa, Homo sapiens
  CDR3 for alpha chain variable domain of TCR clone 386505 (TRAV26-1, TRAJ44)
CIVRANTGTASKLTF

SEQ ID NO: 773010 - protein, 16 aa, Homo sapiens
  CDR3 for beta chain variable domain of TCR clone 386505 (TRBV7-7, TRBJ2-1)
CASSIASGTSYNEQFF

SEQ ID NO: 773011 - protein, 15 aa, Homo sapiens
  CDR3 for alpha chain variable domain of TCR clone 386506 (TRAV3, TRAJ29)
CAVRDINSGNTPRVF

SEQ ID NO: 773012 - protein, 16 aa, Homo sapiens
  CDR3 for beta chain variable domain of TCR clone 386506 (TRBV4-1, TRBJ2-5)
CASSQTFYGDQETQYF

SEQ ID NO: 773013 - protein, 13 aa, Homo sapiens
  CDR3 for alpha chain variable domain of TCR clone 386507 (TRAV12-3, TRAJ13)
CAERPGGYQKVTF

SEQ ID NO: 773014 - protein, 15 aa, Homo sapiens
  CDR3 for beta chain variable domain of TCR clone 386507 (TRBV4-1, TRBJ1-4)
CASSDTGGTNEKLFF

SEQ ID NO: 773015 - protein, 16 aa, Homo sapiens
  CDR3 for alpha chain variable domain of TCR clone 386508 (TRAV16, TRAJ24)
CALSGGSTDIWGKLQF

SEQ ID NO: 773016 - protein, 15 aa, Homo sapiens
  CDR3 for beta chain variable domain of TCR clone 386508 (TRBV27, TRBJ2-1)
CASSNGGGSSNEQFF

SEQ ID NO: 773017 - protein, 16 aa, Homo sapiens
  CDR3 for alpha chain variable domain of TCR clone 386509 (TRAV35, TRAJ29)
CAGPIRGISGNTPLVF

SEQ ID NO: 773018 - protein, 14 aa, Homo sapiens
  CDR3 for beta chain variable domain of TCR clone 386509 (TRBV7-2, TRBJ2-7)
CASSPKTSFYEQYF

SEQ ID NO: 773019 - protein, 18 aa, Homo sapiens
  CDR3 for alpha chain variable domain of TCR clone 386510 (TRAV26-1, TRAJ23)
CIVRVGLEVWNQGGKLIF

SEQ ID NO: 773020 - protein, 14 aa, Homo sapiens
  CDR3 for beta chain variable domain of TCR clone 386510 (TRBV5-1, TRBJ2-7)
GASSRGESLYEQYF

SEQ ID NO: 773021 - protein, 14 aa, Homo sapiens
  CDR3 for alpha chain variable domain of TCR clone 386511 (TRAV35, TRAJ42)
CAGRYGGSQGNPIF

SEQ ID NO: 773022 - protein, 15 aa, Homo sapiens
  CDR3 for beta chain variable domain of TCR clone 386511 (TRBV7-9, TRBJ2-1)
CASSLGWGRANEKFF

SEQ ID NO: 773023 - protein, 15 aa, Homo sapiens
  CDR3 for alpha chain variable domain of TCR clone 386512 (TRAV12-1, TRAJ45)
CVVLSRGGGADGLTF

SEQ ID NO: 773024 - protein, 16 aa, Homo sapiens
  CDR3 for beta chain variable domain of TCR clone 386512 (TRBV6-5, TRBJ2-1)
CASSETLAGHYNEQFF

SEQ ID NO: 773025 - protein, 16 aa, Homo sapiens
  CDR3 for alpha chain variable domain of TCR clone 386513 (TRAV3, TRAJ28)
CAVLPRSGAGSYQLTL

SEQ ID NO: 773026 - protein, 13 aa, Homo sapiens
  CDR3 for beta chain variable domain of TCR clone 386513 (TRBV12-4, TRBJ2-5)
CASRLAVQETEYF

SEQ ID NO: 773027 - protein, 13 aa, Homo sapiens
  CDR3 for alpha chain variable domain of TCR clone 386514 (TRAV27, TRAJ3)
ASLRGSSASKIIF

SEQ ID NO: 773028 - protein, 16 aa, Homo sapiens
  CDR3 for beta chain variable domain of TCR clone 386514 (TRBV29-1, TRBJ2-7)
CSVEVVGTSGSYEQYF

SEQ ID NO: 773029 - protein, 12 aa, Homo sapiens
  CDR3 for alpha chain variable domain of TCR clone 386515 (TRAV13-2, TRAJ16)
CAASPDGQKLLF

SEQ ID NO: 773030 - protein, 16 aa, Homo sapiens
  CDR3 for beta chain variable domain of TCR clone 386515 (TRBV28, TRBJ2-5)
CASSFSPAGGWETQYF

SEQ ID NO: 773031 - protein, 16 aa, Homo sapiens
  CDR3 for alpha chain variable domain of TCR clone 386516 (TRAV12-3, TRAJ53)
CAMSPGSGGSNYKLTF

SEQ ID NO: 773032 - protein, 14 aa, Homo sapiens
  CDR3 for beta chain variable domain of TCR clone 386516 (TRBV28, TRBJ1-1)
CASSSEQGYTEAFF

SEQ ID NO: 773033 - protein, 18 aa, Homo sapiens
  CDR3 for alpha chain variable domain of TCR clone 386517 (TRAV29/DV5, TRAJ52)
CAAGFRGAGGTSYGNLTF

SEQ ID NO: 773034 - protein, 12 aa, Homo sapiens
  CDR3 for beta chain variable domain of TCR clone 386517 (TRBV11-2, TRBJ2-1)
CASSPGNNEQFF

SEQ ID NO: 773035 - protein, 13 aa, Homo sapiens
  CDR3 for alpha chain variable domain of TCR clone 386518 (TRAV29/DV5, TRAJ31)
CSASRNNNARLMF

SEQ ID NO: 773036 - protein, 13 aa, Homo sapiens
  CDR3 for beta chain variable domain of TCR clone 386518 (TRBV20-1, TRBJ1-1)
CSAPLGGGTEAFF

SEQ ID NO: 773037 - protein, 14 aa, Homo sapiens
  CDR3 for alpha chain variable domain of TCR clone 386519 (TRAV12-2, TRAJ45)
CAVNIQGKADGLTF

SEQ ID NO: 773038 - protein, 13 aa, Homo sapiens
  CDR3 for beta chain variable domain of TCR clone 386519 (TRBV9, TRBJ2-1)
CASSSDSYNEPFF

SEQ ID NO: 773039 - protein, 20 aa, Homo sapiens
  CDR3 for alpha chain variable domain of TCR clone 386520 (TRAV26-1, )
CIVSHRVEGFWNQIPDITNP

SEQ ID NO: 773040 - protein, 14 aa, Homo sapiens
  CDR3 for beta chain variable domain of TCR clone 386520 (TRBV20-1, TRBJ2-7)
CSAWTALSSYEQYF

SEQ ID NO: 773041 - protein, 14 aa, Homo sapiens
  CDR3 for alpha chain variable domain of TCR clone 386521 (TRAV12-2, TRAJ40)
CAVRIPSGTYKYIF

SEQ ID NO: 773042 - protein, 16 aa, Homo sapiens
  CDR3 for beta chain variable domain of TCR clone 386521 (TRBV7-3, TRBJ2-5)
CASIQPGGSVQETQYF

SEQ ID NO: 773043 - protein, 14 aa, Homo sapiens
  CDR3 for alpha chain variable domain of TCR clone 386522 (TRAV1-2, TRAJ16)
CAVNRFSDGQKLLF

SEQ ID NO: 773044 - protein, 13 aa, Homo sapiens
  CDR3 for beta chain variable domain of TCR clone 386522 (TRBV20-1, TRBJ1-1)
CSAPEGGNTEAFF

SEQ ID NO: 773045 - protein, 18 aa, Homo sapiens
  CDR3 for alpha chain variable domain of TCR clone 386523 (TRAV26-1, TRAJ52)
CIVRVAGAGGTSYGKPTF

SEQ ID NO: 773046 - protein, 13 aa, Homo sapiens
  CDR3 for beta chain variable domain of TCR clone 386523 (TRBV7-8, TRBJ1-2)
CASSAQSYYGYTL

SEQ ID NO: 773047 - protein, 14 aa, Homo sapiens
  CDR3 for alpha chain variable domain of TCR clone 386524 (TRAV1-2, TRAJ16)
CAVNRFSDGQKLPF

SEQ ID NO: 773048 - protein, 16 aa, Homo sapiens
  CDR3 for beta chain variable domain of TCR clone 386524 (TRBV7-3, TRBJ2-3)
CASSLSGYRPEDTQYF

SEQ ID NO: 773049 - protein, 22 aa, Homo sapiens
  CDR3 for alpha chain variable domain of TCR clone 386525 (TRAV8-3, TRAJ32)
CAVEVVLQTRSSLELALCLLSS

SEQ ID NO: 773050 - protein, 12 aa, Homo sapiens
  CDR3 for beta chain variable domain of TCR clone 386525 (TRBV7-8, TRBJ2-7)
CASSLGDREQYF

SEQ ID NO: 773051 - protein, 15 aa, Homo sapiens
  CDR3 for alpha chain variable domain of TCR clone 386526 (TRAV14/DV4, TRAJ26)
SAMREGQNYGQNFVL

SEQ ID NO: 773052 - protein, 13 aa, Homo sapiens
  CDR3 for beta chain variable domain of TCR clone 386526 (TRBV24-1, TRBJ2-2)
CATSDWSTGELFF

SEQ ID NO: 773053 - protein, 16 aa, Homo sapiens
  CDR3 for alpha chain variable domain of TCR clone 386527 (TRAV16, TRAJ42)
CARKMNYGGSHGNLIF

SEQ ID NO: 773054 - protein, 15 aa, Homo sapiens
  CDR3 for beta chain variable domain of TCR clone 386527 (TRBV20-1, TRBJ2-7)
CSAREGRDSLYEQYF

SEQ ID NO: 773055 - protein, 14 aa, Homo sapiens
  CDR3 for alpha chain variable domain of TCR clone 386528 (TRAV16, TRAJ16)
CALSVLSDGQKLLF

SEQ ID NO: 773056 - protein, 15 aa, Homo sapiens
  CDR3 for beta chain variable domain of TCR clone 386528 (TRBV18, TRBJ2-1)
CASSPPSASYNEQFF

SEQ ID NO: 773057 - protein, 15 aa, Homo sapiens
  CDR3 for alpha chain variable domain of TCR clone 386529 (TRAV1-2, TRAJ17)
CAVRGYGAAGNKLTF

SEQ ID NO: 773058 - protein, 23 aa, Homo sapiens
  CDR3 for beta chain variable domain of TCR clone 386529 (TRBV11-2, TRBJ2-5)
CDSSSPGGEGAASRDPVLRARHA

SEQ ID NO: 773059 - protein, 11 aa, Homo sapiens
  CDR3 for alpha chain variable domain of TCR clone 386530 (TRAV1-2, TRAJ31)
CAVNNNARLMF

SEQ ID NO: 773060 - protein, 13 aa, Homo sapiens
  CDR3 for beta chain variable domain of TCR clone 386530 (TRBV12-5, TRBJ2-3)
CASGDRQSDTKYF

SEQ ID NO: 773061 - protein, 17 aa, Homo sapiens
  CDR3 for alpha chain variable domain of TCR clone 386531 (TRAV3, TRAJ6)
CAVSRRTDTGGSYIPTF

SEQ ID NO: 773062 - protein, 16 aa, Homo sapiens
  CDR3 for beta chain variable domain of TCR clone 386531 (TRBV4-3, TRBJ2-1)
CASSPALDRGVNEQFF

SEQ ID NO: 773063 - protein, 12 aa, Homo sapiens
  CDR3 for alpha chain variable domain of TCR clone 386532 (TRAV12-2, TRAJ43)
CAVNANNNDLRF

SEQ ID NO: 773064 - protein, 14 aa, Homo sapiens
  CDR3 for beta chain variable domain of TCR clone 386532 (TRBV12-5, TRBJ2-5)
CASGSRTHQETQYF

SEQ ID NO: 773065 - protein, 15 aa, Homo sapiens
  CDR3 for alpha chain variable domain of TCR clone 386533 (TRAV3, TRAJ5)
CAVRDLDTGRRGLTF

SEQ ID NO: 773066 - protein, 14 aa, Homo sapiens
  CDR3 for beta chain variable domain of TCR clone 386533 (TRBV25-1, TRBJ1-4)
CASSGGGQPDKLFF

SEQ ID NO: 773067 - protein, 14 aa, Homo sapiens
  CDR3 for alpha chain variable domain of TCR clone 386534 (TRAV20, TRAJ13)
CAVLNSGGYQKVTF

SEQ ID NO: 773068 - protein, 15 aa, Homo sapiens
  CDR3 for beta chain variable domain of TCR clone 386534 (TRBV7-9, TRBJ1-5)
CASSLAQGPNQPQHF

SEQ ID NO: 773069 - protein, 15 aa, Homo sapiens
  CDR3 for alpha chain variable domain of TCR clone 386535 (TRAV3, TRAJ22)
CAVRDRGGSARQMTF

SEQ ID NO: 773070 - protein, 16 aa, Homo sapiens
  CDR3 for beta chain variable domain of TCR clone 386535 (TRBV13, TRBJ2-3)
CQQPLQGSGGRNTQYF

SEQ ID NO: 773071 - protein, 13 aa, Homo sapiens
  CDR3 for alpha chain variable domain of TCR clone 386536 (TRAV35, TRAJ21)
CAGQLSNFNKFYF

SEQ ID NO: 773072 - protein, 16 aa, Homo sapiens
  CDR3 for beta chain variable domain of TCR clone 386536 (TRBV12-5, TRBJ2-5)
CASGPRTSGNQETQYL

SEQ ID NO: 773073 - protein, 11 aa, Homo sapiens
  CDR3 for alpha chain variable domain of TCR clone 386537 (TRAV35, TRAJ12)
RRMDSSYKLIF

SEQ ID NO: 773074 - protein, 14 aa, Homo sapiens
  CDR3 for beta chain variable domain of TCR clone 386537 (TRBV19, TRBJ2-1)
CASPTFVLSGEQFF

SEQ ID NO: 773075 - protein, 18 aa, Homo sapiens
  CDR3 for alpha chain variable domain of TCR clone 386538 (TRAV12-3, TRAJ52)
CAMSVGGAGGSSYGKLTF

SEQ ID NO: 773076 - protein, 14 aa, Homo sapiens
  CDR3 for beta chain variable domain of TCR clone 386538 (TRBV7-2, TRBJ2-7)
CASRSQGAAYEQYF

SEQ ID NO: 773077 - protein, 12 aa, Homo sapiens
  CDR3 for alpha chain variable domain of TCR clone 386539 (TRAV2, TRAJ33)
CAFMDINYQLIW

SEQ ID NO: 773078 - protein, 12 aa, Homo sapiens
  CDR3 for beta chain variable domain of TCR clone 386539 (TRBV11-2, TRBJ2-1)
CASSPGNNEQFF

SEQ ID NO: 773079 - protein, 16 aa, Homo sapiens
  CDR3 for alpha chain variable domain of TCR clone 386540 (TRAV30, TRAJ24)
CGTAIVDADSWGKFQF

SEQ ID NO: 773080 - protein, 12 aa, Homo sapiens
  CDR3 for beta chain variable domain of TCR clone 386540 (TRBV29-1, TRBJ2-3)
CSVTGGADTQYF

SEQ ID NO: 773081 - protein, 15 aa, Homo sapiens
  CDR3 for alpha chain variable domain of TCR clone 386541 (TRAV3, TRAJ47)
CAVRDIGEYGNKLVF

SEQ ID NO: 773082 - protein, 15 aa, Homo sapiens
  CDR3 for beta chain variable domain of TCR clone 386541 (TRBV11-3, TRBJ2-3)
CASLKDGREGDTQYF

SEQ ID NO: 773083 - protein, 16 aa, Homo sapiens
  CDR3 for alpha chain variable domain of TCR clone 386542 (TRAV3, TRAJ27)
CAVRDPQGTNAGKSTF

SEQ ID NO: 773084 - protein, 15 aa, Homo sapiens
  CDR3 for beta chain variable domain of TCR clone 386542 (TRBV20-1, TRBJ2-7)
CSARDRVSGMDEQHF

SEQ ID NO: 773085 - protein, 14 aa, Homo sapiens
  CDR3 for alpha chain variable domain of TCR clone 386543 (TRAV12-3, TRAJ42)
CAMNYGGSQGNLIF

SEQ ID NO: 773086 - protein, 12 aa, Homo sapiens
  CDR3 for beta chain variable domain of TCR clone 386543 (TRBV27, TRBJ2-2)
CASKLFTGELFF

SEQ ID NO: 773087 - protein, 14 aa, Homo sapiens
  CDR3 for alpha chain variable domain of TCR clone 386544 (TRAV1-2, TRAJ16)
CAVNRFSDGQKLLF

SEQ ID NO: 773088 - protein, 15 aa, Homo sapiens
  CDR3 for beta chain variable domain of TCR clone 386544 (TRBV6-1, TRBJ2-3)
CASRERGGITDTQYF

SEQ ID NO: 773089 - protein, 13 aa, Homo sapiens
  CDR3 for alpha chain variable domain of TCR clone 386545 (TRAV12-2, TRAJ20)
CAVYPSNDYKLSF

SEQ ID NO: 773090 - protein, 16 aa, Homo sapiens
  CDR3 for beta chain variable domain of TCR clone 386545 (TRBV6-1, TRBJ2-5)
CASSETLDRGAETQYF

SEQ ID NO: 773091 - protein, 18 aa, Homo sapiens
  CDR3 for alpha chain variable domain of TCR clone 386546 (TRAV13-1, TRAJ52)
CAASKRSAGGTSYGKLTF

SEQ ID NO: 773092 - protein, 13 aa, Homo sapiens
  CDR3 for beta chain variable domain of TCR clone 386546 (TRBV12-4, TRBJ1-2)
FASSLRQGKGDTF

SEQ ID NO: 773093 - protein, 13 aa, Homo sapiens
  CDR3 for alpha chain variable domain of TCR clone 386547 (TRAV9-2, TRAJ15)
CALLNQAGTALIF

SEQ ID NO: 773094 - protein, 13 aa, Homo sapiens
  CDR3 for beta chain variable domain of TCR clone 386547 (TRBV30, TRBJ2-2)
CAWSEEVSGELFF

SEQ ID NO: 773095 - protein, 15 aa, Homo sapiens
  CDR3 for alpha chain variable domain of TCR clone 386548 (TRAV26-1, TRAJ30)
IASSGRFNRDDKIIF

SEQ ID NO: 773096 - protein, 14 aa, Homo sapiens
  CDR3 for beta chain variable domain of TCR clone 386548 (TRBV18, TRBJ2-2)
CASSPPGRAGELFV

SEQ ID NO: 773097 - protein, 15 aa, Homo sapiens
  CDR3 for alpha chain variable domain of TCR clone 386549 (TRAV4, TRAJ26)
CLVGDMNNYGQNFVF

SEQ ID NO: 773098 - protein, 15 aa, Homo sapiens
  CDR3 for beta chain variable domain of TCR clone 386549 (TRBV28, TRBJ1-4)
YSSSRTGAANEKLFF

SEQ ID NO: 773099 - protein, 12 aa, Homo sapiens
  CDR3 for alpha chain variable domain of TCR clone 386550 (TRAV12-3, TRAJ17)
CAMTLTGNKLTF

SEQ ID NO: 773100 - protein, 13 aa, Homo sapiens
  CDR3 for beta chain variable domain of TCR clone 386550 (TRBV19, TRBJ1-5)
CASSTQDGQPQHF

SEQ ID NO: 773101 - protein, 14 aa, Homo sapiens
  CDR3 for alpha chain variable domain of TCR clone 386551 (TRAV1-2, TRAJ16)
CAVNRFSDGQKLLF

SEQ ID NO: 773102 - protein, 14 aa, Homo sapiens
  CDR3 for beta chain variable domain of TCR clone 386551 (TRBV7-2, TRBJ2-7)
CASSPKTSVYEQYF

SEQ ID NO: 773103 - protein, 14 aa, Homo sapiens
  CDR3 for alpha chain variable domain of TCR clone 386552 (TRAV12-2, TRAJ13)
CAVKKTGGYQKVTF

SEQ ID NO: 773104 - protein, 15 aa, Homo sapiens
  CDR3 for beta chain variable domain of TCR clone 386552 (TRBV27, TRBJ2-1)
CASSNGGGPSNEQYF

SEQ ID NO: 773105 - protein, 12 aa, Homo sapiens
  CDR3 for alpha chain variable domain of TCR clone 386553 (TRAV26-1, TRAJ26)
CIVFIYGQNFVF

SEQ ID NO: 773106 - protein, 15 aa, Homo sapiens
  CDR3 for beta chain variable domain of TCR clone 386553 (TRBV7-2, TRBJ2-3)
CASSLAGAFIDTQYF

SEQ ID NO: 773107 - protein, 12 aa, Homo sapiens
  CDR3 for alpha chain variable domain of TCR clone 386554 (TRAV30, TRAJ43)
CSTEERGNDMRC

SEQ ID NO: 773108 - protein, 13 aa, Homo sapiens
  CDR3 for beta chain variable domain of TCR clone 386554 (TRBV27, TRBJ2-7)
CASSFSQGYEQYF

SEQ ID NO: 773109 - protein, 13 aa, Homo sapiens
  CDR3 for alpha chain variable domain of TCR clone 386555 (TRAV8-6, TRAJ13)
CAVRDGGFQKVTF

SEQ ID NO: 773110 - protein, 15 aa, Homo sapiens
  CDR3 for beta chain variable domain of TCR clone 386555 (TRBV7-9, TRBJ2-2)
CASRPEGTSTGELFF

SEQ ID NO: 773111 - protein, 12 aa, Homo sapiens
  CDR3 for alpha chain variable domain of TCR clone 386556 (TRAV16, TRAJ56)
CAPTGANSKLPF

SEQ ID NO: 773112 - protein, 17 aa, Homo sapiens
  CDR3 for beta chain variable domain of TCR clone 386556 (TRBV27, TRBJ2-6)
CASSLAGFASGANVLTF

SEQ ID NO: 773113 - protein, 14 aa, Homo sapiens
  CDR3 for alpha chain variable domain of TCR clone 386557 (TRAV2, TRAJ37)
CAVEGSSNTGKLIF

SEQ ID NO: 773114 - protein, 14 aa, Homo sapiens
  CDR3 for beta chain variable domain of TCR clone 386557 (TRBV19, TRBJ2-1)
CASLTFVLSGEQFF

SEQ ID NO: 773115 - protein, 12 aa, Homo sapiens
  CDR3 for alpha chain variable domain of TCR clone 386558 (TRAV21, TRAJ35)
CAVVGFGNVLLC

SEQ ID NO: 773116 - protein, 16 aa, Homo sapiens
  CDR3 for beta chain variable domain of TCR clone 386558 (TRBV6-1, TRBJ2-5)
CASSETLDRGAETQYF

SEQ ID NO: 773117 - protein, 17 aa, Homo sapiens
  CDR3 for alpha chain variable domain of TCR clone 386559 (TRAV17, TRAJ52)
CATERPSGGTSYGKLTF

SEQ ID NO: 773118 - protein, 13 aa, Homo sapiens
  CDR3 for beta chain variable domain of TCR clone 386559 (TRBV7-9, TRBJ1-2)
CASSLKQNYGYSF

SEQ ID NO: 773119 - protein, 14 aa, Homo sapiens
  CDR3 for alpha chain variable domain of TCR clone 386560 (TRAV1-2, TRAJ8)
CAVREDTGFQKIVF

SEQ ID NO: 773120 - protein, 11 aa, Homo sapiens
  CDR3 for beta chain variable domain of TCR clone 386560 (TRBV19, TRBJ1-1)
CASSIGSEAFF

SEQ ID NO: 773121 - protein, 16 aa, Homo sapiens
  CDR3 for alpha chain variable domain of TCR clone 386561 (TRAV30, TRAJ24)
CGTEIVDADSWGKFQF

SEQ ID NO: 773122 - protein, 18 aa, Homo sapiens
  CDR3 for beta chain variable domain of TCR clone 386561 (TRBV7-8, TRBJ1-1)
CASSLGRGAFVGDTEAFF

SEQ ID NO: 773123 - protein, 13 aa, Homo sapiens
  CDR3 for alpha chain variable domain of TCR clone 386562 (TRAV2, TRAJ29)
CAGGNSGNTPLVF

SEQ ID NO: 773124 - protein, 15 aa, Homo sapiens
  CDR3 for beta chain variable domain of TCR clone 386562 (TRBV9, TRBJ1-6)
CASSVAGTGDSPLHF

SEQ ID NO: 773125 - protein, 12 aa, Homo sapiens
  CDR3 for alpha chain variable domain of TCR clone 386563 (TRAV26-1, TRAJ13)
CIVSRGYQKVTF

SEQ ID NO: 773126 - protein, 13 aa, Homo sapiens
  CDR3 for beta chain variable domain of TCR clone 386563 (TRBV10-3, TRBJ2-7)
CASKLAVNYEQYF

SEQ ID NO: 773127 - protein, 12 aa, Homo sapiens
  CDR3 for alpha chain variable domain of TCR clone 386564 (TRAV17, TRAJ20)
CATYSNDYKLSF

SEQ ID NO: 773128 - protein, 16 aa, Homo sapiens
  CDR3 for beta chain variable domain of TCR clone 386564 (TRBV13, TRBJ2-2)
CASSLGRGYGTGGLFF

SEQ ID NO: 773129 - protein, 15 aa, Homo sapiens
  CDR3 for alpha chain variable domain of TCR clone 386565 (TRAV8-4, TRAJ3)
CAVTGENLVHQRFQD

SEQ ID NO: 773130 - protein, 16 aa, Homo sapiens
  CDR3 for beta chain variable domain of TCR clone 386565 (TRBV4-2, TRBJ1-1)
CASSQAGFGMNTEAFF

SEQ ID NO: 773131 - protein, 14 aa, Homo sapiens
  CDR3 for alpha chain variable domain of TCR clone 386566 (TRAV12-3, TRAJ5)
CAMSTYTGRRALTL

SEQ ID NO: 773132 - protein, 13 aa, Homo sapiens
  CDR3 for beta chain variable domain of TCR clone 386566 (TRBV28, TRBJ2-3)
CASSTGGGDTQYF

SEQ ID NO: 773133 - protein, 14 aa, Homo sapiens
  CDR3 for alpha chain variable domain of TCR clone 386567 (TRAV38-1, TRAJ40)
CALRPTSGTYKYIF

SEQ ID NO: 773134 - protein, 14 aa, Homo sapiens
  CDR3 for beta chain variable domain of TCR clone 386567 (TRBV12-4, TRBJ1-5)
CASSPTGPRGGTYF

SEQ ID NO: 773135 - protein, 14 aa, Homo sapiens
  CDR3 for alpha chain variable domain of TCR clone 386568 (TRAV1-1, TRAJ27)
CAVIYNTNSGKSTF

SEQ ID NO: 773136 - protein, 15 aa, Homo sapiens
  CDR3 for beta chain variable domain of TCR clone 386568 (TRBV7-2, TRBJ2-1)
CASSSELAGGNEQFF

SEQ ID NO: 773137 - protein, 14 aa, Homo sapiens
  CDR3 for alpha chain variable domain of TCR clone 386569 (TRAV1-2, TRAJ16)
CAVNRFSDGQKLLF

SEQ ID NO: 773138 - protein, 13 aa, Homo sapiens
  CDR3 for beta chain variable domain of TCR clone 386569 (TRBV11-1, TRBJ1-1)
CASSKQGRTEAFF

SEQ ID NO: 773139 - protein, 17 aa, Homo sapiens
  CDR3 for alpha chain variable domain of TCR clone 386570 (TRAV36/DV7, TRAJ52)
CAVAQRAGGTSYGKLTF

SEQ ID NO: 773140 - protein, 15 aa, Homo sapiens
  CDR3 for beta chain variable domain of TCR clone 386570 (TRBV6-5, TRBJ1-2)
CASSYSQAFNYGYSF

SEQ ID NO: 773141 - protein, 15 aa, Homo sapiens
  CDR3 for alpha chain variable domain of TCR clone 386571 (TRAV26-1, TRAJ40)
CIVRAVPSGTYKYIF

SEQ ID NO: 773142 - protein, 14 aa, Homo sapiens
  CDR3 for beta chain variable domain of TCR clone 386571 (TRBV19, TRBJ2-1)
CASKDPGLADEQFF

SEQ ID NO: 773143 - protein, 15 aa, Homo sapiens
  CDR3 for alpha chain variable domain of TCR clone 386572 (TRAV6, TRAJ10)
CALDLLTGGGNKLTF

SEQ ID NO: 773144 - protein, 15 aa, Homo sapiens
  CDR3 for beta chain variable domain of TCR clone 386572 (TRBV27, TRBJ2-1)
CASSNGGGSSNEQFF

SEQ ID NO: 773145 - protein, 17 aa, Homo sapiens
  CDR3 for alpha chain variable domain of TCR clone 386573 (TRAV3, TRAJ6)
CAVRDGPRAGGSEIPTF

SEQ ID NO: 773146 - protein, 15 aa, Homo sapiens
  CDR3 for beta chain variable domain of TCR clone 386573 (TRBV29-1, TRBJ2-5)
CSVEGLAVNQETQYF

SEQ ID NO: 773147 - protein, 13 aa, Homo sapiens
  CDR3 for alpha chain variable domain of TCR clone 386574 (TRAV8-2, TRAJ49)
CVVTPNTGNQLYF

SEQ ID NO: 773148 - protein, 15 aa, Homo sapiens
  CDR3 for beta chain variable domain of TCR clone 386574 (TRBV11-2, TRBJ2-1)
CASSLTSGGYNEQFF

SEQ ID NO: 773149 - protein, 13 aa, Homo sapiens
  CDR3 for alpha chain variable domain of TCR clone 386575 (TRAV23/DV6, TRAJ12)
CAPRVDSGYKLIF

SEQ ID NO: 773150 - protein, 12 aa, Homo sapiens
  CDR3 for beta chain variable domain of TCR clone 386575 (TRBV7-8, TRBJ2-7)
CASSLGDREQYL

SEQ ID NO: 773151 - protein, 13 aa, Homo sapiens
  CDR3 for alpha chain variable domain of TCR clone 386576 (TRAV2, TRAJ29)
CAAGNSGNTPLVF

SEQ ID NO: 773152 - protein, 15 aa, Homo sapiens
  CDR3 for beta chain variable domain of TCR clone 386576 (TRBV7-9, TRBJ1-2)
CQQPRGGAINYGYTF

SEQ ID NO: 773153 - protein, 14 aa, Homo sapiens
  CDR3 for alpha chain variable domain of TCR clone 386577 (TRAV8-6, TRAJ57)
CAAYTQGGSEKLVF

SEQ ID NO: 773154 - protein, 16 aa, Homo sapiens
  CDR3 for beta chain variable domain of TCR clone 386577 (TRBV7-6, TRBJ1-6)
CASSPNREIHPSTLGM

SEQ ID NO: 773155 - protein, 12 aa, Homo sapiens
  CDR3 for alpha chain variable domain of TCR clone 386578 (TRAV2, TRAJ42)
PRDGGSQVNLIF

SEQ ID NO: 773156 - protein, 15 aa, Homo sapiens
  CDR3 for beta chain variable domain of TCR clone 386578 (TRBV7-9, TRBJ2-7)
CASSLRTSGSYEQYF

SEQ ID NO: 773157 - protein, 13 aa, Homo sapiens
  CDR3 for alpha chain variable domain of TCR clone 386579 (TRAV20, TRAJ20)
CAVQNPHDYKLSF

SEQ ID NO: 773158 - protein, 15 aa, Homo sapiens
  CDR3 for beta chain variable domain of TCR clone 386579 (TRBV20-1, TRBJ2-7)
CSAESGTSGAYEQYF

SEQ ID NO: 773159 - protein, 12 aa, Homo sapiens
  CDR3 for alpha chain variable domain of TCR clone 386580 (TRAV12-2, TRAJ10)
WGVTGGGNKLTF

SEQ ID NO: 773160 - protein, 14 aa, Homo sapiens
  CDR3 for beta chain variable domain of TCR clone 386580 (TRBV20-1, TRBJ2-1)
CSAQRGGAANEQFF

SEQ ID NO: 773161 - protein, 16 aa, Homo sapiens
  CDR3 for alpha chain variable domain of TCR clone 386581 (TRAV26-2, TRAJ45)
CTTASPIGGGADGLTF

SEQ ID NO: 773162 - protein, 18 aa, Homo sapiens
  CDR3 for beta chain variable domain of TCR clone 386581 (TRBV11-2, TRBJ2-3)
CASSLGGASREAPNTQYF

SEQ ID NO: 773163 - protein, 14 aa, Homo sapiens
  CDR3 for alpha chain variable domain of TCR clone 386582 (TRAV23/DV6, TRAJ4)
CASNLFGGYNKLIF

SEQ ID NO: 773164 - protein, 17 aa, Homo sapiens
  CDR3 for beta chain variable domain of TCR clone 386582 (TRBV4-1, TRBJ1-3)
CASSPQRGIRFGNTIYF

SEQ ID NO: 773165 - protein, 14 aa, Homo sapiens
  CDR3 for alpha chain variable domain of TCR clone 386583 (TRAV1-1, TRAJ27)
CAVLYNTNAGKSTF

SEQ ID NO: 773166 - protein, 15 aa, Homo sapiens
  CDR3 for beta chain variable domain of TCR clone 386583 (TRBV6-3, TRBJ2-7)
CASSSPGTVFYEQYF

SEQ ID NO: 773167 - protein, 15 aa, Homo sapiens
  CDR3 for alpha chain variable domain of TCR clone 386584 (TRAV27, TRAJ38)
CAGRFNAGNNRKLIW

SEQ ID NO: 773168 - protein, 16 aa, Homo sapiens
  CDR3 for beta chain variable domain of TCR clone 386584 (TRBV12-5, TRBJ2-5)
CTSGPRTSGNQETQYF

SEQ ID NO: 773169 - protein, 15 aa, Homo sapiens
  CDR3 for alpha chain variable domain of TCR clone 386585 (TRAV27, TRAJ38)
CAARRNAGNNRKLIW

SEQ ID NO: 773170 - protein, 15 aa, Homo sapiens
  CDR3 for beta chain variable domain of TCR clone 386585 (TRBV12-5, TRBJ2-3)
CASGDRSQIRSILAQ

SEQ ID NO: 773171 - protein, 12 aa, Homo sapiens
  CDR3 for alpha chain variable domain of TCR clone 386586 (TRAV16, TRAJ10)
CSRTGGGNKLTF

SEQ ID NO: 773172 - protein, 12 aa, Homo sapiens
  CDR3 for beta chain variable domain of TCR clone 386586 (TRBV11-3, TRBJ1-1)
CASSHRHGEAFF

SEQ ID NO: 773173 - protein, 14 aa, Homo sapiens
  CDR3 for alpha chain variable domain of TCR clone 386587 (TRAV26-1, TRAJ38)
CIADNAGNNRNLIW

SEQ ID NO: 773174 - protein, 13 aa, Homo sapiens
  CDR3 for beta chain variable domain of TCR clone 386587 (TRBV7-9, TRBJ2-3)
CASSPGSTDTQYF

SEQ ID NO: 773175 - protein, 16 aa, Homo sapiens
  CDR3 for alpha chain variable domain of TCR clone 386588 (TRAV30, TRAJ24)
CGTEVVDADSWGKFQF

SEQ ID NO: 773176 - protein, 13 aa, Homo sapiens
  CDR3 for beta chain variable domain of TCR clone 386588 (TRBV7-9, TRBJ1-2)
CASSLKQNYGYTF

SEQ ID NO: 773177 - protein, 13 aa, Homo sapiens
  CDR3 for alpha chain variable domain of TCR clone 386589 (TRAV20, TRAJ37)
CAGCSGNTGKLIF

SEQ ID NO: 773178 - protein, 21 aa, Homo sapiens
  CDR3 for beta chain variable domain of TCR clone 386589 (TRBV4-2, TRBJ2-3)
PCSQKTRPCISVPAAPDTQYF

SEQ ID NO: 773179 - protein, 15 aa, Homo sapiens
  CDR3 for alpha chain variable domain of TCR clone 386590 (TRAV29/DV5, TRAJ42)
CAAKTDGGSHGNLIF

SEQ ID NO: 773180 - protein, 15 aa, Homo sapiens
  CDR3 for beta chain variable domain of TCR clone 386590 (TRBV5-1, TRBJ2-2)
CASSSQGGNTGELFF

SEQ ID NO: 773181 - protein, 13 aa, Homo sapiens
  CDR3 for alpha chain variable domain of TCR clone 386591 (TRAV3, TRAJ15)
CAVRDQAGTALMF

SEQ ID NO: 773182 - protein, 15 aa, Homo sapiens
  CDR3 for beta chain variable domain of TCR clone 386591 (TRBV6-3, TRBJ2-7)
CASSSPGTVFYEQYF

SEQ ID NO: 773183 - protein, 12 aa, Homo sapiens
  CDR3 for alpha chain variable domain of TCR clone 386592 (TRAV23/DV6, TRAJ49)
CAARRTGNQFFF

SEQ ID NO: 773184 - protein, 16 aa, Homo sapiens
  CDR3 for beta chain variable domain of TCR clone 386592 (TRBV19, TRBJ2-2)
CASRSPGTGATGELFF

SEQ ID NO: 773185 - protein, 14 aa, Homo sapiens
  CDR3 for alpha chain variable domain of TCR clone 386593 (TRAV35, TRAJ33)
CAGSSQDSNYQLIW

SEQ ID NO: 773186 - protein, 15 aa, Homo sapiens
  CDR3 for beta chain variable domain of TCR clone 386593 (TRBV20-1, TRBJ2-7)
CSGESGTSGAYEQYF

SEQ ID NO: 773187 - protein, 13 aa, Homo sapiens
  CDR3 for alpha chain variable domain of TCR clone 386594 (TRAV13-1, TRAJ29)
CAASIGLNTPLVF

SEQ ID NO: 773188 - protein, 14 aa, Homo sapiens
  CDR3 for beta chain variable domain of TCR clone 386594 (TRBV15, TRBJ2-5)
CATSGDRGQETQYF

SEQ ID NO: 773189 - protein, 16 aa, Homo sapiens
  CDR3 for alpha chain variable domain of TCR clone 386595 (TRAV30, TRAJ24)
CGTEIVDADSWGKFQF

SEQ ID NO: 773190 - protein, 13 aa, Homo sapiens
  CDR3 for beta chain variable domain of TCR clone 386595 (TRBV27, TRBJ1-6)
CASRQGEHSPLHF

SEQ ID NO: 773191 - protein, 13 aa, Homo sapiens
  CDR3 for alpha chain variable domain of TCR clone 386596 (TRAV3, TRAJ43)
CAVKARNNNDMRF

SEQ ID NO: 773192 - protein, 13 aa, Homo sapiens
  CDR3 for beta chain variable domain of TCR clone 386596 (TRBV7-9, TRBJ1-2)
CASSLKQNYGYTV

SEQ ID NO: 773193 - protein, 11 aa, Homo sapiens
  CDR3 for alpha chain variable domain of TCR clone 386597 (TRAV12-2, TRAJ30)
CAVGRDDKIIF

SEQ ID NO: 773194 - protein, 13 aa, Homo sapiens
  CDR3 for beta chain variable domain of TCR clone 386597 (TRBV7-9, TRBJ1-2)
CASSLKQNYGYTF

SEQ ID NO: 773195 - protein, 13 aa, Homo sapiens
  CDR3 for alpha chain variable domain of TCR clone 386598 (TRAV21, TRAJ26)
CAVLDNYGQNFVF

SEQ ID NO: 773196 - protein, 16 aa, Homo sapiens
  CDR3 for beta chain variable domain of TCR clone 386598 (TRBV13, TRBJ2-2)
CASSPRTGEHTGELFF

SEQ ID NO: 773197 - protein, 18 aa, Homo sapiens
  CDR3 for alpha chain variable domain of TCR clone 386599 (TRAV21, TRAJ52)
CAVRPSPACGTSYGRLTF

SEQ ID NO: 773198 - protein, 16 aa, Homo sapiens
  CDR3 for beta chain variable domain of TCR clone 386599 (TRBV19, TRBJ2-2)
CASRSPGTGATGELFF

SEQ ID NO: 773199 - protein, 15 aa, Homo sapiens
  CDR3 for alpha chain variable domain of TCR clone 386600 (TRAV17, TRAJ22)
CATAPISGSARQLTF

SEQ ID NO: 773200 - protein, 14 aa, Homo sapiens
  CDR3 for beta chain variable domain of TCR clone 386600 (TRBV25-1, TRBJ1-1)
CASTHLGGNTEAFF

SEQ ID NO: 773201 - protein, 14 aa, Homo sapiens
  CDR3 for alpha chain variable domain of TCR clone 386601 (TRAV13-1, TRAJ35)
CAASKGGFGNVLHC

SEQ ID NO: 773202 - protein, 14 aa, Homo sapiens
  CDR3 for beta chain variable domain of TCR clone 386601 (TRBV28, TRBJ2-4)
CASTQVTGVNIQYF

SEQ ID NO: 773203 - protein, 12 aa, Homo sapiens
  CDR3 for alpha chain variable domain of TCR clone 386602 (TRAV21, TRAJ33)
CAVQVSDYQLIW

SEQ ID NO: 773204 - protein, 14 aa, Homo sapiens
  CDR3 for beta chain variable domain of TCR clone 386602 (TRBV28, TRBJ2-1)
CASSPGEGGNEQFF

SEQ ID NO: 773205 - protein, 16 aa, Homo sapiens
  CDR3 for alpha chain variable domain of TCR clone 386603 (TRAV26-2, TRAJ48)
CILRPPFNFVNEKLTF

SEQ ID NO: 773206 - protein, 15 aa, Homo sapiens
  CDR3 for beta chain variable domain of TCR clone 386603 (TRBV20-1, TRBJ2-3)
CSARVEGTYTDTQYF

SEQ ID NO: 773207 - protein, 14 aa, Homo sapiens
  CDR3 for alpha chain variable domain of TCR clone 386604 (TRAV26-1, TRAJ39)
CIVRGSRAGNMLTF

SEQ ID NO: 773208 - protein, 16 aa, Homo sapiens
  CDR3 for beta chain variable domain of TCR clone 386604 (TRBV7-2, TRBJ2-6)
CASSLAGRSGANVLTF

SEQ ID NO: 773209 - protein, 16 aa, Homo sapiens
  CDR3 for alpha chain variable domain of TCR clone 386605 (TRAV21, TRAJ37)
CAVRTAGSSNTGKLIF

SEQ ID NO: 773210 - protein, 13 aa, Homo sapiens
  CDR3 for beta chain variable domain of TCR clone 386605 (TRBV7-9, TRBJ2-5)
CESLPSGRETQYF

SEQ ID NO: 773211 - protein, 15 aa, Homo sapiens
  CDR3 for alpha chain variable domain of TCR clone 386606 (TRAV27, TRAJ38)
CAGRFNAGNNRKLIW

SEQ ID NO: 773212 - protein, 14 aa, Homo sapiens
  CDR3 for beta chain variable domain of TCR clone 386606 (TRBV7-6, TRBJ2-3)
CASSLVTVTDTQYF

SEQ ID NO: 773213 - protein, 13 aa, Homo sapiens
  CDR3 for alpha chain variable domain of TCR clone 386607 (TRAV2, TRAJ40)
CTVVTSETYKYIF

SEQ ID NO: 773214 - protein, 14 aa, Homo sapiens
  CDR3 for beta chain variable domain of TCR clone 386607 (TRBV19, TRBJ2-1)
CASPTFVLSGEQFF

SEQ ID NO: 773215 - protein, 23 aa, Homo sapiens
  CDR3 for alpha chain variable domain of TCR clone 386608 (TRAV4, TRAJ26)
IPADRKSSTLSLPRVYYGQNFVF

SEQ ID NO: 773216 - protein, 16 aa, Homo sapiens
  CDR3 for beta chain variable domain of TCR clone 386608 (TRBV7-2, TRBJ1-2)
CTSSPNQDRRGHGYTF

SEQ ID NO: 773217 - protein, 13 aa, Homo sapiens
  CDR3 for alpha chain variable domain of TCR clone 386609 (TRAV23/DV6, TRAJ58)
CAARGTSGSRLTF

SEQ ID NO: 773218 - protein, 14 aa, Homo sapiens
  CDR3 for beta chain variable domain of TCR clone 386609 (TRBV4-1, TRBJ2-2)
CASSQAVNTGELFF

SEQ ID NO: 773219 - protein, 14 aa, Homo sapiens
  CDR3 for alpha chain variable domain of TCR clone 386610 (TRAV2, TRAJ37)
TTVPGSSNTGKLIF

SEQ ID NO: 773220 - protein, 14 aa, Homo sapiens
  CDR3 for beta chain variable domain of TCR clone 386610 (TRBV7-8, TRBJ2-7)
CASSLWQSSYEQYY

SEQ ID NO: 773221 - protein, 14 aa, Homo sapiens
  CDR3 for alpha chain variable domain of TCR clone 386611 (TRAV6, TRAJ6)
CALPTSGGSHIPTF

SEQ ID NO: 773222 - protein, 17 aa, Homo sapiens
  CDR3 for beta chain variable domain of TCR clone 386611 (TRBV5-1, TRBJ2-5)
CASSPVALGQNQETQYF

SEQ ID NO: 773223 - protein, 13 aa, Homo sapiens
  CDR3 for alpha chain variable domain of TCR clone 386612 (TRAV20, TRAJ56)
CAVQAGANSKLTF

SEQ ID NO: 773224 - protein, 12 aa, Homo sapiens
  CDR3 for beta chain variable domain of TCR clone 386612 (TRBV12-4, TRBJ2-3)
CASSSTTDTQYF

SEQ ID NO: 773225 - protein, 17 aa, Homo sapiens
  CDR3 for alpha chain variable domain of TCR clone 386613 (TRAV4, TRAJ13)
CLVGVQGSSGGYQKVTF

SEQ ID NO: 773226 - protein, 16 aa, Homo sapiens
  CDR3 for beta chain variable domain of TCR clone 386613 (TRBV28, TRBJ2-7)
CASSLFFGTGGTEQYF

SEQ ID NO: 773227 - protein, 13 aa, Homo sapiens
  CDR3 for alpha chain variable domain of TCR clone 386614 (TRAV12-1, TRAJ40)
CVGPTSGTYKYIF

SEQ ID NO: 773228 - protein, 13 aa, Homo sapiens
  CDR3 for beta chain variable domain of TCR clone 386614 (TRBV4-2, TRBJ1-1)
CASSQAGNTEAFF

SEQ ID NO: 773229 - protein, 16 aa, Homo sapiens
  CDR3 for alpha chain variable domain of TCR clone 386615 (TRAV30, TRAJ24)
CGTEIVDADSWGKSQF

SEQ ID NO: 773230 - protein, 14 aa, Homo sapiens
  CDR3 for beta chain variable domain of TCR clone 386615 (TRBV12-5, TRBJ2-5)
CASGSRTHQGTQYF

SEQ ID NO: 773231 - protein, 12 aa, Homo sapiens
  CDR3 for alpha chain variable domain of TCR clone 386616 (TRAV12-1, TRAJ16)
CVVFRDGRKLLF

SEQ ID NO: 773232 - protein, 16 aa, Homo sapiens
  CDR3 for beta chain variable domain of TCR clone 386616 (TRBV27, TRBJ2-5)
CASSYGPGGQKETQYF

SEQ ID NO: 773233 - protein, 12 aa, Homo sapiens
  CDR3 for alpha chain variable domain of TCR clone 386617 (TRAV12-3, TRAJ17)
CAMTLTGNKLTF

SEQ ID NO: 773234 - protein, 17 aa, Homo sapiens
  CDR3 for beta chain variable domain of TCR clone 386617 (TRBV7-8, TRBJ2-6)
CASSAGTGGAGANALTF

SEQ ID NO: 773235 - protein, 15 aa, Homo sapiens
  CDR3 for alpha chain variable domain of TCR clone 386618 (TRAV17, TRAJ53)
CATDDSGGSNYKLTF

SEQ ID NO: 773236 - protein, 15 aa, Homo sapiens
  CDR3 for beta chain variable domain of TCR clone 386618 (TRBV7-9, TRBJ1-6)
CASSSPGRGNSPLHF

SEQ ID NO: 773237 - protein, 17 aa, Homo sapiens
  CDR3 for alpha chain variable domain of TCR clone 386619 (TRAV17, TRAJ28)
CATDPQRGGAGSYQLTF

SEQ ID NO: 773238 - protein, 16 aa, Homo sapiens
  CDR3 for beta chain variable domain of TCR clone 386619 (TRBV25-1, TRBJ1-1)
CASSGDRDRGRIEAFF

SEQ ID NO: 773239 - protein, 10 aa, Homo sapiens
  CDR3 for alpha chain variable domain of TCR clone 386620 (TRAV23/DV6, TRAJ57)
CAASSTLSQG

SEQ ID NO: 773240 - protein, 14 aa, Homo sapiens
  CDR3 for beta chain variable domain of TCR clone 386620 (TRBV20-1, TRBJ2-5)
CSARDGRAGETQYF

SEQ ID NO: 773241 - protein, 11 aa, Homo sapiens
  CDR3 for alpha chain variable domain of TCR clone 386621 (TRAV8-6, TRAJ23)
CAVISGGKFIF

SEQ ID NO: 773242 - protein, 14 aa, Homo sapiens
  CDR3 for beta chain variable domain of TCR clone 386621 (TRBV12-5, TRBJ2-5)
CASGSRTHQETQYF

SEQ ID NO: 773243 - protein, 12 aa, Homo sapiens
  CDR3 for alpha chain variable domain of TCR clone 386622 (TRAV10, TRAJ31)
CVVRAHRARPMF

SEQ ID NO: 773244 - protein, 17 aa, Homo sapiens
  CDR3 for beta chain variable domain of TCR clone 386622 (TRBV14, TRBJ2-1)
CASSQDRRDSIYNEQFF

SEQ ID NO: 773245 - protein, 13 aa, Homo sapiens
  CDR3 for alpha chain variable domain of TCR clone 386623 (TRAV1-1, TRAJ30)
CAVRSDRDDKIIF

SEQ ID NO: 773246 - protein, 15 aa, Homo sapiens
  CDR3 for beta chain variable domain of TCR clone 386623 (TRBV18, TRBJ2-7)
CASSPRSGTAYEQYF

SEQ ID NO: 773247 - protein, 14 aa, Homo sapiens
  CDR3 for alpha chain variable domain of TCR clone 386624 (TRAV1-2, TRAJ8)
CAVGEDTGFQKLVF

SEQ ID NO: 773248 - protein, 15 aa, Homo sapiens
  CDR3 for beta chain variable domain of TCR clone 386624 (TRBV6-3, TRBJ2-7)
CASSSPGTVFYEQYI

SEQ ID NO: 773249 - protein, 14 aa, Homo sapiens
  CDR3 for alpha chain variable domain of TCR clone 386625 (TRAV2, TRAJ37)
CAVEDQGNTDKLIF

SEQ ID NO: 773250 - protein, 14 aa, Homo sapiens
  CDR3 for beta chain variable domain of TCR clone 386625 (TRBV18, TRBJ2-1)
CASSPQGRFNEQFF

SEQ ID NO: 773251 - protein, 22 aa, Homo sapiens
  CDR3 for alpha chain variable domain of TCR clone 386626 (TRAV27, TRAJ41)
CAVRTQIPDIQNPDPAVYQLRD

SEQ ID NO: 773252 - protein, 16 aa, Homo sapiens
  CDR3 for beta chain variable domain of TCR clone 386626 (TRBV5-1, TRBJ2-3)
CASSLGLAVYADTQYF

SEQ ID NO: 773253 - protein, 11 aa, Homo sapiens
  CDR3 for alpha chain variable domain of TCR clone 386627 (TRAV12-3, TRAJ49)
SAANTGNQFYF

SEQ ID NO: 773254 - protein, 16 aa, Homo sapiens
  CDR3 for beta chain variable domain of TCR clone 386627 (TRBV7-9, TRBJ2-3)
CASSPWREVGTDTQYF

SEQ ID NO: 773255 - protein, 14 aa, Homo sapiens
  CDR3 for alpha chain variable domain of TCR clone 386628 (TRAV1-2, TRAJ8)
CAVREDTGFQKLVF

SEQ ID NO: 773256 - protein, 16 aa, Homo sapiens
  CDR3 for beta chain variable domain of TCR clone 386628 (TRBV4-1, TRBJ2-3)
CSSSQSTSGAEDTQYF

SEQ ID NO: 773257 - protein, 12 aa, Homo sapiens
  CDR3 for alpha chain variable domain of TCR clone 386629 (TRAV12-2, TRAJ43)
CAVNVNNNDMPF

SEQ ID NO: 773258 - protein, 14 aa, Homo sapiens
  CDR3 for beta chain variable domain of TCR clone 386629 (TRBV12-5, TRBJ2-5)
CASGSRTHQETQYF

SEQ ID NO: 773259 - protein, 13 aa, Homo sapiens
  CDR3 for alpha chain variable domain of TCR clone 386630 (TRAV21, TRAJ27)
CAARPGNAGNSTF

SEQ ID NO: 773260 - protein, 13 aa, Homo sapiens
  CDR3 for beta chain variable domain of TCR clone 386630 (TRBV20-1, TRBJ1-1)
CSARGGGNTEAFF

SEQ ID NO: 773261 - protein, 14 aa, Homo sapiens
  CDR3 for alpha chain variable domain of TCR clone 386631 (TRAV12-3, TRAJ10)
SHLPLTGGGNKLTF

SEQ ID NO: 773262 - protein, 13 aa, Homo sapiens
  CDR3 for beta chain variable domain of TCR clone 386631 (TRBV20-1, TRBJ2-5)
CSAREGGKETQYF

SEQ ID NO: 773263 - protein, 13 aa, Homo sapiens
  CDR3 for alpha chain variable domain of TCR clone 386632 (TRAV3, TRAJ20)
CAVRDTGDYKLSF

SEQ ID NO: 773264 - protein, 14 aa, Homo sapiens
  CDR3 for beta chain variable domain of TCR clone 386632 (TRBV15, TRBJ2-1)
CATSRDLFKNEQFF

SEQ ID NO: 773265 - protein, 15 aa, Homo sapiens
  CDR3 for alpha chain variable domain of TCR clone 386633 (TRAV12-1, TRAJ10)
CVVNKLTGGGNKLTF

SEQ ID NO: 773266 - protein, 17 aa, Homo sapiens
  CDR3 for beta chain variable domain of TCR clone 386633 (TRBV5-1, TRBJ1-6)
CASSPSLQGPDNSPLHF

SEQ ID NO: 773267 - protein, 12 aa, Homo sapiens
  CDR3 for alpha chain variable domain of TCR clone 386634 (TRAV25, TRAJ38)
CAGTGNNRKLIW

SEQ ID NO: 773268 - protein, 15 aa, Homo sapiens
  CDR3 for beta chain variable domain of TCR clone 386634 (TRBV9, TRBJ1-6)
CASSVAGTGDSPLHF

SEQ ID NO: 773269 - protein, 12 aa, Homo sapiens
  CDR3 for alpha chain variable domain of TCR clone 386635 (TRAV12-1, TRAJ34)
CVVAGATDKLIF

SEQ ID NO: 773270 - protein, 15 aa, Homo sapiens
  CDR3 for beta chain variable domain of TCR clone 386635 (TRBV5-1, TRBJ2-2)
CASSSQGGNTGELFF

SEQ ID NO: 773271 - protein, 13 aa, Homo sapiens
  CDR3 for alpha chain variable domain of TCR clone 386636 (TRAV21, TRAJ27)
CAARPGNAGKSTF

SEQ ID NO: 773272 - protein, 13 aa, Homo sapiens
  CDR3 for beta chain variable domain of TCR clone 386636 (TRBV4-1, TRBJ2-5)
CASSLTRGETQYF

SEQ ID NO: 773273 - protein, 14 aa, Homo sapiens
  CDR3 for alpha chain variable domain of TCR clone 386637 (TRAV1-2, TRAJ16)
CAVNRFSGGQKLLF

SEQ ID NO: 773274 - protein, 16 aa, Homo sapiens
  CDR3 for beta chain variable domain of TCR clone 386637 (TRBV7-3, TRBJ2-2)
CASSVKRGTLSGELFF

SEQ ID NO: 773275 - protein, 13 aa, Homo sapiens
  CDR3 for alpha chain variable domain of TCR clone 386638 (TRAV12-3, TRAJ13)
CAMTSGGYQKVTF

SEQ ID NO: 773276 - protein, 12 aa, Homo sapiens
  CDR3 for beta chain variable domain of TCR clone 386638 (TRBV11-2, TRBJ2-2)
CASSLGGGELFF

SEQ ID NO: 773277 - protein, 11 aa, Homo sapiens
  CDR3 for alpha chain variable domain of TCR clone 386639 (TRAV21, TRAJ34)
CAHYNTDKLIF

SEQ ID NO: 773278 - protein, 12 aa, Homo sapiens
  CDR3 for beta chain variable domain of TCR clone 386639 (TRBV11-2, TRBJ2-5)
CASSSGQETQYF

SEQ ID NO: 773279 - protein, 11 aa, Homo sapiens
  CDR3 for alpha chain variable domain of TCR clone 386640 (TRAV17, TRAJ9)
CGFTGGFKTIF

SEQ ID NO: 773280 - protein, 16 aa, Homo sapiens
  CDR3 for beta chain variable domain of TCR clone 386640 (TRBV19, TRBJ2-2)
CASRSPGTGATGELFF

SEQ ID NO: 773281 - protein, 13 aa, Homo sapiens
  CDR3 for alpha chain variable domain of TCR clone 386641 (TRAV23/DV6, TRAJ47)
CAASSQYGNKLVF

SEQ ID NO: 773282 - protein, 15 aa, Homo sapiens
  CDR3 for beta chain variable domain of TCR clone 386641 (TRBV7-3, TRBJ2-1)
CASRLDGNSYNEQFF

SEQ ID NO: 773283 - protein, 14 aa, Homo sapiens
  CDR3 for alpha chain variable domain of TCR clone 386642 (TRAV12-2, TRAJ13)
CAVKKTGGYQKVSF

SEQ ID NO: 773284 - protein, 14 aa, Homo sapiens
  CDR3 for beta chain variable domain of TCR clone 386642 (TRBV12-5, TRBJ2-5)
CASGSRTHQETQYF

SEQ ID NO: 773285 - protein, 14 aa, Homo sapiens
  CDR3 for alpha chain variable domain of TCR clone 386643 (TRAV8-2, TRAJ32)
CVVSAGGATNKLIF

SEQ ID NO: 773286 - protein, 16 aa, Homo sapiens
  CDR3 for beta chain variable domain of TCR clone 386643 (TRBV20-1, TRBJ1-4)
CSAPGQGLLTNEKLFF

SEQ ID NO: 773287 - protein, 13 aa, Homo sapiens
  CDR3 for alpha chain variable domain of TCR clone 386644 (TRAV1-2, TRAJ9)
CAALNTGGFKTIF

SEQ ID NO: 773288 - protein, 15 aa, Homo sapiens
  CDR3 for beta chain variable domain of TCR clone 386644 (TRBV19, TRBJ1-1)
CASTSGQIRNTEAFF

SEQ ID NO: 773289 - protein, 13 aa, Homo sapiens
  CDR3 for alpha chain variable domain of TCR clone 386645 (TRAV12-2, TRAJ52)
CAVSGTSYGKLTF

SEQ ID NO: 773290 - protein, 15 aa, Homo sapiens
  CDR3 for beta chain variable domain of TCR clone 386645 (TRBV7-8, TRBJ2-1)
CASSLAGGLYNEQFF

SEQ ID NO: 773291 - protein, 14 aa, Homo sapiens
  CDR3 for alpha chain variable domain of TCR clone 386646 (TRAV1-1, TRAJ27)
CAVIYNTNAGKSTF

SEQ ID NO: 773292 - protein, 15 aa, Homo sapiens
  CDR3 for beta chain variable domain of TCR clone 386646 (TRBV7-2, TRBJ2-1)
CASSSRLAGGNEQFF

SEQ ID NO: 773293 - protein, 14 aa, Homo sapiens
  CDR3 for alpha chain variable domain of TCR clone 386647 (TRAV1-2, TRAJ16)
CAVNRFSDGQKLLF

SEQ ID NO: 773294 - protein, 17 aa, Homo sapiens
  CDR3 for beta chain variable domain of TCR clone 386647 (TRBV5-1, TRBJ1-6)
CASSPSLQGSDNSPLHF

SEQ ID NO: 773295 - protein, 12 aa, Homo sapiens
  CDR3 for alpha chain variable domain of TCR clone 386648 (TRAV12-2, TRAJ52)
IGGGTSYGKLTF

SEQ ID NO: 773296 - protein, 12 aa, Homo sapiens
  CDR3 for beta chain variable domain of TCR clone 386648 (TRBV27, TRBJ2-7)
CASSGGFYEQYF

SEQ ID NO: 773297 - protein, 16 aa, Homo sapiens
  CDR3 for alpha chain variable domain of TCR clone 386649 (TRAV3, TRAJ10)
CAVRDVRAGGGNKLTF

SEQ ID NO: 773298 - protein, 14 aa, Homo sapiens
  CDR3 for beta chain variable domain of TCR clone 386649 (TRBV25-1, TRBJ1-1)
CASTHLGGNTEAFF

SEQ ID NO: 773299 - protein, 18 aa, Homo sapiens
  CDR3 for alpha chain variable domain of TCR clone 386650 (TRAV26-2, TRAJ45)
CLLRVDKYSGGGADGLTF

SEQ ID NO: 773300 - protein, 14 aa, Homo sapiens
  CDR3 for beta chain variable domain of TCR clone 386650 (TRBV7-2, TRBJ2-7)
CASRSQGAAYEQYF

SEQ ID NO: 773301 - protein, 13 aa, Homo sapiens
  CDR3 for alpha chain variable domain of TCR clone 386651 (TRAV23/DV6, TRAJ24)
CAASEDSWGKLQF

SEQ ID NO: 773302 - protein, 12 aa, Homo sapiens
  CDR3 for beta chain variable domain of TCR clone 386651 (TRBV5-1, TRBJ2-7)
CASSDSTYEQFF

SEQ ID NO: 773303 - protein, 14 aa, Homo sapiens
  CDR3 for alpha chain variable domain of TCR clone 386652 (TRAV8-1, TRAJ6)
CAVNASGGSYIPTF

SEQ ID NO: 773304 - protein, 16 aa, Homo sapiens
  CDR3 for beta chain variable domain of TCR clone 386652 (TRBV20-1, TRBJ1-4)
CSAPGQGLLTNEKLFF

SEQ ID NO: 773305 - protein, 13 aa, Homo sapiens
  CDR3 for alpha chain variable domain of TCR clone 386653 (TRAV13-1, TRAJ39)
CSKYSNAGNMLTF

SEQ ID NO: 773306 - protein, 16 aa, Homo sapiens
  CDR3 for beta chain variable domain of TCR clone 386653 (TRBV5-1, TRBJ2-3)
CASSSIGAGSTDTQYF

SEQ ID NO: 773307 - protein, 12 aa, Homo sapiens
  CDR3 for alpha chain variable domain of TCR clone 386654 (TRAV12-3, TRAJ41)
CAMSCSGYALNF

SEQ ID NO: 773308 - protein, 13 aa, Homo sapiens
  CDR3 for beta chain variable domain of TCR clone 386654 (TRBV7-3, TRBJ2-1)
CASSLDSYNEQFF

SEQ ID NO: 773309 - protein, 13 aa, Homo sapiens
  CDR3 for alpha chain variable domain of TCR clone 386655 (TRAV21, TRAJ20)
CAVGLRVDYKLSF

SEQ ID NO: 773310 - protein, 13 aa, Homo sapiens
  CDR3 for beta chain variable domain of TCR clone 386655 (TRBV6-1, TRBJ1-1)
CASSRQGNTEAVV

SEQ ID NO: 773311 - protein, 15 aa, Homo sapiens
  CDR3 for alpha chain variable domain of TCR clone 386656 (TRAV21, TRAJ37)
CAVRPTLSNTGKLIF

SEQ ID NO: 773312 - protein, 16 aa, Homo sapiens
  CDR3 for beta chain variable domain of TCR clone 386656 (TRBV24-1, TRBJ2-6)
CATSDRRASGANVLTF

SEQ ID NO: 773313 - protein, 14 aa, Homo sapiens
  CDR3 for alpha chain variable domain of TCR clone 386657 (TRAV29/DV5, TRAJ4)
CAATVLGGYNNLIF

SEQ ID NO: 773314 - protein, 15 aa, Homo sapiens
  CDR3 for beta chain variable domain of TCR clone 386657 (TRBV5-5, TRBJ1-5)
CASSSTPGSNQPQHF

SEQ ID NO: 773315 - protein, 15 aa, Homo sapiens
  CDR3 for alpha chain variable domain of TCR clone 386658 (TRAV2, TRAJ9)
CAGEDRGTGGFKTIF

SEQ ID NO: 773316 - protein, 16 aa, Homo sapiens
  CDR3 for beta chain variable domain of TCR clone 386658 (TRBV24-1, TRBJ2-3)
CATSDPGTGATDTQYF

SEQ ID NO: 773317 - protein, 15 aa, Homo sapiens
  CDR3 for alpha chain variable domain of TCR clone 386659 (TRAV3, TRAJ4)
CAVRDGTGGYNKLIF

SEQ ID NO: 773318 - protein, 17 aa, Homo sapiens
  CDR3 for beta chain variable domain of TCR clone 386659 (TRBV11-2, TRBJ2-1)
CASSLYPPGVEYNEQFF

SEQ ID NO: 773319 - protein, 18 aa, Homo sapiens
  CDR3 for alpha chain variable domain of TCR clone 386660 (TRAV13-1, TRAJ52)
CAASKSSAGGTSYGKLTF

SEQ ID NO: 773320 - protein, 13 aa, Homo sapiens
  CDR3 for beta chain variable domain of TCR clone 386660 (TRBV12-4, TRBJ1-2)
CASSLRQGKGYIF

SEQ ID NO: 773321 - protein, 14 aa, Homo sapiens
  CDR3 for alpha chain variable domain of TCR clone 386661 (TRAV35, TRAJ22)
CAGLRTGSASQLTF

SEQ ID NO: 773322 - protein, 15 aa, Homo sapiens
  CDR3 for beta chain variable domain of TCR clone 386661 (TRBV12-4, TRBJ2-5)
CASSPPTGLQETQYF

SEQ ID NO: 773323 - protein, 12 aa, Homo sapiens
  CDR3 for alpha chain variable domain of TCR clone 386662 (TRAV13-1, TRAJ21)
CAAKEGFNKFYV

SEQ ID NO: 773324 - protein, 13 aa, Homo sapiens
  CDR3 for beta chain variable domain of TCR clone 386662 (TRBV19, TRBJ2-7)
CASSPRQSYEQYF

SEQ ID NO: 773325 - protein, 14 aa, Homo sapiens
  CDR3 for alpha chain variable domain of TCR clone 386663 (TRAV14/DV4, TRAJ54)
CAMREAKGAQKLVF

SEQ ID NO: 773326 - protein, 15 aa, Homo sapiens
  CDR3 for beta chain variable domain of TCR clone 386663 (TRBV5-1, TRBJ2-7)
CASSLNGGPAREQYF

SEQ ID NO: 773327 - protein, 13 aa, Homo sapiens
  CDR3 for alpha chain variable domain of TCR clone 386664 (TRAV8-4, TRAJ4)
CAVSDIGYNKLIC

SEQ ID NO: 773328 - protein, 13 aa, Homo sapiens
  CDR3 for beta chain variable domain of TCR clone 386664 (TRBV19, TRBJ1-2)
CASSQGQVYGYTF

SEQ ID NO: 773329 - protein, 14 aa, Homo sapiens
  CDR3 for alpha chain variable domain of TCR clone 386665 (TRAV9-2, TRAJ39)
CARYIYNAGNMLTF

SEQ ID NO: 773330 - protein, 15 aa, Homo sapiens
  CDR3 for beta chain variable domain of TCR clone 386665 (TRBV27, TRBJ1-5)
CASSLGTGFDQPQHF

SEQ ID NO: 773331 - protein, 15 aa, Homo sapiens
  CDR3 for alpha chain variable domain of TCR clone 386666 (TRAV3, TRAJ5)
CAVRARKTGRRALTF

SEQ ID NO: 773332 - protein, 15 aa, Homo sapiens
  CDR3 for beta chain variable domain of TCR clone 386666 (TRBV7-8, TRBJ2-1)
CASSLADSLFNEQFF

SEQ ID NO: 773333 - protein, 14 aa, Homo sapiens
  CDR3 for alpha chain variable domain of TCR clone 386667 (TRAV8-4, TRAJ17)
CAVSDQAAGNKLTF

SEQ ID NO: 773334 - protein, 15 aa, Homo sapiens
  CDR3 for beta chain variable domain of TCR clone 386667 (TRBV7-2, TRBJ2-2)
CASRRLGQNTGELFF

SEQ ID NO: 773335 - protein, 17 aa, Homo sapiens
  CDR3 for alpha chain variable domain of TCR clone 386668 (TRAV26-1, TRAJ11)
CIVRVGQRNSGYSTLTF

SEQ ID NO: 773336 - protein, 16 aa, Homo sapiens
  CDR3 for beta chain variable domain of TCR clone 386668 (TRBV7-9, TRBJ1-2)
CASSLGFSSGEDGYTF

SEQ ID NO: 773337 - protein, 14 aa, Homo sapiens
  CDR3 for alpha chain variable domain of TCR clone 386669 (TRAV1-2, TRAJ8)
CAVREDTGFQKLVF

SEQ ID NO: 773338 - protein, 13 aa, Homo sapiens
  CDR3 for beta chain variable domain of TCR clone 386669 (TRBV28, TRBJ1-1)
CASSKQGWTEAFF

SEQ ID NO: 773339 - protein, 14 aa, Homo sapiens
  CDR3 for alpha chain variable domain of TCR clone 386670 (TRAV8-6, TRAJ11)
CAVSDPSGYSTLTF

SEQ ID NO: 773340 - protein, 15 aa, Homo sapiens
  CDR3 for beta chain variable domain of TCR clone 386670 (TRBV20-1, TRBJ2-7)
CSARDRVSGMDEQYF

SEQ ID NO: 773341 - protein, 13 aa, Homo sapiens
  CDR3 for alpha chain variable domain of TCR clone 386671 (TRAV27, TRAJ58)
CAGFETSGSRLTF

SEQ ID NO: 773342 - protein, 15 aa, Homo sapiens
  CDR3 for beta chain variable domain of TCR clone 386671 (TRBV7-8, TRBJ1-1)
CASSLGDSRNTEAFF

SEQ ID NO: 773343 - protein, 12 aa, Homo sapiens
  CDR3 for alpha chain variable domain of TCR clone 386672 (TRAV30, TRAJ43)
CGTEERGNDMRF

SEQ ID NO: 773344 - protein, 17 aa, Homo sapiens
  CDR3 for beta chain variable domain of TCR clone 386672 (TRBV28, TRBJ2-3)
CASSLDPPGQGTDTQYF

SEQ ID NO: 773345 - protein, 13 aa, Homo sapiens
  CDR3 for alpha chain variable domain of TCR clone 386673 (TRAV13-1, TRAJ12)
CAASPDSSYKLIF

SEQ ID NO: 773346 - protein, 18 aa, Homo sapiens
  CDR3 for beta chain variable domain of TCR clone 386673 (TRBV12-4, TRBJ2-2)
CASSLVAGTRGRTGELFF

SEQ ID NO: 773347 - protein, 13 aa, Homo sapiens
  CDR3 for alpha chain variable domain of TCR clone 386674 (TRAV12-3, TRAJ33)
CAMSVNSNYQLIW

SEQ ID NO: 773348 - protein, 13 aa, Homo sapiens
  CDR3 for beta chain variable domain of TCR clone 386674 (TRBV7-3, TRBJ1-1)
CASSQDWGAEAFL

SEQ ID NO: 773349 - protein, 12 aa, Homo sapiens
  CDR3 for alpha chain variable domain of TCR clone 386675 (TRAV30, TRAJ43)
CGTEERGNDMRF

SEQ ID NO: 773350 - protein, 14 aa, Homo sapiens
  CDR3 for beta chain variable domain of TCR clone 386675 (TRBV7-2, TRBJ2-7)
CASSLPPGQGPQYF

SEQ ID NO: 773351 - protein, 14 aa, Homo sapiens
  CDR3 for alpha chain variable domain of TCR clone 386676 (TRAV12-2, TRAJ40)
CAVKIPSGTYKYIF

SEQ ID NO: 773352 - protein, 17 aa, Homo sapiens
  CDR3 for beta chain variable domain of TCR clone 386676 (TRBV15, TRBJ1-5)
CATSRAPPGTRNQPQHF

SEQ ID NO: 773353 - protein, 14 aa, Homo sapiens
  CDR3 for alpha chain variable domain of TCR clone 386677 (TRAV12-1, TRAJ22)
CVVTTSGSARQLTF

SEQ ID NO: 773354 - protein, 17 aa, Homo sapiens
  CDR3 for beta chain variable domain of TCR clone 386677 (TRBV7-3, TRBJ2-3)
CASSLMKRMRGADTQYF

SEQ ID NO: 773355 - protein, 19 aa, Homo sapiens
  CDR3 for alpha chain variable domain of TCR clone 386678 (TRAV29/DV5, TRAJ49)
CSVLLCSKLTVDTGNHFYF

SEQ ID NO: 773356 - protein, 17 aa, Homo sapiens
  CDR3 for beta chain variable domain of TCR clone 386678 (TRBV13, TRBJ2-3)
CASSLSRVAGGRNTQYF

SEQ ID NO: 773357 - protein, 12 aa, Homo sapiens
  CDR3 for alpha chain variable domain of TCR clone 386679 (TRAV8-3, TRAJ41)
CAVALPGYALNF

SEQ ID NO: 773358 - protein, 17 aa, Homo sapiens
  CDR3 for beta chain variable domain of TCR clone 386679 (TRBV7-3, TRBJ2-2)
CASSLSGTSGGTGELFF

SEQ ID NO: 773359 - protein, 14 aa, Homo sapiens
  CDR3 for alpha chain variable domain of TCR clone 386680 (TRAV9-2, TRAJ39)
CALYIYNAGNMLTF

SEQ ID NO: 773360 - protein, 14 aa, Homo sapiens
  CDR3 for beta chain variable domain of TCR clone 386680 (TRBV25-1, TRBJ1-4)
CASSGGGQPEKLFF

SEQ ID NO: 773361 - protein, 13 aa, Homo sapiens
  CDR3 for alpha chain variable domain of TCR clone 386681 (TRAV21, TRAJ15)
CAVANQAGTALIF

SEQ ID NO: 773362 - protein, 13 aa, Homo sapiens
  CDR3 for beta chain variable domain of TCR clone 386681 (TRBV12-4, TRBJ1-2)
CASSLRQGKGYSF

SEQ ID NO: 773363 - protein, 12 aa, Homo sapiens
  CDR3 for alpha chain variable domain of TCR clone 386682 (TRAV13-1, TRAJ15)
CAASQAETALIF

SEQ ID NO: 773364 - protein, 14 aa, Homo sapiens
  CDR3 for beta chain variable domain of TCR clone 386682 (TRBV19, TRBJ2-2)
CASSTLHRSGELFF

SEQ ID NO: 773365 - protein, 14 aa, Homo sapiens
  CDR3 for alpha chain variable domain of TCR clone 386683 (TRAV17, TRAJ40)
CATALTSGTYKYIF

SEQ ID NO: 773366 - protein, 14 aa, Homo sapiens
  CDR3 for beta chain variable domain of TCR clone 386683 (TRBV20-1, TRBJ1-1)
GSAQTRIGGTEAFF

SEQ ID NO: 773367 - protein, 15 aa, Homo sapiens
  CDR3 for alpha chain variable domain of TCR clone 386684 (TRAV3, TRAJ3)
CAVRDMDSSASKIIF

SEQ ID NO: 773368 - protein, 13 aa, Homo sapiens
  CDR3 for beta chain variable domain of TCR clone 386684 (TRBV7-3, TRBJ1-1)
CASSQDWGAEAFF

SEQ ID NO: 773369 - protein, 13 aa, Homo sapiens
  CDR3 for alpha chain variable domain of TCR clone 386685 (TRAV8-1, TRAJ39)
CAGLNNAGNMLTF

SEQ ID NO: 773370 - protein, 17 aa, Homo sapiens
  CDR3 for beta chain variable domain of TCR clone 386685 (TRBV19, TRBJ2-3)
CASSTDPAGGGTDTQYF

SEQ ID NO: 773371 - protein, 18 aa, Homo sapiens
  CDR3 for alpha chain variable domain of TCR clone 386686 (TRAV1-2, TRAJ18)
CAVRDMGDRGSTLGRLYF

SEQ ID NO: 773372 - protein, 17 aa, Homo sapiens
  CDR3 for beta chain variable domain of TCR clone 386686 (TRBV28, TRBJ2-5)
CASSTPEGDALQETQYF

SEQ ID NO: 773373 - protein, 14 aa, Homo sapiens
  CDR3 for alpha chain variable domain of TCR clone 386687 (TRAV1-2, TRAJ16)
CAVSRFSDGQKVLF

SEQ ID NO: 773374 - protein, 15 aa, Homo sapiens
  CDR3 for beta chain variable domain of TCR clone 386687 (TRBV9, TRBJ1-6)
CASSVAGTGDSPLHF

SEQ ID NO: 773375 - protein, 13 aa, Homo sapiens
  CDR3 for alpha chain variable domain of TCR clone 386688 (TRAV8-3, TRAJ28)
CAVGAVGSYQLTF

SEQ ID NO: 773376 - protein, 16 aa, Homo sapiens
  CDR3 for beta chain variable domain of TCR clone 386688 (TRBV4-2, TRBJ2-7)
CASSQDGVERGYEQYF

SEQ ID NO: 773377 - protein, 19 aa, Homo sapiens
  CDR3 for alpha chain variable domain of TCR clone 386689 (TRAV3, TRAJ6)
CAVRDRNPSRSGGSYIPTF

SEQ ID NO: 773378 - protein, 14 aa, Homo sapiens
  CDR3 for beta chain variable domain of TCR clone 386689 (TRBV12-5, TRBJ2-5)
CASGSRTHQETQYF

SEQ ID NO: 773379 - protein, 15 aa, Homo sapiens
  CDR3 for alpha chain variable domain of TCR clone 386690 (TRAV2, TRAJ15)
CAVEDRGQAGTALIF

SEQ ID NO: 773380 - protein, 13 aa, Homo sapiens
  CDR3 for beta chain variable domain of TCR clone 386690 (TRBV12-4, TRBJ2-5)
CDSSLGGSRTQYF

SEQ ID NO: 773381 - protein, 15 aa, Homo sapiens
  CDR3 for alpha chain variable domain of TCR clone 386691 (TRAV13-1, TRAJ36)
CAASIRQTGANNLFF

SEQ ID NO: 773382 - protein, 15 aa, Homo sapiens
  CDR3 for beta chain variable domain of TCR clone 386691 (TRBV6-3, TRBJ2-2)
CASSFLATLTGELFF

SEQ ID NO: 773383 - protein, 15 aa, Homo sapiens
  CDR3 for alpha chain variable domain of TCR clone 386692 (TRAV21, TRAJ38)
CAVRQDAGNNLKLIW

SEQ ID NO: 773384 - protein, 16 aa, Homo sapiens
  CDR3 for beta chain variable domain of TCR clone 386692 (TRBV4-2, TRBJ1-1)
CTSRPLDGGGDTEAFF

SEQ ID NO: 773385 - protein, 14 aa, Homo sapiens
  CDR3 for alpha chain variable domain of TCR clone 386693 (TRAV2, TRAJ37)
CAVDFTSNTGKLIF

SEQ ID NO: 773386 - protein, 13 aa, Homo sapiens
  CDR3 for beta chain variable domain of TCR clone 386693 (TRBV7-3, TRBJ2-1)
CASSLDSYNEQFF

SEQ ID NO: 773387 - protein, 12 aa, Homo sapiens
  CDR3 for alpha chain variable domain of TCR clone 386694 (TRAV35, TRAJ49)
CAGWNTGNQFYF

SEQ ID NO: 773388 - protein, 15 aa, Homo sapiens
  CDR3 for beta chain variable domain of TCR clone 386694 (TRBV6-5, TRBJ2-1)
CASSYDAGAGNEQFF

SEQ ID NO: 773389 - protein, 11 aa, Homo sapiens
  CDR3 for alpha chain variable domain of TCR clone 386695 (TRAV3, TRAJ31)
CAALPGARLMF

SEQ ID NO: 773390 - protein, 15 aa, Homo sapiens
  CDR3 for beta chain variable domain of TCR clone 386695 (TRBV24-1, TRBJ2-1)
CATRASGGQYNEQFF

SEQ ID NO: 773391 - protein, 16 aa, Homo sapiens
  CDR3 for alpha chain variable domain of TCR clone 386696 (TRAV23/DV6, TRAJ9)
CAASIGGNTGGFKTIF

SEQ ID NO: 773392 - protein, 15 aa, Homo sapiens
  CDR3 for beta chain variable domain of TCR clone 386696 (TRBV6-5, TRBJ1-5)
CASSYSWDSNQPQHF

SEQ ID NO: 773393 - protein, 13 aa, Homo sapiens
  CDR3 for alpha chain variable domain of TCR clone 386697 (TRAV21, TRAJ27)
CAARPGNAGKSTF

SEQ ID NO: 773394 - protein, 15 aa, Homo sapiens
  CDR3 for beta chain variable domain of TCR clone 386697 (TRBV11-3, TRBJ2-7)
CASSPGPSSSYEQYF

SEQ ID NO: 773395 - protein, 14 aa, Homo sapiens
  CDR3 for alpha chain variable domain of TCR clone 386698 (TRAV12-2, TRAJ11)
CAVEGGSGHSTLTF

SEQ ID NO: 773396 - protein, 16 aa, Homo sapiens
  CDR3 for beta chain variable domain of TCR clone 386698 (TRBV6-1, TRBJ1-2)
CASSGAWQGRSHGYTF

SEQ ID NO: 773397 - protein, 14 aa, Homo sapiens
  CDR3 for alpha chain variable domain of TCR clone 386699 (TRAV20, TRAJ40)
CAVSLTSGSYKYIF

SEQ ID NO: 773398 - protein, 21 aa, Homo sapiens
  CDR3 for beta chain variable domain of TCR clone 386699 (TRBV27, TRBJ1-1)
CASSFLETARREFSLKLSLDK

SEQ ID NO: 773399 - protein, 14 aa, Homo sapiens
  CDR3 for alpha chain variable domain of TCR clone 386700 (TRAV9-2, TRAJ39)
CALYLYNAGNMHTF

SEQ ID NO: 773400 - protein, 12 aa, Homo sapiens
  CDR3 for beta chain variable domain of TCR clone 386700 (TRBV11-2, TRBJ2-2)
CASSLGGGELFF

SEQ ID NO: 773401 - protein, 14 aa, Homo sapiens
  CDR3 for alpha chain variable domain of TCR clone 386701 (TRAV14/DV4, TRAJ41)
FARGGPDSGYALNF

SEQ ID NO: 773402 - protein, 15 aa, Homo sapiens
  CDR3 for beta chain variable domain of TCR clone 386701 (TRBV19, TRBJ2-1)
CASSIQATSYNEQFF

SEQ ID NO: 773403 - protein, 14 aa, Homo sapiens
  CDR3 for alpha chain variable domain of TCR clone 386702 (TRAV12-2, TRAJ17)
CAVLFKAAGNKLTF

SEQ ID NO: 773404 - protein, 12 aa, Homo sapiens
  CDR3 for beta chain variable domain of TCR clone 386702 (TRBV24-1, TRBJ1-1)
CATLYPDTEAFF

SEQ ID NO: 773405 - protein, 14 aa, Homo sapiens
  CDR3 for alpha chain variable domain of TCR clone 386703 (TRAV1-2, TRAJ16)
CAVNRFSDGQKLLF

SEQ ID NO: 773406 - protein, 18 aa, Homo sapiens
  CDR3 for beta chain variable domain of TCR clone 386703 (TRBV7-8, TRBJ2-1)
CASSPYLGQRGSNNEQFL

SEQ ID NO: 773407 - protein, 14 aa, Homo sapiens
  CDR3 for alpha chain variable domain of TCR clone 386704 (TRAV16, TRAJ37)
CALDISGNTGKLIF

SEQ ID NO: 773408 - protein, 11 aa, Homo sapiens
  CDR3 for beta chain variable domain of TCR clone 386704 (TRBV11-2, TRBJ2-2)
CASSLPGELFF

SEQ ID NO: 773409 - protein, 19 aa, Homo sapiens
  CDR3 for alpha chain variable domain of TCR clone 386705 (TRAV2, TRAJ20)
ILQVREADAAVYRDCKLSF

SEQ ID NO: 773410 - protein, 16 aa, Homo sapiens
  CDR3 for beta chain variable domain of TCR clone 386705 (TRBV9, TRBJ2-2)
CASSAMGKGNTGELYF

SEQ ID NO: 773411 - protein, 13 aa, Homo sapiens
  CDR3 for alpha chain variable domain of TCR clone 386706 (TRAV2, TRAJ40)
CAVVTSGTYKYIF

SEQ ID NO: 773412 - protein, 16 aa, Homo sapiens
  CDR3 for beta chain variable domain of TCR clone 386706 (TRBV7-9, TRBJ1-3)
CASSLGAGSSGKTMYF

SEQ ID NO: 773413 - protein, 12 aa, Homo sapiens
  CDR3 for alpha chain variable domain of TCR clone 386707 (TRAV27, TRAJ13)
CAGVRGYQKVTF

SEQ ID NO: 773414 - protein, 14 aa, Homo sapiens
  CDR3 for beta chain variable domain of TCR clone 386707 (TRBV4-1, TRBJ2-2)
CASSQAVNTGELFF

SEQ ID NO: 773415 - protein, 14 aa, Homo sapiens
  CDR3 for alpha chain variable domain of TCR clone 386708 (TRAV27, TRAJ22)
CAGLPSGSARQLTF

SEQ ID NO: 773416 - protein, 14 aa, Homo sapiens
  CDR3 for beta chain variable domain of TCR clone 386708 (TRBV12-5, TRBJ2-5)
CASGSRTHQETQYF

SEQ ID NO: 773417 - protein, 14 aa, Homo sapiens
  CDR3 for alpha chain variable domain of TCR clone 386709 (TRAV12-2, TRAJ53)
CRERGGGSNYKLKF

SEQ ID NO: 773418 - protein, 17 aa, Homo sapiens
  CDR3 for beta chain variable domain of TCR clone 386709 (TRBV7-3, TRBJ2-3)
CASSLMKRMRGADMQYF

SEQ ID NO: 773419 - protein, 15 aa, Homo sapiens
  CDR3 for alpha chain variable domain of TCR clone 386710 (TRAV8-4, TRAJ40)
CAVSSITSGTYKFIF

SEQ ID NO: 773420 - protein, 13 aa, Homo sapiens
  CDR3 for beta chain variable domain of TCR clone 386710 (TRBV2, TRBJ2-1)
CATSRGTDNEQFF

SEQ ID NO: 773421 - protein, 14 aa, Homo sapiens
  CDR3 for alpha chain variable domain of TCR clone 386711 (TRAV1-2, TRAJ16)
CAVNRFSYGQKLIF

SEQ ID NO: 773422 - protein, 11 aa, Homo sapiens
  CDR3 for beta chain variable domain of TCR clone 386711 (TRBV29-1, TRBJ2-5)
CSEDRTGTQYF

SEQ ID NO: 773423 - protein, 14 aa, Homo sapiens
  CDR3 for alpha chain variable domain of TCR clone 386712 (TRAV41, TRAJ57)
CAVLLQGGSEKLVF

SEQ ID NO: 773424 - protein, 11 aa, Homo sapiens
  CDR3 for beta chain variable domain of TCR clone 386712 (TRBV10-3, TRBJ1-1)
CHDDRPPEAFF

SEQ ID NO: 773425 - protein, 14 aa, Homo sapiens
  CDR3 for alpha chain variable domain of TCR clone 386713 (TRAV12-1, TRAJ42)
CVVIYGGSQGNLIF

SEQ ID NO: 773426 - protein, 17 aa, Homo sapiens
  CDR3 for beta chain variable domain of TCR clone 386713 (TRBV19, TRBJ2-7)
CASSISFYDSYPYEQYF

SEQ ID NO: 773427 - protein, 15 aa, Homo sapiens
  CDR3 for alpha chain variable domain of TCR clone 386714 (TRAV1-2, TRAJ38)
CAVRENAGNKRKLIW

SEQ ID NO: 773428 - protein, 13 aa, Homo sapiens
  CDR3 for beta chain variable domain of TCR clone 386714 (TRBV27, TRBJ1-2)
CASSPSHRGRYTF

SEQ ID NO: 773429 - protein, 19 aa, Homo sapiens
  CDR3 for alpha chain variable domain of TCR clone 386715 (TRAV26-1, TRAJ28)
CIVRVAHSYSGAGSYQLTF

SEQ ID NO: 773430 - protein, 15 aa, Homo sapiens
  CDR3 for beta chain variable domain of TCR clone 386715 (TRBV20-1, TRBJ1-1)
CSASRGVTGNTEAFF

SEQ ID NO: 773431 - protein, 13 aa, Homo sapiens
  CDR3 for alpha chain variable domain of TCR clone 386716 (TRAV13-1, TRAJ9)
CAARITGGFKTIF

SEQ ID NO: 773432 - protein, 13 aa, Homo sapiens
  CDR3 for beta chain variable domain of TCR clone 386716 (TRBV10-3, TRBJ2-7)
CASKLAVNYEQYF

SEQ ID NO: 773433 - protein, 13 aa, Homo sapiens
  CDR3 for alpha chain variable domain of TCR clone 386717 (TRAV26-1, TRAJ33)
CIVRVEGNYQLIG

SEQ ID NO: 773434 - protein, 16 aa, Homo sapiens
  CDR3 for beta chain variable domain of TCR clone 386717 (TRBV15, TRBJ2-7)
CATSRDRGRRRGEQYF

SEQ ID NO: 773435 - protein, 13 aa, Homo sapiens
  CDR3 for alpha chain variable domain of TCR clone 386718 (TRAV3, TRAJ30)
CAVRDRGDDKIIF

SEQ ID NO: 773436 - protein, 14 aa, Homo sapiens
  CDR3 for beta chain variable domain of TCR clone 386718 (TRBV19, TRBJ2-1)
CASPTFVLSGEQFF

SEQ ID NO: 773437 - protein, 13 aa, Homo sapiens
  CDR3 for alpha chain variable domain of TCR clone 386719 (TRAV2, TRAJ15)
CAVASQAGTALIF

SEQ ID NO: 773438 - protein, 15 aa, Homo sapiens
  CDR3 for beta chain variable domain of TCR clone 386719 (TRBV28, TRBJ2-7)
CASSPGGRGFYEQYF

SEQ ID NO: 773439 - protein, 14 aa, Homo sapiens
  CDR3 for alpha chain variable domain of TCR clone 386720 (TRAV1-2, TRAJ16)
CAVNRFSDGQKLLF

SEQ ID NO: 773440 - protein, 13 aa, Homo sapiens
  CDR3 for beta chain variable domain of TCR clone 386720 (TRBV7-9, TRBJ2-3)
CASSPVSTDTQYF

SEQ ID NO: 773441 - protein, 17 aa, Homo sapiens
  CDR3 for alpha chain variable domain of TCR clone 386721 (TRAV1-1, TRAJ28)
CAVDPAYSGAGSYQHTF

SEQ ID NO: 773442 - protein, 14 aa, Homo sapiens
  CDR3 for beta chain variable domain of TCR clone 386721 (TRBV19, TRBJ2-1)
CASPTFVLSGEQFF

SEQ ID NO: 773443 - protein, 14 aa, Homo sapiens
  CDR3 for alpha chain variable domain of TCR clone 386722 (TRAV12-1, TRAJ30)
CVVNIGGRDDKIIF

SEQ ID NO: 773444 - protein, 14 aa, Homo sapiens
  CDR3 for beta chain variable domain of TCR clone 386722 (TRBV6-6, TRBJ2-3)
CASRLQREADTQYF

SEQ ID NO: 773445 - protein, 15 aa, Homo sapiens
  CDR3 for alpha chain variable domain of TCR clone 386723 (TRAV13-1, TRAJ9)
CAASTLNTGGFKTIF

SEQ ID NO: 773446 - protein, 15 aa, Homo sapiens
  CDR3 for beta chain variable domain of TCR clone 386723 (TRBV6-5, TRBJ2-4)
CASSLREAPKNIQYF

SEQ ID NO: 773447 - protein, 12 aa, Homo sapiens
  CDR3 for alpha chain variable domain of TCR clone 386724 (TRAV8-3, TRAJ26)
CAGDNYGQNFVF

SEQ ID NO: 773448 - protein, 14 aa, Homo sapiens
  CDR3 for beta chain variable domain of TCR clone 386724 (TRBV28, TRBJ2-7)
CASSLLRISYEQYF

SEQ ID NO: 773449 - protein, 13 aa, Homo sapiens
  CDR3 for alpha chain variable domain of TCR clone 386725 (TRAV21, TRAJ57)
CAVTQGGSEKLVF

SEQ ID NO: 773450 - protein, 16 aa, Homo sapiens
  CDR3 for beta chain variable domain of TCR clone 386725 (TRBV29-1, TRBJ2-7)
CSVEDAEAGTAYEQYF

SEQ ID NO: 773451 - protein, 14 aa, Homo sapiens
  CDR3 for alpha chain variable domain of TCR clone 386726 (TRAV1-2, TRAJ16)
CAVNRFSDGQKLLF

SEQ ID NO: 773452 - protein, 14 aa, Homo sapiens
  CDR3 for beta chain variable domain of TCR clone 386726 (TRBV11-3, TRBJ2-7)
CASSFRQGSYEQYF

SEQ ID NO: 773453 - protein, 14 aa, Homo sapiens
  CDR3 for alpha chain variable domain of TCR clone 386727 (TRAV21, TRAJ58)
CAVRRGRSGSRLTF

SEQ ID NO: 773454 - protein, 14 aa, Homo sapiens
  CDR3 for beta chain variable domain of TCR clone 386727 (TRBV4-1, TRBJ2-2)
CASSQAVNTGELFF

SEQ ID NO: 773455 - protein, 13 aa, Homo sapiens
  CDR3 for alpha chain variable domain of TCR clone 386728 (TRAV12-2, TRAJ50)
CAVIVTSYDKVIF

SEQ ID NO: 773456 - protein, 14 aa, Homo sapiens
  CDR3 for beta chain variable domain of TCR clone 386728 (TRBV9, TRBJ2-1)
CASSVDARGKEQFF

SEQ ID NO: 773457 - protein, 14 aa, Homo sapiens
  CDR3 for alpha chain variable domain of TCR clone 386729 (TRAV2, TRAJ22)
CAVGRGGSAGQLTF

SEQ ID NO: 773458 - protein, 12 aa, Homo sapiens
  CDR3 for beta chain variable domain of TCR clone 386729 (TRBV19, TRBJ2-1)
CASSTQDTEQFF

SEQ ID NO: 773459 - protein, 13 aa, Homo sapiens
  CDR3 for alpha chain variable domain of TCR clone 386730 (TRAV29/DV5, TRAJ31)
CAASRNNNARLMF

SEQ ID NO: 773460 - protein, 16 aa, Homo sapiens
  CDR3 for beta chain variable domain of TCR clone 386730 (TRBV6-1, TRBJ2-5)
CASSETLDRGAETQYF

SEQ ID NO: 773461 - protein, 15 aa, Homo sapiens
  CDR3 for alpha chain variable domain of TCR clone 386731 (TRAV27, TRAJ10)
CAGARLTGGGNKITF

SEQ ID NO: 773462 - protein, 15 aa, Homo sapiens
  CDR3 for beta chain variable domain of TCR clone 386731 (TRBV27, TRBJ1-4)
CASGAQQDLNEKLFF

SEQ ID NO: 773463 - protein, 14 aa, Homo sapiens
  CDR3 for alpha chain variable domain of TCR clone 386732 (TRAV27, TRAJ49)
CAGRPEGTGNQFYF

SEQ ID NO: 773464 - protein, 15 aa, Homo sapiens
  CDR3 for beta chain variable domain of TCR clone 386732 (TRBV28, TRBJ2-1)
CASSGLAEVDNEQFF

SEQ ID NO: 773465 - protein, 14 aa, Homo sapiens
  CDR3 for alpha chain variable domain of TCR clone 386733 (TRAV26-1, TRAJ38)
CIADNAGNNRQLIL

SEQ ID NO: 773466 - protein, 13 aa, Homo sapiens
  CDR3 for beta chain variable domain of TCR clone 386733 (TRBV20-1, TRBJ1-1)
CSARGGGNTEAFF

SEQ ID NO: 773467 - protein, 12 aa, Homo sapiens
  CDR3 for alpha chain variable domain of TCR clone 386734 (TRAV12-3, TRAJ17)
CAMRLTGNKLTF

SEQ ID NO: 773468 - protein, 13 aa, Homo sapiens
  CDR3 for beta chain variable domain of TCR clone 386734 (TRBV5-1, TRBJ1-2)
CASSSTGVYGYTF

SEQ ID NO: 773469 - protein, 14 aa, Homo sapiens
  CDR3 for alpha chain variable domain of TCR clone 386735 (TRAV8-2, TRAJ6)
CVVISAGGSYIPTF

SEQ ID NO: 773470 - protein, 16 aa, Homo sapiens
  CDR3 for beta chain variable domain of TCR clone 386735 (TRBV7-6, TRBJ2-6)
CASSLPGVSGANVLTF

SEQ ID NO: 773471 - protein, 17 aa, Homo sapiens
  CDR3 for alpha chain variable domain of TCR clone 386736 (TRAV38-1, TRAJ45)
CAFMKHYMGGGADGLTF

SEQ ID NO: 773472 - protein, 19 aa, Homo sapiens
  CDR3 for beta chain variable domain of TCR clone 386736 (TRBV6-1, TRBJ2-5)
CASSEQGLAGGLSQETQYF

SEQ ID NO: 773473 - protein, 12 aa, Homo sapiens
  CDR3 for alpha chain variable domain of TCR clone 386737 (TRAV2, TRAJ9)
CAVGAGGFKAIF

SEQ ID NO: 773474 - protein, 22 aa, Homo sapiens
  CDR3 for beta chain variable domain of TCR clone 386737 (TRBV6-1, TRBJ1-3)
CASVQGGGWKHHIFWRGKLAHC

SEQ ID NO: 773475 - protein, 11 aa, Homo sapiens
  CDR3 for alpha chain variable domain of TCR clone 386738 (TRAV4, TRAJ23)
CLVAPGGKLIF

SEQ ID NO: 773476 - protein, 14 aa, Homo sapiens
  CDR3 for beta chain variable domain of TCR clone 386738 (TRBV19, TRBJ2-7)
CASSIFAGTYEQYF

SEQ ID NO: 773477 - protein, 17 aa, Homo sapiens
  CDR3 for alpha chain variable domain of TCR clone 386739 (TRAV3, TRAJ6)
CAVRDGPRAGGGYIPTF

SEQ ID NO: 773478 - protein, 14 aa, Homo sapiens
  CDR3 for beta chain variable domain of TCR clone 386739 (TRBV7-2, TRBJ2-7)
CASSPKTSSYEQYF

SEQ ID NO: 773479 - protein, 15 aa, Homo sapiens
  CDR3 for alpha chain variable domain of TCR clone 386740 (TRAV21, TRAJ53)
CATLNSGGSNYKLTF

SEQ ID NO: 773480 - protein, 13 aa, Homo sapiens
  CDR3 for beta chain variable domain of TCR clone 386740 (TRBV12-4, TRBJ2-1)
CASSWAENNEQFF

SEQ ID NO: 773481 - protein, 12 aa, Homo sapiens
  CDR3 for alpha chain variable domain of TCR clone 386741 (TRAV8-4, TRAJ43)
CAVSLNNKDMRF

SEQ ID NO: 773482 - protein, 14 aa, Homo sapiens
  CDR3 for beta chain variable domain of TCR clone 386741 (TRBV11-2, TRBJ1-2)
CASSLGTANYGYTF

SEQ ID NO: 773483 - protein, 14 aa, Homo sapiens
  CDR3 for alpha chain variable domain of TCR clone 386742 (TRAV26-1, TRAJ21)
CIVRFGHNFNKFYF

SEQ ID NO: 773484 - protein, 15 aa, Homo sapiens
  CDR3 for beta chain variable domain of TCR clone 386742 (TRBV4-3, TRBJ2-1)
CASSQGLAGSNEQFF

SEQ ID NO: 773485 - protein, 12 aa, Homo sapiens
  CDR3 for alpha chain variable domain of TCR clone 386743 (TRAV21, TRAJ33)
CAVQDSEYQLIW

SEQ ID NO: 773486 - protein, 14 aa, Homo sapiens
  CDR3 for beta chain variable domain of TCR clone 386743 (TRBV28, TRBJ2-1)
CASSPGEGGNEQFF

SEQ ID NO: 773487 - protein, 16 aa, Homo sapiens
  CDR3 for alpha chain variable domain of TCR clone 386744 (TRAV3, TRAJ10)
CAVRDMRAGGGNKLTF

SEQ ID NO: 773488 - protein, 12 aa, Homo sapiens
  CDR3 for beta chain variable domain of TCR clone 386744 (TRBV20-1, TRBJ2-7)
CSAGLKMGEQCF

SEQ ID NO: 773489 - protein, 12 aa, Homo sapiens
  CDR3 for alpha chain variable domain of TCR clone 386745 (TRAV21, TRAJ39)
CAADNAGNMLTF

SEQ ID NO: 773490 - protein, 12 aa, Homo sapiens
  CDR3 for beta chain variable domain of TCR clone 386745 (TRBV5-1, TRBJ2-7)
CASSLDSYEQYF

SEQ ID NO: 773491 - protein, 16 aa, Homo sapiens
  CDR3 for alpha chain variable domain of TCR clone 386746 (TRAV14/DV4, TRAJ53)
CAMREGGGGSNYKLTF

SEQ ID NO: 773492 - protein, 17 aa, Homo sapiens
  CDR3 for beta chain variable domain of TCR clone 386746 (TRBV5-1, TRBJ2-3)
CASSVTSGPQIRSILAQ

SEQ ID NO: 773493 - protein, 14 aa, Homo sapiens
  CDR3 for alpha chain variable domain of TCR clone 386747 (TRAV13-1, TRAJ40)
CAAHPTSGTYKYIF

SEQ ID NO: 773494 - protein, 15 aa, Homo sapiens
  CDR3 for beta chain variable domain of TCR clone 386747 (TRBV11-2, TRBJ2-2)
CDSSPSGGGTGELFF

SEQ ID NO: 773495 - protein, 16 aa, Homo sapiens
  CDR3 for alpha chain variable domain of TCR clone 386748 (TRAV3, TRAJ10)
CAVRDMRAGGGNKLTF

SEQ ID NO: 773496 - protein, 16 aa, Homo sapiens
  CDR3 for beta chain variable domain of TCR clone 386748 (TRBV12-5, TRBJ2-5)
CASGPRTSGNQEAQYF

SEQ ID NO: 773497 - protein, 14 aa, Homo sapiens
  CDR3 for alpha chain variable domain of TCR clone 386749 (TRAV26-1, TRAJ38)
CIADNAGNNRKLIW

SEQ ID NO: 773498 - protein, 15 aa, Homo sapiens
  CDR3 for beta chain variable domain of TCR clone 386749 (TRBV7-8, TRBJ2-1)
CASSLRGGPYNEQFF

SEQ ID NO: 773499 - protein, 13 aa, Homo sapiens
  CDR3 for alpha chain variable domain of TCR clone 386750 (TRAV12-3, TRAJ7)
YAMSASGNNRLAF

SEQ ID NO: 773500 - protein, 14 aa, Homo sapiens
  CDR3 for beta chain variable domain of TCR clone 386750 (TRBV13, TRBJ2-5)
CASSLGPRGETQYF

SEQ ID NO: 773501 - protein, 11 aa, Homo sapiens
  CDR3 for alpha chain variable domain of TCR clone 386751 (TRAV2, TRAJ13)
CASGGYQKVTF

SEQ ID NO: 773502 - protein, 16 aa, Homo sapiens
  CDR3 for beta chain variable domain of TCR clone 386751 (TRBV27, TRBJ2-2)
CASRLSGFWVTGELFF

SEQ ID NO: 773503 - protein, 16 aa, Homo sapiens
  CDR3 for alpha chain variable domain of TCR clone 386752 (TRAV12-3, TRAJ53)
CAMSPGRGGSNYKLTL

SEQ ID NO: 773504 - protein, 15 aa, Homo sapiens
  CDR3 for beta chain variable domain of TCR clone 386752 (TRBV12-4, TRBJ2-5)
CASSPPTGLQETQYF

SEQ ID NO: 773505 - protein, 19 aa, Homo sapiens
  CDR3 for alpha chain variable domain of TCR clone 386753 (TRAV25, TRAJ43)
TATQTTDVGAYFCAVFMRF

SEQ ID NO: 773506 - protein, 12 aa, Homo sapiens
  CDR3 for beta chain variable domain of TCR clone 386753 (TRBV11-2, TRBJ2-3)
CASSYRPDTQYF

SEQ ID NO: 773507 - protein, 17 aa, Homo sapiens
  CDR3 for alpha chain variable domain of TCR clone 386754 (TRAV13-1, TRAJ28)
CAASPPYSGAGSYQLTL

SEQ ID NO: 773508 - protein, 14 aa, Homo sapiens
  CDR3 for beta chain variable domain of TCR clone 386754 (TRBV6-1, TRBJ1-3)
CASVQGGGGNTIYF

SEQ ID NO: 773509 - protein, 15 aa, Homo sapiens
  CDR3 for alpha chain variable domain of TCR clone 386755 (TRAV25, TRAJ53)
CPTSNSGGSNYKLTF

SEQ ID NO: 773510 - protein, 11 aa, Homo sapiens
  CDR3 for beta chain variable domain of TCR clone 386755 (TRBV7-8, TRBJ2-7)
CASSLSLEQYF

SEQ ID NO: 773511 - protein, 17 aa, Homo sapiens
  CDR3 for alpha chain variable domain of TCR clone 386756 (TRAV3, TRAJ28)
CAVREAYSGAVSYQLTF

SEQ ID NO: 773512 - protein, 18 aa, Homo sapiens
  CDR3 for beta chain variable domain of TCR clone 386756 (TRBV27, TRBJ2-1)
CASGNRAVGVGSKNEQFF

SEQ ID NO: 773513 - protein, 12 aa, Homo sapiens
  CDR3 for alpha chain variable domain of TCR clone 386757 (TRAV29/DV5, TRAJ34)
CAARHNTDTLIF

SEQ ID NO: 773514 - protein, 14 aa, Homo sapiens
  CDR3 for beta chain variable domain of TCR clone 386757 (TRBV7-2, TRBJ1-5)
CASSTQGAGQPQHF

SEQ ID NO: 773515 - protein, 11 aa, Homo sapiens
  CDR3 for alpha chain variable domain of TCR clone 386758 (TRAV3, TRAJ21)
CAVGNFNKFYF

SEQ ID NO: 773516 - protein, 17 aa, Homo sapiens
  CDR3 for beta chain variable domain of TCR clone 386758 (TRBV24-1, TRBJ2-1)
WATSDVSTSGAYNEQFF

SEQ ID NO: 773517 - protein, 12 aa, Homo sapiens
  CDR3 for alpha chain variable domain of TCR clone 386759 (TRAV12-3, TRAJ17)
CAMKLTGNKLTF

SEQ ID NO: 773518 - protein, 14 aa, Homo sapiens
  CDR3 for beta chain variable domain of TCR clone 386759 (TRBV4-1, TRBJ2-7)
CASSQDREHVEQYF

SEQ ID NO: 773519 - protein, 13 aa, Homo sapiens
  CDR3 for alpha chain variable domain of TCR clone 386760 (TRAV22, TRAJ29)
CAVGGSGNTPLVF

SEQ ID NO: 773520 - protein, 19 aa, Homo sapiens
  CDR3 for beta chain variable domain of TCR clone 386760 (TRBV19, TRBJ2-5)
CASSIGQVTDFFLGETQYF

SEQ ID NO: 773521 - protein, 14 aa, Homo sapiens
  CDR3 for alpha chain variable domain of TCR clone 386761 (TRAV1-2, TRAJ15)
CAVRDRQAGTALIF

SEQ ID NO: 773522 - protein, 14 aa, Homo sapiens
  CDR3 for beta chain variable domain of TCR clone 386761 (TRBV7-8, TRBJ2-1)
CASSSQGTYNEQFF

SEQ ID NO: 773523 - protein, 15 aa, Homo sapiens
  CDR3 for alpha chain variable domain of TCR clone 386762 (TRAV26-1, TRAJ29)
GIVRVEGAGNTPLVF

SEQ ID NO: 773524 - protein, 15 aa, Homo sapiens
  CDR3 for beta chain variable domain of TCR clone 386762 (TRBV7-9, TRBJ1-5)
CASSQGHQPNQPQHF

SEQ ID NO: 773525 - protein, 15 aa, Homo sapiens
  CDR3 for alpha chain variable domain of TCR clone 386763 (TRAV8-2, TRAJ17)
CVVSSIKAAGNKLTF

SEQ ID NO: 773526 - protein, 13 aa, Homo sapiens
  CDR3 for beta chain variable domain of TCR clone 386763 (TRBV19, TRBJ1-5)
CASSTQDGQPQHF

SEQ ID NO: 773527 - protein, 18 aa, Homo sapiens
  CDR3 for alpha chain variable domain of TCR clone 386764 (TRAV13-1, TRAJ52)
CAASERSAGGTSYGKLTF

SEQ ID NO: 773528 - protein, 13 aa, Homo sapiens
  CDR3 for beta chain variable domain of TCR clone 386764 (TRBV12-4, TRBJ1-2)
CASSLRQGKGYAF

SEQ ID NO: 773529 - protein, 15 aa, Homo sapiens
  CDR3 for alpha chain variable domain of TCR clone 386765 (TRAV8-3, TRAJ7)
CAVGSISYGNNRLAF

SEQ ID NO: 773530 - protein, 18 aa, Homo sapiens
  CDR3 for beta chain variable domain of TCR clone 386765 (TRBV25-1, TRBJ1-2)
CASSGLQNGQGLIFGYTF

SEQ ID NO: 773531 - protein, 14 aa, Homo sapiens
  CDR3 for alpha chain variable domain of TCR clone 386766 (TRAV30, TRAJ26)
CGTEIVSYGQNFVF

SEQ ID NO: 773532 - protein, 13 aa, Homo sapiens
  CDR3 for beta chain variable domain of TCR clone 386766 (TRBV19, TRBJ1-3)
CASRLSLGKTIYF

SEQ ID NO: 773533 - protein, 13 aa, Homo sapiens
  CDR3 for alpha chain variable domain of TCR clone 386767 (TRAV8-6, TRAJ49)
CAVITNTGNQFSF

SEQ ID NO: 773534 - protein, 12 aa, Homo sapiens
  CDR3 for beta chain variable domain of TCR clone 386767 (TRBV12-4, TRBJ2-7)
CASSLGGYEQYF

SEQ ID NO: 773535 - protein, 15 aa, Homo sapiens
  CDR3 for alpha chain variable domain of TCR clone 386768 (TRAV1-2, TRAJ26)
CAVRDLITMVRILSF

SEQ ID NO: 773536 - protein, 11 aa, Homo sapiens
  CDR3 for beta chain variable domain of TCR clone 386768 (TRBV12-4, TRBJ2-3)
CASTATDTQYF

SEQ ID NO: 773537 - protein, 16 aa, Homo sapiens
  CDR3 for alpha chain variable domain of TCR clone 386769 (TRAV3, TRAJ37)
CAVRPHGSGNTGKRIF

SEQ ID NO: 773538 - protein, 17 aa, Homo sapiens
  CDR3 for beta chain variable domain of TCR clone 386769 (TRBV7-2, TRBJ2-7)
CASCFETSGSTSSTSGR

SEQ ID NO: 773539 - protein, 14 aa, Homo sapiens
  CDR3 for alpha chain variable domain of TCR clone 386770 (TRAV1-2, TRAJ16)
CAVNRFSDGQKLLF

SEQ ID NO: 773540 - protein, 17 aa, Homo sapiens
  CDR3 for beta chain variable domain of TCR clone 386770 (TRBV7-8, TRBJ2-6)
CASSAGTGGAGANVLSF

SEQ ID NO: 773541 - protein, 17 aa, Homo sapiens
  CDR3 for alpha chain variable domain of TCR clone 386771 (TRAV14/DV4, TRAJ4)
CAMREASGRGGYNKMIF

SEQ ID NO: 773542 - protein, 11 aa, Homo sapiens
  CDR3 for beta chain variable domain of TCR clone 386771 (TRBV19, TRBJ1-1)
CASSIGSEAFF

SEQ ID NO: 773543 - protein, 11 aa, Homo sapiens
  CDR3 for alpha chain variable domain of TCR clone 386772 (TRAV12-1, TRAJ43)
CVEYDNNDIRF

SEQ ID NO: 773544 - protein, 15 aa, Homo sapiens
  CDR3 for beta chain variable domain of TCR clone 386772 (TRBV18, TRBJ2-5)
CASAPRASEAETQYF

SEQ ID NO: 773545 - protein, 17 aa, Homo sapiens
  CDR3 for alpha chain variable domain of TCR clone 386773 (TRAV3, TRAJ6)
CAVRDGPSAGGSYIPTF

SEQ ID NO: 773546 - protein, 20 aa, Homo sapiens
  CDR3 for beta chain variable domain of TCR clone 386773 (TRBV28, TRBJ2-1)
CASTPIGRSPGIAGGNEQFF

SEQ ID NO: 773547 - protein, 17 aa, Homo sapiens
  CDR3 for alpha chain variable domain of TCR clone 386774 (TRAV12-3, TRAJ18)
CAMIRADRGSTLGRLYF

SEQ ID NO: 773548 - protein, 14 aa, Homo sapiens
  CDR3 for beta chain variable domain of TCR clone 386774 (TRBV5-7, TRBJ1-6)
CASTPWPADSPLDF

SEQ ID NO: 773549 - protein, 12 aa, Homo sapiens
  CDR3 for alpha chain variable domain of TCR clone 386775 (TRAV8-3, TRAJ26)
CAGDNYGQNFFF

SEQ ID NO: 773550 - protein, 15 aa, Homo sapiens
  CDR3 for beta chain variable domain of TCR clone 386775 (TRBV11-2, TRBJ2-1)
CASSLGTSGLNEQFF

SEQ ID NO: 773551 - protein, 14 aa, Homo sapiens
  CDR3 for alpha chain variable domain of TCR clone 386776 (TRAV35, TRAJ22)
CAGLRPGSARKLTF

SEQ ID NO: 773552 - protein, 13 aa, Homo sapiens
  CDR3 for beta chain variable domain of TCR clone 386776 (TRBV20-1, TRBJ2-7)
CSATHTSGYEQYF

SEQ ID NO: 773553 - protein, 13 aa, Homo sapiens
  CDR3 for alpha chain variable domain of TCR clone 386777 (TRAV8-3, TRAJ42)
CARYGGSQGNLIF

SEQ ID NO: 773554 - protein, 14 aa, Homo sapiens
  CDR3 for beta chain variable domain of TCR clone 386777 (TRBV20-1, TRBJ2-1)
CSALDRGTYNEQFF

SEQ ID NO: 773555 - protein, 21 aa, Homo sapiens
  CDR3 for alpha chain variable domain of TCR clone 386778 (TRAV27, TRAJ38)
CAARRNAGNNHTQNPDPAVYQ

SEQ ID NO: 773556 - protein, 13 aa, Homo sapiens
  CDR3 for beta chain variable domain of TCR clone 386778 (TRBV12-5, TRBJ2-3)
CASGDRQSDTQYF

SEQ ID NO: 773557 - protein, 13 aa, Homo sapiens
  CDR3 for alpha chain variable domain of TCR clone 386779 (TRAV29/DV5, TRAJ54)
CAAHLQGAQKLVF

SEQ ID NO: 773558 - protein, 13 aa, Homo sapiens
  CDR3 for beta chain variable domain of TCR clone 386779 (TRBV27, TRBJ1-1)
CASSLSIGAEAFF

SEQ ID NO: 773559 - protein, 13 aa, Homo sapiens
  CDR3 for alpha chain variable domain of TCR clone 386780 (TRAV2, TRAJ15)
CAVASQAGTALIF

SEQ ID NO: 773560 - protein, 17 aa, Homo sapiens
  CDR3 for beta chain variable domain of TCR clone 386780 (TRBV19, TRBJ2-6)
CASSTGQVFSGANVLTF

SEQ ID NO: 773561 - protein, 15 aa, Homo sapiens
  CDR3 for alpha chain variable domain of TCR clone 386781 (TRAV17, TRAJ13)
CATDAGSGGYQKVTF

SEQ ID NO: 773562 - protein, 12 aa, Homo sapiens
  CDR3 for beta chain variable domain of TCR clone 386781 (TRBV11-2, TRBJ2-2)
CASSLGGGELFF

SEQ ID NO: 773563 - protein, 10 aa, Homo sapiens
  CDR3 for alpha chain variable domain of TCR clone 386782 (TRAV26-2, TRAJ49)
CILLGNQFYF

SEQ ID NO: 773564 - protein, 11 aa, Homo sapiens
  CDR3 for beta chain variable domain of TCR clone 386782 (TRBV12-4, TRBJ2-3)
CASTATDTQYF

SEQ ID NO: 773565 - protein, 14 aa, Homo sapiens
  CDR3 for alpha chain variable domain of TCR clone 386783 (TRAV1-2, TRAJ8)
CAVREDTGFQKLAF

SEQ ID NO: 773566 - protein, 15 aa, Homo sapiens
  CDR3 for beta chain variable domain of TCR clone 386783 (TRBV6-3, TRBJ2-7)
CASSAPGTVFYEQYF

SEQ ID NO: 773567 - protein, 13 aa, Homo sapiens
  CDR3 for alpha chain variable domain of TCR clone 386784 (TRAV20, TRAJ20)
CAVQAGSGYNLSL

SEQ ID NO: 773568 - protein, 12 aa, Homo sapiens
  CDR3 for beta chain variable domain of TCR clone 386784 (TRBV3-1, TRBJ2-3)
CRQPRGGDTQYF

SEQ ID NO: 773569 - protein, 18 aa, Homo sapiens
  CDR3 for alpha chain variable domain of TCR clone 386785 (TRAV26-1, TRAJ52)
CIVRVEGAGGTSYGQLTF

SEQ ID NO: 773570 - protein, 15 aa, Homo sapiens
  CDR3 for beta chain variable domain of TCR clone 386785 (TRBV20-1, TRBJ2-7)
CSARDRVSGMDEQYF

SEQ ID NO: 773571 - protein, 18 aa, Homo sapiens
  CDR3 for alpha chain variable domain of TCR clone 386786 (TRAV21, TRAJ53)
CAVKGGENSGGSNYKLPF

SEQ ID NO: 773572 - protein, 14 aa, Homo sapiens
  CDR3 for beta chain variable domain of TCR clone 386786 (TRBV11-3, TRBJ1-5)
LTGDRLYYNQPQHF

SEQ ID NO: 773573 - protein, 14 aa, Homo sapiens
  CDR3 for alpha chain variable domain of TCR clone 386787 (TRAV17, TRAJ34)
CATDSLEGTDKLFF

SEQ ID NO: 773574 - protein, 13 aa, Homo sapiens
  CDR3 for beta chain variable domain of TCR clone 386787 (TRBV11-2, TRBJ2-7)
CASSGTRPYEQYF

SEQ ID NO: 773575 - protein, 12 aa, Homo sapiens
  CDR3 for alpha chain variable domain of TCR clone 386788 (TRAV1-1, TRAJ8)
CAGGTGFQKLVF

SEQ ID NO: 773576 - protein, 15 aa, Homo sapiens
  CDR3 for beta chain variable domain of TCR clone 386788 (TRBV7-9, TRBJ1-4)
CASSRIGGFNERLFF

SEQ ID NO: 773577 - protein, 23 aa, Homo sapiens
  CDR3 for alpha chain variable domain of TCR clone 386789 (TRAV8-6, TRAJ32)
CAVSALWWCYKQAHLWNWHSACF

SEQ ID NO: 773578 - protein, 13 aa, Homo sapiens
  CDR3 for beta chain variable domain of TCR clone 386789 (TRBV11-2, TRBJ2-5)
CASGHGAKETQYF

SEQ ID NO: 773579 - protein, 14 aa, Homo sapiens
  CDR3 for alpha chain variable domain of TCR clone 386790 (TRAV12-2, TRAJ13)
CAVKKTGGYQKVTF

SEQ ID NO: 773580 - protein, 15 aa, Homo sapiens
  CDR3 for beta chain variable domain of TCR clone 386790 (TRBV6-5, TRBJ1-6)
CASSLGQGFRSPLHF

SEQ ID NO: 773581 - protein, 12 aa, Homo sapiens
  CDR3 for alpha chain variable domain of TCR clone 386791 (TRAV8-3, TRAJ26)
CAGDNYGQNFVF

SEQ ID NO: 773582 - protein, 15 aa, Homo sapiens
  CDR3 for beta chain variable domain of TCR clone 386791 (TRBV15, TRBJ2-2)
CATSRGLADTGELFF

SEQ ID NO: 773583 - protein, 13 aa, Homo sapiens
  CDR3 for alpha chain variable domain of TCR clone 386792 (TRAV17, TRAJ29)
CATDAFRKHTSCL

SEQ ID NO: 773584 - protein, 13 aa, Homo sapiens
  CDR3 for beta chain variable domain of TCR clone 386792 (TRBV7-3, TRBJ1-1)
CASSQDWGAEAFF

SEQ ID NO: 773585 - protein, 14 aa, Homo sapiens
  CDR3 for alpha chain variable domain of TCR clone 386793 (TRAV12-2, TRAJ40)
YAVKIPSGTYKYIF

SEQ ID NO: 773586 - protein, 13 aa, Homo sapiens
  CDR3 for beta chain variable domain of TCR clone 386793 (TRBV7-9, TRBJ1-2)
CASSLKQNYGYAF

SEQ ID NO: 773587 - protein, 10 aa, Homo sapiens
  CDR3 for alpha chain variable domain of TCR clone 386794 (TRAV1-2, TRAJ31)
CAFFDARLMF

SEQ ID NO: 773588 - protein, 14 aa, Homo sapiens
  CDR3 for beta chain variable domain of TCR clone 386794 (TRBV20-1, TRBJ1-1)
CSAQTRIGGTEAFF

SEQ ID NO: 773589 - protein, 17 aa, Homo sapiens
  CDR3 for alpha chain variable domain of TCR clone 386795 (TRAV3, TRAJ6)
CAVRDGPRAGGSYIPTF

SEQ ID NO: 773590 - protein, 17 aa, Homo sapiens
  CDR3 for beta chain variable domain of TCR clone 386795 (TRBV27, TRBJ2-6)
CASSLTGFASGAKVLTF

SEQ ID NO: 773591 - protein, 15 aa, Homo sapiens
  CDR3 for alpha chain variable domain of TCR clone 386796 (TRAV27, TRAJ38)
CAARRNAGNNRKLIW

SEQ ID NO: 773592 - protein, 13 aa, Homo sapiens
  CDR3 for beta chain variable domain of TCR clone 386796 (TRBV5-5, TRBJ1-2)
CASSFWRGEDYTF

SEQ ID NO: 773593 - protein, 15 aa, Homo sapiens
  CDR3 for alpha chain variable domain of TCR clone 386797 (TRAV23/DV6, TRAJ9)
CSKHRGKYWGFKTIF

SEQ ID NO: 773594 - protein, 14 aa, Homo sapiens
  CDR3 for beta chain variable domain of TCR clone 386797 (TRBV9, TRBJ2-7)
CASSVGVGSYEQYF

SEQ ID NO: 773595 - protein, 15 aa, Homo sapiens
  CDR3 for alpha chain variable domain of TCR clone 386798 (TRAV12-1, TRAJ9)
CVVSFVDTGGFKTIF

SEQ ID NO: 773596 - protein, 19 aa, Homo sapiens
  CDR3 for beta chain variable domain of TCR clone 386798 (TRBV25-1, TRBJ2-2)
CAILVYRVDRGRKTGELFF

SEQ ID NO: 773597 - protein, 14 aa, Homo sapiens
  CDR3 for alpha chain variable domain of TCR clone 386799 (TRAV17, TRAJ57)
CATVPQGGSEKLVF

SEQ ID NO: 773598 - protein, 18 aa, Homo sapiens
  CDR3 for beta chain variable domain of TCR clone 386799 (TRBV6-5, TRBJ2-6)
CASSYSGNMESGANVLTF

SEQ ID NO: 773599 - protein, 13 aa, Homo sapiens
  CDR3 for alpha chain variable domain of TCR clone 386800 (TRAV17, TRAJ5)
CAPMDTGRRALTF

SEQ ID NO: 773600 - protein, 15 aa, Homo sapiens
  CDR3 for beta chain variable domain of TCR clone 386800 (TRBV5-7, TRBJ1-5)
CASSYGKLWDQPQHF

SEQ ID NO: 773601 - protein, 14 aa, Homo sapiens
  CDR3 for alpha chain variable domain of TCR clone 386801 (TRAV12-2, TRAJ44)
CAVNKAGTSSKLTF

SEQ ID NO: 773602 - protein, 12 aa, Homo sapiens
  CDR3 for beta chain variable domain of TCR clone 386801 (TRBV19, TRBJ1-4)
CASKDWPGGLFF

SEQ ID NO: 773603 - protein, 11 aa, Homo sapiens
  CDR3 for alpha chain variable domain of TCR clone 386802 (TRAV12-2, TRAJ29)
CAVTLRSPLVL

SEQ ID NO: 773604 - protein, 16 aa, Homo sapiens
  CDR3 for beta chain variable domain of TCR clone 386802 (TRBV5-1, TRBJ2-2)
CASSLGGTGSTGELFF

SEQ ID NO: 773605 - protein, 12 aa, Homo sapiens
  CDR3 for alpha chain variable domain of TCR clone 386803 (TRAV21, TRAJ49)
CAVANTGNQFYF

SEQ ID NO: 773606 - protein, 16 aa, Homo sapiens
  CDR3 for beta chain variable domain of TCR clone 386803 (TRBV13, TRBJ2-3)
CSSLSRVAGGRNTQYF

SEQ ID NO: 773607 - protein, 17 aa, Homo sapiens
  CDR3 for alpha chain variable domain of TCR clone 386804 (TRAV13-1, TRAJ52)
CSASSGAGGTSYGKLTF

SEQ ID NO: 773608 - protein, 14 aa, Homo sapiens
  CDR3 for beta chain variable domain of TCR clone 386804 (TRBV12-4, TRBJ2-3)
CASTIAGWGDTQYF

SEQ ID NO: 773609 - protein, 14 aa, Homo sapiens
  CDR3 for alpha chain variable domain of TCR clone 386805 (TRAV25, TRAJ6)
FAGRESGGSYIPTF

SEQ ID NO: 773610 - protein, 13 aa, Homo sapiens
  CDR3 for beta chain variable domain of TCR clone 386805 (TRBV27, TRBJ1-1)
CASSLSIGAEAFF

SEQ ID NO: 773611 - protein, 11 aa, Homo sapiens
  CDR3 for alpha chain variable domain of TCR clone 386806 (TRAV1-1, TRAJ30)
CAQNRDDKIIF

SEQ ID NO: 773612 - protein, 14 aa, Homo sapiens
  CDR3 for beta chain variable domain of TCR clone 386806 (TRBV7-8, TRBJ2-7)
CASSPGRADYEQYF

SEQ ID NO: 773613 - protein, 17 aa, Homo sapiens
  CDR3 for alpha chain variable domain of TCR clone 386807 (TRAV3, TRAJ6)
CAVIDGPRAGGSYIPTF

SEQ ID NO: 773614 - protein, 17 aa, Homo sapiens
  CDR3 for beta chain variable domain of TCR clone 386807 (TRBV11-2, TRBJ2-1)
CASSLYPPGVEYNEQFF

SEQ ID NO: 773615 - protein, 12 aa, Homo sapiens
  CDR3 for alpha chain variable domain of TCR clone 386808 (TRAV8-4, TRAJ31)
CAVSDSNARLMF

SEQ ID NO: 773616 - protein, 11 aa, Homo sapiens
  CDR3 for beta chain variable domain of TCR clone 386808 (TRBV12-4, TRBJ2-3)
CASTATDTQYF

SEQ ID NO: 773617 - protein, 13 aa, Homo sapiens
  CDR3 for alpha chain variable domain of TCR clone 386809 (TRAV12-3, TRAJ53)
CAMRGGSDYKLTF

SEQ ID NO: 773618 - protein, 15 aa, Homo sapiens
  CDR3 for beta chain variable domain of TCR clone 386809 (TRBV2, TRBJ2-1)
CATQARLVMIGEQFF

SEQ ID NO: 773619 - protein, 12 aa, Homo sapiens
  CDR3 for alpha chain variable domain of TCR clone 386810 (TRAV12-3, TRAJ17)
CAMTLTGNKITF

SEQ ID NO: 773620 - protein, 16 aa, Homo sapiens
  CDR3 for beta chain variable domain of TCR clone 386810 (TRBV12-5, TRBJ2-5)
CASGPRTSGNQETQYF

SEQ ID NO: 773621 - protein, 15 aa, Homo sapiens
  CDR3 for alpha chain variable domain of TCR clone 386811 (TRAV17, TRAJ45)
TSVLRTGGGADGLTF

SEQ ID NO: 773622 - protein, 13 aa, Homo sapiens
  CDR3 for beta chain variable domain of TCR clone 386811 (TRBV3-1, TRBJ1-1)
CASSQLQGAEAFF

SEQ ID NO: 773623 - protein, 17 aa, Homo sapiens
  CDR3 for alpha chain variable domain of TCR clone 386812 (TRAV12-2, TRAJ45)
CAVNIWGSGGGADGLTF

SEQ ID NO: 773624 - protein, 18 aa, Homo sapiens
  CDR3 for beta chain variable domain of TCR clone 386812 (TRBV20-1, TRBJ2-6)
CSAATTPTHGSGANGLTF

SEQ ID NO: 773625 - protein, 12 aa, Homo sapiens
  CDR3 for alpha chain variable domain of TCR clone 386813 (TRAV13-1, TRAJ21)
CAAKEGFNKFYF

SEQ ID NO: 773626 - protein, 12 aa, Homo sapiens
  CDR3 for beta chain variable domain of TCR clone 386813 (TRBV7-3, TRBJ1-1)
CQQPGLGAEAFF

SEQ ID NO: 773627 - protein, 14 aa, Homo sapiens
  CDR3 for alpha chain variable domain of TCR clone 386814 (TRAV38-2/DV8, TRAJ30)
CAYMDGLGGDKIVF

SEQ ID NO: 773628 - protein, 15 aa, Homo sapiens
  CDR3 for beta chain variable domain of TCR clone 386814 (TRBV7-9, TRBJ2-2)
CASRPADRDTGELFF

SEQ ID NO: 773629 - protein, 12 aa, Homo sapiens
  CDR3 for alpha chain variable domain of TCR clone 386815 (TRAV9-2, TRAJ40)
CALTSGTYKYIF

SEQ ID NO: 773630 - protein, 16 aa, Homo sapiens
  CDR3 for beta chain variable domain of TCR clone 386815 (TRBV7-7, TRBJ2-2)
CASSPRTGLSTGELFF

SEQ ID NO: 773631 - protein, 13 aa, Homo sapiens
  CDR3 for alpha chain variable domain of TCR clone 386816 (TRAV8-3, TRAJ28)
CAVGAVGSYQLTF

SEQ ID NO: 773632 - protein, 14 aa, Homo sapiens
  CDR3 for beta chain variable domain of TCR clone 386816 (TRBV11-2, TRBJ1-1)
CASSTQRGRTEAFF

SEQ ID NO: 773633 - protein, 14 aa, Homo sapiens
  CDR3 for alpha chain variable domain of TCR clone 386817 (TRAV16, TRAJ15)
CALSGPQAGTALIF

SEQ ID NO: 773634 - protein, 17 aa, Homo sapiens
  CDR3 for beta chain variable domain of TCR clone 386817 (TRBV4-3, TRBJ2-1)
CASSQFSSGRASGEQFF

SEQ ID NO: 773635 - protein, 13 aa, Homo sapiens
  CDR3 for alpha chain variable domain of TCR clone 386818 (TRAV3, TRAJ9)
CCERQYWRLKTIF

SEQ ID NO: 773636 - protein, 14 aa, Homo sapiens
  CDR3 for beta chain variable domain of TCR clone 386818 (TRBV15, TRBJ2-1)
CATSGVEDYNEQFF

SEQ ID NO: 773637 - protein, 16 aa, Homo sapiens
  CDR3 for alpha chain variable domain of TCR clone 386819 (TRAV30, TRAJ24)
CGTEIVDADSWGKFQF

SEQ ID NO: 773638 - protein, 14 aa, Homo sapiens
  CDR3 for beta chain variable domain of TCR clone 386819 (TRBV7-9, TRBJ2-1)
CASSPRDSLYERFF

SEQ ID NO: 773639 - protein, 13 aa, Homo sapiens
  CDR3 for alpha chain variable domain of TCR clone 386820 (TRAV8-3, TRAJ28)
CAVGAVGSYQLTF

SEQ ID NO: 773640 - protein, 14 aa, Homo sapiens
  CDR3 for beta chain variable domain of TCR clone 386820 (TRBV25-1, TRBJ1-1)
FASTHLGGNTEAFF

SEQ ID NO: 773641 - protein, 14 aa, Homo sapiens
  CDR3 for alpha chain variable domain of TCR clone 386821 (TRAV26-1, TRAJ48)
CIVRVGFGNEKLTF

SEQ ID NO: 773642 - protein, 12 aa, Homo sapiens
  CDR3 for beta chain variable domain of TCR clone 386821 (TRBV11-2, TRBJ2-2)
CASSLPTGELFF

SEQ ID NO: 773643 - protein, 14 aa, Homo sapiens
  CDR3 for alpha chain variable domain of TCR clone 386822 (TRAV1-2, TRAJ8)
CAVREDTGFQKLVF

SEQ ID NO: 773644 - protein, 15 aa, Homo sapiens
  CDR3 for beta chain variable domain of TCR clone 386822 (TRBV7-2, TRBJ2-1)
CASSSRTSREDEQFF

SEQ ID NO: 773645 - protein, 15 aa, Homo sapiens
  CDR3 for alpha chain variable domain of TCR clone 386823 (TRAV25, TRAJ52)
CAGRPGGTSYGKLTF

SEQ ID NO: 773646 - protein, 16 aa, Homo sapiens
  CDR3 for beta chain variable domain of TCR clone 386823 (TRBV6-1, TRBJ2-5)
CASSGTLDRGAETQYF

SEQ ID NO: 773647 - protein, 14 aa, Homo sapiens
  CDR3 for alpha chain variable domain of TCR clone 386824 (TRAV1-2, TRAJ8)
CAVREDTDFQKLVF

SEQ ID NO: 773648 - protein, 15 aa, Homo sapiens
  CDR3 for beta chain variable domain of TCR clone 386824 (TRBV20-1, TRBJ2-7)
CSARDRVSGMDEQYF

SEQ ID NO: 773649 - protein, 15 aa, Homo sapiens
  CDR3 for alpha chain variable domain of TCR clone 386825 (TRAV8-3, TRAJ27)
CAVGPSKTNAGKSTF

SEQ ID NO: 773650 - protein, 14 aa, Homo sapiens
  CDR3 for beta chain variable domain of TCR clone 386825 (TRBV4-1, TRBJ2-7)
CASSPVAGGDEQYF

SEQ ID NO: 773651 - protein, 20 aa, Homo sapiens
  CDR3 for alpha chain variable domain of TCR clone 386826 (TRAV2, TRAJ13)
CSSSRCGRQMLLPLDQKVTF

SEQ ID NO: 773652 - protein, 14 aa, Homo sapiens
  CDR3 for beta chain variable domain of TCR clone 386826 (TRBV12-4, TRBJ2-3)
CASSGQGSTDTQYF

SEQ ID NO: 773653 - protein, 14 aa, Homo sapiens
  CDR3 for alpha chain variable domain of TCR clone 386827 (TRAV26-1, TRAJ38)
CIADNAGNSRKLIW

SEQ ID NO: 773654 - protein, 13 aa, Homo sapiens
  CDR3 for beta chain variable domain of TCR clone 386827 (TRBV4-1, TRBJ2-7)
RASSQGQAYEQYF

SEQ ID NO: 773655 - protein, 14 aa, Homo sapiens
  CDR3 for alpha chain variable domain of TCR clone 386828 (TRAV20, TRAJ56)
CAVQFGGANSKLTF

SEQ ID NO: 773656 - protein, 14 aa, Homo sapiens
  CDR3 for beta chain variable domain of TCR clone 386828 (TRBV4-1, TRBJ2-5)
CASSQYRDQETQYF

SEQ ID NO: 773657 - protein, 14 aa, Homo sapiens
  CDR3 for alpha chain variable domain of TCR clone 386829 (TRAV16, TRAJ17)
CALSSRAAGNKLTF

SEQ ID NO: 773658 - protein, 17 aa, Homo sapiens
  CDR3 for beta chain variable domain of TCR clone 386829 (TRBV18, TRBJ2-6)
CASSPRQGAVGANVLTF

SEQ ID NO: 773659 - protein, 16 aa, Homo sapiens
  CDR3 for alpha chain variable domain of TCR clone 386830 (TRAV21, TRAJ45)
CAVSWGSGGGADGLTF

SEQ ID NO: 773660 - protein, 17 aa, Homo sapiens
  CDR3 for beta chain variable domain of TCR clone 386830 (TRBV13, TRBJ2-3)
CASSLSRVAGGRNTQYF

SEQ ID NO: 773661 - protein, 13 aa, Homo sapiens
  CDR3 for alpha chain variable domain of TCR clone 386831 (TRAV12-3, TRAJ9)
CAMRHTGGFKTIF

SEQ ID NO: 773662 - protein, 13 aa, Homo sapiens
  CDR3 for beta chain variable domain of TCR clone 386831 (TRBV2, TRBJ1-1)
CASRWTVNTEAFF

SEQ ID NO: 773663 - protein, 12 aa, Homo sapiens
  CDR3 for alpha chain variable domain of TCR clone 386832 (TRAV35, TRAJ39)
LAPNNAGNMLTF

SEQ ID NO: 773664 - protein, 17 aa, Homo sapiens
  CDR3 for beta chain variable domain of TCR clone 386832 (TRBV7-3, TRBJ2-3)
CASSPRGQGYGTDTQYF

SEQ ID NO: 773665 - protein, 14 aa, Homo sapiens
  CDR3 for alpha chain variable domain of TCR clone 386833 (TRAV12-2, TRAJ13)
CAVKKNGGYQKVTF

SEQ ID NO: 773666 - protein, 15 aa, Homo sapiens
  CDR3 for beta chain variable domain of TCR clone 386833 (TRBV27, TRBJ2-1)
CASSNGGGSANEQFF

SEQ ID NO: 773667 - protein, 14 aa, Homo sapiens
  CDR3 for alpha chain variable domain of TCR clone 386834 (TRAV12-2, TRAJ13)
CAVKKTGGYQKVTF

SEQ ID NO: 773668 - protein, 17 aa, Homo sapiens
  CDR3 for beta chain variable domain of TCR clone 386834 (TRBV20-1, TRBJ2-2)
CSASGSGQGGLTGELFF

SEQ ID NO: 773669 - protein, 14 aa, Homo sapiens
  CDR3 for alpha chain variable domain of TCR clone 386835 (TRAV21, TRAJ4)
CAVPRFWWLNKLIF

SEQ ID NO: 773670 - protein, 13 aa, Homo sapiens
  CDR3 for beta chain variable domain of TCR clone 386835 (TRBV7-3, TRBJ2-5)
CASSLTAGETQYF

SEQ ID NO: 773671 - protein, 18 aa, Homo sapiens
  CDR3 for alpha chain variable domain of TCR clone 386836 (TRAV26-2, TRAJ45)
CILRLWGYSGGGADGITC

SEQ ID NO: 773672 - protein, 17 aa, Homo sapiens
  CDR3 for beta chain variable domain of TCR clone 386836 (TRBV28, TRBJ2-3)
CASSPTPAGGRVDTQYF

SEQ ID NO: 773673 - protein, 16 aa, Homo sapiens
  CDR3 for alpha chain variable domain of TCR clone 386837 (TRAV3, TRAJ37)
CAVRGKGSGHTGKLIF

SEQ ID NO: 773674 - protein, 13 aa, Homo sapiens
  CDR3 for beta chain variable domain of TCR clone 386837 (TRBV14, TRBJ2-7)
CASSQDRRYEQYF

SEQ ID NO: 773675 - protein, 14 aa, Homo sapiens
  CDR3 for alpha chain variable domain of TCR clone 386838 (TRAV12-2, TRAJ52)
CRCAGGNSYGKLTF

SEQ ID NO: 773676 - protein, 13 aa, Homo sapiens
  CDR3 for beta chain variable domain of TCR clone 386838 (TRBV11-2, TRBJ2-1)
CASSLRLTHEQFF

SEQ ID NO: 773677 - protein, 14 aa, Homo sapiens
  CDR3 for alpha chain variable domain of TCR clone 386839 (TRAV1-2, TRAJ16)
CAVNRFSDVQKLLF

SEQ ID NO: 773678 - protein, 13 aa, Homo sapiens
  CDR3 for beta chain variable domain of TCR clone 386839 (TRBV7-2, TRBJ1-1)
CASNLKGAKVAFF

SEQ ID NO: 773679 - protein, 14 aa, Homo sapiens
  CDR3 for alpha chain variable domain of TCR clone 386840 (TRAV1-2, TRAJ8)
CAVREDTGFQKLVF

SEQ ID NO: 773680 - protein, 12 aa, Homo sapiens
  CDR3 for beta chain variable domain of TCR clone 386840 (TRBV24-1, TRBJ1-1)
CATLSPDTEAFF

SEQ ID NO: 773681 - protein, 15 aa, Homo sapiens
  CDR3 for alpha chain variable domain of TCR clone 386841 (TRAV30, TRAJ32)
CGTEILGGATNKLIF

SEQ ID NO: 773682 - protein, 17 aa, Homo sapiens
  CDR3 for beta chain variable domain of TCR clone 386841 (TRBV5-4, TRBJ2-1)
RASSSAGGRVPYNEQLF

SEQ ID NO: 773683 - protein, 13 aa, Homo sapiens
  CDR3 for alpha chain variable domain of TCR clone 386842 (TRAV13-2, TRAJ13)
CAERPGGSQKVTF

SEQ ID NO: 773684 - protein, 18 aa, Homo sapiens
  CDR3 for beta chain variable domain of TCR clone 386842 (TRBV7-6, TRBJ2-1)
CASSPRTSGMSSYNEQFF

SEQ ID NO: 773685 - protein, 12 aa, Homo sapiens
  CDR3 for alpha chain variable domain of TCR clone 386843 (TRAV24, TRAJ41)
CSPYDSGYALNF

SEQ ID NO: 773686 - protein, 16 aa, Homo sapiens
  CDR3 for beta chain variable domain of TCR clone 386843 (TRBV10-3, TRBJ2-1)
CAISGVGDGGGGEQFF

SEQ ID NO: 773687 - protein, 14 aa, Homo sapiens
  CDR3 for alpha chain variable domain of TCR clone 386844 (TRAV1-1, TRAJ27)
CAVIYNTNAGKSTF

SEQ ID NO: 773688 - protein, 13 aa, Homo sapiens
  CDR3 for beta chain variable domain of TCR clone 386844 (TRBV7-6, TRBJ2-3)
CASSLAVGDTQYF

SEQ ID NO: 773689 - protein, 12 aa, Homo sapiens
  CDR3 for alpha chain variable domain of TCR clone 386845 (TRAV2, TRAJ15)
CAVAQAGTALIF

SEQ ID NO: 773690 - protein, 14 aa, Homo sapiens
  CDR3 for beta chain variable domain of TCR clone 386845 (TRBV28, TRBJ2-4)
CASRATGGENIQYF

SEQ ID NO: 773691 - protein, 16 aa, Homo sapiens
  CDR3 for alpha chain variable domain of TCR clone 386846 (TRAV13-1, TRAJ48)
CAASIFGNFGNEKLTF

SEQ ID NO: 773692 - protein, 13 aa, Homo sapiens
  CDR3 for beta chain variable domain of TCR clone 386846 (TRBV7-9, TRBJ1-2)
CASSLKQNYGDTF

SEQ ID NO: 773693 - protein, 15 aa, Homo sapiens
  CDR3 for alpha chain variable domain of TCR clone 386847 (TRAV8-3, TRAJ20)
CAVEAKGSNDYKLSF

SEQ ID NO: 773694 - protein, 14 aa, Homo sapiens
  CDR3 for beta chain variable domain of TCR clone 386847 (TRBV12-5, TRBJ2-5)
CASGSRTHQETQYF

SEQ ID NO: 773695 - protein, 14 aa, Homo sapiens
  CDR3 for alpha chain variable domain of TCR clone 386848 (TRAV1-2, TRAJ8)
CAVREDTGFQKLVF

SEQ ID NO: 773696 - protein, 14 aa, Homo sapiens
  CDR3 for beta chain variable domain of TCR clone 386848 (TRBV12-4, TRBJ1-2)
CASSLQGKGGGYTF

SEQ ID NO: 773697 - protein, 12 aa, Homo sapiens
  CDR3 for alpha chain variable domain of TCR clone 386849 (TRAV21, TRAJ33)
CAKMDSNYQLIW

SEQ ID NO: 773698 - protein, 16 aa, Homo sapiens
  CDR3 for beta chain variable domain of TCR clone 386849 (TRBV25-1, TRBJ1-1)
CASSGDRDRGRIEAFF

SEQ ID NO: 773699 - protein, 13 aa, Homo sapiens
  CDR3 for alpha chain variable domain of TCR clone 386850 (TRAV12-3, TRAJ9)
CAMRNTGGFKTIF

SEQ ID NO: 773700 - protein, 17 aa, Homo sapiens
  CDR3 for beta chain variable domain of TCR clone 386850 (TRBV7-3, TRBJ2-3)
CASSLMKRMRGADTQYF

SEQ ID NO: 773701 - protein, 23 aa, Homo sapiens
  CDR3 for alpha chain variable domain of TCR clone 386851 (TRAV8-3, TRAJ6)
CAVGGEEATYLHLEEEPAILFIL

SEQ ID NO: 773702 - protein, 17 aa, Homo sapiens
  CDR3 for beta chain variable domain of TCR clone 386851 (TRBV7-2, TRBJ2-3)
CASSLAGGLAGTAGQYF

SEQ ID NO: 773703 - protein, 12 aa, Homo sapiens
  CDR3 for alpha chain variable domain of TCR clone 386852 (TRAV13-1, TRAJ15)
CAASQAGTALIS

SEQ ID NO: 773704 - protein, 18 aa, Homo sapiens
  CDR3 for beta chain variable domain of TCR clone 386852 (TRBV7-9, TRBJ2-3)
CASSLPINGQISTDTQYF

SEQ ID NO: 773705 - protein, 13 aa, Homo sapiens
  CDR3 for alpha chain variable domain of TCR clone 386853 (TRAV20, TRAJ37)
CAGCSRNTGKLIF

SEQ ID NO: 773706 - protein, 15 aa, Homo sapiens
  CDR3 for beta chain variable domain of TCR clone 386853 (TRBV7-2, TRBJ2-1)
CASSFQADEYNEQFF

SEQ ID NO: 773707 - protein, 14 aa, Homo sapiens
  CDR3 for alpha chain variable domain of TCR clone 386854 (TRAV1-1, TRAJ28)
CAAPSGAGSYQLTF

SEQ ID NO: 773708 - protein, 17 aa, Homo sapiens
  CDR3 for beta chain variable domain of TCR clone 386854 (TRBV7-8, TRBJ2-6)
CASSAGTGGAGANVLTF

SEQ ID NO: 773709 - protein, 15 aa, Homo sapiens
  CDR3 for alpha chain variable domain of TCR clone 386855 (TRAV3, TRAJ13)
CAVRVYSGGYQKVTF

SEQ ID NO: 773710 - protein, 18 aa, Homo sapiens
  CDR3 for beta chain variable domain of TCR clone 386855 (TRBV4-3, TRBJ2-3)
CASSQSPPAGSSTDTQYF

SEQ ID NO: 773711 - protein, 13 aa, Homo sapiens
  CDR3 for alpha chain variable domain of TCR clone 386856 (TRAV20, TRAJ34)
CAVSSYNTDKLIF

SEQ ID NO: 773712 - protein, 10 aa, Homo sapiens
  CDR3 for beta chain variable domain of TCR clone 386856 (TRBV7-9, TRBJ1-2)
CASSLSRTMA

SEQ ID NO: 773713 - protein, 17 aa, Homo sapiens
  CDR3 for alpha chain variable domain of TCR clone 386857 (TRAV12-1, TRAJ53)
CVAGAIVGGGSNYKLTF

SEQ ID NO: 773714 - protein, 14 aa, Homo sapiens
  CDR3 for beta chain variable domain of TCR clone 386857 (TRBV5-1, TRBJ1-4)
CASSLDRTHDKLFF

SEQ ID NO: 773715 - protein, 14 aa, Homo sapiens
  CDR3 for alpha chain variable domain of TCR clone 386858 (TRAV8-4, TRAJ8)
CAVSVGTVFQKLVF

SEQ ID NO: 773716 - protein, 15 aa, Homo sapiens
  CDR3 for beta chain variable domain of TCR clone 386858 (TRBV2, TRBJ2-3)
CASSGEGTGTDTQYF

SEQ ID NO: 773717 - protein, 14 aa, Homo sapiens
  CDR3 for alpha chain variable domain of TCR clone 386859 (TRAV12-3, TRAJ10)
SHLPLTGGGNKLTF

SEQ ID NO: 773718 - protein, 13 aa, Homo sapiens
  CDR3 for beta chain variable domain of TCR clone 386859 (TRBV7-9, TRBJ2-3)
CASSTGSTDTQYF

SEQ ID NO: 773719 - protein, 17 aa, Homo sapiens
  CDR3 for alpha chain variable domain of TCR clone 386860 (TRAV3, TRAJ6)
CAVRDGPRAGGSYIPTF

SEQ ID NO: 773720 - protein, 20 aa, Homo sapiens
  CDR3 for beta chain variable domain of TCR clone 386860 (TRBV28, TRBJ2-1)
CASTPIGRSPGVAGGNEQFL

SEQ ID NO: 773721 - protein, 15 aa, Homo sapiens
  CDR3 for alpha chain variable domain of TCR clone 386861 (TRAV27, TRAJ45)
CAPVDSGGGADGLTF

SEQ ID NO: 773722 - protein, 13 aa, Homo sapiens
  CDR3 for beta chain variable domain of TCR clone 386861 (TRBV11-2, TRBJ2-7)
CASSPLGSYEQYF

SEQ ID NO: 773723 - protein, 14 aa, Homo sapiens
  CDR3 for alpha chain variable domain of TCR clone 386862 (TRAV38-1, TRAJ11)
CAFMKHEGYSTLTF

SEQ ID NO: 773724 - protein, 12 aa, Homo sapiens
  CDR3 for beta chain variable domain of TCR clone 386862 (TRBV10-3, TRBJ2-3)
CAISESPQARVF

SEQ ID NO: 773725 - protein, 15 aa, Homo sapiens
  CDR3 for alpha chain variable domain of TCR clone 386863 (TRAV26-1, TRAJ29)
CIVRVEGSGNTPLVF

SEQ ID NO: 773726 - protein, 14 aa, Homo sapiens
  CDR3 for beta chain variable domain of TCR clone 386863 (TRBV18, TRBJ2-5)
CASSPGVSQEAQSF

SEQ ID NO: 773727 - protein, 13 aa, Homo sapiens
  CDR3 for alpha chain variable domain of TCR clone 386864 (TRAV8-3, TRAJ36)
CAVGATGANNLFF

SEQ ID NO: 773728 - protein, 13 aa, Homo sapiens
  CDR3 for beta chain variable domain of TCR clone 386864 (TRBV12-4, TRBJ1-2)
CASSLRQGKGYSF

SEQ ID NO: 773729 - protein, 13 aa, Homo sapiens
  CDR3 for alpha chain variable domain of TCR clone 386865 (TRAV12-1, TRAJ26)
SATYLYYGQNFVF

SEQ ID NO: 773730 - protein, 12 aa, Homo sapiens
  CDR3 for beta chain variable domain of TCR clone 386865 (TRBV11-2, TRBJ2-2)
CASSLGGGELFF

SEQ ID NO: 773731 - protein, 15 aa, Homo sapiens
  CDR3 for alpha chain variable domain of TCR clone 386866 (TRAV21, TRAJ40)
CAVRPQTSGTYKSIF

SEQ ID NO: 773732 - protein, 15 aa, Homo sapiens
  CDR3 for beta chain variable domain of TCR clone 386866 (TRBV5-1, TRBJ2-3)
CASSVTSGSTDTQYF

SEQ ID NO: 773733 - protein, 10 aa, Homo sapiens
  CDR3 for alpha chain variable domain of TCR clone 386867 (TRAV16, TRAJ16)
CPGQKLLFAR

SEQ ID NO: 773734 - protein, 14 aa, Homo sapiens
  CDR3 for beta chain variable domain of TCR clone 386867 (TRBV4-1, TRBJ2-5)
CASSQERGRETQYF

SEQ ID NO: 773735 - protein, 14 aa, Homo sapiens
  CDR3 for alpha chain variable domain of TCR clone 386868 (TRAV12-2, TRAJ36)
CAVNPPTGANNLFF

SEQ ID NO: 773736 - protein, 14 aa, Homo sapiens
  CDR3 for beta chain variable domain of TCR clone 386868 (TRBV12-5, TRBJ2-5)
CASGPRTHQETQYF

SEQ ID NO: 773737 - protein, 14 aa, Homo sapiens
  CDR3 for alpha chain variable domain of TCR clone 386869 (TRAV1-2, TRAJ8)
CAVREDTGFHKLVF

SEQ ID NO: 773738 - protein, 17 aa, Homo sapiens
  CDR3 for beta chain variable domain of TCR clone 386869 (TRBV20-1, TRBJ2-2)
CSASGSGQGGLTGELFF

SEQ ID NO: 773739 - protein, 13 aa, Homo sapiens
  CDR3 for alpha chain variable domain of TCR clone 386870 (TRAV13-1, TRAJ21)
CAASIYNINKFYF

SEQ ID NO: 773740 - protein, 15 aa, Homo sapiens
  CDR3 for beta chain variable domain of TCR clone 386870 (TRBV7-8, TRBJ1-5)
CASSLAGQPNQPQHF

SEQ ID NO: 773741 - protein, 15 aa, Homo sapiens
  CDR3 for alpha chain variable domain of TCR clone 386871 (TRAV17, TRAJ6)
CATDLPSGGSYIPTF

SEQ ID NO: 773742 - protein, 16 aa, Homo sapiens
  CDR3 for beta chain variable domain of TCR clone 386871 (TRBV4-1, TRBJ2-7)
CASSQDPTGYPYEQYS

SEQ ID NO: 773743 - protein, 12 aa, Homo sapiens
  CDR3 for alpha chain variable domain of TCR clone 386872 (TRAV13-1, TRAJ21)
CAAKEGFNKFYF

SEQ ID NO: 773744 - protein, 11 aa, Homo sapiens
  CDR3 for beta chain variable domain of TCR clone 386872 (TRBV10-3, TRBJ2-7)
CAISEGLEQYF

SEQ ID NO: 773745 - protein, 11 aa, Homo sapiens
  CDR3 for alpha chain variable domain of TCR clone 386873 (TRAV13-1, TRAJ39)
CASHAGNMLTF

SEQ ID NO: 773746 - protein, 14 aa, Homo sapiens
  CDR3 for beta chain variable domain of TCR clone 386873 (TRBV11-2, TRBJ1-5)
CASSLDRGMQPQHF

SEQ ID NO: 773747 - protein, 13 aa, Homo sapiens
  CDR3 for alpha chain variable domain of TCR clone 386874 (TRAV3, TRAJ21)
CAVREPDFNKFYF

SEQ ID NO: 773748 - protein, 14 aa, Homo sapiens
  CDR3 for beta chain variable domain of TCR clone 386874 (TRBV7-2, TRBJ1-3)
CASSRGGTGNTIYF

SEQ ID NO: 773749 - protein, 14 aa, Homo sapiens
  CDR3 for alpha chain variable domain of TCR clone 386875 (TRAV3, TRAJ9)
CAVRLNTGGPKTIF

SEQ ID NO: 773750 - protein, 15 aa, Homo sapiens
  CDR3 for beta chain variable domain of TCR clone 386875 (TRBV7-2, TRBJ2-1)
CASSLASGRVNEQFF

SEQ ID NO: 773751 - protein, 10 aa, Homo sapiens
  CDR3 for alpha chain variable domain of TCR clone 386876 (TRAV13-2, TRAJ48)
WTLENEKLTF

SEQ ID NO: 773752 - protein, 15 aa, Homo sapiens
  CDR3 for beta chain variable domain of TCR clone 386876 (TRBV7-9, TRBJ1-6)
CASSSPGRGNSPLHF

SEQ ID NO: 773753 - protein, 13 aa, Homo sapiens
  CDR3 for alpha chain variable domain of TCR clone 386877 (TRAV12-2, TRAJ20)
CAVYPSNDCKPSF

SEQ ID NO: 773754 - protein, 15 aa, Homo sapiens
  CDR3 for beta chain variable domain of TCR clone 386877 (TRBV6-1, TRBJ2-5)
CASSEGWGIQETQYF

SEQ ID NO: 773755 - protein, 14 aa, Homo sapiens
  CDR3 for alpha chain variable domain of TCR clone 386878 (TRAV1-2, TRAJ8)
CAVREDTGFQKLVF

SEQ ID NO: 773756 - protein, 15 aa, Homo sapiens
  CDR3 for beta chain variable domain of TCR clone 386878 (TRBV7-3, TRBJ2-2)
CASGETGQGTGELFF

SEQ ID NO: 773757 - protein, 14 aa, Homo sapiens
  CDR3 for alpha chain variable domain of TCR clone 386879 (TRAV35, TRAJ39)
CAGQRGNAGNMLTF

SEQ ID NO: 773758 - protein, 11 aa, Homo sapiens
  CDR3 for beta chain variable domain of TCR clone 386879 (TRBV5-5, TRBJ2-2)
CASSLSRGEFF

SEQ ID NO: 773759 - protein, 15 aa, Homo sapiens
  CDR3 for alpha chain variable domain of TCR clone 386880 (TRAV16, TRAJ26)
CALSGQTGYGQNFVF

SEQ ID NO: 773760 - protein, 15 aa, Homo sapiens
  CDR3 for beta chain variable domain of TCR clone 386880 (TRBV7-9, TRBJ1-6)
CASSSPGRGNSPLHF

SEQ ID NO: 773761 - protein, 14 aa, Homo sapiens
  CDR3 for alpha chain variable domain of TCR clone 386881 (TRAV16, TRAJ17)
CAPRIKAAGNKLTF

SEQ ID NO: 773762 - protein, 12 aa, Homo sapiens
  CDR3 for beta chain variable domain of TCR clone 386881 (TRBV18, TRBJ2-1)
CASSSDEDEQFF

SEQ ID NO: 773763 - protein, 12 aa, Homo sapiens
  CDR3 for alpha chain variable domain of TCR clone 386882 (TRAV13-1, TRAJ49)
CASSIRGNQFYF

SEQ ID NO: 773764 - protein, 14 aa, Homo sapiens
  CDR3 for beta chain variable domain of TCR clone 386882 (TRBV12-4, TRBJ1-1)
CASSLDGLNTEAFF

SEQ ID NO: 773765 - protein, 12 aa, Homo sapiens
  CDR3 for alpha chain variable domain of TCR clone 386883 (TRAV12-2, TRAJ47)
RAVAEYGNKLVF

SEQ ID NO: 773766 - protein, 14 aa, Homo sapiens
  CDR3 for beta chain variable domain of TCR clone 386883 (TRBV20-1, TRBJ1-1)
CSAMGGTANTEAFF

SEQ ID NO: 773767 - protein, 12 aa, Homo sapiens
  CDR3 for alpha chain variable domain of TCR clone 386884 (TRAV12-3, TRAJ5)
CAMDTGRRALTF

SEQ ID NO: 773768 - protein, 13 aa, Homo sapiens
  CDR3 for beta chain variable domain of TCR clone 386884 (TRBV7-7, TRBJ2-2)
CASSLTSAGEPFF

SEQ ID NO: 773769 - protein, 16 aa, Homo sapiens
  CDR3 for alpha chain variable domain of TCR clone 386885 (TRAV26-1, TRAJ36)
CIVRVSYQTGANNLFF

SEQ ID NO: 773770 - protein, 16 aa, Homo sapiens
  CDR3 for beta chain variable domain of TCR clone 386885 (TRBV2, TRBJ2-6)
CASSETGGSGANVLTF

SEQ ID NO: 773771 - protein, 12 aa, Homo sapiens
  CDR3 for alpha chain variable domain of TCR clone 386886 (TRAV8-3, TRAJ20)
CAVGGGEYKLSF

SEQ ID NO: 773772 - protein, 14 aa, Homo sapiens
  CDR3 for beta chain variable domain of TCR clone 386886 (TRBV5-1, TRBJ2-7)
CASSRGESSYEQYF

SEQ ID NO: 773773 - protein, 16 aa, Homo sapiens
  CDR3 for alpha chain variable domain of TCR clone 386887 (TRAV1-2, TRAJ10)
CAVRGVLTGGGNKLTF

SEQ ID NO: 773774 - protein, 16 aa, Homo sapiens
  CDR3 for beta chain variable domain of TCR clone 386887 (TRBV28, TRBJ2-7)
CASSSGTSGRGYEQYF

SEQ ID NO: 773775 - protein, 13 aa, Homo sapiens
  CDR3 for alpha chain variable domain of TCR clone 386888 (TRAV12-3, TRAJ33)
CAMSVNTNYQLIW

SEQ ID NO: 773776 - protein, 16 aa, Homo sapiens
  CDR3 for beta chain variable domain of TCR clone 386888 (TRBV12-4, TRBJ1-5)
CASSRPVGGSNQPQHF

SEQ ID NO: 773777 - protein, 15 aa, Homo sapiens
  CDR3 for alpha chain variable domain of TCR clone 386889 (TRAV25, TRAJ52)
CAGSPGGTSYGKLTF

SEQ ID NO: 773778 - protein, 14 aa, Homo sapiens
  CDR3 for beta chain variable domain of TCR clone 386889 (TRBV11-2, TRBJ2-1)
CASSLEPSGRGKFF

SEQ ID NO: 773779 - protein, 14 aa, Homo sapiens
  CDR3 for alpha chain variable domain of TCR clone 386890 (TRAV12-2, TRAJ13)
CAVKKTGGYQKVTF

SEQ ID NO: 773780 - protein, 16 aa, Homo sapiens
  CDR3 for beta chain variable domain of TCR clone 386890 (TRBV4-2, TRBJ2-5)
CASSQELVGSQETQYF

SEQ ID NO: 773781 - protein, 16 aa, Homo sapiens
  CDR3 for alpha chain variable domain of TCR clone 386891 (TRAV13-1, TRAJ40)
CAASIATTSGTYKYIF

SEQ ID NO: 773782 - protein, 14 aa, Homo sapiens
  CDR3 for beta chain variable domain of TCR clone 386891 (TRBV6-1, TRBJ1-3)
CASVQGGGGNTMYF

SEQ ID NO: 773783 - protein, 14 aa, Homo sapiens
  CDR3 for alpha chain variable domain of TCR clone 386892 (TRAV13-2, TRAJ27)
CAEMQPTNAGKSTF

SEQ ID NO: 773784 - protein, 15 aa, Homo sapiens
  CDR3 for beta chain variable domain of TCR clone 386892 (TRBV7-2, TRBJ2-1)
CASSSGLAGGNEQFF

SEQ ID NO: 773785 - protein, 15 aa, Homo sapiens
  CDR3 for alpha chain variable domain of TCR clone 386893 (TRAV29/DV5, TRAJ29)
CAASERSSGNTPLVF

SEQ ID NO: 773786 - protein, 12 aa, Homo sapiens
  CDR3 for beta chain variable domain of TCR clone 386893 (TRBV7-9, TRBJ1-4)
CASSTDRDKLFF

SEQ ID NO: 773787 - protein, 12 aa, Homo sapiens
  CDR3 for alpha chain variable domain of TCR clone 386894 (TRAV30, TRAJ43)
CGTEERGNDMRF

SEQ ID NO: 773788 - protein, 17 aa, Homo sapiens
  CDR3 for beta chain variable domain of TCR clone 386894 (TRBV4-1, TRBJ1-4)
CASSHDGPRGVEEKLFF

SEQ ID NO: 773789 - protein, 13 aa, Homo sapiens
  CDR3 for alpha chain variable domain of TCR clone 386895 (TRAV12-2, TRAJ47)
CAVFTEYGNKLVF

SEQ ID NO: 773790 - protein, 14 aa, Homo sapiens
  CDR3 for beta chain variable domain of TCR clone 386895 (TRBV4-1, TRBJ1-5)
CASSQGPTNQPQHF

SEQ ID NO: 773791 - protein, 13 aa, Homo sapiens
  CDR3 for alpha chain variable domain of TCR clone 386896 (TRAV16, TRAJ10)
CALLTGGENKLTF

SEQ ID NO: 773792 - protein, 12 aa, Homo sapiens
  CDR3 for beta chain variable domain of TCR clone 386896 (TRBV28, TRBJ2-7)
CASTGNHYEQYF

SEQ ID NO: 773793 - protein, 12 aa, Homo sapiens
  CDR3 for alpha chain variable domain of TCR clone 386897 (TRAV13-2, TRAJ23)
CAERHRGGKLIF

SEQ ID NO: 773794 - protein, 13 aa, Homo sapiens
  CDR3 for beta chain variable domain of TCR clone 386897 (TRBV20-1, TRBJ2-5)
CSAATELQEAQYF

SEQ ID NO: 773795 - protein, 16 aa, Homo sapiens
  CDR3 for alpha chain variable domain of TCR clone 386898 (TRAV3, TRAJ37)
CAVRPHGSGNTGKLFF

SEQ ID NO: 773796 - protein, 16 aa, Homo sapiens
  CDR3 for beta chain variable domain of TCR clone 386898 (TRBV9, TRBJ1-2)
CASSVEEKVSPYGYTF

SEQ ID NO: 773797 - protein, 14 aa, Homo sapiens
  CDR3 for alpha chain variable domain of TCR clone 386899 (TRAV1-2, TRAJ8)
CAVREDTGFQRLVF

SEQ ID NO: 773798 - protein, 14 aa, Homo sapiens
  CDR3 for beta chain variable domain of TCR clone 386899 (TRBV11-2, TRBJ2-3)
CASSRLARTDTQYF

SEQ ID NO: 773799 - protein, 14 aa, Homo sapiens
  CDR3 for alpha chain variable domain of TCR clone 386900 (TRAV1-2, TRAJ16)
CAVNRFPDGQKLLF

SEQ ID NO: 773800 - protein, 15 aa, Homo sapiens
  CDR3 for beta chain variable domain of TCR clone 386900 (TRBV20-1, TRBJ2-5)
CSAEGTGGLQETQYF

SEQ ID NO: 773801 - protein, 14 aa, Homo sapiens
  CDR3 for alpha chain variable domain of TCR clone 386901 (TRAV12-3, TRAJ10)
SHLPLTGRGNKLTF

SEQ ID NO: 773802 - protein, 12 aa, Homo sapiens
  CDR3 for beta chain variable domain of TCR clone 386901 (TRBV7-8, TRBJ2-7)
CASSLGDREQYF

SEQ ID NO: 773803 - protein, 14 aa, Homo sapiens
  CDR3 for alpha chain variable domain of TCR clone 386902 (TRAV12-2, TRAJ17)
CAVLFKAACNKLTF

SEQ ID NO: 773804 - protein, 15 aa, Homo sapiens
  CDR3 for beta chain variable domain of TCR clone 386902 (TRBV20-1, TRBJ2-7)
CSARDRVSGMDEQYF

SEQ ID NO: 773805 - protein, 15 aa, Homo sapiens
  CDR3 for alpha chain variable domain of TCR clone 386903 (TRAV8-3, TRAJ40)
CATPSLGSGTYNYIF

SEQ ID NO: 773806 - protein, 16 aa, Homo sapiens
  CDR3 for beta chain variable domain of TCR clone 386903 (TRBV7-3, TRBJ2-3)
CASSLSGYRPEDTQYF

SEQ ID NO: 773807 - protein, 15 aa, Homo sapiens
  CDR3 for alpha chain variable domain of TCR clone 386904 (TRAV26-1, TRAJ29)
CIVRVEGSGNTPLVF

SEQ ID NO: 773808 - protein, 15 aa, Homo sapiens
  CDR3 for beta chain variable domain of TCR clone 386904 (TRBV7-9, TRBJ1-5)
CASSHGHQPNQTQHF

SEQ ID NO: 773809 - protein, 14 aa, Homo sapiens
  CDR3 for alpha chain variable domain of TCR clone 386905 (TRAV26-1, TRAJ21)
CFVRPPYNFNKFYF

SEQ ID NO: 773810 - protein, 14 aa, Homo sapiens
  CDR3 for beta chain variable domain of TCR clone 386905 (TRBV19, TRBJ2-1)
CASPTFVLSGEQFF

SEQ ID NO: 773811 - protein, 14 aa, Homo sapiens
  CDR3 for alpha chain variable domain of TCR clone 386906 (TRAV20, TRAJ56)
CAVQFGGANSKLTF

SEQ ID NO: 773812 - protein, 14 aa, Homo sapiens
  CDR3 for beta chain variable domain of TCR clone 386906 (TRBV20-1, TRBJ2-7)
CSDKRGRSSYEQYF

SEQ ID NO: 773813 - protein, 17 aa, Homo sapiens
  CDR3 for alpha chain variable domain of TCR clone 386907 (TRAV8-3, TRAJ50)
CAVGAVDTETSYDKVIF

SEQ ID NO: 773814 - protein, 14 aa, Homo sapiens
  CDR3 for beta chain variable domain of TCR clone 386907 (TRBV7-3, TRBJ1-1)
CASSLGTGYTEAFF

SEQ ID NO: 773815 - protein, 13 aa, Homo sapiens
  CDR3 for alpha chain variable domain of TCR clone 386908 (TRAV1-1, TRAJ38)
CASNAGNNCKLIW

SEQ ID NO: 773816 - protein, 14 aa, Homo sapiens
  CDR3 for beta chain variable domain of TCR clone 386908 (TRBV15, TRBJ2-1)
CATSGVEDYNEQFF

SEQ ID NO: 773817 - protein, 17 aa, Homo sapiens
  CDR3 for alpha chain variable domain of TCR clone 386909 (TRAV26-1, TRAJ53)
CIVRLDGSGGSNYKLTF

SEQ ID NO: 773818 - protein, 15 aa, Homo sapiens
  CDR3 for beta chain variable domain of TCR clone 386909 (TRBV20-1, TRBJ2-7)
CSARVPAAYFYEQYF

SEQ ID NO: 773819 - protein, 15 aa, Homo sapiens
  CDR3 for alpha chain variable domain of TCR clone 386910 (TRAV29/DV5, TRAJ53)
CAARYSVGSNYKLTF

SEQ ID NO: 773820 - protein, 15 aa, Homo sapiens
  CDR3 for beta chain variable domain of TCR clone 386910 (TRBV28, TRBJ2-1)
CASSLGTRLYNEQFF

SEQ ID NO: 773821 - protein, 15 aa, Homo sapiens
  CDR3 for alpha chain variable domain of TCR clone 386911 (TRAV20, TRAJ4)
CAVEGSSGGYNKLIF

SEQ ID NO: 773822 - protein, 14 aa, Homo sapiens
  CDR3 for beta chain variable domain of TCR clone 386911 (TRBV7-8, TRBJ2-7)
CASTRGGALGEQYF

SEQ ID NO: 773823 - protein, 16 aa, Homo sapiens
  CDR3 for alpha chain variable domain of TCR clone 386912 (TRAV8-1, TRAJ39)
CAVNVPSYNAGNMLTF

SEQ ID NO: 773824 - protein, 15 aa, Homo sapiens
  CDR3 for beta chain variable domain of TCR clone 386912 (TRBV4-1, TRBJ2-3)
CASRSTGAGTDTQYF

SEQ ID NO: 773825 - protein, 15 aa, Homo sapiens
  CDR3 for alpha chain variable domain of TCR clone 386913 (TRAV21, TRAJ53)
CATLNSGGSNYKLTF

SEQ ID NO: 773826 - protein, 20 aa, Homo sapiens
  CDR3 for beta chain variable domain of TCR clone 386913 (TRBV4-3, TRBJ2-4)
CASSQGRWTGGLRSLNIQYF

SEQ ID NO: 773827 - protein, 13 aa, Homo sapiens
  CDR3 for alpha chain variable domain of TCR clone 386914 (TRAV2, TRAJ40)
CAVVTSGTYKYIF

SEQ ID NO: 773828 - protein, 13 aa, Homo sapiens
  CDR3 for beta chain variable domain of TCR clone 386914 (TRBV7-9, TRBJ2-5)
CTSLPSGRETQYF

SEQ ID NO: 773829 - protein, 13 aa, Homo sapiens
  CDR3 for alpha chain variable domain of TCR clone 386915 (TRAV12-1, TRAJ39)
CVVPQRAGNMLTF

SEQ ID NO: 773830 - protein, 14 aa, Homo sapiens
  CDR3 for beta chain variable domain of TCR clone 386915 (TRBV25-1, TRBJ1-1)
CASTHLGGNTEAFF

SEQ ID NO: 773831 - protein, 16 aa, Homo sapiens
  CDR3 for alpha chain variable domain of TCR clone 386916 (TRAV21, TRAJ17)
CTVRPGEEAAGNKLTF

SEQ ID NO: 773832 - protein, 16 aa, Homo sapiens
  CDR3 for beta chain variable domain of TCR clone 386916 (TRBV2, TRBJ2-7)
CASSEPWTGPSYEQYF

SEQ ID NO: 773833 - protein, 12 aa, Homo sapiens
  CDR3 for alpha chain variable domain of TCR clone 386917 (TRAV12-3, TRAJ17)
CAMMLTGNKLTF

SEQ ID NO: 773834 - protein, 13 aa, Homo sapiens
  CDR3 for beta chain variable domain of TCR clone 386917 (TRBV7-2, TRBJ2-2)
CASSLAVTGELFF

SEQ ID NO: 773835 - protein, 11 aa, Homo sapiens
  CDR3 for alpha chain variable domain of TCR clone 386918 (TRAV13-2, TRAJ20)
CSDSNDYKLSF

SEQ ID NO: 773836 - protein, 12 aa, Homo sapiens
  CDR3 for beta chain variable domain of TCR clone 386918 (TRBV11-2, TRBJ2-2)
CASSLGGGELFF

SEQ ID NO: 773837 - protein, 12 aa, Homo sapiens
  CDR3 for alpha chain variable domain of TCR clone 386919 (TRAV1-1, TRAJ8)
CAGGTGFQKLVF

SEQ ID NO: 773838 - protein, 14 aa, Homo sapiens
  CDR3 for beta chain variable domain of TCR clone 386919 (TRBV7-3, TRBJ2-1)
CASSLAGGTNEQFF

SEQ ID NO: 773839 - protein, 11 aa, Homo sapiens
  CDR3 for alpha chain variable domain of TCR clone 386920 (TRAV35, TRAJ30)
CAPGGDDKIIF

SEQ ID NO: 773840 - protein, 14 aa, Homo sapiens
  CDR3 for beta chain variable domain of TCR clone 386920 (TRBV7-6, TRBJ2-1)
CASSLGGGQMSSSP

SEQ ID NO: 773841 - protein, 17 aa, Homo sapiens
  CDR3 for alpha chain variable domain of TCR clone 386921 (TRAV8-3, TRAJ50)
CAVGAVDTETSYDKVIF

SEQ ID NO: 773842 - protein, 13 aa, Homo sapiens
  CDR3 for beta chain variable domain of TCR clone 386921 (TRBV7-9, TRBJ2-2)
CAISSAGTGELFF

SEQ ID NO: 773843 - protein, 14 aa, Homo sapiens
  CDR3 for alpha chain variable domain of TCR clone 386922 (TRAV8-6, TRAJ30)
CAVSFVNRDDKIIF

SEQ ID NO: 773844 - protein, 13 aa, Homo sapiens
  CDR3 for beta chain variable domain of TCR clone 386922 (TRBV19, TRBJ2-7)
CASSPRQSYEQYF

SEQ ID NO: 773845 - protein, 16 aa, Homo sapiens
  CDR3 for alpha chain variable domain of TCR clone 386923 (TRAV30, TRAJ24)
CGTEIMDADSWGKFQF

SEQ ID NO: 773846 - protein, 14 aa, Homo sapiens
  CDR3 for beta chain variable domain of TCR clone 386923 (TRBV5-5, TRBJ1-2)
CASSLDPYNYGYTF

SEQ ID NO: 773847 - protein, 12 aa, Homo sapiens
  CDR3 for alpha chain variable domain of TCR clone 386924 (TRAV40, TRAJ20)
CLRGLNDYKLSF

SEQ ID NO: 773848 - protein, 13 aa, Homo sapiens
  CDR3 for beta chain variable domain of TCR clone 386924 (TRBV19, TRBJ1-3)
CASRLSLGNTIYF

SEQ ID NO: 773849 - protein, 12 aa, Homo sapiens
  CDR3 for alpha chain variable domain of TCR clone 386925 (TRAV13-1, TRAJ20)
CAASRGDYKLSF

SEQ ID NO: 773850 - protein, 14 aa, Homo sapiens
  CDR3 for beta chain variable domain of TCR clone 386925 (TRBV20-1, TRBJ2-7)
CSAKRGRSSYEQYF

SEQ ID NO: 773851 - protein, 13 aa, Homo sapiens
  CDR3 for alpha chain variable domain of TCR clone 386926 (TRAV3, TRAJ21)
CAVREPDFNKFYF

SEQ ID NO: 773852 - protein, 15 aa, Homo sapiens
  CDR3 for beta chain variable domain of TCR clone 386926 (TRBV2, TRBJ2-1)
CASSELAGGYNEQFV

SEQ ID NO: 773853 - protein, 14 aa, Homo sapiens
  CDR3 for alpha chain variable domain of TCR clone 386927 (TRAV26-1, TRAJ38)
CIANNAGNNRQLIW

SEQ ID NO: 773854 - protein, 13 aa, Homo sapiens
  CDR3 for beta chain variable domain of TCR clone 386927 (TRBV20-1, TRBJ1-1)
CSARGGGNTEAFF

SEQ ID NO: 773855 - protein, 14 aa, Homo sapiens
  CDR3 for alpha chain variable domain of TCR clone 386928 (TRAV12-2, TRAJ40)
CAVKIPSGTYKYIF

SEQ ID NO: 773856 - protein, 15 aa, Homo sapiens
  CDR3 for beta chain variable domain of TCR clone 386928 (TRBV20-1, TRBJ1-4)
CSARREWGVDEKLFF

SEQ ID NO: 773857 - protein, 11 aa, Homo sapiens
  CDR3 for alpha chain variable domain of TCR clone 386929 (TRAV21, TRAJ9)
CAVTGGFKTIF

SEQ ID NO: 773858 - protein, 12 aa, Homo sapiens
  CDR3 for beta chain variable domain of TCR clone 386929 (TRBV20-1, TRBJ2-3)
CSARVGTDTQYF

SEQ ID NO: 773859 - protein, 14 aa, Homo sapiens
  CDR3 for alpha chain variable domain of TCR clone 386930 (TRAV1-2, TRAJ16)
CAVNRFSDGPKLLF

SEQ ID NO: 773860 - protein, 14 aa, Homo sapiens
  CDR3 for beta chain variable domain of TCR clone 386930 (TRBV19, TRBJ2-2)
CASSTLHRSGELFF

SEQ ID NO: 773861 - protein, 13 aa, Homo sapiens
  CDR3 for alpha chain variable domain of TCR clone 386931 (TRAV8-3, TRAJ31)
CAVGARNNAKLMF

SEQ ID NO: 773862 - protein, 16 aa, Homo sapiens
  CDR3 for beta chain variable domain of TCR clone 386931 (TRBV18, TRBJ1-3)
CASSLGILNGENTIYF

SEQ ID NO: 773863 - protein, 13 aa, Homo sapiens
  CDR3 for alpha chain variable domain of TCR clone 386932 (TRAV30, TRAJ24)
CGTVTDRWGKLQF

SEQ ID NO: 773864 - protein, 15 aa, Homo sapiens
  CDR3 for beta chain variable domain of TCR clone 386932 (TRBV19, TRBJ1-1)
CASTSGQIENTEAFF

SEQ ID NO: 773865 - protein, 12 aa, Homo sapiens
  CDR3 for alpha chain variable domain of TCR clone 386933 (TRAV23/DV6, TRAJ27)
CAASKSAGKSTF

SEQ ID NO: 773866 - protein, 13 aa, Homo sapiens
  CDR3 for beta chain variable domain of TCR clone 386933 (TRBV12-4, TRBJ1-2)
CASSLRQGKGYTF

SEQ ID NO: 773867 - protein, 12 aa, Homo sapiens
  CDR3 for alpha chain variable domain of TCR clone 386934 (TRAV26-2, TRAJ21)
CILKGNFNKFYF

SEQ ID NO: 773868 - protein, 12 aa, Homo sapiens
  CDR3 for beta chain variable domain of TCR clone 386934 (TRBV11-2, TRBJ2-4)
CASSSASGSEYF

SEQ ID NO: 773869 - protein, 12 aa, Homo sapiens
  CDR3 for alpha chain variable domain of TCR clone 386935 (TRAV1-1, TRAJ24)
FAVRGSWGKFQF

SEQ ID NO: 773870 - protein, 14 aa, Homo sapiens
  CDR3 for beta chain variable domain of TCR clone 386935 (TRBV20-1, TRBJ2-3)
CSARGGTSTDTQYF

SEQ ID NO: 773871 - protein, 11 aa, Homo sapiens
  CDR3 for alpha chain variable domain of TCR clone 386936 (TRAV1-2, TRAJ11)
CAVRGYSTLTF

SEQ ID NO: 773872 - protein, 14 aa, Homo sapiens
  CDR3 for beta chain variable domain of TCR clone 386936 (TRBV5-1, TRBJ2-1)
CASSALWAGNEQFF

SEQ ID NO: 773873 - protein, 14 aa, Homo sapiens
  CDR3 for alpha chain variable domain of TCR clone 386937 (TRAV12-2, TRAJ45)
CAGNIGGGADGLTF

SEQ ID NO: 773874 - protein, 13 aa, Homo sapiens
  CDR3 for beta chain variable domain of TCR clone 386937 (TRBV19, TRBJ2-2)
CAGSIWSTGELFF

SEQ ID NO: 773875 - protein, 14 aa, Homo sapiens
  CDR3 for alpha chain variable domain of TCR clone 386938 (TRAV12-3, TRAJ10)
SHLPLTGGGNKLTF

SEQ ID NO: 773876 - protein, 15 aa, Homo sapiens
  CDR3 for beta chain variable domain of TCR clone 386938 (TRBV27, TRBJ1-5)
CASSLGTEFDQPQHF

SEQ ID NO: 773877 - protein, 12 aa, Homo sapiens
  CDR3 for alpha chain variable domain of TCR clone 386939 (TRAV17, TRAJ57)
CATDGGTEKLVF

SEQ ID NO: 773878 - protein, 13 aa, Homo sapiens
  CDR3 for beta chain variable domain of TCR clone 386939 (TRBV7-9, TRBJ2-7)
CASSFAGAYEQYL

SEQ ID NO: 773879 - protein, 11 aa, Homo sapiens
  CDR3 for alpha chain variable domain of TCR clone 386940 (TRAV12-2, TRAJ49)
CAVHTGNQFYF

SEQ ID NO: 773880 - protein, 20 aa, Homo sapiens
  CDR3 for beta chain variable domain of TCR clone 386940 (TRBV7-8, TRBJ2-2)
CASSHLFPGPTIHITGELFF

SEQ ID NO: 773881 - protein, 13 aa, Homo sapiens
  CDR3 for alpha chain variable domain of TCR clone 386941 (TRAV1-2, TRAJ27)
CAVFNTNAGKSTF

SEQ ID NO: 773882 - protein, 17 aa, Homo sapiens
  CDR3 for beta chain variable domain of TCR clone 386941 (TRBV11-2, TRBJ2-4)
CASSLGGGEGGKNIQYF

SEQ ID NO: 773883 - protein, 15 aa, Homo sapiens
  CDR3 for alpha chain variable domain of TCR clone 386942 (TRAV16, TRAJ20)
CALKGGLRADYKPSF

SEQ ID NO: 773884 - protein, 16 aa, Homo sapiens
  CDR3 for beta chain variable domain of TCR clone 386942 (TRBV11-3, TRBJ2-2)
CASSSRTSPGTEELFF

SEQ ID NO: 773885 - protein, 10 aa, Homo sapiens
  CDR3 for alpha chain variable domain of TCR clone 386943 (TRAV23/DV6, TRAJ57)
CAASSTLSQA

SEQ ID NO: 773886 - protein, 14 aa, Homo sapiens
  CDR3 for beta chain variable domain of TCR clone 386943 (TRBV25-1, TRBJ1-1)
CASTDLGGNTEAFF

SEQ ID NO: 773887 - protein, 19 aa, Homo sapiens
  CDR3 for alpha chain variable domain of TCR clone 386944 (TRAV1-2, TRAJ26)
CLLPLCCERPDNYGQNFVF

SEQ ID NO: 773888 - protein, 13 aa, Homo sapiens
  CDR3 for beta chain variable domain of TCR clone 386944 (TRBV19, TRBJ1-2)
CASSQGQVYGYIF

SEQ ID NO: 773889 - protein, 15 aa, Homo sapiens
  CDR3 for alpha chain variable domain of TCR clone 386945 (TRAV3, TRAJ22)
CAVRDRGGSARQLTF

SEQ ID NO: 773890 - protein, 15 aa, Homo sapiens
  CDR3 for beta chain variable domain of TCR clone 386945 (TRBV19, TRBJ2-5)
CASSIVRASQENQYF

SEQ ID NO: 773891 - protein, 13 aa, Homo sapiens
  CDR3 for alpha chain variable domain of TCR clone 386946 (TRAV22, TRAJ7)
CAVEFYGNNRLAF

SEQ ID NO: 773892 - protein, 14 aa, Homo sapiens
  CDR3 for beta chain variable domain of TCR clone 386946 (TRBV12-5, TRBJ2-5)
CASGSRTHQETQYF

SEQ ID NO: 773893 - protein, 12 aa, Homo sapiens
  CDR3 for alpha chain variable domain of TCR clone 386947 (TRAV21, TRAJ42)
CAVGGSQGNLIF

SEQ ID NO: 773894 - protein, 14 aa, Homo sapiens
  CDR3 for beta chain variable domain of TCR clone 386947 (TRBV12-4, TRBJ1-1)
CASSLGTGGTEAFC

SEQ ID NO: 773895 - protein, 14 aa, Homo sapiens
  CDR3 for alpha chain variable domain of TCR clone 386948 (TRAV25, TRAJ44)
CAVFPTGTASKPTF

SEQ ID NO: 773896 - protein, 14 aa, Homo sapiens
  CDR3 for beta chain variable domain of TCR clone 386948 (TRBV19, TRBJ1-1)
CASTGHRLNTEAFF

SEQ ID NO: 773897 - protein, 10 aa, Homo sapiens
  CDR3 for alpha chain variable domain of TCR clone 386949 (TRAV17, TRAJ56)
TPGANSKLTF

SEQ ID NO: 773898 - protein, 15 aa, Homo sapiens
  CDR3 for beta chain variable domain of TCR clone 386949 (TRBV27, TRBJ2-7)
CASSLFGTGLDEQYF

SEQ ID NO: 773899 - protein, 12 aa, Homo sapiens
  CDR3 for alpha chain variable domain of TCR clone 386950 (TRAV8-3, TRAJ20)
CAVGANDYKLSF

SEQ ID NO: 773900 - protein, 13 aa, Homo sapiens
  CDR3 for beta chain variable domain of TCR clone 386950 (TRBV7-2, TRBJ2-2)
CASSSVRAWELFF

SEQ ID NO: 773901 - protein, 12 aa, Homo sapiens
  CDR3 for alpha chain variable domain of TCR clone 386951 (TRAV3, TRAJ27)
CAVRDGAGKSTF

SEQ ID NO: 773902 - protein, 13 aa, Homo sapiens
  CDR3 for beta chain variable domain of TCR clone 386951 (TRBV10-3, TRBJ1-2)
CAINSDLNYGYTF

SEQ ID NO: 773903 - protein, 13 aa, Homo sapiens
  CDR3 for alpha chain variable domain of TCR clone 386952 (TRAV2, TRAJ40)
CAVVTSGTYRYIF

SEQ ID NO: 773904 - protein, 13 aa, Homo sapiens
  CDR3 for beta chain variable domain of TCR clone 386952 (TRBV19, TRBJ2-1)
CQSDFRLSGEQFF

SEQ ID NO: 773905 - protein, 16 aa, Homo sapiens
  CDR3 for alpha chain variable domain of TCR clone 386953 (TRAV30, TRAJ24)
CGTEIVDADSWGKFQV

SEQ ID NO: 773906 - protein, 14 aa, Homo sapiens
  CDR3 for beta chain variable domain of TCR clone 386953 (TRBV18, TRBJ2-3)
CASSPRTSTDTQYF

SEQ ID NO: 773907 - protein, 14 aa, Homo sapiens
  CDR3 for alpha chain variable domain of TCR clone 386954 (TRAV36/DV7, TRAJ40)
CAVETTSGTYKYIF

SEQ ID NO: 773908 - protein, 14 aa, Homo sapiens
  CDR3 for beta chain variable domain of TCR clone 386954 (TRBV2, TRBJ2-3)
CASSEGQNTDTQYF

SEQ ID NO: 773909 - protein, 12 aa, Homo sapiens
  CDR3 for alpha chain variable domain of TCR clone 386955 (TRAV13-1, TRAJ49)
CAASIRSNQFSF

SEQ ID NO: 773910 - protein, 14 aa, Homo sapiens
  CDR3 for beta chain variable domain of TCR clone 386955 (TRBV12-5, TRBJ2-5)
CASGSRTHQETQYF

SEQ ID NO: 773911 - protein, 12 aa, Homo sapiens
  CDR3 for alpha chain variable domain of TCR clone 386956 (TRAV12-2, TRAJ10)
WGVTGGGNKITF

SEQ ID NO: 773912 - protein, 14 aa, Homo sapiens
  CDR3 for beta chain variable domain of TCR clone 386956 (TRBV27, TRBJ2-7)
CASATGTERREQYF

SEQ ID NO: 773913 - protein, 15 aa, Homo sapiens
  CDR3 for alpha chain variable domain of TCR clone 386957 (TRAV16, TRAJ16)
CALQGGGPDGQKLLF

SEQ ID NO: 773914 - protein, 13 aa, Homo sapiens
  CDR3 for beta chain variable domain of TCR clone 386957 (TRBV12-5, TRBJ2-3)
CASGDRQSDTRYF

SEQ ID NO: 773915 - protein, 11 aa, Homo sapiens
  CDR3 for alpha chain variable domain of TCR clone 386958 (TRAV13-1, TRAJ15)
WAATPGTALIF

SEQ ID NO: 773916 - protein, 17 aa, Homo sapiens
  CDR3 for beta chain variable domain of TCR clone 386958 (TRBV13, TRBJ2-3)
CASSLSRVAGGRNTQYF

SEQ ID NO: 773917 - protein, 12 aa, Homo sapiens
  CDR3 for alpha chain variable domain of TCR clone 386959 (TRAV21, TRAJ31)
SAVWGNNARLMF

SEQ ID NO: 773918 - protein, 16 aa, Homo sapiens
  CDR3 for beta chain variable domain of TCR clone 386959 (TRBV27, TRBJ2-5)
SASSYGPGGQKETQYF

SEQ ID NO: 773919 - protein, 16 aa, Homo sapiens
  CDR3 for alpha chain variable domain of TCR clone 386960 (TRAV14/DV4, TRAJ10)
CAMREGRPGGGNKLTF

SEQ ID NO: 773920 - protein, 16 aa, Homo sapiens
  CDR3 for beta chain variable domain of TCR clone 386960 (TRBV12-5, TRBJ2-5)
CASGPRTSGNQETQYF

SEQ ID NO: 773921 - protein, 11 aa, Homo sapiens
  CDR3 for alpha chain variable domain of TCR clone 386961 (TRAV13-1, TRAJ23)
CSASSRGKLIF

SEQ ID NO: 773922 - protein, 13 aa, Homo sapiens
  CDR3 for beta chain variable domain of TCR clone 386961 (TRBV7-3, TRBJ2-5)
CASSFRGGETQYF

SEQ ID NO: 773923 - protein, 14 aa, Homo sapiens
  CDR3 for alpha chain variable domain of TCR clone 386962 (TRAV3, TRAJ36)
CAVRGGTGANNLFF

SEQ ID NO: 773924 - protein, 16 aa, Homo sapiens
  CDR3 for beta chain variable domain of TCR clone 386962 (TRBV7-3, TRBJ2-5)
CASIQPGGSVQETQYF

SEQ ID NO: 773925 - protein, 18 aa, Homo sapiens
  CDR3 for alpha chain variable domain of TCR clone 386963 (TRAV26-1, TRAJ5)
CIVRVVPPRDTGRRALTF

SEQ ID NO: 773926 - protein, 14 aa, Homo sapiens
  CDR3 for beta chain variable domain of TCR clone 386963 (TRBV7-9, TRBJ2-7)
CSSLPMGQANEQYF

SEQ ID NO: 773927 - protein, 12 aa, Homo sapiens
  CDR3 for alpha chain variable domain of TCR clone 386964 (TRAV8-3, TRAJ20)
CGVDFKDYKLSF

SEQ ID NO: 773928 - protein, 12 aa, Homo sapiens
  CDR3 for beta chain variable domain of TCR clone 386964 (TRBV12-4, TRBJ1-3)
CASSFSGNTIYF

SEQ ID NO: 773929 - protein, 12 aa, Homo sapiens
  CDR3 for alpha chain variable domain of TCR clone 386965 (TRAV12-1, TRAJ40)
CVVYSGTYKYIF

SEQ ID NO: 773930 - protein, 15 aa, Homo sapiens
  CDR3 for beta chain variable domain of TCR clone 386965 (TRBV7-2, TRBJ1-2)
CASSITWTGDYGYTF

SEQ ID NO: 773931 - protein, 15 aa, Homo sapiens
  CDR3 for alpha chain variable domain of TCR clone 386966 (TRAV26-1, TRAJ29)
CIIRVEGSGKTPLVF

SEQ ID NO: 773932 - protein, 15 aa, Homo sapiens
  CDR3 for beta chain variable domain of TCR clone 386966 (TRBV7-9, TRBJ1-5)
CASSQGHQPNQPQHF

SEQ ID NO: 773933 - protein, 14 aa, Homo sapiens
  CDR3 for alpha chain variable domain of TCR clone 386967 (TRAV1-2, TRAJ8)
CAVREDTGFQKLVV

SEQ ID NO: 773934 - protein, 16 aa, Homo sapiens
  CDR3 for beta chain variable domain of TCR clone 386967 (TRBV15, TRBJ2-3)
CATSRDLGIVTDTQYF

SEQ ID NO: 773935 - protein, 14 aa, Homo sapiens
  CDR3 for alpha chain variable domain of TCR clone 386968 (TRAV12-3, TRAJ54)
CAMRGIQGAKKLVF

SEQ ID NO: 773936 - protein, 13 aa, Homo sapiens
  CDR3 for beta chain variable domain of TCR clone 386968 (TRBV19, TRBJ1-1)
CASSPSNGGQAFF

SEQ ID NO: 773937 - protein, 15 aa, Homo sapiens
  CDR3 for alpha chain variable domain of TCR clone 386969 (TRAV3, TRAJ22)
CAVRDRGGSARQLTF

SEQ ID NO: 773938 - protein, 13 aa, Homo sapiens
  CDR3 for beta chain variable domain of TCR clone 386969 (TRBV3-1, TRBJ2-2)
CASLARGSGELFF

SEQ ID NO: 773939 - protein, 14 aa, Homo sapiens
  CDR3 for alpha chain variable domain of TCR clone 386970 (TRAV9-2, TRAJ39)
CALYIYNAGNMLTF

SEQ ID NO: 773940 - protein, 15 aa, Homo sapiens
  CDR3 for beta chain variable domain of TCR clone 386970 (TRBV18, TRBJ2-3)
CASSPPMAGRDTQYF

SEQ ID NO: 773941 - protein, 21 aa, Homo sapiens
  CDR3 for alpha chain variable domain of TCR clone 386971 (TRAV1-1, TRAJ6)
CLLLLRCERLERTGGSYIPTF

SEQ ID NO: 773942 - protein, 18 aa, Homo sapiens
  CDR3 for beta chain variable domain of TCR clone 386971 (TRBV12-4, TRBJ2-2)
CASSLVAGTRGRTGELFF

SEQ ID NO: 773943 - protein, 17 aa, Homo sapiens
  CDR3 for alpha chain variable domain of TCR clone 386972 (TRAV3, TRAJ6)
CAVRDGPRAGGSYIPTF

SEQ ID NO: 773944 - protein, 15 aa, Homo sapiens
  CDR3 for beta chain variable domain of TCR clone 386972 (TRBV27, TRBJ2-1)
CASSLRAGIPGEQFF

SEQ ID NO: 773945 - protein, 14 aa, Homo sapiens
  CDR3 for alpha chain variable domain of TCR clone 386973 (TRAV20, TRAJ56)
CDVQFGGANSKLTV

SEQ ID NO: 773946 - protein, 14 aa, Homo sapiens
  CDR3 for beta chain variable domain of TCR clone 386973 (TRBV20-1, TRBJ2-7)
CSAKRGRSSYEQYF

SEQ ID NO: 773947 - protein, 15 aa, Homo sapiens
  CDR3 for alpha chain variable domain of TCR clone 386974 (TRAV1-2, TRAJ15)
CAVEAANQAGTALIF

SEQ ID NO: 773948 - protein, 13 aa, Homo sapiens
  CDR3 for beta chain variable domain of TCR clone 386974 (TRBV7-8, TRBJ2-7)
CASSLTGGREQYF

SEQ ID NO: 773949 - protein, 16 aa, Homo sapiens
  CDR3 for alpha chain variable domain of TCR clone 386975 (TRAV26-1, TRAJ37)
CIVRVEGSGNTGKLIF

SEQ ID NO: 773950 - protein, 17 aa, Homo sapiens
  CDR3 for beta chain variable domain of TCR clone 386975 (TRBV4-1, TRBJ2-7)
CASSRDPLGVRGGEQYF

SEQ ID NO: 773951 - protein, 17 aa, Homo sapiens
  CDR3 for alpha chain variable domain of TCR clone 386976 (TRAV3, TRAJ42)
CAVRDRDYGGSQGNLIF

SEQ ID NO: 773952 - protein, 14 aa, Homo sapiens
  CDR3 for beta chain variable domain of TCR clone 386976 (TRBV7-2, TRBJ1-3)
CASSLGTAGNTIYF

SEQ ID NO: 773953 - protein, 12 aa, Homo sapiens
  CDR3 for alpha chain variable domain of TCR clone 386977 (TRAV16, TRAJ10)
CSRTGGGNKLTF

SEQ ID NO: 773954 - protein, 15 aa, Homo sapiens
  CDR3 for beta chain variable domain of TCR clone 386977 (TRBV12-4, TRBJ2-5)
CASSGTGQAQETQYF

SEQ ID NO: 773955 - protein, 18 aa, Homo sapiens
  CDR3 for alpha chain variable domain of TCR clone 386978 (TRAV35, TRAJ28)
CAGHNYPLSVSGSYHLTF

SEQ ID NO: 773956 - protein, 12 aa, Homo sapiens
  CDR3 for beta chain variable domain of TCR clone 386978 (TRBV7-9, TRBJ1-1)
CASSLEGTEAFF

SEQ ID NO: 773957 - protein, 16 aa, Homo sapiens
  CDR3 for alpha chain variable domain of TCR clone 386979 (TRAV3, TRAJ10)
CAVRDMRAGGGNKLTF

SEQ ID NO: 773958 - protein, 20 aa, Homo sapiens
  CDR3 for beta chain variable domain of TCR clone 386979 (TRBV11-3, TRBJ2-7)
CASSQRTSGGLRAVLRAGHQ

SEQ ID NO: 773959 - protein, 15 aa, Homo sapiens
  CDR3 for alpha chain variable domain of TCR clone 386980 (TRAV26-1, TRAJ29)
CIVRVEGSGNAPLVC

SEQ ID NO: 773960 - protein, 14 aa, Homo sapiens
  CDR3 for beta chain variable domain of TCR clone 386980 (TRBV18, TRBJ2-5)
CASSPGVSQETQYF

SEQ ID NO: 773961 - protein, 16 aa, Homo sapiens
  CDR3 for alpha chain variable domain of TCR clone 386981 (TRAV3, TRAJ10)
CAVRDMRAGGGTKLTF

SEQ ID NO: 773962 - protein, 13 aa, Homo sapiens
  CDR3 for beta chain variable domain of TCR clone 386981 (TRBV3-1, TRBJ1-1)
CASSPGVITEAFF

SEQ ID NO: 773963 - protein, 12 aa, Homo sapiens
  CDR3 for alpha chain variable domain of TCR clone 386982 (TRAV3, TRAJ31)
CAVRDGNARLMF

SEQ ID NO: 773964 - protein, 18 aa, Homo sapiens
  CDR3 for beta chain variable domain of TCR clone 386982 (TRBV7-2, TRBJ2-3)
CASSLKREGRGIKDKKYF

SEQ ID NO: 773965 - protein, 14 aa, Homo sapiens
  CDR3 for alpha chain variable domain of TCR clone 386983 (TRAV20, TRAJ39)
CAVQAGNAGNMLTF

SEQ ID NO: 773966 - protein, 19 aa, Homo sapiens
  CDR3 for beta chain variable domain of TCR clone 386983 (TRBV2, TRBJ2-7)
CASSDDETSGRANDYEQYF

SEQ ID NO: 773967 - protein, 15 aa, Homo sapiens
  CDR3 for alpha chain variable domain of TCR clone 386984 (TRAV3, TRAJ22)
CAVRDRGGSARQLTL

SEQ ID NO: 773968 - protein, 14 aa, Homo sapiens
  CDR3 for beta chain variable domain of TCR clone 386984 (TRBV23-1, TRBJ2-5)
CASSFLRSQETQYF

SEQ ID NO: 773969 - protein, 14 aa, Homo sapiens
  CDR3 for alpha chain variable domain of TCR clone 386985 (TRAV1-2, TRAJ6)
CAVSLSGGSYIPTF

SEQ ID NO: 773970 - protein, 15 aa, Homo sapiens
  CDR3 for beta chain variable domain of TCR clone 386985 (TRBV7-9, TRBJ2-7)
CASSPGGGLAYEQYF

SEQ ID NO: 773971 - protein, 16 aa, Homo sapiens
  CDR3 for alpha chain variable domain of TCR clone 386986 (TRAV21, TRAJ37)
CAVRTAGSSNTGQLIF

SEQ ID NO: 773972 - protein, 13 aa, Homo sapiens
  CDR3 for beta chain variable domain of TCR clone 386986 (TRBV7-9, TRBJ2-5)
CASLPSGRETQCF

SEQ ID NO: 773973 - protein, 15 aa, Homo sapiens
  CDR3 for alpha chain variable domain of TCR clone 386987 (TRAV21, TRAJ52)
CAVRGGGTSYGKLTF

SEQ ID NO: 773974 - protein, 13 aa, Homo sapiens
  CDR3 for beta chain variable domain of TCR clone 386987 (TRBV6-5, TRBJ2-5)
CATARSPQETQYF

SEQ ID NO: 773975 - protein, 18 aa, Homo sapiens
  CDR3 for alpha chain variable domain of TCR clone 386988 (TRAV21, TRAJ52)
CAVRPSPAGCTSYVKLTF

SEQ ID NO: 773976 - protein, 17 aa, Homo sapiens
  CDR3 for beta chain variable domain of TCR clone 386988 (TRBV13, TRBJ2-3)
CASSLSRVAGGRNTQYF

SEQ ID NO: 773977 - protein, 12 aa, Homo sapiens
  CDR3 for alpha chain variable domain of TCR clone 386989 (TRAV1-1, TRAJ23)
CAVTNQGGKLIF

SEQ ID NO: 773978 - protein, 13 aa, Homo sapiens
  CDR3 for beta chain variable domain of TCR clone 386989 (TRBV15, TRBJ1-6)
CATSGGLNSPLHF

SEQ ID NO: 773979 - protein, 15 aa, Homo sapiens
  CDR3 for alpha chain variable domain of TCR clone 386990 (TRAV38-1, TRAJ37)
CDFIHGSGNTGKLIF

SEQ ID NO: 773980 - protein, 12 aa, Homo sapiens
  CDR3 for beta chain variable domain of TCR clone 386990 (TRBV7-9, TRBJ2-7)
CASSFGSYEQYF

SEQ ID NO: 773981 - protein, 17 aa, Homo sapiens
  CDR3 for alpha chain variable domain of TCR clone 386991 (TRAV3, TRAJ6)
CTVRDGPRAGGSYIPTF

SEQ ID NO: 773982 - protein, 15 aa, Homo sapiens
  CDR3 for beta chain variable domain of TCR clone 386991 (TRBV29-1, TRBJ2-5)
CSVGGLAVNQETQYF

SEQ ID NO: 773983 - protein, 14 aa, Homo sapiens
  CDR3 for alpha chain variable domain of TCR clone 386992 (TRAV12-2, TRAJ13)
CAVKKTGGYQKVTF

SEQ ID NO: 773984 - protein, 12 aa, Homo sapiens
  CDR3 for beta chain variable domain of TCR clone 386992 (TRBV11-2, TRBJ2-2)
CASSLGGGVLFF

SEQ ID NO: 773985 - protein, 12 aa, Homo sapiens
  CDR3 for alpha chain variable domain of TCR clone 386993 (TRAV1-1, TRAJ24)
CAVRGSWGKFQF

SEQ ID NO: 773986 - protein, 14 aa, Homo sapiens
  CDR3 for beta chain variable domain of TCR clone 386993 (TRBV7-2, TRBJ1-2)
CACSQTGSTYGYTF

SEQ ID NO: 773987 - protein, 12 aa, Homo sapiens
  CDR3 for alpha chain variable domain of TCR clone 386994 (TRAV1-2, TRAJ33)
CAALDSNYQLIW

SEQ ID NO: 773988 - protein, 16 aa, Homo sapiens
  CDR3 for beta chain variable domain of TCR clone 386994 (TRBV6-4, TRBJ1-2)
CASSEAVGDPNYGYTF

SEQ ID NO: 773989 - protein, 14 aa, Homo sapiens
  CDR3 for alpha chain variable domain of TCR clone 386995 (TRAV30, TRAJ26)
CGTEIVSYGQNFVF

SEQ ID NO: 773990 - protein, 15 aa, Homo sapiens
  CDR3 for beta chain variable domain of TCR clone 386995 (TRBV27, TRBJ2-1)
CASSNGGGSSNEQFF

SEQ ID NO: 773991 - protein, 16 aa, Homo sapiens
  CDR3 for alpha chain variable domain of TCR clone 386996 (TRAV3, TRAJ37)
CAVRPHCSGNTGKLIF

SEQ ID NO: 773992 - protein, 16 aa, Homo sapiens
  CDR3 for beta chain variable domain of TCR clone 386996 (TRBV12-4, TRBJ1-5)
CASSRPVGGSNQPQHF

SEQ ID NO: 773993 - protein, 11 aa, Homo sapiens
  CDR3 for alpha chain variable domain of TCR clone 386997 (TRAV1-1, TRAJ23)
CAVRQGGKLIF

SEQ ID NO: 773994 - protein, 20 aa, Homo sapiens
  CDR3 for beta chain variable domain of TCR clone 386997 (TRBV7-8, TRBJ2-2)
GASSHLFPGPTVHITGELFF

SEQ ID NO: 773995 - protein, 12 aa, Homo sapiens
  CDR3 for alpha chain variable domain of TCR clone 386998 (TRAV16, TRAJ26)
CALRSYGQNFVL

SEQ ID NO: 773996 - protein, 14 aa, Homo sapiens
  CDR3 for beta chain variable domain of TCR clone 386998 (TRBV10-3, TRBJ2-1)
CAISSDLAYNEQFF

SEQ ID NO: 773997 - protein, 12 aa, Homo sapiens
  CDR3 for alpha chain variable domain of TCR clone 386999 (TRAV13-1, TRAJ43)
CAAGRFNNDMRF

SEQ ID NO: 773998 - protein, 14 aa, Homo sapiens
  CDR3 for beta chain variable domain of TCR clone 386999 (TRBV7-2, TRBJ2-7)
CASSPKTSFYEQYF

SEQ ID NO: 773999 - protein, 14 aa, Homo sapiens
  CDR3 for alpha chain variable domain of TCR clone 387000 (TRAV35, TRAJ13)
CAGSPSGGNQKVTF

SEQ ID NO: 774000 - protein, 14 aa, Homo sapiens
  CDR3 for beta chain variable domain of TCR clone 387000 (TRBV12-5, TRBJ2-5)
CASGSRTHQETQYF

SEQ ID NO: 774001 - protein, 14 aa, Homo sapiens
  CDR3 for alpha chain variable domain of TCR clone 387001 (TRAV29/DV5, TRAJ49)
CAASAQNTGNQYYF

SEQ ID NO: 774002 - protein, 16 aa, Homo sapiens
  CDR3 for beta chain variable domain of TCR clone 387001 (TRBV12-4, TRBJ1-5)
CASRQPVEGSNQPQHF

SEQ ID NO: 774003 - protein, 15 aa, Homo sapiens
  CDR3 for alpha chain variable domain of TCR clone 387002 (TRAV27, TRAJ38)
CAARRNAGNNRKPMW

SEQ ID NO: 774004 - protein, 13 aa, Homo sapiens
  CDR3 for beta chain variable domain of TCR clone 387002 (TRBV12-5, TRBJ2-3)
CASGDRQSDTQYF

SEQ ID NO: 774005 - protein, 13 aa, Homo sapiens
  CDR3 for alpha chain variable domain of TCR clone 387003 (TRAV1-2, TRAJ9)
CAALNTGGFKTIF

SEQ ID NO: 774006 - protein, 16 aa, Homo sapiens
  CDR3 for beta chain variable domain of TCR clone 387003 (TRBV12-5, TRBJ2-5)
CASGPRTSGNQGTQYF

SEQ ID NO: 774007 - protein, 11 aa, Homo sapiens
  CDR3 for alpha chain variable domain of TCR clone 387004 (TRAV1-1, TRAJ3)
CAVRSASKIIF

SEQ ID NO: 774008 - protein, 14 aa, Homo sapiens
  CDR3 for beta chain variable domain of TCR clone 387004 (TRBV12-4, TRBJ1-1)
CASSLGTGGTEAFF

SEQ ID NO: 774009 - protein, 14 aa, Homo sapiens
  CDR3 for alpha chain variable domain of TCR clone 387005 (TRAV12-2, TRAJ40)
CAVKIPSGAYKYIF

SEQ ID NO: 774010 - protein, 15 aa, Homo sapiens
  CDR3 for beta chain variable domain of TCR clone 387005 (TRBV7-2, TRBJ2-1)
CASTHGTGIYNEQFF

SEQ ID NO: 774011 - protein, 13 aa, Homo sapiens
  CDR3 for alpha chain variable domain of TCR clone 387006 (TRAV8-1, TRAJ4)
CAVMLGGYNKLIF

SEQ ID NO: 774012 - protein, 10 aa, Homo sapiens
  CDR3 for beta chain variable domain of TCR clone 387006 (TRBV10-3, TRBJ2-7)
SATGAYEQYF

SEQ ID NO: 774013 - protein, 14 aa, Homo sapiens
  CDR3 for alpha chain variable domain of TCR clone 387007 (TRAV2, TRAJ8)
CAGRGNTGFQKLAF

SEQ ID NO: 774014 - protein, 13 aa, Homo sapiens
  CDR3 for beta chain variable domain of TCR clone 387007 (TRBV6-5, TRBJ2-7)
CASRTSGIHEQYF

SEQ ID NO: 774015 - protein, 14 aa, Homo sapiens
  CDR3 for alpha chain variable domain of TCR clone 387008 (TRAV17, TRAJ23)
CATALGGQGGKLIF

SEQ ID NO: 774016 - protein, 13 aa, Homo sapiens
  CDR3 for beta chain variable domain of TCR clone 387008 (TRBV3-1, TRBJ2-5)
CASSPPAAETQYC

SEQ ID NO: 774017 - protein, 13 aa, Homo sapiens
  CDR3 for alpha chain variable domain of TCR clone 387009 (TRAV13-1, TRAJ37)
CAARSGNTGILIF

SEQ ID NO: 774018 - protein, 14 aa, Homo sapiens
  CDR3 for beta chain variable domain of TCR clone 387009 (TRBV12-4, TRBJ2-3)
CASSLGQGTDTQYF

SEQ ID NO: 774019 - protein, 12 aa, Homo sapiens
  CDR3 for alpha chain variable domain of TCR clone 387010 (TRAV12-2, TRAJ10)
WGVTGGGNKLTF

SEQ ID NO: 774020 - protein, 15 aa, Homo sapiens
  CDR3 for beta chain variable domain of TCR clone 387010 (TRBV28, TRBJ2-7)
CASSPGGRGFYEQYF

SEQ ID NO: 774021 - protein, 17 aa, Homo sapiens
  CDR3 for alpha chain variable domain of TCR clone 387011 (TRAV17, TRAJ28)
CATDPRRGGAGSYQLTF

SEQ ID NO: 774022 - protein, 16 aa, Homo sapiens
  CDR3 for beta chain variable domain of TCR clone 387011 (TRBV25-1, TRBJ1-1)
CASSGDMDRGRIEAFF

SEQ ID NO: 774023 - protein, 14 aa, Homo sapiens
  CDR3 for alpha chain variable domain of TCR clone 387012 (TRAV17, TRAJ45)
CATASGGGADGVTF

SEQ ID NO: 774024 - protein, 15 aa, Homo sapiens
  CDR3 for beta chain variable domain of TCR clone 387012 (TRBV11-2, TRBJ2-1)
CASSRNRGLMYEQFF

SEQ ID NO: 774025 - protein, 13 aa, Homo sapiens
  CDR3 for alpha chain variable domain of TCR clone 387013 (TRAV12-2, TRAJ15)
CAVFNQAGTALIF

SEQ ID NO: 774026 - protein, 23 aa, Homo sapiens
  CDR3 for beta chain variable domain of TCR clone 387013 (TRBV7-8, TRBJ1-5)
RRTPPCISVAAAGGGGADQPQHF

SEQ ID NO: 774027 - protein, 14 aa, Homo sapiens
  CDR3 for alpha chain variable domain of TCR clone 387014 (TRAV12-3, TRAJ10)
SHLPLTGGGNKLTF

SEQ ID NO: 774028 - protein, 13 aa, Homo sapiens
  CDR3 for beta chain variable domain of TCR clone 387014 (TRBV19, TRBJ1-1)
CASSFGRNTEAFF

SEQ ID NO: 774029 - protein, 10 aa, Homo sapiens
  CDR3 for alpha chain variable domain of TCR clone 387015 (TRAV13-2, TRAJ24)
TTDSWGKLQF

SEQ ID NO: 774030 - protein, 13 aa, Homo sapiens
  CDR3 for beta chain variable domain of TCR clone 387015 (TRBV11-2, TRBJ2-1)
CASSLGLAGGRFF

SEQ ID NO: 774031 - protein, 14 aa, Homo sapiens
  CDR3 for alpha chain variable domain of TCR clone 387016 (TRAV17, TRAJ57)
CATDPQGGSEKLVL

SEQ ID NO: 774032 - protein, 13 aa, Homo sapiens
  CDR3 for beta chain variable domain of TCR clone 387016 (TRBV10-3, TRBJ2-7)
CASKLAVNYEQYF

SEQ ID NO: 774033 - protein, 11 aa, Homo sapiens
  CDR3 for alpha chain variable domain of TCR clone 387017 (TRAV8-3, TRAJ15)
CAVGPGTALIF

SEQ ID NO: 774034 - protein, 18 aa, Homo sapiens
  CDR3 for beta chain variable domain of TCR clone 387017 (TRBV18, TRBJ2-3)
CASPYTSGAAGGTDTQYF

SEQ ID NO: 774035 - protein, 14 aa, Homo sapiens
  CDR3 for alpha chain variable domain of TCR clone 387018 (TRAV1-2, TRAJ16)
CAVNRFSDGQKMLF

SEQ ID NO: 774036 - protein, 17 aa, Homo sapiens
  CDR3 for beta chain variable domain of TCR clone 387018 (TRBV11-2, TRBJ2-1)
CASSLYPPGVEYNEQYF

SEQ ID NO: 774037 - protein, 13 aa, Homo sapiens
  CDR3 for alpha chain variable domain of TCR clone 387019 (TRAV2, TRAJ40)
CAVVTSGTYNYIF

SEQ ID NO: 774038 - protein, 14 aa, Homo sapiens
  CDR3 for beta chain variable domain of TCR clone 387019 (TRBV19, TRBJ2-1)
CASPTFVLSREQFF

SEQ ID NO: 774039 - protein, 17 aa, Homo sapiens
  CDR3 for alpha chain variable domain of TCR clone 387020 (TRAV26-2, TRAJ42)
CILRDVGYGGSQGNVIF

SEQ ID NO: 774040 - protein, 16 aa, Homo sapiens
  CDR3 for beta chain variable domain of TCR clone 387020 (TRBV12-4, TRBJ2-7)
CASSLIGGTGTYEQYF

SEQ ID NO: 774041 - protein, 14 aa, Homo sapiens
  CDR3 for alpha chain variable domain of TCR clone 387021 (TRAV26-1, TRAJ26)
CIVRATFLGQNFDF

SEQ ID NO: 774042 - protein, 16 aa, Homo sapiens
  CDR3 for beta chain variable domain of TCR clone 387021 (TRBV12-4, TRBJ2-7)
CASRSTGTGPSYEQYF

SEQ ID NO: 774043 - protein, 13 aa, Homo sapiens
  CDR3 for alpha chain variable domain of TCR clone 387022 (TRAV26-1, TRAJ33)
CIVRVEGNYQLIW

SEQ ID NO: 774044 - protein, 14 aa, Homo sapiens
  CDR3 for beta chain variable domain of TCR clone 387022 (TRBV25-1, TRBJ1-1)
CASTHLGGNTEAFF

SEQ ID NO: 774045 - protein, 15 aa, Homo sapiens
  CDR3 for alpha chain variable domain of TCR clone 387023 (TRAV2, TRAJ11)
CAVGGRNSGYSTLTF

SEQ ID NO: 774046 - protein, 19 aa, Homo sapiens
  CDR3 for beta chain variable domain of TCR clone 387023 (TRBV25-1, TRBJ2-2)
CAILVYRVDRGRKTGELFF

SEQ ID NO: 774047 - protein, 14 aa, Homo sapiens
  CDR3 for alpha chain variable domain of TCR clone 387024 (TRAV17, TRAJ34)
CAPAEVRVSDKLIF

SEQ ID NO: 774048 - protein, 13 aa, Homo sapiens
  CDR3 for beta chain variable domain of TCR clone 387024 (TRBV28, TRBJ2-1)
CASRSGGLNEQFF

SEQ ID NO: 774049 - protein, 12 aa, Homo sapiens
  CDR3 for alpha chain variable domain of TCR clone 387025 (TRAV3, TRAJ20)
CAGRDGDYKLSF

SEQ ID NO: 774050 - protein, 13 aa, Homo sapiens
  CDR3 for beta chain variable domain of TCR clone 387025 (TRBV9, TRBJ2-1)
CASSVGQGGEQFF

SEQ ID NO: 774051 - protein, 17 aa, Homo sapiens
  CDR3 for alpha chain variable domain of TCR clone 387026 (TRAV12-2, TRAJ22)
CAVNRIPFSGSARQLTF

SEQ ID NO: 774052 - protein, 15 aa, Homo sapiens
  CDR3 for beta chain variable domain of TCR clone 387026 (TRBV29-1, TRBJ2-1)
CSVGRHALFYNEQFF

SEQ ID NO: 774053 - protein, 13 aa, Homo sapiens
  CDR3 for alpha chain variable domain of TCR clone 387027 (TRAV26-1, TRAJ34)
CIVRPWITDKLVF

SEQ ID NO: 774054 - protein, 13 aa, Homo sapiens
  CDR3 for beta chain variable domain of TCR clone 387027 (TRBV5-1, TRBJ2-1)
CASSLGSYNEQFF

SEQ ID NO: 774055 - protein, 14 aa, Homo sapiens
  CDR3 for alpha chain variable domain of TCR clone 387028 (TRAV13-1, TRAJ3)
CAAEGYSSACKIIF

SEQ ID NO: 774056 - protein, 14 aa, Homo sapiens
  CDR3 for beta chain variable domain of TCR clone 387028 (TRBV19, TRBJ2-5)
CASSSSGIQETQYF

SEQ ID NO: 774057 - protein, 14 aa, Homo sapiens
  CDR3 for alpha chain variable domain of TCR clone 387029 (TRAV1-2, TRAJ17)
CALRRGAAGNKLTF

SEQ ID NO: 774058 - protein, 14 aa, Homo sapiens
  CDR3 for beta chain variable domain of TCR clone 387029 (TRBV19, TRBJ2-2)
CASSGQGIAGELFF

SEQ ID NO: 774059 - protein, 12 aa, Homo sapiens
  CDR3 for alpha chain variable domain of TCR clone 387030 (TRAV22, TRAJ22)
CAPGGSARQLTF

SEQ ID NO: 774060 - protein, 15 aa, Homo sapiens
  CDR3 for beta chain variable domain of TCR clone 387030 (TRBV7-2, TRBJ2-7)
CASSLKGALTYEQYF

SEQ ID NO: 774061 - protein, 14 aa, Homo sapiens
  CDR3 for alpha chain variable domain of TCR clone 387031 (TRAV12-2, TRAJ44)
CAVNPAGTASKLTF

SEQ ID NO: 774062 - protein, 20 aa, Homo sapiens
  CDR3 for beta chain variable domain of TCR clone 387031 (TRBV28, TRBJ2-1)
CASTPIGRSPGLAGGNEQFF

SEQ ID NO: 774063 - protein, 11 aa, Homo sapiens
  CDR3 for alpha chain variable domain of TCR clone 387032 (TRAV2, TRAJ13)
CASGGYQKVTF

SEQ ID NO: 774064 - protein, 16 aa, Homo sapiens
  CDR3 for beta chain variable domain of TCR clone 387032 (TRBV9, TRBJ2-2)
CASSAMGKGNTGELFF

SEQ ID NO: 774065 - protein, 14 aa, Homo sapiens
  CDR3 for alpha chain variable domain of TCR clone 387033 (TRAV12-3, TRAJ10)
SHLPLTGGGNKLTF

SEQ ID NO: 774066 - protein, 13 aa, Homo sapiens
  CDR3 for beta chain variable domain of TCR clone 387033 (TRBV20-1, TRBJ2-5)
CGARGDYQETQYF

SEQ ID NO: 774067 - protein, 16 aa, Homo sapiens
  CDR3 for alpha chain variable domain of TCR clone 387034 (TRAV30, TRAJ26)
CGTESVGDNYGQNFVF

SEQ ID NO: 774068 - protein, 13 aa, Homo sapiens
  CDR3 for beta chain variable domain of TCR clone 387034 (TRBV19, TRBJ1-2)
CAGSISEDYGYTF

SEQ ID NO: 774069 - protein, 16 aa, Homo sapiens
  CDR3 for alpha chain variable domain of TCR clone 387035 (TRAV26-1, TRAJ28)
CIVRVGLWGWEVPTHF

SEQ ID NO: 774070 - protein, 16 aa, Homo sapiens
  CDR3 for beta chain variable domain of TCR clone 387035 (TRBV20-1, TRBJ1-2)
CSASMGQGVANYGYTF

SEQ ID NO: 774071 - protein, 15 aa, Homo sapiens
  CDR3 for alpha chain variable domain of TCR clone 387036 (TRAV35, TRAJ40)
CTGQLGTSGTYNYIF

SEQ ID NO: 774072 - protein, 14 aa, Homo sapiens
  CDR3 for beta chain variable domain of TCR clone 387036 (TRBV7-3, TRBJ2-1)
CASSLAGGTNEQFF

SEQ ID NO: 774073 - protein, 12 aa, Homo sapiens
  CDR3 for alpha chain variable domain of TCR clone 387037 (TRAV8-3, TRAJ26)
CAGDNYGQNFVF

SEQ ID NO: 774074 - protein, 15 aa, Homo sapiens
  CDR3 for beta chain variable domain of TCR clone 387037 (TRBV9, TRBJ2-3)
CASSTGGGEGDTQYF

SEQ ID NO: 774075 - protein, 15 aa, Homo sapiens
  CDR3 for alpha chain variable domain of TCR clone 387038 (TRAV8-3, TRAJ27)
CAVGPSKTNAGKSTF

SEQ ID NO: 774076 - protein, 15 aa, Homo sapiens
  CDR3 for beta chain variable domain of TCR clone 387038 (TRBV7-2, TRBJ2-1)
CASSSGRAGGNEQCF

SEQ ID NO: 774077 - protein, 14 aa, Homo sapiens
  CDR3 for alpha chain variable domain of TCR clone 387039 (TRAV12-2, TRAJ40)
CAVTIPSGTYKYIF

SEQ ID NO: 774078 - protein, 17 aa, Homo sapiens
  CDR3 for beta chain variable domain of TCR clone 387039 (TRBV13, TRBJ2-3)
CASSLSRVAGGRNTQYF

SEQ ID NO: 774079 - protein, 16 aa, Homo sapiens
  CDR3 for alpha chain variable domain of TCR clone 387040 (TRAV3, TRAJ4)
CAVRAFFSGGYNKLIF

SEQ ID NO: 774080 - protein, 17 aa, Homo sapiens
  CDR3 for beta chain variable domain of TCR clone 387040 (TRBV20-1, TRBJ2-1)
CSASSSGLAGSYNEQFF

SEQ ID NO: 774081 - protein, 14 aa, Homo sapiens
  CDR3 for alpha chain variable domain of TCR clone 387041 (TRAV12-3, TRAJ57)
CAMSAWGGSEKLVF

SEQ ID NO: 774082 - protein, 15 aa, Homo sapiens
  CDR3 for beta chain variable domain of TCR clone 387041 (TRBV11-2, TRBJ2-1)
CASSRNRGLMYEQFF

SEQ ID NO: 774083 - protein, 12 aa, Homo sapiens
  CDR3 for alpha chain variable domain of TCR clone 387042 (TRAV17, TRAJ49)
CATVTTGNQFYF

SEQ ID NO: 774084 - protein, 16 aa, Homo sapiens
  CDR3 for beta chain variable domain of TCR clone 387042 (TRBV11-2, TRBJ2-7)
CASSPTTGGVSYEQYF

SEQ ID NO: 774085 - protein, 16 aa, Homo sapiens
  CDR3 for alpha chain variable domain of TCR clone 387043 (TRAV3, TRAJ18)
FAVRDGRGSTLGRLYF

SEQ ID NO: 774086 - protein, 15 aa, Homo sapiens
  CDR3 for beta chain variable domain of TCR clone 387043 (TRBV7-9, TRBJ1-6)
CANSSPGRGNSPLHF

SEQ ID NO: 774087 - protein, 13 aa, Homo sapiens
  CDR3 for alpha chain variable domain of TCR clone 387044 (TRAV1-2, TRAJ26)
CAVRPNYGQNFVF

SEQ ID NO: 774088 - protein, 14 aa, Homo sapiens
  CDR3 for beta chain variable domain of TCR clone 387044 (TRBV4-1, TRBJ2-5)
CASSQYLALETQYF

SEQ ID NO: 774089 - protein, 13 aa, Homo sapiens
  CDR3 for alpha chain variable domain of TCR clone 387045 (TRAV21, TRAJ57)
CAVAQGGSEKLVF

SEQ ID NO: 774090 - protein, 11 aa, Homo sapiens
  CDR3 for beta chain variable domain of TCR clone 387045 (TRBV11-2, TRBJ2-2)
CASSLPGELFF

SEQ ID NO: 774091 - protein, 14 aa, Homo sapiens
  CDR3 for alpha chain variable domain of TCR clone 387046 (TRAV23/DV6, TRAJ44)
CAAARGGTASKLTF

SEQ ID NO: 774092 - protein, 14 aa, Homo sapiens
  CDR3 for beta chain variable domain of TCR clone 387046 (TRBV12-5, TRBJ2-5)
CASGSRTHQETQYF

SEQ ID NO: 774093 - protein, 15 aa, Homo sapiens
  CDR3 for alpha chain variable domain of TCR clone 387047 (TRAV3, TRAJ20)
CAVRDIKLSDYKLSF

SEQ ID NO: 774094 - protein, 15 aa, Homo sapiens
  CDR3 for beta chain variable domain of TCR clone 387047 (TRBV7-9, TRBJ1-6)
CASSSPGRGNSHLLF

SEQ ID NO: 774095 - protein, 11 aa, Homo sapiens
  CDR3 for alpha chain variable domain of TCR clone 387048 (TRAV27, TRAJ20)
CAGLNDYKLRF

SEQ ID NO: 774096 - protein, 14 aa, Homo sapiens
  CDR3 for beta chain variable domain of TCR clone 387048 (TRBV6-1, TRBJ1-1)
CASTPLQMNTEAFF

SEQ ID NO: 774097 - protein, 12 aa, Homo sapiens
  CDR3 for alpha chain variable domain of TCR clone 387049 (TRAV13-2, TRAJ23)
CAERHRGGKLIF

SEQ ID NO: 774098 - protein, 14 aa, Homo sapiens
  CDR3 for beta chain variable domain of TCR clone 387049 (TRBV12-4, TRBJ1-4)
CASRMTGRSEKLFF

SEQ ID NO: 774099 - protein, 12 aa, Homo sapiens
  CDR3 for alpha chain variable domain of TCR clone 387050 (TRAV13-2, TRAJ23)
CAERHRGGKLIF

SEQ ID NO: 774100 - protein, 14 aa, Homo sapiens
  CDR3 for beta chain variable domain of TCR clone 387050 (TRBV15, TRBJ2-3)
CATRSGTSTDTQYF

SEQ ID NO: 774101 - protein, 11 aa, Homo sapiens
  CDR3 for alpha chain variable domain of TCR clone 387051 (TRAV12-2, TRAJ31)
CAILNNARLMF

SEQ ID NO: 774102 - protein, 13 aa, Homo sapiens
  CDR3 for beta chain variable domain of TCR clone 387051 (TRBV10-3, TRBJ2-7)
CASKLAVNYEQYF

SEQ ID NO: 774103 - protein, 14 aa, Homo sapiens
  CDR3 for alpha chain variable domain of TCR clone 387052 (TRAV12-2, TRAJ40)
CAVKIPSGTYKYTF

SEQ ID NO: 774104 - protein, 16 aa, Homo sapiens
  CDR3 for beta chain variable domain of TCR clone 387052 (TRBV28, TRBJ2-5)
CASSFSPAGGWETQYF

SEQ ID NO: 774105 - protein, 12 aa, Homo sapiens
  CDR3 for alpha chain variable domain of TCR clone 387053 (TRAV17, TRAJ12)
CATLRISYKLIF

SEQ ID NO: 774106 - protein, 16 aa, Homo sapiens
  CDR3 for beta chain variable domain of TCR clone 387053 (TRBV28, TRBJ2-7)
CASSLFLETGGPEQYF

SEQ ID NO: 774107 - protein, 14 aa, Homo sapiens
  CDR3 for alpha chain variable domain of TCR clone 387054 (TRAV8-3, TRAJ31)
CAVGRGLNNARLML

SEQ ID NO: 774108 - protein, 15 aa, Homo sapiens
  CDR3 for beta chain variable domain of TCR clone 387054 (TRBV7-2, TRBJ2-2)
CASSLAGGLTGELFF

SEQ ID NO: 774109 - protein, 14 aa, Homo sapiens
  CDR3 for alpha chain variable domain of TCR clone 387055 (TRAV35, TRAJ33)
CAGSSQDSNFQLIC

SEQ ID NO: 774110 - protein, 15 aa, Homo sapiens
  CDR3 for beta chain variable domain of TCR clone 387055 (TRBV20-1, TRBJ2-7)
CSAESGTSGAYEQYF

SEQ ID NO: 774111 - protein, 14 aa, Homo sapiens
  CDR3 for alpha chain variable domain of TCR clone 387056 (TRAV8-2, TRAJ6)
CVVISPGGSYIPTF

SEQ ID NO: 774112 - protein, 16 aa, Homo sapiens
  CDR3 for beta chain variable domain of TCR clone 387056 (TRBV7-6, TRBJ2-6)
CASSLPGLSGANVLTF

SEQ ID NO: 774113 - protein, 10 aa, Homo sapiens
  CDR3 for alpha chain variable domain of TCR clone 387057 (TRAV2, TRAJ35)
CAVEVYRLWE

SEQ ID NO: 774114 - protein, 16 aa, Homo sapiens
  CDR3 for beta chain variable domain of TCR clone 387057 (TRBV4-1, TRBJ2-5)
CASSQTRGGPLETQYF

SEQ ID NO: 774115 - protein, 14 aa, Homo sapiens
  CDR3 for alpha chain variable domain of TCR clone 387058 (TRAV20, TRAJ10)
CAVRIEGGGNKLTF

SEQ ID NO: 774116 - protein, 13 aa, Homo sapiens
  CDR3 for beta chain variable domain of TCR clone 387058 (TRBV13, TRBJ2-2)
CASSPGLTGELFF

SEQ ID NO: 774117 - protein, 17 aa, Homo sapiens
  CDR3 for alpha chain variable domain of TCR clone 387059 (TRAV4, TRAJ42)
CLVGVLNYGGSKGNPIF

SEQ ID NO: 774118 - protein, 12 aa, Homo sapiens
  CDR3 for beta chain variable domain of TCR clone 387059 (TRBV20-1, TRBJ2-1)
CSAQYTYNEQFF

SEQ ID NO: 774119 - protein, 11 aa, Homo sapiens
  CDR3 for alpha chain variable domain of TCR clone 387060 (TRAV12-3, TRAJ43)
CAMSVSNDMRF

SEQ ID NO: 774120 - protein, 14 aa, Homo sapiens
  CDR3 for beta chain variable domain of TCR clone 387060 (TRBV19, TRBJ2-5)
CASSMTGQQETQYF

SEQ ID NO: 774121 - protein, 13 aa, Homo sapiens
  CDR3 for alpha chain variable domain of TCR clone 387061 (TRAV12-2, TRAJ34)
CAVRGYNTDKLIF

SEQ ID NO: 774122 - protein, 15 aa, Homo sapiens
  CDR3 for beta chain variable domain of TCR clone 387061 (TRBV28, TRBJ2-1)
CASRTGAGVIARKFF

SEQ ID NO: 774123 - protein, 14 aa, Homo sapiens
  CDR3 for alpha chain variable domain of TCR clone 387062 (TRAV38-1, TRAJ27)
CAFIHNTKAGKSTF

SEQ ID NO: 774124 - protein, 12 aa, Homo sapiens
  CDR3 for beta chain variable domain of TCR clone 387062 (TRBV7-8, TRBJ2-7)
CASSLGDREQYF

SEQ ID NO: 774125 - protein, 15 aa, Homo sapiens
  CDR3 for alpha chain variable domain of TCR clone 387063 (TRAV12-3, TRAJ11)
CAMSEENSGYSTLTF

SEQ ID NO: 774126 - protein, 16 aa, Homo sapiens
  CDR3 for beta chain variable domain of TCR clone 387063 (TRBV5-1, TRBJ2-7)
CASSLEGLAGLYVQYF

SEQ ID NO: 774127 - protein, 16 aa, Homo sapiens
  CDR3 for alpha chain variable domain of TCR clone 387064 (TRAV4, TRAJ22)
CLVGDLYSGSARQLTF

SEQ ID NO: 774128 - protein, 16 aa, Homo sapiens
  CDR3 for beta chain variable domain of TCR clone 387064 (TRBV7-9, TRBJ2-3)
CASSHWREVGTDTQYF

SEQ ID NO: 774129 - protein, 15 aa, Homo sapiens
  CDR3 for alpha chain variable domain of TCR clone 387065 (TRAV12-2, TRAJ53)
CAVNGGGGSNYKLKF

SEQ ID NO: 774130 - protein, 15 aa, Homo sapiens
  CDR3 for beta chain variable domain of TCR clone 387065 (TRBV28, TRBJ2-1)
CASSGLAEVDNEQFF

SEQ ID NO: 774131 - protein, 15 aa, Homo sapiens
  CDR3 for alpha chain variable domain of TCR clone 387066 (TRAV38-2/DV8, TRAJ57)
CASARAQGGSEKLVF

SEQ ID NO: 774132 - protein, 13 aa, Homo sapiens
  CDR3 for beta chain variable domain of TCR clone 387066 (TRBV10-3, TRBJ2-7)
CASKLAVNYEQYF

SEQ ID NO: 774133 - protein, 12 aa, Homo sapiens
  CDR3 for alpha chain variable domain of TCR clone 387067 (TRAV8-2, TRAJ45)
CVQGGGADGLTF

SEQ ID NO: 774134 - protein, 16 aa, Homo sapiens
  CDR3 for beta chain variable domain of TCR clone 387067 (TRBV7-2, TRBJ2-6)
CASSLAGRSGANVLTF

SEQ ID NO: 774135 - protein, 16 aa, Homo sapiens
  CDR3 for alpha chain variable domain of TCR clone 387068 (TRAV27, TRAJ52)
CAGAGAGGTSYGKLTF

SEQ ID NO: 774136 - protein, 14 aa, Homo sapiens
  CDR3 for beta chain variable domain of TCR clone 387068 (TRBV20-1, TRBJ1-1)
CSAQTRIGGTQAFF

SEQ ID NO: 774137 - protein, 13 aa, Homo sapiens
  CDR3 for alpha chain variable domain of TCR clone 387069 (TRAV23/DV6, TRAJ47)
CAASIRNGIWKQT

SEQ ID NO: 774138 - protein, 13 aa, Homo sapiens
  CDR3 for beta chain variable domain of TCR clone 387069 (TRBV19, TRBJ1-2)
CASSQGQVYDYTF

SEQ ID NO: 774139 - protein, 14 aa, Homo sapiens
  CDR3 for alpha chain variable domain of TCR clone 387070 (TRAV21, TRAJ35)
CAVMPIGFGNVLHC

SEQ ID NO: 774140 - protein, 16 aa, Homo sapiens
  CDR3 for beta chain variable domain of TCR clone 387070 (TRBV5-8, TRBJ2-2)
CASSLINPGGAGELFF

SEQ ID NO: 774141 - protein, 18 aa, Homo sapiens
  CDR3 for alpha chain variable domain of TCR clone 387071 (TRAV12-3, TRAJ52)
CAMSRTNAGGTSYGKLTF

SEQ ID NO: 774142 - protein, 15 aa, Homo sapiens
  CDR3 for beta chain variable domain of TCR clone 387071 (TRBV7-2, TRBJ2-1)
CASSLVAGGNNEQFF

SEQ ID NO: 774143 - protein, 15 aa, Homo sapiens
  CDR3 for alpha chain variable domain of TCR clone 387072 (TRAV26-1, TRAJ53)
CIVRVEGGSNYKLTF

SEQ ID NO: 774144 - protein, 14 aa, Homo sapiens
  CDR3 for beta chain variable domain of TCR clone 387072 (TRBV4-3, TRBJ2-1)
CASSQGRWRGEQFF

SEQ ID NO: 774145 - protein, 15 aa, Homo sapiens
  CDR3 for alpha chain variable domain of TCR clone 387073 (TRAV4, TRAJ10)
CLVVREGGGGNKLTF

SEQ ID NO: 774146 - protein, 15 aa, Homo sapiens
  CDR3 for beta chain variable domain of TCR clone 387073 (TRBV25-1, TRBJ2-5)
CASSDTGTHQETQYF

SEQ ID NO: 774147 - protein, 14 aa, Homo sapiens
  CDR3 for alpha chain variable domain of TCR clone 387074 (TRAV12-2, TRAJ17)
CAVNIKAAGNKPTF

SEQ ID NO: 774148 - protein, 16 aa, Homo sapiens
  CDR3 for beta chain variable domain of TCR clone 387074 (TRBV20-1, TRBJ2-6)
CSASSQGYDGANDLTF

SEQ ID NO: 774149 - protein, 15 aa, Homo sapiens
  CDR3 for alpha chain variable domain of TCR clone 387075 (TRAV25, TRAJ52)
CAGRPGGTSYGKLTF

SEQ ID NO: 774150 - protein, 12 aa, Homo sapiens
  CDR3 for beta chain variable domain of TCR clone 387075 (TRBV20-1, TRBJ2-1)
CSARLGTDEQFF

SEQ ID NO: 774151 - protein, 16 aa, Homo sapiens
  CDR3 for alpha chain variable domain of TCR clone 387076 (TRAV3, TRAJ37)
CAVRGKGSGNTGKLIF

SEQ ID NO: 774152 - protein, 14 aa, Homo sapiens
  CDR3 for beta chain variable domain of TCR clone 387076 (TRBV4-1, TRBJ2-2)
RASSLTENTGELFF

SEQ ID NO: 774153 - protein, 15 aa, Homo sapiens
  CDR3 for alpha chain variable domain of TCR clone 387077 (TRAV20, TRAJ58)
CAVQDLETSGSRLTF

SEQ ID NO: 774154 - protein, 13 aa, Homo sapiens
  CDR3 for beta chain variable domain of TCR clone 387077 (TRBV7-2, TRBJ2-2)
CASSLAVTGELFF

SEQ ID NO: 774155 - protein, 14 aa, Homo sapiens
  CDR3 for alpha chain variable domain of TCR clone 387078 (TRAV2, TRAJ3)
CAVRPYSSASKIIS

SEQ ID NO: 774156 - protein, 17 aa, Homo sapiens
  CDR3 for beta chain variable domain of TCR clone 387078 (TRBV7-6, TRBJ2-5)
CASSSPQAGYPSETQYF

SEQ ID NO: 774157 - protein, 12 aa, Homo sapiens
  CDR3 for alpha chain variable domain of TCR clone 387079 (TRAV8-3, TRAJ45)
CASSYSGGGLTD

SEQ ID NO: 774158 - protein, 13 aa, Homo sapiens
  CDR3 for beta chain variable domain of TCR clone 387079 (TRBV10-3, TRBJ2-7)
CASKLAVNYEQYF

SEQ ID NO: 774159 - protein, 14 aa, Homo sapiens
  CDR3 for alpha chain variable domain of TCR clone 387080 (TRAV1-2, TRAJ29)
CAVRELTSATPLVF

SEQ ID NO: 774160 - protein, 15 aa, Homo sapiens
  CDR3 for beta chain variable domain of TCR clone 387080 (TRBV13, TRBJ1-5)
CASSFGQGGVQPQHF

SEQ ID NO: 774161 - protein, 14 aa, Homo sapiens
  CDR3 for alpha chain variable domain of TCR clone 387081 (TRAV26-1, TRAJ39)
CIVRGSRAGNMLPF

SEQ ID NO: 774162 - protein, 15 aa, Homo sapiens
  CDR3 for beta chain variable domain of TCR clone 387081 (TRBV7-9, TRBJ1-5)
CASSQGYQPNQPQHF

SEQ ID NO: 774163 - protein, 12 aa, Homo sapiens
  CDR3 for alpha chain variable domain of TCR clone 387082 (TRAV3, TRAJ20)
CAVRDGDYKLSF

SEQ ID NO: 774164 - protein, 15 aa, Homo sapiens
  CDR3 for beta chain variable domain of TCR clone 387082 (TRBV5-1, TRBJ2-7)
CASSLNGGPAREQYF

SEQ ID NO: 774165 - protein, 13 aa, Homo sapiens
  CDR3 for alpha chain variable domain of TCR clone 387083 (TRAV27, TRAJ17)
CAGAATAGNKLTF

SEQ ID NO: 774166 - protein, 13 aa, Homo sapiens
  CDR3 for beta chain variable domain of TCR clone 387083 (TRBV19, TRBJ1-2)
CASSVPGQDGYTF

SEQ ID NO: 774167 - protein, 14 aa, Homo sapiens
  CDR3 for alpha chain variable domain of TCR clone 387084 (TRAV13-1, TRAJ9)
CAASALTGGFKTIF

SEQ ID NO: 774168 - protein, 14 aa, Homo sapiens
  CDR3 for beta chain variable domain of TCR clone 387084 (TRBV15, TRBJ2-3)
CATRSGTSTDTQYF

SEQ ID NO: 774169 - protein, 14 aa, Homo sapiens
  CDR3 for alpha chain variable domain of TCR clone 387085 (TRAV12-1, TRAJ17)
CVVNYKAAGNKLTF

SEQ ID NO: 774170 - protein, 15 aa, Homo sapiens
  CDR3 for beta chain variable domain of TCR clone 387085 (TRBV7-2, TRBJ2-7)
CASSTPGLTRGEQYF

SEQ ID NO: 774171 - protein, 16 aa, Homo sapiens
  CDR3 for alpha chain variable domain of TCR clone 387086 (TRAV26-1, TRAJ31)
CIVRPPVLNNNARLMF

SEQ ID NO: 774172 - protein, 17 aa, Homo sapiens
  CDR3 for beta chain variable domain of TCR clone 387086 (TRBV5-1, TRBJ1-5)
CASSLVGREEGHQPQHF

SEQ ID NO: 774173 - protein, 13 aa, Homo sapiens
  CDR3 for alpha chain variable domain of TCR clone 387087 (TRAV8-3, TRAJ6)
CAAWRGGSYIPTF

SEQ ID NO: 774174 - protein, 15 aa, Homo sapiens
  CDR3 for beta chain variable domain of TCR clone 387087 (TRBV4-1, TRBJ2-3)
CASSNLAGGRDTQYF

SEQ ID NO: 774175 - protein, 14 aa, Homo sapiens
  CDR3 for alpha chain variable domain of TCR clone 387088 (TRAV1-2, TRAJ8)
CAVREDTGFQKLVF

SEQ ID NO: 774176 - protein, 14 aa, Homo sapiens
  CDR3 for beta chain variable domain of TCR clone 387088 (TRBV12-5, TRBJ2-5)
CASGSRTQQETQYF

SEQ ID NO: 774177 - protein, 11 aa, Homo sapiens
  CDR3 for alpha chain variable domain of TCR clone 387089 (TRAV12-2, TRAJ49)
CALQGGNQFYF

SEQ ID NO: 774178 - protein, 14 aa, Homo sapiens
  CDR3 for beta chain variable domain of TCR clone 387089 (TRBV7-2, TRBJ2-7)
CASSPKASFYEQYF

SEQ ID NO: 774179 - protein, 13 aa, Homo sapiens
  CDR3 for alpha chain variable domain of TCR clone 387090 (TRAV3, TRAJ15)
CAVRDQAGTALIF

SEQ ID NO: 774180 - protein, 15 aa, Homo sapiens
  CDR3 for beta chain variable domain of TCR clone 387090 (TRBV11-1, TRBJ2-7)
CASSLNYGASYEQNF

SEQ ID NO: 774181 - protein, 14 aa, Homo sapiens
  CDR3 for alpha chain variable domain of TCR clone 387091 (TRAV6, TRAJ17)
CALDLKAAGNKLTV

SEQ ID NO: 774182 - protein, 17 aa, Homo sapiens
  CDR3 for beta chain variable domain of TCR clone 387091 (TRBV6-1, TRBJ1-1)
CASLARGGGGFNTEAFF

SEQ ID NO: 774183 - protein, 15 aa, Homo sapiens
  CDR3 for alpha chain variable domain of TCR clone 387092 (TRAV3, TRAJ22)
CSVRDRGGSARQLTF

SEQ ID NO: 774184 - protein, 13 aa, Homo sapiens
  CDR3 for beta chain variable domain of TCR clone 387092 (TRBV6-1, TRBJ1-1)
CASSRQGNTEAFF

SEQ ID NO: 774185 - protein, 12 aa, Homo sapiens
  CDR3 for alpha chain variable domain of TCR clone 387093 (TRAV26-1, TRAJ48)
CIAVFGNEKLTF

SEQ ID NO: 774186 - protein, 16 aa, Homo sapiens
  CDR3 for beta chain variable domain of TCR clone 387093 (TRBV3-1, TRBJ2-7)
CASSQGATGVAYEQYF

SEQ ID NO: 774187 - protein, 11 aa, Homo sapiens
  CDR3 for alpha chain variable domain of TCR clone 387094 (TRAV3, TRAJ17)
PRGAAGNKLTF

SEQ ID NO: 774188 - protein, 15 aa, Homo sapiens
  CDR3 for beta chain variable domain of TCR clone 387094 (TRBV7-6, TRBJ2-1)
CQQRSGPSSYNEQFF

SEQ ID NO: 774189 - protein, 14 aa, Homo sapiens
  CDR3 for alpha chain variable domain of TCR clone 387095 (TRAV12-1, TRAJ17)
CVVNYEAAGNKLTF

SEQ ID NO: 774190 - protein, 17 aa, Homo sapiens
  CDR3 for beta chain variable domain of TCR clone 387095 (TRBV20-1, TRBJ2-1)
CSASPSGLAGSYNEQFF

SEQ ID NO: 774191 - protein, 14 aa, Homo sapiens
  CDR3 for alpha chain variable domain of TCR clone 387096 (TRAV3, TRAJ6)
CAVRDSRRKLHTYI

SEQ ID NO: 774192 - protein, 15 aa, Homo sapiens
  CDR3 for beta chain variable domain of TCR clone 387096 (TRBV18, TRBJ2-7)
CASSPRQGRAYEQYF

SEQ ID NO: 774193 - protein, 13 aa, Homo sapiens
  CDR3 for alpha chain variable domain of TCR clone 387097 (TRAV1-2, TRAJ9)
CAVLNTGGFKTIF

SEQ ID NO: 774194 - protein, 14 aa, Homo sapiens
  CDR3 for beta chain variable domain of TCR clone 387097 (TRBV20-1, TRBJ2-3)
CNARGGTSTDTQYF

SEQ ID NO: 774195 - protein, 14 aa, Homo sapiens
  CDR3 for alpha chain variable domain of TCR clone 387098 (TRAV8-6, TRAJ10)
CAVTSTGGGNKLTF

SEQ ID NO: 774196 - protein, 13 aa, Homo sapiens
  CDR3 for beta chain variable domain of TCR clone 387098 (TRBV7-3, TRBJ1-1)
CASSQDWGAEAFF

SEQ ID NO: 774197 - protein, 14 aa, Homo sapiens
  CDR3 for alpha chain variable domain of TCR clone 387099 (TRAV12-2, TRAJ44)
CAVNPAGPASKLTF

SEQ ID NO: 774198 - protein, 13 aa, Homo sapiens
  CDR3 for beta chain variable domain of TCR clone 387099 (TRBV4-2, TRBJ1-1)
CASSQAGNTEAFF

SEQ ID NO: 774199 - protein, 13 aa, Homo sapiens
  CDR3 for alpha chain variable domain of TCR clone 387100 (TRAV2, TRAJ5)
CAVPDTGRRALTF

SEQ ID NO: 774200 - protein, 14 aa, Homo sapiens
  CDR3 for beta chain variable domain of TCR clone 387100 (TRBV7-3, TRBJ2-2)
CASSSGGYTGELFF

SEQ ID NO: 774201 - protein, 15 aa, Homo sapiens
  CDR3 for alpha chain variable domain of TCR clone 387101 (TRAV25, TRAJ53)
CAAPGGGGSNYKLTF

SEQ ID NO: 774202 - protein, 11 aa, Homo sapiens
  CDR3 for beta chain variable domain of TCR clone 387101 (TRBV11-3, TRBJ2-2)
CASSSGGELFF

SEQ ID NO: 774203 - protein, 15 aa, Homo sapiens
  CDR3 for alpha chain variable domain of TCR clone 387102 (TRAV17, TRAJ57)
CATGPSQGGSEKLVF

SEQ ID NO: 774204 - protein, 13 aa, Homo sapiens
  CDR3 for beta chain variable domain of TCR clone 387102 (TRBV27, TRAJ31)
CASSLMGDEKLFF

SEQ ID NO: 774205 - protein, 14 aa, Homo sapiens
  CDR3 for alpha chain variable domain of TCR clone 387103 (TRAV17, TRAJ16)
CATADFSDGQKLLF

SEQ ID NO: 774206 - protein, 12 aa, Homo sapiens
  CDR3 for beta chain variable domain of TCR clone 387103 (TRBV24-1, TRBJ1-1)
CATLYPETEAFF

SEQ ID NO: 774207 - protein, 10 aa, Homo sapiens
  CDR3 for alpha chain variable domain of TCR clone 387104 (TRAV26-1, TRAJ40)
CIAGTYKYIF

SEQ ID NO: 774208 - protein, 20 aa, Homo sapiens
  CDR3 for beta chain variable domain of TCR clone 387104 (TRBV7-8, TRBJ2-2)
CASSHLFPGPTIHITGELFF

SEQ ID NO: 774209 - protein, 15 aa, Homo sapiens
  CDR3 for alpha chain variable domain of TCR clone 387105 (TRAV21, TRAJ24)
CAARSSTDSWGKLQV

SEQ ID NO: 774210 - protein, 13 aa, Homo sapiens
  CDR3 for beta chain variable domain of TCR clone 387105 (TRBV11-3, TRBJ2-5)
CASSSTGEETQYF

SEQ ID NO: 774211 - protein, 16 aa, Homo sapiens
  CDR3 for alpha chain variable domain of TCR clone 387106 (TRAV27, TRAJ52)
CAGAPAGGTSYGKLTF

SEQ ID NO: 774212 - protein, 12 aa, Homo sapiens
  CDR3 for beta chain variable domain of TCR clone 387106 (TRBV11-2, TRBJ2-1)
CASSPGNNEQFF

SEQ ID NO: 774213 - protein, 14 aa, Homo sapiens
  CDR3 for alpha chain variable domain of TCR clone 387107 (TRAV12-3, TRAJ10)
SHLPLTGGGNKLTF

SEQ ID NO: 774214 - protein, 16 aa, Homo sapiens
  CDR3 for beta chain variable domain of TCR clone 387107 (TRBV5-7, TRBJ2-3)
CASSPWTSGGTDTQYF

SEQ ID NO: 774215 - protein, 14 aa, Homo sapiens
  CDR3 for alpha chain variable domain of TCR clone 387108 (TRAV12-2, TRAJ45)
CALPERGGADGLTL

SEQ ID NO: 774216 - protein, 15 aa, Homo sapiens
  CDR3 for beta chain variable domain of TCR clone 387108 (TRBV4-3, TRBJ2-7)
CASSQGDWGDYEQYF

SEQ ID NO: 774217 - protein, 13 aa, Homo sapiens
  CDR3 for alpha chain variable domain of TCR clone 387109 (TRAV3, TRAJ17)
CAVPRAAGNKLTF

SEQ ID NO: 774218 - protein, 16 aa, Homo sapiens
  CDR3 for beta chain variable domain of TCR clone 387109 (TRBV2, TRBJ2-1)
CASRSPAGGKYNEQFF

SEQ ID NO: 774219 - protein, 18 aa, Homo sapiens
  CDR3 for alpha chain variable domain of TCR clone 387110 (TRAV12-2, )
CAVEDIQNLDPAVYQLRD

SEQ ID NO: 774220 - protein, 15 aa, Homo sapiens
  CDR3 for beta chain variable domain of TCR clone 387110 (TRBV6-3, TRBJ2-7)
CASSSPGTVFYEQYF

SEQ ID NO: 774221 - protein, 14 aa, Homo sapiens
  CDR3 for alpha chain variable domain of TCR clone 387111 (TRAV21, TRAJ37)
CAVKGSSYTGKLIF

SEQ ID NO: 774222 - protein, 14 aa, Homo sapiens
  CDR3 for beta chain variable domain of TCR clone 387111 (TRBV7-2, TRBJ2-1)
CASSRGGARNEQFF

SEQ ID NO: 774223 - protein, 14 aa, Homo sapiens
  CDR3 for alpha chain variable domain of TCR clone 387112 (TRAV1-2, TRAJ8)
CAVREDTGFQKLVS

SEQ ID NO: 774224 - protein, 16 aa, Homo sapiens
  CDR3 for beta chain variable domain of TCR clone 387112 (TRBV7-9, TRBJ1-2)
CASSLGFSSGEDGYTF

SEQ ID NO: 774225 - protein, 15 aa, Homo sapiens
  CDR3 for alpha chain variable domain of TCR clone 387113 (TRAV17, TRAJ23)
CATDAEDNQGGKLIF

SEQ ID NO: 774226 - protein, 12 aa, Homo sapiens
  CDR3 for beta chain variable domain of TCR clone 387113 (TRBV12-4, TRBJ2-7)
CASSLGGYEQYF

SEQ ID NO: 774227 - protein, 12 aa, Homo sapiens
  CDR3 for alpha chain variable domain of TCR clone 387114 (TRAV12-3, TRAJ42)
CAPGGSKGNLIF

SEQ ID NO: 774228 - protein, 13 aa, Homo sapiens
  CDR3 for beta chain variable domain of TCR clone 387114 (TRBV5-7, TRBJ2-6)
CASTSSGANVLTF

SEQ ID NO: 774229 - protein, 14 aa, Homo sapiens
  CDR3 for alpha chain variable domain of TCR clone 387115 (TRAV8-4, TRAJ13)
CAVTLSGGYQKVTF

SEQ ID NO: 774230 - protein, 14 aa, Homo sapiens
  CDR3 for beta chain variable domain of TCR clone 387115 (TRBV20-1, TRBJ2-7)
CSAWTALSSYEQYF

SEQ ID NO: 774231 - protein, 11 aa, Homo sapiens
  CDR3 for alpha chain variable domain of TCR clone 387116 (TRAV3, TRAJ21)
CAVGNFNKFYF

SEQ ID NO: 774232 - protein, 17 aa, Homo sapiens
  CDR3 for beta chain variable domain of TCR clone 387116 (TRBV7-2, TRBJ2-3)
CASSLEARGTSTDTQYF

SEQ ID NO: 774233 - protein, 12 aa, Homo sapiens
  CDR3 for alpha chain variable domain of TCR clone 387117 (TRAV12-3, TRAJ17)
CAMTLTRNKLTF

SEQ ID NO: 774234 - protein, 13 aa, Homo sapiens
  CDR3 for beta chain variable domain of TCR clone 387117 (TRBV19, TRBJ1-2)
CASSVPGQDGYTF

SEQ ID NO: 774235 - protein, 15 aa, Homo sapiens
  CDR3 for alpha chain variable domain of TCR clone 387118 (TRAV9-2, TRAJ16)
CALSDRFIDGQKLLF

SEQ ID NO: 774236 - protein, 17 aa, Homo sapiens
  CDR3 for beta chain variable domain of TCR clone 387118 (TRBV19, TRBJ2-6)
CASSKGATASGANVLTF

SEQ ID NO: 774237 - protein, 12 aa, Homo sapiens
  CDR3 for alpha chain variable domain of TCR clone 387119 (TRAV13-1, TRAJ15)
CAASQAGTALIF

SEQ ID NO: 774238 - protein, 14 aa, Homo sapiens
  CDR3 for beta chain variable domain of TCR clone 387119 (TRBV19, TRBJ2-2)
CASSTLHRSGDLFF

SEQ ID NO: 774239 - protein, 16 aa, Homo sapiens
  CDR3 for alpha chain variable domain of TCR clone 387120 (TRAV20, TRAJ22)
CAVQASSSGSARQLTF

SEQ ID NO: 774240 - protein, 13 aa, Homo sapiens
  CDR3 for beta chain variable domain of TCR clone 387120 (TRBV7-9, TRBJ1-2)
CASSLKQNYGCTF

SEQ ID NO: 774241 - protein, 12 aa, Homo sapiens
  CDR3 for alpha chain variable domain of TCR clone 387121 (TRAV30, TRAJ43)
CGTEERGNDMRF

SEQ ID NO: 774242 - protein, 17 aa, Homo sapiens
  CDR3 for beta chain variable domain of TCR clone 387121 (TRBV5-1, TRBJ2-2)
CASSEKPNFANTGELFF

SEQ ID NO: 774243 - protein, 12 aa, Homo sapiens
  CDR3 for alpha chain variable domain of TCR clone 387122 (TRAV3, TRAJ31)
CAAQRATARLMF

SEQ ID NO: 774244 - protein, 16 aa, Homo sapiens
  CDR3 for beta chain variable domain of TCR clone 387122 (TRBV4-2, TRBJ1-1)
CASSPSPGRAAPEAFF

SEQ ID NO: 774245 - protein, 14 aa, Homo sapiens
  CDR3 for alpha chain variable domain of TCR clone 387123 (TRAV12-2, TRAJ9)
CAVNMEGGGFKTIF

SEQ ID NO: 774246 - protein, 14 aa, Homo sapiens
  CDR3 for beta chain variable domain of TCR clone 387123 (TRBV27, TRBJ2-3)
CASRRGGRTDTQYF

SEQ ID NO: 774247 - protein, 14 aa, Homo sapiens
  CDR3 for alpha chain variable domain of TCR clone 387124 (TRAV1-2, TRAJ16)
CAVNRFSGGQRLLF

SEQ ID NO: 774248 - protein, 15 aa, Homo sapiens
  CDR3 for beta chain variable domain of TCR clone 387124 (TRBV7-9, TRBJ1-6)
CASSSPGRGNSPLHF

SEQ ID NO: 774249 - protein, 12 aa, Homo sapiens
  CDR3 for alpha chain variable domain of TCR clone 387125 (TRAV12-3, TRAJ4)
CAMTGAGTRLAV

SEQ ID NO: 774250 - protein, 14 aa, Homo sapiens
  CDR3 for beta chain variable domain of TCR clone 387125 (TRBV10-3, TRBJ1-1)
CSISDTDRGVEAFF

SEQ ID NO: 774251 - protein, 11 aa, Homo sapiens
  CDR3 for alpha chain variable domain of TCR clone 387126 (TRAV12-2, TRAJ26)
CAVNYGQNFVF

SEQ ID NO: 774252 - protein, 11 aa, Homo sapiens
  CDR3 for beta chain variable domain of TCR clone 387126 (TRBV12-4, TRBJ2-5)
CASSFQGAQYF

SEQ ID NO: 774253 - protein, 14 aa, Homo sapiens
  CDR3 for alpha chain variable domain of TCR clone 387127 (TRAV29/DV5, TRAJ8)
CAASEITGFQKLVF

SEQ ID NO: 774254 - protein, 15 aa, Homo sapiens
  CDR3 for beta chain variable domain of TCR clone 387127 (TRBV6-5, TRBJ2-7)
CASSYSTSGNYEQYF

SEQ ID NO: 774255 - protein, 14 aa, Homo sapiens
  CDR3 for alpha chain variable domain of TCR clone 387128 (TRAV14/DV4, TRAJ20)
CAMRESLNDYKLSF

SEQ ID NO: 774256 - protein, 15 aa, Homo sapiens
  CDR3 for beta chain variable domain of TCR clone 387128 (TRBV5-7, TRBJ1-5)
CASSYGKVWDQPQHF

SEQ ID NO: 774257 - protein, 13 aa, Homo sapiens
  CDR3 for alpha chain variable domain of TCR clone 387129 (TRAV17, TRAJ40)
CATDEGGTYKYIF

SEQ ID NO: 774258 - protein, 14 aa, Homo sapiens
  CDR3 for beta chain variable domain of TCR clone 387129 (TRBV18, TRBJ2-7)
CASSPRGGAYEQYF

SEQ ID NO: 774259 - protein, 12 aa, Homo sapiens
  CDR3 for alpha chain variable domain of TCR clone 387130 (TRAV22, TRAJ22)
CAPGVSARQLTF

SEQ ID NO: 774260 - protein, 13 aa, Homo sapiens
  CDR3 for beta chain variable domain of TCR clone 387130 (TRBV15, TRBJ1-6)
CATSGGLNSPLHF

SEQ ID NO: 774261 - protein, 14 aa, Homo sapiens
  CDR3 for alpha chain variable domain of TCR clone 387131 (TRAV1-1, TRAJ13)
CAPPQGGGYQKVTF

SEQ ID NO: 774262 - protein, 15 aa, Homo sapiens
  CDR3 for beta chain variable domain of TCR clone 387131 (TRBV19, TRBJ1-2)
CASSVGQVLNYGYTF

SEQ ID NO: 774263 - protein, 12 aa, Homo sapiens
  CDR3 for alpha chain variable domain of TCR clone 387132 (TRAV2, TRAJ3)
CALRSSASKIIF

SEQ ID NO: 774264 - protein, 15 aa, Homo sapiens
  CDR3 for beta chain variable domain of TCR clone 387132 (TRBV15, TRBJ2-5)
CATSRDGGPQETQYF

SEQ ID NO: 774265 - protein, 15 aa, Homo sapiens
  CDR3 for alpha chain variable domain of TCR clone 387133 (TRAV20, TRAJ43)
CAVQAGKSSNNDLRF

SEQ ID NO: 774266 - protein, 13 aa, Homo sapiens
  CDR3 for beta chain variable domain of TCR clone 387133 (TRBV27, TRBJ1-1)
CASSLSIGAEAFF

SEQ ID NO: 774267 - protein, 12 aa, Homo sapiens
  CDR3 for alpha chain variable domain of TCR clone 387134 (TRAV29/DV5, TRAJ34)
CAASGNTDKLIF

SEQ ID NO: 774268 - protein, 14 aa, Homo sapiens
  CDR3 for beta chain variable domain of TCR clone 387134 (TRBV28, TRBJ1-2)
CASRIQGANYGYTF

SEQ ID NO: 774269 - protein, 14 aa, Homo sapiens
  CDR3 for alpha chain variable domain of TCR clone 387135 (TRAV12-3, TRAJ33)
CAMSAGDSNYQLIW

SEQ ID NO: 774270 - protein, 14 aa, Homo sapiens
  CDR3 for beta chain variable domain of TCR clone 387135 (TRBV28, TRBJ2-4)
CASTQVTGVNMQYF

SEQ ID NO: 774271 - protein, 15 aa, Homo sapiens
  CDR3 for alpha chain variable domain of TCR clone 387136 (TRAV12-2, TRAJ50)
CAVNGLETSYDKVIF

SEQ ID NO: 774272 - protein, 14 aa, Homo sapiens
  CDR3 for beta chain variable domain of TCR clone 387136 (TRBV7-2, TRBJ1-1)
CASSFLTGTAEAFF

SEQ ID NO: 774273 - protein, 14 aa, Homo sapiens
  CDR3 for alpha chain variable domain of TCR clone 387137 (TRAV9-2, TRAJ39)
CALYIYNAVNMLTF

SEQ ID NO: 774274 - protein, 14 aa, Homo sapiens
  CDR3 for beta chain variable domain of TCR clone 387137 (TRBV7-6, TRBJ2-3)
CASSLGTVTDTQYF

SEQ ID NO: 774275 - protein, 12 aa, Homo sapiens
  CDR3 for alpha chain variable domain of TCR clone 387138 (TRAV16, TRAJ56)
CAPTGANSKLTF

SEQ ID NO: 774276 - protein, 15 aa, Homo sapiens
  CDR3 for beta chain variable domain of TCR clone 387138 (TRBV10-3, TRBJ2-6)
CATPAAASGANVLTF

SEQ ID NO: 774277 - protein, 14 aa, Homo sapiens
  CDR3 for alpha chain variable domain of TCR clone 387139 (TRAV8-4, TRAJ9)
CAVILNTGGFKTIF

SEQ ID NO: 774278 - protein, 11 aa, Homo sapiens
  CDR3 for beta chain variable domain of TCR clone 387139 (TRBV7-9, TRBJ2-6)
CASTRANVLTF

SEQ ID NO: 774279 - protein, 17 aa, Homo sapiens
  CDR3 for alpha chain variable domain of TCR clone 387140 (TRAV4, TRAJ20)
CTTASWVKGNNDYKLSF

SEQ ID NO: 774280 - protein, 17 aa, Homo sapiens
  CDR3 for beta chain variable domain of TCR clone 387140 (TRBV11-2, TRBJ2-1)
CASSLSPPGVEYNEQFF

SEQ ID NO: 774281 - protein, 11 aa, Homo sapiens
  CDR3 for alpha chain variable domain of TCR clone 387141 (TRAV12-3, TRAJ43)
CAMSVSNDMRF

SEQ ID NO: 774282 - protein, 18 aa, Homo sapiens
  CDR3 for beta chain variable domain of TCR clone 387141 (TRBV20-1, TRBJ2-3)
CSASVLAGGPGTTDTQYF

SEQ ID NO: 774283 - protein, 17 aa, Homo sapiens
  CDR3 for alpha chain variable domain of TCR clone 387142 (TRAV3, TRAJ6)
RAVSRRTDTGGSYIPTF

SEQ ID NO: 774284 - protein, 18 aa, Homo sapiens
  CDR3 for beta chain variable domain of TCR clone 387142 (TRBV7-2, TRBJ2-3)
CASSLETSRGRKADTQYF

SEQ ID NO: 774285 - protein, 13 aa, Homo sapiens
  CDR3 for alpha chain variable domain of TCR clone 387143 (TRAV13-1, TRAJ20)
CAARVSNDYKLSF

SEQ ID NO: 774286 - protein, 13 aa, Homo sapiens
  CDR3 for beta chain variable domain of TCR clone 387143 (TRBV10-2, TRBJ2-3)
CASSESGDHTQYF

SEQ ID NO: 774287 - protein, 16 aa, Homo sapiens
  CDR3 for alpha chain variable domain of TCR clone 387144 (TRAV3, TRAJ42)
CAVRDIEGGSQGNLIF

SEQ ID NO: 774288 - protein, 14 aa, Homo sapiens
  CDR3 for beta chain variable domain of TCR clone 387144 (TRBV18, TRBJ1-1)
CASSPPTGRTEPFF

SEQ ID NO: 774289 - protein, 14 aa, Homo sapiens
  CDR3 for alpha chain variable domain of TCR clone 387145 (TRAV34, TRAJ44)
CGADGTGTASKLTF

SEQ ID NO: 774290 - protein, 18 aa, Homo sapiens
  CDR3 for beta chain variable domain of TCR clone 387145 (TRBV23-1, TRBJ2-7)
CASSQYRRTDSTSSTSGR

SEQ ID NO: 774291 - protein, 14 aa, Homo sapiens
  CDR3 for alpha chain variable domain of TCR clone 387146 (TRAV17, TRAJ26)
CATDASNYGQNFVF

SEQ ID NO: 774292 - protein, 15 aa, Homo sapiens
  CDR3 for beta chain variable domain of TCR clone 387146 (TRBV7-9, TRBJ2-2)
CASRRTGGRTGELFF

SEQ ID NO: 774293 - protein, 15 aa, Homo sapiens
  CDR3 for alpha chain variable domain of TCR clone 387147 (TRAV25, TRAJ23)
CALAPNYNQGGKLIF

SEQ ID NO: 774294 - protein, 17 aa, Homo sapiens
  CDR3 for beta chain variable domain of TCR clone 387147 (TRBV28, TRBJ2-7)
CASSPLHRASGVYEQYF

SEQ ID NO: 774295 - protein, 12 aa, Homo sapiens
  CDR3 for alpha chain variable domain of TCR clone 387148 (TRAV17, TRAJ4)
CATDGGYNKLIF

SEQ ID NO: 774296 - protein, 14 aa, Homo sapiens
  CDR3 for beta chain variable domain of TCR clone 387148 (TRBV19, TRBJ2-1)
CASEVTGARNEQFF

SEQ ID NO: 774297 - protein, 14 aa, Homo sapiens
  CDR3 for alpha chain variable domain of TCR clone 387149 (TRAV1-1, TRAJ27)
CAVIYNTNAGKSTF

SEQ ID NO: 774298 - protein, 15 aa, Homo sapiens
  CDR3 for beta chain variable domain of TCR clone 387149 (TRBV6-3, TRBJ2-7)
CASSSPGTVFYEQYV

SEQ ID NO: 774299 - protein, 12 aa, Homo sapiens
  CDR3 for alpha chain variable domain of TCR clone 387150 (TRAV12-3, TRAJ29)
CAAREGNTPLVF

SEQ ID NO: 774300 - protein, 17 aa, Homo sapiens
  CDR3 for beta chain variable domain of TCR clone 387150 (TRBV18, TRBJ2-1)
CDSSPLAAGAGDNEQFF

SEQ ID NO: 774301 - protein, 12 aa, Homo sapiens
  CDR3 for alpha chain variable domain of TCR clone 387151 (TRAV20, TRAJ23)
CAVHNQGGKLIF

SEQ ID NO: 774302 - protein, 14 aa, Homo sapiens
  CDR3 for beta chain variable domain of TCR clone 387151 (TRBV11-2, TRBJ2-3)
CASSLGRGTDTQYF

SEQ ID NO: 774303 - protein, 12 aa, Homo sapiens
  CDR3 for alpha chain variable domain of TCR clone 387152 (TRAV1-2, TRAJ33)
CAALDSNYQLIW

SEQ ID NO: 774304 - protein, 13 aa, Homo sapiens
  CDR3 for beta chain variable domain of TCR clone 387152 (TRBV7-2, TRBJ2-2)
CASSVAVTGELFF

SEQ ID NO: 774305 - protein, 16 aa, Homo sapiens
  CDR3 for alpha chain variable domain of TCR clone 387153 (TRAV16, TRAJ52)
CALSAACGTSYGKLTF

SEQ ID NO: 774306 - protein, 16 aa, Homo sapiens
  CDR3 for beta chain variable domain of TCR clone 387153 (TRBV12-4, TRBJ1-5)
CASSRPVGGSNQPQHF

SEQ ID NO: 774307 - protein, 14 aa, Homo sapiens
  CDR3 for alpha chain variable domain of TCR clone 387154 (TRAV1-2, TRAJ8)
CAAREDTGFQKLVF

SEQ ID NO: 774308 - protein, 20 aa, Homo sapiens
  CDR3 for beta chain variable domain of TCR clone 387154 (TRBV28, TRBJ2-1)
CASTPIGRSPGLAGGNEQFF

SEQ ID NO: 774309 - protein, 13 aa, Homo sapiens
  CDR3 for alpha chain variable domain of TCR clone 387155 (TRAV23/DV6, TRAJ45)
CAARRGGADGLTF

SEQ ID NO: 774310 - protein, 13 aa, Homo sapiens
  CDR3 for beta chain variable domain of TCR clone 387155 (TRBV10-2, TRBJ2-7)
CASGASGGYEQYF

SEQ ID NO: 774311 - protein, 13 aa, Homo sapiens
  CDR3 for alpha chain variable domain of TCR clone 387156 (TRAV35, TRAJ42)
CSGFPGSRGNLIF

SEQ ID NO: 774312 - protein, 12 aa, Homo sapiens
  CDR3 for beta chain variable domain of TCR clone 387156 (TRBV7-2, TRBJ1-6)
CASSLSSSPLHF

SEQ ID NO: 774313 - protein, 15 aa, Homo sapiens
  CDR3 for alpha chain variable domain of TCR clone 387157 (TRAV12-1, TRAJ43)
CVVNRGRYNNNDMRF

SEQ ID NO: 774314 - protein, 13 aa, Homo sapiens
  CDR3 for beta chain variable domain of TCR clone 387157 (TRBV2, TRBJ2-7)
CASSVGGSGEQYF

SEQ ID NO: 774315 - protein, 12 aa, Homo sapiens
  CDR3 for alpha chain variable domain of TCR clone 387158 (TRAV2, TRAJ9)
CAVGAGDFKTIF

SEQ ID NO: 774316 - protein, 15 aa, Homo sapiens
  CDR3 for beta chain variable domain of TCR clone 387158 (TRBV11-3, TRBJ2-3)
CASLKDGREGDTQYF

SEQ ID NO: 774317 - protein, 13 aa, Homo sapiens
  CDR3 for alpha chain variable domain of TCR clone 387159 (TRAV25, TRAJ40)
CAGSVSGTYKYIF

SEQ ID NO: 774318 - protein, 14 aa, Homo sapiens
  CDR3 for beta chain variable domain of TCR clone 387159 (TRBV7-2, TRBJ2-7)
CASRSQGAAYEQYF

SEQ ID NO: 774319 - protein, 12 aa, Homo sapiens
  CDR3 for alpha chain variable domain of TCR clone 387160 (TRAV12-3, TRAJ17)
CAMTLTGNKLTF

SEQ ID NO: 774320 - protein, 16 aa, Homo sapiens
  CDR3 for beta chain variable domain of TCR clone 387160 (TRBV4-2, TRBJ2-2)
CASRDGDSGTTGELFF

SEQ ID NO: 774321 - protein, 13 aa, Homo sapiens
  CDR3 for alpha chain variable domain of TCR clone 387161 (TRAV35, TRAJ49)
CAGRLNTGNQFYF

SEQ ID NO: 774322 - protein, 17 aa, Homo sapiens
  CDR3 for beta chain variable domain of TCR clone 387161 (TRBV6-1, TRBJ2-1)
CASSEGGWGQFYNEQFV

SEQ ID NO: 774323 - protein, 19 aa, Homo sapiens
  CDR3 for alpha chain variable domain of TCR clone 387162 (TRAV3, TRAJ6)
CAVRDRNPSRSGGSYIPTF

SEQ ID NO: 774324 - protein, 14 aa, Homo sapiens
  CDR3 for beta chain variable domain of TCR clone 387162 (TRBV29-1, TRBJ1-2)
CSARRGTQTSGYTF

SEQ ID NO: 774325 - protein, 18 aa, Homo sapiens
  CDR3 for alpha chain variable domain of TCR clone 387163 (TRAV21, TRAJ52)
CAVRPSPAGGTSYGKLTF

SEQ ID NO: 774326 - protein, 16 aa, Homo sapiens
  CDR3 for beta chain variable domain of TCR clone 387163 (TRBV13, TRBJ2-1)
CASSLSRVAGGNEQFF

SEQ ID NO: 774327 - protein, 13 aa, Homo sapiens
  CDR3 for alpha chain variable domain of TCR clone 387164 (TRAV12-2, TRAJ39)
CAVNNNAGNMLTF

SEQ ID NO: 774328 - protein, 13 aa, Homo sapiens
  CDR3 for beta chain variable domain of TCR clone 387164 (TRBV2, TRBJ1-5)
CTTAGPGNQPQHF

SEQ ID NO: 774329 - protein, 15 aa, Homo sapiens
  CDR3 for alpha chain variable domain of TCR clone 387165 (TRAV12-3, TRAJ11)
CAMSEENSGYSTLTF

SEQ ID NO: 774330 - protein, 15 aa, Homo sapiens
  CDR3 for beta chain variable domain of TCR clone 387165 (TRBV11-3, TRBJ2-7)
CASSPGPASSYEQYF

SEQ ID NO: 774331 - protein, 17 aa, Homo sapiens
  CDR3 for alpha chain variable domain of TCR clone 387166 (TRAV36/DV7, TRAJ52)
CAVAQRAGGTSYGKLTF

SEQ ID NO: 774332 - protein, 16 aa, Homo sapiens
  CDR3 for beta chain variable domain of TCR clone 387166 (TRBV7-2, TRBJ2-7)
CASSLVMGVGSYEQYF

SEQ ID NO: 774333 - protein, 15 aa, Homo sapiens
  CDR3 for alpha chain variable domain of TCR clone 387167 (TRAV17, TRAJ16)
CATALRFSDGQELLF

SEQ ID NO: 774334 - protein, 12 aa, Homo sapiens
  CDR3 for beta chain variable domain of TCR clone 387167 (TRBV2, TRBJ2-7)
CASSDPDYEQYF

SEQ ID NO: 774335 - protein, 13 aa, Homo sapiens
  CDR3 for alpha chain variable domain of TCR clone 387168 (TRAV12-1, TRAJ22)
RVVPSGSARQLTF

SEQ ID NO: 774336 - protein, 15 aa, Homo sapiens
  CDR3 for beta chain variable domain of TCR clone 387168 (TRBV11-3, TRBJ2-7)
CASSPGPASSYEQYF

SEQ ID NO: 774337 - protein, 15 aa, Homo sapiens
  CDR3 for alpha chain variable domain of TCR clone 387169 (TRAV38-1, TRAJ37)
CAFIFGSGNTGKLIF

SEQ ID NO: 774338 - protein, 15 aa, Homo sapiens
  CDR3 for beta chain variable domain of TCR clone 387169 (TRBV20-1, TRBJ2-2)
CSAIPGHSNTGELFF

SEQ ID NO: 774339 - protein, 18 aa, Homo sapiens
  CDR3 for alpha chain variable domain of TCR clone 387170 (TRAV21, TRAJ52)
CAVRPSPAGGTSYGKLTF

SEQ ID NO: 774340 - protein, 13 aa, Homo sapiens
  CDR3 for beta chain variable domain of TCR clone 387170 (TRBV11-2, TRBJ2-1)
CASSPGTYNEQFF

SEQ ID NO: 774341 - protein, 15 aa, Homo sapiens
  CDR3 for alpha chain variable domain of TCR clone 387171 (TRAV8-3, TRAJ45)
CASSYPGGGADGLTF

SEQ ID NO: 774342 - protein, 16 aa, Homo sapiens
  CDR3 for beta chain variable domain of TCR clone 387171 (TRBV7-9, TRBJ2-2)
CASSGFGGANTGELFF

SEQ ID NO: 774343 - protein, 16 aa, Homo sapiens
  CDR3 for alpha chain variable domain of TCR clone 387172 (TRAV30, TRAJ49)
SAAQRVGPNTGNQFYF

SEQ ID NO: 774344 - protein, 11 aa, Homo sapiens
  CDR3 for beta chain variable domain of TCR clone 387172 (TRBV24-1, TRBJ2-3)
CATASTDTQYF

SEQ ID NO: 774345 - protein, 11 aa, Homo sapiens
  CDR3 for alpha chain variable domain of TCR clone 387173 (TRAV3, TRAJ17)
PRGAAGNKLTF

SEQ ID NO: 774346 - protein, 16 aa, Homo sapiens
  CDR3 for beta chain variable domain of TCR clone 387173 (TRBV7-3, TRBJ2-1)
CASSLEGYRSYNEQFF

SEQ ID NO: 774347 - protein, 17 aa, Homo sapiens
  CDR3 for alpha chain variable domain of TCR clone 387174 (TRAV3, TRAJ42)
CAVRDRDYGGSQGNLIF

SEQ ID NO: 774348 - protein, 15 aa, Homo sapiens
  CDR3 for beta chain variable domain of TCR clone 387174 (TRBV5-1, TRBJ2-1)
CASSPPRAPYNEQFL

SEQ ID NO: 774349 - protein, 18 aa, Homo sapiens
  CDR3 for alpha chain variable domain of TCR clone 387175 (TRAV21, TRAJ52)
CAVRPSPAGGTSYGKLTF

SEQ ID NO: 774350 - protein, 18 aa, Homo sapiens
  CDR3 for beta chain variable domain of TCR clone 387175 (TRBV3-1, TRBJ2-5)
CASSQAGTSGGGERPSTS

SEQ ID NO: 774351 - protein, 12 aa, Homo sapiens
  CDR3 for alpha chain variable domain of TCR clone 387176 (TRAV17, TRAJ4)
CATDGGYNKLIF

SEQ ID NO: 774352 - protein, 13 aa, Homo sapiens
  CDR3 for beta chain variable domain of TCR clone 387176 (TRBV20-1, TRBJ1-5)
CSASPRANQPQHF

SEQ ID NO: 774353 - protein, 16 aa, Homo sapiens
  CDR3 for alpha chain variable domain of TCR clone 387177 (TRAV30, TRAJ24)
CGTEIVDADSWGKFQF

SEQ ID NO: 774354 - protein, 17 aa, Homo sapiens
  CDR3 for beta chain variable domain of TCR clone 387177 (TRBV20-1, TRBJ2-1)
CSASSSGLAGSYNEQFV

SEQ ID NO: 774355 - protein, 14 aa, Homo sapiens
  CDR3 for alpha chain variable domain of TCR clone 387178 (TRAV12-3, TRAJ10)
SHLPLTGGGNKLTF

SEQ ID NO: 774356 - protein, 18 aa, Homo sapiens
  CDR3 for beta chain variable domain of TCR clone 387178 (TRBV4-1, TRBJ1-4)
CASSQDLRRGEKNCFLAV

SEQ ID NO: 774357 - protein, 13 aa, Homo sapiens
  CDR3 for alpha chain variable domain of TCR clone 387179 (TRAV27, TRAJ42)
CAGARGSQGNLIF

SEQ ID NO: 774358 - protein, 15 aa, Homo sapiens
  CDR3 for beta chain variable domain of TCR clone 387179 (TRBV10-3, TRBJ2-2)
CAIRTDRVDTGELFF

SEQ ID NO: 774359 - protein, 14 aa, Homo sapiens
  CDR3 for alpha chain variable domain of TCR clone 387180 (TRAV17, TRAJ54)
CATDANQGTPKLVF

SEQ ID NO: 774360 - protein, 12 aa, Homo sapiens
  CDR3 for beta chain variable domain of TCR clone 387180 (TRBV6-3, TRBJ2-1)
CASSGSYNEQFF

SEQ ID NO: 774361 - protein, 13 aa, Homo sapiens
  CDR3 for alpha chain variable domain of TCR clone 387181 (TRAV9-2, TRAJ53)
CALSGGSNYKLTF

SEQ ID NO: 774362 - protein, 16 aa, Homo sapiens
  CDR3 for beta chain variable domain of TCR clone 387181 (TRBV7-9, TRBJ1-2)
CASSLGFSSGEDGYTF

SEQ ID NO: 774363 - protein, 16 aa, Homo sapiens
  CDR3 for alpha chain variable domain of TCR clone 387182 (TRAV3, TRAJ10)
CAVRDMRAGGGNKPTF

SEQ ID NO: 774364 - protein, 16 aa, Homo sapiens
  CDR3 for beta chain variable domain of TCR clone 387182 (TRBV7-3, TRBJ2-2)
CASSLKRGTLSGELFF

SEQ ID NO: 774365 - protein, 16 aa, Homo sapiens
  CDR3 for alpha chain variable domain of TCR clone 387183 (TRAV30, TRAJ24)
CGTHIVDADSWGKFQF

SEQ ID NO: 774366 - protein, 14 aa, Homo sapiens
  CDR3 for beta chain variable domain of TCR clone 387183 (TRBV12-5, TRBJ2-5)
CASGSRTHQETQYF

SEQ ID NO: 774367 - protein, 14 aa, Homo sapiens
  CDR3 for alpha chain variable domain of TCR clone 387184 (TRAV20, TRAJ56)
CAVQFGGANSKLTF

SEQ ID NO: 774368 - protein, 14 aa, Homo sapiens
  CDR3 for beta chain variable domain of TCR clone 387184 (TRBV7-9, TRBJ2-1)
CASSPRDSLYEQFF

SEQ ID NO: 774369 - protein, 11 aa, Homo sapiens
  CDR3 for alpha chain variable domain of TCR clone 387185 (TRAV2, TRAJ40)
CAVEGTYKYIF

SEQ ID NO: 774370 - protein, 17 aa, Homo sapiens
  CDR3 for beta chain variable domain of TCR clone 387185 (TRBV10-3, TRBJ1-2)
CAISQTGSASGVDRYTF

SEQ ID NO: 774371 - protein, 16 aa, Homo sapiens
  CDR3 for alpha chain variable domain of TCR clone 387186 (TRAV16, TRAJ42)
CALSGYYGGSQGNLIL

SEQ ID NO: 774372 - protein, 14 aa, Homo sapiens
  CDR3 for beta chain variable domain of TCR clone 387186 (TRBV3-1, TRBJ2-5)
CASSQAVRQETQYF

SEQ ID NO: 774373 - protein, 14 aa, Homo sapiens
  CDR3 for alpha chain variable domain of TCR clone 387187 (TRAV8-3, TRAJ4)
CAVGAAGGYNKLIL

SEQ ID NO: 774374 - protein, 15 aa, Homo sapiens
  CDR3 for beta chain variable domain of TCR clone 387187 (TRBV5-1, TRBJ2-1)
CASSPPRAPYNEQFF

SEQ ID NO: 774375 - protein, 12 aa, Homo sapiens
  CDR3 for alpha chain variable domain of TCR clone 387188 (TRAV22, TRAJ22)
CAPGGSARQLTF

SEQ ID NO: 774376 - protein, 16 aa, Homo sapiens
  CDR3 for beta chain variable domain of TCR clone 387188 (TRBV24-1, TRBJ2-3)
CATSDPGTGATDTQYF

SEQ ID NO: 774377 - protein, 15 aa, Homo sapiens
  CDR3 for alpha chain variable domain of TCR clone 387189 (TRAV17, TRAJ57)
CATGPSQGGSEKLVF

SEQ ID NO: 774378 - protein, 12 aa, Homo sapiens
  CDR3 for beta chain variable domain of TCR clone 387189 (TRBV11-2, TRBJ2-1)
GASSPGNNEQFF

SEQ ID NO: 774379 - protein, 14 aa, Homo sapiens
  CDR3 for alpha chain variable domain of TCR clone 387190 (TRAV17, TRAJ15)
CATDRGQAGTALIF

SEQ ID NO: 774380 - protein, 16 aa, Homo sapiens
  CDR3 for beta chain variable domain of TCR clone 387190 (TRBV4-2, TRBJ2-3)
CASSQDGARGGVKQYF

SEQ ID NO: 774381 - protein, 14 aa, Homo sapiens
  CDR3 for alpha chain variable domain of TCR clone 387191 (TRAV13-1, TRAJ22)
CAASNGGSARQLTF

SEQ ID NO: 774382 - protein, 14 aa, Homo sapiens
  CDR3 for beta chain variable domain of TCR clone 387191 (TRBV18, TRBJ2-2)
CASSTGQNTGELFF

SEQ ID NO: 774383 - protein, 13 aa, Homo sapiens
  CDR3 for alpha chain variable domain of TCR clone 387192 (TRAV13-2, TRAJ53)
CAENMGSNYKLTF

SEQ ID NO: 774384 - protein, 15 aa, Homo sapiens
  CDR3 for beta chain variable domain of TCR clone 387192 (TRBV2, TRBJ2-7)
CASSEGLARSYEQYF

SEQ ID NO: 774385 - protein, 14 aa, Homo sapiens
  CDR3 for alpha chain variable domain of TCR clone 387193 (TRAV1-2, TRAJ16)
CAVNRFSDGQKLLF

SEQ ID NO: 774386 - protein, 13 aa, Homo sapiens
  CDR3 for beta chain variable domain of TCR clone 387193 (TRBV10-3, TRBJ2-7)
CAIRPTEAYEQYF

SEQ ID NO: 774387 - protein, 15 aa, Homo sapiens
  CDR3 for alpha chain variable domain of TCR clone 387194 (TRAV3, TRAJ5)
CAVRDLDTGRRALTF

SEQ ID NO: 774388 - protein, 14 aa, Homo sapiens
  CDR3 for beta chain variable domain of TCR clone 387194 (TRBV25-1, TRBJ1-4)
FASSGGGQPEKLFF

SEQ ID NO: 774389 - protein, 14 aa, Homo sapiens
  CDR3 for alpha chain variable domain of TCR clone 387195 (TRAV27, TRAJ22)
CAGVSVLGKRQLTF

SEQ ID NO: 774390 - protein, 15 aa, Homo sapiens
  CDR3 for beta chain variable domain of TCR clone 387195 (TRBV4-1, TRBJ1-4)
CASSDTGGTNEKLFF

SEQ ID NO: 774391 - protein, 13 aa, Homo sapiens
  CDR3 for alpha chain variable domain of TCR clone 387196 (TRAV21, TRAJ34)
CAVMSYNTDKLIF

SEQ ID NO: 774392 - protein, 15 aa, Homo sapiens
  CDR3 for beta chain variable domain of TCR clone 387196 (TRBV13, TRBJ2-1)
CASNLAGGSANEQFF

SEQ ID NO: 774393 - protein, 15 aa, Homo sapiens
  CDR3 for alpha chain variable domain of TCR clone 387197 (TRAV16, TRAJ42)
CALRRGGGSQGNLIF

SEQ ID NO: 774394 - protein, 13 aa, Homo sapiens
  CDR3 for beta chain variable domain of TCR clone 387197 (TRBV19, TRBJ1-5)
CASSMRGYQPQHF

SEQ ID NO: 774395 - protein, 14 aa, Homo sapiens
  CDR3 for alpha chain variable domain of TCR clone 387198 (TRAV13-1, TRAJ35)
CAASKGGFGNVLHC

SEQ ID NO: 774396 - protein, 13 aa, Homo sapiens
  CDR3 for beta chain variable domain of TCR clone 387198 (TRBV7-3, TRBJ1-1)
SSSSQDWGAEAFF

SEQ ID NO: 774397 - protein, 14 aa, Homo sapiens
  CDR3 for alpha chain variable domain of TCR clone 387199 (TRAV17, TRAJ4)
CATAPLGGYNKLVF

SEQ ID NO: 774398 - protein, 13 aa, Homo sapiens
  CDR3 for beta chain variable domain of TCR clone 387199 (TRBV12-4, TRBJ1-3)
CASSLASGNTIYF

SEQ ID NO: 774399 - protein, 15 aa, Homo sapiens
  CDR3 for alpha chain variable domain of TCR clone 387200 (TRAV20, TRAJ32)
CAVQAKRGATNKLIF

SEQ ID NO: 774400 - protein, 13 aa, Homo sapiens
  CDR3 for beta chain variable domain of TCR clone 387200 (TRBV15, TRBJ1-6)
CATSGGLNSPLHF

SEQ ID NO: 774401 - protein, 12 aa, Homo sapiens
  CDR3 for alpha chain variable domain of TCR clone 387201 (TRAV1-1, TRAJ30)
CAVRGRGDKSIF

SEQ ID NO: 774402 - protein, 13 aa, Homo sapiens
  CDR3 for beta chain variable domain of TCR clone 387201 (TRBV11-3, TRBJ2-7)
CASSLDKLYEQYF

SEQ ID NO: 774403 - protein, 13 aa, Homo sapiens
  CDR3 for alpha chain variable domain of TCR clone 387202 (TRAV12-3, TRAJ31)
CAMSANNNARLMF

SEQ ID NO: 774404 - protein, 16 aa, Homo sapiens
  CDR3 for beta chain variable domain of TCR clone 387202 (TRBV7-9, TRBJ1-2)
CASSLGLSSGEDGYTF

SEQ ID NO: 774405 - protein, 11 aa, Homo sapiens
  CDR3 for alpha chain variable domain of TCR clone 387203 (TRAV21, TRAJ34)
CAHYNTDKLIF

SEQ ID NO: 774406 - protein, 15 aa, Homo sapiens
  CDR3 for beta chain variable domain of TCR clone 387203 (TRBV6-5, TRBJ2-1)
CASSYDAGAGNEQFF

SEQ ID NO: 774407 - protein, 14 aa, Homo sapiens
  CDR3 for alpha chain variable domain of TCR clone 387204 (TRAV12-2, TRAJ11)
CAVNMKSGYSTLTF

SEQ ID NO: 774408 - protein, 13 aa, Homo sapiens
  CDR3 for beta chain variable domain of TCR clone 387204 (TRBV6-1, TRBJ1-2)
CASSDSPSYGYTF

SEQ ID NO: 774409 - protein, 12 aa, Homo sapiens
  CDR3 for alpha chain variable domain of TCR clone 387205 (TRAV12-1, TRAJ9)
CVVNPASFKTIF

SEQ ID NO: 774410 - protein, 13 aa, Homo sapiens
  CDR3 for beta chain variable domain of TCR clone 387205 (TRBV4-2, TRBJ1-1)
CASSQAGNTEAFF

SEQ ID NO: 774411 - protein, 15 aa, Homo sapiens
  CDR3 for alpha chain variable domain of TCR clone 387206 (TRAV35, TRAJ30)
CAGQPEMNRDDKIIF

SEQ ID NO: 774412 - protein, 11 aa, Homo sapiens
  CDR3 for beta chain variable domain of TCR clone 387206 (TRBV29-1, TRBJ2-5)
CSEDRTGTQYF

SEQ ID NO: 774413 - protein, 15 aa, Homo sapiens
  CDR3 for alpha chain variable domain of TCR clone 387207 (TRAV1-2, TRAJ16)
CAVRARFSDGQKLLF

SEQ ID NO: 774414 - protein, 14 aa, Homo sapiens
  CDR3 for beta chain variable domain of TCR clone 387207 (TRBV2, TRBJ1-5)
CASSENRGGQPQHF

SEQ ID NO: 774415 - protein, 13 aa, Homo sapiens
  CDR3 for alpha chain variable domain of TCR clone 387208 (TRAV3, TRAJ21)
CAVREPDFNKFYF

SEQ ID NO: 774416 - protein, 17 aa, Homo sapiens
  CDR3 for beta chain variable domain of TCR clone 387208 (TRBV7-8, TRBJ2-6)
CASRAGTGGAGANVLTF

SEQ ID NO: 774417 - protein, 11 aa, Homo sapiens
  CDR3 for alpha chain variable domain of TCR clone 387209 (TRAV12-2, TRAJ31)
CAVTRWARLMF

SEQ ID NO: 774418 - protein, 15 aa, Homo sapiens
  CDR3 for beta chain variable domain of TCR clone 387209 (TRBV19, TRBJ2-7)
CASSIGGRLVNEQYF

SEQ ID NO: 774419 - protein, 13 aa, Homo sapiens
  CDR3 for alpha chain variable domain of TCR clone 387210 (TRAV12-3, TRAJ5)
CAMIYTGRRALTF

SEQ ID NO: 774420 - protein, 15 aa, Homo sapiens
  CDR3 for beta chain variable domain of TCR clone 387210 (TRBV20-1, TRBJ2-7)
CSARKGLAESYEQYF

SEQ ID NO: 774421 - protein, 16 aa, Homo sapiens
  CDR3 for alpha chain variable domain of TCR clone 387211 (TRAV12-1, TRAJ18)
CVVNPRGGSTLGRLYF

SEQ ID NO: 774422 - protein, 14 aa, Homo sapiens
  CDR3 for beta chain variable domain of TCR clone 387211 (TRBV27, TRBJ2-1)
CASRPMGQGAEQFF

SEQ ID NO: 774423 - protein, 11 aa, Homo sapiens
  CDR3 for alpha chain variable domain of TCR clone 387212 (TRAV2, TRAJ13)
CASGGYQKVTF

SEQ ID NO: 774424 - protein, 17 aa, Homo sapiens
  CDR3 for beta chain variable domain of TCR clone 387212 (TRBV28, TRBJ2-5)
CASSTPEGDALQETQYC

SEQ ID NO: 774425 - protein, 15 aa, Homo sapiens
  CDR3 for alpha chain variable domain of TCR clone 387213 (TRAV2, TRAJ42)
CAVNPYGGSQGNLIF

SEQ ID NO: 774426 - protein, 14 aa, Homo sapiens
  CDR3 for beta chain variable domain of TCR clone 387213 (TRBV20-1, TRBJ1-5)
CSAGSPDSNQPQHF

SEQ ID NO: 774427 - protein, 13 aa, Homo sapiens
  CDR3 for alpha chain variable domain of TCR clone 387214 (TRAV12-1, TRAJ26)
CVVRRNYGQNFVF

SEQ ID NO: 774428 - protein, 14 aa, Homo sapiens
  CDR3 for beta chain variable domain of TCR clone 387214 (TRBV6-3, TRBJ1-1)
CASRYTRESTEAFF

SEQ ID NO: 774429 - protein, 14 aa, Homo sapiens
  CDR3 for alpha chain variable domain of TCR clone 387215 (TRAV12-3, TRAJ9)
CAMSPNTGGFKTIF

SEQ ID NO: 774430 - protein, 13 aa, Homo sapiens
  CDR3 for beta chain variable domain of TCR clone 387215 (TRBV4-1, TRBJ1-1)
CASSLRGPTESFF

SEQ ID NO: 774431 - protein, 15 aa, Homo sapiens
  CDR3 for alpha chain variable domain of TCR clone 387216 (TRAV8-3, TRAJ27)
CAVGPSKTNAGKSTF

SEQ ID NO: 774432 - protein, 15 aa, Homo sapiens
  CDR3 for beta chain variable domain of TCR clone 387216 (TRBV12-4, TRBJ2-7)
CASSQRTSGNYEQYF

SEQ ID NO: 774433 - protein, 13 aa, Homo sapiens
  CDR3 for alpha chain variable domain of TCR clone 387217 (TRAV12-3, TRAJ31)
CAMSANNNARLMF

SEQ ID NO: 774434 - protein, 16 aa, Homo sapiens
  CDR3 for beta chain variable domain of TCR clone 387217 (TRBV7-9, TRBJ1-2)
CACSLGFSSGEDGYTF

SEQ ID NO: 774435 - protein, 15 aa, Homo sapiens
  CDR3 for alpha chain variable domain of TCR clone 387218 (TRAV3, TRAJ5)
CSVRDRKTGRIALTF

SEQ ID NO: 774436 - protein, 15 aa, Homo sapiens
  CDR3 for beta chain variable domain of TCR clone 387218 (TRBV7-8, TRBJ2-1)
CASSLADSLYNEQFF

SEQ ID NO: 774437 - protein, 13 aa, Homo sapiens
  CDR3 for alpha chain variable domain of TCR clone 387219 (TRAV3, TRAJ20)
CAVRDMDDYKLSF

SEQ ID NO: 774438 - protein, 13 aa, Homo sapiens
  CDR3 for beta chain variable domain of TCR clone 387219 (TRBV27, TRBJ2-7)
CASSFSQGYEQYF

SEQ ID NO: 774439 - protein, 14 aa, Homo sapiens
  CDR3 for alpha chain variable domain of TCR clone 387220 (TRAV4, TRAJ17)
CLVGDMAAGNKLTF

SEQ ID NO: 774440 - protein, 19 aa, Homo sapiens
  CDR3 for beta chain variable domain of TCR clone 387220 (TRBV4-1, TRBJ2-7)
CASSPVAGGGQAVLRAGHQ

SEQ ID NO: 774441 - protein, 16 aa, Homo sapiens
  CDR3 for alpha chain variable domain of TCR clone 387221 (TRAV26-2, TRAJ48)
CILRPPFNFGNEKLTF

SEQ ID NO: 774442 - protein, 15 aa, Homo sapiens
  CDR3 for beta chain variable domain of TCR clone 387221 (TRBV20-1, TRBJ2-3)
CSSRVEGTYTDTQYF

SEQ ID NO: 774443 - protein, 10 aa, Homo sapiens
  CDR3 for alpha chain variable domain of TCR clone 387222 (TRAV30, TRAJ48)
CGIGDEKLTF

SEQ ID NO: 774444 - protein, 16 aa, Homo sapiens
  CDR3 for beta chain variable domain of TCR clone 387222 (TRBV19, TRBJ1-5)
CASSTWTGGGNQPQHF

SEQ ID NO: 774445 - protein, 14 aa, Homo sapiens
  CDR3 for alpha chain variable domain of TCR clone 387223 (TRAV17, TRAJ54)
CATDANQGAQKLVF

SEQ ID NO: 774446 - protein, 15 aa, Homo sapiens
  CDR3 for beta chain variable domain of TCR clone 387223 (TRBV11-2, TRBJ2-1)
CASSKNRGLIYEQFF

SEQ ID NO: 774447 - protein, 10 aa, Homo sapiens
  CDR3 for alpha chain variable domain of TCR clone 387224 (TRAV16, TRAJ22)
SAMYLRQLTF

SEQ ID NO: 774448 - protein, 15 aa, Homo sapiens
  CDR3 for beta chain variable domain of TCR clone 387224 (TRBV7-9, TRBJ1-6)
CASSSPGRGNSPHHF

SEQ ID NO: 774449 - protein, 12 aa, Homo sapiens
  CDR3 for alpha chain variable domain of TCR clone 387225 (TRAV2, TRAJ33)
CAVWGSNYQLIW

SEQ ID NO: 774450 - protein, 16 aa, Homo sapiens
  CDR3 for beta chain variable domain of TCR clone 387225 (TRBV20-1, TRBJ1-4)
CSAPGQGSLTNEKLFF

SEQ ID NO: 774451 - protein, 17 aa, Homo sapiens
  CDR3 for alpha chain variable domain of TCR clone 387226 (TRAV36/DV7, TRAJ52)
CAVAQRPGGTSYRKLTF

SEQ ID NO: 774452 - protein, 15 aa, Homo sapiens
  CDR3 for beta chain variable domain of TCR clone 387226 (TRBV7-2, TRBJ2-7)
CASSLALGSAYEQYF

SEQ ID NO: 774453 - protein, 15 aa, Homo sapiens
  CDR3 for alpha chain variable domain of TCR clone 387227 (TRAV3, TRAJ4)
CAGGDGTGGYNKLIF

SEQ ID NO: 774454 - protein, 16 aa, Homo sapiens
  CDR3 for beta chain variable domain of TCR clone 387227 (TRBV27, TRBJ2-2)
CASSSSGVSNTGELFF

SEQ ID NO: 774455 - protein, 16 aa, Homo sapiens
  CDR3 for alpha chain variable domain of TCR clone 387228 (TRAV12-2, TRAJ10)
CAVNRVLTGGGNKLTF

SEQ ID NO: 774456 - protein, 14 aa, Homo sapiens
  CDR3 for beta chain variable domain of TCR clone 387228 (TRBV28, TRBJ2-7)
CASSLAATSSTSGR

SEQ ID NO: 774457 - protein, 11 aa, Homo sapiens
  CDR3 for alpha chain variable domain of TCR clone 387229 (TRAV35, TRAJ34)
CWARNTDKLIF

SEQ ID NO: 774458 - protein, 15 aa, Homo sapiens
  CDR3 for beta chain variable domain of TCR clone 387229 (TRBV5-5, TRBJ2-2)
CASSRQASGAGELFF

SEQ ID NO: 774459 - protein, 11 aa, Homo sapiens
  CDR3 for alpha chain variable domain of TCR clone 387230 (TRAV35, TRAJ30)
CAGPGDDKIIF

SEQ ID NO: 774460 - protein, 14 aa, Homo sapiens
  CDR3 for beta chain variable domain of TCR clone 387230 (TRBV19, TRBJ1-5)
CASSLGTGGQPQHF

SEQ ID NO: 774461 - protein, 11 aa, Homo sapiens
  CDR3 for alpha chain variable domain of TCR clone 387231 (TRAV1-2, TRAJ31)
CAVNNNARPMF

SEQ ID NO: 774462 - protein, 15 aa, Homo sapiens
  CDR3 for beta chain variable domain of TCR clone 387231 (TRBV28, TRBJ2-1)
CASSIRAGGRSEQFF

SEQ ID NO: 774463 - protein, 15 aa, Homo sapiens
  CDR3 for alpha chain variable domain of TCR clone 387232 (TRAV3, TRAJ22)
CAVRDRGGSARQLTF

SEQ ID NO: 774464 - protein, 14 aa, Homo sapiens
  CDR3 for beta chain variable domain of TCR clone 387232 (TRBV27, TRBJ2-1)
CAGSIAETYNEQFF

SEQ ID NO: 774465 - protein, 14 aa, Homo sapiens
  CDR3 for alpha chain variable domain of TCR clone 387233 (TRAV17, TRAJ31)
CATVLRNNNARLMF

SEQ ID NO: 774466 - protein, 15 aa, Homo sapiens
  CDR3 for beta chain variable domain of TCR clone 387233 (TRBV5-1, TRBJ2-2)
CASSLRQGDTGELFF

SEQ ID NO: 774467 - protein, 12 aa, Homo sapiens
  CDR3 for alpha chain variable domain of TCR clone 387234 (TRAV8-3, TRAJ20)
CAVGANDYKLSS

SEQ ID NO: 774468 - protein, 13 aa, Homo sapiens
  CDR3 for beta chain variable domain of TCR clone 387234 (TRBV5-1, TRBJ2-1)
CASSSEGFEEQFF

SEQ ID NO: 774469 - protein, 14 aa, Homo sapiens
  CDR3 for alpha chain variable domain of TCR clone 387235 (TRAV26-1, TRAJ38)
CIADNAGNNRKLLW

SEQ ID NO: 774470 - protein, 14 aa, Homo sapiens
  CDR3 for beta chain variable domain of TCR clone 387235 (TRBV7-8, TRBJ2-5)
CASSATGGQETQYF

SEQ ID NO: 774471 - protein, 15 aa, Homo sapiens
  CDR3 for alpha chain variable domain of TCR clone 387236 (TRAV23/DV6, TRAJ33)
CAAANSGGGNYQLIW

SEQ ID NO: 774472 - protein, 14 aa, Homo sapiens
  CDR3 for beta chain variable domain of TCR clone 387236 (TRBV7-2, TRBJ2-7)
CASSLYPGRYEQYF

SEQ ID NO: 774473 - protein, 14 aa, Homo sapiens
  CDR3 for alpha chain variable domain of TCR clone 387237 (TRAV35, TRAJ33)
CAGSSQDSNYQLIW

SEQ ID NO: 774474 - protein, 15 aa, Homo sapiens
  CDR3 for beta chain variable domain of TCR clone 387237 (TRBV20-1, TRBJ2-7)
CTAESGTSGAYEQYF

SEQ ID NO: 774475 - protein, 13 aa, Homo sapiens
  CDR3 for alpha chain variable domain of TCR clone 387238 (TRAV14/DV4, TRAJ49)
CAMVENTGNQFYF

SEQ ID NO: 774476 - protein, 14 aa, Homo sapiens
  CDR3 for beta chain variable domain of TCR clone 387238 (TRBV12-5, TRBJ2-5)
CASGSRTHQETQYF

SEQ ID NO: 774477 - protein, 15 aa, Homo sapiens
  CDR3 for alpha chain variable domain of TCR clone 387239 (TRAV20, TRAJ53)
CAVQERGGSNYKLTF

SEQ ID NO: 774478 - protein, 12 aa, Homo sapiens
  CDR3 for beta chain variable domain of TCR clone 387239 (TRBV5-1, TRBJ1-2)
CASSQDTYGYTF

SEQ ID NO: 774479 - protein, 11 aa, Homo sapiens
  CDR3 for alpha chain variable domain of TCR clone 387240 (TRAV21, TRAJ48)
CAVDGSEKLTF

SEQ ID NO: 774480 - protein, 16 aa, Homo sapiens
  CDR3 for beta chain variable domain of TCR clone 387240 (TRBV19, TRBJ2-1)
CASSSKGTRSYNEQFF

SEQ ID NO: 774481 - protein, 16 aa, Homo sapiens
  CDR3 for alpha chain variable domain of TCR clone 387241 (TRAV3, TRAJ17)
CAVRDGSPAAGNKLTF

SEQ ID NO: 774482 - protein, 15 aa, Homo sapiens
  CDR3 for beta chain variable domain of TCR clone 387241 (TRBV27, TRBJ2-7)
CASSLSVQGGYEQYF

SEQ ID NO: 774483 - protein, 16 aa, Homo sapiens
  CDR3 for alpha chain variable domain of TCR clone 387242 (TRAV23/DV6, TRAJ9)
CAASIGGNTGGFKTIF

SEQ ID NO: 774484 - protein, 13 aa, Homo sapiens
  CDR3 for beta chain variable domain of TCR clone 387242 (TRBV12-4, TRBJ1-1)
CASSPETGFEAFF

SEQ ID NO: 774485 - protein, 12 aa, Homo sapiens
  CDR3 for alpha chain variable domain of TCR clone 387243 (TRAV8-3, TRAJ20)
CAVGANDYKLSF

SEQ ID NO: 774486 - protein, 15 aa, Homo sapiens
  CDR3 for beta chain variable domain of TCR clone 387243 (TRBV19, TRBJ2-2)
CQPISRDRGHREAVF

SEQ ID NO: 774487 - protein, 12 aa, Homo sapiens
  CDR3 for alpha chain variable domain of TCR clone 387244 (TRAV13-1, TRAJ11)
SAGPSGYSTLTF

SEQ ID NO: 774488 - protein, 13 aa, Homo sapiens
  CDR3 for beta chain variable domain of TCR clone 387244 (TRBV12-4, TRBJ2-1)
CASSLSPSNEQFF

SEQ ID NO: 774489 - protein, 13 aa, Homo sapiens
  CDR3 for alpha chain variable domain of TCR clone 387245 (TRAV30, TRAJ6)
CGFIEGGSYVPTF

SEQ ID NO: 774490 - protein, 13 aa, Homo sapiens
  CDR3 for beta chain variable domain of TCR clone 387245 (TRBV5-4, TRBJ2-5)
CASSPGSQETQYF

SEQ ID NO: 774491 - protein, 15 aa, Homo sapiens
  CDR3 for alpha chain variable domain of TCR clone 387246 (TRAV8-4, TRAJ45)
CAVIWTGGGADGLTF

SEQ ID NO: 774492 - protein, 15 aa, Homo sapiens
  CDR3 for beta chain variable domain of TCR clone 387246 (TRBV20-1, TRBJ1-1)
CSASRGVTGNTEAFF

SEQ ID NO: 774493 - protein, 15 aa, Homo sapiens
  CDR3 for alpha chain variable domain of TCR clone 387247 (TRAV1-2, TRAJ36)
CAASADQTGANNRFF

SEQ ID NO: 774494 - protein, 15 aa, Homo sapiens
  CDR3 for beta chain variable domain of TCR clone 387247 (TRBV5-1, TRBJ2-7)
CASSFSTDSVYEQDF

SEQ ID NO: 774495 - protein, 14 aa, Homo sapiens
  CDR3 for alpha chain variable domain of TCR clone 387248 (TRAV16, TRAJ17)
CAPRIKAAGNKLTF

SEQ ID NO: 774496 - protein, 17 aa, Homo sapiens
  CDR3 for beta chain variable domain of TCR clone 387248 (TRBV7-2, TRBJ2-3)
WASSSYSGTRRADTQYF

SEQ ID NO: 774497 - protein, 14 aa, Homo sapiens
  CDR3 for alpha chain variable domain of TCR clone 387249 (TRAV1-2, TRAJ8)
CAVREDTGFQKLVF

SEQ ID NO: 774498 - protein, 14 aa, Homo sapiens
  CDR3 for beta chain variable domain of TCR clone 387249 (TRBV6-1, TRBJ1-5)
CASSEARSYQPQHF

SEQ ID NO: 774499 - protein, 11 aa, Homo sapiens
  CDR3 for alpha chain variable domain of TCR clone 387250 (TRAV4, TRAJ23)
CLVAPGGKLIF

SEQ ID NO: 774500 - protein, 14 aa, Homo sapiens
  CDR3 for beta chain variable domain of TCR clone 387250 (TRBV7-2, TRBJ1-4)
CASSHSKTNEKLFF

SEQ ID NO: 774501 - protein, 16 aa, Homo sapiens
  CDR3 for alpha chain variable domain of TCR clone 387251 (TRAV30, TRAJ24)
CGTEIVDADSWGKFQF

SEQ ID NO: 774502 - protein, 15 aa, Homo sapiens
  CDR3 for beta chain variable domain of TCR clone 387251 (TRBV27, TRBJ1-5)
CASSLGTGFDQPQHF

SEQ ID NO: 774503 - protein, 13 aa, Homo sapiens
  CDR3 for alpha chain variable domain of TCR clone 387252 (TRAV17, TRAJ9)
CATDYTGVFKTIF

SEQ ID NO: 774504 - protein, 13 aa, Homo sapiens
  CDR3 for beta chain variable domain of TCR clone 387252 (TRBV10-3, TRBJ2-7)
CAISEKGGYEQYF

SEQ ID NO: 774505 - protein, 15 aa, Homo sapiens
  CDR3 for alpha chain variable domain of TCR clone 387253 (TRAV3, TRAJ20)
CAVRDIKLSDYKPSF

SEQ ID NO: 774506 - protein, 16 aa, Homo sapiens
  CDR3 for beta chain variable domain of TCR clone 387253 (TRBV7-3, TRBJ2-2)
CASSLKRGTLSGELFF

SEQ ID NO: 774507 - protein, 17 aa, Homo sapiens
  CDR3 for alpha chain variable domain of TCR clone 387254 (TRAV12-2, TRAJ4)
CALNVRPVSGGYNKLIF

SEQ ID NO: 774508 - protein, 17 aa, Homo sapiens
  CDR3 for beta chain variable domain of TCR clone 387254 (TRBV6-3, TRBJ2-1)
CASSYSSGTRGLDEQFF

SEQ ID NO: 774509 - protein, 16 aa, Homo sapiens
  CDR3 for alpha chain variable domain of TCR clone 387255 (TRAV30, TRAJ24)
CGTEIVDAESWGKFQF

SEQ ID NO: 774510 - protein, 13 aa, Homo sapiens
  CDR3 for beta chain variable domain of TCR clone 387255 (TRBV10-3, TRBJ2-7)
CASKLAVNYEQYF

SEQ ID NO: 774511 - protein, 12 aa, Homo sapiens
  CDR3 for alpha chain variable domain of TCR clone 387256 (TRAV23/DV6, TRAJ30)
CAASKGDDKIIF

SEQ ID NO: 774512 - protein, 18 aa, Homo sapiens
  CDR3 for beta chain variable domain of TCR clone 387256 (TRBV10-3, TRBJ2-3)
CAVSESRVGPMRGDTQYF

SEQ ID NO: 774513 - protein, 12 aa, Homo sapiens
  CDR3 for alpha chain variable domain of TCR clone 387257 (TRAV12-1, TRAJ34)
CVVAGATDKLIF

SEQ ID NO: 774514 - protein, 12 aa, Homo sapiens
  CDR3 for beta chain variable domain of TCR clone 387257 (TRBV7-9, TRBJ1-1)
CGSSLVRGEAFF

SEQ ID NO: 774515 - protein, 16 aa, Homo sapiens
  CDR3 for alpha chain variable domain of TCR clone 387258 (TRAV27, TRAJ13)
RAGAKSDSGGYQKVTF

SEQ ID NO: 774516 - protein, 15 aa, Homo sapiens
  CDR3 for beta chain variable domain of TCR clone 387258 (TRBV29-1, TRBJ2-1)
CSVGRHALFYNEQFF

SEQ ID NO: 774517 - protein, 13 aa, Homo sapiens
  CDR3 for alpha chain variable domain of TCR clone 387259 (TRAV21, TRAJ27)
CAQWGGNAGKSTF

SEQ ID NO: 774518 - protein, 14 aa, Homo sapiens
  CDR3 for beta chain variable domain of TCR clone 387259 (TRBV2, TRBJ2-3)
CAVGGIISTDTQYF

SEQ ID NO: 774519 - protein, 14 aa, Homo sapiens
  CDR3 for alpha chain variable domain of TCR clone 387260 (TRAV27, TRAJ53)
CAGDRGGSNYKLTF

SEQ ID NO: 774520 - protein, 13 aa, Homo sapiens
  CDR3 for beta chain variable domain of TCR clone 387260 (TRBV7-9, TRBJ2-7)
CASNPLTGYEQYF

SEQ ID NO: 774521 - protein, 14 aa, Homo sapiens
  CDR3 for alpha chain variable domain of TCR clone 387261 (TRAV13-1, TRAJ24)
CAASPADSWGKFQF

SEQ ID NO: 774522 - protein, 16 aa, Homo sapiens
  CDR3 for beta chain variable domain of TCR clone 387261 (TRBV29-1, TRBJ2-6)
CSVEDITYSGANVLTF

SEQ ID NO: 774523 - protein, 10 aa, Homo sapiens
  CDR3 for alpha chain variable domain of TCR clone 387262 (TRAV21, TRAJ43)
CAVRIGDMRF

SEQ ID NO: 774524 - protein, 13 aa, Homo sapiens
  CDR3 for beta chain variable domain of TCR clone 387262 (TRBV20-1, TRBJ2-7)
CSAPGLAVYEQYF

SEQ ID NO: 774525 - protein, 16 aa, Homo sapiens
  CDR3 for alpha chain variable domain of TCR clone 387263 (TRAV3, TRAJ37)
CAVRGKGSGNPGKLIF

SEQ ID NO: 774526 - protein, 17 aa, Homo sapiens
  CDR3 for beta chain variable domain of TCR clone 387263 (TRBV13, TRBJ2-3)
CASSLSRVAGGRNTQYF

SEQ ID NO: 774527 - protein, 15 aa, Homo sapiens
  CDR3 for alpha chain variable domain of TCR clone 387264 (TRAV3, TRAJ4)
CAVREGTGGYNKLIF

SEQ ID NO: 774528 - protein, 13 aa, Homo sapiens
  CDR3 for beta chain variable domain of TCR clone 387264 (TRBV12-5, TRBJ1-2)
CASGVRTGNGYTF

SEQ ID NO: 774529 - protein, 12 aa, Homo sapiens
  CDR3 for alpha chain variable domain of TCR clone 387265 (TRAV13-1, TRAJ21)
CAAKEGFNKFYF

SEQ ID NO: 774530 - protein, 12 aa, Homo sapiens
  CDR3 for beta chain variable domain of TCR clone 387265 (TRBV7-9, TRBJ2-3)
CASSFITYTQYF

SEQ ID NO: 774531 - protein, 11 aa, Homo sapiens
  CDR3 for alpha chain variable domain of TCR clone 387266 (TRAV21, TRAJ34)
CAHYNTDKLLF

SEQ ID NO: 774532 - protein, 13 aa, Homo sapiens
  CDR3 for beta chain variable domain of TCR clone 387266 (TRBV7-6, TRBJ1-2)
CASSLVEDDGYTF

SEQ ID NO: 774533 - protein, 13 aa, Homo sapiens
  CDR3 for alpha chain variable domain of TCR clone 387267 (TRAV12-1, TRAJ29)
CVVNGPGNTPLVF

SEQ ID NO: 774534 - protein, 13 aa, Homo sapiens
  CDR3 for beta chain variable domain of TCR clone 387267 (TRBV7-2, TRBJ2-5)
CASSRGGLETQFF

SEQ ID NO: 774535 - protein, 15 aa, Homo sapiens
  CDR3 for alpha chain variable domain of TCR clone 387268 (TRAV27, TRAJ24)
CAGSMTTDSWGKLQF

SEQ ID NO: 774536 - protein, 15 aa, Homo sapiens
  CDR3 for beta chain variable domain of TCR clone 387268 (TRBV6-6, TRBJ1-5)
CASRSPRGQGQPQHF

SEQ ID NO: 774537 - protein, 16 aa, Homo sapiens
  CDR3 for alpha chain variable domain of TCR clone 387269 (TRAV3, TRAJ21)
CAVRDIERGNFNKFYF

SEQ ID NO: 774538 - protein, 13 aa, Homo sapiens
  CDR3 for beta chain variable domain of TCR clone 387269 (TRBV27, TRBJ2-7)
CASSLTTGYEQDF

SEQ ID NO: 774539 - protein, 14 aa, Homo sapiens
  CDR3 for alpha chain variable domain of TCR clone 387270 (TRAV13-1, TRAJ9)
CAASALTGGFKTIF

SEQ ID NO: 774540 - protein, 15 aa, Homo sapiens
  CDR3 for beta chain variable domain of TCR clone 387270 (TRBV11-2, TRBJ2-2)
CASSLDGGNTGELFF

SEQ ID NO: 774541 - protein, 13 aa, Homo sapiens
  CDR3 for alpha chain variable domain of TCR clone 387271 (TRAV21, TRAJ22)
CAVKSGSARQLTF

SEQ ID NO: 774542 - protein, 19 aa, Homo sapiens
  CDR3 for beta chain variable domain of TCR clone 387271 (TRBV6-5, TRBJ2-7)
WASSYSNRGSNPFTYEQYF

SEQ ID NO: 774543 - protein, 14 aa, Homo sapiens
  CDR3 for alpha chain variable domain of TCR clone 387272 (TRAV27, TRAJ57)
CAGVRRADLKSWSF

SEQ ID NO: 774544 - protein, 11 aa, Homo sapiens
  CDR3 for beta chain variable domain of TCR clone 387272 (TRBV11-2, TRBJ1-1)
CASSINTEAFF

SEQ ID NO: 774545 - protein, 12 aa, Homo sapiens
  CDR3 for alpha chain variable domain of TCR clone 387273 (TRAV1-2, TRAJ29)
CAVPSGNTPLVF

SEQ ID NO: 774546 - protein, 14 aa, Homo sapiens
  CDR3 for beta chain variable domain of TCR clone 387273 (TRBV10-2, TRBJ1-5)
CASSSTGRNQPQHF

SEQ ID NO: 774547 - protein, 14 aa, Homo sapiens
  CDR3 for alpha chain variable domain of TCR clone 387274 (TRAV4, TRAJ17)
CLVGPQAAGNKLPF

SEQ ID NO: 774548 - protein, 15 aa, Homo sapiens
  CDR3 for beta chain variable domain of TCR clone 387274 (TRBV9, TRBJ2-1)
CASSLAGSSYNEQFF

SEQ ID NO: 774549 - protein, 15 aa, Homo sapiens
  CDR3 for alpha chain variable domain of TCR clone 387275 (TRAV29/DV5, TRAJ24)
CAASGATDSWGKFQF

SEQ ID NO: 774550 - protein, 14 aa, Homo sapiens
  CDR3 for beta chain variable domain of TCR clone 387275 (TRBV7-3, TRBJ2-1)
CASSLAGGTNEQFF

SEQ ID NO: 774551 - protein, 21 aa, Homo sapiens
  CDR3 for alpha chain variable domain of TCR clone 387276 (TRAV36/DV7, TRAJ39)
TATQTGDSAIYLPNAGNMLTF

SEQ ID NO: 774552 - protein, 14 aa, Homo sapiens
  CDR3 for beta chain variable domain of TCR clone 387276 (TRBV7-2, TRBJ2-7)
CASSLYPGRYEQYF

SEQ ID NO: 774553 - protein, 16 aa, Homo sapiens
  CDR3 for alpha chain variable domain of TCR clone 387277 (TRAV30, TRAJ24)
CGTEIVDADSWGKFQF

SEQ ID NO: 774554 - protein, 14 aa, Homo sapiens
  CDR3 for beta chain variable domain of TCR clone 387277 (TRBV7-9, TRBJ2-4)
CASSLAMGCNIQYF

SEQ ID NO: 774555 - protein, 13 aa, Homo sapiens
  CDR3 for alpha chain variable domain of TCR clone 387278 (TRAV13-2, TRAJ8)
CAFMNTGFQKLVF

SEQ ID NO: 774556 - protein, 15 aa, Homo sapiens
  CDR3 for beta chain variable domain of TCR clone 387278 (TRBV19, TRBJ2-3)
CAAGHTNAPNDTQYF

SEQ ID NO: 774557 - protein, 17 aa, Homo sapiens
  CDR3 for alpha chain variable domain of TCR clone 387279 (TRAV13-1, TRAJ52)
VAASSGAGGTSYGKLTF

SEQ ID NO: 774558 - protein, 15 aa, Homo sapiens
  CDR3 for beta chain variable domain of TCR clone 387279 (TRBV2, TRBJ2-1)
CASSELAGSYNEQFF

SEQ ID NO: 774559 - protein, 11 aa, Homo sapiens
  CDR3 for alpha chain variable domain of TCR clone 387280 (TRAV12-3, TRAJ43)
CAMSVSNDMRF

SEQ ID NO: 774560 - protein, 16 aa, Homo sapiens
  CDR3 for beta chain variable domain of TCR clone 387280 (TRBV7-2, TRBJ1-2)
CASSSNQDRRGHGYTF

SEQ ID NO: 774561 - protein, 14 aa, Homo sapiens
  CDR3 for alpha chain variable domain of TCR clone 387281 (TRAV26-1, TRAJ38)
CIADNAGNNRKLIW

SEQ ID NO: 774562 - protein, 14 aa, Homo sapiens
  CDR3 for beta chain variable domain of TCR clone 387281 (TRBV4-1, TRBJ2-2)
CASSQAVNTWELFF

SEQ ID NO: 774563 - protein, 14 aa, Homo sapiens
  CDR3 for alpha chain variable domain of TCR clone 387282 (TRAV12-3, TRAJ10)
SHLPLTGGGKKLTF

SEQ ID NO: 774564 - protein, 12 aa, Homo sapiens
  CDR3 for beta chain variable domain of TCR clone 387282 (TRBV7-8, TRBJ2-7)
CASSLGDREQYF

SEQ ID NO: 774565 - protein, 14 aa, Homo sapiens
  CDR3 for alpha chain variable domain of TCR clone 387283 (TRAV3, TRAJ8)
CAVSRNTGFQKLVF

SEQ ID NO: 774566 - protein, 18 aa, Homo sapiens
  CDR3 for beta chain variable domain of TCR clone 387283 (TRBV11-2, TRBJ2-3)
CASSLGGASRGAPNTQYF

SEQ ID NO: 774567 - protein, 15 aa, Homo sapiens
  CDR3 for alpha chain variable domain of TCR clone 387284 (TRAV10, TRAJ6)
CVVRPRTGGSDIPTF

SEQ ID NO: 774568 - protein, 14 aa, Homo sapiens
  CDR3 for beta chain variable domain of TCR clone 387284 (TRBV20-1, TRBJ2-4)
CSASGRVGENIQYF

SEQ ID NO: 774569 - protein, 16 aa, Homo sapiens
  CDR3 for alpha chain variable domain of TCR clone 387285 (TRAV4, TRAJ22)
CLVGDLYSGSARQLTF

SEQ ID NO: 774570 - protein, 16 aa, Homo sapiens
  CDR3 for beta chain variable domain of TCR clone 387285 (TRBV7-9, TRBJ2-1)
YASSDVAGGSYNEQFV

SEQ ID NO: 774571 - protein, 14 aa, Homo sapiens
  CDR3 for alpha chain variable domain of TCR clone 387286 (TRAV12-2, TRAJ17)
CAVLFKAAGNKLTF

SEQ ID NO: 774572 - protein, 11 aa, Homo sapiens
  CDR3 for beta chain variable domain of TCR clone 387286 (TRBV23-1, TRBJ2-7)
SSSGTGLEQYF

SEQ ID NO: 774573 - protein, 14 aa, Homo sapiens
  CDR3 for alpha chain variable domain of TCR clone 387287 (TRAV12-2, TRAJ13)
CAVPRSGGYQKVTF

SEQ ID NO: 774574 - protein, 14 aa, Homo sapiens
  CDR3 for beta chain variable domain of TCR clone 387287 (TRBV7-8, TRBJ2-7)
CASSVGQGAYEQYF

SEQ ID NO: 774575 - protein, 16 aa, Homo sapiens
  CDR3 for alpha chain variable domain of TCR clone 387288 (TRAV12-3, TRAJ45)
CAMGWGSGGGAGGLTF

SEQ ID NO: 774576 - protein, 18 aa, Homo sapiens
  CDR3 for beta chain variable domain of TCR clone 387288 (TRBV12-4, TRBJ2-2)
CASSLVAGTRGRTGELFF

SEQ ID NO: 774577 - protein, 15 aa, Homo sapiens
  CDR3 for alpha chain variable domain of TCR clone 387289 (TRAV21, TRAJ37)
CAVRPTLSNPGKLIF

SEQ ID NO: 774578 - protein, 16 aa, Homo sapiens
  CDR3 for beta chain variable domain of TCR clone 387289 (TRBV24-1, TRBJ2-3)
CATSDRRQDLTDTQYF

SEQ ID NO: 774579 - protein, 14 aa, Homo sapiens
  CDR3 for alpha chain variable domain of TCR clone 387290 (TRAV3, TRAJ9)
CAVRLNNGGFKTIF

SEQ ID NO: 774580 - protein, 15 aa, Homo sapiens
  CDR3 for beta chain variable domain of TCR clone 387290 (TRBV7-2, TRBJ2-1)
CASSLASGRVNEQSF

SEQ ID NO: 774581 - protein, 12 aa, Homo sapiens
  CDR3 for alpha chain variable domain of TCR clone 387291 (TRAV13-1, TRAJ21)
CAAKEGFNKFYF

SEQ ID NO: 774582 - protein, 18 aa, Homo sapiens
  CDR3 for beta chain variable domain of TCR clone 387291 (TRBV20-1, TRBJ2-6)
CSAEMTPTHGSGANVLTF

SEQ ID NO: 774583 - protein, 13 aa, Homo sapiens
  CDR3 for alpha chain variable domain of TCR clone 387292 (TRAV27, TRAJ42)
CAGAGGSQGNLIF

SEQ ID NO: 774584 - protein, 14 aa, Homo sapiens
  CDR3 for beta chain variable domain of TCR clone 387292 (TRBV20-1, TRBJ1-1)
CSARTRIGGTEAFF

SEQ ID NO: 774585 - protein, 10 aa, Homo sapiens
  CDR3 for alpha chain variable domain of TCR clone 387293 (TRAV5, TRAJ34)
CAEDTDKLIF

SEQ ID NO: 774586 - protein, 15 aa, Homo sapiens
  CDR3 for beta chain variable domain of TCR clone 387293 (TRBV4-1, TRBJ1-2)
CASSQGQGAAYGYTF

SEQ ID NO: 774587 - protein, 19 aa, Homo sapiens
  CDR3 for alpha chain variable domain of TCR clone 387294 (TRAV30, TRAJ52)
CGTEANTNAGGTSYGKLTF

SEQ ID NO: 774588 - protein, 13 aa, Homo sapiens
  CDR3 for beta chain variable domain of TCR clone 387294 (TRBV7-9, TRBJ1-2)
CASSLKQNYGYTF

SEQ ID NO: 774589 - protein, 14 aa, Homo sapiens
  CDR3 for alpha chain variable domain of TCR clone 387295 (TRAV26-1, TRAJ45)
CIVREGGVADGLTF

SEQ ID NO: 774590 - protein, 16 aa, Homo sapiens
  CDR3 for beta chain variable domain of TCR clone 387295 (TRBV19, TRBJ2-2)
CASRSPGTGATGELFF

SEQ ID NO: 774591 - protein, 16 aa, Homo sapiens
  CDR3 for alpha chain variable domain of TCR clone 387296 (TRAV3, TRAJ37)
CAVRPHGSGNTGKLIF

SEQ ID NO: 774592 - protein, 16 aa, Homo sapiens
  CDR3 for beta chain variable domain of TCR clone 387296 (TRBV9, TRBJ1-2)
CDSSVEEKVSPYGDTF

SEQ ID NO: 774593 - protein, 15 aa, Homo sapiens
  CDR3 for alpha chain variable domain of TCR clone 387297 (TRAV8-3, TRAJ45)
CASSYSGRGADGLTF

SEQ ID NO: 774594 - protein, 13 aa, Homo sapiens
  CDR3 for beta chain variable domain of TCR clone 387297 (TRBV10-3, TRBJ2-7)
CASKLAVNCEQYF

SEQ ID NO: 774595 - protein, 15 aa, Homo sapiens
  CDR3 for alpha chain variable domain of TCR clone 387298 (TRAV3, TRAJ30)
CAVRDDYGRDDKIIF

SEQ ID NO: 774596 - protein, 16 aa, Homo sapiens
  CDR3 for beta chain variable domain of TCR clone 387298 (TRBV5-1, TRBJ2-5)
CASSLANHRGRETQYF

SEQ ID NO: 774597 - protein, 12 aa, Homo sapiens
  CDR3 for alpha chain variable domain of TCR clone 387299 (TRAV4, TRAJ22)
CLVGDINYFFWF

SEQ ID NO: 774598 - protein, 14 aa, Homo sapiens
  CDR3 for beta chain variable domain of TCR clone 387299 (TRBV9, TRBJ2-4)
CASSPSGTSGFQYF

SEQ ID NO: 774599 - protein, 15 aa, Homo sapiens
  CDR3 for alpha chain variable domain of TCR clone 387300 (TRAV17, TRAJ37)
CATDGGSSNTGKLIF

SEQ ID NO: 774600 - protein, 15 aa, Homo sapiens
  CDR3 for beta chain variable domain of TCR clone 387300 (TRBV28, TRBJ2-5)
CDSSSGRTIQETPYF

SEQ ID NO: 774601 - protein, 13 aa, Homo sapiens
  CDR3 for alpha chain variable domain of TCR clone 387301 (TRAV21, TRAJ27)
CAARPGNEANQPL

SEQ ID NO: 774602 - protein, 14 aa, Homo sapiens
  CDR3 for beta chain variable domain of TCR clone 387301 (TRBV7-6, TRBJ2-3)
CASSLGTVTDTQYF

SEQ ID NO: 774603 - protein, 13 aa, Homo sapiens
  CDR3 for alpha chain variable domain of TCR clone 387302 (TRAV3, TRAJ41)
CAVSSNSRYALNL

SEQ ID NO: 774604 - protein, 13 aa, Homo sapiens
  CDR3 for beta chain variable domain of TCR clone 387302 (TRBV20-1, TRBJ2-2)
CSALSGGAGELFF

SEQ ID NO: 774605 - protein, 14 aa, Homo sapiens
  CDR3 for alpha chain variable domain of TCR clone 387303 (TRAV2, TRAJ9)
CAVEDRRGGFKTIF

SEQ ID NO: 774606 - protein, 19 aa, Homo sapiens
  CDR3 for beta chain variable domain of TCR clone 387303 (TRBV25-1, TRBJ2-2)
CAILVYRVDRGRKTGELFF

SEQ ID NO: 774607 - protein, 12 aa, Homo sapiens
  CDR3 for alpha chain variable domain of TCR clone 387304 (TRAV13-1, TRAJ21)
CAAKEGLNKFYF

SEQ ID NO: 774608 - protein, 17 aa, Homo sapiens
  CDR3 for beta chain variable domain of TCR clone 387304 (TRBV4-2, TRBJ2-1)
CASSQFPGQGIYNEQFF

SEQ ID NO: 774609 - protein, 13 aa, Homo sapiens
  CDR3 for alpha chain variable domain of TCR clone 387305 (TRAV35, TRAJ32)
CAGVGGATNKLIF

SEQ ID NO: 774610 - protein, 16 aa, Homo sapiens
  CDR3 for beta chain variable domain of TCR clone 387305 (TRBV7-2, TRBJ1-3)
CASSSGRVLSGNTIYF

SEQ ID NO: 774611 - protein, 12 aa, Homo sapiens
  CDR3 for alpha chain variable domain of TCR clone 387306 (TRAV13-2, TRAJ23)
CAERHRGGKLIF

SEQ ID NO: 774612 - protein, 14 aa, Homo sapiens
  CDR3 for beta chain variable domain of TCR clone 387306 (TRBV7-2, TRBJ2-7)
CASSPKTSFYEQYF

SEQ ID NO: 774613 - protein, 18 aa, Homo sapiens
  CDR3 for alpha chain variable domain of TCR clone 387307 (TRAV21, TRAJ52)
CAVRPFPAGGTSYGKLTF

SEQ ID NO: 774614 - protein, 14 aa, Homo sapiens
  CDR3 for beta chain variable domain of TCR clone 387307 (TRBV4-1, TRBJ2-2)
CASSQAVNTGELFF

SEQ ID NO: 774615 - protein, 17 aa, Homo sapiens
  CDR3 for alpha chain variable domain of TCR clone 387308 (TRAV3, TRAJ42)
CAVRDRDYGGSQGNLIF

SEQ ID NO: 774616 - protein, 15 aa, Homo sapiens
  CDR3 for beta chain variable domain of TCR clone 387308 (TRBV28, TRBJ2-5)
CASSSGRTIQETQYF

SEQ ID NO: 774617 - protein, 13 aa, Homo sapiens
  CDR3 for alpha chain variable domain of TCR clone 387309 (TRAV13-2, TRAJ5)
CAESDTGRRALTL

SEQ ID NO: 774618 - protein, 14 aa, Homo sapiens
  CDR3 for beta chain variable domain of TCR clone 387309 (TRBV2, TRBJ1-1)
CASTQVGENTEAFF

SEQ ID NO: 774619 - protein, 13 aa, Homo sapiens
  CDR3 for alpha chain variable domain of TCR clone 387310 (TRAV1-1, TRAJ28)
CVTSGAGSYQLTF

SEQ ID NO: 774620 - protein, 12 aa, Homo sapiens
  CDR3 for beta chain variable domain of TCR clone 387310 (TRBV12-4, TRBJ2-7)
CASSLGGYEQYF

SEQ ID NO: 774621 - protein, 13 aa, Homo sapiens
  CDR3 for alpha chain variable domain of TCR clone 387311 (TRAV12-2, TRAJ20)
CAVDPSNDYKLSF

SEQ ID NO: 774622 - protein, 15 aa, Homo sapiens
  CDR3 for beta chain variable domain of TCR clone 387311 (TRBV18, TRBJ1-2)
CASSPGNGLGYGYTF

SEQ ID NO: 774623 - protein, 12 aa, Homo sapiens
  CDR3 for alpha chain variable domain of TCR clone 387312 (TRAV21, TRAJ3)
CCFYSSASKIIF

SEQ ID NO: 774624 - protein, 16 aa, Homo sapiens
  CDR3 for beta chain variable domain of TCR clone 387312 (TRBV19, TRBJ2-1)
CASSKAGPSSYNAQFF

SEQ ID NO: 774625 - protein, 14 aa, Homo sapiens
  CDR3 for alpha chain variable domain of TCR clone 387313 (TRAV8-3, TRAJ9)
CAVVYNTGGFITIF

SEQ ID NO: 774626 - protein, 16 aa, Homo sapiens
  CDR3 for beta chain variable domain of TCR clone 387313 (TRBV7-3, TRBJ2-2)
CASSLKRGTLSGELFF

SEQ ID NO: 774627 - protein, 12 aa, Homo sapiens
  CDR3 for alpha chain variable domain of TCR clone 387314 (TRAV35, TRAJ49)
CAGWNTGNQFYV

SEQ ID NO: 774628 - protein, 16 aa, Homo sapiens
  CDR3 for beta chain variable domain of TCR clone 387314 (TRBV5-1, TRBJ2-2)
CASSLWDTTNTGELFF

SEQ ID NO: 774629 - protein, 15 aa, Homo sapiens
  CDR3 for alpha chain variable domain of TCR clone 387315 (TRAV22, TRAJ28)
CAARRSGAGSYQLTF

SEQ ID NO: 774630 - protein, 15 aa, Homo sapiens
  CDR3 for beta chain variable domain of TCR clone 387315 (TRBV14, TRBJ1-1)
CASSQDGMGRRKAFF

SEQ ID NO: 774631 - protein, 17 aa, Homo sapiens
  CDR3 for alpha chain variable domain of TCR clone 387316 (TRAV3, TRAJ38)
CAVRDCLNAGNNRKLIG

SEQ ID NO: 774632 - protein, 14 aa, Homo sapiens
  CDR3 for beta chain variable domain of TCR clone 387316 (TRBV5-5, TRBJ1-5)
CASSGQGVDQHQHF

SEQ ID NO: 774633 - protein, 16 aa, Homo sapiens
  CDR3 for alpha chain variable domain of TCR clone 387317 (TRAV3, TRAJ37)
CAVRGKGSGNTGKLIF

SEQ ID NO: 774634 - protein, 18 aa, Homo sapiens
  CDR3 for beta chain variable domain of TCR clone 387317 (TRBV12-4, TRBJ2-2)
CASSLVAGTRGRTGELVF

SEQ ID NO: 774635 - protein, 14 aa, Homo sapiens
  CDR3 for alpha chain variable domain of TCR clone 387318 (TRAV12-1, TRAJ12)
CVVTRMDGSYKLIF

SEQ ID NO: 774636 - protein, 15 aa, Homo sapiens
  CDR3 for beta chain variable domain of TCR clone 387318 (TRBV20-1, TRBJ2-7)
CSARDRVSGMDEQYF

SEQ ID NO: 774637 - protein, 13 aa, Homo sapiens
  CDR3 for alpha chain variable domain of TCR clone 387319 (TRAV26-2, TRAJ43)
CILRAVNNNDMRF

SEQ ID NO: 774638 - protein, 11 aa, Homo sapiens
  CDR3 for beta chain variable domain of TCR clone 387319 (TRBV19, TRBJ1-2)
CASSISSGYTF

SEQ ID NO: 774639 - protein, 14 aa, Homo sapiens
  CDR3 for alpha chain variable domain of TCR clone 387320 (TRAV30, TRAJ33)
CGTVAPRSNYQLIW

SEQ ID NO: 774640 - protein, 18 aa, Homo sapiens
  CDR3 for beta chain variable domain of TCR clone 387320 (TRBV11-2, TRBJ2-3)
CASSLGGASRGAPNTQYY

SEQ ID NO: 774641 - protein, 15 aa, Homo sapiens
  CDR3 for alpha chain variable domain of TCR clone 387321 (TRAV12-2, TRAJ9)
CAVNNERTGGFKTIF

SEQ ID NO: 774642 - protein, 15 aa, Homo sapiens
  CDR3 for beta chain variable domain of TCR clone 387321 (TRBV19, TRBJ2-1)
CASSSPGVPLDEQFF

SEQ ID NO: 774643 - protein, 15 aa, Homo sapiens
  CDR3 for alpha chain variable domain of TCR clone 387322 (TRAV26-1, TRAJ39)
CIVRDGSNAGNMLTF

SEQ ID NO: 774644 - protein, 14 aa, Homo sapiens
  CDR3 for beta chain variable domain of TCR clone 387322 (TRBV10-3, TRBJ1-2)
CASRAGTGDYGYTF

SEQ ID NO: 774645 - protein, 14 aa, Homo sapiens
  CDR3 for alpha chain variable domain of TCR clone 387323 (TRAV4, TRAJ30)
CLGGDMNRDDKIIF

SEQ ID NO: 774646 - protein, 14 aa, Homo sapiens
  CDR3 for beta chain variable domain of TCR clone 387323 (TRBV19, TRBJ2-7)
CASSIQEWSYEQYF

SEQ ID NO: 774647 - protein, 13 aa, Homo sapiens
  CDR3 for alpha chain variable domain of TCR clone 387324 (TRAV29/DV5, TRAJ31)
CAASRNNNAILMF

SEQ ID NO: 774648 - protein, 14 aa, Homo sapiens
  CDR3 for beta chain variable domain of TCR clone 387324 (TRBV7-9, TRBJ2-2)
CASSLVQDTGELFF

SEQ ID NO: 774649 - protein, 13 aa, Homo sapiens
  CDR3 for alpha chain variable domain of TCR clone 387325 (TRAV12-3, TRAJ33)
CAMSVNSNYQLIW

SEQ ID NO: 774650 - protein, 15 aa, Homo sapiens
  CDR3 for beta chain variable domain of TCR clone 387325 (TRBV20-1, TRBJ2-7)
GSARDRVSGMDEQYF

SEQ ID NO: 774651 - protein, 14 aa, Homo sapiens
  CDR3 for alpha chain variable domain of TCR clone 387326 (TRAV26-1, TRAJ45)
CIEVTGGGADGLTF

SEQ ID NO: 774652 - protein, 15 aa, Homo sapiens
  CDR3 for beta chain variable domain of TCR clone 387326 (TRBV6-3, TRBJ2-7)
CASSSPGTVCYEQYF

SEQ ID NO: 774653 - protein, 14 aa, Homo sapiens
  CDR3 for alpha chain variable domain of TCR clone 387327 (TRAV8-1, TRAJ5)
CAVRTDTGRRALTF

SEQ ID NO: 774654 - protein, 15 aa, Homo sapiens
  CDR3 for beta chain variable domain of TCR clone 387327 (TRBV7-3, TRBJ2-1)
CASSPTGGGEVEQVF

SEQ ID NO: 774655 - protein, 23 aa, Homo sapiens
  CDR3 for alpha chain variable domain of TCR clone 387328 (TRAV13-1, TRAJ6)
SLQSQRPNLKTRLSTSVQRWPTF

SEQ ID NO: 774656 - protein, 14 aa, Homo sapiens
  CDR3 for beta chain variable domain of TCR clone 387328 (TRBV28, TRBJ2-3)
CASSLTDLLDTQYF

SEQ ID NO: 774657 - protein, 13 aa, Homo sapiens
  CDR3 for alpha chain variable domain of TCR clone 387329 (TRAV8-3, TRAJ36)
CAVGATGANNLFF

SEQ ID NO: 774658 - protein, 15 aa, Homo sapiens
  CDR3 for beta chain variable domain of TCR clone 387329 (TRBV7-2, TRBJ1-2)
CGSSPRAGWNDGYTF

SEQ ID NO: 774659 - protein, 15 aa, Homo sapiens
  CDR3 for alpha chain variable domain of TCR clone 387330 (TRAV3, TRAJ22)
CAVRDRGGSARQLTF

SEQ ID NO: 774660 - protein, 14 aa, Homo sapiens
  CDR3 for beta chain variable domain of TCR clone 387330 (TRBV11-2, TRBJ2-5)
CASRPLAGRETQYF

SEQ ID NO: 774661 - protein, 11 aa, Homo sapiens
  CDR3 for alpha chain variable domain of TCR clone 387331 (TRAV2, TRAJ13)
CASGGCQKVTF

SEQ ID NO: 774662 - protein, 16 aa, Homo sapiens
  CDR3 for beta chain variable domain of TCR clone 387331 (TRBV7-7, TRBJ2-1)
CASSLASGTSYNEQFF

SEQ ID NO: 774663 - protein, 13 aa, Homo sapiens
  CDR3 for alpha chain variable domain of TCR clone 387332 (TRAV3, TRAJ27)
CALRPLGAGKSTV

SEQ ID NO: 774664 - protein, 13 aa, Homo sapiens
  CDR3 for beta chain variable domain of TCR clone 387332 (TRBV7-9, TRBJ2-3)
CASSPGSTDTQYF

SEQ ID NO: 774665 - protein, 15 aa, Homo sapiens
  CDR3 for alpha chain variable domain of TCR clone 387333 (TRAV20, TRAJ50)
CAVRQMKTSYDKVIF

SEQ ID NO: 774666 - protein, 12 aa, Homo sapiens
  CDR3 for beta chain variable domain of TCR clone 387333 (TRBV14, TRBJ2-7)
CASSRLKGEQYF

SEQ ID NO: 774667 - protein, 13 aa, Homo sapiens
  CDR3 for alpha chain variable domain of TCR clone 387334 (TRAV36/DV7, TRAJ50)
CAVSKTSYDKVKF

SEQ ID NO: 774668 - protein, 13 aa, Homo sapiens
  CDR3 for beta chain variable domain of TCR clone 387334 (TRBV18, TRBJ2-7)
CASSPGRNYEQYF

SEQ ID NO: 774669 - protein, 17 aa, Homo sapiens
  CDR3 for alpha chain variable domain of TCR clone 387335 (TRAV26-1, TRAJ56)
CIVRVARLAGANSKLTF

SEQ ID NO: 774670 - protein, 14 aa, Homo sapiens
  CDR3 for beta chain variable domain of TCR clone 387335 (TRBV19, TRBJ2-1)
CASPTFVLSGEQFF

SEQ ID NO: 774671 - protein, 15 aa, Homo sapiens
  CDR3 for alpha chain variable domain of TCR clone 387336 (TRAV1-2, TRAJ18)
CAVRGEAQPWGGYTL

SEQ ID NO: 774672 - protein, 13 aa, Homo sapiens
  CDR3 for beta chain variable domain of TCR clone 387336 (TRBV20-1, TRBJ1-1)
CSARVGGNTEAFF

SEQ ID NO: 774673 - protein, 12 aa, Homo sapiens
  CDR3 for alpha chain variable domain of TCR clone 387337 (TRAV2, TRAJ32)
CAVGGATNKRIF

SEQ ID NO: 774674 - protein, 15 aa, Homo sapiens
  CDR3 for beta chain variable domain of TCR clone 387337 (TRBV7-2, TRBJ2-1)
CASSSRTSREDEQFF

SEQ ID NO: 774675 - protein, 14 aa, Homo sapiens
  CDR3 for alpha chain variable domain of TCR clone 387338 (TRAV12-1, TRAJ10)
CVVNLAGGGDKLTF

SEQ ID NO: 774676 - protein, 14 aa, Homo sapiens
  CDR3 for beta chain variable domain of TCR clone 387338 (TRBV12-4, TRBJ1-1)
CASSLGTGGTEAFF

SEQ ID NO: 774677 - protein, 17 aa, Homo sapiens
  CDR3 for alpha chain variable domain of TCR clone 387339 (TRAV27, TRAJ42)
CAERVIYYGGSQGNLIF

SEQ ID NO: 774678 - protein, 13 aa, Homo sapiens
  CDR3 for beta chain variable domain of TCR clone 387339 (TRBV7-9, TRBJ1-2)
CASSLKQNYGYTF

SEQ ID NO: 774679 - protein, 14 aa, Homo sapiens
  CDR3 for alpha chain variable domain of TCR clone 387340 (TRAV16, TRAJ13)
CALRRSGGYQKVTF

SEQ ID NO: 774680 - protein, 13 aa, Homo sapiens
  CDR3 for beta chain variable domain of TCR clone 387340 (TRBV7-2, TRBJ2-2)
CASSLAVTGELFF

SEQ ID NO: 774681 - protein, 13 aa, Homo sapiens
  CDR3 for alpha chain variable domain of TCR clone 387341 (TRAV9-2, TRAJ49)
CALRPNTGNQFYF

SEQ ID NO: 774682 - protein, 14 aa, Homo sapiens
  CDR3 for beta chain variable domain of TCR clone 387341 (TRBV9, TRBJ2-7)
CASSVAGGVYEHYF

SEQ ID NO: 774683 - protein, 15 aa, Homo sapiens
  CDR3 for alpha chain variable domain of TCR clone 387342 (TRAV27, TRAJ38)
CAGRFNAGNNRKLIW

SEQ ID NO: 774684 - protein, 13 aa, Homo sapiens
  CDR3 for beta chain variable domain of TCR clone 387342 (TRBV12-4, TRBJ2-5)
CASSLGGSRTQYF

SEQ ID NO: 774685 - protein, 15 aa, Homo sapiens
  CDR3 for alpha chain variable domain of TCR clone 387343 (TRAV8-3, TRAJ45)
CASSYSGGGADGLTF

SEQ ID NO: 774686 - protein, 13 aa, Homo sapiens
  CDR3 for beta chain variable domain of TCR clone 387343 (TRBV25-1, TRBJ2-7)
CASSEDGDYEQYF

SEQ ID NO: 774687 - protein, 14 aa, Homo sapiens
  CDR3 for alpha chain variable domain of TCR clone 387344 (TRAV9-2, TRAJ39)
CALYIYNAGNMLTF

SEQ ID NO: 774688 - protein, 13 aa, Homo sapiens
  CDR3 for beta chain variable domain of TCR clone 387344 (TRBV20-1, TRBJ1-2)
CSATGIQGSGYTF

SEQ ID NO: 774689 - protein, 14 aa, Homo sapiens
  CDR3 for alpha chain variable domain of TCR clone 387345 (TRAV1-2, TRAJ16)
CAVNRFSDGQKLLF

SEQ ID NO: 774690 - protein, 13 aa, Homo sapiens
  CDR3 for beta chain variable domain of TCR clone 387345 (TRBV7-9, TRBJ2-5)
CASLSPGQETQYF

SEQ ID NO: 774691 - protein, 15 aa, Homo sapiens
  CDR3 for alpha chain variable domain of TCR clone 387346 (TRAV6, TRAJ52)
CALTAGGTSYGKLTF

SEQ ID NO: 774692 - protein, 19 aa, Homo sapiens
  CDR3 for beta chain variable domain of TCR clone 387346 (TRBV7-2, TRBJ2-3)
CASSFLSRNWGGGTDTQYF

SEQ ID NO: 774693 - protein, 16 aa, Homo sapiens
  CDR3 for alpha chain variable domain of TCR clone 387347 (TRAV38-1, TRAJ56)
CAFMKRHTGANSKLTF

SEQ ID NO: 774694 - protein, 15 aa, Homo sapiens
  CDR3 for beta chain variable domain of TCR clone 387347 (TRBV24-1, TRBJ1-4)
CATSDPQGADEKLFF

SEQ ID NO: 774695 - protein, 12 aa, Homo sapiens
  CDR3 for alpha chain variable domain of TCR clone 387348 (TRAV12-3, TRAJ17)
CAMTLTGNKLTF

SEQ ID NO: 774696 - protein, 15 aa, Homo sapiens
  CDR3 for beta chain variable domain of TCR clone 387348 (TRBV6-6, TRBJ2-5)
CASSPGGGLEEAHYF

SEQ ID NO: 774697 - protein, 16 aa, Homo sapiens
  CDR3 for alpha chain variable domain of TCR clone 387349 (TRAV26-1, TRAJ37)
CIVRVEKTNLWARDNF

SEQ ID NO: 774698 - protein, 13 aa, Homo sapiens
  CDR3 for beta chain variable domain of TCR clone 387349 (TRBV14, TRBJ1-2)
CASSEDRRYGYTF

SEQ ID NO: 774699 - protein, 16 aa, Homo sapiens
  CDR3 for alpha chain variable domain of TCR clone 387350 (TRAV3, TRAJ37)
CAVRPHGSGNTGKLIF

SEQ ID NO: 774700 - protein, 16 aa, Homo sapiens
  CDR3 for beta chain variable domain of TCR clone 387350 (TRBV5-1, TRBJ1-1)
CDSSSGGNSLNTEAFF

SEQ ID NO: 774701 - protein, 14 aa, Homo sapiens
  CDR3 for alpha chain variable domain of TCR clone 387351 (TRAV12-2, TRAJ33)
CAVKRARSNYRLTW

SEQ ID NO: 774702 - protein, 15 aa, Homo sapiens
  CDR3 for beta chain variable domain of TCR clone 387351 (TRBV20-1, TRBJ2-7)
CSARDRVSGMDEQYF

SEQ ID NO: 774703 - protein, 14 aa, Homo sapiens
  CDR3 for alpha chain variable domain of TCR clone 387352 (TRAV2, TRAJ9)
CAVEDRSGSFKTIF

SEQ ID NO: 774704 - protein, 11 aa, Homo sapiens
  CDR3 for beta chain variable domain of TCR clone 387352 (TRBV7-2, TRBJ2-7)
CASSSGLWQYF

SEQ ID NO: 774705 - protein, 18 aa, Homo sapiens
  CDR3 for alpha chain variable domain of TCR clone 387353 (TRAV21, TRAJ52)
CAVRPSPAGGTSYGKLTF

SEQ ID NO: 774706 - protein, 14 aa, Homo sapiens
  CDR3 for beta chain variable domain of TCR clone 387353 (TRBV19, TRBJ2-1)
CASSPGLAPNEQFF

SEQ ID NO: 774707 - protein, 15 aa, Homo sapiens
  CDR3 for alpha chain variable domain of TCR clone 387354 (TRAV17, TRAJ35)
CATAFVIGFGNVLHC

SEQ ID NO: 774708 - protein, 15 aa, Homo sapiens
  CDR3 for beta chain variable domain of TCR clone 387354 (TRBV7-9, TRBJ2-7)
CASSLALAEADEQYF

SEQ ID NO: 774709 - protein, 12 aa, Homo sapiens
  CDR3 for alpha chain variable domain of TCR clone 387355 (TRAV12-1, TRAJ40)
CVVYSGTYKYIF

SEQ ID NO: 774710 - protein, 17 aa, Homo sapiens
  CDR3 for beta chain variable domain of TCR clone 387355 (TRBV11-3, TRBJ1-5)
CASSPLTGLWGNQPQHF

SEQ ID NO: 774711 - protein, 13 aa, Homo sapiens
  CDR3 for alpha chain variable domain of TCR clone 387356 (TRAV26-1, TRAJ34)
CIVRPWITDKLIF

SEQ ID NO: 774712 - protein, 14 aa, Homo sapiens
  CDR3 for beta chain variable domain of TCR clone 387356 (TRBV7-3, TRBJ2-1)
CASSLAGGTNEQFF

SEQ ID NO: 774713 - protein, 11 aa, Homo sapiens
  CDR3 for alpha chain variable domain of TCR clone 387357 (TRAV1-2, TRAJ20)
CAVANVYKLSF

SEQ ID NO: 774714 - protein, 15 aa, Homo sapiens
  CDR3 for beta chain variable domain of TCR clone 387357 (TRBV2, TRBJ2-1)
CASSELAGSYNEQFF

SEQ ID NO: 774715 - protein, 13 aa, Homo sapiens
  CDR3 for alpha chain variable domain of TCR clone 387358 (TRAV1-2, TRAJ9)
CAALNTGGFKTIF

SEQ ID NO: 774716 - protein, 20 aa, Homo sapiens
  CDR3 for beta chain variable domain of TCR clone 387358 (TRBV28, TRBJ2-1)
CASTPIGRSPGLAGVNEQFF

SEQ ID NO: 774717 - protein, 13 aa, Homo sapiens
  CDR3 for alpha chain variable domain of TCR clone 387359 (TRAV16, TRAJ9)
CALSNTGGFKTIF

SEQ ID NO: 774718 - protein, 14 aa, Homo sapiens
  CDR3 for beta chain variable domain of TCR clone 387359 (TRBV5-1, TRBJ2-1)
CASSLEGPVYEQCF

SEQ ID NO: 774719 - protein, 13 aa, Homo sapiens
  CDR3 for alpha chain variable domain of TCR clone 387360 (TRAV1-1, TRAJ9)
CAATNTGGFKTIF

SEQ ID NO: 774720 - protein, 14 aa, Homo sapiens
  CDR3 for beta chain variable domain of TCR clone 387360 (TRBV12-4, TRBJ1-1)
CASSLGTGGTEAFF

SEQ ID NO: 774721 - protein, 14 aa, Homo sapiens
  CDR3 for alpha chain variable domain of TCR clone 387361 (TRAV16, TRAJ33)
CALSAMDSNYQLIW

SEQ ID NO: 774722 - protein, 14 aa, Homo sapiens
  CDR3 for beta chain variable domain of TCR clone 387361 (TRBV28, TRBJ2-7)
CASTNRGRAYEQYF

SEQ ID NO: 774723 - protein, 17 aa, Homo sapiens
  CDR3 for alpha chain variable domain of TCR clone 387362 (TRAV2, TRAJ22)
ILQVREADAAEQRQLTF

SEQ ID NO: 774724 - protein, 16 aa, Homo sapiens
  CDR3 for beta chain variable domain of TCR clone 387362 (TRBV2, TRBJ2-5)
CVSSETQGVGEETQYF

SEQ ID NO: 774725 - protein, 11 aa, Homo sapiens
  CDR3 for alpha chain variable domain of TCR clone 387363 (TRAV1-2, TRAJ20)
CAVANYYKLSF

SEQ ID NO: 774726 - protein, 18 aa, Homo sapiens
  CDR3 for beta chain variable domain of TCR clone 387363 (TRBV20-1, TRBJ2-6)
CSAETTPTHGSGANVLTV

SEQ ID NO: 774727 - protein, 14 aa, Homo sapiens
  CDR3 for alpha chain variable domain of TCR clone 387364 (TRAV12-3, TRAJ57)
CAMSAWGGSEKLVF

SEQ ID NO: 774728 - protein, 16 aa, Homo sapiens
  CDR3 for beta chain variable domain of TCR clone 387364 (TRBV15, TRBJ1-2)
CATSRGPRTGGGGYTF

SEQ ID NO: 774729 - protein, 14 aa, Homo sapiens
  CDR3 for alpha chain variable domain of TCR clone 387365 (TRAV8-1, TRAJ23)
CAVGTYNQGGKLIF

SEQ ID NO: 774730 - protein, 16 aa, Homo sapiens
  CDR3 for beta chain variable domain of TCR clone 387365 (TRBV18, TRBJ1-5)
CARSPSTGNSNQPQHS

SEQ ID NO: 774731 - protein, 13 aa, Homo sapiens
  CDR3 for alpha chain variable domain of TCR clone 387366 (TRAV29/DV5, TRAJ31)
CAASRNNNARLMF

SEQ ID NO: 774732 - protein, 16 aa, Homo sapiens
  CDR3 for beta chain variable domain of TCR clone 387366 (TRBV18, TRBJ2-7)
CASSPRSQGISYEQYF

SEQ ID NO: 774733 - protein, 13 aa, Homo sapiens
  CDR3 for alpha chain variable domain of TCR clone 387367 (TRAV27, TRAJ41)
SAGEGNSGYAPNF

SEQ ID NO: 774734 - protein, 14 aa, Homo sapiens
  CDR3 for beta chain variable domain of TCR clone 387367 (TRBV7-2, TRBJ1-1)
CASSFLTGTTEAFF

SEQ ID NO: 774735 - protein, 13 aa, Homo sapiens
  CDR3 for alpha chain variable domain of TCR clone 387368 (TRAV20, TRAJ37)
CAGCSSNTGKLIF

SEQ ID NO: 774736 - protein, 15 aa, Homo sapiens
  CDR3 for beta chain variable domain of TCR clone 387368 (TRBV4-2, TRBJ2-3)
CASSTRYAVLWPRHP

SEQ ID NO: 774737 - protein, 15 aa, Homo sapiens
  CDR3 for alpha chain variable domain of TCR clone 387369 (TRAV21, TRAJ13)
CAVRPTSGGYQKVTF

SEQ ID NO: 774738 - protein, 12 aa, Homo sapiens
  CDR3 for beta chain variable domain of TCR clone 387369 (TRBV7-9, TRBJ2-7)
CASSLFDYEQYF

SEQ ID NO: 774739 - protein, 10 aa, Homo sapiens
  CDR3 for alpha chain variable domain of TCR clone 387370 (TRAV12-3, TRAJ49)
CAMNDDQFYF

SEQ ID NO: 774740 - protein, 16 aa, Homo sapiens
  CDR3 for beta chain variable domain of TCR clone 387370 (TRBV7-6, TRBJ2-5)
CASSETSGRAVETQYF

SEQ ID NO: 774741 - protein, 13 aa, Homo sapiens
  CDR3 for alpha chain variable domain of TCR clone 387371 (TRAV12-2, TRAJ4)
CAGFSGGYNKLIF

SEQ ID NO: 774742 - protein, 14 aa, Homo sapiens
  CDR3 for beta chain variable domain of TCR clone 387371 (TRBV24-1, TRBJ1-1)
CATSIPRGDAEAFF

SEQ ID NO: 774743 - protein, 15 aa, Homo sapiens
  CDR3 for alpha chain variable domain of TCR clone 387372 (TRAV2, TRAJ24)
CAVVRLKNSWGKLQF

SEQ ID NO: 774744 - protein, 16 aa, Homo sapiens
  CDR3 for beta chain variable domain of TCR clone 387372 (TRBV7-7, TRBJ2-3)
CASSPGTSGSTDTHYF

SEQ ID NO: 774745 - protein, 11 aa, Homo sapiens
  CDR3 for alpha chain variable domain of TCR clone 387373 (TRAV16, TRAJ33)
CALHSNYRLIW

SEQ ID NO: 774746 - protein, 15 aa, Homo sapiens
  CDR3 for beta chain variable domain of TCR clone 387373 (TRBV4-1, TRBJ2-7)
CASSQQGQGFDEQYF

SEQ ID NO: 774747 - protein, 16 aa, Homo sapiens
  CDR3 for alpha chain variable domain of TCR clone 387374 (TRAV30, TRAJ24)
CGTEIVAADRWGKFQF

SEQ ID NO: 774748 - protein, 15 aa, Homo sapiens
  CDR3 for beta chain variable domain of TCR clone 387374 (TRBV7-9, TRBJ2-3)
CASSHGDRVPDTQYF

SEQ ID NO: 774749 - protein, 16 aa, Homo sapiens
  CDR3 for alpha chain variable domain of TCR clone 387375 (TRAV4, TRAJ9)
CLVGDPNRPGGFKTIF

SEQ ID NO: 774750 - protein, 15 aa, Homo sapiens
  CDR3 for beta chain variable domain of TCR clone 387375 (TRBV6-1, TRBJ1-5)
CASSELREGNQPQLF

SEQ ID NO: 774751 - protein, 18 aa, Homo sapiens
  CDR3 for alpha chain variable domain of TCR clone 387376 (TRAV21, TRAJ52)
CAVRPSPAGGTSYGRLTF

SEQ ID NO: 774752 - protein, 17 aa, Homo sapiens
  CDR3 for beta chain variable domain of TCR clone 387376 (TRBV13, TRBJ2-3)
CASSLSRVAGRRNTQYF

SEQ ID NO: 774753 - protein, 18 aa, Homo sapiens
  CDR3 for alpha chain variable domain of TCR clone 387377 (TRAV29/DV5, TRAJ52)
CSAGFRGAGGTSYGKLTF

SEQ ID NO: 774754 - protein, 16 aa, Homo sapiens
  CDR3 for beta chain variable domain of TCR clone 387377 (TRBV7-3, TRBJ2-2)
CAISLKRGTLSGELFF

SEQ ID NO: 774755 - protein, 14 aa, Homo sapiens
  CDR3 for alpha chain variable domain of TCR clone 387378 (TRAV12-2, TRAJ13)
CAVKKTGGYQKVTF

SEQ ID NO: 774756 - protein, 17 aa, Homo sapiens
  CDR3 for beta chain variable domain of TCR clone 387378 (TRBV28, TRBJ2-1)
CASSFPLTSGKANEQFF

SEQ ID NO: 774757 - protein, 13 aa, Homo sapiens
  CDR3 for alpha chain variable domain of TCR clone 387379 (TRAV3, TRAJ28)
CAVGAVGSYQLTF

SEQ ID NO: 774758 - protein, 15 aa, Homo sapiens
  CDR3 for beta chain variable domain of TCR clone 387379 (TRBV7-9, TRBJ1-5)
CASSQGHQPNQPQHF

SEQ ID NO: 774759 - protein, 13 aa, Homo sapiens
  CDR3 for alpha chain variable domain of TCR clone 387380 (TRAV41, TRAJ44)
CAVISGTASKLTF

SEQ ID NO: 774760 - protein, 17 aa, Homo sapiens
  CDR3 for beta chain variable domain of TCR clone 387380 (TRBV4-1, TRBJ1-5)
CASSQPPPTVANQPQHF

SEQ ID NO: 774761 - protein, 11 aa, Homo sapiens
  CDR3 for alpha chain variable domain of TCR clone 387381 (TRAV12-3, TRAJ49)
CAANTGNQFYF

SEQ ID NO: 774762 - protein, 12 aa, Homo sapiens
  CDR3 for beta chain variable domain of TCR clone 387381 (TRBV6-3, TRBJ2-7)
CASSEPGYEQYF

SEQ ID NO: 774763 - protein, 13 aa, Homo sapiens
  CDR3 for alpha chain variable domain of TCR clone 387382 (TRAV3, TRAJ20)
CAVRPLYDYKLSF

SEQ ID NO: 774764 - protein, 12 aa, Homo sapiens
  CDR3 for beta chain variable domain of TCR clone 387382 (TRBV6-1, TRBJ2-1)
CATYGLNNEQFF

SEQ ID NO: 774765 - protein, 13 aa, Homo sapiens
  CDR3 for alpha chain variable domain of TCR clone 387383 (TRAV3, TRAJ20)
CCEAFCNDYKLSF

SEQ ID NO: 774766 - protein, 13 aa, Homo sapiens
  CDR3 for beta chain variable domain of TCR clone 387383 (TRBV7-2, TRBJ1-1)
CASNLKGAKVAFF

SEQ ID NO: 774767 - protein, 16 aa, Homo sapiens
  CDR3 for alpha chain variable domain of TCR clone 387384 (TRAV3, TRAJ37)
CAVRGKGSGNTGKLIF

SEQ ID NO: 774768 - protein, 13 aa, Homo sapiens
  CDR3 for beta chain variable domain of TCR clone 387384 (TRBV14, TRBJ2-7)
CASSQDLRYEQYF

SEQ ID NO: 774769 - protein, 15 aa, Homo sapiens
  CDR3 for alpha chain variable domain of TCR clone 387385 (TRAV13-1, TRAJ27)
CAARELNTNAGKSTF

SEQ ID NO: 774770 - protein, 17 aa, Homo sapiens
  CDR3 for beta chain variable domain of TCR clone 387385 (TRBV13, TRBJ2-3)
CASSLSRVAGGRKTQYF

SEQ ID NO: 774771 - protein, 14 aa, Homo sapiens
  CDR3 for alpha chain variable domain of TCR clone 387386 (TRAV1-2, TRAJ8)
CAVIEDTGFQKLVF

SEQ ID NO: 774772 - protein, 15 aa, Homo sapiens
  CDR3 for beta chain variable domain of TCR clone 387386 (TRBV11-3, TRBJ2-3)
CASLKDGREGDTQYF

SEQ ID NO: 774773 - protein, 15 aa, Homo sapiens
  CDR3 for alpha chain variable domain of TCR clone 387387 (TRAV4, TRAJ39)
CLVGPNNSAGNMLTF

SEQ ID NO: 774774 - protein, 16 aa, Homo sapiens
  CDR3 for beta chain variable domain of TCR clone 387387 (TRBV13, TRBJ2-2)
CASSPRTGGHTGELFF

SEQ ID NO: 774775 - protein, 16 aa, Homo sapiens
  CDR3 for alpha chain variable domain of TCR clone 387388 (TRAV13-1, TRAJ58)
CAASSPYAPSGSRLTF

SEQ ID NO: 774776 - protein, 14 aa, Homo sapiens
  CDR3 for beta chain variable domain of TCR clone 387388 (TRBV7-2, TRBJ2-7)
CASSPKTSFYEQYF

SEQ ID NO: 774777 - protein, 14 aa, Homo sapiens
  CDR3 for alpha chain variable domain of TCR clone 387389 (TRAV12-3, TRAJ58)
CAMSTETSGSRLTF

SEQ ID NO: 774778 - protein, 12 aa, Homo sapiens
  CDR3 for beta chain variable domain of TCR clone 387389 (TRBV11-1, TRBJ1-2)
CASSLWVDTPMA

SEQ ID NO: 774779 - protein, 14 aa, Homo sapiens
  CDR3 for alpha chain variable domain of TCR clone 387390 (TRAV1-2, TRAJ16)
CAVNRFSAGQKLLF

SEQ ID NO: 774780 - protein, 13 aa, Homo sapiens
  CDR3 for beta chain variable domain of TCR clone 387390 (TRBV29-1, TRBJ1-1)
CSVGDSRNTEAFF

SEQ ID NO: 774781 - protein, 14 aa, Homo sapiens
  CDR3 for alpha chain variable domain of TCR clone 387391 (TRAV12-3, TRAJ10)
SHLPLTGGGNKLTF

SEQ ID NO: 774782 - protein, 16 aa, Homo sapiens
  CDR3 for beta chain variable domain of TCR clone 387391 (TRBV6-1, TRBJ1-3)
CASVQGGLETPYILER

SEQ ID NO: 774783 - protein, 12 aa, Homo sapiens
  CDR3 for alpha chain variable domain of TCR clone 387392 (TRAV36/DV7, TRAJ54)
CAVVRGAQKLVF

SEQ ID NO: 774784 - protein, 17 aa, Homo sapiens
  CDR3 for beta chain variable domain of TCR clone 387392 (TRBV7-8, TRBJ2-6)
CASSAGTGGAGANVLTF

SEQ ID NO: 774785 - protein, 15 aa, Homo sapiens
  CDR3 for alpha chain variable domain of TCR clone 387393 (TRAV3, TRAJ36)
CAVRASQTGANNLFF

SEQ ID NO: 774786 - protein, 12 aa, Homo sapiens
  CDR3 for beta chain variable domain of TCR clone 387393 (TRBV11-2, TRBJ2-1)
CASSPGNNEQFF

SEQ ID NO: 774787 - protein, 12 aa, Homo sapiens
  CDR3 for alpha chain variable domain of TCR clone 387394 (TRAV3, TRAJ43)
CAVRDPNNDMRF

SEQ ID NO: 774788 - protein, 16 aa, Homo sapiens
  CDR3 for beta chain variable domain of TCR clone 387394 (TRBV6-1, TRBJ2-5)
CASSETLDRGAETQYF

SEQ ID NO: 774789 - protein, 12 aa, Homo sapiens
  CDR3 for alpha chain variable domain of TCR clone 387395 (TRAV12-3, TRAJ17)
CAMTLTGNKLTF

SEQ ID NO: 774790 - protein, 15 aa, Homo sapiens
  CDR3 for beta chain variable domain of TCR clone 387395 (TRBV7-9, TRBJ1-1)
CASSQPTGGFPEAFF

SEQ ID NO: 774791 - protein, 15 aa, Homo sapiens
  CDR3 for alpha chain variable domain of TCR clone 387396 (TRAV4, TRAJ39)
CLVGPNNNAGNMLTF

SEQ ID NO: 774792 - protein, 14 aa, Homo sapiens
  CDR3 for beta chain variable domain of TCR clone 387396 (TRBV19, TRBJ2-5)
CASSMTGQQETQYF

SEQ ID NO: 774793 - protein, 13 aa, Homo sapiens
  CDR3 for alpha chain variable domain of TCR clone 387397 (TRAV20, TRAJ20)
CAVQALNDYKLSF

SEQ ID NO: 774794 - protein, 14 aa, Homo sapiens
  CDR3 for beta chain variable domain of TCR clone 387397 (TRBV19, TRBJ2-5)
CASSMTGQQETQYF

SEQ ID NO: 774795 - protein, 14 aa, Homo sapiens
  CDR3 for alpha chain variable domain of TCR clone 387398 (TRAV8-2, TRAJ37)
CVVSISGNTGKLIF

SEQ ID NO: 774796 - protein, 11 aa, Homo sapiens
  CDR3 for beta chain variable domain of TCR clone 387398 (TRBV18, TRBJ2-5)
CASSPRESQYF

SEQ ID NO: 774797 - protein, 17 aa, Homo sapiens
  CDR3 for alpha chain variable domain of TCR clone 387399 (TRAV27, TRAJ52)
CAGAGWAGGTSYGKLTF

SEQ ID NO: 774798 - protein, 16 aa, Homo sapiens
  CDR3 for beta chain variable domain of TCR clone 387399 (TRBV19, TRBJ2-1)
CASSKAGPGSYNEQFF

SEQ ID NO: 774799 - protein, 17 aa, Homo sapiens
  CDR3 for alpha chain variable domain of TCR clone 387400 (TRAV3, TRAJ42)
CAVRDRDYGGSQGNLII

SEQ ID NO: 774800 - protein, 15 aa, Homo sapiens
  CDR3 for beta chain variable domain of TCR clone 387400 (TRBV2, TRBJ2-7)
CASSEGLARSYEQYF

SEQ ID NO: 774801 - protein, 15 aa, Homo sapiens
  CDR3 for alpha chain variable domain of TCR clone 387401 (TRAV3, TRAJ22)
CAVRDRGGSARQLIF

SEQ ID NO: 774802 - protein, 12 aa, Homo sapiens
  CDR3 for beta chain variable domain of TCR clone 387401 (TRBV7-2, TRBJ2-1)
CASSPQDIEQFL

SEQ ID NO: 774803 - protein, 13 aa, Homo sapiens
  CDR3 for alpha chain variable domain of TCR clone 387402 (TRAV8-6, TRAJ21)
CALSPSSLHKFYF

SEQ ID NO: 774804 - protein, 14 aa, Homo sapiens
  CDR3 for beta chain variable domain of TCR clone 387402 (TRBV7-9, TRBJ2-5)
CASSLDTAQETQYF

SEQ ID NO: 774805 - protein, 13 aa, Homo sapiens
  CDR3 for alpha chain variable domain of TCR clone 387403 (TRAV1-2, TRAJ12)
CAVSMDSSYKLIF

SEQ ID NO: 774806 - protein, 16 aa, Homo sapiens
  CDR3 for beta chain variable domain of TCR clone 387403 (TRBV29-1, TRBJ2-7)
CSVEVVGTSGSYEQYF

SEQ ID NO: 774807 - protein, 14 aa, Homo sapiens
  CDR3 for alpha chain variable domain of TCR clone 387404 (TRAV26-1, TRAJ11)
CIVPLYSGYSTLTF

SEQ ID NO: 774808 - protein, 14 aa, Homo sapiens
  CDR3 for beta chain variable domain of TCR clone 387404 (TRBV6-1, TRBJ1-3)
CASVQGGGGNTIYF

SEQ ID NO: 774809 - protein, 15 aa, Homo sapiens
  CDR3 for alpha chain variable domain of TCR clone 387405 (TRAV8-3, TRAJ27)
CAVGTSKTNAGKSTF

SEQ ID NO: 774810 - protein, 13 aa, Homo sapiens
  CDR3 for beta chain variable domain of TCR clone 387405 (TRBV20-1, TRBJ1-1)
CSAPLGGGTEAFF

SEQ ID NO: 774811 - protein, 18 aa, Homo sapiens
  CDR3 for alpha chain variable domain of TCR clone 387406 (TRAV13-1, TRAJ52)
CAAKNTNAGGTSYGKLTF

SEQ ID NO: 774812 - protein, 15 aa, Homo sapiens
  CDR3 for beta chain variable domain of TCR clone 387406 (TRBV18, TRBJ2-6)
CASSPSYAGANVLTF

SEQ ID NO: 774813 - protein, 14 aa, Homo sapiens
  CDR3 for alpha chain variable domain of TCR clone 387407 (TRAV17, TRAJ57)
CATDPQGGSEKLVF

SEQ ID NO: 774814 - protein, 18 aa, Homo sapiens
  CDR3 for beta chain variable domain of TCR clone 387407 (TRBV25-1, TRBJ2-1)
CASGESRAGGPGYNEQFF

SEQ ID NO: 774815 - protein, 14 aa, Homo sapiens
  CDR3 for alpha chain variable domain of TCR clone 387408 (TRAV17, TRAJ54)
CATDAKQGAQKLVF

SEQ ID NO: 774816 - protein, 14 aa, Homo sapiens
  CDR3 for beta chain variable domain of TCR clone 387408 (TRBV25-1, TRBJ1-1)
CASTHLGGNTEAFF

SEQ ID NO: 774817 - protein, 14 aa, Homo sapiens
  CDR3 for alpha chain variable domain of TCR clone 387409 (TRAV12-3, TRAJ10)
SHLPQTGGGNKLTF

SEQ ID NO: 774818 - protein, 13 aa, Homo sapiens
  CDR3 for beta chain variable domain of TCR clone 387409 (TRBV12-4, TRBJ1-1)
CASSPGTGFEAFF

SEQ ID NO: 774819 - protein, 14 aa, Homo sapiens
  CDR3 for alpha chain variable domain of TCR clone 387410 (TRAV12-2, TRAJ13)
CAVKKTGGYQKVTF

SEQ ID NO: 774820 - protein, 14 aa, Homo sapiens
  CDR3 for beta chain variable domain of TCR clone 387410 (TRBV12-5, TRBJ2-5)
CASGSRTHQETQCF

SEQ ID NO: 774821 - protein, 14 aa, Homo sapiens
  CDR3 for alpha chain variable domain of TCR clone 387411 (TRAV21, TRAJ32)
CAVWDGGATNKLIF

SEQ ID NO: 774822 - protein, 15 aa, Homo sapiens
  CDR3 for beta chain variable domain of TCR clone 387411 (TRBV12-4, TRBJ2-5)
CASSPPTGLQETQYF

SEQ ID NO: 774823 - protein, 16 aa, Homo sapiens
  CDR3 for alpha chain variable domain of TCR clone 387412 (TRAV12-2, TRAJ32)
CAVNLGQGGATNKPIF

SEQ ID NO: 774824 - protein, 15 aa, Homo sapiens
  CDR3 for beta chain variable domain of TCR clone 387412 (TRBV20-1, TRBJ2-7)
CSARDRVSGMDEQYF

SEQ ID NO: 774825 - protein, 13 aa, Homo sapiens
  CDR3 for alpha chain variable domain of TCR clone 387413 (TRAV3, TRAJ20)
CAVRSLNDYKLSF

SEQ ID NO: 774826 - protein, 13 aa, Homo sapiens
  CDR3 for beta chain variable domain of TCR clone 387413 (TRBV10-3, TRBJ2-7)
CASKLAVNYEQYF

SEQ ID NO: 774827 - protein, 13 aa, Homo sapiens
  CDR3 for alpha chain variable domain of TCR clone 387414 (TRAV17, TRAJ26)
CATVDNYGQNFVF

SEQ ID NO: 774828 - protein, 14 aa, Homo sapiens
  CDR3 for beta chain variable domain of TCR clone 387414 (TRBV7-2, TRBJ1-2)
CASSQTGSTYGYTF

SEQ ID NO: 774829 - protein, 14 aa, Homo sapiens
  CDR3 for alpha chain variable domain of TCR clone 387415 (TRAV12-3, TRAJ42)
CAMNYGGSQGNLIF

SEQ ID NO: 774830 - protein, 14 aa, Homo sapiens
  CDR3 for beta chain variable domain of TCR clone 387415 (TRBV6-1, TRBJ1-3)
CASVQGGGGNTIYF

SEQ ID NO: 774831 - protein, 14 aa, Homo sapiens
  CDR3 for alpha chain variable domain of TCR clone 387416 (TRAV12-2, TRAJ53)
CAVKGGGSNYKLTF

SEQ ID NO: 774832 - protein, 15 aa, Homo sapiens
  CDR3 for beta chain variable domain of TCR clone 387416 (TRBV2, TRBJ2-1)
CASSELAGSYNEQFF

SEQ ID NO: 774833 - protein, 12 aa, Homo sapiens
  CDR3 for alpha chain variable domain of TCR clone 387417 (TRAV26-2, TRAJ21)
CILKGNFNKFYF

SEQ ID NO: 774834 - protein, 14 aa, Homo sapiens
  CDR3 for beta chain variable domain of TCR clone 387417 (TRBV12-4, TRBJ1-1)
CASSLGTGGTEAFL

SEQ ID NO: 774835 - protein, 15 aa, Homo sapiens
  CDR3 for alpha chain variable domain of TCR clone 387418 (TRAV8-2, TRAJ40)
CVVLGTTSGTYKYIF

SEQ ID NO: 774836 - protein, 12 aa, Homo sapiens
  CDR3 for beta chain variable domain of TCR clone 387418 (TRBV7-9, TRBJ1-5)
CASSPQGQPQHF

SEQ ID NO: 774837 - protein, 11 aa, Homo sapiens
  CDR3 for alpha chain variable domain of TCR clone 387419 (TRAV2, TRAJ21)
CAVFTFNKFYF

SEQ ID NO: 774838 - protein, 14 aa, Homo sapiens
  CDR3 for beta chain variable domain of TCR clone 387419 (TRBV15, TRBJ2-3)
CATRSGTSTDTQYF

SEQ ID NO: 774839 - protein, 14 aa, Homo sapiens
  CDR3 for alpha chain variable domain of TCR clone 387420 (TRAV17, TRAJ54)
CATDANQGAQKLVF

SEQ ID NO: 774840 - protein, 12 aa, Homo sapiens
  CDR3 for beta chain variable domain of TCR clone 387420 (TRBV6-3, TRBJ2-1)
CSSSGSYNEQFF

SEQ ID NO: 774841 - protein, 13 aa, Homo sapiens
  CDR3 for alpha chain variable domain of TCR clone 387421 (TRAV26-1, TRAJ30)
CIVRDESNDKTIF

SEQ ID NO: 774842 - protein, 17 aa, Homo sapiens
  CDR3 for beta chain variable domain of TCR clone 387421 (TRBV13, TRBJ2-3)
CASSLSRVAGGRNTQYF

SEQ ID NO: 774843 - protein, 10 aa, Homo sapiens
  CDR3 for alpha chain variable domain of TCR clone 387422 (TRAV36/DV7, TRAJ48)
CAVGNEKLSF

SEQ ID NO: 774844 - protein, 16 aa, Homo sapiens
  CDR3 for beta chain variable domain of TCR clone 387422 (TRBV15, TRBJ2-3)
CATRLSGGRAPDTQYF

SEQ ID NO: 774845 - protein, 16 aa, Homo sapiens
  CDR3 for alpha chain variable domain of TCR clone 387423 (TRAV12-3, TRAJ53)
CAMSPGSGGSNYKLTF

SEQ ID NO: 774846 - protein, 15 aa, Homo sapiens
  CDR3 for beta chain variable domain of TCR clone 387423 (TRBV3-1, TRBJ2-1)
CASSQDYTPRGEQFF

SEQ ID NO: 774847 - protein, 17 aa, Homo sapiens
  CDR3 for alpha chain variable domain of TCR clone 387424 (TRAV16, TRAJ10)
CHVLLYSRTGGGNKLTF

SEQ ID NO: 774848 - protein, 15 aa, Homo sapiens
  CDR3 for beta chain variable domain of TCR clone 387424 (TRBV6-3, TRBJ2-7)
CASSSPGTVFYEQYF

SEQ ID NO: 774849 - protein, 14 aa, Homo sapiens
  CDR3 for alpha chain variable domain of TCR clone 387425 (TRAV12-1, TRAJ12)
CVVNGRDSSYNLIF

SEQ ID NO: 774850 - protein, 13 aa, Homo sapiens
  CDR3 for beta chain variable domain of TCR clone 387425 (TRBV28, TRBJ2-2)
CASIRESTGELFF

SEQ ID NO: 774851 - protein, 17 aa, Homo sapiens
  CDR3 for alpha chain variable domain of TCR clone 387426 (TRAV3, TRAJ6)
CAVRDGPRAGGSYIPPF

SEQ ID NO: 774852 - protein, 14 aa, Homo sapiens
  CDR3 for beta chain variable domain of TCR clone 387426 (TRBV11-2, TRBJ2-3)
CASSRLARTDTQYF

SEQ ID NO: 774853 - protein, 14 aa, Homo sapiens
  CDR3 for alpha chain variable domain of TCR clone 387427 (TRAV12-1, TRAJ3)
CVVNPGSSASKIIF

SEQ ID NO: 774854 - protein, 13 aa, Homo sapiens
  CDR3 for beta chain variable domain of TCR clone 387427 (TRBV24-1, TRBJ2-2)
CATSDWSTGELFF

SEQ ID NO: 774855 - protein, 16 aa, Homo sapiens
  CDR3 for alpha chain variable domain of TCR clone 387428 (TRAV30, TRAJ24)
CGTGIVDADSWGKSQF

SEQ ID NO: 774856 - protein, 14 aa, Homo sapiens
  CDR3 for beta chain variable domain of TCR clone 387428 (TRBV12-5, TRBJ2-5)
CASGSRTHQETQYF

SEQ ID NO: 774857 - protein, 15 aa, Homo sapiens
  CDR3 for alpha chain variable domain of TCR clone 387429 (TRAV13-1, TRAJ17)
CAASIERAAGNKITF

SEQ ID NO: 774858 - protein, 12 aa, Homo sapiens
  CDR3 for beta chain variable domain of TCR clone 387429 (TRBV5-7, TRBJ1-1)
FASSLGRGKAFF

SEQ ID NO: 774859 - protein, 16 aa, Homo sapiens
  CDR3 for alpha chain variable domain of TCR clone 387430 (TRAV14/DV4, TRAJ15)
CAMREGSFQAGTALIL

SEQ ID NO: 774860 - protein, 18 aa, Homo sapiens
  CDR3 for beta chain variable domain of TCR clone 387430 (TRBV12-4, TRBJ2-4)
CASSRTGAVDVAKNIQYF

SEQ ID NO: 774861 - protein, 15 aa, Homo sapiens
  CDR3 for alpha chain variable domain of TCR clone 387431 (TRAV8-3, TRAJ27)
CAVGPSKTHAGKSTF

SEQ ID NO: 774862 - protein, 15 aa, Homo sapiens
  CDR3 for beta chain variable domain of TCR clone 387431 (TRBV7-2, TRBJ2-3)
CASSLAGAFIDTQYF

SEQ ID NO: 774863 - protein, 13 aa, Homo sapiens
  CDR3 for alpha chain variable domain of TCR clone 387432 (TRAV13-1, TRAJ49)
CAAMSYTGNQFYF

SEQ ID NO: 774864 - protein, 15 aa, Homo sapiens
  CDR3 for beta chain variable domain of TCR clone 387432 (TRBV12-4, TRBJ1-5)
CASTRGSGFGQPQHF

SEQ ID NO: 774865 - protein, 14 aa, Homo sapiens
  CDR3 for alpha chain variable domain of TCR clone 387433 (TRAV8-4, TRAJ48)
CAVSETFGNEKLTF

SEQ ID NO: 774866 - protein, 14 aa, Homo sapiens
  CDR3 for beta chain variable domain of TCR clone 387433 (TRBV13, TRBJ2-7)
CASSLKGASHEQYF

SEQ ID NO: 774867 - protein, 13 aa, Homo sapiens
  CDR3 for alpha chain variable domain of TCR clone 387434 (TRAV21, TRAJ8)
CAAPNTGFQTLVF

SEQ ID NO: 774868 - protein, 14 aa, Homo sapiens
  CDR3 for beta chain variable domain of TCR clone 387434 (TRBV5-1, TRBJ2-7)
CASSRGESLYEQYF

SEQ ID NO: 774869 - protein, 19 aa, Homo sapiens
  CDR3 for alpha chain variable domain of TCR clone 387435 (TRAV2, TRAJ20)
ILQVREADAAVYRDCKLIF

SEQ ID NO: 774870 - protein, 17 aa, Homo sapiens
  CDR3 for beta chain variable domain of TCR clone 387435 (TRBV20-1, TRBJ2-2)
CSASGSGQGGLTGELFF

SEQ ID NO: 774871 - protein, 13 aa, Homo sapiens
  CDR3 for alpha chain variable domain of TCR clone 387436 (TRAV16, TRAJ28)
CAPTGAGSHQLTF

SEQ ID NO: 774872 - protein, 16 aa, Homo sapiens
  CDR3 for beta chain variable domain of TCR clone 387436 (TRBV28, TRBJ1-5)
CASSLTGQGWNQPQHL

SEQ ID NO: 774873 - protein, 10 aa, Homo sapiens
  CDR3 for alpha chain variable domain of TCR clone 387437 (TRAV8-3, TRAJ34)
FGAIPGKLIF

SEQ ID NO: 774874 - protein, 15 aa, Homo sapiens
  CDR3 for beta chain variable domain of TCR clone 387437 (TRBV5-7, TRBJ2-1)
CASSRRLAGDNEQFF

SEQ ID NO: 774875 - protein, 13 aa, Homo sapiens
  CDR3 for alpha chain variable domain of TCR clone 387438 (TRAV16, TRAJ52)
CALRGTSYGKLTF

SEQ ID NO: 774876 - protein, 17 aa, Homo sapiens
  CDR3 for beta chain variable domain of TCR clone 387438 (TRBV13, TRBJ2-3)
CASSLSRVAGGRNTQYF

SEQ ID NO: 774877 - protein, 14 aa, Homo sapiens
  CDR3 for alpha chain variable domain of TCR clone 387439 (TRAV8-1, TRAJ9)
CAVNAWTGGSKTIF

SEQ ID NO: 774878 - protein, 13 aa, Homo sapiens
  CDR3 for beta chain variable domain of TCR clone 387439 (TRBV5-5, TRBJ1-2)
CASSFWRGEDYTF

SEQ ID NO: 774879 - protein, 11 aa, Homo sapiens
  CDR3 for alpha chain variable domain of TCR clone 387440 (TRAV3, TRAJ21)
CAVGNFNKFYF

SEQ ID NO: 774880 - protein, 13 aa, Homo sapiens
  CDR3 for beta chain variable domain of TCR clone 387440 (TRBV4-1, TRBJ2-7)
CASSQGQAYEQYF

SEQ ID NO: 774881 - protein, 15 aa, Homo sapiens
  CDR3 for alpha chain variable domain of TCR clone 387441 (TRAV38-2/DV8, TRAJ57)
CAYKSGLGGSEKLVC

SEQ ID NO: 774882 - protein, 16 aa, Homo sapiens
  CDR3 for beta chain variable domain of TCR clone 387441 (TRBV28, TRBJ1-5)
CASSFRGGYSNQPQHF

SEQ ID NO: 774883 - protein, 14 aa, Homo sapiens
  CDR3 for alpha chain variable domain of TCR clone 387442 (TRAV29/DV5, TRAJ36)
CAARRKTGANNLFF

SEQ ID NO: 774884 - protein, 17 aa, Homo sapiens
  CDR3 for beta chain variable domain of TCR clone 387442 (TRBV7-6, TRBJ2-5)
CASSPGLAEPWGETQYF

SEQ ID NO: 774885 - protein, 14 aa, Homo sapiens
  CDR3 for alpha chain variable domain of TCR clone 387443 (TRAV8-4, TRAJ15)
CAVTIREAETALIF

SEQ ID NO: 774886 - protein, 16 aa, Homo sapiens
  CDR3 for beta chain variable domain of TCR clone 387443 (TRBV29-1, TRBJ2-6)
CSVEDITYSGANVLTF

SEQ ID NO: 774887 - protein, 14 aa, Homo sapiens
  CDR3 for alpha chain variable domain of TCR clone 387444 (TRAV17, TRAJ34)
CATDSLEGTDKLIF

SEQ ID NO: 774888 - protein, 15 aa, Homo sapiens
  CDR3 for beta chain variable domain of TCR clone 387444 (TRBV5-1, TRBJ1-2)
CASSLGQVSGRGYTF

SEQ ID NO: 774889 - protein, 13 aa, Homo sapiens
  CDR3 for alpha chain variable domain of TCR clone 387445 (TRAV21, TRAJ27)
CAARPGNAGKSTF

SEQ ID NO: 774890 - protein, 13 aa, Homo sapiens
  CDR3 for beta chain variable domain of TCR clone 387445 (TRBV7-3, TRBJ2-1)
CASSLDSYNEQFF

SEQ ID NO: 774891 - protein, 14 aa, Homo sapiens
  CDR3 for alpha chain variable domain of TCR clone 387446 (TRAV12-1, TRAJ17)
CVVNYKAAGNKLTF

SEQ ID NO: 774892 - protein, 19 aa, Homo sapiens
  CDR3 for beta chain variable domain of TCR clone 387446 (TRBV19, TRBJ2-5)
CASSIGQVTDFFLGETQYF

SEQ ID NO: 774893 - protein, 15 aa, Homo sapiens
  CDR3 for alpha chain variable domain of TCR clone 387447 (TRAV12-1, TRAJ45)
CVVLSGGGGADGLTF

SEQ ID NO: 774894 - protein, 15 aa, Homo sapiens
  CDR3 for beta chain variable domain of TCR clone 387447 (TRBV12-5, TRBJ2-5)
CASGSGLAGRETQYC

SEQ ID NO: 774895 - protein, 14 aa, Homo sapiens
  CDR3 for alpha chain variable domain of TCR clone 387448 (TRAV35, TRAJ22)
CAGLRPGSASQLTF

SEQ ID NO: 774896 - protein, 13 aa, Homo sapiens
  CDR3 for beta chain variable domain of TCR clone 387448 (TRBV20-1, TRBJ1-1)
CSARGGGNTEAFF

SEQ ID NO: 774897 - protein, 12 aa, Homo sapiens
  CDR3 for alpha chain variable domain of TCR clone 387449 (TRAV29/DV5, TRAJ15)
CASNQAGTALIF

SEQ ID NO: 774898 - protein, 15 aa, Homo sapiens
  CDR3 for beta chain variable domain of TCR clone 387449 (TRBV7-3, TRBJ2-2)
CASSETGQGTGELFF

SEQ ID NO: 774899 - protein, 16 aa, Homo sapiens
  CDR3 for alpha chain variable domain of TCR clone 387450 (TRAV3, TRAJ37)
CAVRGKGSGNTGKLIF

SEQ ID NO: 774900 - protein, 15 aa, Homo sapiens
  CDR3 for beta chain variable domain of TCR clone 387450 (TRBV6-1, TRBJ2-1)
CASSELRGQHNEQFF

SEQ ID NO: 774901 - protein, 14 aa, Homo sapiens
  CDR3 for alpha chain variable domain of TCR clone 387451 (TRAV21, TRAJ45)
CAGSSGGGADGLTF

SEQ ID NO: 774902 - protein, 15 aa, Homo sapiens
  CDR3 for beta chain variable domain of TCR clone 387451 (TRBV6-1, TRBJ2-4)
CASSEAVWTINSQYF

SEQ ID NO: 774903 - protein, 14 aa, Homo sapiens
  CDR3 for alpha chain variable domain of TCR clone 387452 (TRAV8-4, TRAJ13)
CAVTLSGGYPKVTF

SEQ ID NO: 774904 - protein, 14 aa, Homo sapiens
  CDR3 for beta chain variable domain of TCR clone 387452 (TRBV7-2, TRBJ1-2)
CARSQTGSTYGYTF

SEQ ID NO: 774905 - protein, 15 aa, Homo sapiens
  CDR3 for alpha chain variable domain of TCR clone 387453 (TRAV17, TRAJ57)
CATGPSQGGSEKLVF

SEQ ID NO: 774906 - protein, 18 aa, Homo sapiens
  CDR3 for beta chain variable domain of TCR clone 387453 (TRBV7-2, TRBJ2-2)
CASSLASRGAGGPGELFF

SEQ ID NO: 774907 - protein, 14 aa, Homo sapiens
  CDR3 for alpha chain variable domain of TCR clone 387454 (TRAV13-1, TRAJ44)
CAAKATGTASKLTF

SEQ ID NO: 774908 - protein, 19 aa, Homo sapiens
  CDR3 for beta chain variable domain of TCR clone 387454 (TRBV19, TRBJ2-2)
CASTRPGLAGGRVTGELFF

SEQ ID NO: 774909 - protein, 14 aa, Homo sapiens
  CDR3 for alpha chain variable domain of TCR clone 387455 (TRAV3, TRAJ21)
CAVESQANFNKFYF

SEQ ID NO: 774910 - protein, 12 aa, Homo sapiens
  CDR3 for beta chain variable domain of TCR clone 387455 (TRBV6-3, TRBJ2-7)
CTSSLTPYEQYF

SEQ ID NO: 774911 - protein, 15 aa, Homo sapiens
  CDR3 for alpha chain variable domain of TCR clone 387456 (TRAV21, TRAJ53)
CATLNSGGSNSKLTF

SEQ ID NO: 774912 - protein, 12 aa, Homo sapiens
  CDR3 for beta chain variable domain of TCR clone 387456 (TRBV14, TRBJ2-4)
CASSNLKSIQYF

SEQ ID NO: 774913 - protein, 15 aa, Homo sapiens
  CDR3 for alpha chain variable domain of TCR clone 387457 (TRAV17, TRAJ22)
CATVAPSGSARQLTF

SEQ ID NO: 774914 - protein, 14 aa, Homo sapiens
  CDR3 for beta chain variable domain of TCR clone 387457 (TRBV4-1, TRBJ2-2)
CASSQAVNTGELFF

SEQ ID NO: 774915 - protein, 13 aa, Homo sapiens
  CDR3 for alpha chain variable domain of TCR clone 387458 (TRAV13-1, TRAJ5)
CAASDTGRRAITF

SEQ ID NO: 774916 - protein, 19 aa, Homo sapiens
  CDR3 for beta chain variable domain of TCR clone 387458 (TRBV19, TRBJ1-4)
CASSPLGQLDGLANEKLFF

SEQ ID NO: 774917 - protein, 13 aa, Homo sapiens
  CDR3 for alpha chain variable domain of TCR clone 387459 (TRAV12-1, TRAJ17)
CVVNKAAGNKLTF

SEQ ID NO: 774918 - protein, 16 aa, Homo sapiens
  CDR3 for beta chain variable domain of TCR clone 387459 (TRBV11-2, TRBJ2-2)
CASSLRTGSLIGELFF

SEQ ID NO: 774919 - protein, 13 aa, Homo sapiens
  CDR3 for alpha chain variable domain of TCR clone 387460 (TRAV12-2, TRAJ52)
WAVSGTSYGKLTF

SEQ ID NO: 774920 - protein, 17 aa, Homo sapiens
  CDR3 for beta chain variable domain of TCR clone 387460 (TRBV11-2, TRBJ2-1)
CASSLYPPGVEYNEQFF

SEQ ID NO: 774921 - protein, 14 aa, Homo sapiens
  CDR3 for alpha chain variable domain of TCR clone 387461 (TRAV9-2, TRAJ39)
CALYIYNAGNMLTF

SEQ ID NO: 774922 - protein, 14 aa, Homo sapiens
  CDR3 for beta chain variable domain of TCR clone 387461 (TRBV28, TRBJ2-2)
CASRIRSGTGELFF

SEQ ID NO: 774923 - protein, 13 aa, Homo sapiens
  CDR3 for alpha chain variable domain of TCR clone 387462 (TRAV20, TRAJ20)
CAVRDFNDYKLSF

SEQ ID NO: 774924 - protein, 12 aa, Homo sapiens
  CDR3 for beta chain variable domain of TCR clone 387462 (TRBV7-3, TRBJ2-1)
CASSFINNEQFF

SEQ ID NO: 774925 - protein, 13 aa, Homo sapiens
  CDR3 for alpha chain variable domain of TCR clone 387463 (TRAV17, TRAJ34)
CATVPYNTDKLIF

SEQ ID NO: 774926 - protein, 14 aa, Homo sapiens
  CDR3 for beta chain variable domain of TCR clone 387463 (TRBV20-1, TRBJ1-1)
CSAQTRIGGTEAFF

SEQ ID NO: 774927 - protein, 18 aa, Homo sapiens
  CDR3 for alpha chain variable domain of TCR clone 387464 (TRAV17, TRAJ45)
CATSLDLYSGGGADGLTF

SEQ ID NO: 774928 - protein, 15 aa, Homo sapiens
  CDR3 for beta chain variable domain of TCR clone 387464 (TRBV11-2, TRBJ2-1)
CASSKNRGLIHEQFF

SEQ ID NO: 774929 - protein, 13 aa, Homo sapiens
  CDR3 for alpha chain variable domain of TCR clone 387465 (TRAV27, TRAJ49)
CAPRPYPGHQFYF

SEQ ID NO: 774930 - protein, 16 aa, Homo sapiens
  CDR3 for beta chain variable domain of TCR clone 387465 (TRBV4-1, TRBJ1-2)
CASSQDAGQVLYGYTF

SEQ ID NO: 774931 - protein, 14 aa, Homo sapiens
  CDR3 for alpha chain variable domain of TCR clone 387466 (TRAV26-1, TRAJ39)
CIVRGSRAGNMLTF

SEQ ID NO: 774932 - protein, 13 aa, Homo sapiens
  CDR3 for beta chain variable domain of TCR clone 387466 (TRBV25-1, TRBJ2-5)
CASSPGGVETQYF

SEQ ID NO: 774933 - protein, 17 aa, Homo sapiens
  CDR3 for alpha chain variable domain of TCR clone 387467 (TRAV3, TRAJ6)
CAVRDGPRAGGSYIPTF

SEQ ID NO: 774934 - protein, 11 aa, Homo sapiens
  CDR3 for beta chain variable domain of TCR clone 387467 (TRBV12-4, TRBJ2-2)
CASSSAGELFF

SEQ ID NO: 774935 - protein, 14 aa, Homo sapiens
  CDR3 for alpha chain variable domain of TCR clone 387468 (TRAV14/DV4, TRAJ23)
CAMRLYNQGGKLIL

SEQ ID NO: 774936 - protein, 14 aa, Homo sapiens
  CDR3 for beta chain variable domain of TCR clone 387468 (TRBV7-8, TRBJ2-3)
CASSLEAGTDTQYF

SEQ ID NO: 774937 - protein, 15 aa, Homo sapiens
  CDR3 for alpha chain variable domain of TCR clone 387469 (TRAV1-1, TRAJ36)
CAVRPQGTGANNLFF

SEQ ID NO: 774938 - protein, 17 aa, Homo sapiens
  CDR3 for beta chain variable domain of TCR clone 387469 (TRBV20-1, TRBJ2-7)
CSASGTSGRVGESEQCF

SEQ ID NO: 774939 - protein, 13 aa, Homo sapiens
  CDR3 for alpha chain variable domain of TCR clone 387470 (TRAV13-1, TRAJ49)
CAAMLYTGNQFYI

SEQ ID NO: 774940 - protein, 15 aa, Homo sapiens
  CDR3 for beta chain variable domain of TCR clone 387470 (TRBV12-4, TRBJ1-5)
CASTRGSGFGQPQHF

SEQ ID NO: 774941 - protein, 13 aa, Homo sapiens
  CDR3 for alpha chain variable domain of TCR clone 387471 (TRAV1-1, TRAJ13)
CAVNSGGYQKVTF

SEQ ID NO: 774942 - protein, 12 aa, Homo sapiens
  CDR3 for beta chain variable domain of TCR clone 387471 (TRBV28, TRBJ2-1)
CGSSVQINEQFF

SEQ ID NO: 774943 - protein, 15 aa, Homo sapiens
  CDR3 for alpha chain variable domain of TCR clone 387472 (TRAV14/DV4, TRAJ33)
CAMREGRDSNYQLIW

SEQ ID NO: 774944 - protein, 15 aa, Homo sapiens
  CDR3 for beta chain variable domain of TCR clone 387472 (TRBV5-5, TRBJ1-5)
CASSSTPGSDQPQHF

SEQ ID NO: 774945 - protein, 15 aa, Homo sapiens
  CDR3 for alpha chain variable domain of TCR clone 387473 (TRAV12-3, TRAJ6)
CAMSATSGGSYIPTF

SEQ ID NO: 774946 - protein, 12 aa, Homo sapiens
  CDR3 for beta chain variable domain of TCR clone 387473 (TRBV7-9, TRBJ2-7)
CASSLEGYEQYF

SEQ ID NO: 774947 - protein, 14 aa, Homo sapiens
  CDR3 for alpha chain variable domain of TCR clone 387474 (TRAV8-3, TRAJ23)
CAVIIYNQGGKFIF

SEQ ID NO: 774948 - protein, 15 aa, Homo sapiens
  CDR3 for beta chain variable domain of TCR clone 387474 (TRBV18, TRBJ2-1)
CASSPPSASYNEQFF

SEQ ID NO: 774949 - protein, 11 aa, Homo sapiens
  CDR3 for alpha chain variable domain of TCR clone 387475 (TRAV12-1, TRAJ3)
CVVSSASKIIF

SEQ ID NO: 774950 - protein, 16 aa, Homo sapiens
  CDR3 for beta chain variable domain of TCR clone 387475 (TRBV20-1, TRBJ2-5)
SAGLVGLAGGGETQYF

SEQ ID NO: 774951 - protein, 10 aa, Homo sapiens
  CDR3 for alpha chain variable domain of TCR clone 387476 (TRAV27, TRAJ43)
CAGANNDMRF

SEQ ID NO: 774952 - protein, 14 aa, Homo sapiens
  CDR3 for beta chain variable domain of TCR clone 387476 (TRBV14, TRBJ2-1)
CASSQVQGRGEQFF

SEQ ID NO: 774953 - protein, 17 aa, Homo sapiens
  CDR3 for alpha chain variable domain of TCR clone 387477 (TRAV26-1, TRAJ53)
CIVRVDDSGGSNYKLTF

SEQ ID NO: 774954 - protein, 17 aa, Homo sapiens
  CDR3 for beta chain variable domain of TCR clone 387477 (TRBV20-1, TRBJ2-7)
CSARVPAEYFYEQYSGR

SEQ ID NO: 774955 - protein, 11 aa, Homo sapiens
  CDR3 for alpha chain variable domain of TCR clone 387478 (TRAV2, TRAJ33)
CAVESNYQLIR

SEQ ID NO: 774956 - protein, 15 aa, Homo sapiens
  CDR3 for beta chain variable domain of TCR clone 387478 (TRBV19, TRBJ1-1)
CASTSGQIQDTEAFF

SEQ ID NO: 774957 - protein, 16 aa, Homo sapiens
  CDR3 for alpha chain variable domain of TCR clone 387479 (TRAV17, TRAJ28)
CATDEYSGAGNYQLTF

SEQ ID NO: 774958 - protein, 13 aa, Homo sapiens
  CDR3 for beta chain variable domain of TCR clone 387479 (TRBV7-9, TRBJ1-2)
CASRTGPNYGYTF

SEQ ID NO: 774959 - protein, 23 aa, Homo sapiens
  CDR3 for alpha chain variable domain of TCR clone 387480 (TRAV8-3, )
CAVVTTRIPDIQNPDPAVYQLRD

SEQ ID NO: 774960 - protein, 14 aa, Homo sapiens
  CDR3 for beta chain variable domain of TCR clone 387480 (TRBV11-2, TRBJ2-7)
YASSPSTTSYEQYF

SEQ ID NO: 774961 - protein, 12 aa, Homo sapiens
  CDR3 for alpha chain variable domain of TCR clone 387481 (TRAV12-3, TRAJ20)
CAMVRGDYKLSF

SEQ ID NO: 774962 - protein, 13 aa, Homo sapiens
  CDR3 for beta chain variable domain of TCR clone 387481 (TRBV19, TRBJ2-3)
CASCDRSGDTQYF

SEQ ID NO: 774963 - protein, 14 aa, Homo sapiens
  CDR3 for alpha chain variable domain of TCR clone 387482 (TRAV13-1, TRAJ29)
CAASSNSGNTPLVF

SEQ ID NO: 774964 - protein, 13 aa, Homo sapiens
  CDR3 for beta chain variable domain of TCR clone 387482 (TRBV7-9, TRBJ1-2)
CASSLKQNYGYTF

SEQ ID NO: 774965 - protein, 13 aa, Homo sapiens
  CDR3 for alpha chain variable domain of TCR clone 387483 (TRAV3, TRAJ21)
CAVRKPDFNKFYF

SEQ ID NO: 774966 - protein, 17 aa, Homo sapiens
  CDR3 for beta chain variable domain of TCR clone 387483 (TRBV7-8, TRBJ2-6)
CASSAGTGGAGANVLTF

SEQ ID NO: 774967 - protein, 13 aa, Homo sapiens
  CDR3 for alpha chain variable domain of TCR clone 387484 (TRAV21, TRAJ3)
CAVRGSSASKIIF

SEQ ID NO: 774968 - protein, 17 aa, Homo sapiens
  CDR3 for beta chain variable domain of TCR clone 387484 (TRBV5-7, TRBJ2-5)
CASSWIQGRGREGTQYF

SEQ ID NO: 774969 - protein, 14 aa, Homo sapiens
  CDR3 for alpha chain variable domain of TCR clone 387485 (TRAV1-2, TRAJ8)
CAVREDTGFQKLVI

SEQ ID NO: 774970 - protein, 15 aa, Homo sapiens
  CDR3 for beta chain variable domain of TCR clone 387485 (TRBV12-4, TRBJ2-5)
CASSPPTGLQETQYF

SEQ ID NO: 774971 - protein, 15 aa, Homo sapiens
  CDR3 for alpha chain variable domain of TCR clone 387486 (TRAV21, TRAJ53)
CATLNSGWSNYKLTF

SEQ ID NO: 774972 - protein, 15 aa, Homo sapiens
  CDR3 for beta chain variable domain of TCR clone 387486 (TRBV27, TRBJ2-1)
CASSNGGGSSNEQFF

SEQ ID NO: 774973 - protein, 17 aa, Homo sapiens
  CDR3 for alpha chain variable domain of TCR clone 387487 (TRAV12-2, TRAJ4)
CAVNVRPVSGGYNKLIF

SEQ ID NO: 774974 - protein, 13 aa, Homo sapiens
  CDR3 for beta chain variable domain of TCR clone 387487 (TRBV7-9, TRBJ2-7)
CASSFAGAYEQYF

SEQ ID NO: 774975 - protein, 14 aa, Homo sapiens
  CDR3 for alpha chain variable domain of TCR clone 387488 (TRAV26-1, TRAJ45)
CIEVTGGGADGLTF

SEQ ID NO: 774976 - protein, 12 aa, Homo sapiens
  CDR3 for beta chain variable domain of TCR clone 387488 (TRBV12-4, TRBJ2-7)
CASSLGSYEQYF

SEQ ID NO: 774977 - protein, 12 aa, Homo sapiens
  CDR3 for alpha chain variable domain of TCR clone 387489 (TRAV20, TRAJ20)
CAVRFNDYKLGF

SEQ ID NO: 774978 - protein, 14 aa, Homo sapiens
  CDR3 for beta chain variable domain of TCR clone 387489 (TRBV20-1, TRBJ2-1)
CSAQIGGSANEQFF

SEQ ID NO: 774979 - protein, 13 aa, Homo sapiens
  CDR3 for alpha chain variable domain of TCR clone 387490 (TRAV8-6, TRAJ49)
CAVITNTGNQLYF

SEQ ID NO: 774980 - protein, 14 aa, Homo sapiens
  CDR3 for beta chain variable domain of TCR clone 387490 (TRBV28, TRBJ2-7)
CAIVGQGNLYEQYF

SEQ ID NO: 774981 - protein, 14 aa, Homo sapiens
  CDR3 for alpha chain variable domain of TCR clone 387491 (TRAV12-1, TRAJ23)
CVVIVYNQGGKLIF

SEQ ID NO: 774982 - protein, 15 aa, Homo sapiens
  CDR3 for beta chain variable domain of TCR clone 387491 (TRBV20-1, TRBJ1-5)
CSAKPPGQCPQPQHF

SEQ ID NO: 774983 - protein, 15 aa, Homo sapiens
  CDR3 for alpha chain variable domain of TCR clone 387492 (TRAV3, TRAJ5)
CAVRDLDTGRRALTF

SEQ ID NO: 774984 - protein, 14 aa, Homo sapiens
  CDR3 for beta chain variable domain of TCR clone 387492 (TRBV5-1, TRBJ1-1)
CASSLVSINTEAFF

SEQ ID NO: 774985 - protein, 15 aa, Homo sapiens
  CDR3 for alpha chain variable domain of TCR clone 387493 (TRAV26-1, TRAJ22)
CIVRVSFWFCKATDL

SEQ ID NO: 774986 - protein, 12 aa, Homo sapiens
  CDR3 for beta chain variable domain of TCR clone 387493 (TRBV7-6, TRBJ2-5)
CASSLSQETQYF

SEQ ID NO: 774987 - protein, 16 aa, Homo sapiens
  CDR3 for alpha chain variable domain of TCR clone 387494 (TRAV20, TRAJ38)
CAVQASNAGNSSKLIW

SEQ ID NO: 774988 - protein, 16 aa, Homo sapiens
  CDR3 for beta chain variable domain of TCR clone 387494 (TRBV7-8, TRBJ2-6)
CASRVGDSSGANVLTF

SEQ ID NO: 774989 - protein, 15 aa, Homo sapiens
  CDR3 for alpha chain variable domain of TCR clone 387495 (TRAV26-1, TRAJ29)
CIARVEGSGNTPLVF

SEQ ID NO: 774990 - protein, 15 aa, Homo sapiens
  CDR3 for beta chain variable domain of TCR clone 387495 (TRBV19, TRBJ2-7)
CASSPACSCEALRYF

SEQ ID NO: 774991 - protein, 14 aa, Homo sapiens
  CDR3 for alpha chain variable domain of TCR clone 387496 (TRAV1-2, TRAJ10)
WAVRGTGGGNKLTF

SEQ ID NO: 774992 - protein, 18 aa, Homo sapiens
  CDR3 for beta chain variable domain of TCR clone 387496 (TRBV11-2, TRBJ2-7)
CASSPRGVAGFLIYEQYF

SEQ ID NO: 774993 - protein, 12 aa, Homo sapiens
  CDR3 for alpha chain variable domain of TCR clone 387497 (TRAV3, TRAJ20)
CAARDPDYKPSV

SEQ ID NO: 774994 - protein, 13 aa, Homo sapiens
  CDR3 for beta chain variable domain of TCR clone 387497 (TRBV9, TRBJ2-1)
CASSVGQGGEQFF

SEQ ID NO: 774995 - protein, 13 aa, Homo sapiens
  CDR3 for alpha chain variable domain of TCR clone 387498 (TRAV39, TRAJ49)
CAVDSNTGNQFYF

SEQ ID NO: 774996 - protein, 12 aa, Homo sapiens
  CDR3 for beta chain variable domain of TCR clone 387498 (TRBV24-1, TRBJ1-1)
CATLYPDTEAFF

SEQ ID NO: 774997 - protein, 14 aa, Homo sapiens
  CDR3 for alpha chain variable domain of TCR clone 387499 (TRAV1-2, TRAJ6)
CAVSLSGGSYIPTF

SEQ ID NO: 774998 - protein, 11 aa, Homo sapiens
  CDR3 for beta chain variable domain of TCR clone 387499 (TRBV19, TRBJ2-1)
CASSMGLEQFF

SEQ ID NO: 774999 - protein, 14 aa, Homo sapiens
  CDR3 for alpha chain variable domain of TCR clone 387500 (TRAV17, TRAJ53)
CGVGSGGSNYKLTF

SEQ ID NO: 775000 - protein, 12 aa, Homo sapiens
  CDR3 for beta chain variable domain of TCR clone 387500 (TRBV7-9, TRBJ2-3)
CASSFITDTQYF

SEQ ID NO: 775001 - protein, 18 aa, Homo sapiens
  CDR3 for alpha chain variable domain of TCR clone 387501 (TRAV3, TRAJ32)
CAVRDIRGHGGATNKLIF

SEQ ID NO: 775002 - protein, 15 aa, Homo sapiens
  CDR3 for beta chain variable domain of TCR clone 387501 (TRBV12-4, TRBJ2-2)
CASSLGVRHTGELFF

SEQ ID NO: 775003 - protein, 18 aa, Homo sapiens
  CDR3 for alpha chain variable domain of TCR clone 387502 (TRAV12-1, TRAJ52)
CVVKLINAGGTSYGKLTF

SEQ ID NO: 775004 - protein, 13 aa, Homo sapiens
  CDR3 for beta chain variable domain of TCR clone 387502 (TRBV7-3, TRBJ1-1)
CASSQDWGAEAFF

SEQ ID NO: 775005 - protein, 12 aa, Homo sapiens
  CDR3 for alpha chain variable domain of TCR clone 387503 (TRAV8-6, TRAJ43)
CAVSHNNNDMRF

SEQ ID NO: 775006 - protein, 15 aa, Homo sapiens
  CDR3 for beta chain variable domain of TCR clone 387503 (TRBV7-9, TRBJ2-2)
CASGPLDTFPGELFF

SEQ ID NO: 775007 - protein, 13 aa, Homo sapiens
  CDR3 for alpha chain variable domain of TCR clone 387504 (TRAV38-2/DV8, TRAJ53)
CASGGGSNYKLTF

SEQ ID NO: 775008 - protein, 16 aa, Homo sapiens
  CDR3 for beta chain variable domain of TCR clone 387504 (TRBV28, TRBJ1-5)
CASRFRGAVQNQPHHF

SEQ ID NO: 775009 - protein, 12 aa, Homo sapiens
  CDR3 for alpha chain variable domain of TCR clone 387505 (TRAV12-2, TRAJ10)
WGVTGGGNKLTF

SEQ ID NO: 775010 - protein, 14 aa, Homo sapiens
  CDR3 for beta chain variable domain of TCR clone 387505 (TRBV28, TRBJ1-1)
CASSESGRGTEAFF

SEQ ID NO: 775011 - protein, 13 aa, Homo sapiens
  CDR3 for alpha chain variable domain of TCR clone 387506 (TRAV2, TRAJ24)
CAVSTDSWGKLQF

SEQ ID NO: 775012 - protein, 14 aa, Homo sapiens
  CDR3 for beta chain variable domain of TCR clone 387506 (TRBV2, TRBJ2-7)
CASSLTSGGYEQYF

SEQ ID NO: 775013 - protein, 14 aa, Homo sapiens
  CDR3 for alpha chain variable domain of TCR clone 387507 (TRAV1-2, TRAJ8)
CAVREDTGFQRLVF

SEQ ID NO: 775014 - protein, 16 aa, Homo sapiens
  CDR3 for beta chain variable domain of TCR clone 387507 (TRBV5-1, TRBJ2-3)
CASSLALAVVSDTQYF

SEQ ID NO: 775015 - protein, 15 aa, Homo sapiens
  CDR3 for alpha chain variable domain of TCR clone 387508 (TRAV3, TRAJ22)
CAVRDRGGSARKLPF

SEQ ID NO: 775016 - protein, 16 aa, Homo sapiens
  CDR3 for beta chain variable domain of TCR clone 387508 (TRBV5-4, TRBJ2-3)
CASQQPGAGGADTQYF

SEQ ID NO: 775017 - protein, 13 aa, Homo sapiens
  CDR3 for alpha chain variable domain of TCR clone 387509 (TRAV2, TRAJ40)
CAVVTSGTYKYIF

SEQ ID NO: 775018 - protein, 13 aa, Homo sapiens
  CDR3 for beta chain variable domain of TCR clone 387509 (TRBV28, TRBJ2-1)
CASRSGGLNEQFF

SEQ ID NO: 775019 - protein, 15 aa, Homo sapiens
  CDR3 for alpha chain variable domain of TCR clone 387510 (TRAV26-1, TRAJ29)
CIVRVEGSGNTPLVF

SEQ ID NO: 775020 - protein, 15 aa, Homo sapiens
  CDR3 for beta chain variable domain of TCR clone 387510 (TRBV28, TRBJ2-5)
CASSPGQGSIETQYC

SEQ ID NO: 775021 - protein, 13 aa, Homo sapiens
  CDR3 for alpha chain variable domain of TCR clone 387511 (TRAV13-1, TRAJ10)
CAATAGGENKLTF

SEQ ID NO: 775022 - protein, 14 aa, Homo sapiens
  CDR3 for beta chain variable domain of TCR clone 387511 (TRBV12-4, TRBJ2-7)
CASSPAGLKYEQYF

SEQ ID NO: 775023 - protein, 14 aa, Homo sapiens
  CDR3 for alpha chain variable domain of TCR clone 387512 (TRAV14/DV4, TRAJ42)
CPRGSLRSQGNLIF

SEQ ID NO: 775024 - protein, 17 aa, Homo sapiens
  CDR3 for beta chain variable domain of TCR clone 387512 (TRBV24-1, TRBJ2-1)
CATSDVSTSGTYNEQFF

SEQ ID NO: 775025 - protein, 14 aa, Homo sapiens
  CDR3 for alpha chain variable domain of TCR clone 387513 (TRAV12-2, TRAJ40)
CAVKIPSGTYQYIF

SEQ ID NO: 775026 - protein, 15 aa, Homo sapiens
  CDR3 for beta chain variable domain of TCR clone 387513 (TRBV7-2, TRBJ2-1)
CASSFQADEYNEQFF

SEQ ID NO: 775027 - protein, 14 aa, Homo sapiens
  CDR3 for alpha chain variable domain of TCR clone 387514 (TRAV12-2, TRAJ5)
CAVNRSTGRRALTC

SEQ ID NO: 775028 - protein, 12 aa, Homo sapiens
  CDR3 for beta chain variable domain of TCR clone 387514 (TRBV19, TRBJ1-5)
CASSIAQQHQHF

SEQ ID NO: 775029 - protein, 14 aa, Homo sapiens
  CDR3 for alpha chain variable domain of TCR clone 387515 (TRAV1-2, TRAJ8)
CAVGEDTGFQKLVF

SEQ ID NO: 775030 - protein, 12 aa, Homo sapiens
  CDR3 for beta chain variable domain of TCR clone 387515 (TRBV7-9, TRBJ2-7)
CASSFGSYEQYF

SEQ ID NO: 775031 - protein, 14 aa, Homo sapiens
  CDR3 for alpha chain variable domain of TCR clone 387516 (TRAV17, TRAJ16)
CATADFSDGQKLLF

SEQ ID NO: 775032 - protein, 11 aa, Homo sapiens
  CDR3 for beta chain variable domain of TCR clone 387516 (TRBV24-1, TRBJ1-1)
CATLYPDTGAF

SEQ ID NO: 775033 - protein, 16 aa, Homo sapiens
  CDR3 for alpha chain variable domain of TCR clone 387517 (TRAV1-2, TRAJ10)
CAVRGVLTGGGNKLTF

SEQ ID NO: 775034 - protein, 17 aa, Homo sapiens
  CDR3 for beta chain variable domain of TCR clone 387517 (TRBV15, TRBJ1-5)
CATSSAPPGTRNQPQHF

SEQ ID NO: 775035 - protein, 12 aa, Homo sapiens
  CDR3 for alpha chain variable domain of TCR clone 387518 (TRAV35, TRAJ30)
CAGLNRDDTIIF

SEQ ID NO: 775036 - protein, 15 aa, Homo sapiens
  CDR3 for beta chain variable domain of TCR clone 387518 (TRBV18, TRBJ2-3)
CASSPLAGETDTQYF

SEQ ID NO: 775037 - protein, 18 aa, Homo sapiens
  CDR3 for alpha chain variable domain of TCR clone 387519 (TRAV21, TRAJ52)
CAVKPSPAGGTIYGKLTF

SEQ ID NO: 775038 - protein, 16 aa, Homo sapiens
  CDR3 for beta chain variable domain of TCR clone 387519 (TRBV7-3, TRBJ2-2)
CASSLKRGTLSGELFF

SEQ ID NO: 775039 - protein, 12 aa, Homo sapiens
  CDR3 for alpha chain variable domain of TCR clone 387520 (TRAV27, TRAJ9)
CAGESGGFKTIF

SEQ ID NO: 775040 - protein, 12 aa, Homo sapiens
  CDR3 for beta chain variable domain of TCR clone 387520 (TRBV19, TRBJ1-5)
CASSIAQQPQHF

SEQ ID NO: 775041 - protein, 15 aa, Homo sapiens
  CDR3 for alpha chain variable domain of TCR clone 387521 (TRAV35, TRAJ40)
FAGQLGTSGTYKYIF

SEQ ID NO: 775042 - protein, 14 aa, Homo sapiens
  CDR3 for beta chain variable domain of TCR clone 387521 (TRBV7-3, TRBJ2-1)
CASSLAGGTNEQFV

SEQ ID NO: 775043 - protein, 14 aa, Homo sapiens
  CDR3 for alpha chain variable domain of TCR clone 387522 (TRAV23/DV6, TRAJ17)
CEARGRAAGNKLTF

SEQ ID NO: 775044 - protein, 12 aa, Homo sapiens
  CDR3 for beta chain variable domain of TCR clone 387522 (TRBV7-9, TRBJ2-3)
CASSFITDTQYF

SEQ ID NO: 775045 - protein, 12 aa, Homo sapiens
  CDR3 for alpha chain variable domain of TCR clone 387523 (TRAV13-2, TRAJ23)
CAERHRGGKLIF

SEQ ID NO: 775046 - protein, 15 aa, Homo sapiens
  CDR3 for beta chain variable domain of TCR clone 387523 (TRBV19, TRBJ1-2)
CASSVGQVVNYGYTF

SEQ ID NO: 775047 - protein, 12 aa, Homo sapiens
  CDR3 for alpha chain variable domain of TCR clone 387524 (TRAV12-3, TRAJ3)
CAIDSSASKIIF

SEQ ID NO: 775048 - protein, 17 aa, Homo sapiens
  CDR3 for beta chain variable domain of TCR clone 387524 (TRBV28, TRBJ2-5)
CASSFGGEWGGQETQYF

SEQ ID NO: 775049 - protein, 14 aa, Homo sapiens
  CDR3 for alpha chain variable domain of TCR clone 387525 (TRAV26-1, TRAJ38)
CIADNAGNNGKLIW

SEQ ID NO: 775050 - protein, 17 aa, Homo sapiens
  CDR3 for beta chain variable domain of TCR clone 387525 (TRBV7-9, TRBJ2-3)
CASSPTVAGGPHRYAVF

SEQ ID NO: 775051 - protein, 13 aa, Homo sapiens
  CDR3 for alpha chain variable domain of TCR clone 387526 (TRAV8-6, TRAJ24)
CAVSSDSWGKLQC

SEQ ID NO: 775052 - protein, 15 aa, Homo sapiens
  CDR3 for beta chain variable domain of TCR clone 387526 (TRBV5-1, TRBJ2-1)
CASSPPRAPYNEQFF

SEQ ID NO: 775053 - protein, 14 aa, Homo sapiens
  CDR3 for alpha chain variable domain of TCR clone 387527 (TRAV16, TRAJ57)
CALPTQGGSEKLVF

SEQ ID NO: 775054 - protein, 15 aa, Homo sapiens
  CDR3 for beta chain variable domain of TCR clone 387527 (TRBV28, TRBJ1-3)
CASWGGHLSGNSIYF

SEQ ID NO: 775055 - protein, 14 aa, Homo sapiens
  CDR3 for alpha chain variable domain of TCR clone 387528 (TRAV26-1, TRAJ38)
CIADNAGNNCKLIW

SEQ ID NO: 775056 - protein, 14 aa, Homo sapiens
  CDR3 for beta chain variable domain of TCR clone 387528 (TRBV6-1, TRBJ1-3)
CASVQGGGGNTIYF

SEQ ID NO: 775057 - protein, 17 aa, Homo sapiens
  CDR3 for alpha chain variable domain of TCR clone 387529 (TRAV8-6, TRAJ4)
CAVSDLGVAGGYNKLMF

SEQ ID NO: 775058 - protein, 15 aa, Homo sapiens
  CDR3 for beta chain variable domain of TCR clone 387529 (TRBV28, TRBJ1-2)
CASSSPRRGNYGYTF

SEQ ID NO: 775059 - protein, 13 aa, Homo sapiens
  CDR3 for alpha chain variable domain of TCR clone 387530 (TRAV2, TRAJ40)
CAVVTSGTYKYIF

SEQ ID NO: 775060 - protein, 16 aa, Homo sapiens
  CDR3 for beta chain variable domain of TCR clone 387530 (TRBV7-7, TRBJ2-1)
CASSLASGTSYNGQFF

SEQ ID NO: 775061 - protein, 13 aa, Homo sapiens
  CDR3 for alpha chain variable domain of TCR clone 387531 (TRAV16, TRAJ54)
CALKVRGAQQLVF

SEQ ID NO: 775062 - protein, 13 aa, Homo sapiens
  CDR3 for beta chain variable domain of TCR clone 387531 (TRBV20-1, TRBJ1-1)
CSARGGGNTEAFF

SEQ ID NO: 775063 - protein, 12 aa, Homo sapiens
  CDR3 for alpha chain variable domain of TCR clone 387532 (TRAV8-6, TRAJ43)
CAVRHNNNDMRF

SEQ ID NO: 775064 - protein, 14 aa, Homo sapiens
  CDR3 for beta chain variable domain of TCR clone 387532 (TRBV10-3, TRBJ1-1)
CAISDGSGVTEAFF

SEQ ID NO: 775065 - protein, 12 aa, Homo sapiens
  CDR3 for alpha chain variable domain of TCR clone 387533 (TRAV13-1, TRAJ49)
CAASPMGNQFYF

SEQ ID NO: 775066 - protein, 14 aa, Homo sapiens
  CDR3 for beta chain variable domain of TCR clone 387533 (TRBV19, TRBJ2-5)
CASSMTGKQETQYF

SEQ ID NO: 775067 - protein, 12 aa, Homo sapiens
  CDR3 for alpha chain variable domain of TCR clone 387534 (TRAV12-1, TRAJ40)
CVVYYGTYKYIF

SEQ ID NO: 775068 - protein, 18 aa, Homo sapiens
  CDR3 for beta chain variable domain of TCR clone 387534 (TRBV11-3, TRBJ2-3)
CASSLGGASRGAPNTQYF

SEQ ID NO: 775069 - protein, 13 aa, Homo sapiens
  CDR3 for alpha chain variable domain of TCR clone 387535 (TRAV12-2, TRAJ45)
CAARGGGADGLTF

SEQ ID NO: 775070 - protein, 15 aa, Homo sapiens
  CDR3 for beta chain variable domain of TCR clone 387535 (TRBV12-4, TRBJ2-5)
CASSPPTGLQETQYF

SEQ ID NO: 775071 - protein, 14 aa, Homo sapiens
  CDR3 for alpha chain variable domain of TCR clone 387536 (TRAV13-1, TRAJ48)
CAASTDFVNEKLTF

SEQ ID NO: 775072 - protein, 14 aa, Homo sapiens
  CDR3 for beta chain variable domain of TCR clone 387536 (TRBV7-2, TRBJ2-2)
CASSSDGHTGELFF

SEQ ID NO: 775073 - protein, 14 aa, Homo sapiens
  CDR3 for alpha chain variable domain of TCR clone 387537 (TRAV1-2, TRAJ16)
CAVNRFSDGQKLLS

SEQ ID NO: 775074 - protein, 15 aa, Homo sapiens
  CDR3 for beta chain variable domain of TCR clone 387537 (TRBV9, TRBJ1-6)
CASSVAGTGDPTLHF

SEQ ID NO: 775075 - protein, 18 aa, Homo sapiens
  CDR3 for alpha chain variable domain of TCR clone 387538 (TRAV26-1, TRAJ5)
CIVRVVPPRDTGRRALTF

SEQ ID NO: 775076 - protein, 12 aa, Homo sapiens
  CDR3 for beta chain variable domain of TCR clone 387538 (TRBV7-9, TRBJ2-3)
CASSQGTDTQYF

SEQ ID NO: 775077 - protein, 12 aa, Homo sapiens
  CDR3 for alpha chain variable domain of TCR clone 387539 (TRAV23/DV6, TRAJ53)
CAASKLGRGGSN

SEQ ID NO: 775078 - protein, 14 aa, Homo sapiens
  CDR3 for beta chain variable domain of TCR clone 387539 (TRBV12-4, TRBJ2-5)
CASSLWQKQETQYF

SEQ ID NO: 775079 - protein, 14 aa, Homo sapiens
  CDR3 for alpha chain variable domain of TCR clone 387540 (TRAV21, TRAJ15)
CAVSLNQAGTGLIF

SEQ ID NO: 775080 - protein, 11 aa, Homo sapiens
  CDR3 for beta chain variable domain of TCR clone 387540 (TRBV20-1, TRBJ2-7)
CSARTSYEQYF

SEQ ID NO: 775081 - protein, 14 aa, Homo sapiens
  CDR3 for alpha chain variable domain of TCR clone 387541 (TRAV3, TRAJ8)
CAALMNTGFQKLVF

SEQ ID NO: 775082 - protein, 15 aa, Homo sapiens
  CDR3 for beta chain variable domain of TCR clone 387541 (TRBV28, TRBJ2-5)
CASRLGLGNQETQYF

SEQ ID NO: 775083 - protein, 13 aa, Homo sapiens
  CDR3 for alpha chain variable domain of TCR clone 387542 (TRAV16, TRAJ58)
CALSIPSGSRLTF

SEQ ID NO: 775084 - protein, 15 aa, Homo sapiens
  CDR3 for beta chain variable domain of TCR clone 387542 (TRBV7-3, TRBJ2-1)
CASSPTGGGEVEQFF

SEQ ID NO: 775085 - protein, 11 aa, Homo sapiens
  CDR3 for alpha chain variable domain of TCR clone 387543 (TRAV21, TRAJ34)
CAVTNTDKLIF

SEQ ID NO: 775086 - protein, 13 aa, Homo sapiens
  CDR3 for beta chain variable domain of TCR clone 387543 (TRBV11-2, TRBJ2-1)
CASSLDLVNEQFF

SEQ ID NO: 775087 - protein, 14 aa, Homo sapiens
  CDR3 for alpha chain variable domain of TCR clone 387544 (TRAV8-3, TRAJ4)
CAVGAAGGYNKLIF

SEQ ID NO: 775088 - protein, 14 aa, Homo sapiens
  CDR3 for beta chain variable domain of TCR clone 387544 (TRBV12-4, TRBJ1-1)
CASSLGTGGTEAFF

SEQ ID NO: 775089 - protein, 13 aa, Homo sapiens
  CDR3 for alpha chain variable domain of TCR clone 387545 (TRAV13-2, TRAJ53)
CAENMGSNYKLTL

SEQ ID NO: 775090 - protein, 13 aa, Homo sapiens
  CDR3 for beta chain variable domain of TCR clone 387545 (TRBV4-1, TRBJ2-2)
CASSQENAGELFF

SEQ ID NO: 775091 - protein, 13 aa, Homo sapiens
  CDR3 for alpha chain variable domain of TCR clone 387546 (TRAV8-3, TRAJ4)
WVFYSGGYNKLIF

SEQ ID NO: 775092 - protein, 14 aa, Homo sapiens
  CDR3 for beta chain variable domain of TCR clone 387546 (TRBV7-9, TRBJ2-3)
CASNLEDGTDTQYF

SEQ ID NO: 775093 - protein, 10 aa, Homo sapiens
  CDR3 for alpha chain variable domain of TCR clone 387547 (TRAV25, TRAJ53)
CAGSNYKLTF

SEQ ID NO: 775094 - protein, 14 aa, Homo sapiens
  CDR3 for beta chain variable domain of TCR clone 387547 (TRBV7-7, TRBJ2-7)
CASSLGRGVGEQDF

SEQ ID NO: 775095 - protein, 16 aa, Homo sapiens
  CDR3 for alpha chain variable domain of TCR clone 387548 (TRAV4, TRAJ22)
CLVGDLYSGSARQLTF

SEQ ID NO: 775096 - protein, 16 aa, Homo sapiens
  CDR3 for beta chain variable domain of TCR clone 387548 (TRBV7-9, TRBJ2-1)
WASSDVAGGSYNEQFF

SEQ ID NO: 775097 - protein, 16 aa, Homo sapiens
  CDR3 for alpha chain variable domain of TCR clone 387549 (TRAV8-3, TRAJ10)
CAVGPILTGGGNKLAF

SEQ ID NO: 775098 - protein, 16 aa, Homo sapiens
  CDR3 for beta chain variable domain of TCR clone 387549 (TRBV7-2, TRBJ2-5)
CASSSKWWSGQETQYF

SEQ ID NO: 775099 - protein, 13 aa, Homo sapiens
  CDR3 for alpha chain variable domain of TCR clone 387550 (TRAV1-2, TRAJ9)
CAALNTGGFKTIF

SEQ ID NO: 775100 - protein, 16 aa, Homo sapiens
  CDR3 for beta chain variable domain of TCR clone 387550 (TRBV5-1, TRBJ2-7)
CASSYASTSSGGEQYF

SEQ ID NO: 775101 - protein, 18 aa, Homo sapiens
  CDR3 for alpha chain variable domain of TCR clone 387551 (TRAV12-3, TRAJ52)
CAMSVGGAGGTSYGNLTF

SEQ ID NO: 775102 - protein, 15 aa, Homo sapiens
  CDR3 for beta chain variable domain of TCR clone 387551 (TRBV27, TRBJ1-6)
CASSFDRGLGSPFYF

SEQ ID NO: 775103 - protein, 11 aa, Homo sapiens
  CDR3 for alpha chain variable domain of TCR clone 387552 (TRAV16, TRAJ20)
CALSEGFKAAL

SEQ ID NO: 775104 - protein, 13 aa, Homo sapiens
  CDR3 for beta chain variable domain of TCR clone 387552 (TRBV7-3, TRBJ2-1)
CASSLDSDNEQFF

SEQ ID NO: 775105 - protein, 13 aa, Homo sapiens
  CDR3 for alpha chain variable domain of TCR clone 387553 (TRAV12-2, TRAJ20)
CAVNRFDDYKLSF

SEQ ID NO: 775106 - protein, 12 aa, Homo sapiens
  CDR3 for beta chain variable domain of TCR clone 387553 (TRBV28, TRBJ2-3)
CASSLYRHTQYF

SEQ ID NO: 775107 - protein, 14 aa, Homo sapiens
  CDR3 for alpha chain variable domain of TCR clone 387554 (TRAV20, TRAJ56)
CAMQFGGANSKLTF

SEQ ID NO: 775108 - protein, 13 aa, Homo sapiens
  CDR3 for beta chain variable domain of TCR clone 387554 (TRBV19, TRBJ2-7)
CASSPRQSYEQYF

SEQ ID NO: 775109 - protein, 14 aa, Homo sapiens
  CDR3 for alpha chain variable domain of TCR clone 387555 (TRAV8-6, TRAJ37)
CAVRLSGNTGKLIF

SEQ ID NO: 775110 - protein, 12 aa, Homo sapiens
  CDR3 for beta chain variable domain of TCR clone 387555 (TRBV7-9, TRBJ2-1)
CASDTSYNEQFF

SEQ ID NO: 775111 - protein, 17 aa, Homo sapiens
  CDR3 for alpha chain variable domain of TCR clone 387556 (TRAV26-1, TRAJ58)
CIVRVGAEETSGSRLTF

SEQ ID NO: 775112 - protein, 16 aa, Homo sapiens
  CDR3 for beta chain variable domain of TCR clone 387556 (TRBV7-2, TRBJ1-4)
CASSLAPGRRDEKLFF

SEQ ID NO: 775113 - protein, 12 aa, Homo sapiens
  CDR3 for alpha chain variable domain of TCR clone 387557 (TRAV13-1, TRAJ48)
CAANFGNEKLTF

SEQ ID NO: 775114 - protein, 13 aa, Homo sapiens
  CDR3 for beta chain variable domain of TCR clone 387557 (TRBV19, TRBJ1-2)
SASSISEDYGYTF

SEQ ID NO: 775115 - protein, 14 aa, Homo sapiens
  CDR3 for alpha chain variable domain of TCR clone 387558 (TRAV1-2, TRAJ8)
CAVREDTGFPKLVF

SEQ ID NO: 775116 - protein, 15 aa, Homo sapiens
  CDR3 for beta chain variable domain of TCR clone 387558 (TRBV7-3, TRBJ2-2)
CASSETGQGTGELFF

SEQ ID NO: 775117 - protein, 16 aa, Homo sapiens
  CDR3 for alpha chain variable domain of TCR clone 387559 (TRAV2, TRAJ13)
CCGDFMNSGGYQEVTF

SEQ ID NO: 775118 - protein, 14 aa, Homo sapiens
  CDR3 for beta chain variable domain of TCR clone 387559 (TRBV25-1, TRBJ1-1)
CASTHLGGNTEAFF

SEQ ID NO: 775119 - protein, 14 aa, Homo sapiens
  CDR3 for alpha chain variable domain of TCR clone 387560 (TRAV13-1, TRAJ44)
CAAKPTGTPSKLPF

SEQ ID NO: 775120 - protein, 17 aa, Homo sapiens
  CDR3 for beta chain variable domain of TCR clone 387560 (TRBV7-3, TRBJ2-3)
CASSLMKRMRGADTQYF

SEQ ID NO: 775121 - protein, 13 aa, Homo sapiens
  CDR3 for alpha chain variable domain of TCR clone 387561 (TRAV17, TRAJ22)
CAGRRGSARQLTF

SEQ ID NO: 775122 - protein, 14 aa, Homo sapiens
  CDR3 for beta chain variable domain of TCR clone 387561 (TRBV19, TRBJ1-1)
CASSITGWETEAFL

SEQ ID NO: 775123 - protein, 15 aa, Homo sapiens
  CDR3 for alpha chain variable domain of TCR clone 387562 (TRAV10, TRAJ6)
CVVRPRTGGSYIPTF

SEQ ID NO: 775124 - protein, 16 aa, Homo sapiens
  CDR3 for beta chain variable domain of TCR clone 387562 (TRBV7-2, TRBJ1-2)
CAGSSNQDRRGHGYTF

SEQ ID NO: 775125 - protein, 13 aa, Homo sapiens
  CDR3 for alpha chain variable domain of TCR clone 387563 (TRAV3, TRAJ21)
FAVREPDFNKFYF

SEQ ID NO: 775126 - protein, 13 aa, Homo sapiens
  CDR3 for beta chain variable domain of TCR clone 387563 (TRBV9, TRBJ2-1)
CASSPSGGNEQFY

SEQ ID NO: 775127 - protein, 17 aa, Homo sapiens
  CDR3 for alpha chain variable domain of TCR clone 387564 (TRAV3, TRAJ6)
CAVRDGPRAGGSYIPTF

SEQ ID NO: 775128 - protein, 20 aa, Homo sapiens
  CDR3 for beta chain variable domain of TCR clone 387564 (TRBV28, TRBJ2-1)
CASTPMGRSPGLAGGNEQFF

SEQ ID NO: 775129 - protein, 17 aa, Homo sapiens
  CDR3 for alpha chain variable domain of TCR clone 387565 (TRAV12-1, TRAJ52)
CVVTPNAGGTSYGKLTF

SEQ ID NO: 775130 - protein, 14 aa, Homo sapiens
  CDR3 for beta chain variable domain of TCR clone 387565 (TRBV2, TRBJ2-2)
CSSSLFGGNGELSF

SEQ ID NO: 775131 - protein, 12 aa, Homo sapiens
  CDR3 for alpha chain variable domain of TCR clone 387566 (TRAV16, TRAJ10)
CSLTGGGNKLTF

SEQ ID NO: 775132 - protein, 14 aa, Homo sapiens
  CDR3 for beta chain variable domain of TCR clone 387566 (TRBV7-2, TRBJ2-1)
CASSLGVGYNEQFF

SEQ ID NO: 775133 - protein, 11 aa, Homo sapiens
  CDR3 for alpha chain variable domain of TCR clone 387567 (TRAV13-1, TRAJ5)
CAPKGRRSLTF

SEQ ID NO: 775134 - protein, 17 aa, Homo sapiens
  CDR3 for beta chain variable domain of TCR clone 387567 (TRBV28, TRBJ2-5)
CARGTPEGDALQETQYF

SEQ ID NO: 775135 - protein, 13 aa, Homo sapiens
  CDR3 for alpha chain variable domain of TCR clone 387568 (TRAV13-1, TRAJ29)
CAASIGLNKPLVF

SEQ ID NO: 775136 - protein, 14 aa, Homo sapiens
  CDR3 for beta chain variable domain of TCR clone 387568 (TRBV20-1, TRBJ2-5)
CSASDSGSGETQYF

SEQ ID NO: 775137 - protein, 14 aa, Homo sapiens
  CDR3 for alpha chain variable domain of TCR clone 387569 (TRAV21, TRAJ35)
CAVMPIGFGNVLHC

SEQ ID NO: 775138 - protein, 17 aa, Homo sapiens
  CDR3 for beta chain variable domain of TCR clone 387569 (TRBV7-2, TRBJ2-2)
CASSPRGVGEGTGELFF

SEQ ID NO: 775139 - protein, 15 aa, Homo sapiens
  CDR3 for alpha chain variable domain of TCR clone 387570 (TRAV8-6, TRAJ42)
CAVMNYGGSQGNLIF

SEQ ID NO: 775140 - protein, 14 aa, Homo sapiens
  CDR3 for beta chain variable domain of TCR clone 387570 (TRBV4-1, TRBJ2-2)
CASSQAVNTGELFF

SEQ ID NO: 775141 - protein, 14 aa, Homo sapiens
  CDR3 for alpha chain variable domain of TCR clone 387571 (TRAV1-2, TRAJ16)
CAVNRFSDGQRLVF

SEQ ID NO: 775142 - protein, 17 aa, Homo sapiens
  CDR3 for beta chain variable domain of TCR clone 387571 (TRBV7-3, TRBJ2-3)
CASSLMKRMRGADTQYF

SEQ ID NO: 775143 - protein, 12 aa, Homo sapiens
  CDR3 for alpha chain variable domain of TCR clone 387572 (TRAV26-2, TRAJ21)
CILKGNFNKFYF

SEQ ID NO: 775144 - protein, 14 aa, Homo sapiens
  CDR3 for beta chain variable domain of TCR clone 387572 (TRBV27, TRBJ2-7)
CASATGTERREQYF

SEQ ID NO: 775145 - protein, 13 aa, Homo sapiens
  CDR3 for alpha chain variable domain of TCR clone 387573 (TRAV8-4, TRAJ30)
CAVSVNRDDKIIF

SEQ ID NO: 775146 - protein, 14 aa, Homo sapiens
  CDR3 for beta chain variable domain of TCR clone 387573 (TRBV4-1, TRBJ2-7)
CASSPVAGGDEQYF

SEQ ID NO: 775147 - protein, 12 aa, Homo sapiens
  CDR3 for alpha chain variable domain of TCR clone 387574 (TRAV12-3, TRAJ4)
CAMTGAGTRLAV

SEQ ID NO: 775148 - protein, 14 aa, Homo sapiens
  CDR3 for beta chain variable domain of TCR clone 387574 (TRBV10-3, TRBJ1-1)
CAISDTDRGVESFF

SEQ ID NO: 775149 - protein, 14 aa, Homo sapiens
  CDR3 for alpha chain variable domain of TCR clone 387575 (TRAV12-3, TRAJ10)
SHLPLTGGGNKITF

SEQ ID NO: 775150 - protein, 14 aa, Homo sapiens
  CDR3 for beta chain variable domain of TCR clone 387575 (TRBV6-1, TRBJ1-3)
CASVQGRGGNTIYF

SEQ ID NO: 775151 - protein, 12 aa, Homo sapiens
  CDR3 for alpha chain variable domain of TCR clone 387576 (TRAV2, TRAJ31)
CAVEDNNARLMF

SEQ ID NO: 775152 - protein, 15 aa, Homo sapiens
  CDR3 for beta chain variable domain of TCR clone 387576 (TRBV10-2, TRBJ2-6)
CASSEQGTGANVLTF

SEQ ID NO: 775153 - protein, 13 aa, Homo sapiens
  CDR3 for alpha chain variable domain of TCR clone 387577 (TRAV21, TRAJ27)
CASRPGNAGKSTF

SEQ ID NO: 775154 - protein, 13 aa, Homo sapiens
  CDR3 for beta chain variable domain of TCR clone 387577 (TRBV4-2, TRBJ1-1)
CASSQAGNTEAFF

SEQ ID NO: 775155 - protein, 13 aa, Homo sapiens
  CDR3 for alpha chain variable domain of TCR clone 387578 (TRAV17, TRAJ9)
CATDYTGGFKTIF

SEQ ID NO: 775156 - protein, 16 aa, Homo sapiens
  CDR3 for beta chain variable domain of TCR clone 387578 (TRBV7-7, TRBJ2-1)
CASSLASGTSYHEQFF

SEQ ID NO: 775157 - protein, 12 aa, Homo sapiens
  CDR3 for alpha chain variable domain of TCR clone 387579 (TRAV12-3, TRAJ17)
RAMTLTGNKLTF

SEQ ID NO: 775158 - protein, 15 aa, Homo sapiens
  CDR3 for beta chain variable domain of TCR clone 387579 (TRBV20-1, TRBJ2-7)
CSVRDRVSGMDEQYF

SEQ ID NO: 775159 - protein, 18 aa, Homo sapiens
  CDR3 for alpha chain variable domain of TCR clone 387580 (TRAV26-2, )
CILTDIQNPDPAVYQLRD

SEQ ID NO: 775160 - protein, 16 aa, Homo sapiens
  CDR3 for beta chain variable domain of TCR clone 387580 (TRBV12-4, TRBJ2-3)
CASSLRLAETTDTQYF

SEQ ID NO: 775161 - protein, 11 aa, Homo sapiens
  CDR3 for alpha chain variable domain of TCR clone 387581 (TRAV17, TRAJ31)
CATSNNARLMF

SEQ ID NO: 775162 - protein, 14 aa, Homo sapiens
  CDR3 for beta chain variable domain of TCR clone 387581 (TRBV18, TRBJ2-7)
CASSPRGGAYQQYF

SEQ ID NO: 775163 - protein, 11 aa, Homo sapiens
  CDR3 for alpha chain variable domain of TCR clone 387582 (TRAV17, TRAJ9)
CGFTGCFKTIF

SEQ ID NO: 775164 - protein, 14 aa, Homo sapiens
  CDR3 for beta chain variable domain of TCR clone 387582 (TRBV7-9, TRBJ2-2)
CASSLVQYTGELFF

SEQ ID NO: 775165 - protein, 14 aa, Homo sapiens
  CDR3 for alpha chain variable domain of TCR clone 387583 (TRAV3, TRAJ9)
CAVRLNTGGFKTIF

SEQ ID NO: 775166 - protein, 12 aa, Homo sapiens
  CDR3 for beta chain variable domain of TCR clone 387583 (TRBV24-1, TRBJ1-1)
CATLYPDTEAFF

SEQ ID NO: 775167 - protein, 11 aa, Homo sapiens
  CDR3 for alpha chain variable domain of TCR clone 387584 (TRAV1-1, TRAJ23)
CAVRQGGELIF

SEQ ID NO: 775168 - protein, 16 aa, Homo sapiens
  CDR3 for beta chain variable domain of TCR clone 387584 (TRBV11-2, TRBJ1-2)
CASSPSGREANYGYTF

SEQ ID NO: 775169 - protein, 14 aa, Homo sapiens
  CDR3 for alpha chain variable domain of TCR clone 387585 (TRAV27, TRAJ45)
CAGAQEGVLTDSPF

SEQ ID NO: 775170 - protein, 15 aa, Homo sapiens
  CDR3 for beta chain variable domain of TCR clone 387585 (TRBV9, TRBJ2-2)
CASSDFAGASGELFF

SEQ ID NO: 775171 - protein, 16 aa, Homo sapiens
  CDR3 for alpha chain variable domain of TCR clone 387586 (TRAV3, TRAJ10)
CAVRDMRAGGGNKLPF

SEQ ID NO: 775172 - protein, 12 aa, Homo sapiens
  CDR3 for beta chain variable domain of TCR clone 387586 (TRBV20-1, TRBJ2-7)
CSAGLKMGEQYF

SEQ ID NO: 775173 - protein, 11 aa, Homo sapiens
  CDR3 for alpha chain variable domain of TCR clone 387587 (TRAV21, TRAJ34)
CAVTNTDKPIF

SEQ ID NO: 775174 - protein, 16 aa, Homo sapiens
  CDR3 for beta chain variable domain of TCR clone 387587 (TRBV6-1, TRBJ2-5)
CASSETLDRGAETQYF

SEQ ID NO: 775175 - protein, 15 aa, Homo sapiens
  CDR3 for alpha chain variable domain of TCR clone 387588 (TRAV13-1, TRAJ17)
CAASIERAAGNKLTF

SEQ ID NO: 775176 - protein, 14 aa, Homo sapiens
  CDR3 for beta chain variable domain of TCR clone 387588 (TRBV11-2, TRBJ2-5)
CASSRTGGIETQYF

SEQ ID NO: 775177 - protein, 12 aa, Homo sapiens
  CDR3 for alpha chain variable domain of TCR clone 387589 (TRAV8-3, TRAJ41)
CAAALSGYALNF

SEQ ID NO: 775178 - protein, 17 aa, Homo sapiens
  CDR3 for beta chain variable domain of TCR clone 387589 (TRBV7-3, TRBJ2-2)
CASSLSGTSGGTGELFV

SEQ ID NO: 775179 - protein, 13 aa, Homo sapiens
  CDR3 for alpha chain variable domain of TCR clone 387590 (TRAV20, TRAJ3)
CASRYSSASKIIF

SEQ ID NO: 775180 - protein, 16 aa, Homo sapiens
  CDR3 for beta chain variable domain of TCR clone 387590 (TRBV6-1, TRBJ1-6)
CASSSDGSTRNSPLHF

SEQ ID NO: 775181 - protein, 12 aa, Homo sapiens
  CDR3 for alpha chain variable domain of TCR clone 387591 (TRAV13-1, TRAJ21)
CVAKEGFNKFYF

SEQ ID NO: 775182 - protein, 18 aa, Homo sapiens
  CDR3 for beta chain variable domain of TCR clone 387591 (TRBV20-1, TRBJ2-6)
CSAETTPTHGSGANVLTF

SEQ ID NO: 775183 - protein, 12 aa, Homo sapiens
  CDR3 for alpha chain variable domain of TCR clone 387592 (TRAV2, TRAJ9)
CAVGAGGFKTIF

SEQ ID NO: 775184 - protein, 16 aa, Homo sapiens
  CDR3 for beta chain variable domain of TCR clone 387592 (TRBV6-1, TRBJ2-1)
CASSDLPGQLNNEQFF

SEQ ID NO: 775185 - protein, 15 aa, Homo sapiens
  CDR3 for alpha chain variable domain of TCR clone 387593 (TRAV14/DV4, TRAJ10)
CAMRELTGGGNKINF

SEQ ID NO: 775186 - protein, 18 aa, Homo sapiens
  CDR3 for beta chain variable domain of TCR clone 387593 (TRBV7-9, TRBJ2-7)
CASSLTTSGSRTWYEQYF

SEQ ID NO: 775187 - protein, 14 aa, Homo sapiens
  CDR3 for alpha chain variable domain of TCR clone 387594 (TRAV12-2, TRAJ13)
CAVKKTGGYQKVTF

SEQ ID NO: 775188 - protein, 15 aa, Homo sapiens
  CDR3 for beta chain variable domain of TCR clone 387594 (TRBV27, TRBJ2-1)
CGSSNGGGFSNEQFF

SEQ ID NO: 775189 - protein, 14 aa, Homo sapiens
  CDR3 for alpha chain variable domain of TCR clone 387595 (TRAV8-1, TRAJ49)
CASSIANTGNQFYF

SEQ ID NO: 775190 - protein, 13 aa, Homo sapiens
  CDR3 for beta chain variable domain of TCR clone 387595 (TRBV11-2, TRBJ2-5)
CASSFSSQETQFF

SEQ ID NO: 775191 - protein, 16 aa, Homo sapiens
  CDR3 for alpha chain variable domain of TCR clone 387596 (TRAV30, TRAJ24)
CGTEMVDADSWGKFQF

SEQ ID NO: 775192 - protein, 14 aa, Homo sapiens
  CDR3 for beta chain variable domain of TCR clone 387596 (TRBV12-5, TRBJ2-5)
CASASRTHQETQYF

SEQ ID NO: 775193 - protein, 13 aa, Homo sapiens
  CDR3 for alpha chain variable domain of TCR clone 387597 (TRAV12-1, TRAJ37)
CVVNAGNTGKLIF

SEQ ID NO: 775194 - protein, 13 aa, Homo sapiens
  CDR3 for beta chain variable domain of TCR clone 387597 (TRBV7-9, TRBJ1-2)
CASGPSNFWGYTF

SEQ ID NO: 775195 - protein, 10 aa, Homo sapiens
  CDR3 for alpha chain variable domain of TCR clone 387598 (TRAV8-6, TRAJ34)
CAVNTDKLIF

SEQ ID NO: 775196 - protein, 14 aa, Homo sapiens
  CDR3 for beta chain variable domain of TCR clone 387598 (TRBV7-2, TRBJ1-1)
CASSFLTGTTEAFF

SEQ ID NO: 775197 - protein, 13 aa, Homo sapiens
  CDR3 for alpha chain variable domain of TCR clone 387599 (TRAV21, TRAJ27)
CAARPGNAGKSTC

SEQ ID NO: 775198 - protein, 16 aa, Homo sapiens
  CDR3 for beta chain variable domain of TCR clone 387599 (TRBV20-1, TRBJ1-2)
CSASMGQGVANYGYTF

SEQ ID NO: 775199 - protein, 16 aa, Homo sapiens
  CDR3 for alpha chain variable domain of TCR clone 387600 (TRAV38-2/DV8, TRAJ33)
CAYRTGLFDGNYQLIW

SEQ ID NO: 775200 - protein, 13 aa, Homo sapiens
  CDR3 for beta chain variable domain of TCR clone 387600 (TRBV27, TRBJ1-4)
CASSLMGDEKLFF

SEQ ID NO: 775201 - protein, 13 aa, Homo sapiens
  CDR3 for alpha chain variable domain of TCR clone 387601 (TRAV16, TRAJ48)
CSPLNFGYEKLTF

SEQ ID NO: 775202 - protein, 11 aa, Homo sapiens
  CDR3 for beta chain variable domain of TCR clone 387601 (TRBV7-9, TRBJ2-3)
CASSPTDTQYF

SEQ ID NO: 775203 - protein, 15 aa, Homo sapiens
  CDR3 for alpha chain variable domain of TCR clone 387602 (TRAV17, TRAJ57)
CATGPSQGGSEKPVF

SEQ ID NO: 775204 - protein, 17 aa, Homo sapiens
  CDR3 for beta chain variable domain of TCR clone 387602 (TRBV7-8, TRBJ2-6)
CASSAGTGGAGANVPTF

SEQ ID NO: 775205 - protein, 14 aa, Homo sapiens
  CDR3 for alpha chain variable domain of TCR clone 387603 (TRAV13-2, TRAJ34)
CAENLGERTDKLIF

SEQ ID NO: 775206 - protein, 16 aa, Homo sapiens
  CDR3 for beta chain variable domain of TCR clone 387603 (TRBV5-1, TRBJ2-1)
CASSPWTSGEYNEQLF

SEQ ID NO: 775207 - protein, 12 aa, Homo sapiens
  CDR3 for alpha chain variable domain of TCR clone 387604 (TRAV12-3, TRAJ41)
CAMSYSGYALNF

SEQ ID NO: 775208 - protein, 15 aa, Homo sapiens
  CDR3 for beta chain variable domain of TCR clone 387604 (TRBV7-9, TRBJ1-4)
CASSRTGGFNEKLFF

SEQ ID NO: 775209 - protein, 12 aa, Homo sapiens
  CDR3 for alpha chain variable domain of TCR clone 387605 (TRAV20, TRAJ34)
CAVKDNTDKLIF

SEQ ID NO: 775210 - protein, 13 aa, Homo sapiens
  CDR3 for beta chain variable domain of TCR clone 387605 (TRBV5-5, TRBJ1-2)
CASSFWRGEDYTF

SEQ ID NO: 775211 - protein, 13 aa, Homo sapiens
  CDR3 for alpha chain variable domain of TCR clone 387606 (TRAV21, TRAJ27)
CAARPRNAGKSTF

SEQ ID NO: 775212 - protein, 14 aa, Homo sapiens
  CDR3 for beta chain variable domain of TCR clone 387606 (TRBV7-6, TRBJ2-3)
CASSLGTFTDTQYF

SEQ ID NO: 775213 - protein, 14 aa, Homo sapiens
  CDR3 for alpha chain variable domain of TCR clone 387607 (TRAV17, TRAJ9)
CATGEWGGDWRLQN

SEQ ID NO: 775214 - protein, 15 aa, Homo sapiens
  CDR3 for beta chain variable domain of TCR clone 387607 (TRBV20-1, TRBJ1-2)
CSARDSRGRNYGYTF

SEQ ID NO: 775215 - protein, 17 aa, Homo sapiens
  CDR3 for alpha chain variable domain of TCR clone 387608 (TRAV3, TRAJ12)
CAVRDGGRMDSSYKLIF

SEQ ID NO: 775216 - protein, 17 aa, Homo sapiens
  CDR3 for beta chain variable domain of TCR clone 387608 (TRBV15, TRBJ1-5)
CATSRAPPGTRNQPQHF

SEQ ID NO: 775217 - protein, 13 aa, Homo sapiens
  CDR3 for alpha chain variable domain of TCR clone 387609 (TRAV12-1, TRAJ9)
CVVPNTGGFKTIF

SEQ ID NO: 775218 - protein, 14 aa, Homo sapiens
  CDR3 for beta chain variable domain of TCR clone 387609 (TRBV20-1, TRBJ2-1)
CSAQIGGSANEQFF

SEQ ID NO: 775219 - protein, 13 aa, Homo sapiens
  CDR3 for alpha chain variable domain of TCR clone 387610 (TRAV2, TRAJ40)
CAVVTSGTYKYIF

SEQ ID NO: 775220 - protein, 14 aa, Homo sapiens
  CDR3 for beta chain variable domain of TCR clone 387610 (TRBV7-6, TRBJ2-3)
CASSLGTVTDKQYF

SEQ ID NO: 775221 - protein, 14 aa, Homo sapiens
  CDR3 for alpha chain variable domain of TCR clone 387611 (TRAV1-2, TRAJ6)
CAVSLSGGSYIPTF

SEQ ID NO: 775222 - protein, 15 aa, Homo sapiens
  CDR3 for beta chain variable domain of TCR clone 387611 (TRBV28, TRBJ2-7)
CASSPGGRGFYEEYF

SEQ ID NO: 775223 - protein, 16 aa, Homo sapiens
  CDR3 for alpha chain variable domain of TCR clone 387612 (TRAV26-1, TRAJ53)
CIVRVAMGGSNYKLTF

SEQ ID NO: 775224 - protein, 12 aa, Homo sapiens
  CDR3 for beta chain variable domain of TCR clone 387612 (TRBV7-9, TRBJ1-5)
CERRERGEKKNF

SEQ ID NO: 775225 - protein, 14 aa, Homo sapiens
  CDR3 for alpha chain variable domain of TCR clone 387613 (TRAV1-2, TRAJ6)
CAVSLLGGRYIPTF

SEQ ID NO: 775226 - protein, 15 aa, Homo sapiens
  CDR3 for beta chain variable domain of TCR clone 387613 (TRBV28, TRBJ2-7)
CASSPGGRGFYEQYF

SEQ ID NO: 775227 - protein, 14 aa, Homo sapiens
  CDR3 for alpha chain variable domain of TCR clone 387614 (TRAV17, TRAJ56)
CATVPAGDNSKLTF

SEQ ID NO: 775228 - protein, 13 aa, Homo sapiens
  CDR3 for beta chain variable domain of TCR clone 387614 (TRBV12-4, TRBJ2-2)
CASSITGSGELFF

SEQ ID NO: 775229 - protein, 12 aa, Homo sapiens
  CDR3 for alpha chain variable domain of TCR clone 387615 (TRAV6, TRAJ33)
CSRIWSNYQLIW

SEQ ID NO: 775230 - protein, 12 aa, Homo sapiens
  CDR3 for beta chain variable domain of TCR clone 387615 (TRBV7-8, TRBJ2-7)
CASSLGDREQYF

SEQ ID NO: 775231 - protein, 14 aa, Homo sapiens
  CDR3 for alpha chain variable domain of TCR clone 387616 (TRAV23/DV6, TRAJ6)
CAAIPSGGSYILTF

SEQ ID NO: 775232 - protein, 17 aa, Homo sapiens
  CDR3 for beta chain variable domain of TCR clone 387616 (TRBV7-2, TRBJ2-3)
CASSLGGRAAWRDTQYF

SEQ ID NO: 775233 - protein, 13 aa, Homo sapiens
  CDR3 for alpha chain variable domain of TCR clone 387617 (TRAV26-1, TRAJ35)
CIVSRRVGEMLHC

SEQ ID NO: 775234 - protein, 15 aa, Homo sapiens
  CDR3 for beta chain variable domain of TCR clone 387617 (TRBV7-2, TRBJ2-1)
CASSSGLAGGNEQFF

SEQ ID NO: 775235 - protein, 14 aa, Homo sapiens
  CDR3 for alpha chain variable domain of TCR clone 387618 (TRAV1-2, TRAJ8)
CAGREDTGFQKLVF

SEQ ID NO: 775236 - protein, 14 aa, Homo sapiens
  CDR3 for beta chain variable domain of TCR clone 387618 (TRBV29-1, TRBJ2-3)
CSAGAGVGADTQYF

SEQ ID NO: 775237 - protein, 12 aa, Homo sapiens
  CDR3 for alpha chain variable domain of TCR clone 387619 (TRAV12-2, TRAJ7)
CAPEDGNNRLAF

SEQ ID NO: 775238 - protein, 14 aa, Homo sapiens
  CDR3 for beta chain variable domain of TCR clone 387619 (TRBV7-9, TRBJ2-1)
CASSPRDSLYEQFF

SEQ ID NO: 775239 - protein, 17 aa, Homo sapiens
  CDR3 for alpha chain variable domain of TCR clone 387620 (TRAV12-2, TRAJ52)
CAVNPYAGGTSYGKLKF

SEQ ID NO: 775240 - protein, 12 aa, Homo sapiens
  CDR3 for beta chain variable domain of TCR clone 387620 (TRBV7-2, TRBJ2-5)
CASSLYGETQYF

SEQ ID NO: 775241 - protein, 16 aa, Homo sapiens
  CDR3 for alpha chain variable domain of TCR clone 387621 (TRAV3, TRAJ10)
CAVRDMRAGGGNKLTF

SEQ ID NO: 775242 - protein, 17 aa, Homo sapiens
  CDR3 for beta chain variable domain of TCR clone 387621 (TRBV11-2, TRBJ2-4)
CASSFLALGGAGDIQYF

SEQ ID NO: 775243 - protein, 13 aa, Homo sapiens
  CDR3 for alpha chain variable domain of TCR clone 387622 (TRAV12-1, TRAJ31)
CVVNFPHNARLMF

SEQ ID NO: 775244 - protein, 16 aa, Homo sapiens
  CDR3 for beta chain variable domain of TCR clone 387622 (TRBV15, TRBJ2-3)
CATSRDLGIVTDTQYF

SEQ ID NO: 775245 - protein, 15 aa, Homo sapiens
  CDR3 for alpha chain variable domain of TCR clone 387623 (TRAV25, TRAJ52)
RAGTSGGTSYGKLTF

SEQ ID NO: 775246 - protein, 14 aa, Homo sapiens
  CDR3 for beta chain variable domain of TCR clone 387623 (TRBV4-2, TRBJ1-5)
CASSRDRGNQPQHF

SEQ ID NO: 775247 - protein, 10 aa, Homo sapiens
  CDR3 for alpha chain variable domain of TCR clone 387624 (TRAV13-1, TRAJ5)
CAASRRALTF

SEQ ID NO: 775248 - protein, 13 aa, Homo sapiens
  CDR3 for beta chain variable domain of TCR clone 387624 (TRBV19, TRBJ1-1)
CASTRRGDTEAFF

SEQ ID NO: 775249 - protein, 16 aa, Homo sapiens
  CDR3 for alpha chain variable domain of TCR clone 387625 (TRAV8-3, TRAJ8)
CAVPRDGNTVFQKLVF

SEQ ID NO: 775250 - protein, 14 aa, Homo sapiens
  CDR3 for beta chain variable domain of TCR clone 387625 (TRBV28, TRBJ1-1)
CASSESGRGTEAFF

SEQ ID NO: 775251 - protein, 15 aa, Homo sapiens
  CDR3 for alpha chain variable domain of TCR clone 387626 (TRAV21, TRAJ24)
CAAPSSTDSWGKLQF

SEQ ID NO: 775252 - protein, 15 aa, Homo sapiens
  CDR3 for beta chain variable domain of TCR clone 387626 (TRBV4-1, TRBJ2-7)
CASSQNTGRLYEQYF

SEQ ID NO: 775253 - protein, 13 aa, Homo sapiens
  CDR3 for alpha chain variable domain of TCR clone 387627 (TRAV35, TRAJ22)
CAGLSGSARQLTF

SEQ ID NO: 775254 - protein, 12 aa, Homo sapiens
  CDR3 for beta chain variable domain of TCR clone 387627 (TRBV28, TRBJ1-6)
CASSLLRGGIAF

SEQ ID NO: 775255 - protein, 16 aa, Homo sapiens
  CDR3 for alpha chain variable domain of TCR clone 387628 (TRAV1-1, TRAJ29)
CAVRSTRNSGNTPLVF

SEQ ID NO: 775256 - protein, 14 aa, Homo sapiens
  CDR3 for beta chain variable domain of TCR clone 387628 (TRBV19, TRBJ2-1)
CASPTFVLSGEQFF

SEQ ID NO: 775257 - protein, 13 aa, Homo sapiens
  CDR3 for alpha chain variable domain of TCR clone 387629 (TRAV30, TRAJ39)
CGIEKNAGNMLTF

SEQ ID NO: 775258 - protein, 12 aa, Homo sapiens
  CDR3 for beta chain variable domain of TCR clone 387629 (TRBV12-4, TRBJ2-5)
CASSSAQETQYF

SEQ ID NO: 775259 - protein, 16 aa, Homo sapiens
  CDR3 for alpha chain variable domain of TCR clone 387630 (TRAV14/DV4, TRAJ53)
CAMRVGGGGSNYKLTF

SEQ ID NO: 775260 - protein, 18 aa, Homo sapiens
  CDR3 for beta chain variable domain of TCR clone 387630 (TRBV18, TRBJ1-3)
CASSPRGGAGPSGNTIYF

SEQ ID NO: 775261 - protein, 13 aa, Homo sapiens
  CDR3 for alpha chain variable domain of TCR clone 387631 (TRAV8-3, TRAJ21)
CAVGAYNFKKFYF

SEQ ID NO: 775262 - protein, 11 aa, Homo sapiens
  CDR3 for beta chain variable domain of TCR clone 387631 (TRBV24-1, TRBJ1-1)
CQAKGWTEAFF

SEQ ID NO: 775263 - protein, 14 aa, Homo sapiens
  CDR3 for alpha chain variable domain of TCR clone 387632 (TRAV12-3, TRAJ54)
CAMRIIQGAQKLVF

SEQ ID NO: 775264 - protein, 16 aa, Homo sapiens
  CDR3 for beta chain variable domain of TCR clone 387632 (TRBV28, TRBJ2-1)
WASRVPASGRIGEQFF

SEQ ID NO: 775265 - protein, 15 aa, Homo sapiens
  CDR3 for alpha chain variable domain of TCR clone 387633 (TRAV17, TRAJ40)
CATVSSTSGTYKYIF

SEQ ID NO: 775266 - protein, 16 aa, Homo sapiens
  CDR3 for beta chain variable domain of TCR clone 387633 (TRBV5-1, TRBJ2-3)
CASSLGLAVYTDTQYF

SEQ ID NO: 775267 - protein, 14 aa, Homo sapiens
  CDR3 for alpha chain variable domain of TCR clone 387634 (TRAV8-3, TRAJ13)
CAVGAQEGYQKVTF

SEQ ID NO: 775268 - protein, 15 aa, Homo sapiens
  CDR3 for beta chain variable domain of TCR clone 387634 (TRBV15, TRBJ2-2)
CATRGTGGRVGELFF

SEQ ID NO: 775269 - protein, 18 aa, Homo sapiens
  CDR3 for alpha chain variable domain of TCR clone 387635 (TRAV29/DV5, TRAJ29)
CSVLLSASLDSGNTPLVF

SEQ ID NO: 775270 - protein, 13 aa, Homo sapiens
  CDR3 for beta chain variable domain of TCR clone 387635 (TRBV4-1, TRBJ2-2)
CACRQGAYGELFF

SEQ ID NO: 775271 - protein, 18 aa, Homo sapiens
  CDR3 for alpha chain variable domain of TCR clone 387636 (TRAV26-2, TRAJ33)
CCVLLHPEEPASNYQLIW

SEQ ID NO: 775272 - protein, 14 aa, Homo sapiens
  CDR3 for beta chain variable domain of TCR clone 387636 (TRBV7-6, TRBJ2-3)
CASSLGTVTDTQYF

SEQ ID NO: 775273 - protein, 12 aa, Homo sapiens
  CDR3 for alpha chain variable domain of TCR clone 387637 (TRAV27, TRAJ9)
CAGESGGFKTIF

SEQ ID NO: 775274 - protein, 14 aa, Homo sapiens
  CDR3 for beta chain variable domain of TCR clone 387637 (TRBV6-1, TRBJ2-1)
CASATDGFYNEQFF

SEQ ID NO: 775275 - protein, 13 aa, Homo sapiens
  CDR3 for alpha chain variable domain of TCR clone 387638 (TRAV26-1, TRAJ38)
CIADNAGNNRKLI

SEQ ID NO: 775276 - protein, 12 aa, Homo sapiens
  CDR3 for beta chain variable domain of TCR clone 387638 (TRBV5-1, TRBJ2-7)
CASSFRGYEQYF

SEQ ID NO: 775277 - protein, 13 aa, Homo sapiens
  CDR3 for alpha chain variable domain of TCR clone 387639 (TRAV12-1, TRAJ40)
CVVPTSGTYKYIF

SEQ ID NO: 775278 - protein, 14 aa, Homo sapiens
  CDR3 for beta chain variable domain of TCR clone 387639 (TRBV6-1, TRBJ1-3)
CASAQGGGGNTIYF

SEQ ID NO: 775279 - protein, 12 aa, Homo sapiens
  CDR3 for alpha chain variable domain of TCR clone 387640 (TRAV12-1, TRAJ40)
CVFYSGTYKYIF

SEQ ID NO: 775280 - protein, 18 aa, Homo sapiens
  CDR3 for beta chain variable domain of TCR clone 387640 (TRBV12-4, TRBJ2-2)
CASSLVAGSRGRTRELFF

SEQ ID NO: 775281 - protein, 15 aa, Homo sapiens
  CDR3 for alpha chain variable domain of TCR clone 387641 (TRAV26-1, TRAJ29)
CIVRVEGSGNTPLVF

SEQ ID NO: 775282 - protein, 15 aa, Homo sapiens
  CDR3 for beta chain variable domain of TCR clone 387641 (TRBV2, TRBJ2-1)
CASSEEREGDNEQFF

SEQ ID NO: 775283 - protein, 16 aa, Homo sapiens
  CDR3 for alpha chain variable domain of TCR clone 387642 (TRAV4, TRAJ22)
CLVGDLSSGSARQLTF

SEQ ID NO: 775284 - protein, 16 aa, Homo sapiens
  CDR3 for beta chain variable domain of TCR clone 387642 (TRBV7-9, TRBJ2-3)
CASSPWREVGTDTQYF

SEQ ID NO: 775285 - protein, 13 aa, Homo sapiens
  CDR3 for alpha chain variable domain of TCR clone 387643 (TRAV21, TRAJ27)
CAARPGNAGKSTF

SEQ ID NO: 775286 - protein, 15 aa, Homo sapiens
  CDR3 for beta chain variable domain of TCR clone 387643 (TRBV10-1, TRBJ2-3)
CASSATSGGFDTQYF

SEQ ID NO: 775287 - protein, 19 aa, Homo sapiens
  CDR3 for alpha chain variable domain of TCR clone 387644 (TRAV12-1, TRAJ45)
CVVTHDVGYSGGGADGLTF

SEQ ID NO: 775288 - protein, 12 aa, Homo sapiens
  CDR3 for beta chain variable domain of TCR clone 387644 (TRBV28, TRBJ1-2)
CASLTLAEGYTF

SEQ ID NO: 775289 - protein, 13 aa, Homo sapiens
  CDR3 for alpha chain variable domain of TCR clone 387645 (TRAV12-3, TRAJ33)
CAMSVNSNNQLIW

SEQ ID NO: 775290 - protein, 16 aa, Homo sapiens
  CDR3 for beta chain variable domain of TCR clone 387645 (TRBV7-3, TRBJ2-3)
CASSLSGYRPEDTQYF

SEQ ID NO: 775291 - protein, 12 aa, Homo sapiens
  CDR3 for alpha chain variable domain of TCR clone 387646 (TRAV12-3, TRAJ17)
CAMTLTGNKLTF

SEQ ID NO: 775292 - protein, 15 aa, Homo sapiens
  CDR3 for beta chain variable domain of TCR clone 387646 (TRBV20-1, TRBJ2-7)
CSARDRVSGVDGQYF

SEQ ID NO: 775293 - protein, 12 aa, Homo sapiens
  CDR3 for alpha chain variable domain of TCR clone 387647 (TRAV3, TRAJ21)
CALGRGSTNFTF

SEQ ID NO: 775294 - protein, 14 aa, Homo sapiens
  CDR3 for beta chain variable domain of TCR clone 387647 (TRBV7-8, TRBJ2-3)
CASSFKSSTDTQYF

SEQ ID NO: 775295 - protein, 12 aa, Homo sapiens
  CDR3 for alpha chain variable domain of TCR clone 387648 (TRAV10, TRAJ43)
CVVVRDGNDMRF

SEQ ID NO: 775296 - protein, 15 aa, Homo sapiens
  CDR3 for beta chain variable domain of TCR clone 387648 (TRBV2, TRBJ2-7)
CASSEGLARSYEQYF

SEQ ID NO: 775297 - protein, 18 aa, Homo sapiens
  CDR3 for alpha chain variable domain of TCR clone 387649 (TRAV26-1, TRAJ23)
CIVRVGLEVWNQGGKFNF

SEQ ID NO: 775298 - protein, 16 aa, Homo sapiens
  CDR3 for beta chain variable domain of TCR clone 387649 (TRBV12-4, TRBJ2-5)
CASSFFVRGRQETQYF

SEQ ID NO: 775299 - protein, 12 aa, Homo sapiens
  CDR3 for alpha chain variable domain of TCR clone 387650 (TRAV12-3, TRAJ17)
CAMTLTGNKLTF

SEQ ID NO: 775300 - protein, 17 aa, Homo sapiens
  CDR3 for beta chain variable domain of TCR clone 387650 (TRBV20-1, TRBJ2-3)
CSARDGWNAKERDTQYF

SEQ ID NO: 775301 - protein, 13 aa, Homo sapiens
  CDR3 for alpha chain variable domain of TCR clone 387651 (TRAV16, TRAJ52)
CALRGTSYGKLTF

SEQ ID NO: 775302 - protein, 15 aa, Homo sapiens
  CDR3 for beta chain variable domain of TCR clone 387651 (TRBV9, TRBJ2-1)
CASSLAGSSYNEQFF

SEQ ID NO: 775303 - protein, 14 aa, Homo sapiens
  CDR3 for alpha chain variable domain of TCR clone 387652 (TRAV12-2, TRAJ13)
CSVKKTGGYQKVTF

SEQ ID NO: 775304 - protein, 12 aa, Homo sapiens
  CDR3 for beta chain variable domain of TCR clone 387652 (TRBV12-4, TRBJ1-2)
CASSFIWLHLRF

SEQ ID NO: 775305 - protein, 12 aa, Homo sapiens
  CDR3 for alpha chain variable domain of TCR clone 387653 (TRAV21, TRAJ33)
CAKMDSNYQLIW

SEQ ID NO: 775306 - protein, 15 aa, Homo sapiens
  CDR3 for beta chain variable domain of TCR clone 387653 (TRBV7-6, TRBJ2-1)
CASSSLAGEGNEQFF

SEQ ID NO: 775307 - protein, 14 aa, Homo sapiens
  CDR3 for alpha chain variable domain of TCR clone 387654 (TRAV12-3, TRAJ29)
CAMSAYSGNTPLVF

SEQ ID NO: 775308 - protein, 15 aa, Homo sapiens
  CDR3 for beta chain variable domain of TCR clone 387654 (TRBV2, TRBJ2-5)
CASRIAGVGGETQYF

SEQ ID NO: 775309 - protein, 12 aa, Homo sapiens
  CDR3 for alpha chain variable domain of TCR clone 387655 (TRAV12-3, TRAJ17)
CAMTLTGNKLTF

SEQ ID NO: 775310 - protein, 14 aa, Homo sapiens
  CDR3 for beta chain variable domain of TCR clone 387655 (TRBV28, TRBJ1-2)
CASSQAEGPFGYTF

SEQ ID NO: 775311 - protein, 13 aa, Homo sapiens
  CDR3 for alpha chain variable domain of TCR clone 387656 (TRAV21, TRAJ27)
CAARPGNAGKSTF

SEQ ID NO: 775312 - protein, 15 aa, Homo sapiens
  CDR3 for beta chain variable domain of TCR clone 387656 (TRBV2, TRBJ2-3)
CASNDAGGPPDTQYF

SEQ ID NO: 775313 - protein, 13 aa, Homo sapiens
  CDR3 for alpha chain variable domain of TCR clone 387657 (TRAV3, TRAJ15)
CAVRDQAGTALIF

SEQ ID NO: 775314 - protein, 16 aa, Homo sapiens
  CDR3 for beta chain variable domain of TCR clone 387657 (TRBV4-1, TRBJ2-3)
CASSQSTSGAEDTQYF

SEQ ID NO: 775315 - protein, 16 aa, Homo sapiens
  CDR3 for alpha chain variable domain of TCR clone 387658 (TRAV17, TRAJ36)
CATVSLHWGKQPLLWN

SEQ ID NO: 775316 - protein, 13 aa, Homo sapiens
  CDR3 for beta chain variable domain of TCR clone 387658 (TRBV4-1, TRBJ1-1)
CASSQLGTGEAFF

SEQ ID NO: 775317 - protein, 13 aa, Homo sapiens
  CDR3 for alpha chain variable domain of TCR clone 387659 (TRAV2, TRAJ15)
CAVASQAGTALIF

SEQ ID NO: 775318 - protein, 15 aa, Homo sapiens
  CDR3 for beta chain variable domain of TCR clone 387659 (TRBV7-6, TRBJ2-1)
CASSSLAGEGNEQFF

SEQ ID NO: 775319 - protein, 15 aa, Homo sapiens
  CDR3 for alpha chain variable domain of TCR clone 387660 (TRAV20, TRAJ41)
CAVQANSNSGYALNF

SEQ ID NO: 775320 - protein, 14 aa, Homo sapiens
  CDR3 for beta chain variable domain of TCR clone 387660 (TRBV25-1, TRBJ1-1)
CASTHLGRNTEAFF

SEQ ID NO: 775321 - protein, 21 aa, Homo sapiens
  CDR3 for alpha chain variable domain of TCR clone 387661 (TRAV2, )
CAVEEDIQNPDPAVYQLRDSK

SEQ ID NO: 775322 - protein, 14 aa, Homo sapiens
  CDR3 for beta chain variable domain of TCR clone 387661 (TRBV19, TRBJ1-2)
CASNPGQAPYGYTF

SEQ ID NO: 775323 - protein, 12 aa, Homo sapiens
  CDR3 for alpha chain variable domain of TCR clone 387662 (TRAV3, TRAJ31)
CAVRDGNARLLF

SEQ ID NO: 775324 - protein, 18 aa, Homo sapiens
  CDR3 for beta chain variable domain of TCR clone 387662 (TRBV7-2, TRBJ2-3)
CASSLKREGSGITDTQHF

SEQ ID NO: 775325 - protein, 11 aa, Homo sapiens
  CDR3 for alpha chain variable domain of TCR clone 387663 (TRAV12-2, TRAJ49)
WALQGGNQFYF

SEQ ID NO: 775326 - protein, 14 aa, Homo sapiens
  CDR3 for beta chain variable domain of TCR clone 387663 (TRBV7-2, TRBJ2-7)
CASSPKTSFYEQYF

SEQ ID NO: 775327 - protein, 14 aa, Homo sapiens
  CDR3 for alpha chain variable domain of TCR clone 387664 (TRAV12-2, TRAJ44)
CAVNKAGNASKLTF

SEQ ID NO: 775328 - protein, 12 aa, Homo sapiens
  CDR3 for beta chain variable domain of TCR clone 387664 (TRBV19, TRBJ1-4)
CASKDWPGGLFF

SEQ ID NO: 775329 - protein, 14 aa, Homo sapiens
  CDR3 for alpha chain variable domain of TCR clone 387665 (TRAV2, TRAJ33)
CAVEDQGSNYQLIW

SEQ ID NO: 775330 - protein, 12 aa, Homo sapiens
  CDR3 for beta chain variable domain of TCR clone 387665 (TRBV11-2, TRBJ2-2)
CASSLGGGELFF

SEQ ID NO: 775331 - protein, 14 aa, Homo sapiens
  CDR3 for alpha chain variable domain of TCR clone 387666 (TRAV29/DV5, TRAJ36)
CAARPKTGANNLFF

SEQ ID NO: 775332 - protein, 15 aa, Homo sapiens
  CDR3 for beta chain variable domain of TCR clone 387666 (TRBV19, TRBJ1-6)
CASSTQGAVGSPLHF

SEQ ID NO: 775333 - protein, 13 aa, Homo sapiens
  CDR3 for alpha chain variable domain of TCR clone 387667 (TRAV12-1, TRAJ39)
CVVNYNAGNVLTF

SEQ ID NO: 775334 - protein, 12 aa, Homo sapiens
  CDR3 for beta chain variable domain of TCR clone 387667 (TRBV5-7, TRBJ1-1)
CASSLGRGKDFF

SEQ ID NO: 775335 - protein, 19 aa, Homo sapiens
  CDR3 for alpha chain variable domain of TCR clone 387668 (TRAV25, TRAJ20)
TATQTTDVGILPHDYKLSF

SEQ ID NO: 775336 - protein, 13 aa, Homo sapiens
  CDR3 for beta chain variable domain of TCR clone 387668 (TRBV12-4, TRBJ1-1)
CASSPGTGFEAFF

SEQ ID NO: 775337 - protein, 11 aa, Homo sapiens
  CDR3 for alpha chain variable domain of TCR clone 387669 (TRAV2, TRAJ13)
CASGGYQKVTF

SEQ ID NO: 775338 - protein, 19 aa, Homo sapiens
  CDR3 for beta chain variable domain of TCR clone 387669 (TRBV13, TRBJ2-6)
CASSLVHRDRGAGANVLTF

SEQ ID NO: 775339 - protein, 14 aa, Homo sapiens
  CDR3 for alpha chain variable domain of TCR clone 387670 (TRAV12-2, TRAJ17)
CAVLFKAAGNKLTF

SEQ ID NO: 775340 - protein, 16 aa, Homo sapiens
  CDR3 for beta chain variable domain of TCR clone 387670 (TRBV2, TRBJ2-5)
CASSETQGVGEETQYF

SEQ ID NO: 775341 - protein, 14 aa, Homo sapiens
  CDR3 for alpha chain variable domain of TCR clone 387671 (TRAV21, TRAJ23)
CAPRLYNQGGKLIF

SEQ ID NO: 775342 - protein, 11 aa, Homo sapiens
  CDR3 for beta chain variable domain of TCR clone 387671 (TRBV29-1, TRBJ1-4)
CSVEDREKLFF

SEQ ID NO: 775343 - protein, 13 aa, Homo sapiens
  CDR3 for alpha chain variable domain of TCR clone 387672 (TRAV9-2, TRAJ53)
CALSGGSNYKLTF

SEQ ID NO: 775344 - protein, 17 aa, Homo sapiens
  CDR3 for beta chain variable domain of TCR clone 387672 (TRBV11-2, TRBJ2-1)
YASSLYPPGVEYNEQFF

SEQ ID NO: 775345 - protein, 17 aa, Homo sapiens
  CDR3 for alpha chain variable domain of TCR clone 387673 (TRAV3, TRAJ6)
CAVRDGPRAGGNYIPTF

SEQ ID NO: 775346 - protein, 13 aa, Homo sapiens
  CDR3 for beta chain variable domain of TCR clone 387673 (TRBV20-1, TRBJ1-1)
CSARGGGNTEAFF

SEQ ID NO: 775347 - protein, 15 aa, Homo sapiens
  CDR3 for alpha chain variable domain of TCR clone 387674 (TRAV26-2, TRAJ13)
CILRDLSGGYQNVTF

SEQ ID NO: 775348 - protein, 11 aa, Homo sapiens
  CDR3 for beta chain variable domain of TCR clone 387674 (TRBV7-9, TRBJ2-3)
CASSYTDTQYF

SEQ ID NO: 775349 - protein, 12 aa, Homo sapiens
  CDR3 for alpha chain variable domain of TCR clone 387675 (TRAV12-1, TRAJ40)
CVVYSGTYKYIF

SEQ ID NO: 775350 - protein, 15 aa, Homo sapiens
  CDR3 for beta chain variable domain of TCR clone 387675 (TRBV20-1, TRBJ2-7)
CSARKGLAESYEQYF

SEQ ID NO: 775351 - protein, 16 aa, Homo sapiens
  CDR3 for alpha chain variable domain of TCR clone 387676 (TRAV8-3, TRAJ13)
CAVGAYPSGGYQKVTF

SEQ ID NO: 775352 - protein, 13 aa, Homo sapiens
  CDR3 for beta chain variable domain of TCR clone 387676 (TRBV7-6, TRBJ2-3)
CASSLRSDNTQYF

SEQ ID NO: 775353 - protein, 15 aa, Homo sapiens
  CDR3 for alpha chain variable domain of TCR clone 387677 (TRAV26-1, TRAJ44)
CIARVPFGTASKLTF

SEQ ID NO: 775354 - protein, 16 aa, Homo sapiens
  CDR3 for beta chain variable domain of TCR clone 387677 (TRBV29-1, TRBJ2-7)
CSVEVVGTSGSYEQYF

SEQ ID NO: 775355 - protein, 15 aa, Homo sapiens
  CDR3 for alpha chain variable domain of TCR clone 387678 (TRAV4, TRAJ39)
CLVRPNNNAGNMLTF

SEQ ID NO: 775356 - protein, 14 aa, Homo sapiens
  CDR3 for beta chain variable domain of TCR clone 387678 (TRBV11-2, TRBJ2-5)
CASSRTGGIETQYF

SEQ ID NO: 775357 - protein, 23 aa, Homo sapiens
  CDR3 for alpha chain variable domain of TCR clone 387679 (TRAV1-1, TRAJ11)
LLQELQMKDSASYFCAGYSTLTF

SEQ ID NO: 775358 - protein, 15 aa, Homo sapiens
  CDR3 for beta chain variable domain of TCR clone 387679 (TRBV6-5, TRBJ2-1)
CASRGDFDSYNEQFV

SEQ ID NO: 775359 - protein, 15 aa, Homo sapiens
  CDR3 for alpha chain variable domain of TCR clone 387680 (TRAV3, TRAJ9)
FAVRARNTGGSKTIF

SEQ ID NO: 775360 - protein, 15 aa, Homo sapiens
  CDR3 for beta chain variable domain of TCR clone 387680 (TRBV27, TRBJ1-1)
CASSPYADPYTEAFF

SEQ ID NO: 775361 - protein, 10 aa, Homo sapiens
  CDR3 for alpha chain variable domain of TCR clone 387681 (TRAV23/DV6, TRAJ57)
CAASSTLSQG

SEQ ID NO: 775362 - protein, 17 aa, Homo sapiens
  CDR3 for beta chain variable domain of TCR clone 387681 (TRBV10-3, TRBJ2-6)
CVISESTAPSGANVLTF

SEQ ID NO: 775363 - protein, 12 aa, Homo sapiens
  CDR3 for alpha chain variable domain of TCR clone 387682 (TRAV17, TRAJ20)
CATLANDYKLSF

SEQ ID NO: 775364 - protein, 14 aa, Homo sapiens
  CDR3 for beta chain variable domain of TCR clone 387682 (TRBV10-3, TRBJ1-2)
CAISEDTRYYGYTF

SEQ ID NO: 775365 - protein, 13 aa, Homo sapiens
  CDR3 for alpha chain variable domain of TCR clone 387683 (TRAV12-3, TRAJ7)
CAMSASGNKRLAF

SEQ ID NO: 775366 - protein, 14 aa, Homo sapiens
  CDR3 for beta chain variable domain of TCR clone 387683 (TRBV13, TRBJ2-5)
CASSLGPRGETQYV

SEQ ID NO: 775367 - protein, 11 aa, Homo sapiens
  CDR3 for alpha chain variable domain of TCR clone 387684 (TRAV17, TRAJ31)
CATSNNASLMF

SEQ ID NO: 775368 - protein, 16 aa, Homo sapiens
  CDR3 for beta chain variable domain of TCR clone 387684 (TRBV7-8, TRBJ2-4)
CASSAERTLAKNMQYF

SEQ ID NO: 775369 - protein, 10 aa, Homo sapiens
  CDR3 for alpha chain variable domain of TCR clone 387685 (TRAV1-2, TRAJ20)
CALNDYKLSF

SEQ ID NO: 775370 - protein, 11 aa, Homo sapiens
  CDR3 for beta chain variable domain of TCR clone 387685 (TRBV29-1, TRBJ2-5)
CSEDRAGTQYF

SEQ ID NO: 775371 - protein, 17 aa, Homo sapiens
  CDR3 for alpha chain variable domain of TCR clone 387686 (TRAV3, TRAJ42)
CAVRERDYGGSQGNLIC

SEQ ID NO: 775372 - protein, 15 aa, Homo sapiens
  CDR3 for beta chain variable domain of TCR clone 387686 (TRBV6-6, TRBJ2-7)
CASSYSYGGSYEQYF

SEQ ID NO: 775373 - protein, 12 aa, Homo sapiens
  CDR3 for alpha chain variable domain of TCR clone 387687 (TRAV12-3, TRAJ17)
CAMTLPGNNLTF

SEQ ID NO: 775374 - protein, 15 aa, Homo sapiens
  CDR3 for beta chain variable domain of TCR clone 387687 (TRBV20-1, TRBJ2-7)
CSARDRVSGMDEQYF

SEQ ID NO: 775375 - protein, 12 aa, Homo sapiens
  CDR3 for alpha chain variable domain of TCR clone 387688 (TRAV3, TRAJ20)
CAVRDPDYKRSF

SEQ ID NO: 775376 - protein, 14 aa, Homo sapiens
  CDR3 for beta chain variable domain of TCR clone 387688 (TRBV7-2, TRBJ2-7)
CASSPKTSFYEQYF

SEQ ID NO: 775377 - protein, 13 aa, Homo sapiens
  CDR3 for alpha chain variable domain of TCR clone 387689 (TRAV2, TRAJ40)
CAVVTSGTYKYIF

SEQ ID NO: 775378 - protein, 12 aa, Homo sapiens
  CDR3 for beta chain variable domain of TCR clone 387689 (TRBV24-1, TRBJ1-1)
CATLYPDTEAFF

SEQ ID NO: 775379 - protein, 14 aa, Homo sapiens
  CDR3 for alpha chain variable domain of TCR clone 387690 (TRAV12-2, TRAJ40)
CAVKIPSGTYKYIF

SEQ ID NO: 775380 - protein, 13 aa, Homo sapiens
  CDR3 for beta chain variable domain of TCR clone 387690 (TRBV20-1, TRBJ1-3)
CSSRVQGRDTIYF

SEQ ID NO: 775381 - protein, 13 aa, Homo sapiens
  CDR3 for alpha chain variable domain of TCR clone 387691 (TRAV2, TRAJ40)
CAVVTSGAYKYIF

SEQ ID NO: 775382 - protein, 14 aa, Homo sapiens
  CDR3 for beta chain variable domain of TCR clone 387691 (TRBV19, TRBJ2-1)
CASPTFGLSGEQFF

SEQ ID NO: 775383 - protein, 15 aa, Homo sapiens
  CDR3 for alpha chain variable domain of TCR clone 387692 (TRAV20, TRAJ43)
CAVQAGKSSNNDMRF

SEQ ID NO: 775384 - protein, 14 aa, Homo sapiens
  CDR3 for beta chain variable domain of TCR clone 387692 (TRBV27, TRBJ2-1)
CASRHLRGGKEQFF

SEQ ID NO: 775385 - protein, 14 aa, Homo sapiens
  CDR3 for alpha chain variable domain of TCR clone 387693 (TRAV29/DV5, TRAJ34)
CAASASGNTDKLIF

SEQ ID NO: 775386 - protein, 12 aa, Homo sapiens
  CDR3 for beta chain variable domain of TCR clone 387693 (TRBV11-2, TRBJ2-1)
CASSPGNNEQFF

SEQ ID NO: 775387 - protein, 13 aa, Homo sapiens
  CDR3 for alpha chain variable domain of TCR clone 387694 (TRAV8-3, TRAJ43)
CAVVPYNNNDMRF

SEQ ID NO: 775388 - protein, 14 aa, Homo sapiens
  CDR3 for beta chain variable domain of TCR clone 387694 (TRBV4-1, TRBJ2-2)
CASSQAVNTGELFF

SEQ ID NO: 775389 - protein, 13 aa, Homo sapiens
  CDR3 for alpha chain variable domain of TCR clone 387695 (TRAV8-3, TRAJ28)
CAVGVVGSYQLTF

SEQ ID NO: 775390 - protein, 16 aa, Homo sapiens
  CDR3 for beta chain variable domain of TCR clone 387695 (TRBV19, TRBJ2-1)
CASSKAGPSSYNEQFF

SEQ ID NO: 775391 - protein, 13 aa, Homo sapiens
  CDR3 for alpha chain variable domain of TCR clone 387696 (TRAV21, TRAJ20)
CAVGLRVDYKLSF

SEQ ID NO: 775392 - protein, 17 aa, Homo sapiens
  CDR3 for beta chain variable domain of TCR clone 387696 (TRBV7-3, TRBJ2-2)
CASSLSGTSGGTGELFF

SEQ ID NO: 775393 - protein, 10 aa, Homo sapiens
  CDR3 for alpha chain variable domain of TCR clone 387697 (TRAV8-1, TRAJ21)
CAVNGTKFYF

SEQ ID NO: 775394 - protein, 11 aa, Homo sapiens
  CDR3 for beta chain variable domain of TCR clone 387697 (TRBV6-3, TRBJ2-3)
CATGRADTQYF

SEQ ID NO: 775395 - protein, 13 aa, Homo sapiens
  CDR3 for alpha chain variable domain of TCR clone 387698 (TRAV17, TRAJ5)
CATMDTGRRELTF

SEQ ID NO: 775396 - protein, 15 aa, Homo sapiens
  CDR3 for beta chain variable domain of TCR clone 387698 (TRBV20-1, TRBJ2-5)
CSATRTSGSLETQYF

SEQ ID NO: 775397 - protein, 13 aa, Homo sapiens
  CDR3 for alpha chain variable domain of TCR clone 387699 (TRAV35, TRAJ22)
CAGLSGSARPLTF

SEQ ID NO: 775398 - protein, 16 aa, Homo sapiens
  CDR3 for beta chain variable domain of TCR clone 387699 (TRBV7-9, TRBJ2-1)
CASSLVLTGQGNEQFF

SEQ ID NO: 775399 - protein, 17 aa, Homo sapiens
  CDR3 for alpha chain variable domain of TCR clone 387700 (TRAV14/DV4, TRAJ26)
CAMRWPSEFCLWSRYQI

SEQ ID NO: 775400 - protein, 14 aa, Homo sapiens
  CDR3 for beta chain variable domain of TCR clone 387700 (TRBV12-4, TRBJ1-3)
CASTLTGAGNTIYF

SEQ ID NO: 775401 - protein, 14 aa, Homo sapiens
  CDR3 for alpha chain variable domain of TCR clone 387701 (TRAV1-2, TRAJ6)
CAVSLSGGSYIPTF

SEQ ID NO: 775402 - protein, 15 aa, Homo sapiens
  CDR3 for beta chain variable domain of TCR clone 387701 (TRBV12-4, TRBJ2-5)
CASSPPTGLQETQYF

SEQ ID NO: 775403 - protein, 15 aa, Homo sapiens
  CDR3 for alpha chain variable domain of TCR clone 387702 (TRAV12-2, TRAJ52)
CAVTSGGTSYGKLTF

SEQ ID NO: 775404 - protein, 15 aa, Homo sapiens
  CDR3 for beta chain variable domain of TCR clone 387702 (TRBV5-1, TRBJ2-7)
CASSPQGRPLDEQYF

SEQ ID NO: 775405 - protein, 15 aa, Homo sapiens
  CDR3 for alpha chain variable domain of TCR clone 387703 (TRAV34, TRAJ38)
CGADFTPGNNRKLIW

SEQ ID NO: 775406 - protein, 12 aa, Homo sapiens
  CDR3 for beta chain variable domain of TCR clone 387703 (TRBV24-1, TRBJ1-1)
CATSDPGLEAFF

SEQ ID NO: 775407 - protein, 14 aa, Homo sapiens
  CDR3 for alpha chain variable domain of TCR clone 387704 (TRAV13-1, TRAJ35)
CAASKGGFGNVLHC

SEQ ID NO: 775408 - protein, 15 aa, Homo sapiens
  CDR3 for beta chain variable domain of TCR clone 387704 (TRBV7-3, TRBJ2-1)
CASSLDGNSYNEQFF

SEQ ID NO: 775409 - protein, 14 aa, Homo sapiens
  CDR3 for alpha chain variable domain of TCR clone 387705 (TRAV12-3, TRAJ12)
CAMSEVDSSYKLIF

SEQ ID NO: 775410 - protein, 12 aa, Homo sapiens
  CDR3 for beta chain variable domain of TCR clone 387705 (TRBV24-1, TRBJ1-1)
CATLYPDTEAFF

SEQ ID NO: 775411 - protein, 10 aa, Homo sapiens
  CDR3 for alpha chain variable domain of TCR clone 387706 (TRAV36/DV7, TRAJ56)
CAGPAVELTF

SEQ ID NO: 775412 - protein, 17 aa, Homo sapiens
  CDR3 for beta chain variable domain of TCR clone 387706 (TRBV7-9, TRBJ2-6)
CASSAGTGGAGANVLTF

SEQ ID NO: 775413 - protein, 17 aa, Homo sapiens
  CDR3 for alpha chain variable domain of TCR clone 387707 (TRAV3, TRAJ42)
CAWRDRDYGGSQGNLIF

SEQ ID NO: 775414 - protein, 15 aa, Homo sapiens
  CDR3 for beta chain variable domain of TCR clone 387707 (TRBV6-6, TRBJ2-7)
CASSYSYGGSYEQYF

SEQ ID NO: 775415 - protein, 14 aa, Homo sapiens
  CDR3 for alpha chain variable domain of TCR clone 387708 (TRAV1-2, TRAJ16)
GVVNRFSDGRKLLF

SEQ ID NO: 775416 - protein, 15 aa, Homo sapiens
  CDR3 for beta chain variable domain of TCR clone 387708 (TRBV9, TRBJ1-6)
CASSVAGTGDSPLHF

SEQ ID NO: 775417 - protein, 14 aa, Homo sapiens
  CDR3 for alpha chain variable domain of TCR clone 387709 (TRAV26-1, TRAJ21)
FIVRPLYNFNKFYF

SEQ ID NO: 775418 - protein, 14 aa, Homo sapiens
  CDR3 for beta chain variable domain of TCR clone 387709 (TRBV11-3, TRBJ2-1)
CASSATTSGSIQFF

SEQ ID NO: 775419 - protein, 13 aa, Homo sapiens
  CDR3 for alpha chain variable domain of TCR clone 387710 (TRAV1-2, TRAJ9)
CAVLNTGGFKTIF

SEQ ID NO: 775420 - protein, 12 aa, Homo sapiens
  CDR3 for beta chain variable domain of TCR clone 387710 (TRBV3-1, TRBJ2-1)
CASSQGSSGQFF

SEQ ID NO: 775421 - protein, 18 aa, Homo sapiens
  CDR3 for alpha chain variable domain of TCR clone 387711 (TRAV17, TRAJ45)
CATSLDLYSGGGSDGLTF

SEQ ID NO: 775422 - protein, 13 aa, Homo sapiens
  CDR3 for beta chain variable domain of TCR clone 387711 (TRBV12-4, TRBJ1-2)
CASSLRQGKGYTF

SEQ ID NO: 775423 - protein, 10 aa, Homo sapiens
  CDR3 for alpha chain variable domain of TCR clone 387712 (TRAV25, TRAJ20)
CAVNDYKLSF

SEQ ID NO: 775424 - protein, 13 aa, Homo sapiens
  CDR3 for beta chain variable domain of TCR clone 387712 (TRBV6-3, TRBJ2-7)
CASSFSGGCEQYF

SEQ ID NO: 775425 - protein, 15 aa, Homo sapiens
  CDR3 for alpha chain variable domain of TCR clone 387713 (TRAV26-1, TRAJ29)
CIVRVEGSGNTPLVF

SEQ ID NO: 775426 - protein, 14 aa, Homo sapiens
  CDR3 for beta chain variable domain of TCR clone 387713 (TRBV7-9, TRBJ2-1)
CASSPRDSLYEQFF

SEQ ID NO: 775427 - protein, 11 aa, Homo sapiens
  CDR3 for alpha chain variable domain of TCR clone 387714 (TRAV2, TRAJ33)
CAVESNYQLIW

SEQ ID NO: 775428 - protein, 15 aa, Homo sapiens
  CDR3 for beta chain variable domain of TCR clone 387714 (TRBV24-1, TRBJ2-1)
CATRASGGQYNEQFF

SEQ ID NO: 775429 - protein, 14 aa, Homo sapiens
  CDR3 for alpha chain variable domain of TCR clone 387715 (TRAV1-2, TRAJ8)
CAVREDTGFQKLVF

SEQ ID NO: 775430 - protein, 15 aa, Homo sapiens
  CDR3 for beta chain variable domain of TCR clone 387715 (TRBV10-2, TRBJ2-6)
CASSEQGTAANVLTF

SEQ ID NO: 775431 - protein, 15 aa, Homo sapiens
  CDR3 for alpha chain variable domain of TCR clone 387716 (TRAV1-2, TRAJ30)
CAVRPHGNRDDKIIF

SEQ ID NO: 775432 - protein, 15 aa, Homo sapiens
  CDR3 for beta chain variable domain of TCR clone 387716 (TRBV9, TRBJ1-6)
CASSVAGTGDSPLHF

SEQ ID NO: 775433 - protein, 13 aa, Homo sapiens
  CDR3 for alpha chain variable domain of TCR clone 387717 (TRAV1-1, TRAJ9)
CDAKNTGGFNTIF

SEQ ID NO: 775434 - protein, 14 aa, Homo sapiens
  CDR3 for beta chain variable domain of TCR clone 387717 (TRBV20-1, TRBJ2-1)
CSAQIGGSANEQFF

SEQ ID NO: 775435 - protein, 14 aa, Homo sapiens
  CDR3 for alpha chain variable domain of TCR clone 387718 (TRAV8-4, TRAJ13)
CAVTLSGGYQKFTF

SEQ ID NO: 775436 - protein, 17 aa, Homo sapiens
  CDR3 for beta chain variable domain of TCR clone 387718 (TRBV13, TRBJ2-3)
CASSLSRVAGGRNTQYF

SEQ ID NO: 775437 - protein, 13 aa, Homo sapiens
  CDR3 for alpha chain variable domain of TCR clone 387719 (TRAV8-3, TRAJ6)
CAARRGGSYIPTF

SEQ ID NO: 775438 - protein, 15 aa, Homo sapiens
  CDR3 for beta chain variable domain of TCR clone 387719 (TRBV4-1, TRBJ2-3)
CASGNLAGGRDTQYF

SEQ ID NO: 775439 - protein, 14 aa, Homo sapiens
  CDR3 for alpha chain variable domain of TCR clone 387720 (TRAV21, TRAJ21)
CAVGVEDNFTKFYF

SEQ ID NO: 775440 - protein, 17 aa, Homo sapiens
  CDR3 for beta chain variable domain of TCR clone 387720 (TRBV20-1, TRBJ2-2)
CSASGSGQGGLTGELFF

SEQ ID NO: 775441 - protein, 12 aa, Homo sapiens
  CDR3 for alpha chain variable domain of TCR clone 387721 (TRAV13-2, TRAJ23)
CAERHRGGKLIF

SEQ ID NO: 775442 - protein, 15 aa, Homo sapiens
  CDR3 for beta chain variable domain of TCR clone 387721 (TRBV9, TRBJ1-6)
CASSVAGTGDSTLHF

SEQ ID NO: 775443 - protein, 14 aa, Homo sapiens
  CDR3 for alpha chain variable domain of TCR clone 387722 (TRAV1-2, TRAJ16)
CAVNRVSDGQKLLF

SEQ ID NO: 775444 - protein, 10 aa, Homo sapiens
  CDR3 for beta chain variable domain of TCR clone 387722 (TRBV20-1, TRBJ1-4)
PQGANEKLFF

SEQ ID NO: 775445 - protein, 14 aa, Homo sapiens
  CDR3 for alpha chain variable domain of TCR clone 387723 (TRAV13-1, TRAJ17)
LSSRSKAAGNKLTF

SEQ ID NO: 775446 - protein, 14 aa, Homo sapiens
  CDR3 for beta chain variable domain of TCR clone 387723 (TRBV7-9, TRBJ2-1)
CASSSMVGFGEQFL

SEQ ID NO: 775447 - protein, 18 aa, Homo sapiens
  CDR3 for alpha chain variable domain of TCR clone 387724 (TRAV13-1, TRAJ52)
CAANNPNAGGTSYGKLTF

SEQ ID NO: 775448 - protein, 18 aa, Homo sapiens
  CDR3 for beta chain variable domain of TCR clone 387724 (TRBV12-4, TRBJ2-4)
CASSRTGAVDVAKNIQYF

SEQ ID NO: 775449 - protein, 20 aa, Homo sapiens
  CDR3 for alpha chain variable domain of TCR clone 387725 (TRAV12-3, TRAJ52)
CAMTQSYQNAGGTSYGKLTF

SEQ ID NO: 775450 - protein, 15 aa, Homo sapiens
  CDR3 for beta chain variable domain of TCR clone 387725 (TRBV20-1, TRBJ2-7)
CSARDRVSGMDEQYF

SEQ ID NO: 775451 - protein, 11 aa, Homo sapiens
  CDR3 for alpha chain variable domain of TCR clone 387726 (TRAV23/DV6, TRAJ58)
CAARLLRGESS

SEQ ID NO: 775452 - protein, 13 aa, Homo sapiens
  CDR3 for beta chain variable domain of TCR clone 387726 (TRBV6-4, TRBJ1-5)
CASSADLNQPQHF

SEQ ID NO: 775453 - protein, 15 aa, Homo sapiens
  CDR3 for alpha chain variable domain of TCR clone 387727 (TRAV26-2, TRAJ39)
CSLRGNNNAGNMLTF

SEQ ID NO: 775454 - protein, 13 aa, Homo sapiens
  CDR3 for beta chain variable domain of TCR clone 387727 (TRBV20-1, TRBJ2-7)
CSATHTSGYEQYF

SEQ ID NO: 775455 - protein, 15 aa, Homo sapiens
  CDR3 for alpha chain variable domain of TCR clone 387728 (TRAV12-1, TRAJ44)
CVADLPTGTASKLTF

SEQ ID NO: 775456 - protein, 14 aa, Homo sapiens
  CDR3 for beta chain variable domain of TCR clone 387728 (TRBV19, TRBJ2-1)
CASSPGLAPNEQFF

SEQ ID NO: 775457 - protein, 14 aa, Homo sapiens
  CDR3 for alpha chain variable domain of TCR clone 387729 (TRAV12-3, TRAJ10)
SHLPLTGGGNKLTF

SEQ ID NO: 775458 - protein, 16 aa, Homo sapiens
  CDR3 for beta chain variable domain of TCR clone 387729 (TRBV7-9, TRBJ2-1)
CASSDVAGGSYNEQFC

SEQ ID NO: 775459 - protein, 14 aa, Homo sapiens
  CDR3 for alpha chain variable domain of TCR clone 387730 (TRAV13-1, TRAJ5)
CAAHPDTGRRALTF

SEQ ID NO: 775460 - protein, 15 aa, Homo sapiens
  CDR3 for beta chain variable domain of TCR clone 387730 (TRBV5-1, TRBJ2-1)
CASSPPRAPYNEQFF

SEQ ID NO: 775461 - protein, 15 aa, Homo sapiens
  CDR3 for alpha chain variable domain of TCR clone 387731 (TRAV27, TRAJ53)
CRAINSGGSNYKLTF

SEQ ID NO: 775462 - protein, 19 aa, Homo sapiens
  CDR3 for beta chain variable domain of TCR clone 387731 (TRBV7-9, TRBJ2-1)
YASSHNRGALLRSYNEQFF

SEQ ID NO: 775463 - protein, 14 aa, Homo sapiens
  CDR3 for alpha chain variable domain of TCR clone 387732 (TRAV17, TRAJ35)
CATDRPGFGNVLHC

SEQ ID NO: 775464 - protein, 14 aa, Homo sapiens
  CDR3 for beta chain variable domain of TCR clone 387732 (TRBV7-2, TRBJ2-7)
CASSPKTSFYEQYF

SEQ ID NO: 775465 - protein, 15 aa, Homo sapiens
  CDR3 for alpha chain variable domain of TCR clone 387733 (TRAV29/DV5, TRAJ42)
CPAKTDGGSQGNLIF

SEQ ID NO: 775466 - protein, 12 aa, Homo sapiens
  CDR3 for beta chain variable domain of TCR clone 387733 (TRBV11-2, TRBJ2-1)
CASSPGNNEQFF

SEQ ID NO: 775467 - protein, 15 aa, Homo sapiens
  CDR3 for alpha chain variable domain of TCR clone 387734 (TRAV8-3, TRAJ27)
CAVGPSKTNAGKSTF

SEQ ID NO: 775468 - protein, 12 aa, Homo sapiens
  CDR3 for beta chain variable domain of TCR clone 387734 (TRBV11-2, TRBJ2-2)
CASSRGGGELFF

SEQ ID NO: 775469 - protein, 17 aa, Homo sapiens
  CDR3 for alpha chain variable domain of TCR clone 387735 (TRAV26-1, TRAJ53)
CIVRVDDSGSSNYKLTF

SEQ ID NO: 775470 - protein, 15 aa, Homo sapiens
  CDR3 for beta chain variable domain of TCR clone 387735 (TRBV20-1, TRBJ2-7)
CSARDRVAGMDEQYF

SEQ ID NO: 775471 - protein, 12 aa, Homo sapiens
  CDR3 for alpha chain variable domain of TCR clone 387736 (TRAV8-3, TRAJ28)
CAVGGWELPTHF

SEQ ID NO: 775472 - protein, 15 aa, Homo sapiens
  CDR3 for beta chain variable domain of TCR clone 387736 (TRBV7-9, TRBJ1-5)
CASSQGHQPNQPQHF

SEQ ID NO: 775473 - protein, 11 aa, Homo sapiens
  CDR3 for alpha chain variable domain of TCR clone 387737 (TRAV35, TRAJ30)
CAGPGDDKFIF

SEQ ID NO: 775474 - protein, 14 aa, Homo sapiens
  CDR3 for beta chain variable domain of TCR clone 387737 (TRBV7-6, TRBJ1-6)
CASSQAGGGSPLHF

SEQ ID NO: 775475 - protein, 14 aa, Homo sapiens
  CDR3 for alpha chain variable domain of TCR clone 387738 (TRAV3, TRAJ33)
CAVRDMDSNYQLIW

SEQ ID NO: 775476 - protein, 16 aa, Homo sapiens
  CDR3 for beta chain variable domain of TCR clone 387738 (TRBV7-9, TRBJ2-1)
CGSSDVAGGSYNEQFF

SEQ ID NO: 775477 - protein, 12 aa, Homo sapiens
  CDR3 for alpha chain variable domain of TCR clone 387739 (TRAV2, TRAJ9)
CAVGAGGFKTIF

SEQ ID NO: 775478 - protein, 12 aa, Homo sapiens
  CDR3 for beta chain variable domain of TCR clone 387739 (TRBV5-1, TRBJ1-1)
CASSQGNTEAFF

SEQ ID NO: 775479 - protein, 13 aa, Homo sapiens
  CDR3 for alpha chain variable domain of TCR clone 387740 (TRAV8-4, TRAJ9)
CAVSETGGFKTNF

SEQ ID NO: 775480 - protein, 14 aa, Homo sapiens
  CDR3 for beta chain variable domain of TCR clone 387740 (TRBV18, TRBJ2-3)
CASSGLADTDTQYF

SEQ ID NO: 775481 - protein, 14 aa, Homo sapiens
  CDR3 for alpha chain variable domain of TCR clone 387741 (TRAV3, TRAJ17)
CAVRYAAAGNKLTF

SEQ ID NO: 775482 - protein, 16 aa, Homo sapiens
  CDR3 for beta chain variable domain of TCR clone 387741 (TRBV28, TRBJ1-5)
CASSLTGQGWNQPQHF

SEQ ID NO: 775483 - protein, 14 aa, Homo sapiens
  CDR3 for alpha chain variable domain of TCR clone 387742 (TRAV1-2, TRAJ16)
CAVNRFSDGQKLLF

SEQ ID NO: 775484 - protein, 16 aa, Homo sapiens
  CDR3 for beta chain variable domain of TCR clone 387742 (TRBV7-3, TRBJ2-2)
CASSLKRGPCPGSCFF

SEQ ID NO: 775485 - protein, 14 aa, Homo sapiens
  CDR3 for alpha chain variable domain of TCR clone 387743 (TRAV12-2, TRAJ17)
CAVFFKAAGNKLTF

SEQ ID NO: 775486 - protein, 17 aa, Homo sapiens
  CDR3 for beta chain variable domain of TCR clone 387743 (TRBV20-1, TRBJ2-2)
CSASGSGQGGLTGELFF

SEQ ID NO: 775487 - protein, 18 aa, Homo sapiens
  CDR3 for alpha chain variable domain of TCR clone 387744 (TRAV21, TRAJ52)
CAVRPSPAVGTSYGKLTF

SEQ ID NO: 775488 - protein, 15 aa, Homo sapiens
  CDR3 for beta chain variable domain of TCR clone 387744 (TRBV7-9, TRBJ2-7)
CASSSSGLAVYEQYF

SEQ ID NO: 775489 - protein, 14 aa, Homo sapiens
  CDR3 for alpha chain variable domain of TCR clone 387745 (TRAV16, TRAJ37)
CALDISVNTGKLIF

SEQ ID NO: 775490 - protein, 11 aa, Homo sapiens
  CDR3 for beta chain variable domain of TCR clone 387745 (TRBV6-1, TRBJ2-1)
CASISSNEQFF

SEQ ID NO: 775491 - protein, 14 aa, Homo sapiens
  CDR3 for alpha chain variable domain of TCR clone 387746 (TRAV26-1, TRAJ57)
CIVITQGGSEKLVF

SEQ ID NO: 775492 - protein, 16 aa, Homo sapiens
  CDR3 for beta chain variable domain of TCR clone 387746 (TRBV20-1, TRBJ1-1)
CSARALTQGMNTEAFF

SEQ ID NO: 775493 - protein, 23 aa, Homo sapiens
  CDR3 for alpha chain variable domain of TCR clone 387747 (TRAV26-1, TRAJ38)
CIADNAGNNHIQNPDPAVYQLRD

SEQ ID NO: 775494 - protein, 14 aa, Homo sapiens
  CDR3 for beta chain variable domain of TCR clone 387747 (TRBV2, TRBJ2-1)
CASSEARQGVSEFF

SEQ ID NO: 775495 - protein, 13 aa, Homo sapiens
  CDR3 for alpha chain variable domain of TCR clone 387748 (TRAV8-1, TRAJ28)
CAVSEAGSYPLTF

SEQ ID NO: 775496 - protein, 14 aa, Homo sapiens
  CDR3 for beta chain variable domain of TCR clone 387748 (TRBV7-2, TRBJ2-2)
CASRGQGAAGELFF

SEQ ID NO: 775497 - protein, 11 aa, Homo sapiens
  CDR3 for alpha chain variable domain of TCR clone 387749 (TRAV2, TRAJ33)
CAVESNYQLIW

SEQ ID NO: 775498 - protein, 13 aa, Homo sapiens
  CDR3 for beta chain variable domain of TCR clone 387749 (TRBV7-9, TRBJ2-7)
CASSFAGAYEQYF

SEQ ID NO: 775499 - protein, 15 aa, Homo sapiens
  CDR3 for alpha chain variable domain of TCR clone 387750 (TRAV8-4, TRAJ13)
CAVSDWGGGYQKVTF

SEQ ID NO: 775500 - protein, 15 aa, Homo sapiens
  CDR3 for beta chain variable domain of TCR clone 387750 (TRBV25-1, TRBJ1-4)
CASSHGDSTNEKLFF

SEQ ID NO: 775501 - protein, 16 aa, Homo sapiens
  CDR3 for alpha chain variable domain of TCR clone 387751 (TRAV26-1, TRAJ41)
CIVRVAVANSGYALNF

SEQ ID NO: 775502 - protein, 15 aa, Homo sapiens
  CDR3 for beta chain variable domain of TCR clone 387751 (TRBV7-9, TRBJ1-4)
CASSRTGGFNEKLFF

SEQ ID NO: 775503 - protein, 14 aa, Homo sapiens
  CDR3 for alpha chain variable domain of TCR clone 387752 (TRAV13-1, TRAJ48)
CAASRSFVDEKLTF

SEQ ID NO: 775504 - protein, 12 aa, Homo sapiens
  CDR3 for beta chain variable domain of TCR clone 387752 (TRBV6-6, TRBJ2-5)
CASNRQSGTQYF

SEQ ID NO: 775505 - protein, 16 aa, Homo sapiens
  CDR3 for alpha chain variable domain of TCR clone 387753 (TRAV12-2, TRAJ10)
CAVNRVLMGGGNKLTF

SEQ ID NO: 775506 - protein, 12 aa, Homo sapiens
  CDR3 for beta chain variable domain of TCR clone 387753 (TRBV28, TRBJ2-7)
CASSFSSYEQYF

SEQ ID NO: 775507 - protein, 12 aa, Homo sapiens
  CDR3 for alpha chain variable domain of TCR clone 387754 (TRAV13-2, TRAJ39)
CAENTAGNMLTF

SEQ ID NO: 775508 - protein, 13 aa, Homo sapiens
  CDR3 for beta chain variable domain of TCR clone 387754 (TRBV7-6, TRBJ1-1)
CASSLKLGTEAFF

SEQ ID NO: 775509 - protein, 11 aa, Homo sapiens
  CDR3 for alpha chain variable domain of TCR clone 387755 (TRAV2, TRAJ33)
CAVESNYQLIW

SEQ ID NO: 775510 - protein, 15 aa, Homo sapiens
  CDR3 for beta chain variable domain of TCR clone 387755 (TRBV19, TRBJ1-1)
CASTTGQIQNTEAFF

SEQ ID NO: 775511 - protein, 15 aa, Homo sapiens
  CDR3 for alpha chain variable domain of TCR clone 387756 (TRAV29/DV5, TRAJ29)
CVVSERSSGNTPLVF

SEQ ID NO: 775512 - protein, 17 aa, Homo sapiens
  CDR3 for beta chain variable domain of TCR clone 387756 (TRBV4-1, TRBJ1-4)
CASSQEGPRGVEEKLFF

SEQ ID NO: 775513 - protein, 14 aa, Homo sapiens
  CDR3 for alpha chain variable domain of TCR clone 387757 (TRAV20, TRAJ10)
CAVRVKGGGNKLTF

SEQ ID NO: 775514 - protein, 13 aa, Homo sapiens
  CDR3 for beta chain variable domain of TCR clone 387757 (TRBV13, TRBJ2-2)
CASSPGLTGELFF

SEQ ID NO: 775515 - protein, 12 aa, Homo sapiens
  CDR3 for alpha chain variable domain of TCR clone 387758 (TRAV29/DV5, TRAJ15)
CASNQAGTALIF

SEQ ID NO: 775516 - protein, 15 aa, Homo sapiens
  CDR3 for beta chain variable domain of TCR clone 387758 (TRBV11-2, TRBJ2-2)
CAGSSDRVNAGELFF

SEQ ID NO: 775517 - protein, 11 aa, Homo sapiens
  CDR3 for alpha chain variable domain of TCR clone 387759 (TRAV4, TRAJ31)
CLVGDNARLMF

SEQ ID NO: 775518 - protein, 16 aa, Homo sapiens
  CDR3 for beta chain variable domain of TCR clone 387759 (TRBV7-2, TRBJ2-5)
CASSTKWWSGQETQYF

SEQ ID NO: 775519 - protein, 14 aa, Homo sapiens
  CDR3 for alpha chain variable domain of TCR clone 387760 (TRAV14/DV4, TRAJ54)
CAMREAPGAQKLVF

SEQ ID NO: 775520 - protein, 15 aa, Homo sapiens
  CDR3 for beta chain variable domain of TCR clone 387760 (TRBV5-1, TRBJ2-7)
CASSVNGGPAREQYF

SEQ ID NO: 775521 - protein, 11 aa, Homo sapiens
  CDR3 for alpha chain variable domain of TCR clone 387761 (TRAV17, TRAJ36)
CAPTGANNLLF

SEQ ID NO: 775522 - protein, 12 aa, Homo sapiens
  CDR3 for beta chain variable domain of TCR clone 387761 (TRBV19, TRBJ2-1)
CASSRQGAEQFF

SEQ ID NO: 775523 - protein, 14 aa, Homo sapiens
  CDR3 for alpha chain variable domain of TCR clone 387762 (TRAV13-1, TRAJ5)
CAALGLAGRRALTF

SEQ ID NO: 775524 - protein, 12 aa, Homo sapiens
  CDR3 for beta chain variable domain of TCR clone 387762 (TRBV11-2, TRBJ2-5)
CASSPPAETQYF

SEQ ID NO: 775525 - protein, 15 aa, Homo sapiens
  CDR3 for alpha chain variable domain of TCR clone 387763 (TRAV17, TRAJ57)
CATGPSQGGSEKLVF

SEQ ID NO: 775526 - protein, 15 aa, Homo sapiens
  CDR3 for beta chain variable domain of TCR clone 387763 (TRBV29-1, TRBJ2-7)
CSVGFFDRGSYEQYF

SEQ ID NO: 775527 - protein, 14 aa, Homo sapiens
  CDR3 for alpha chain variable domain of TCR clone 387764 (TRAV13-1, TRAJ8)
CAASEETGFQKLVF

SEQ ID NO: 775528 - protein, 13 aa, Homo sapiens
  CDR3 for beta chain variable domain of TCR clone 387764 (TRBV19, TRBJ1-5)
CASSTRRDQPQHF

SEQ ID NO: 775529 - protein, 12 aa, Homo sapiens
  CDR3 for alpha chain variable domain of TCR clone 387765 (TRAV22, TRAJ36)
CAVGTGANNLFF

SEQ ID NO: 775530 - protein, 17 aa, Homo sapiens
  CDR3 for beta chain variable domain of TCR clone 387765 (TRBV15, TRBJ1-4)
CATSGYGTGDPNEKLFF

SEQ ID NO: 775531 - protein, 13 aa, Homo sapiens
  CDR3 for alpha chain variable domain of TCR clone 387766 (TRAV26-1, TRAJ8)
CIVRSTGFQKLVF

SEQ ID NO: 775532 - protein, 14 aa, Homo sapiens
  CDR3 for beta chain variable domain of TCR clone 387766 (TRBV12-5, TRBJ2-5)
CASGSRTHQETQYF

SEQ ID NO: 775533 - protein, 11 aa, Homo sapiens
  CDR3 for alpha chain variable domain of TCR clone 387767 (TRAV12-2, TRAJ39)
CAVNKMLTFGG

SEQ ID NO: 775534 - protein, 16 aa, Homo sapiens
  CDR3 for beta chain variable domain of TCR clone 387767 (TRBV9, TRBJ2-7)
CASSAGPDRSPYEQYF

SEQ ID NO: 775535 - protein, 23 aa, Homo sapiens
  CDR3 for alpha chain variable domain of TCR clone 387768 (TRAV8-3, )
CAVVTTRIPDIQNPDPAVYQLRD

SEQ ID NO: 775536 - protein, 14 aa, Homo sapiens
  CDR3 for beta chain variable domain of TCR clone 387768 (TRBV11-2, TRBJ2-7)
CASSPSTNSYEQYF

SEQ ID NO: 775537 - protein, 18 aa, Homo sapiens
  CDR3 for alpha chain variable domain of TCR clone 387769 (TRAV21, TRAJ52)
CAVRPSPAGGTSYGKLTF

SEQ ID NO: 775538 - protein, 14 aa, Homo sapiens
  CDR3 for beta chain variable domain of TCR clone 387769 (TRBV15, TRBJ2-7)
CATSRVARGYEQYF

SEQ ID NO: 775539 - protein, 13 aa, Homo sapiens
  CDR3 for alpha chain variable domain of TCR clone 387770 (TRAV2, TRAJ29)
CAAGNSGNTPLVF

SEQ ID NO: 775540 - protein, 16 aa, Homo sapiens
  CDR3 for beta chain variable domain of TCR clone 387770 (TRBV7-9, TRBJ1-2)
CASSPSGGAINYGHTF

SEQ ID NO: 775541 - protein, 13 aa, Homo sapiens
  CDR3 for alpha chain variable domain of TCR clone 387771 (TRAV35, TRAJ49)
CAGRLNTGNQFYF

SEQ ID NO: 775542 - protein, 12 aa, Homo sapiens
  CDR3 for beta chain variable domain of TCR clone 387771 (TRBV5-4, TRBJ2-7)
CASSLEAYEQYF

SEQ ID NO: 775543 - protein, 14 aa, Homo sapiens
  CDR3 for alpha chain variable domain of TCR clone 387772 (TRAV21, TRAJ58)
CAVRRGRSGSRLTF

SEQ ID NO: 775544 - protein, 13 aa, Homo sapiens
  CDR3 for beta chain variable domain of TCR clone 387772 (TRBV12-4, TRBJ2-7)
CASSPTETYEQYF

SEQ ID NO: 775545 - protein, 12 aa, Homo sapiens
  CDR3 for alpha chain variable domain of TCR clone 387773 (TRAV12-1, TRAJ23)
CVVKIPGGKLIF

SEQ ID NO: 775546 - protein, 15 aa, Homo sapiens
  CDR3 for beta chain variable domain of TCR clone 387773 (TRBV6-3, TRBJ2-7)
CASSSPGTVFYEQYF

SEQ ID NO: 775547 - protein, 14 aa, Homo sapiens
  CDR3 for alpha chain variable domain of TCR clone 387774 (TRAV12-1, TRAJ12)
CVVMRMDSSYKLIF

SEQ ID NO: 775548 - protein, 13 aa, Homo sapiens
  CDR3 for beta chain variable domain of TCR clone 387774 (TRBV20-1, TRBJ1-1)
CSARGGGNTEAFF

SEQ ID NO: 775549 - protein, 22 aa, Homo sapiens
  CDR3 for alpha chain variable domain of TCR clone 387775 (TRAV40, )
CLLGDGIPDIQNPDPAVYQLRD

SEQ ID NO: 775550 - protein, 16 aa, Homo sapiens
  CDR3 for beta chain variable domain of TCR clone 387775 (TRBV20-1, TRBJ1-5)
CSAGLPGQQTNQPQHF

SEQ ID NO: 775551 - protein, 13 aa, Homo sapiens
  CDR3 for alpha chain variable domain of TCR clone 387776 (TRAV13-1, TRAJ29)
CAASIGLNTPLVL

SEQ ID NO: 775552 - protein, 15 aa, Homo sapiens
  CDR3 for beta chain variable domain of TCR clone 387776 (TRBV6-1, TRBJ2-5)
CASSEFPLMGETQYF

SEQ ID NO: 775553 - protein, 13 aa, Homo sapiens
  CDR3 for alpha chain variable domain of TCR clone 387777 (TRAV27, TRAJ41)
CAGEGNSGYALNF

SEQ ID NO: 775554 - protein, 10 aa, Homo sapiens
  CDR3 for beta chain variable domain of TCR clone 387777 (TRBV25-1, TRBJ1-1)
PTWGNTEAFF

SEQ ID NO: 775555 - protein, 14 aa, Homo sapiens
  CDR3 for alpha chain variable domain of TCR clone 387778 (TRAV20, TRAJ42)
CAVQGWRSQGNPIF

SEQ ID NO: 775556 - protein, 16 aa, Homo sapiens
  CDR3 for beta chain variable domain of TCR clone 387778 (TRBV12-5, TRBJ2-5)
CASGPRTSGNQETQYF

SEQ ID NO: 775557 - protein, 16 aa, Homo sapiens
  CDR3 for alpha chain variable domain of TCR clone 387779 (TRAV30, TRAJ24)
CGTEIVDADSWGNSSL

SEQ ID NO: 775558 - protein, 14 aa, Homo sapiens
  CDR3 for beta chain variable domain of TCR clone 387779 (TRBV12-5, TRBJ2-5)
CASVSRTHQETQYF

SEQ ID NO: 775559 - protein, 14 aa, Homo sapiens
  CDR3 for alpha chain variable domain of TCR clone 387780 (TRAV13-2, TRAJ17)
CAENSKAAGNKLTF

SEQ ID NO: 775560 - protein, 16 aa, Homo sapiens
  CDR3 for beta chain variable domain of TCR clone 387780 (TRBV12-4, TRBJ1-5)
CASSRPVGGSKQPQHF

SEQ ID NO: 775561 - protein, 11 aa, Homo sapiens
  CDR3 for alpha chain variable domain of TCR clone 387781 (TRAV3, TRAJ21)
CAVGNFNKFYF

SEQ ID NO: 775562 - protein, 17 aa, Homo sapiens
  CDR3 for beta chain variable domain of TCR clone 387781 (TRBV24-1, TRBJ2-1)
CATSDVSTSGSYNEQFF

SEQ ID NO: 775563 - protein, 12 aa, Homo sapiens
  CDR3 for alpha chain variable domain of TCR clone 387782 (TRAV27, TRAJ21)
CAGVRQLQQILL

SEQ ID NO: 775564 - protein, 14 aa, Homo sapiens
  CDR3 for beta chain variable domain of TCR clone 387782 (TRBV19, TRBJ2-5)
CASSTNRGQETQYF

SEQ ID NO: 775565 - protein, 15 aa, Homo sapiens
  CDR3 for alpha chain variable domain of TCR clone 387783 (TRAV27, TRAJ17)
CRSTMIKAAGNKLTF

SEQ ID NO: 775566 - protein, 14 aa, Homo sapiens
  CDR3 for beta chain variable domain of TCR clone 387783 (TRBV13, TRBJ2-5)
CASSLERVGETQYF

SEQ ID NO: 775567 - protein, 16 aa, Homo sapiens
  CDR3 for alpha chain variable domain of TCR clone 387784 (TRAV12-3, TRAJ53)
CAMSPGSGGSNYKLTF

SEQ ID NO: 775568 - protein, 13 aa, Homo sapiens
  CDR3 for beta chain variable domain of TCR clone 387784 (TRBV7-3, TRBJ2-1)
CASSPVAYNEQFF

SEQ ID NO: 775569 - protein, 13 aa, Homo sapiens
  CDR3 for alpha chain variable domain of TCR clone 387785 (TRAV21, TRAJ57)
CAVIEGGSETLVF

SEQ ID NO: 775570 - protein, 15 aa, Homo sapiens
  CDR3 for beta chain variable domain of TCR clone 387785 (TRBV10-3, TRBJ2-5)
CATSEFGRGQETQYF

SEQ ID NO: 775571 - protein, 13 aa, Homo sapiens
  CDR3 for alpha chain variable domain of TCR clone 387786 (TRAV12-1, TRAJ29)
CVVRNSGNTPLVF

SEQ ID NO: 775572 - protein, 14 aa, Homo sapiens
  CDR3 for beta chain variable domain of TCR clone 387786 (TRBV7-2, TRBJ2-7)
CASRLQGAAYEQYF

SEQ ID NO: 775573 - protein, 13 aa, Homo sapiens
  CDR3 for alpha chain variable domain of TCR clone 387787 (TRAV21, TRAJ27)
CAARPGNAGKSTF

SEQ ID NO: 775574 - protein, 15 aa, Homo sapiens
  CDR3 for beta chain variable domain of TCR clone 387787 (TRBV2, TRBJ2-3)
CASSDAGGPPNTQYF

SEQ ID NO: 775575 - protein, 14 aa, Homo sapiens
  CDR3 for alpha chain variable domain of TCR clone 387788 (TRAV38-1, TRAJ43)
CAFMKHNNNNDMRF

SEQ ID NO: 775576 - protein, 16 aa, Homo sapiens
  CDR3 for beta chain variable domain of TCR clone 387788 (TRBV11-2, TRBJ2-2)
CASSLRAGNLIGELFF

SEQ ID NO: 775577 - protein, 14 aa, Homo sapiens
  CDR3 for alpha chain variable domain of TCR clone 387789 (TRAV1-2, TRAJ8)
CAVREDTGFQKLVF

SEQ ID NO: 775578 - protein, 16 aa, Homo sapiens
  CDR3 for beta chain variable domain of TCR clone 387789 (TRBV12-4, TRBJ2-2)
CASSSQVGGPGGELFF

SEQ ID NO: 775579 - protein, 14 aa, Homo sapiens
  CDR3 for alpha chain variable domain of TCR clone 387790 (TRAV4, TRAJ26)
CLVGPHNYGQNFVF

SEQ ID NO: 775580 - protein, 14 aa, Homo sapiens
  CDR3 for beta chain variable domain of TCR clone 387790 (TRBV7-8, TRBJ2-7)
CASSPRDRVYEQYF

SEQ ID NO: 775581 - protein, 17 aa, Homo sapiens
  CDR3 for alpha chain variable domain of TCR clone 387791 (TRAV12-2, TRAJ52)
CAGNKGAGGTSYGKLTF

SEQ ID NO: 775582 - protein, 16 aa, Homo sapiens
  CDR3 for beta chain variable domain of TCR clone 387791 (TRBV2, TRBJ1-5)
CASGSTGSNFGQPQHF

SEQ ID NO: 775583 - protein, 14 aa, Homo sapiens
  CDR3 for alpha chain variable domain of TCR clone 387792 (TRAV27, TRAJ50)
CAGGRKTSYDKVIF

SEQ ID NO: 775584 - protein, 15 aa, Homo sapiens
  CDR3 for beta chain variable domain of TCR clone 387792 (TRBV7-2, TRBJ2-1)
CASSSGLAGGNEQFF

SEQ ID NO: 775585 - protein, 17 aa, Homo sapiens
  CDR3 for alpha chain variable domain of TCR clone 387793 (TRAV3, TRAJ6)
CAVRDGPRAGGSYTPTF

SEQ ID NO: 775586 - protein, 14 aa, Homo sapiens
  CDR3 for beta chain variable domain of TCR clone 387793 (TRBV7-2, TRBJ2-7)
CASSPKTIFYEQYF

SEQ ID NO: 775587 - protein, 17 aa, Homo sapiens
  CDR3 for alpha chain variable domain of TCR clone 387794 (TRAV26-1, TRAJ53)
CIVRVDDSGGSNYKLTF

SEQ ID NO: 775588 - protein, 18 aa, Homo sapiens
  CDR3 for beta chain variable domain of TCR clone 387794 (TRBV4-1, TRBJ2-3)
CASSHQLAGGRSTDTQYF

SEQ ID NO: 775589 - protein, 11 aa, Homo sapiens
  CDR3 for alpha chain variable domain of TCR clone 387795 (TRAV16, TRAJ49)
CSLNTGNQFYF

SEQ ID NO: 775590 - protein, 12 aa, Homo sapiens
  CDR3 for beta chain variable domain of TCR clone 387795 (TRBV7-9, TRBJ1-4)
CASSTDRENLFF

SEQ ID NO: 775591 - protein, 13 aa, Homo sapiens
  CDR3 for alpha chain variable domain of TCR clone 387796 (TRAV26-2, TRAJ43)
CILRAVNNNDMRF

SEQ ID NO: 775592 - protein, 15 aa, Homo sapiens
  CDR3 for beta chain variable domain of TCR clone 387796 (TRBV7-2, TRBJ2-1)
CASTHGTGIYNRQFF

SEQ ID NO: 775593 - protein, 14 aa, Homo sapiens
  CDR3 for alpha chain variable domain of TCR clone 387797 (TRAV9-2, TRAJ39)
CALYIYNAGNMLTF

SEQ ID NO: 775594 - protein, 17 aa, Homo sapiens
  CDR3 for beta chain variable domain of TCR clone 387797 (TRBV3-1, TRBJ2-2)
CASSQDSQGPNTGELFF

SEQ ID NO: 775595 - protein, 15 aa, Homo sapiens
  CDR3 for alpha chain variable domain of TCR clone 387798 (TRAV13-2, TRAJ6)
CADHLREGGSYIPTF

SEQ ID NO: 775596 - protein, 12 aa, Homo sapiens
  CDR3 for beta chain variable domain of TCR clone 387798 (TRBV19, TRBJ1-5)
CASSIAQQPQHF

SEQ ID NO: 775597 - protein, 12 aa, Homo sapiens
  CDR3 for alpha chain variable domain of TCR clone 387799 (TRAV13-2, TRAJ48)
CADGLWKWEINL

SEQ ID NO: 775598 - protein, 13 aa, Homo sapiens
  CDR3 for beta chain variable domain of TCR clone 387799 (TRBV7-9, TRBJ1-2)
CASSLKQNYGYTF

SEQ ID NO: 775599 - protein, 15 aa, Homo sapiens
  CDR3 for alpha chain variable domain of TCR clone 387800 (TRAV27, TRAJ38)
CAARRNAGNNRKLIW

SEQ ID NO: 775600 - protein, 14 aa, Homo sapiens
  CDR3 for beta chain variable domain of TCR clone 387800 (TRBV11-2, TRBJ2-3)
CASSLYAGRDTQYF

SEQ ID NO: 775601 - protein, 14 aa, Homo sapiens
  CDR3 for alpha chain variable domain of TCR clone 387801 (TRAV26-1, TRAJ38)
CIADDAGNNRKLIW

SEQ ID NO: 775602 - protein, 14 aa, Homo sapiens
  CDR3 for beta chain variable domain of TCR clone 387801 (TRBV19, TRBJ2-5)
CASSMTGQQETQYF

SEQ ID NO: 775603 - protein, 10 aa, Homo sapiens
  CDR3 for alpha chain variable domain of TCR clone 387802 (TRAV36/DV7, TRAJ49)
CALTSNQFYF

SEQ ID NO: 775604 - protein, 14 aa, Homo sapiens
  CDR3 for beta chain variable domain of TCR clone 387802 (TRBV4-2, TRBJ2-5)
CASSQDRGRETQYF

SEQ ID NO: 775605 - protein, 15 aa, Homo sapiens
  CDR3 for alpha chain variable domain of TCR clone 387803 (TRAV3, TRAJ5)
CAWRDRKTGRRALTF

SEQ ID NO: 775606 - protein, 15 aa, Homo sapiens
  CDR3 for beta chain variable domain of TCR clone 387803 (TRBV7-8, TRBJ2-1)
CASSLADSLYNEQFF

SEQ ID NO: 775607 - protein, 15 aa, Homo sapiens
  CDR3 for alpha chain variable domain of TCR clone 387804 (TRAV8-6, TRAJ11)
CAVNFMSSGYSTLTF

SEQ ID NO: 775608 - protein, 14 aa, Homo sapiens
  CDR3 for beta chain variable domain of TCR clone 387804 (TRBV7-7, TRBJ2-5)
CASSLRTGQETQYF

SEQ ID NO: 775609 - protein, 14 aa, Homo sapiens
  CDR3 for alpha chain variable domain of TCR clone 387805 (TRAV12-3, TRAJ35)
CAMSLIGFGNVLHC

SEQ ID NO: 775610 - protein, 12 aa, Homo sapiens
  CDR3 for beta chain variable domain of TCR clone 387805 (TRBV5-1, TRBJ1-2)
CASSQDTYGYTF

SEQ ID NO: 775611 - protein, 16 aa, Homo sapiens
  CDR3 for alpha chain variable domain of TCR clone 387806 (TRAV13-2, TRAJ32)
CAENMNYGGATNKLIF

SEQ ID NO: 775612 - protein, 14 aa, Homo sapiens
  CDR3 for beta chain variable domain of TCR clone 387806 (TRBV15, TRBJ2-5)
CATSSTGYQETQYV

SEQ ID NO: 775613 - protein, 14 aa, Homo sapiens
  CDR3 for alpha chain variable domain of TCR clone 387807 (TRAV1-2, TRAJ16)
CAVNRFSVGQKLLF

SEQ ID NO: 775614 - protein, 17 aa, Homo sapiens
  CDR3 for beta chain variable domain of TCR clone 387807 (TRBV7-9, TRBJ2-1)
CASSLVASYPSYNEQFF

SEQ ID NO: 775615 - protein, 13 aa, Homo sapiens
  CDR3 for alpha chain variable domain of TCR clone 387808 (TRAV2, TRAJ40)
CAVVTPGTYKYIF

SEQ ID NO: 775616 - protein, 15 aa, Homo sapiens
  CDR3 for beta chain variable domain of TCR clone 387808 (TRBV4-2, TRBJ2-4)
CASSPLGAAKNIQYF

SEQ ID NO: 775617 - protein, 14 aa, Homo sapiens
  CDR3 for alpha chain variable domain of TCR clone 387809 (TRAV38-1, TRAJ40)
CALRPTSGTYKYIF

SEQ ID NO: 775618 - protein, 15 aa, Homo sapiens
  CDR3 for beta chain variable domain of TCR clone 387809 (TRBV4-1, TRBJ1-2)
CASSLNTGQGYGYTF

SEQ ID NO: 775619 - protein, 16 aa, Homo sapiens
  CDR3 for alpha chain variable domain of TCR clone 387810 (TRAV21, TRAJ37)
LAVRTAGPSNTGKLIF

SEQ ID NO: 775620 - protein, 13 aa, Homo sapiens
  CDR3 for beta chain variable domain of TCR clone 387810 (TRBV7-9, TRBJ2-5)
CASLPSGRETQYF

SEQ ID NO: 775621 - protein, 12 aa, Homo sapiens
  CDR3 for alpha chain variable domain of TCR clone 387811 (TRAV17, TRAJ53)
CATEGSNYKLTF

SEQ ID NO: 775622 - protein, 15 aa, Homo sapiens
  CDR3 for beta chain variable domain of TCR clone 387811 (TRBV7-3, TRBJ2-2)
CASSLTGQGTGELFF

SEQ ID NO: 775623 - protein, 12 aa, Homo sapiens
  CDR3 for alpha chain variable domain of TCR clone 387812 (TRAV21, TRAJ11)
CAATAGYSTHTF

SEQ ID NO: 775624 - protein, 16 aa, Homo sapiens
  CDR3 for beta chain variable domain of TCR clone 387812 (TRBV27, TRBJ2-2)
CASSFRGLVRTGELFF

SEQ ID NO: 775625 - protein, 10 aa, Homo sapiens
  CDR3 for alpha chain variable domain of TCR clone 387813 (TRAV12-1, TRAJ43)
CVVHNNDMRF

SEQ ID NO: 775626 - protein, 15 aa, Homo sapiens
  CDR3 for beta chain variable domain of TCR clone 387813 (TRBV29-1, TRBJ2-1)
CSVGRHALFYNEQFF

SEQ ID NO: 775627 - protein, 14 aa, Homo sapiens
  CDR3 for alpha chain variable domain of TCR clone 387814 (TRAV26-1, TRAJ45)
CIEVTGGGADGLTF

SEQ ID NO: 775628 - protein, 12 aa, Homo sapiens
  CDR3 for beta chain variable domain of TCR clone 387814 (TRBV12-4, TRBJ2-7)
CPSSLGGYEQYF

SEQ ID NO: 775629 - protein, 16 aa, Homo sapiens
  CDR3 for alpha chain variable domain of TCR clone 387815 (TRAV26-1, TRAJ45)
CIVEKYSGGGAEGLTF

SEQ ID NO: 775630 - protein, 15 aa, Homo sapiens
  CDR3 for beta chain variable domain of TCR clone 387815 (TRBV15, TRBJ2-7)
CHQQRPIQQAYEQYF

SEQ ID NO: 775631 - protein, 15 aa, Homo sapiens
  CDR3 for alpha chain variable domain of TCR clone 387816 (TRAV17, TRAJ3)
CATDGPHSSASKIIF

SEQ ID NO: 775632 - protein, 16 aa, Homo sapiens
  CDR3 for beta chain variable domain of TCR clone 387816 (TRBV12-5, TRBJ2-5)
CASGPRTSGNQETQYF

SEQ ID NO: 775633 - protein, 16 aa, Homo sapiens
  CDR3 for alpha chain variable domain of TCR clone 387817 (TRAV12-3, TRAJ45)
CAMGWGSGGGADGPTF

SEQ ID NO: 775634 - protein, 15 aa, Homo sapiens
  CDR3 for beta chain variable domain of TCR clone 387817 (TRBV3-1, TRBJ1-2)
CASSHPGTPGYGYTF

SEQ ID NO: 775635 - protein, 16 aa, Homo sapiens
  CDR3 for alpha chain variable domain of TCR clone 387818 (TRAV27, TRAJ53)
CAAPEGSGGSNYKLTF

SEQ ID NO: 775636 - protein, 16 aa, Homo sapiens
  CDR3 for beta chain variable domain of TCR clone 387818 (TRBV12-5, TRBJ2-5)
CASGPRTSGNQETQYF

SEQ ID NO: 775637 - protein, 11 aa, Homo sapiens
  CDR3 for alpha chain variable domain of TCR clone 387819 (TRAV2, TRAJ33)
CAVESNYQLIW

SEQ ID NO: 775638 - protein, 12 aa, Homo sapiens
  CDR3 for beta chain variable domain of TCR clone 387819 (TRBV11-2, TRBJ2-2)
CASSLGVGELFF

SEQ ID NO: 775639 - protein, 15 aa, Homo sapiens
  CDR3 for alpha chain variable domain of TCR clone 387820 (TRAV13-1, TRAJ17)
CAASIESAAGNKLTF

SEQ ID NO: 775640 - protein, 12 aa, Homo sapiens
  CDR3 for beta chain variable domain of TCR clone 387820 (TRBV5-7, TRBJ1-1)
CASSLGRGKAVF

SEQ ID NO: 775641 - protein, 15 aa, Homo sapiens
  CDR3 for alpha chain variable domain of TCR clone 387821 (TRAV8-3, TRAJ45)
CASSYSGGGADGLTF

SEQ ID NO: 775642 - protein, 15 aa, Homo sapiens
  CDR3 for beta chain variable domain of TCR clone 387821 (TRBV20-1, TRBJ2-7)
CSARVPAAYFYEQYF

SEQ ID NO: 775643 - protein, 13 aa, Homo sapiens
  CDR3 for alpha chain variable domain of TCR clone 387822 (TRAV21, TRAJ20)
CDVGLRVDYKLSF

SEQ ID NO: 775644 - protein, 21 aa, Homo sapiens
  CDR3 for beta chain variable domain of TCR clone 387822 (TRBV15, TRBJ2-1)
AWGTQPCTCVPPAEVDTARFF

SEQ ID NO: 775645 - protein, 14 aa, Homo sapiens
  CDR3 for alpha chain variable domain of TCR clone 387823 (TRAV1-2, TRAJ8)
CAVREDTGFQNLVF

SEQ ID NO: 775646 - protein, 13 aa, Homo sapiens
  CDR3 for beta chain variable domain of TCR clone 387823 (TRBV27, TRBJ2-7)
CASSVTTGYEQYF

SEQ ID NO: 775647 - protein, 15 aa, Homo sapiens
  CDR3 for alpha chain variable domain of TCR clone 387824 (TRAV21, TRAJ52)
CAVRGGGTSYGKLTF

SEQ ID NO: 775648 - protein, 15 aa, Homo sapiens
  CDR3 for beta chain variable domain of TCR clone 387824 (TRBV4-1, TRBJ1-1)
CASSQEWGHYTEAFS

SEQ ID NO: 775649 - protein, 13 aa, Homo sapiens
  CDR3 for alpha chain variable domain of TCR clone 387825 (TRAV16, TRAJ34)
CALSRYNTDKLIF

SEQ ID NO: 775650 - protein, 13 aa, Homo sapiens
  CDR3 for beta chain variable domain of TCR clone 387825 (TRBV7-2, TRBJ1-1)
CASSSQGVTEAFF

SEQ ID NO: 775651 - protein, 14 aa, Homo sapiens
  CDR3 for alpha chain variable domain of TCR clone 387826 (TRAV9-2, TRAJ39)
CALSIYNAGNMLTF

SEQ ID NO: 775652 - protein, 14 aa, Homo sapiens
  CDR3 for beta chain variable domain of TCR clone 387826 (TRBV25-1, TRBJ1-1)
CASTHLGGNTEAFF

SEQ ID NO: 775653 - protein, 15 aa, Homo sapiens
  CDR3 for alpha chain variable domain of TCR clone 387827 (TRAV8-3, TRAJ45)
CASSYSGGGADGLTF

SEQ ID NO: 775654 - protein, 16 aa, Homo sapiens
  CDR3 for beta chain variable domain of TCR clone 387827 (TRBV7-9, TRBJ2-2)
CASSGFGGANTGGLFF

SEQ ID NO: 775655 - protein, 22 aa, Homo sapiens
  CDR3 for alpha chain variable domain of TCR clone 387828 (TRAV21, )
CAVRKDAGNNHIQNPDPAVYQL

SEQ ID NO: 775656 - protein, 16 aa, Homo sapiens
  CDR3 for beta chain variable domain of TCR clone 387828 (TRBV4-2, TRBJ1-1)
CASRPLDGGGDTEAFF

SEQ ID NO: 775657 - protein, 13 aa, Homo sapiens
  CDR3 for alpha chain variable domain of TCR clone 387829 (TRAV21, TRAJ15)
CAVANQAGTALIF

SEQ ID NO: 775658 - protein, 17 aa, Homo sapiens
  CDR3 for beta chain variable domain of TCR clone 387829 (TRBV20-1, TRBJ2-2)
CSASGSGQGGLTGELFF

SEQ ID NO: 775659 - protein, 14 aa, Homo sapiens
  CDR3 for alpha chain variable domain of TCR clone 387830 (TRAV3, TRAJ9)
CAVRLNTGAFKTIF

SEQ ID NO: 775660 - protein, 14 aa, Homo sapiens
  CDR3 for beta chain variable domain of TCR clone 387830 (TRBV20-1, TRBJ1-1)
CSAQTRIGGTEAFF

SEQ ID NO: 775661 - protein, 12 aa, Homo sapiens
  CDR3 for alpha chain variable domain of TCR clone 387831 (TRAV8-3, TRAJ26)
CAGDNYGQNFVF

SEQ ID NO: 775662 - protein, 18 aa, Homo sapiens
  CDR3 for beta chain variable domain of TCR clone 387831 (TRBV28, TRBJ2-3)
CASSFHRPGPTSTDTQYF

SEQ ID NO: 775663 - protein, 18 aa, Homo sapiens
  CDR3 for alpha chain variable domain of TCR clone 387832 (TRAV13-1, TRAJ52)
CAAENPNAGGTSYGKLTF

SEQ ID NO: 775664 - protein, 14 aa, Homo sapiens
  CDR3 for beta chain variable domain of TCR clone 387832 (TRBV7-8, TRBJ2-3)
CASSLEAGTDTQYF

SEQ ID NO: 775665 - protein, 13 aa, Homo sapiens
  CDR3 for alpha chain variable domain of TCR clone 387833 (TRAV17, TRAJ39)
CATDSNAGNMLTF

SEQ ID NO: 775666 - protein, 17 aa, Homo sapiens
  CDR3 for beta chain variable domain of TCR clone 387833 (TRBV7-8, TRBJ2-6)
CASSAGTGGAGANVLTF

SEQ ID NO: 775667 - protein, 13 aa, Homo sapiens
  CDR3 for alpha chain variable domain of TCR clone 387834 (TRAV12-2, TRAJ7)
CAGLIYGNNRLAF

SEQ ID NO: 775668 - protein, 14 aa, Homo sapiens
  CDR3 for beta chain variable domain of TCR clone 387834 (TRBV25-1, TRBJ1-1)
CASTHLGGNTEAFF

SEQ ID NO: 775669 - protein, 14 aa, Homo sapiens
  CDR3 for alpha chain variable domain of TCR clone 387835 (TRAV35, TRAJ10)
CAGILAGGGNKLTF

SEQ ID NO: 775670 - protein, 18 aa, Homo sapiens
  CDR3 for beta chain variable domain of TCR clone 387835 (TRBV11-2, TRBJ2-3)
CASSLGGASRGAPNTQYF

SEQ ID NO: 775671 - protein, 15 aa, Homo sapiens
  CDR3 for alpha chain variable domain of TCR clone 387836 (TRAV17, TRAJ57)
CATGPSQGGPEKLVF

SEQ ID NO: 775672 - protein, 16 aa, Homo sapiens
  CDR3 for beta chain variable domain of TCR clone 387836 (TRBV12-4, TRBJ1-5)
CASSRPVGGSNQHQHF

SEQ ID NO: 775673 - protein, 14 aa, Homo sapiens
  CDR3 for alpha chain variable domain of TCR clone 387837 (TRAV1-2, TRAJ16)
SAVNRFSDGQKLLF

SEQ ID NO: 775674 - protein, 14 aa, Homo sapiens
  CDR3 for beta chain variable domain of TCR clone 387837 (TRBV13, TRBJ2-5)
CASSLGRGQETQYF

SEQ ID NO: 775675 - protein, 13 aa, Homo sapiens
  CDR3 for alpha chain variable domain of TCR clone 387838 (TRAV21, TRAJ20)
CAVGLRVDYKLSF

SEQ ID NO: 775676 - protein, 12 aa, Homo sapiens
  CDR3 for beta chain variable domain of TCR clone 387838 (TRBV11-2, TRBJ2-2)
CAVPRNTGELFF

SEQ ID NO: 775677 - protein, 17 aa, Homo sapiens
  CDR3 for alpha chain variable domain of TCR clone 387839 (TRAV3, TRAJ38)
CAVRDCLNAGNNRKLIW

SEQ ID NO: 775678 - protein, 12 aa, Homo sapiens
  CDR3 for beta chain variable domain of TCR clone 387839 (TRBV19, TRBJ2-1)
CASSRQGAEQFF

SEQ ID NO: 775679 - protein, 14 aa, Homo sapiens
  CDR3 for alpha chain variable domain of TCR clone 387840 (TRAV1-2, TRAJ8)
CAVREDTGFQKLVF

SEQ ID NO: 775680 - protein, 12 aa, Homo sapiens
  CDR3 for beta chain variable domain of TCR clone 387840 (TRBV20-1, TRBJ2-3)
CSARVGTDTQYF

SEQ ID NO: 775681 - protein, 12 aa, Homo sapiens
  CDR3 for alpha chain variable domain of TCR clone 387841 (TRAV12-3, TRAJ20)
CAMVRGDYELSF

SEQ ID NO: 775682 - protein, 13 aa, Homo sapiens
  CDR3 for beta chain variable domain of TCR clone 387841 (TRBV7-9, TRBJ1-2)
CASSLKQNYGYTF

SEQ ID NO: 775683 - protein, 14 aa, Homo sapiens
  CDR3 for alpha chain variable domain of TCR clone 387842 (TRAV8-3, TRAJ4)
CAVGASGGYNKLIF

SEQ ID NO: 775684 - protein, 15 aa, Homo sapiens
  CDR3 for beta chain variable domain of TCR clone 387842 (TRBV2, TRBJ2-7)
CASSEGLARSYEQYF

SEQ ID NO: 775685 - protein, 11 aa, Homo sapiens
  CDR3 for alpha chain variable domain of TCR clone 387843 (TRAV3, TRAJ21)
CAVGNFTKFYF

SEQ ID NO: 775686 - protein, 16 aa, Homo sapiens
  CDR3 for beta chain variable domain of TCR clone 387843 (TRBV19, TRBJ2-1)
CASSKAGPSSYDEQFF

SEQ ID NO: 775687 - protein, 12 aa, Homo sapiens
  CDR3 for alpha chain variable domain of TCR clone 387844 (TRAV17, TRAJ20)
CATDSNDYKLSF

SEQ ID NO: 775688 - protein, 16 aa, Homo sapiens
  CDR3 for beta chain variable domain of TCR clone 387844 (TRBV20-1, TRBJ1-4)
CSAPGQGLLTNEKLFF

SEQ ID NO: 775689 - protein, 14 aa, Homo sapiens
  CDR3 for alpha chain variable domain of TCR clone 387845 (TRAV26-1, TRAJ34)
FIVRVAYNTDKLIF

SEQ ID NO: 775690 - protein, 16 aa, Homo sapiens
  CDR3 for beta chain variable domain of TCR clone 387845 (TRBV2, TRBJ2-3)
CASSTSVEGVTDTQYF

SEQ ID NO: 775691 - protein, 14 aa, Homo sapiens
  CDR3 for alpha chain variable domain of TCR clone 387846 (TRAV29/DV5, TRAJ36)
CAARRKTGANNLFF

SEQ ID NO: 775692 - protein, 17 aa, Homo sapiens
  CDR3 for beta chain variable domain of TCR clone 387846 (TRBV11-3, TRBJ2-3)
CASSPGSSGGRTDTQYF

SEQ ID NO: 775693 - protein, 11 aa, Homo sapiens
  CDR3 for alpha chain variable domain of TCR clone 387847 (TRAV21, TRAJ39)
LLLNAGNMLTF

SEQ ID NO: 775694 - protein, 15 aa, Homo sapiens
  CDR3 for beta chain variable domain of TCR clone 387847 (TRBV29-1, TRBJ2-1)
CSGRDRKSSYNEQFF

SEQ ID NO: 775695 - protein, 16 aa, Homo sapiens
  CDR3 for alpha chain variable domain of TCR clone 387848 (TRAV23/DV6, TRAJ48)
CAASGVVNFGNEKLNL

SEQ ID NO: 775696 - protein, 15 aa, Homo sapiens
  CDR3 for beta chain variable domain of TCR clone 387848 (TRBV7-9, TRBJ2-1)
CASSLGWGRANEQFF

SEQ ID NO: 775697 - protein, 15 aa, Homo sapiens
  CDR3 for alpha chain variable domain of TCR clone 387849 (TRAV38-2/DV8, TRAJ57)
CASARAQGGSEKLVF

SEQ ID NO: 775698 - protein, 17 aa, Homo sapiens
  CDR3 for beta chain variable domain of TCR clone 387849 (TRBV18, TRBJ1-5)
CASSPAMGQGTNQPQHF

SEQ ID NO: 775699 - protein, 14 aa, Homo sapiens
  CDR3 for alpha chain variable domain of TCR clone 387850 (TRAV26-1, TRAJ48)
CIVRVGFGNEKLTF

SEQ ID NO: 775700 - protein, 14 aa, Homo sapiens
  CDR3 for beta chain variable domain of TCR clone 387850 (TRBV19, TRBJ2-1)
CASPTFVFSGEQFF

SEQ ID NO: 775701 - protein, 16 aa, Homo sapiens
  CDR3 for alpha chain variable domain of TCR clone 387851 (TRAV21, )
CAVRQDAGNNHIQNPD

SEQ ID NO: 775702 - protein, 16 aa, Homo sapiens
  CDR3 for beta chain variable domain of TCR clone 387851 (TRBV4-2, TRBJ1-1)
CAGRPLDGGGDTEAFF

SEQ ID NO: 775703 - protein, 14 aa, Homo sapiens
  CDR3 for alpha chain variable domain of TCR clone 387852 (TRAV1-1, TRAJ23)
CAVSIYNQGGKLIF

SEQ ID NO: 775704 - protein, 15 aa, Homo sapiens
  CDR3 for beta chain variable domain of TCR clone 387852 (TRBV5-8, TRBJ2-2)
CASSLDRGATGELFF

SEQ ID NO: 775705 - protein, 13 aa, Homo sapiens
  CDR3 for alpha chain variable domain of TCR clone 387853 (TRAV3, TRAJ20)
CCEAFCNDYKLSF

SEQ ID NO: 775706 - protein, 14 aa, Homo sapiens
  CDR3 for beta chain variable domain of TCR clone 387853 (TRBV4-2, TRBJ2-1)
CASGLDRAYNEQFF

SEQ ID NO: 775707 - protein, 15 aa, Homo sapiens
  CDR3 for alpha chain variable domain of TCR clone 387854 (TRAV8-4, TRAJ47)
CAVSDPVEYGNKLVF

SEQ ID NO: 775708 - protein, 15 aa, Homo sapiens
  CDR3 for beta chain variable domain of TCR clone 387854 (TRBV11-2, TRBJ2-1)
CASSLGPDSYNEQFF

SEQ ID NO: 775709 - protein, 15 aa, Homo sapiens
  CDR3 for alpha chain variable domain of TCR clone 387855 (TRAV4, TRAJ39)
CLAGPNNNAGNMLTF

SEQ ID NO: 775710 - protein, 14 aa, Homo sapiens
  CDR3 for beta chain variable domain of TCR clone 387855 (TRBV11-2, TRBJ2-5)
CASSRTGGIETQYF

SEQ ID NO: 775711 - protein, 16 aa, Homo sapiens
  CDR3 for alpha chain variable domain of TCR clone 387856 (TRAV8-4, TRAJ27)
CAVKEGGFTNAGKSTF

SEQ ID NO: 775712 - protein, 17 aa, Homo sapiens
  CDR3 for beta chain variable domain of TCR clone 387856 (TRBV11-2, TRBJ2-1)
CASSLYPPGVEYNEQFF

SEQ ID NO: 775713 - protein, 14 aa, Homo sapiens
  CDR3 for alpha chain variable domain of TCR clone 387857 (TRAV1-2, TRAJ4)
CALRSPGGYNKLIF

SEQ ID NO: 775714 - protein, 16 aa, Homo sapiens
  CDR3 for beta chain variable domain of TCR clone 387857 (TRBV20-1, TRBJ2-3)
CSAASGRGVSTDTQYF

SEQ ID NO: 775715 - protein, 21 aa, Homo sapiens
  CDR3 for alpha chain variable domain of TCR clone 387858 (TRAV26-1, TRAJ38)
CIADNAGNNHIQNPDPAVYQL

SEQ ID NO: 775716 - protein, 13 aa, Homo sapiens
  CDR3 for beta chain variable domain of TCR clone 387858 (TRBV20-1, TRBJ1-1)
CSARGGGDTEAFF

SEQ ID NO: 775717 - protein, 13 aa, Homo sapiens
  CDR3 for alpha chain variable domain of TCR clone 387859 (TRAV2, TRAJ40)
CSVVTSGTYKYIF

SEQ ID NO: 775718 - protein, 16 aa, Homo sapiens
  CDR3 for beta chain variable domain of TCR clone 387859 (TRBV27, TRBJ2-7)
CASSSERRDSAYEQYF

SEQ ID NO: 775719 - protein, 17 aa, Homo sapiens
  CDR3 for alpha chain variable domain of TCR clone 387860 (TRAV3, TRAJ42)
CAVRDRDYGGRQGNLIF

SEQ ID NO: 775720 - protein, 13 aa, Homo sapiens
  CDR3 for beta chain variable domain of TCR clone 387860 (TRBV20-1, TRBJ2-5)
CSARRGTGATQYF

SEQ ID NO: 775721 - protein, 14 aa, Homo sapiens
  CDR3 for alpha chain variable domain of TCR clone 387861 (TRAV26-2, TRAJ27)
CILRDISDAGKSTF

SEQ ID NO: 775722 - protein, 15 aa, Homo sapiens
  CDR3 for beta chain variable domain of TCR clone 387861 (TRBV10-3, TRBJ2-7)
CATREQGLRSYEKYF

SEQ ID NO: 775723 - protein, 15 aa, Homo sapiens
  CDR3 for alpha chain variable domain of TCR clone 387862 (TRAV8-3, TRAJ11)
CAVGLLNSGYSTLTF

SEQ ID NO: 775724 - protein, 13 aa, Homo sapiens
  CDR3 for beta chain variable domain of TCR clone 387862 (TRBV6-1, TRBJ1-1)
CASSRQGNTEAFF

SEQ ID NO: 775725 - protein, 16 aa, Homo sapiens
  CDR3 for alpha chain variable domain of TCR clone 387863 (TRAV14/DV4, TRAJ54)
CAMREGRLQGAQKLVF

SEQ ID NO: 775726 - protein, 18 aa, Homo sapiens
  CDR3 for beta chain variable domain of TCR clone 387863 (TRBV18, TRBJ1-3)
CASSPRGGAGPSGNTIYF

SEQ ID NO: 775727 - protein, 17 aa, Homo sapiens
  CDR3 for alpha chain variable domain of TCR clone 387864 (TRAV3, TRAJ6)
CAVRDGPRAGGSYIPTF

SEQ ID NO: 775728 - protein, 14 aa, Homo sapiens
  CDR3 for beta chain variable domain of TCR clone 387864 (TRBV11-2, TRBJ2-3)
CASSRLARTDTQYV

SEQ ID NO: 775729 - protein, 11 aa, Homo sapiens
  CDR3 for alpha chain variable domain of TCR clone 387865 (TRAV3, TRAJ21)
CAVGNFNKFYF

SEQ ID NO: 775730 - protein, 16 aa, Homo sapiens
  CDR3 for beta chain variable domain of TCR clone 387865 (TRBV19, TRBJ2-1)
CANSNAGPSSYNEQFF

SEQ ID NO: 775731 - protein, 16 aa, Homo sapiens
  CDR3 for alpha chain variable domain of TCR clone 387866 (TRAV30, TRAJ24)
CGTEIVDADSWGKFQF

SEQ ID NO: 775732 - protein, 14 aa, Homo sapiens
  CDR3 for beta chain variable domain of TCR clone 387866 (TRBV7-9, TRBJ1-1)
CASSLGGANTEAFF

SEQ ID NO: 775733 - protein, 15 aa, Homo sapiens
  CDR3 for alpha chain variable domain of TCR clone 387867 (TRAV17, TRAJ37)
CATDGGSSNTGKLIF

SEQ ID NO: 775734 - protein, 15 aa, Homo sapiens
  CDR3 for beta chain variable domain of TCR clone 387867 (TRBV28, TRBJ2-5)
CASSSGRTIQETQFF

SEQ ID NO: 775735 - protein, 10 aa, Homo sapiens
  CDR3 for alpha chain variable domain of TCR clone 387868 (TRAV30, TRAJ24)
CGTELVMLTA

SEQ ID NO: 775736 - protein, 14 aa, Homo sapiens
  CDR3 for beta chain variable domain of TCR clone 387868 (TRBV12-5, TRBJ2-5)
CASGSRTHQETQYF

SEQ ID NO: 775737 - protein, 16 aa, Homo sapiens
  CDR3 for alpha chain variable domain of TCR clone 387869 (TRAV12-1, TRAJ48)
CVVNMVSNCGNEKLTF

SEQ ID NO: 775738 - protein, 18 aa, Homo sapiens
  CDR3 for beta chain variable domain of TCR clone 387869 (TRBV11-2, TRBJ2-6)
CASSLNPFLGTGANVLTF

SEQ ID NO: 775739 - protein, 16 aa, Homo sapiens
  CDR3 for alpha chain variable domain of TCR clone 387870 (TRAV3, TRAJ13)
CAVRDLRSGGYQKVTF

SEQ ID NO: 775740 - protein, 12 aa, Homo sapiens
  CDR3 for beta chain variable domain of TCR clone 387870 (TRBV7-9, TRBJ2-7)
CASSIKREEQYF

SEQ ID NO: 775741 - protein, 11 aa, Homo sapiens
  CDR3 for alpha chain variable domain of TCR clone 387871 (TRAV30, TRAJ23)
CGTEIAGRLIF

SEQ ID NO: 775742 - protein, 15 aa, Homo sapiens
  CDR3 for beta chain variable domain of TCR clone 387871 (TRBV7-2, TRBJ1-2)
CASSPRAGWNYGYTF

SEQ ID NO: 775743 - protein, 16 aa, Homo sapiens
  CDR3 for alpha chain variable domain of TCR clone 387872 (TRAV17, TRAJ53)
CDTDALSGGSNYKLTF

SEQ ID NO: 775744 - protein, 12 aa, Homo sapiens
  CDR3 for beta chain variable domain of TCR clone 387872 (TRBV5-1, TRBJ2-7)
CASSFRGYEQYF

SEQ ID NO: 775745 - protein, 12 aa, Homo sapiens
  CDR3 for alpha chain variable domain of TCR clone 387873 (TRAV13-2, TRAJ8)
CAPWLGFQKLVF

SEQ ID NO: 775746 - protein, 14 aa, Homo sapiens
  CDR3 for beta chain variable domain of TCR clone 387873 (TRBV19, TRBJ2-3)
CASSVGRGSDTQYF

SEQ ID NO: 775747 - protein, 15 aa, Homo sapiens
  CDR3 for alpha chain variable domain of TCR clone 387874 (TRAV35, TRAJ40)
CAGQLGTSGTYKYIF

SEQ ID NO: 775748 - protein, 13 aa, Homo sapiens
  CDR3 for beta chain variable domain of TCR clone 387874 (TRBV23-1, TRBJ2-7)
PASSTGTGLEQYF

SEQ ID NO: 775749 - protein, 12 aa, Homo sapiens
  CDR3 for alpha chain variable domain of TCR clone 387875 (TRAV8-3, TRAJ26)
CAGDNYGQNFVF

SEQ ID NO: 775750 - protein, 12 aa, Homo sapiens
  CDR3 for beta chain variable domain of TCR clone 387875 (TRBV28, TRBJ2-6)
CAIQAGANVLTF

SEQ ID NO: 775751 - protein, 14 aa, Homo sapiens
  CDR3 for alpha chain variable domain of TCR clone 387876 (TRAV12-2, TRAJ13)
CAVKKTGGYQKGTF

SEQ ID NO: 775752 - protein, 17 aa, Homo sapiens
  CDR3 for beta chain variable domain of TCR clone 387876 (TRBV15, TRBJ2-4)
CATSRDNPQTGLDIQYF

SEQ ID NO: 775753 - protein, 12 aa, Homo sapiens
  CDR3 for alpha chain variable domain of TCR clone 387877 (TRAV12-2, TRAJ49)
CAVLNTGNQFYF

SEQ ID NO: 775754 - protein, 14 aa, Homo sapiens
  CDR3 for beta chain variable domain of TCR clone 387877 (TRBV19, TRBJ2-1)
CASPTFVLSGEQFF

SEQ ID NO: 775755 - protein, 11 aa, Homo sapiens
  CDR3 for alpha chain variable domain of TCR clone 387878 (TRAV27, TRAJ57)
CRRNDRGELVF

SEQ ID NO: 775756 - protein, 17 aa, Homo sapiens
  CDR3 for beta chain variable domain of TCR clone 387878 (TRBV20-1, TRBJ2-2)
CSASGSGQGGLTGELFF

SEQ ID NO: 775757 - protein, 13 aa, Homo sapiens
  CDR3 for alpha chain variable domain of TCR clone 387879 (TRAV8-6, TRAJ16)
CAVSSPDCQKLLF

SEQ ID NO: 775758 - protein, 16 aa, Homo sapiens
  CDR3 for beta chain variable domain of TCR clone 387879 (TRBV5-6, TRBJ2-3)
CASSSLGGAITDTQYF

SEQ ID NO: 775759 - protein, 11 aa, Homo sapiens
  CDR3 for alpha chain variable domain of TCR clone 387880 (TRAV23/DV6, TRAJ58)
CSARLLRGETS

SEQ ID NO: 775760 - protein, 13 aa, Homo sapiens
  CDR3 for beta chain variable domain of TCR clone 387880 (TRBV6-4, TRBJ1-5)
CASSADLNQPQHF

SEQ ID NO: 775761 - protein, 12 aa, Homo sapiens
  CDR3 for alpha chain variable domain of TCR clone 387881 (TRAV1-1, TRAJ9)
CAVDTGGFKTIF

SEQ ID NO: 775762 - protein, 14 aa, Homo sapiens
  CDR3 for beta chain variable domain of TCR clone 387881 (TRBV7-8, TRBJ2-5)
CASSATGGKKTQYF

SEQ ID NO: 775763 - protein, 12 aa, Homo sapiens
  CDR3 for alpha chain variable domain of TCR clone 387882 (TRAV1-2, TRAJ30)
CVAGGSPGKLIF

SEQ ID NO: 775764 - protein, 14 aa, Homo sapiens
  CDR3 for beta chain variable domain of TCR clone 387882 (TRBV5-4, TRBJ2-5)
CASSLVRGQETQYF

SEQ ID NO: 775765 - protein, 15 aa, Homo sapiens
  CDR3 for alpha chain variable domain of TCR clone 387883 (TRAV17, TRAJ34)
CVTDPRMVDTDKLIF

SEQ ID NO: 775766 - protein, 12 aa, Homo sapiens
  CDR3 for beta chain variable domain of TCR clone 387883 (TRBV10-2, TRBJ2-3)
CASSEGPGPRYF

SEQ ID NO: 775767 - protein, 14 aa, Homo sapiens
  CDR3 for alpha chain variable domain of TCR clone 387884 (TRAV3, TRAJ7)
CAAREEEREQQTRF

SEQ ID NO: 775768 - protein, 12 aa, Homo sapiens
  CDR3 for beta chain variable domain of TCR clone 387884 (TRBV7-8, TRBJ2-7)
CASSRGDREQYF

SEQ ID NO: 775769 - protein, 13 aa, Homo sapiens
  CDR3 for alpha chain variable domain of TCR clone 387885 (TRAV35, TRAJ57)
CAGSQGGSEELVF

SEQ ID NO: 775770 - protein, 15 aa, Homo sapiens
  CDR3 for beta chain variable domain of TCR clone 387885 (TRBV20-1, TRBJ2-7)
CSARDRVSGMDEQYF

SEQ ID NO: 775771 - protein, 14 aa, Homo sapiens
  CDR3 for alpha chain variable domain of TCR clone 387886 (TRAV12-1, TRAJ9)
CVVNRRTGGFKTIF

SEQ ID NO: 775772 - protein, 14 aa, Homo sapiens
  CDR3 for beta chain variable domain of TCR clone 387886 (TRBV12-5, TRBJ2-5)
CASGSRTHQETQYF

SEQ ID NO: 775773 - protein, 11 aa, Homo sapiens
  CDR3 for alpha chain variable domain of TCR clone 387887 (TRAV25, TRAJ49)
CAGGTGNQFYF

SEQ ID NO: 775774 - protein, 14 aa, Homo sapiens
  CDR3 for beta chain variable domain of TCR clone 387887 (TRBV19, TRBJ2-1)
CASPTFVLSGEQFF

SEQ ID NO: 775775 - protein, 15 aa, Homo sapiens
  CDR3 for alpha chain variable domain of TCR clone 387888 (TRAV21, TRAJ53)
CATLNSGCSNYKLTF

SEQ ID NO: 775776 - protein, 15 aa, Homo sapiens
  CDR3 for beta chain variable domain of TCR clone 387888 (TRBV7-9, TRBJ1-5)
CASSQGHQPNQPQHF

SEQ ID NO: 775777 - protein, 13 aa, Homo sapiens
  CDR3 for alpha chain variable domain of TCR clone 387889 (TRAV13-1, TRAJ5)
CAASDTGRRALTF

SEQ ID NO: 775778 - protein, 12 aa, Homo sapiens
  CDR3 for beta chain variable domain of TCR clone 387889 (TRBV28, TRBJ2-3)
CPSSLYRDTQYF

SEQ ID NO: 775779 - protein, 15 aa, Homo sapiens
  CDR3 for alpha chain variable domain of TCR clone 387890 (TRAV3, TRAJ22)
CAVRDRGGSARQLTL

SEQ ID NO: 775780 - protein, 14 aa, Homo sapiens
  CDR3 for beta chain variable domain of TCR clone 387890 (TRBV7-6, TRBJ2-3)
CASSLGTVTDTQYF

SEQ ID NO: 775781 - protein, 14 aa, Homo sapiens
  CDR3 for alpha chain variable domain of TCR clone 387891 (TRAV16, TRAJ42)
CALLAGGSQGNLIF

SEQ ID NO: 775782 - protein, 16 aa, Homo sapiens
  CDR3 for beta chain variable domain of TCR clone 387891 (TRBV20-1, TRBJ2-1)
CSARDLKQGMNNEQFF

SEQ ID NO: 775783 - protein, 15 aa, Homo sapiens
  CDR3 for alpha chain variable domain of TCR clone 387892 (TRAV12-2, TRAJ43)
CAFDMRFGAGTRLTV

SEQ ID NO: 775784 - protein, 13 aa, Homo sapiens
  CDR3 for beta chain variable domain of TCR clone 387892 (TRBV4-2, TRBJ1-1)
CASSQAGKTEAFF

SEQ ID NO: 775785 - protein, 14 aa, Homo sapiens
  CDR3 for alpha chain variable domain of TCR clone 387893 (TRAV8-3, TRAJ11)
CCGLLNSGYSTLTF

SEQ ID NO: 775786 - protein, 23 aa, Homo sapiens
  CDR3 for beta chain variable domain of TCR clone 387893 (TRBV7-9, TRBJ1-2)
EAQLEKSRLLSDRFSSGEDGYTF

SEQ ID NO: 775787 - protein, 14 aa, Homo sapiens
  CDR3 for alpha chain variable domain of TCR clone 387894 (TRAV12-3, TRAJ10)
SHLPLTGGGNKLTF

SEQ ID NO: 775788 - protein, 12 aa, Homo sapiens
  CDR3 for beta chain variable domain of TCR clone 387894 (TRBV3-1, TRBJ2-2)
CASSRVTGELFF

SEQ ID NO: 775789 - protein, 15 aa, Homo sapiens
  CDR3 for alpha chain variable domain of TCR clone 387895 (TRAV30, TRAJ57)
CGTAIPQGGSEKLVF

SEQ ID NO: 775790 - protein, 17 aa, Homo sapiens
  CDR3 for beta chain variable domain of TCR clone 387895 (TRBV11-2, TRBJ2-1)
CASSLYPTGVEYNEQFF

SEQ ID NO: 775791 - protein, 15 aa, Homo sapiens
  CDR3 for alpha chain variable domain of TCR clone 387896 (TRAV17, TRAJ57)
CATGPSQGGSEKLVF

SEQ ID NO: 775792 - protein, 11 aa, Homo sapiens
  CDR3 for beta chain variable domain of TCR clone 387896 (TRBV11-2, TRBJ2-2)
CASSLPEELFF

SEQ ID NO: 775793 - protein, 16 aa, Homo sapiens
  CDR3 for alpha chain variable domain of TCR clone 387897 (TRAV3, TRAJ10)
CAVRDMRAGGGNKLTF

SEQ ID NO: 775794 - protein, 20 aa, Homo sapiens
  CDR3 for beta chain variable domain of TCR clone 387897 (TRBV11-3, TRBJ2-7)
CASSQRTSGSLKAVHRAGHQ

SEQ ID NO: 775795 - protein, 15 aa, Homo sapiens
  CDR3 for alpha chain variable domain of TCR clone 387898 (TRAV3, TRAJ17)
CAVSPKEAAGNKLTF

SEQ ID NO: 775796 - protein, 14 aa, Homo sapiens
  CDR3 for beta chain variable domain of TCR clone 387898 (TRBV28, TRBJ1-5)
CASIPYGLEQPQHF

SEQ ID NO: 775797 - protein, 13 aa, Homo sapiens
  CDR3 for alpha chain variable domain of TCR clone 387899 (TRAV12-2, TRAJ20)
CAVYPSNDYKLSF

SEQ ID NO: 775798 - protein, 14 aa, Homo sapiens
  CDR3 for beta chain variable domain of TCR clone 387899 (TRBV13, TRBJ2-5)
CASSLERVGETQYF

SEQ ID NO: 775799 - protein, 14 aa, Homo sapiens
  CDR3 for alpha chain variable domain of TCR clone 387900 (TRAV12-3, TRAJ29)
CAMSVYSGNTPLVF

SEQ ID NO: 775800 - protein, 15 aa, Homo sapiens
  CDR3 for beta chain variable domain of TCR clone 387900 (TRBV5-1, TRBJ2-3)
CASSPGGARTDTQYF

SEQ ID NO: 775801 - protein, 16 aa, Homo sapiens
  CDR3 for alpha chain variable domain of TCR clone 387901 (TRAV3, TRAJ37)
CAVSGKGSGNTGKLIF

SEQ ID NO: 775802 - protein, 15 aa, Homo sapiens
  CDR3 for beta chain variable domain of TCR clone 387901 (TRBV20-1, TRBJ2-1)
CSARGGTRYYNEQFF

SEQ ID NO: 775803 - protein, 12 aa, Homo sapiens
  CDR3 for alpha chain variable domain of TCR clone 387902 (TRAV12-3, TRAJ20)
CAMVRGDYKLSF

SEQ ID NO: 775804 - protein, 13 aa, Homo sapiens
  CDR3 for beta chain variable domain of TCR clone 387902 (TRBV4-1, TRBJ2-1)
CASSQEVQYEQFF

SEQ ID NO: 775805 - protein, 11 aa, Homo sapiens
  CDR3 for alpha chain variable domain of TCR clone 387903 (TRAV12-2, TRAJ31)
CAILNNARLML

SEQ ID NO: 775806 - protein, 16 aa, Homo sapiens
  CDR3 for beta chain variable domain of TCR clone 387903 (TRBV13, TRBJ2-2)
CASSPRTGEHTGELFF

SEQ ID NO: 775807 - protein, 14 aa, Homo sapiens
  CDR3 for alpha chain variable domain of TCR clone 387904 (TRAV12-2, TRAJ13)
GAVKKTGGYQKVTF

SEQ ID NO: 775808 - protein, 15 aa, Homo sapiens
  CDR3 for beta chain variable domain of TCR clone 387904 (TRBV27, TRBJ2-1)
CASSNGGGSSNEQLF

SEQ ID NO: 775809 - protein, 14 aa, Homo sapiens
  CDR3 for alpha chain variable domain of TCR clone 387905 (TRAV13-1, TRAJ42)
CAALAGGSQGNLIF

SEQ ID NO: 775810 - protein, 14 aa, Homo sapiens
  CDR3 for beta chain variable domain of TCR clone 387905 (TRBV6-1, TRBJ1-3)
CASVQGGGGNTIYF

SEQ ID NO: 775811 - protein, 13 aa, Homo sapiens
  CDR3 for alpha chain variable domain of TCR clone 387906 (TRAV3, TRAJ27)
CAVRPLGAGKSTF

SEQ ID NO: 775812 - protein, 14 aa, Homo sapiens
  CDR3 for beta chain variable domain of TCR clone 387906 (TRBV9, TRBJ2-2)
CASSPHPDTGELFF

SEQ ID NO: 775813 - protein, 14 aa, Homo sapiens
  CDR3 for alpha chain variable domain of TCR clone 387907 (TRAV38-1, TRAJ45)
CAYYSGGGADGLTF

SEQ ID NO: 775814 - protein, 11 aa, Homo sapiens
  CDR3 for beta chain variable domain of TCR clone 387907 (TRBV6-5, TRBJ2-2)
CASSRTGELFF

SEQ ID NO: 775815 - protein, 13 aa, Homo sapiens
  CDR3 for alpha chain variable domain of TCR clone 387908 (TRAV12-2, TRAJ30)
CAVNLNRDDKIIF

SEQ ID NO: 775816 - protein, 14 aa, Homo sapiens
  CDR3 for beta chain variable domain of TCR clone 387908 (TRBV20-1, TRBJ2-3)
CSASSGGSTHTQYF

SEQ ID NO: 775817 - protein, 14 aa, Homo sapiens
  CDR3 for alpha chain variable domain of TCR clone 387909 (TRAV1-2, TRAJ8)
CAVREDTGFQKLVF

SEQ ID NO: 775818 - protein, 13 aa, Homo sapiens
  CDR3 for beta chain variable domain of TCR clone 387909 (TRBV7-2, TRBJ1-6)
CASSLKFDSPLHF

SEQ ID NO: 775819 - protein, 16 aa, Homo sapiens
  CDR3 for alpha chain variable domain of TCR clone 387910 (TRAV3, TRAJ21)
CAVRDIERGNFKKFCF

SEQ ID NO: 775820 - protein, 13 aa, Homo sapiens
  CDR3 for beta chain variable domain of TCR clone 387910 (TRBV27, TRBJ2-7)
CASSLTTGYEQYF

SEQ ID NO: 775821 - protein, 13 aa, Homo sapiens
  CDR3 for alpha chain variable domain of TCR clone 387911 (TRAV12-3, TRAJ13)
CAMTSGGYQNVTF

SEQ ID NO: 775822 - protein, 13 aa, Homo sapiens
  CDR3 for beta chain variable domain of TCR clone 387911 (TRBV20-1, TRBJ2-2)
CSALSGGAGELFF

SEQ ID NO: 775823 - protein, 14 aa, Homo sapiens
  CDR3 for alpha chain variable domain of TCR clone 387912 (TRAV16, TRAJ3)
CALSQFSSASKIIF

SEQ ID NO: 775824 - protein, 14 aa, Homo sapiens
  CDR3 for beta chain variable domain of TCR clone 387912 (TRBV6-3, TRBJ2-1)
CASLHSAYYNEQFF

SEQ ID NO: 775825 - protein, 11 aa, Homo sapiens
  CDR3 for alpha chain variable domain of TCR clone 387913 (TRAV21, TRAJ9)
CAVPGGLKTIF

SEQ ID NO: 775826 - protein, 12 aa, Homo sapiens
  CDR3 for beta chain variable domain of TCR clone 387913 (TRBV20-1, TRBJ2-3)
CSARVGTDTQYF

SEQ ID NO: 775827 - protein, 14 aa, Homo sapiens
  CDR3 for alpha chain variable domain of TCR clone 387914 (TRAV12-3, TRAJ10)
SHLPLTGGGNKLTF

SEQ ID NO: 775828 - protein, 15 aa, Homo sapiens
  CDR3 for beta chain variable domain of TCR clone 387914 (TRBV27, TRBJ1-5)
CASSLGTGFDQLQHF

SEQ ID NO: 775829 - protein, 14 aa, Homo sapiens
  CDR3 for alpha chain variable domain of TCR clone 387915 (TRAV21, TRAJ45)
CAVSSGGGADGLTF

SEQ ID NO: 775830 - protein, 15 aa, Homo sapiens
  CDR3 for beta chain variable domain of TCR clone 387915 (TRBV9, TRBJ2-1)
CASSLAGSSYNEQFF

SEQ ID NO: 775831 - protein, 14 aa, Homo sapiens
  CDR3 for alpha chain variable domain of TCR clone 387916 (TRAV4, TRAJ26)
CLVGGDNYGQNFVF

SEQ ID NO: 775832 - protein, 17 aa, Homo sapiens
  CDR3 for beta chain variable domain of TCR clone 387916 (TRBV28, TRBJ2-5)
CASSTPEGDALQETQYF

SEQ ID NO: 775833 - protein, 12 aa, Homo sapiens
  CDR3 for alpha chain variable domain of TCR clone 387917 (TRAV8-3, TRAJ20)
CAVGGGDYKLSF

SEQ ID NO: 775834 - protein, 14 aa, Homo sapiens
  CDR3 for beta chain variable domain of TCR clone 387917 (TRBV28, TRBJ2-1)
CASSIQGTVGEQFF

SEQ ID NO: 775835 - protein, 14 aa, Homo sapiens
  CDR3 for alpha chain variable domain of TCR clone 387918 (TRAV8-4, TRAJ48)
CAVSETFGNEKLTF

SEQ ID NO: 775836 - protein, 14 aa, Homo sapiens
  CDR3 for beta chain variable domain of TCR clone 387918 (TRBV12-5, TRBJ2-5)
CASGSRTHQETQYF

SEQ ID NO: 775837 - protein, 10 aa, Homo sapiens
  CDR3 for alpha chain variable domain of TCR clone 387919 (TRAV1-2, TRAJ23)
CAAWAGKLIF

SEQ ID NO: 775838 - protein, 14 aa, Homo sapiens
  CDR3 for beta chain variable domain of TCR clone 387919 (TRBV20-1, TRBJ2-7)
RSAKTGTGGYEQYF

SEQ ID NO: 775839 - protein, 12 aa, Homo sapiens
  CDR3 for alpha chain variable domain of TCR clone 387920 (TRAV16, TRAJ9)
CALRAGGFTTIF

SEQ ID NO: 775840 - protein, 13 aa, Homo sapiens
  CDR3 for beta chain variable domain of TCR clone 387920 (TRBV4-3, TRBJ1-1)
CASSQVEGSMAFF

SEQ ID NO: 775841 - protein, 15 aa, Homo sapiens
  CDR3 for alpha chain variable domain of TCR clone 387921 (TRAV21, TRAJ45)
CAVSYSGGGADGLTF

SEQ ID NO: 775842 - protein, 14 aa, Homo sapiens
  CDR3 for beta chain variable domain of TCR clone 387921 (TRBV7-2, TRBJ1-1)
CASSFLTGTTEAFF

SEQ ID NO: 775843 - protein, 12 aa, Homo sapiens
  CDR3 for alpha chain variable domain of TCR clone 387922 (TRAV1-2, TRAJ33)
CAALDSNYQLIW

SEQ ID NO: 775844 - protein, 13 aa, Homo sapiens
  CDR3 for beta chain variable domain of TCR clone 387922 (TRBV19, TRBJ2-7)
CASRKAGGSKQYF

SEQ ID NO: 775845 - protein, 15 aa, Homo sapiens
  CDR3 for alpha chain variable domain of TCR clone 387923 (TRAV17, TRAJ37)
CATDGGSSNTGKLIF

SEQ ID NO: 775846 - protein, 15 aa, Homo sapiens
  CDR3 for beta chain variable domain of TCR clone 387923 (TRBV28, TRBJ2-5)
CASGSGRTIQETQYF

SEQ ID NO: 775847 - protein, 12 aa, Homo sapiens
  CDR3 for alpha chain variable domain of TCR clone 387924 (TRAV12-3, TRAJ40)
CAMSSGTYKYIF

SEQ ID NO: 775848 - protein, 15 aa, Homo sapiens
  CDR3 for beta chain variable domain of TCR clone 387924 (TRBV7-3, TRBJ2-2)
CASSETGQGNGELFF

SEQ ID NO: 775849 - protein, 14 aa, Homo sapiens
  CDR3 for alpha chain variable domain of TCR clone 387925 (TRAV13-2, TRAJ42)
CGEWVGGSQGNLIF

SEQ ID NO: 775850 - protein, 11 aa, Homo sapiens
  CDR3 for beta chain variable domain of TCR clone 387925 (TRBV29-1, TRBJ2-5)
CSEDRTGTQYF

SEQ ID NO: 775851 - protein, 14 aa, Homo sapiens
  CDR3 for alpha chain variable domain of TCR clone 387926 (TRAV20, TRAJ32)
CCGRYGGATNKLIF

SEQ ID NO: 775852 - protein, 16 aa, Homo sapiens
  CDR3 for beta chain variable domain of TCR clone 387926 (TRBV19, TRBJ2-2)
CASRSPGTGATLELFF

SEQ ID NO: 775853 - protein, 11 aa, Homo sapiens
  CDR3 for alpha chain variable domain of TCR clone 387927 (TRAV12-2, TRAJ29)
CAVTLRSPLVF

SEQ ID NO: 775854 - protein, 13 aa, Homo sapiens
  CDR3 for beta chain variable domain of TCR clone 387927 (TRBV15, TRBJ1-6)
CATSGGLNSPLHF

SEQ ID NO: 775855 - protein, 15 aa, Homo sapiens
  CDR3 for alpha chain variable domain of TCR clone 387928 (TRAV2, TRAJ9)
CAVEDRGTGGFKTIF

SEQ ID NO: 775856 - protein, 15 aa, Homo sapiens
  CDR3 for beta chain variable domain of TCR clone 387928 (TRBV7-2, TRBJ2-2)
CASRRPGQNTGELFF

SEQ ID NO: 775857 - protein, 14 aa, Homo sapiens
  CDR3 for alpha chain variable domain of TCR clone 387929 (TRAV12-2, TRAJ13)
CAVKKTGGYQKFTF

SEQ ID NO: 775858 - protein, 14 aa, Homo sapiens
  CDR3 for beta chain variable domain of TCR clone 387929 (TRBV7-2, TRBJ2-7)
CASSPKTSFYEQYF

SEQ ID NO: 775859 - protein, 12 aa, Homo sapiens
  CDR3 for alpha chain variable domain of TCR clone 387930 (TRAV12-1, TRAJ40)
CVVYSGTYKYIF

SEQ ID NO: 775860 - protein, 18 aa, Homo sapiens
  CDR3 for beta chain variable domain of TCR clone 387930 (TRBV11-2, TRBJ2-3)
WASSLGGASRVAPNTQYF

SEQ ID NO: 775861 - protein, 16 aa, Homo sapiens
  CDR3 for alpha chain variable domain of TCR clone 387931 (TRAV8-2, TRAJ50)
CVVSDHMKTSYDKVKF

SEQ ID NO: 775862 - protein, 15 aa, Homo sapiens
  CDR3 for beta chain variable domain of TCR clone 387931 (TRBV7-2, TRBJ2-1)
CASSFQADEYNEQFF

SEQ ID NO: 775863 - protein, 13 aa, Homo sapiens
  CDR3 for alpha chain variable domain of TCR clone 387932 (TRAV8-1, TRAJ34)
CAVRPYNIDKLIF

SEQ ID NO: 775864 - protein, 15 aa, Homo sapiens
  CDR3 for beta chain variable domain of TCR clone 387932 (TRBV7-9, TRBJ1-3)
CASSLRSGSGNTIYF

SEQ ID NO: 775865 - protein, 14 aa, Homo sapiens
  CDR3 for alpha chain variable domain of TCR clone 387933 (TRAV16, TRAJ54)
CALSLIQGAQKLVS

SEQ ID NO: 775866 - protein, 15 aa, Homo sapiens
  CDR3 for beta chain variable domain of TCR clone 387933 (TRBV20-1, TRBJ2-7)
CSSRDRVSGMDEQYF

SEQ ID NO: 775867 - protein, 14 aa, Homo sapiens
  CDR3 for alpha chain variable domain of TCR clone 387934 (TRAV1-1, TRAJ28)
CAAPSGAGSDQLTF

SEQ ID NO: 775868 - protein, 17 aa, Homo sapiens
  CDR3 for beta chain variable domain of TCR clone 387934 (TRBV13, TRBJ2-3)
CASSLSRVAGGRNTQYF

SEQ ID NO: 775869 - protein, 18 aa, Homo sapiens
  CDR3 for alpha chain variable domain of TCR clone 387935 (TRAV26-2, TRAJ45)
CILRVDKYSGGGANGLTF

SEQ ID NO: 775870 - protein, 17 aa, Homo sapiens
  CDR3 for beta chain variable domain of TCR clone 387935 (TRBV25-1, TRBJ2-1)
CASSAYGQGRGVYEQFF

SEQ ID NO: 775871 - protein, 11 aa, Homo sapiens
  CDR3 for alpha chain variable domain of TCR clone 387936 (TRAV1-2, TRAJ20)
CAVANDYKLSF

SEQ ID NO: 775872 - protein, 15 aa, Homo sapiens
  CDR3 for beta chain variable domain of TCR clone 387936 (TRBV11-3, TRBJ2-7)
CASSPGPASSYEQYF

SEQ ID NO: 775873 - protein, 14 aa, Homo sapiens
  CDR3 for alpha chain variable domain of TCR clone 387937 (TRAV35, TRAJ33)
CWPRGRDGNYQLIW

SEQ ID NO: 775874 - protein, 11 aa, Homo sapiens
  CDR3 for beta chain variable domain of TCR clone 387937 (TRBV10-3, TRBJ2-7)
CAISEGLEQYF

SEQ ID NO: 775875 - protein, 14 aa, Homo sapiens
  CDR3 for alpha chain variable domain of TCR clone 387938 (TRAV8-4, TRAJ9)
CAVRINTGGFKTIF

SEQ ID NO: 775876 - protein, 13 aa, Homo sapiens
  CDR3 for beta chain variable domain of TCR clone 387938 (TRBV11-2, TRBJ2-5)
CASSSTGEETQYF

SEQ ID NO: 775877 - protein, 13 aa, Homo sapiens
  CDR3 for alpha chain variable domain of TCR clone 387939 (TRAV27, TRAJ53)
CSPSGGSNYKLTF

SEQ ID NO: 775878 - protein, 14 aa, Homo sapiens
  CDR3 for beta chain variable domain of TCR clone 387939 (TRBV25-1, TRBJ1-1)
CASTHLGGNTEAFF

SEQ ID NO: 775879 - protein, 16 aa, Homo sapiens
  CDR3 for alpha chain variable domain of TCR clone 387940 (TRAV3, TRAJ10)
CAVRDMRAGGGNKLTF

SEQ ID NO: 775880 - protein, 13 aa, Homo sapiens
  CDR3 for beta chain variable domain of TCR clone 387940 (TRBV12-5, TRBJ2-3)
CANGDRQSDTQYF

SEQ ID NO: 775881 - protein, 16 aa, Homo sapiens
  CDR3 for alpha chain variable domain of TCR clone 387941 (TRAV8-3, TRAJ44)
CAVGPLNTGTASKLTF

SEQ ID NO: 775882 - protein, 18 aa, Homo sapiens
  CDR3 for beta chain variable domain of TCR clone 387941 (TRBV3-1, TRBJ2-1)
CASSHDRPGRPLFDEQFF

SEQ ID NO: 775883 - protein, 10 aa, Homo sapiens
  CDR3 for alpha chain variable domain of TCR clone 387942 (TRAV12-2, TRAJ41)
CAVTGYALNF

SEQ ID NO: 775884 - protein, 15 aa, Homo sapiens
  CDR3 for beta chain variable domain of TCR clone 387942 (TRBV4-2, TRBJ2-1)
RASSQDVGLAGEQFF

SEQ ID NO: 775885 - protein, 14 aa, Homo sapiens
  CDR3 for alpha chain variable domain of TCR clone 387943 (TRAV38-1, TRAJ40)
CALRPTSGTCKYIF

SEQ ID NO: 775886 - protein, 14 aa, Homo sapiens
  CDR3 for beta chain variable domain of TCR clone 387943 (TRBV25-1, TRBJ1-1)
CGSTHLGGNTEAFF

SEQ ID NO: 775887 - protein, 15 aa, Homo sapiens
  CDR3 for alpha chain variable domain of TCR clone 387944 (TRAV8-3, TRAJ45)
CASSYSGGGADGLTL

SEQ ID NO: 775888 - protein, 13 aa, Homo sapiens
  CDR3 for beta chain variable domain of TCR clone 387944 (TRBV10-3, TRBJ2-7)
CASKRAVNYEQYF

SEQ ID NO: 775889 - protein, 15 aa, Homo sapiens
  CDR3 for alpha chain variable domain of TCR clone 387945 (TRAV12-1, TRAJ9)
CVVGFGDTGGFKTIF

SEQ ID NO: 775890 - protein, 15 aa, Homo sapiens
  CDR3 for beta chain variable domain of TCR clone 387945 (TRBV20-1, TRBJ2-7)
CSARDRVSGMDEQYF

SEQ ID NO: 775891 - protein, 15 aa, Homo sapiens
  CDR3 for alpha chain variable domain of TCR clone 387946 (TRAV26-1, TRAJ29)
CIVRVEGSGNTPVVL

SEQ ID NO: 775892 - protein, 14 aa, Homo sapiens
  CDR3 for beta chain variable domain of TCR clone 387946 (TRBV18, TRBJ2-5)
CASSPGVSQETQYF

SEQ ID NO: 775893 - protein, 13 aa, Homo sapiens
  CDR3 for alpha chain variable domain of TCR clone 387947 (TRAV12-1, TRAJ22)
CVVYSGSARQLTF

SEQ ID NO: 775894 - protein, 16 aa, Homo sapiens
  CDR3 for beta chain variable domain of TCR clone 387947 (TRBV24-1, TRBJ2-5)
CATRLAEDCWEKTQYF

SEQ ID NO: 775895 - protein, 12 aa, Homo sapiens
  CDR3 for alpha chain variable domain of TCR clone 387948 (TRAV12-3, TRAJ17)
CAMTLTGTKLTF

SEQ ID NO: 775896 - protein, 15 aa, Homo sapiens
  CDR3 for beta chain variable domain of TCR clone 387948 (TRBV20-1, TRBJ2-7)
CSAGDRVSGMDEQYF

SEQ ID NO: 775897 - protein, 23 aa, Homo sapiens
  CDR3 for alpha chain variable domain of TCR clone 387949 (TRAV26-1, TRAJ38)
CIADNAGNNHIQNPDPAVYQLRD

SEQ ID NO: 775898 - protein, 17 aa, Homo sapiens
  CDR3 for beta chain variable domain of TCR clone 387949 (TRBV11-2, TRBJ2-6)
CASSQRVIFSGANVLTF

SEQ ID NO: 775899 - protein, 12 aa, Homo sapiens
  CDR3 for alpha chain variable domain of TCR clone 387950 (TRAV2, TRAJ31)
CAVEDNNARLMF

SEQ ID NO: 775900 - protein, 14 aa, Homo sapiens
  CDR3 for beta chain variable domain of TCR clone 387950 (TRBV7-3, TRBJ2-1)
CASSLAGGTNEQFF

SEQ ID NO: 775901 - protein, 14 aa, Homo sapiens
  CDR3 for alpha chain variable domain of TCR clone 387951 (TRAV1-1, TRAJ23)
CAVSIYNQGGKLIF

SEQ ID NO: 775902 - protein, 15 aa, Homo sapiens
  CDR3 for beta chain variable domain of TCR clone 387951 (TRBV19, TRBJ1-2)
CASSVGQVLNYGYTC

SEQ ID NO: 775903 - protein, 15 aa, Homo sapiens
  CDR3 for alpha chain variable domain of TCR clone 387952 (TRAV34, TRAJ38)
CGADFTPGNNRKLLW

SEQ ID NO: 775904 - protein, 12 aa, Homo sapiens
  CDR3 for beta chain variable domain of TCR clone 387952 (TRBV7-9, TRBJ2-7)
CATRTDAYEQYF

SEQ ID NO: 775905 - protein, 15 aa, Homo sapiens
  CDR3 for alpha chain variable domain of TCR clone 387953 (TRAV23/DV6, )
CAADIQNPDTAVYQL

SEQ ID NO: 775906 - protein, 14 aa, Homo sapiens
  CDR3 for beta chain variable domain of TCR clone 387953 (TRBV5-7, TRBJ1-6)
CASSFAGHNSPLHF

SEQ ID NO: 775907 - protein, 14 aa, Homo sapiens
  CDR3 for alpha chain variable domain of TCR clone 387954 (TRAV1-2, TRAJ16)
CAVTRFSDGQKLLF

SEQ ID NO: 775908 - protein, 11 aa, Homo sapiens
  CDR3 for beta chain variable domain of TCR clone 387954 (TRBV11-2, TRBJ2-2)
CASSLPGELFV

SEQ ID NO: 775909 - protein, 13 aa, Homo sapiens
  CDR3 for alpha chain variable domain of TCR clone 387955 (TRAV12-1, TRAJ7)
CVGNMRGKTDSLL

SEQ ID NO: 775910 - protein, 15 aa, Homo sapiens
  CDR3 for beta chain variable domain of TCR clone 387955 (TRBV27, TRBJ2-3)
CASSLGLAATDTQYF

SEQ ID NO: 775911 - protein, 15 aa, Homo sapiens
  CDR3 for alpha chain variable domain of TCR clone 387956 (TRAV17, TRAJ57)
CATGPSQGGSEKLVF

SEQ ID NO: 775912 - protein, 14 aa, Homo sapiens
  CDR3 for beta chain variable domain of TCR clone 387956 (TRBV12-5, TRBJ2-5)
CTSGSRTHQETQYF

SEQ ID NO: 775913 - protein, 13 aa, Homo sapiens
  CDR3 for alpha chain variable domain of TCR clone 387957 (TRAV21, TRAJ57)
CAVTQGGSEKVVF

SEQ ID NO: 775914 - protein, 11 aa, Homo sapiens
  CDR3 for beta chain variable domain of TCR clone 387957 (TRBV11-2, TRBJ2-2)
CASSLPGELFF

SEQ ID NO: 775915 - protein, 15 aa, Homo sapiens
  CDR3 for alpha chain variable domain of TCR clone 387958 (TRAV3, TRAJ4)
CAGRDGTGGYNKRIF

SEQ ID NO: 775916 - protein, 13 aa, Homo sapiens
  CDR3 for beta chain variable domain of TCR clone 387958 (TRBV12-5, TRBJ1-2)
CASGVRTGNGYTF

SEQ ID NO: 775917 - protein, 13 aa, Homo sapiens
  CDR3 for alpha chain variable domain of TCR clone 387959 (TRAV25, TRAJ26)
CAGMDNYGQNFVF

SEQ ID NO: 775918 - protein, 15 aa, Homo sapiens
  CDR3 for beta chain variable domain of TCR clone 387959 (TRBV10-3, TRBJ2-1)
CDIRNGTSGHNEQFF

SEQ ID NO: 775919 - protein, 15 aa, Homo sapiens
  CDR3 for alpha chain variable domain of TCR clone 387960 (TRAV14/DV4, TRAJ10)
CAMRELTGGGNKLTF

SEQ ID NO: 775920 - protein, 14 aa, Homo sapiens
  CDR3 for beta chain variable domain of TCR clone 387960 (TRBV7-6, TRBJ2-3)
CASSVAGGTDTQYF

SEQ ID NO: 775921 - protein, 15 aa, Homo sapiens
  CDR3 for alpha chain variable domain of TCR clone 387961 (TRAV2, TRAJ9)
CAVEDRGTGGFKTIF

SEQ ID NO: 775922 - protein, 16 aa, Homo sapiens
  CDR3 for beta chain variable domain of TCR clone 387961 (TRBV24-1, TRBJ2-3)
CATSDPGTGATDSQYF

SEQ ID NO: 775923 - protein, 16 aa, Homo sapiens
  CDR3 for alpha chain variable domain of TCR clone 387962 (TRAV38-1, TRAJ32)
CAFMKGGGGATNKLIF

SEQ ID NO: 775924 - protein, 13 aa, Homo sapiens
  CDR3 for beta chain variable domain of TCR clone 387962 (TRBV20-1, TRBJ2-5)
CSARETFKETQYF

SEQ ID NO: 775925 - protein, 14 aa, Homo sapiens
  CDR3 for alpha chain variable domain of TCR clone 387963 (TRAV12-2, TRAJ13)
CAVKKPGGYQKATF

SEQ ID NO: 775926 - protein, 17 aa, Homo sapiens
  CDR3 for beta chain variable domain of TCR clone 387963 (TRBV15, TRBJ2-4)
CATSRDNPQTGLDIQYF

SEQ ID NO: 775927 - protein, 10 aa, Homo sapiens
  CDR3 for alpha chain variable domain of TCR clone 387964 (TRAV8-4, TRAJ39)
CAVAGNMLTF

SEQ ID NO: 775928 - protein, 14 aa, Homo sapiens
  CDR3 for beta chain variable domain of TCR clone 387964 (TRBV7-3, TRBJ2-7)
CASSLSGVPYEQYF

SEQ ID NO: 775929 - protein, 14 aa, Homo sapiens
  CDR3 for alpha chain variable domain of TCR clone 387965 (TRAV35, TRAJ22)
CAGLRPGSARQLTF

SEQ ID NO: 775930 - protein, 17 aa, Homo sapiens
  CDR3 for beta chain variable domain of TCR clone 387965 (TRBV4-3, TRBJ1-2)
CASSSRLQAGGSVGYAF

SEQ ID NO: 775931 - protein, 14 aa, Homo sapiens
  CDR3 for alpha chain variable domain of TCR clone 387966 (TRAV16, TRAJ4)
CALHFSGGYNKLIF

SEQ ID NO: 775932 - protein, 15 aa, Homo sapiens
  CDR3 for beta chain variable domain of TCR clone 387966 (TRBV7-2, TRBJ2-7)
CASSTRLAGVDEQSF

SEQ ID NO: 775933 - protein, 11 aa, Homo sapiens
  CDR3 for alpha chain variable domain of TCR clone 387967 (TRAV2, TRAJ13)
CASVGYQKVAF

SEQ ID NO: 775934 - protein, 16 aa, Homo sapiens
  CDR3 for beta chain variable domain of TCR clone 387967 (TRBV6-1, TRBJ2-5)
CASSETLDRGAETQYF

SEQ ID NO: 775935 - protein, 12 aa, Homo sapiens
  CDR3 for alpha chain variable domain of TCR clone 387968 (TRAV1-2, TRAJ39)
TSLLYAANMLTF

SEQ ID NO: 775936 - protein, 16 aa, Homo sapiens
  CDR3 for beta chain variable domain of TCR clone 387968 (TRBV11-2, TRBJ2-1)
CASSLLLLSSYNEQFF

SEQ ID NO: 775937 - protein, 14 aa, Homo sapiens
  CDR3 for alpha chain variable domain of TCR clone 387969 (TRAV27, TRAJ13)
CRSSNSGGYQKVTF

SEQ ID NO: 775938 - protein, 16 aa, Homo sapiens
  CDR3 for beta chain variable domain of TCR clone 387969 (TRBV11-2, TRBJ1-1)
CASSGRGLWTNTEAFF

SEQ ID NO: 775939 - protein, 17 aa, Homo sapiens
  CDR3 for alpha chain variable domain of TCR clone 387970 (TRAV23/DV6, TRAJ58)
CAARLLRGETSGSRLTF

SEQ ID NO: 775940 - protein, 14 aa, Homo sapiens
  CDR3 for beta chain variable domain of TCR clone 387970 (TRBV11-2, TRBJ2-7)
CASSLGAGAYEQYF

SEQ ID NO: 775941 - protein, 12 aa, Homo sapiens
  CDR3 for alpha chain variable domain of TCR clone 387971 (TRAV12-3, TRAJ20)
CAMVRGDYKLSF

SEQ ID NO: 775942 - protein, 14 aa, Homo sapiens
  CDR3 for beta chain variable domain of TCR clone 387971 (TRBV5-5, TRBJ1-5)
CASSRQGVDQPQHF

SEQ ID NO: 775943 - protein, 12 aa, Homo sapiens
  CDR3 for alpha chain variable domain of TCR clone 387972 (TRAV13-1, TRAJ15)
CAASQAGTALIY

SEQ ID NO: 775944 - protein, 14 aa, Homo sapiens
  CDR3 for beta chain variable domain of TCR clone 387972 (TRBV19, TRBJ2-2)
CASSTLHRSGELFF

SEQ ID NO: 775945 - protein, 14 aa, Homo sapiens
  CDR3 for alpha chain variable domain of TCR clone 387973 (TRAV16, TRAJ39)
CALSKNNAGNMLTF

SEQ ID NO: 775946 - protein, 17 aa, Homo sapiens
  CDR3 for beta chain variable domain of TCR clone 387973 (TRBV11-2, TRBJ2-1)
CASSLYPPGVEYNEQFF

SEQ ID NO: 775947 - protein, 12 aa, Homo sapiens
  CDR3 for alpha chain variable domain of TCR clone 387974 (TRAV21, TRAJ31)
CAVWGNNARLMF

SEQ ID NO: 775948 - protein, 15 aa, Homo sapiens
  CDR3 for beta chain variable domain of TCR clone 387974 (TRBV7-2, TRBJ2-1)
CASSSGLAGGNEQFF

SEQ ID NO: 775949 - protein, 14 aa, Homo sapiens
  CDR3 for alpha chain variable domain of TCR clone 387975 (TRAV1-2, TRAJ16)
CAVNRFSGGQKLLF

SEQ ID NO: 775950 - protein, 17 aa, Homo sapiens
  CDR3 for beta chain variable domain of TCR clone 387975 (TRBV7-3, TRBJ2-3)
CASSLMKRMRGADTQYF

SEQ ID NO: 775951 - protein, 14 aa, Homo sapiens
  CDR3 for alpha chain variable domain of TCR clone 387976 (TRAV1-2, TRAJ8)
CAVREDTGFQKLVF

SEQ ID NO: 775952 - protein, 14 aa, Homo sapiens
  CDR3 for beta chain variable domain of TCR clone 387976 (TRBV5-4, TRBJ2-6)
CQQLRRTGANVLTF

SEQ ID NO: 775953 - protein, 14 aa, Homo sapiens
  CDR3 for alpha chain variable domain of TCR clone 387977 (TRAV12-2, TRAJ24)
CAVTPADSWGKLQF

SEQ ID NO: 775954 - protein, 20 aa, Homo sapiens
  CDR3 for beta chain variable domain of TCR clone 387977 (TRBV3-1, TRBJ2-6)
CASSPRPGLEGGAGANVLTF

SEQ ID NO: 775955 - protein, 12 aa, Homo sapiens
  CDR3 for alpha chain variable domain of TCR clone 387978 (TRAV13-1, TRAJ49)
CAAPNTGNQVYF

SEQ ID NO: 775956 - protein, 17 aa, Homo sapiens
  CDR3 for beta chain variable domain of TCR clone 387978 (TRBV25-1, TRBJ2-7)
CASSDARVVFSSYEQYF

SEQ ID NO: 775957 - protein, 14 aa, Homo sapiens
  CDR3 for alpha chain variable domain of TCR clone 387979 (TRAV17, TRAJ57)
CATDPQGGSEKLVF

SEQ ID NO: 775958 - protein, 14 aa, Homo sapiens
  CDR3 for beta chain variable domain of TCR clone 387979 (TRBV19, TRBJ2-7)
CASTVQGRPYEQYF

SEQ ID NO: 775959 - protein, 12 aa, Homo sapiens
  CDR3 for alpha chain variable domain of TCR clone 387980 (TRAV13-2, TRAJ23)
CAERHRGGKIIF

SEQ ID NO: 775960 - protein, 13 aa, Homo sapiens
  CDR3 for beta chain variable domain of TCR clone 387980 (TRBV7-9, TRBJ1-2)
CASSLKQNYGYAF

SEQ ID NO: 775961 - protein, 15 aa, Homo sapiens
  CDR3 for alpha chain variable domain of TCR clone 387981 (TRAV26-1, TRAJ29)
CIVRVEGSGNTPLFF

SEQ ID NO: 775962 - protein, 16 aa, Homo sapiens
  CDR3 for beta chain variable domain of TCR clone 387981 (TRBV9, TRBJ2-1)
CASSVGGGGNYNEQFF

SEQ ID NO: 775963 - protein, 16 aa, Homo sapiens
  CDR3 for alpha chain variable domain of TCR clone 387982 (TRAV30, TRAJ24)
CGTEIVDADSWGKFQF

SEQ ID NO: 775964 - protein, 14 aa, Homo sapiens
  CDR3 for beta chain variable domain of TCR clone 387982 (TRBV12-5, TRBJ2-5)
CSSGSRTHQEIQYF

SEQ ID NO: 775965 - protein, 13 aa, Homo sapiens
  CDR3 for alpha chain variable domain of TCR clone 387983 (TRAV12-2, TRAJ53)
CAGVGGSNYKLTF

SEQ ID NO: 775966 - protein, 15 aa, Homo sapiens
  CDR3 for beta chain variable domain of TCR clone 387983 (TRBV4-1, TRBJ2-7)
CASSQQGQGFDEQYF

SEQ ID NO: 775967 - protein, 16 aa, Homo sapiens
  CDR3 for alpha chain variable domain of TCR clone 387984 (TRAV13-1, TRAJ39)
CAGSIVMQATCSPLEG

SEQ ID NO: 775968 - protein, 16 aa, Homo sapiens
  CDR3 for beta chain variable domain of TCR clone 387984 (TRBV20-1, TRBJ1-4)
CSAPGQGLLTNEKLFF

SEQ ID NO: 775969 - protein, 10 aa, Homo sapiens
  CDR3 for alpha chain variable domain of TCR clone 387985 (TRAV1-2, TRAJ20)
CAVTDYKLSF

SEQ ID NO: 775970 - protein, 15 aa, Homo sapiens
  CDR3 for beta chain variable domain of TCR clone 387985 (TRBV6-3, TRBJ2-7)
CASSSPGTVVYEQYF

SEQ ID NO: 775971 - protein, 14 aa, Homo sapiens
  CDR3 for alpha chain variable domain of TCR clone 387986 (TRAV1-2, TRAJ16)
CAVNRFSDGQKLLF

SEQ ID NO: 775972 - protein, 15 aa, Homo sapiens
  CDR3 for beta chain variable domain of TCR clone 387986 (TRBV12-4, TRBJ2-5)
CASSPPTGLRETQYF

SEQ ID NO: 775973 - protein, 15 aa, Homo sapiens
  CDR3 for alpha chain variable domain of TCR clone 387987 (TRAV2, TRAJ32)
CAVANYGGATNKLIV

SEQ ID NO: 775974 - protein, 15 aa, Homo sapiens
  CDR3 for beta chain variable domain of TCR clone 387987 (TRBV7-7, TRBJ2-5)
CASSQLERAEETPYF

SEQ ID NO: 775975 - protein, 15 aa, Homo sapiens
  CDR3 for alpha chain variable domain of TCR clone 387988 (TRAV12-3, TRAJ6)
CAMRAASGGSYIPTF

SEQ ID NO: 775976 - protein, 13 aa, Homo sapiens
  CDR3 for beta chain variable domain of TCR clone 387988 (TRBV20-1, TRBJ1-2)
CSASPEFNYGYTF

SEQ ID NO: 775977 - protein, 18 aa, Homo sapiens
  CDR3 for alpha chain variable domain of TCR clone 387989 (TRAV14/DV4, TRAJ3)
CAMREGSGGYSSASKIIF

SEQ ID NO: 775978 - protein, 19 aa, Homo sapiens
  CDR3 for beta chain variable domain of TCR clone 387989 (TRBV25-1, TRBJ2-2)
CAILVYRVDRGRKTGELFF

SEQ ID NO: 775979 - protein, 14 aa, Homo sapiens
  CDR3 for alpha chain variable domain of TCR clone 387990 (TRAV12-3, TRAJ58)
CAMSTETSGSRLTF

SEQ ID NO: 775980 - protein, 13 aa, Homo sapiens
  CDR3 for beta chain variable domain of TCR clone 387990 (TRBV27, TRBJ2-3)
CASSWGRSDTQYF

SEQ ID NO: 775981 - protein, 17 aa, Homo sapiens
  CDR3 for alpha chain variable domain of TCR clone 387991 (TRAV3, TRAJ6)
CAVRDGPRAGGSYITTF

SEQ ID NO: 775982 - protein, 14 aa, Homo sapiens
  CDR3 for beta chain variable domain of TCR clone 387991 (TRBV7-2, TRBJ2-7)
CASSPKTSRYEQYF

SEQ ID NO: 775983 - protein, 13 aa, Homo sapiens
  CDR3 for alpha chain variable domain of TCR clone 387992 (TRAV16, TRAJ4)
CAPFSGGYNKLIF

SEQ ID NO: 775984 - protein, 14 aa, Homo sapiens
  CDR3 for beta chain variable domain of TCR clone 387992 (TRBV19, TRBJ2-7)
CASSMGQGAIKQYF

SEQ ID NO: 775985 - protein, 12 aa, Homo sapiens
  CDR3 for alpha chain variable domain of TCR clone 387993 (TRAV25, TRAJ44)
CAGRGTASKLTF

SEQ ID NO: 775986 - protein, 12 aa, Homo sapiens
  CDR3 for beta chain variable domain of TCR clone 387993 (TRBV11-2, TRBJ2-1)
CASSPGNNEQFF

SEQ ID NO: 775987 - protein, 13 aa, Homo sapiens
  CDR3 for alpha chain variable domain of TCR clone 387994 (TRAV21, TRAJ27)
CAQWGGNAGKTTF

SEQ ID NO: 775988 - protein, 14 aa, Homo sapiens
  CDR3 for beta chain variable domain of TCR clone 387994 (TRBV2, TRBJ2-3)
CAVGGTISTDTQYF

SEQ ID NO: 775989 - protein, 11 aa, Homo sapiens
  CDR3 for alpha chain variable domain of TCR clone 387995 (TRAV3, TRAJ21)
CAVGDFNKFYF

SEQ ID NO: 775990 - protein, 13 aa, Homo sapiens
  CDR3 for beta chain variable domain of TCR clone 387995 (TRBV28, TRBJ2-5)
CASSFAGGETQYF

SEQ ID NO: 775991 - protein, 14 aa, Homo sapiens
  CDR3 for alpha chain variable domain of TCR clone 387996 (TRAV1-1, TRAJ35)
CAVRSIGFGKVLHC

SEQ ID NO: 775992 - protein, 14 aa, Homo sapiens
  CDR3 for beta chain variable domain of TCR clone 387996 (TRBV19, TRBJ2-1)
CASPTFVLSGEQFF

SEQ ID NO: 775993 - protein, 14 aa, Homo sapiens
  CDR3 for alpha chain variable domain of TCR clone 387997 (TRAV3, TRAJ37)
CAVKESGNTGKLIF

SEQ ID NO: 775994 - protein, 14 aa, Homo sapiens
  CDR3 for beta chain variable domain of TCR clone 387997 (TRBV7-2, TRBJ2-1)
CASSLEGGYNEQFF

SEQ ID NO: 775995 - protein, 16 aa, Homo sapiens
  CDR3 for alpha chain variable domain of TCR clone 387998 (TRAV20, TRAJ52)
FAVQAAGGTSYGKLTF

SEQ ID NO: 775996 - protein, 13 aa, Homo sapiens
  CDR3 for beta chain variable domain of TCR clone 387998 (TRBV27, TRBJ2-7)
CASSLTTGYEQYF

SEQ ID NO: 775997 - protein, 17 aa, Homo sapiens
  CDR3 for alpha chain variable domain of TCR clone 387999 (TRAV36/DV7, TRAJ52)
CAVAQRAGGTSYGKLTF

SEQ ID NO: 775998 - protein, 11 aa, Homo sapiens
  CDR3 for beta chain variable domain of TCR clone 387999 (TRBV11-2, TRBJ2-2)
CASSLPGELFF

SEQ ID NO: 775999 - protein, 14 aa, Homo sapiens
  CDR3 for alpha chain variable domain of TCR clone 388000 (TRAV1-2, TRAJ8)
CAVREDTGFQKLVF

SEQ ID NO: 776000 - protein, 15 aa, Homo sapiens
  CDR3 for beta chain variable domain of TCR clone 388000 (TRBV12-4, TRBJ2-5)
CASSPPTGLQETQYC

SEQ ID NO: 776001 - protein, 10 aa, Homo sapiens
  CDR3 for alpha chain variable domain of TCR clone 388001 (TRAV23/DV6, TRAJ43)
CAAAVAALEQ

SEQ ID NO: 776002 - protein, 13 aa, Homo sapiens
  CDR3 for beta chain variable domain of TCR clone 388001 (TRBV12-4, TRBJ1-2)
CGSSLRQGKGYTF

SEQ ID NO: 776003 - protein, 17 aa, Homo sapiens
  CDR3 for alpha chain variable domain of TCR clone 388002 (TRAV12-3, TRAJ6)
CAMSARGGAGGSYIPTF

SEQ ID NO: 776004 - protein, 17 aa, Homo sapiens
  CDR3 for beta chain variable domain of TCR clone 388002 (TRBV11-2, TRBJ2-1)
CASSLYPPGVEYNEQFF

SEQ ID NO: 776005 - protein, 13 aa, Homo sapiens
  CDR3 for alpha chain variable domain of TCR clone 388003 (TRAV38-1, TRAJ42)
CARWGGSQGNLII

SEQ ID NO: 776006 - protein, 14 aa, Homo sapiens
  CDR3 for beta chain variable domain of TCR clone 388003 (TRBV6-1, TRBJ1-3)
CASVQGGGGNTIYF

SEQ ID NO: 776007 - protein, 14 aa, Homo sapiens
  CDR3 for alpha chain variable domain of TCR clone 388004 (TRAV12-2, TRAJ40)
CAVKIPSGTYKYIF

SEQ ID NO: 776008 - protein, 14 aa, Homo sapiens
  CDR3 for beta chain variable domain of TCR clone 388004 (TRBV20-1, TRBJ1-1)
CSAQTRIGCTESFF

SEQ ID NO: 776009 - protein, 11 aa, Homo sapiens
  CDR3 for alpha chain variable domain of TCR clone 388005 (TRAV3, TRAJ21)
CAVVNFNKFYF

SEQ ID NO: 776010 - protein, 20 aa, Homo sapiens
  CDR3 for beta chain variable domain of TCR clone 388005 (TRBV7-8, TRBJ2-2)
CASSHLFPGPTIHITGELFF

SEQ ID NO: 776011 - protein, 12 aa, Homo sapiens
  CDR3 for alpha chain variable domain of TCR clone 388006 (TRAV12-2, TRAJ43)
CAVNVNNNDMRF

SEQ ID NO: 776012 - protein, 14 aa, Homo sapiens
  CDR3 for beta chain variable domain of TCR clone 388006 (TRBV7-2, TRBJ2-7)
CASSFLGRVYEQYV

SEQ ID NO: 776013 - protein, 13 aa, Homo sapiens
  CDR3 for alpha chain variable domain of TCR clone 388007 (TRAV2, TRAJ15)
CAVASQAGTALIF

SEQ ID NO: 776014 - protein, 15 aa, Homo sapiens
  CDR3 for beta chain variable domain of TCR clone 388007 (TRBV5-1, TRBJ2-1)
CASSWGPGPGGEQFF

SEQ ID NO: 776015 - protein, 12 aa, Homo sapiens
  CDR3 for alpha chain variable domain of TCR clone 388008 (TRAV13-2, TRAJ31)
CAESYNNARLMF

SEQ ID NO: 776016 - protein, 13 aa, Homo sapiens
  CDR3 for beta chain variable domain of TCR clone 388008 (TRBV24-1, TRBJ1-3)
CATMSDSGNTIYF

SEQ ID NO: 776017 - protein, 12 aa, Homo sapiens
  CDR3 for alpha chain variable domain of TCR clone 388009 (TRAV12-3, TRAJ40)
CAMSSGTYKYIF

SEQ ID NO: 776018 - protein, 13 aa, Homo sapiens
  CDR3 for beta chain variable domain of TCR clone 388009 (TRBV19, TRBJ1-5)
CASRIGGEQPQHF

SEQ ID NO: 776019 - protein, 14 aa, Homo sapiens
  CDR3 for alpha chain variable domain of TCR clone 388010 (TRAV38-1, TRAJ45)
CASHSGGGAEGLTL

SEQ ID NO: 776020 - protein, 13 aa, Homo sapiens
  CDR3 for beta chain variable domain of TCR clone 388010 (TRBV10-3, TRBJ1-2)
CAISERDSYGYTF

SEQ ID NO: 776021 - protein, 14 aa, Homo sapiens
  CDR3 for alpha chain variable domain of TCR clone 388011 (TRAV27, TRAJ22)
CAGVSVLGKRQLTF

SEQ ID NO: 776022 - protein, 14 aa, Homo sapiens
  CDR3 for beta chain variable domain of TCR clone 388011 (TRBV10-3, TRBJ2-7)
CAISAPRGAYEQYF

SEQ ID NO: 776023 - protein, 11 aa, Homo sapiens
  CDR3 for alpha chain variable domain of TCR clone 388012 (TRAV1-1, TRAJ23)
CALRQGGKLIF

SEQ ID NO: 776024 - protein, 14 aa, Homo sapiens
  CDR3 for beta chain variable domain of TCR clone 388012 (TRBV19, TRBJ2-1)
CASPTFVLSGEQFF

SEQ ID NO: 776025 - protein, 14 aa, Homo sapiens
  CDR3 for alpha chain variable domain of TCR clone 388013 (TRAV17, TRAJ40)
CATALTSGTYKYIF

SEQ ID NO: 776026 - protein, 13 aa, Homo sapiens
  CDR3 for beta chain variable domain of TCR clone 388013 (TRBV24-1, TRBJ2-1)
CATSAGPYNEQFF

SEQ ID NO: 776027 - protein, 22 aa, Homo sapiens
  CDR3 for alpha chain variable domain of TCR clone 388014 (TRAV12-1, )
CVVNAPRRIPDIQNPDPAVYQL

SEQ ID NO: 776028 - protein, 15 aa, Homo sapiens
  CDR3 for beta chain variable domain of TCR clone 388014 (TRBV9, TRBJ2-3)
CASSPERDLPDTQYF

SEQ ID NO: 776029 - protein, 14 aa, Homo sapiens
  CDR3 for alpha chain variable domain of TCR clone 388015 (TRAV13-2, TRAJ43)
CAEIPTYNNNDMRF

SEQ ID NO: 776030 - protein, 16 aa, Homo sapiens
  CDR3 for beta chain variable domain of TCR clone 388015 (TRBV12-4, TRBJ1-5)
CASSRPVGGSNQPQHF

SEQ ID NO: 776031 - protein, 12 aa, Homo sapiens
  CDR3 for alpha chain variable domain of TCR clone 388016 (TRAV30, TRAJ43)
CGTEERGNDMRF

SEQ ID NO: 776032 - protein, 17 aa, Homo sapiens
  CDR3 for beta chain variable domain of TCR clone 388016 (TRBV11-2, TRBJ2-1)
CASSLYPPGVEYNERFF

SEQ ID NO: 776033 - protein, 15 aa, Homo sapiens
  CDR3 for alpha chain variable domain of TCR clone 388017 (TRAV26-1, TRAJ44)
CIVRANTGTASKLTF

SEQ ID NO: 776034 - protein, 16 aa, Homo sapiens
  CDR3 for beta chain variable domain of TCR clone 388017 (TRBV7-8, TRBJ2-4)
CASSAERTLAKNIQYF

SEQ ID NO: 776035 - protein, 12 aa, Homo sapiens
  CDR3 for alpha chain variable domain of TCR clone 388018 (TRAV12-2, TRAJ45)
CAVTGGSDGLTF

SEQ ID NO: 776036 - protein, 14 aa, Homo sapiens
  CDR3 for beta chain variable domain of TCR clone 388018 (TRBV5-5, TRBJ2-7)
CASSLGQGTYEQYF

SEQ ID NO: 776037 - protein, 13 aa, Homo sapiens
  CDR3 for alpha chain variable domain of TCR clone 388019 (TRAV12-3, TRAJ7)
CAMTPYGNNRLAF

SEQ ID NO: 776038 - protein, 15 aa, Homo sapiens
  CDR3 for beta chain variable domain of TCR clone 388019 (TRBV20-1, TRBJ2-5)
CSAEGTGGLQETQYF

SEQ ID NO: 776039 - protein, 15 aa, Homo sapiens
  CDR3 for alpha chain variable domain of TCR clone 388020 (TRAV12-3, TRAJ6)
CAMSATTGGSYIPRF

SEQ ID NO: 776040 - protein, 16 aa, Homo sapiens
  CDR3 for beta chain variable domain of TCR clone 388020 (TRBV20-1, TRBJ1-2)
CSASMGQGVANYGYTF

SEQ ID NO: 776041 - protein, 13 aa, Homo sapiens
  CDR3 for alpha chain variable domain of TCR clone 388021 (TRAV35, TRAJ57)
CAGTQGGSEKLVF

SEQ ID NO: 776042 - protein, 12 aa, Homo sapiens
  CDR3 for beta chain variable domain of TCR clone 388021 (TRBV7-9, TRBJ2-1)
CASRAGVDEQFF

SEQ ID NO: 776043 - protein, 13 aa, Homo sapiens
  CDR3 for alpha chain variable domain of TCR clone 388022 (TRAV17, TRAJ11)
CATVPGGYSTLTF

SEQ ID NO: 776044 - protein, 15 aa, Homo sapiens
  CDR3 for beta chain variable domain of TCR clone 388022 (TRBV20-1, TRBJ2-7)
CSARDRVSGMDEQYF

SEQ ID NO: 776045 - protein, 11 aa, Homo sapiens
  CDR3 for alpha chain variable domain of TCR clone 388023 (TRAV3, TRAJ21)
CAVGNFNKFYF

SEQ ID NO: 776046 - protein, 17 aa, Homo sapiens
  CDR3 for beta chain variable domain of TCR clone 388023 (TRBV13, TRBJ2-3)
CASSLSRVAGGRKTQYF

SEQ ID NO: 776047 - protein, 14 aa, Homo sapiens
  CDR3 for alpha chain variable domain of TCR clone 388024 (TRAV26-1, TRAJ21)
CIVRVVYNFNKFYF

SEQ ID NO: 776048 - protein, 17 aa, Homo sapiens
  CDR3 for beta chain variable domain of TCR clone 388024 (TRBV11-2, TRBJ2-1)
CASSLNPPGVEYNEQFF

SEQ ID NO: 776049 - protein, 13 aa, Homo sapiens
  CDR3 for alpha chain variable domain of TCR clone 388025 (TRAV23/DV6, TRAJ22)
CASRAGSAMQLTF

SEQ ID NO: 776050 - protein, 14 aa, Homo sapiens
  CDR3 for beta chain variable domain of TCR clone 388025 (TRBV7-2, TRBJ2-7)
CASSPKTSFYEQYF

SEQ ID NO: 776051 - protein, 14 aa, Homo sapiens
  CDR3 for alpha chain variable domain of TCR clone 388026 (TRAV1-2, TRAJ16)
CAVNRFSDGQKLLF

SEQ ID NO: 776052 - protein, 14 aa, Homo sapiens
  CDR3 for beta chain variable domain of TCR clone 388026 (TRBV19, TRBJ1-5)
CASSFTGSNQPQHF

SEQ ID NO: 776053 - protein, 12 aa, Homo sapiens
  CDR3 for alpha chain variable domain of TCR clone 388027 (TRAV17, TRAJ57)
CATDGGSEKLVF

SEQ ID NO: 776054 - protein, 18 aa, Homo sapiens
  CDR3 for beta chain variable domain of TCR clone 388027 (TRBV7-9, TRBJ2-7)
CASSLTTSGSRTWYEQYF

SEQ ID NO: 776055 - protein, 13 aa, Homo sapiens
  CDR3 for alpha chain variable domain of TCR clone 388028 (TRAV1-2, TRAJ9)
CAALNTGGFKTIF

SEQ ID NO: 776056 - protein, 17 aa, Homo sapiens
  CDR3 for beta chain variable domain of TCR clone 388028 (TRBV4-1, TRBJ2-7)
CASSRDPLGVRGGEQYF

SEQ ID NO: 776057 - protein, 13 aa, Homo sapiens
  CDR3 for alpha chain variable domain of TCR clone 388029 (TRAV12-2, TRAJ10)
CAVPTGGGNKLTF

SEQ ID NO: 776058 - protein, 14 aa, Homo sapiens
  CDR3 for beta chain variable domain of TCR clone 388029 (TRBV7-2, TRBJ1-5)
CASSTQGAGQPQHF

SEQ ID NO: 776059 - protein, 18 aa, Homo sapiens
  CDR3 for alpha chain variable domain of TCR clone 388030 (TRAV3, TRAJ17)
CAVRARRGGRSCRQQANF

SEQ ID NO: 776060 - protein, 14 aa, Homo sapiens
  CDR3 for beta chain variable domain of TCR clone 388030 (TRBV3-1, TRBJ2-5)
CASSQAVRQETQYF

SEQ ID NO: 776061 - protein, 13 aa, Homo sapiens
  CDR3 for alpha chain variable domain of TCR clone 388031 (TRAV27, TRAJ56)
CAGKPGANSKLTF

SEQ ID NO: 776062 - protein, 11 aa, Homo sapiens
  CDR3 for beta chain variable domain of TCR clone 388031 (TRBV6-3, TRBJ2-3)
CATGQADTQYF

SEQ ID NO: 776063 - protein, 14 aa, Homo sapiens
  CDR3 for alpha chain variable domain of TCR clone 388032 (TRAV1-2, TRAJ16)
CAVNRFSDGQKLLF

SEQ ID NO: 776064 - protein, 17 aa, Homo sapiens
  CDR3 for beta chain variable domain of TCR clone 388032 (TRBV28, TRBJ1-1)
CASSLSGTGYENTEAFF

SEQ ID NO: 776065 - protein, 12 aa, Homo sapiens
  CDR3 for alpha chain variable domain of TCR clone 388033 (TRAV8-3, TRAJ26)
CAGDNYGQNFVF

SEQ ID NO: 776066 - protein, 11 aa, Homo sapiens
  CDR3 for beta chain variable domain of TCR clone 388033 (TRBV19, TRBJ1-1)
SASSIGSEAFF

SEQ ID NO: 776067 - protein, 14 aa, Homo sapiens
  CDR3 for alpha chain variable domain of TCR clone 388034 (TRAV13-1, TRAJ44)
CAAKATGTASKLTF

SEQ ID NO: 776068 - protein, 14 aa, Homo sapiens
  CDR3 for beta chain variable domain of TCR clone 388034 (TRBV7-9, TRBJ2-1)
CASSLVVGADEQFF

SEQ ID NO: 776069 - protein, 16 aa, Homo sapiens
  CDR3 for alpha chain variable domain of TCR clone 388035 (TRAV12-3, TRAJ53)
CAMSPGSGGSNYKLNP

SEQ ID NO: 776070 - protein, 11 aa, Homo sapiens
  CDR3 for beta chain variable domain of TCR clone 388035 (TRBV29-1, TRBJ2-5)
CSEDRTGTQYF

SEQ ID NO: 776071 - protein, 14 aa, Homo sapiens
  CDR3 for alpha chain variable domain of TCR clone 388036 (TRAV1-2, TRAJ8)
CALREDTGFQKLVF

SEQ ID NO: 776072 - protein, 14 aa, Homo sapiens
  CDR3 for beta chain variable domain of TCR clone 388036 (TRBV11-3, TRBJ2-3)
CASSRLARTDTQYF

SEQ ID NO: 776073 - protein, 18 aa, Homo sapiens
  CDR3 for alpha chain variable domain of TCR clone 388037 (TRAV1-1, TRAJ12)
CLLLLRYERGDSSYKLIF

SEQ ID NO: 776074 - protein, 15 aa, Homo sapiens
  CDR3 for beta chain variable domain of TCR clone 388037 (TRBV18, TRBJ2-5)
CASTDRGPRQETQYF

SEQ ID NO: 776075 - protein, 16 aa, Homo sapiens
  CDR3 for alpha chain variable domain of TCR clone 388038 (TRAV16, TRAJ42)
CALSGYYGVSQGNLIF

SEQ ID NO: 776076 - protein, 12 aa, Homo sapiens
  CDR3 for beta chain variable domain of TCR clone 388038 (TRBV7-9, TRBJ2-7)
CASSLEGYEQYF

SEQ ID NO: 776077 - protein, 14 aa, Homo sapiens
  CDR3 for alpha chain variable domain of TCR clone 388039 (TRAV1-2, TRAJ16)
CAVNRFSHGQKLLF

SEQ ID NO: 776078 - protein, 14 aa, Homo sapiens
  CDR3 for beta chain variable domain of TCR clone 388039 (TRBV18, TRBJ2-7)
CASSPRGGAYEQYF

SEQ ID NO: 776079 - protein, 16 aa, Homo sapiens
  CDR3 for alpha chain variable domain of TCR clone 388040 (TRAV26-1, TRAJ52)
CIVSNAGGTSYGKMTF

SEQ ID NO: 776080 - protein, 15 aa, Homo sapiens
  CDR3 for beta chain variable domain of TCR clone 388040 (TRBV7-3, TRBJ2-1)
CASSPTGGGEVEQFF

SEQ ID NO: 776081 - protein, 12 aa, Homo sapiens
  CDR3 for alpha chain variable domain of TCR clone 388041 (TRAV35, TRAJ40)
CAGRAGTYKYIF

SEQ ID NO: 776082 - protein, 14 aa, Homo sapiens
  CDR3 for beta chain variable domain of TCR clone 388041 (TRBV7-2, TRBJ1-3)
CASTRGGTGNTIYF

SEQ ID NO: 776083 - protein, 14 aa, Homo sapiens
  CDR3 for alpha chain variable domain of TCR clone 388042 (TRAV12-3, TRAJ33)
CAMSEEDSNYQLIW

SEQ ID NO: 776084 - protein, 15 aa, Homo sapiens
  CDR3 for beta chain variable domain of TCR clone 388042 (TRBV11-3, TRBJ2-3)
CASLKDGREGDTQYF

SEQ ID NO: 776085 - protein, 16 aa, Homo sapiens
  CDR3 for alpha chain variable domain of TCR clone 388043 (TRAV3, TRAJ28)
CAVLPRSGAGSYQLTF

SEQ ID NO: 776086 - protein, 18 aa, Homo sapiens
  CDR3 for beta chain variable domain of TCR clone 388043 (TRBV7-9, TRBJ2-7)
CASSLTTIGSRTWYEQYF

SEQ ID NO: 776087 - protein, 20 aa, Homo sapiens
  CDR3 for alpha chain variable domain of TCR clone 388044 (TRAV25, TRAJ53)
CRNLLLPHKQSGGSNYKLTF

SEQ ID NO: 776088 - protein, 14 aa, Homo sapiens
  CDR3 for beta chain variable domain of TCR clone 388044 (TRBV11-2, TRBJ2-3)
CASSRLARTDTQYF

SEQ ID NO: 776089 - protein, 13 aa, Homo sapiens
  CDR3 for alpha chain variable domain of TCR clone 388045 (TRAV17, TRAJ26)
CATVDNYGQNFVF

SEQ ID NO: 776090 - protein, 16 aa, Homo sapiens
  CDR3 for beta chain variable domain of TCR clone 388045 (TRBV20-1, TRBJ1-4)
CSAPGQGLLTNEKLFF

SEQ ID NO: 776091 - protein, 13 aa, Homo sapiens
  CDR3 for alpha chain variable domain of TCR clone 388046 (TRAV29/DV5, TRAJ31)
CAASRNNNARLMF

SEQ ID NO: 776092 - protein, 15 aa, Homo sapiens
  CDR3 for beta chain variable domain of TCR clone 388046 (TRBV7-2, TRBJ1-1)
CASSPQGGANTEAFF

SEQ ID NO: 776093 - protein, 17 aa, Homo sapiens
  CDR3 for alpha chain variable domain of TCR clone 388047 (TRAV3, TRAJ6)
CAVRDGSRAGGSYIPTF

SEQ ID NO: 776094 - protein, 18 aa, Homo sapiens
  CDR3 for beta chain variable domain of TCR clone 388047 (TRBV7-9, TRBJ2-7)
CASSLTTSGSRTWYEQYF

SEQ ID NO: 776095 - protein, 15 aa, Homo sapiens
  CDR3 for alpha chain variable domain of TCR clone 388048 (TRAV3, TRAJ27)
CAVRGFTPMQANQPL

SEQ ID NO: 776096 - protein, 12 aa, Homo sapiens
  CDR3 for beta chain variable domain of TCR clone 388048 (TRBV11-3, TRBJ2-2)
CASSLGGGELFL

SEQ ID NO: 776097 - protein, 16 aa, Homo sapiens
  CDR3 for alpha chain variable domain of TCR clone 388049 (TRAV26-1, TRAJ50)
CIVRALMKTSYDKVIF

SEQ ID NO: 776098 - protein, 14 aa, Homo sapiens
  CDR3 for beta chain variable domain of TCR clone 388049 (TRBV19, TRBJ2-1)
CASPTFVLSGEQFF

SEQ ID NO: 776099 - protein, 15 aa, Homo sapiens
  CDR3 for alpha chain variable domain of TCR clone 388050 (TRAV4, TRAJ39)
CLVGPNNNAGNMLTF

SEQ ID NO: 776100 - protein, 13 aa, Homo sapiens
  CDR3 for beta chain variable domain of TCR clone 388050 (TRBV11-2, TRBJ2-5)
CASSSTGEETLYF

SEQ ID NO: 776101 - protein, 15 aa, Homo sapiens
  CDR3 for alpha chain variable domain of TCR clone 388051 (TRAV21, TRAJ53)
CATLNSGGSNYKLTF

SEQ ID NO: 776102 - protein, 13 aa, Homo sapiens
  CDR3 for beta chain variable domain of TCR clone 388051 (TRBV7-7, TRBJ2-5)
CASSRSGQETQYF

SEQ ID NO: 776103 - protein, 14 aa, Homo sapiens
  CDR3 for alpha chain variable domain of TCR clone 388052 (TRAV4, TRAJ9)
CLVGSGTGGFKTIF

SEQ ID NO: 776104 - protein, 14 aa, Homo sapiens
  CDR3 for beta chain variable domain of TCR clone 388052 (TRBV11-2, TRBJ2-7)
CASSLGAGAYEQYF

SEQ ID NO: 776105 - protein, 19 aa, Homo sapiens
  CDR3 for alpha chain variable domain of TCR clone 388053 (TRAV26-1, TRAJ22)
CCVLLHQWVFSGSARQLTF

SEQ ID NO: 776106 - protein, 19 aa, Homo sapiens
  CDR3 for beta chain variable domain of TCR clone 388053 (TRBV19, TRBJ2-5)
CASSIGQVTDFFLGETQYF

SEQ ID NO: 776107 - protein, 16 aa, Homo sapiens
  CDR3 for alpha chain variable domain of TCR clone 388054 (TRAV26-1, TRAJ38)
CIVRAYNAGNNRTLIW

SEQ ID NO: 776108 - protein, 12 aa, Homo sapiens
  CDR3 for beta chain variable domain of TCR clone 388054 (TRBV28, TRBJ2-1)
CASSVQINEQFF

SEQ ID NO: 776109 - protein, 12 aa, Homo sapiens
  CDR3 for alpha chain variable domain of TCR clone 388055 (TRAV8-3, TRAJ20)
CAVGANDYKLSF

SEQ ID NO: 776110 - protein, 13 aa, Homo sapiens
  CDR3 for beta chain variable domain of TCR clone 388055 (TRBV12-4, TRBJ2-1)
CASSFHSGSEQFF

SEQ ID NO: 776111 - protein, 22 aa, Homo sapiens
  CDR3 for alpha chain variable domain of TCR clone 388056 (TRAV27, TRAJ38)
CAARRNAGNNRIQNPDPAVYQL

SEQ ID NO: 776112 - protein, 13 aa, Homo sapiens
  CDR3 for beta chain variable domain of TCR clone 388056 (TRBV12-5, TRBJ2-3)
CASGDRQSDTQYF

SEQ ID NO: 776113 - protein, 12 aa, Homo sapiens
  CDR3 for alpha chain variable domain of TCR clone 388057 (TRAV12-3, TRAJ17)
CAMTLTGNKLTF

SEQ ID NO: 776114 - protein, 12 aa, Homo sapiens
  CDR3 for beta chain variable domain of TCR clone 388057 (TRBV4-1, TRBJ2-3)
CSSSQGTDTQYF

SEQ ID NO: 776115 - protein, 11 aa, Homo sapiens
  CDR3 for alpha chain variable domain of TCR clone 388058 (TRAV30, TRAJ23)
CGTEIAGKLIF

SEQ ID NO: 776116 - protein, 16 aa, Homo sapiens
  CDR3 for beta chain variable domain of TCR clone 388058 (TRBV7-2, TRBJ2-7)
CASTSQAASGGYAQYF

SEQ ID NO: 776117 - protein, 13 aa, Homo sapiens
  CDR3 for alpha chain variable domain of TCR clone 388059 (TRAV1-2, TRAJ9)
CAALNTGGFKTIF

SEQ ID NO: 776118 - protein, 13 aa, Homo sapiens
  CDR3 for beta chain variable domain of TCR clone 388059 (TRBV19, TRBJ1-2)
CASSIPGQDGHTF

SEQ ID NO: 776119 - protein, 15 aa, Homo sapiens
  CDR3 for alpha chain variable domain of TCR clone 388060 (TRAV17, TRAJ35)
CAAEGGIGFGNVLHC

SEQ ID NO: 776120 - protein, 16 aa, Homo sapiens
  CDR3 for beta chain variable domain of TCR clone 388060 (TRBV6-5, TRBJ2-7)
CASSSDPTSGFYEQYF

SEQ ID NO: 776121 - protein, 13 aa, Homo sapiens
  CDR3 for alpha chain variable domain of TCR clone 388061 (TRAV3, TRAJ26)
CAVSRGYGQNFVF

SEQ ID NO: 776122 - protein, 15 aa, Homo sapiens
  CDR3 for beta chain variable domain of TCR clone 388061 (TRBV27, TRBJ2-1)
RASSLARGAYNEQFF

SEQ ID NO: 776123 - protein, 15 aa, Homo sapiens
  CDR3 for alpha chain variable domain of TCR clone 388062 (TRAV23/DV6, TRAJ37)
CAAGEGSSNTGKLIF

SEQ ID NO: 776124 - protein, 14 aa, Homo sapiens
  CDR3 for beta chain variable domain of TCR clone 388062 (TRBV12-5, TRBJ2-5)
CASGSRTHQETQYF

SEQ ID NO: 776125 - protein, 14 aa, Homo sapiens
  CDR3 for alpha chain variable domain of TCR clone 388063 (TRAV12-1, TRAJ24)
CVVRSTDSWGKFQF

SEQ ID NO: 776126 - protein, 14 aa, Homo sapiens
  CDR3 for beta chain variable domain of TCR clone 388063 (TRBV11-2, TRBJ2-3)
CASSLGGGTDTQYF

SEQ ID NO: 776127 - protein, 16 aa, Homo sapiens
  CDR3 for alpha chain variable domain of TCR clone 388064 (TRAV23/DV6, TRAJ9)
CAASIGGNTGGFKSIF

SEQ ID NO: 776128 - protein, 14 aa, Homo sapiens
  CDR3 for beta chain variable domain of TCR clone 388064 (TRBV9, TRBJ2-7)
CASSVGVGSYEQYF

SEQ ID NO: 776129 - protein, 23 aa, Homo sapiens
  CDR3 for alpha chain variable domain of TCR clone 388065 (TRAV1-1, TRAJ11)
LLQELQMKDSASYFCAGYSTLTF

SEQ ID NO: 776130 - protein, 13 aa, Homo sapiens
  CDR3 for beta chain variable domain of TCR clone 388065 (TRBV19, TRBJ2-7)
CASSPRQSYEQYF

SEQ ID NO: 776131 - protein, 14 aa, Homo sapiens
  CDR3 for alpha chain variable domain of TCR clone 388066 (TRAV8-4, TRAJ13)
CAVSLSGGYQKVTF

SEQ ID NO: 776132 - protein, 14 aa, Homo sapiens
  CDR3 for beta chain variable domain of TCR clone 388066 (TRBV7-2, TRBJ1-2)
CASSQTGSTYGYTF

SEQ ID NO: 776133 - protein, 14 aa, Homo sapiens
  CDR3 for alpha chain variable domain of TCR clone 388067 (TRAV9-2, TRAJ39)
CALYIYNAGNMLTF

SEQ ID NO: 776134 - protein, 14 aa, Homo sapiens
  CDR3 for beta chain variable domain of TCR clone 388067 (TRBV6-1, TRBJ1-3)
CASVQGGGGNSIYF

SEQ ID NO: 776135 - protein, 12 aa, Homo sapiens
  CDR3 for alpha chain variable domain of TCR clone 388068 (TRAV27, TRAJ13)
CAGVRGYQKVTF

SEQ ID NO: 776136 - protein, 16 aa, Homo sapiens
  CDR3 for beta chain variable domain of TCR clone 388068 (TRBV28, TRBJ2-1)
CASSSSDSGSLNEQFF

SEQ ID NO: 776137 - protein, 15 aa, Homo sapiens
  CDR3 for alpha chain variable domain of TCR clone 388069 (TRAV2, TRAJ11)
CAVGGLNSGYSTLTF

SEQ ID NO: 776138 - protein, 14 aa, Homo sapiens
  CDR3 for beta chain variable domain of TCR clone 388069 (TRBV4-1, TRBJ2-2)
CASSQAVNTGELFF

SEQ ID NO: 776139 - protein, 12 aa, Homo sapiens
  CDR3 for alpha chain variable domain of TCR clone 388070 (TRAV2, TRAJ10)
CASTGGGNKLTF

SEQ ID NO: 776140 - protein, 15 aa, Homo sapiens
  CDR3 for beta chain variable domain of TCR clone 388070 (TRBV7-2, TRBJ1-5)
CASSLDRGQDQPQHF

SEQ ID NO: 776141 - protein, 14 aa, Homo sapiens
  CDR3 for alpha chain variable domain of TCR clone 388071 (TRAV17, TRAJ54)
CATDANQGAQKLVF

SEQ ID NO: 776142 - protein, 13 aa, Homo sapiens
  CDR3 for beta chain variable domain of TCR clone 388071 (TRBV2, TRBJ2-7)
CASSVGGSGEQYF

SEQ ID NO: 776143 - protein, 12 aa, Homo sapiens
  CDR3 for alpha chain variable domain of TCR clone 388072 (TRAV21, TRAJ33)
CAKMDSNYQLIW

SEQ ID NO: 776144 - protein, 13 aa, Homo sapiens
  CDR3 for beta chain variable domain of TCR clone 388072 (TRBV12-4, TRBJ2-5)
CASGPGTEETQYF

SEQ ID NO: 776145 - protein, 16 aa, Homo sapiens
  CDR3 for alpha chain variable domain of TCR clone 388073 (TRAV30, TRAJ24)
CGTEIVDATAGGNSSL

SEQ ID NO: 776146 - protein, 14 aa, Homo sapiens
  CDR3 for beta chain variable domain of TCR clone 388073 (TRBV12-5, TRBJ2-5)
CASGSRTHQETQYF

SEQ ID NO: 776147 - protein, 17 aa, Homo sapiens
  CDR3 for alpha chain variable domain of TCR clone 388074 (TRAV3, TRAJ6)
CAVRDGPRVGGSYIPTF

SEQ ID NO: 776148 - protein, 14 aa, Homo sapiens
  CDR3 for beta chain variable domain of TCR clone 388074 (TRBV7-2, TRBJ2-7)
CASSPKTSCYEQYF

SEQ ID NO: 776149 - protein, 13 aa, Homo sapiens
  CDR3 for alpha chain variable domain of TCR clone 388075 (TRAV38-1, TRAJ42)
CARWGGSQGNLIF

SEQ ID NO: 776150 - protein, 13 aa, Homo sapiens
  CDR3 for beta chain variable domain of TCR clone 388075 (TRBV6-5, TRBJ2-5)
CASSPQGGETQYF

SEQ ID NO: 776151 - protein, 14 aa, Homo sapiens
  CDR3 for alpha chain variable domain of TCR clone 388076 (TRAV13-1, TRAJ44)
CAAKATGTASTLTF

SEQ ID NO: 776152 - protein, 17 aa, Homo sapiens
  CDR3 for beta chain variable domain of TCR clone 388076 (TRBV7-3, TRBJ2-3)
CASSLRKRMRGADTQYF

SEQ ID NO: 776153 - protein, 15 aa, Homo sapiens
  CDR3 for alpha chain variable domain of TCR clone 388077 (TRAV12-2, TRAJ42)
CAVNSHGGSPGNLIL

SEQ ID NO: 776154 - protein, 13 aa, Homo sapiens
  CDR3 for beta chain variable domain of TCR clone 388077 (TRBV27, TRBJ1-1)
CASSVSANTEAFF

SEQ ID NO: 776155 - protein, 15 aa, Homo sapiens
  CDR3 for alpha chain variable domain of TCR clone 388078 (TRAV21, TRAJ13)
CAVPRSFWGLTESYL

SEQ ID NO: 776156 - protein, 15 aa, Homo sapiens
  CDR3 for beta chain variable domain of TCR clone 388078 (TRBV7-9, TRBJ1-6)
CASSSPGRGNSPLHF

SEQ ID NO: 776157 - protein, 12 aa, Homo sapiens
  CDR3 for alpha chain variable domain of TCR clone 388079 (TRAV12-3, TRAJ5)
CAMDTGRRALTL

SEQ ID NO: 776158 - protein, 15 aa, Homo sapiens
  CDR3 for beta chain variable domain of TCR clone 388079 (TRBV5-1, TRBJ2-7)
CASSLNGGPAREQYF

SEQ ID NO: 776159 - protein, 14 aa, Homo sapiens
  CDR3 for alpha chain variable domain of TCR clone 388080 (TRAV24, TRAJ42)
CAQNYGGSKGNLIF

SEQ ID NO: 776160 - protein, 15 aa, Homo sapiens
  CDR3 for beta chain variable domain of TCR clone 388080 (TRBV19, TRBJ1-5)
CASSIPGGAGQPQHF

SEQ ID NO: 776161 - protein, 13 aa, Homo sapiens
  CDR3 for alpha chain variable domain of TCR clone 388081 (TRAV35, TRAJ42)
CAGFPGSQGNLIF

SEQ ID NO: 776162 - protein, 13 aa, Homo sapiens
  CDR3 for beta chain variable domain of TCR clone 388081 (TRBV12-4, TRBJ1-1)
CASSPGTGFEAFF

SEQ ID NO: 776163 - protein, 17 aa, Homo sapiens
  CDR3 for alpha chain variable domain of TCR clone 388082 (TRAV3, TRAJ6)
CAVRDGPRAGGSYIPTF

SEQ ID NO: 776164 - protein, 14 aa, Homo sapiens
  CDR3 for beta chain variable domain of TCR clone 388082 (TRBV6-1, TRBJ1-3)
CAGVQGGGGNTIYF

SEQ ID NO: 776165 - protein, 14 aa, Homo sapiens
  CDR3 for alpha chain variable domain of TCR clone 388083 (TRAV17, TRAJ45)
CATDARGGADGLTF

SEQ ID NO: 776166 - protein, 11 aa, Homo sapiens
  CDR3 for beta chain variable domain of TCR clone 388083 (TRBV28, TRBJ2-5)
CATGNQEIQYF

SEQ ID NO: 776167 - protein, 14 aa, Homo sapiens
  CDR3 for alpha chain variable domain of TCR clone 388084 (TRAV35, TRAJ38)
CAGSNAGNNRKLIW

SEQ ID NO: 776168 - protein, 15 aa, Homo sapiens
  CDR3 for beta chain variable domain of TCR clone 388084 (TRBV7-9, TRBJ1-2)
CASSSVDRSNYGYTF

SEQ ID NO: 776169 - protein, 11 aa, Homo sapiens
  CDR3 for alpha chain variable domain of TCR clone 388085 (TRAV1-2, TRAJ31)
CAVNNNARLMF

SEQ ID NO: 776170 - protein, 15 aa, Homo sapiens
  CDR3 for beta chain variable domain of TCR clone 388085 (TRBV19, TRBJ2-1)
CASSGGGTLYNEQFF

SEQ ID NO: 776171 - protein, 13 aa, Homo sapiens
  CDR3 for alpha chain variable domain of TCR clone 388086 (TRAV8-6, TRAJ9)
CAVWDTGRFKTIF

SEQ ID NO: 776172 - protein, 14 aa, Homo sapiens
  CDR3 for beta chain variable domain of TCR clone 388086 (TRBV2, TRBJ2-1)
CASSEALIYNEQFF

SEQ ID NO: 776173 - protein, 16 aa, Homo sapiens
  CDR3 for alpha chain variable domain of TCR clone 388087 (TRAV3, TRAJ37)
CAVRPHGSGNTDKLIF

SEQ ID NO: 776174 - protein, 15 aa, Homo sapiens
  CDR3 for beta chain variable domain of TCR clone 388087 (TRBV10-3, TRBJ2-3)
CAISLTSGGTDTQYF

SEQ ID NO: 776175 - protein, 12 aa, Homo sapiens
  CDR3 for alpha chain variable domain of TCR clone 388088 (TRAV12-2, TRAJ16)
CAVAPDGQKLLF

SEQ ID NO: 776176 - protein, 13 aa, Homo sapiens
  CDR3 for beta chain variable domain of TCR clone 388088 (TRBV20-1, TRBJ2-7)
CSARPSTNYEQYF

SEQ ID NO: 776177 - protein, 18 aa, Homo sapiens
  CDR3 for alpha chain variable domain of TCR clone 388089 (TRAV21, TRAJ52)
CAVRPSPAGGTSYGKLTF

SEQ ID NO: 776178 - protein, 13 aa, Homo sapiens
  CDR3 for beta chain variable domain of TCR clone 388089 (TRBV10-3, TRBJ2-7)
CASKLAVNYEQDF

SEQ ID NO: 776179 - protein, 14 aa, Homo sapiens
  CDR3 for alpha chain variable domain of TCR clone 388090 (TRAV23/DV6, TRAJ57)
CAASNQGGSEKLVF

SEQ ID NO: 776180 - protein, 15 aa, Homo sapiens
  CDR3 for beta chain variable domain of TCR clone 388090 (TRBV28, TRBJ2-4)
CAAGSGTLLMGIQYF

SEQ ID NO: 776181 - protein, 12 aa, Homo sapiens
  CDR3 for alpha chain variable domain of TCR clone 388091 (TRAV21, TRAJ13)
PGPSGGYQKVTF

SEQ ID NO: 776182 - protein, 15 aa, Homo sapiens
  CDR3 for beta chain variable domain of TCR clone 388091 (TRBV20-1, TRBJ2-7)
CSARVPAAYFYEQYF

SEQ ID NO: 776183 - protein, 17 aa, Homo sapiens
  CDR3 for alpha chain variable domain of TCR clone 388092 (TRAV3, TRAJ38)
CAVRDCLNAGNNRKLIW

SEQ ID NO: 776184 - protein, 11 aa, Homo sapiens
  CDR3 for beta chain variable domain of TCR clone 388092 (TRBV7-9, TRBJ2-3)
CASSPTDTQYF

SEQ ID NO: 776185 - protein, 13 aa, Homo sapiens
  CDR3 for alpha chain variable domain of TCR clone 388093 (TRAV8-3, TRAJ28)
CAVGAVGSYQLTF

SEQ ID NO: 776186 - protein, 14 aa, Homo sapiens
  CDR3 for beta chain variable domain of TCR clone 388093 (TRBV27, TRBJ1-1)
CASSPQGKRAEAFF

SEQ ID NO: 776187 - protein, 15 aa, Homo sapiens
  CDR3 for alpha chain variable domain of TCR clone 388094 (TRAV3, TRAJ5)
CAVRDLDTGRAALTF

SEQ ID NO: 776188 - protein, 13 aa, Homo sapiens
  CDR3 for beta chain variable domain of TCR clone 388094 (TRBV12-4, TRBJ2-7)
CASSPTETYEQYF

SEQ ID NO: 776189 - protein, 14 aa, Homo sapiens
  CDR3 for alpha chain variable domain of TCR clone 388095 (TRAV1-1, TRAJ35)
CAVRSIGFGNVLHC

SEQ ID NO: 776190 - protein, 14 aa, Homo sapiens
  CDR3 for beta chain variable domain of TCR clone 388095 (TRBV5-6, TRBJ2-7)
CANSGGLSSYEQCF

SEQ ID NO: 776191 - protein, 16 aa, Homo sapiens
  CDR3 for alpha chain variable domain of TCR clone 388096 (TRAV20, TRAJ26)
CAVQHRRDNYGQNFVF

SEQ ID NO: 776192 - protein, 13 aa, Homo sapiens
  CDR3 for beta chain variable domain of TCR clone 388096 (TRBV27, TRBJ2-1)
CASRTLVVGEQFF

SEQ ID NO: 776193 - protein, 13 aa, Homo sapiens
  CDR3 for alpha chain variable domain of TCR clone 388097 (TRAV8-3, TRAJ44)
CAVVPGTASKLTF

SEQ ID NO: 776194 - protein, 13 aa, Homo sapiens
  CDR3 for beta chain variable domain of TCR clone 388097 (TRBV11-2, TRBJ2-3)
CASSRLAHRYAVF

SEQ ID NO: 776195 - protein, 12 aa, Homo sapiens
  CDR3 for alpha chain variable domain of TCR clone 388098 (TRAV2, TRAJ9)
CAVAAGGFKTIF

SEQ ID NO: 776196 - protein, 13 aa, Homo sapiens
  CDR3 for beta chain variable domain of TCR clone 388098 (TRBV4-2, TRBJ1-1)
CASSQAGNTEAFF

SEQ ID NO: 776197 - protein, 13 aa, Homo sapiens
  CDR3 for alpha chain variable domain of TCR clone 388099 (TRAV13-2, TRAJ48)
CAEMDFGNEKLTF

SEQ ID NO: 776198 - protein, 15 aa, Homo sapiens
  CDR3 for beta chain variable domain of TCR clone 388099 (TRBV7-9, TRBJ1-6)
SASSSPGRGNSPLHF

SEQ ID NO: 776199 - protein, 16 aa, Homo sapiens
  CDR3 for alpha chain variable domain of TCR clone 388100 (TRAV14/DV4, TRAJ54)
CAMREGRIQGAQKLVF

SEQ ID NO: 776200 - protein, 13 aa, Homo sapiens
  CDR3 for beta chain variable domain of TCR clone 388100 (TRBV7-3, TRBJ1-1)
CASSQDWGAEAFF

SEQ ID NO: 776201 - protein, 12 aa, Homo sapiens
  CDR3 for alpha chain variable domain of TCR clone 388101 (TRAV25, TRAJ30)
CAGKNRDDKIIF

SEQ ID NO: 776202 - protein, 11 aa, Homo sapiens
  CDR3 for beta chain variable domain of TCR clone 388101 (TRBV12-4, TRBJ2-7)
CATPEKGELYF

SEQ ID NO: 776203 - protein, 14 aa, Homo sapiens
  CDR3 for alpha chain variable domain of TCR clone 388102 (TRAV3, TRAJ28)
CAVRRGAGSYQLTF

SEQ ID NO: 776204 - protein, 16 aa, Homo sapiens
  CDR3 for beta chain variable domain of TCR clone 388102 (TRBV4-1, TRBJ2-7)
CASSREWTSGPLEQYF

SEQ ID NO: 776205 - protein, 14 aa, Homo sapiens
  CDR3 for alpha chain variable domain of TCR clone 388103 (TRAV1-2, TRAJ16)
CAVNRFSDGQKLLF

SEQ ID NO: 776206 - protein, 15 aa, Homo sapiens
  CDR3 for beta chain variable domain of TCR clone 388103 (TRBV20-1, TRBJ2-1)
CSARGGTRYYNEQFF

SEQ ID NO: 776207 - protein, 12 aa, Homo sapiens
  CDR3 for alpha chain variable domain of TCR clone 388104 (TRAV13-1, TRAJ11)
CAGPSGYSTLTF

SEQ ID NO: 776208 - protein, 13 aa, Homo sapiens
  CDR3 for beta chain variable domain of TCR clone 388104 (TRBV12-4, TRBJ1-5)
CASSPGRAQPQHF

SEQ ID NO: 776209 - protein, 12 aa, Homo sapiens
  CDR3 for alpha chain variable domain of TCR clone 388105 (TRAV8-3, TRAJ41)
CAVALSGYALNF

SEQ ID NO: 776210 - protein, 18 aa, Homo sapiens
  CDR3 for beta chain variable domain of TCR clone 388105 (TRBV20-1, TRBJ2-6)
CSAGTTPTHGSGANVLTF

SEQ ID NO: 776211 - protein, 19 aa, Homo sapiens
  CDR3 for alpha chain variable domain of TCR clone 388106 (TRAV38-1, TRAJ53)
CAFMKHGLESGGSNYKLTF

SEQ ID NO: 776212 - protein, 13 aa, Homo sapiens
  CDR3 for beta chain variable domain of TCR clone 388106 (TRBV20-1, TRBJ1-5)
CSAPGGPNQPQHF

SEQ ID NO: 776213 - protein, 12 aa, Homo sapiens
  CDR3 for alpha chain variable domain of TCR clone 388107 (TRAV12-3, TRAJ17)
CAMTLTGNKLTF

SEQ ID NO: 776214 - protein, 13 aa, Homo sapiens
  CDR3 for beta chain variable domain of TCR clone 388107 (TRBV20-1, TRBJ2-7)
CSASPFSSYEQYF

SEQ ID NO: 776215 - protein, 15 aa, Homo sapiens
  CDR3 for alpha chain variable domain of TCR clone 388108 (TRAV26-1, TRAJ53)
CIVGVEGGSNYRLTF

SEQ ID NO: 776216 - protein, 14 aa, Homo sapiens
  CDR3 for beta chain variable domain of TCR clone 388108 (TRBV4-3, TRBJ2-1)
CASSQDRWRGEQFF

SEQ ID NO: 776217 - protein, 10 aa, Homo sapiens
  CDR3 for alpha chain variable domain of TCR clone 388109 (TRAV9-2, TRAJ49)
CALAGNQFYF

SEQ ID NO: 776218 - protein, 16 aa, Homo sapiens
  CDR3 for beta chain variable domain of TCR clone 388109 (TRBV19, TRBJ2-3)
CASSPGAASRTDTQYF

SEQ ID NO: 776219 - protein, 15 aa, Homo sapiens
  CDR3 for alpha chain variable domain of TCR clone 388110 (TRAV13-1, TRAJ44)
CAASRGGGTASKLTF

SEQ ID NO: 776220 - protein, 14 aa, Homo sapiens
  CDR3 for beta chain variable domain of TCR clone 388110 (TRBV7-2, TRBJ2-5)
CASSPRGSSKTQYF

SEQ ID NO: 776221 - protein, 11 aa, Homo sapiens
  CDR3 for alpha chain variable domain of TCR clone 388111 (TRAV1-1, TRAJ16)
CAAGDGKKLLF

SEQ ID NO: 776222 - protein, 15 aa, Homo sapiens
  CDR3 for beta chain variable domain of TCR clone 388111 (TRBV28, TRBJ1-2)
CASIPQGSDDYGYTF

SEQ ID NO: 776223 - protein, 13 aa, Homo sapiens
  CDR3 for alpha chain variable domain of TCR clone 388112 (TRAV36/DV7, TRAJ54)
YAVLIQGAQKLVF

SEQ ID NO: 776224 - protein, 16 aa, Homo sapiens
  CDR3 for beta chain variable domain of TCR clone 388112 (TRBV23-1, TRBJ2-1)
CASSHAQRGGGNEQFF

SEQ ID NO: 776225 - protein, 17 aa, Homo sapiens
  CDR3 for alpha chain variable domain of TCR clone 388113 (TRAV3, TRAJ6)
CAVRDGPRAGGSYIPTF

SEQ ID NO: 776226 - protein, 15 aa, Homo sapiens
  CDR3 for beta chain variable domain of TCR clone 388113 (TRBV11-2, TRBJ2-2)
CASSLETGVTGEQFF

SEQ ID NO: 776227 - protein, 16 aa, Homo sapiens
  CDR3 for alpha chain variable domain of TCR clone 388114 (TRAV26-1, TRAJ37)
CIVRGDVSGNTGKLIF

SEQ ID NO: 776228 - protein, 17 aa, Homo sapiens
  CDR3 for beta chain variable domain of TCR clone 388114 (TRBV11-2, TRBJ2-1)
CASSLYPPGVEYNEQFF

SEQ ID NO: 776229 - protein, 17 aa, Homo sapiens
  CDR3 for alpha chain variable domain of TCR clone 388115 (TRAV8-6, TRAJ58)
CAVSSWGGETSGSRLTF

SEQ ID NO: 776230 - protein, 14 aa, Homo sapiens
  CDR3 for beta chain variable domain of TCR clone 388115 (TRBV4-2, TRBJ2-1)
CASSLDRAYNEQFF

SEQ ID NO: 776231 - protein, 15 aa, Homo sapiens
  CDR3 for alpha chain variable domain of TCR clone 388116 (TRAV8-2, TRAJ40)
CVVLGTTSGPYKYTF

SEQ ID NO: 776232 - protein, 16 aa, Homo sapiens
  CDR3 for beta chain variable domain of TCR clone 388116 (TRBV7-3, TRBJ2-1)
CASSLEGYRSDNEQFF

SEQ ID NO: 776233 - protein, 15 aa, Homo sapiens
  CDR3 for alpha chain variable domain of TCR clone 388117 (TRAV8-4, TRAJ6)
CAVSAPSGGSYIPTV

SEQ ID NO: 776234 - protein, 15 aa, Homo sapiens
  CDR3 for beta chain variable domain of TCR clone 388117 (TRBV2, TRBJ2-1)
CASSEARSAYNEQFF

SEQ ID NO: 776235 - protein, 12 aa, Homo sapiens
  CDR3 for alpha chain variable domain of TCR clone 388118 (TRAV13-1, TRAJ49)
CATSPMGNQFYF

SEQ ID NO: 776236 - protein, 13 aa, Homo sapiens
  CDR3 for beta chain variable domain of TCR clone 388118 (TRBV20-1, TRBJ2-2)
CSASAAGTGELFF

SEQ ID NO: 776237 - protein, 10 aa, Homo sapiens
  CDR3 for alpha chain variable domain of TCR clone 388119 (TRAV2, TRAJ34)
CAVVNDKLIF

SEQ ID NO: 776238 - protein, 20 aa, Homo sapiens
  CDR3 for beta chain variable domain of TCR clone 388119 (TRBV19, TRBJ2-1)
CANSISRTVTSTRLNNEQFF

SEQ ID NO: 776239 - protein, 17 aa, Homo sapiens
  CDR3 for alpha chain variable domain of TCR clone 388120 (TRAV36/DV7, TRAJ52)
RAVAQRAGGTSYGKLTF

SEQ ID NO: 776240 - protein, 15 aa, Homo sapiens
  CDR3 for beta chain variable domain of TCR clone 388120 (TRBV20-1, TRBJ2-7)
CSARDRVSGMDEQYF

SEQ ID NO: 776241 - protein, 15 aa, Homo sapiens
  CDR3 for alpha chain variable domain of TCR clone 388121 (TRAV3, TRAJ13)
CAVRVYSGGYQKVTF

SEQ ID NO: 776242 - protein, 15 aa, Homo sapiens
  CDR3 for beta chain variable domain of TCR clone 388121 (TRBV2, TRBJ2-1)
CASSEEREGDNEQFF

SEQ ID NO: 776243 - protein, 14 aa, Homo sapiens
  CDR3 for alpha chain variable domain of TCR clone 388122 (TRAV12-3, TRAJ10)
SHLPLTGGGNKLSF

SEQ ID NO: 776244 - protein, 11 aa, Homo sapiens
  CDR3 for beta chain variable domain of TCR clone 388122 (TRBV19, TRBJ1-1)
CASSIGSEAFF

SEQ ID NO: 776245 - protein, 14 aa, Homo sapiens
  CDR3 for alpha chain variable domain of TCR clone 388123 (TRAV12-2, TRAJ11)
CAVRKHSGYSTLTF

SEQ ID NO: 776246 - protein, 14 aa, Homo sapiens
  CDR3 for beta chain variable domain of TCR clone 388123 (TRBV7-2, TRBJ2-5)
CASWQERFRETQYF

SEQ ID NO: 776247 - protein, 14 aa, Homo sapiens
  CDR3 for alpha chain variable domain of TCR clone 388124 (TRAV1-2, TRAJ16)
CAVDRFSDDQKLLF

SEQ ID NO: 776248 - protein, 15 aa, Homo sapiens
  CDR3 for beta chain variable domain of TCR clone 388124 (TRBV9, TRBJ1-6)
CASSVAGTGDSPLHF

SEQ ID NO: 776249 - protein, 14 aa, Homo sapiens
  CDR3 for alpha chain variable domain of TCR clone 388125 (TRAV27, TRAJ23)
CAGLSYNQGGKLIF

SEQ ID NO: 776250 - protein, 15 aa, Homo sapiens
  CDR3 for beta chain variable domain of TCR clone 388125 (TRBV19, TRBJ2-2)
CASSLNRGVTGELSF

SEQ ID NO: 776251 - protein, 12 aa, Homo sapiens
  CDR3 for alpha chain variable domain of TCR clone 388126 (TRAV4, TRAJ26)
CLVGDYGQNFVF

SEQ ID NO: 776252 - protein, 16 aa, Homo sapiens
  CDR3 for beta chain variable domain of TCR clone 388126 (TRBV12-5, TRBJ2-5)
CASGPRTSVNQETQYF

SEQ ID NO: 776253 - protein, 11 aa, Homo sapiens
  CDR3 for alpha chain variable domain of TCR clone 388127 (TRAV12-1, TRAJ21)
CVVYNFNKFNF

SEQ ID NO: 776254 - protein, 14 aa, Homo sapiens
  CDR3 for beta chain variable domain of TCR clone 388127 (TRBV19, TRBJ2-7)
CASSMGQGAIEQYF

SEQ ID NO: 776255 - protein, 11 aa, Homo sapiens
  CDR3 for alpha chain variable domain of TCR clone 388128 (TRAV2, TRAJ13)
CASGGYQKVTF

SEQ ID NO: 776256 - protein, 12 aa, Homo sapiens
  CDR3 for beta chain variable domain of TCR clone 388128 (TRBV4-3, TRBJ2-1)
CASSLSGYEQFF

SEQ ID NO: 776257 - protein, 12 aa, Homo sapiens
  CDR3 for alpha chain variable domain of TCR clone 388129 (TRAV16, TRAJ56)
CSPTGANSKLTF

SEQ ID NO: 776258 - protein, 15 aa, Homo sapiens
  CDR3 for beta chain variable domain of TCR clone 388129 (TRBV20-1, TRBJ2-7)
CSARDRVSGMDEQYF

SEQ ID NO: 776259 - protein, 18 aa, Homo sapiens
  CDR3 for alpha chain variable domain of TCR clone 388130 (TRAV26-2, TRAJ45)
CILRVDKYSGGGAAGLTF

SEQ ID NO: 776260 - protein, 15 aa, Homo sapiens
  CDR3 for beta chain variable domain of TCR clone 388130 (TRBV9, TRBJ1-6)
CASSVAGTGDSPLHF

SEQ ID NO: 776261 - protein, 15 aa, Homo sapiens
  CDR3 for alpha chain variable domain of TCR clone 388131 (TRAV12-2, TRAJ43)
CAFDMRFGAGTRLTV

SEQ ID NO: 776262 - protein, 13 aa, Homo sapiens
  CDR3 for beta chain variable domain of TCR clone 388131 (TRBV12-4, TRBJ2-1)
CASSLSPSNEQFF

SEQ ID NO: 776263 - protein, 18 aa, Homo sapiens
  CDR3 for alpha chain variable domain of TCR clone 388132 (TRAV26-2, TRAJ45)
CILRVWGYSGGGADGLTF

SEQ ID NO: 776264 - protein, 17 aa, Homo sapiens
  CDR3 for beta chain variable domain of TCR clone 388132 (TRBV28, TRBJ2-3)
CASSPTAAGGRVDTQYF

SEQ ID NO: 776265 - protein, 11 aa, Homo sapiens
  CDR3 for alpha chain variable domain of TCR clone 388133 (TRAV3, TRAJ21)
CDVGNFNKFYF

SEQ ID NO: 776266 - protein, 16 aa, Homo sapiens
  CDR3 for beta chain variable domain of TCR clone 388133 (TRBV19, TRBJ2-1)
CANSKAGPSSYNEQFF

SEQ ID NO: 776267 - protein, 18 aa, Homo sapiens
  CDR3 for alpha chain variable domain of TCR clone 388134 (TRAV12-3, TRAJ52)
CAMSRTNAGGTSYGKLTF

SEQ ID NO: 776268 - protein, 17 aa, Homo sapiens
  CDR3 for beta chain variable domain of TCR clone 388134 (TRBV7-3, TRBJ2-3)
CASSLMKRMRGADTQYY

SEQ ID NO: 776269 - protein, 13 aa, Homo sapiens
  CDR3 for alpha chain variable domain of TCR clone 388135 (TRAV3, TRAJ27)
CAVRPLGAGKSTF

SEQ ID NO: 776270 - protein, 13 aa, Homo sapiens
  CDR3 for beta chain variable domain of TCR clone 388135 (TRBV4-1, TRBJ2-1)
CASSQEVQYEQFF

SEQ ID NO: 776271 - protein, 12 aa, Homo sapiens
  CDR3 for alpha chain variable domain of TCR clone 388136 (TRAV26-1, TRAJ35)
CIGLSFGNVLHC

SEQ ID NO: 776272 - protein, 15 aa, Homo sapiens
  CDR3 for beta chain variable domain of TCR clone 388136 (TRBV7-2, TRBJ1-2)
CASSPRAGWNYGYTF

SEQ ID NO: 776273 - protein, 16 aa, Homo sapiens
  CDR3 for alpha chain variable domain of TCR clone 388137 (TRAV27, TRAJ45)
CPPRGRRGGGADGLTL

SEQ ID NO: 776274 - protein, 12 aa, Homo sapiens
  CDR3 for beta chain variable domain of TCR clone 388137 (TRBV7-3, TRBJ2-1)
CASSFINNEQFF

SEQ ID NO: 776275 - protein, 15 aa, Homo sapiens
  CDR3 for alpha chain variable domain of TCR clone 388138 (TRAV14/DV4, TRAJ10)
CAMRELTGGGHKLTF

SEQ ID NO: 776276 - protein, 18 aa, Homo sapiens
  CDR3 for beta chain variable domain of TCR clone 388138 (TRBV7-9, TRBJ2-7)
CASSLTTSGSRTWYEQYF

SEQ ID NO: 776277 - protein, 14 aa, Homo sapiens
  CDR3 for alpha chain variable domain of TCR clone 388139 (TRAV12-3, TRAJ10)
GHLPLTGGGNKLTF

SEQ ID NO: 776278 - protein, 15 aa, Homo sapiens
  CDR3 for beta chain variable domain of TCR clone 388139 (TRBV7-9, TRBJ1-6)
CASSSPGRGNSPLHF

SEQ ID NO: 776279 - protein, 11 aa, Homo sapiens
  CDR3 for alpha chain variable domain of TCR clone 388140 (TRAV1-1, TRAJ23)
CAVRQGGKLIF

SEQ ID NO: 776280 - protein, 13 aa, Homo sapiens
  CDR3 for beta chain variable domain of TCR clone 388140 (TRBV27, TRBJ2-3)
CASGQESTDTQYF

SEQ ID NO: 776281 - protein, 13 aa, Homo sapiens
  CDR3 for alpha chain variable domain of TCR clone 388141 (TRAV1-2, TRAJ9)
RAVLNTGGFKTIF

SEQ ID NO: 776282 - protein, 13 aa, Homo sapiens
  CDR3 for beta chain variable domain of TCR clone 388141 (TRBV19, TRBJ2-7)
CASRKAGGSEQYF

SEQ ID NO: 776283 - protein, 15 aa, Homo sapiens
  CDR3 for alpha chain variable domain of TCR clone 388142 (TRAV27, TRAJ50)
CAGVGMGTSYDKLIF

SEQ ID NO: 776284 - protein, 14 aa, Homo sapiens
  CDR3 for beta chain variable domain of TCR clone 388142 (TRBV7-2, TRBJ1-1)
CASSFYDLNTEAFF

SEQ ID NO: 776285 - protein, 22 aa, Homo sapiens
  CDR3 for alpha chain variable domain of TCR clone 388143 (TRAV4, )
CLVGPPNYDIQNPDPAVYQLRD

SEQ ID NO: 776286 - protein, 17 aa, Homo sapiens
  CDR3 for beta chain variable domain of TCR clone 388143 (TRBV24-1, TRBJ2-1)
CATSDVSTSGTYNEQFF

SEQ ID NO: 776287 - protein, 14 aa, Homo sapiens
  CDR3 for alpha chain variable domain of TCR clone 388144 (TRAV29/DV5, TRAJ32)
CAAAYGGATNKLIF

SEQ ID NO: 776288 - protein, 15 aa, Homo sapiens
  CDR3 for beta chain variable domain of TCR clone 388144 (TRBV27, TRBJ2-7)
YASSTAGTGSYEQYF

SEQ ID NO: 776289 - protein, 13 aa, Homo sapiens
  CDR3 for alpha chain variable domain of TCR clone 388145 (TRAV12-3, TRAJ33)
CAMSVNSNDQLIW

SEQ ID NO: 776290 - protein, 19 aa, Homo sapiens
  CDR3 for beta chain variable domain of TCR clone 388145 (TRBV25-1, TRBJ2-2)
CAILVYRVDRGRKTGELFF

SEQ ID NO: 776291 - protein, 11 aa, Homo sapiens
  CDR3 for alpha chain variable domain of TCR clone 388146 (TRAV1-2, TRAJ31)
CAVNNNARLMF

SEQ ID NO: 776292 - protein, 15 aa, Homo sapiens
  CDR3 for beta chain variable domain of TCR clone 388146 (TRBV28, TRBJ2-7)
CASSIIAGGRSEQYF

SEQ ID NO: 776293 - protein, 15 aa, Homo sapiens
  CDR3 for alpha chain variable domain of TCR clone 388147 (TRAV21, TRAJ32)
CAGNSYGGAPNKLIF

SEQ ID NO: 776294 - protein, 18 aa, Homo sapiens
  CDR3 for beta chain variable domain of TCR clone 388147 (TRBV7-9, TRBJ2-1)
CASSTGLAEGSSYNEQFF

SEQ ID NO: 776295 - protein, 16 aa, Homo sapiens
  CDR3 for alpha chain variable domain of TCR clone 388148 (TRAV30, TRAJ24)
CGTEIVDADSWGKFQV

SEQ ID NO: 776296 - protein, 15 aa, Homo sapiens
  CDR3 for beta chain variable domain of TCR clone 388148 (TRBV7-9, TRBJ1-6)
CASSSPGRGNSPLHF

SEQ ID NO: 776297 - protein, 15 aa, Homo sapiens
  CDR3 for alpha chain variable domain of TCR clone 388149 (TRAV13-1, TRAJ57)
CAASNTQGGSEKLVF

SEQ ID NO: 776298 - protein, 12 aa, Homo sapiens
  CDR3 for beta chain variable domain of TCR clone 388149 (TRBV11-2, TRBJ2-2)
CASSLGGGELFF

SEQ ID NO: 776299 - protein, 14 aa, Homo sapiens
  CDR3 for alpha chain variable domain of TCR clone 388150 (TRAV2, TRAJ3)
CAVEDNSSASKIIF

SEQ ID NO: 776300 - protein, 14 aa, Homo sapiens
  CDR3 for beta chain variable domain of TCR clone 388150 (TRBV6-3, TRBJ2-7)
CARRISGGPGEQYF

SEQ ID NO: 776301 - protein, 15 aa, Homo sapiens
  CDR3 for alpha chain variable domain of TCR clone 388151 (TRAV38-1, TRAJ57)
CAFMDSQGGSEKLVF

SEQ ID NO: 776302 - protein, 19 aa, Homo sapiens
  CDR3 for beta chain variable domain of TCR clone 388151 (TRBV10-3, TRBJ2-1)
CTSVPAGGGGRGDYNEQFF

SEQ ID NO: 776303 - protein, 14 aa, Homo sapiens
  CDR3 for alpha chain variable domain of TCR clone 388152 (TRAV2, TRAJ37)
CAVDFTSNTGKLIF

SEQ ID NO: 776304 - protein, 16 aa, Homo sapiens
  CDR3 for beta chain variable domain of TCR clone 388152 (TRBV7-9, TRBJ1-2)
CASSISLDRGGYGYTF

SEQ ID NO: 776305 - protein, 14 aa, Homo sapiens
  CDR3 for alpha chain variable domain of TCR clone 388153 (TRAV1-2, TRAJ6)
CAVSLSGGSYIPTF

SEQ ID NO: 776306 - protein, 13 aa, Homo sapiens
  CDR3 for beta chain variable domain of TCR clone 388153 (TRBV20-1, TRBJ1-1)
CSARGGGNTEAFF

SEQ ID NO: 776307 - protein, 17 aa, Homo sapiens
  CDR3 for alpha chain variable domain of TCR clone 388154 (TRAV3, TRAJ6)
CAVRDGPRAGGSYIPTF

SEQ ID NO: 776308 - protein, 14 aa, Homo sapiens
  CDR3 for beta chain variable domain of TCR clone 388154 (TRBV7-2, TRBJ2-7)
CASSSNTSFYEQYF

SEQ ID NO: 776309 - protein, 14 aa, Homo sapiens
  CDR3 for alpha chain variable domain of TCR clone 388155 (TRAV12-1, TRAJ43)
CVVNGRSNKMTCAL

SEQ ID NO: 776310 - protein, 16 aa, Homo sapiens
  CDR3 for beta chain variable domain of TCR clone 388155 (TRBV7-9, TRBJ2-5)
CASSFSGTSGRETQYF

SEQ ID NO: 776311 - protein, 15 aa, Homo sapiens
  CDR3 for alpha chain variable domain of TCR clone 388156 (TRAV3, TRAJ5)
CAVRALDTGRGALTF

SEQ ID NO: 776312 - protein, 13 aa, Homo sapiens
  CDR3 for beta chain variable domain of TCR clone 388156 (TRBV12-4, TRBJ2-7)
CASSPTETYEQYF

SEQ ID NO: 776313 - protein, 16 aa, Homo sapiens
  CDR3 for alpha chain variable domain of TCR clone 388157 (TRAV4, TRAJ9)
CLVGDPNRPGGFKTIF

SEQ ID NO: 776314 - protein, 13 aa, Homo sapiens
  CDR3 for beta chain variable domain of TCR clone 388157 (TRBV3-1, TRBJ1-1)
CASSQRWSTEAFF

SEQ ID NO: 776315 - protein, 10 aa, Homo sapiens
  CDR3 for alpha chain variable domain of TCR clone 388158 (TRAV12-3, TRAJ6)
CAMSARGGAG

SEQ ID NO: 776316 - protein, 12 aa, Homo sapiens
  CDR3 for beta chain variable domain of TCR clone 388158 (TRBV12-4, TRBJ2-3)
CASSTLPDTQYF

SEQ ID NO: 776317 - protein, 16 aa, Homo sapiens
  CDR3 for alpha chain variable domain of TCR clone 388159 (TRAV30, TRAJ24)
CGTEIVDADSWGKFQF

SEQ ID NO: 776318 - protein, 17 aa, Homo sapiens
  CDR3 for beta chain variable domain of TCR clone 388159 (TRBV20-1, TRBJ2-1)
CSARDRRRARSYNEQFF

SEQ ID NO: 776319 - protein, 14 aa, Homo sapiens
  CDR3 for alpha chain variable domain of TCR clone 388160 (TRAV26-1, TRAJ57)
CIRAGQGGSEKLIF

SEQ ID NO: 776320 - protein, 13 aa, Homo sapiens
  CDR3 for beta chain variable domain of TCR clone 388160 (TRBV19, TRBJ2-7)
CASSLTTSYEQYF

SEQ ID NO: 776321 - protein, 13 aa, Homo sapiens
  CDR3 for alpha chain variable domain of TCR clone 388161 (TRAV1-1, TRAJ9)
CAAKNTGGFKTIF

SEQ ID NO: 776322 - protein, 15 aa, Homo sapiens
  CDR3 for beta chain variable domain of TCR clone 388161 (TRBV28, TRBJ1-3)
CASSMGWASGNTIYF

SEQ ID NO: 776323 - protein, 12 aa, Homo sapiens
  CDR3 for alpha chain variable domain of TCR clone 388162 (TRAV9-2, TRAJ26)
CALRGYGQNFVF

SEQ ID NO: 776324 - protein, 15 aa, Homo sapiens
  CDR3 for beta chain variable domain of TCR clone 388162 (TRBV5-7, TRBJ1-5)
CASSYGKLWDQPQHF

SEQ ID NO: 776325 - protein, 16 aa, Homo sapiens
  CDR3 for alpha chain variable domain of TCR clone 388163 (TRAV3, TRAJ37)
CAVRGKGSGNTGRLIF

SEQ ID NO: 776326 - protein, 16 aa, Homo sapiens
  CDR3 for beta chain variable domain of TCR clone 388163 (TRBV12-4, TRBJ1-5)
CASSRPVGGSNQTQHF

SEQ ID NO: 776327 - protein, 15 aa, Homo sapiens
  CDR3 for alpha chain variable domain of TCR clone 388164 (TRAV12-1, TRAJ44)
CVADLPTGTASKLTF

SEQ ID NO: 776328 - protein, 13 aa, Homo sapiens
  CDR3 for beta chain variable domain of TCR clone 388164 (TRBV6-5, TRBJ2-5)
CASSPQGGETQYF

SEQ ID NO: 776329 - protein, 12 aa, Homo sapiens
  CDR3 for alpha chain variable domain of TCR clone 388165 (TRAV13-2, TRAJ23)
CGERHRGGKLIF

SEQ ID NO: 776330 - protein, 16 aa, Homo sapiens
  CDR3 for beta chain variable domain of TCR clone 388165 (TRBV20-1, TRBJ1-4)
CSAPGQGLLTNEKLFF

SEQ ID NO: 776331 - protein, 14 aa, Homo sapiens
  CDR3 for alpha chain variable domain of TCR clone 388166 (TRAV1-2, TRAJ8)
CAVREDTGFQKLVF

SEQ ID NO: 776332 - protein, 15 aa, Homo sapiens
  CDR3 for beta chain variable domain of TCR clone 388166 (TRBV27, TRBJ1-5)
CASRRGDYSNQPQHF

SEQ ID NO: 776333 - protein, 17 aa, Homo sapiens
  CDR3 for alpha chain variable domain of TCR clone 388167 (TRAV3, TRAJ6)
RAVRDGPRAGGSYIPTF

SEQ ID NO: 776334 - protein, 16 aa, Homo sapiens
  CDR3 for beta chain variable domain of TCR clone 388167 (TRBV19, TRBJ1-1)
CASSPTRFWPGTEAFF

SEQ ID NO: 776335 - protein, 14 aa, Homo sapiens
  CDR3 for alpha chain variable domain of TCR clone 388168 (TRAV13-1, TRAJ3)
CAASTSSSASKIIF

SEQ ID NO: 776336 - protein, 13 aa, Homo sapiens
  CDR3 for beta chain variable domain of TCR clone 388168 (TRBV25-1, TRBJ2-5)
CASSESGRETQYF

SEQ ID NO: 776337 - protein, 11 aa, Homo sapiens
  CDR3 for alpha chain variable domain of TCR clone 388169 (TRAV8-6, TRAJ20)
CAVSYDYKLSF

SEQ ID NO: 776338 - protein, 16 aa, Homo sapiens
  CDR3 for beta chain variable domain of TCR clone 388169 (TRBV7-8, TRBJ2-4)
CASSAERTLAKNIQYF

SEQ ID NO: 776339 - protein, 15 aa, Homo sapiens
  CDR3 for alpha chain variable domain of TCR clone 388170 (TRAV26-2, TRAJ13)
CILRDLSGGYQKVTF

SEQ ID NO: 776340 - protein, 11 aa, Homo sapiens
  CDR3 for beta chain variable domain of TCR clone 388170 (TRBV7-9, TRBJ2-3)
CASSYTETQYF

SEQ ID NO: 776341 - protein, 13 aa, Homo sapiens
  CDR3 for alpha chain variable domain of TCR clone 388171 (TRAV35, TRAJ21)
CAGQLSNFTKFYF

SEQ ID NO: 776342 - protein, 11 aa, Homo sapiens
  CDR3 for beta chain variable domain of TCR clone 388171 (TRBV7-6, TRBJ2-5)
CASSSQETQYF

SEQ ID NO: 776343 - protein, 14 aa, Homo sapiens
  CDR3 for alpha chain variable domain of TCR clone 388172 (TRAV17, TRAJ54)
CATDANQGAQQLVF

SEQ ID NO: 776344 - protein, 12 aa, Homo sapiens
  CDR3 for beta chain variable domain of TCR clone 388172 (TRBV6-3, TRBJ2-1)
CASSGSYNEQFF

SEQ ID NO: 776345 - protein, 13 aa, Homo sapiens
  CDR3 for alpha chain variable domain of TCR clone 388173 (TRAV26-1, TRAJ34)
CIASSYNTDKLIF

SEQ ID NO: 776346 - protein, 15 aa, Homo sapiens
  CDR3 for beta chain variable domain of TCR clone 388173 (TRBV20-1, TRBJ2-7)
CSAESGTSGAYEQYF

SEQ ID NO: 776347 - protein, 12 aa, Homo sapiens
  CDR3 for alpha chain variable domain of TCR clone 388174 (TRAV21, TRAJ13)
PGPSGGYQKVTF

SEQ ID NO: 776348 - protein, 15 aa, Homo sapiens
  CDR3 for beta chain variable domain of TCR clone 388174 (TRBV19, TRBJ2-1)
CASSSPGVPLDEQFF

SEQ ID NO: 776349 - protein, 14 aa, Homo sapiens
  CDR3 for alpha chain variable domain of TCR clone 388175 (TRAV1-2, TRAJ16)
CAVNRFSDGQKLLF

SEQ ID NO: 776350 - protein, 13 aa, Homo sapiens
  CDR3 for beta chain variable domain of TCR clone 388175 (TRBV12-4, TRBJ2-1)
CASSHYTDNEQFF

SEQ ID NO: 776351 - protein, 14 aa, Homo sapiens
  CDR3 for alpha chain variable domain of TCR clone 388176 (TRAV27, TRAJ12)
CAGARMDSTYKLIF

SEQ ID NO: 776352 - protein, 18 aa, Homo sapiens
  CDR3 for beta chain variable domain of TCR clone 388176 (TRBV10-3, TRBJ2-7)
CAISESGRPSGGRVEQYF

SEQ ID NO: 776353 - protein, 15 aa, Homo sapiens
  CDR3 for alpha chain variable domain of TCR clone 388177 (TRAV8-3, TRAJ45)
CASSYSGGVADGLTY

SEQ ID NO: 776354 - protein, 13 aa, Homo sapiens
  CDR3 for beta chain variable domain of TCR clone 388177 (TRBV10-3, TRBJ2-7)
CASKLAVNYEQYF

SEQ ID NO: 776355 - protein, 14 aa, Homo sapiens
  CDR3 for alpha chain variable domain of TCR clone 388178 (TRAV12-2, TRAJ17)
CAVNIKAAGNKLTF

SEQ ID NO: 776356 - protein, 17 aa, Homo sapiens
  CDR3 for beta chain variable domain of TCR clone 388178 (TRBV20-1, TRBJ2-1)
CSASSSGLAGSYNEQFF

SEQ ID NO: 776357 - protein, 14 aa, Homo sapiens
  CDR3 for alpha chain variable domain of TCR clone 388179 (TRAV2, TRAJ9)
CAVEDRSGGFKTIF

SEQ ID NO: 776358 - protein, 14 aa, Homo sapiens
  CDR3 for beta chain variable domain of TCR clone 388179 (TRBV5-1, TRBJ2-3)
CASSLVGPTDTQYF

SEQ ID NO: 776359 - protein, 16 aa, Homo sapiens
  CDR3 for alpha chain variable domain of TCR clone 388180 (TRAV13-1, TRAJ45)
WAARGSRKGGADGLTF

SEQ ID NO: 776360 - protein, 13 aa, Homo sapiens
  CDR3 for beta chain variable domain of TCR clone 388180 (TRBV11-2, TRBJ1-1)
CASSLGRNTEAFF

SEQ ID NO: 776361 - protein, 14 aa, Homo sapiens
  CDR3 for alpha chain variable domain of TCR clone 388181 (TRAV12-3, TRAJ6)
CAMSATGGSYIPTF

SEQ ID NO: 776362 - protein, 16 aa, Homo sapiens
  CDR3 for beta chain variable domain of TCR clone 388181 (TRBV4-2, TRBJ2-1)
CASSPRAAQGANEQFF

SEQ ID NO: 776363 - protein, 14 aa, Homo sapiens
  CDR3 for alpha chain variable domain of TCR clone 388182 (TRAV12-3, TRAJ41)
CAMSAGNSGYALNF

SEQ ID NO: 776364 - protein, 11 aa, Homo sapiens
  CDR3 for beta chain variable domain of TCR clone 388182 (TRBV7-2, TRBJ2-3)
CAGSSSDTQYF

SEQ ID NO: 776365 - protein, 11 aa, Homo sapiens
  CDR3 for alpha chain variable domain of TCR clone 388183 (TRAV13-1, TRAJ43)
CAAHNNNDMRF

SEQ ID NO: 776366 - protein, 15 aa, Homo sapiens
  CDR3 for beta chain variable domain of TCR clone 388183 (TRBV6-1, TRBJ2-2)
CASSRLRGDTGELCF

SEQ ID NO: 776367 - protein, 15 aa, Homo sapiens
  CDR3 for alpha chain variable domain of TCR clone 388184 (TRAV3, TRAJ5)
CAVRDRKTGRRALTF

SEQ ID NO: 776368 - protein, 13 aa, Homo sapiens
  CDR3 for beta chain variable domain of TCR clone 388184 (TRBV7-8, TRBJ2-7)
RRVRLTEMGEQYF

SEQ ID NO: 776369 - protein, 12 aa, Homo sapiens
  CDR3 for alpha chain variable domain of TCR clone 388185 (TRAV12-3, TRAJ17)
CAMTLTGNKLTF

SEQ ID NO: 776370 - protein, 13 aa, Homo sapiens
  CDR3 for beta chain variable domain of TCR clone 388185 (TRBV5-1, TRBJ1-1)
CASSADWDTESFF

SEQ ID NO: 776371 - protein, 17 aa, Homo sapiens
  CDR3 for alpha chain variable domain of TCR clone 388186 (TRAV38-2/DV8, TRAJ28)
CAFLTLYSGAGSYQLTF

SEQ ID NO: 776372 - protein, 22 aa, Homo sapiens
  CDR3 for beta chain variable domain of TCR clone 388186 (TRBV7-2, TRBJ2-5)
RRTRPGISVPAACQGGGETQYF

SEQ ID NO: 776373 - protein, 15 aa, Homo sapiens
  CDR3 for alpha chain variable domain of TCR clone 388187 (TRAV2, TRAJ28)
CAVPYSGAGCYQLTF

SEQ ID NO: 776374 - protein, 17 aa, Homo sapiens
  CDR3 for beta chain variable domain of TCR clone 388187 (TRBV20-1, TRBJ2-4)
CSARDWASGGRENIQYF

SEQ ID NO: 776375 - protein, 16 aa, Homo sapiens
  CDR3 for alpha chain variable domain of TCR clone 388188 (TRAV26-1, TRAJ52)
CIVSNAGVTSYGKLTF

SEQ ID NO: 776376 - protein, 16 aa, Homo sapiens
  CDR3 for beta chain variable domain of TCR clone 388188 (TRBV5-1, TRBJ2-1)
CASSLEGRGLYNEQFF

SEQ ID NO: 776377 - protein, 16 aa, Homo sapiens
  CDR3 for alpha chain variable domain of TCR clone 388189 (TRAV30, TRAJ24)
CGTEIVDDDSWGKFQF

SEQ ID NO: 776378 - protein, 12 aa, Homo sapiens
  CDR3 for beta chain variable domain of TCR clone 388189 (TRBV7-8, TRBJ2-7)
CASSLGDREQYF

SEQ ID NO: 776379 - protein, 11 aa, Homo sapiens
  CDR3 for alpha chain variable domain of TCR clone 388190 (TRAV17, TRAJ43)
CATPRSNDMRF

SEQ ID NO: 776380 - protein, 12 aa, Homo sapiens
  CDR3 for beta chain variable domain of TCR clone 388190 (TRBV12-4, TRBJ1-5)
CASSLGRQPQHF

SEQ ID NO: 776381 - protein, 17 aa, Homo sapiens
  CDR3 for alpha chain variable domain of TCR clone 388191 (TRAV3, TRAJ12)
CAVRDGGRMDSSYKLIF

SEQ ID NO: 776382 - protein, 14 aa, Homo sapiens
  CDR3 for beta chain variable domain of TCR clone 388191 (TRBV7-9, TRBJ1-2)
CASSRQGDNYGYTF

SEQ ID NO: 776383 - protein, 13 aa, Homo sapiens
  CDR3 for alpha chain variable domain of TCR clone 388192 (TRAV1-2, TRAJ9)
CAALNTGGFKTIF

SEQ ID NO: 776384 - protein, 14 aa, Homo sapiens
  CDR3 for beta chain variable domain of TCR clone 388192 (TRBV7-2, TRBJ2-1)
CASSRGGARNEQFF

SEQ ID NO: 776385 - protein, 13 aa, Homo sapiens
  CDR3 for alpha chain variable domain of TCR clone 388193 (TRAV23/DV6, TRAJ34)
CAAIENNTDKLIF

SEQ ID NO: 776386 - protein, 14 aa, Homo sapiens
  CDR3 for beta chain variable domain of TCR clone 388193 (TRBV7-6, TRBJ2-3)
CAGSLGTVTDTQYF

SEQ ID NO: 776387 - protein, 14 aa, Homo sapiens
  CDR3 for alpha chain variable domain of TCR clone 388194 (TRAV12-2, TRAJ40)
CAVKIPSGTYKYIF

SEQ ID NO: 776388 - protein, 14 aa, Homo sapiens
  CDR3 for beta chain variable domain of TCR clone 388194 (TRBV7-8, TRBJ2-7)
CASSPRDRVYEQCF

SEQ ID NO: 776389 - protein, 17 aa, Homo sapiens
  CDR3 for alpha chain variable domain of TCR clone 388195 (TRAV13-1, TRAJ28)
CAASPPYSGAGSYQLTF

SEQ ID NO: 776390 - protein, 16 aa, Homo sapiens
  CDR3 for beta chain variable domain of TCR clone 388195 (TRBV6-1, TRBJ2-1)
CASILRQGSSYNEQFF

SEQ ID NO: 776391 - protein, 14 aa, Homo sapiens
  CDR3 for alpha chain variable domain of TCR clone 388196 (TRAV23/DV6, TRAJ17)
CAASIGAAGNKLTF

SEQ ID NO: 776392 - protein, 13 aa, Homo sapiens
  CDR3 for beta chain variable domain of TCR clone 388196 (TRBV19, TRBJ1-2)
CASSQGQVYGYTF

SEQ ID NO: 776393 - protein, 14 aa, Homo sapiens
  CDR3 for alpha chain variable domain of TCR clone 388197 (TRAV2, TRAJ37)
CAVDFTSNTGKLIF

SEQ ID NO: 776394 - protein, 11 aa, Homo sapiens
  CDR3 for beta chain variable domain of TCR clone 388197 (TRBV12-4, TRBJ2-7)
CATPEKGEQYF

SEQ ID NO: 776395 - protein, 13 aa, Homo sapiens
  CDR3 for alpha chain variable domain of TCR clone 388198 (TRAV25, TRAJ10)
CAGRTGGGNKLTF

SEQ ID NO: 776396 - protein, 15 aa, Homo sapiens
  CDR3 for beta chain variable domain of TCR clone 388198 (TRBV19, TRBJ2-1)
CASSSPGVPLDEQFI

SEQ ID NO: 776397 - protein, 11 aa, Homo sapiens
  CDR3 for alpha chain variable domain of TCR clone 388199 (TRAV9-2, TRAJ43)
CALNNNNDMRF

SEQ ID NO: 776398 - protein, 13 aa, Homo sapiens
  CDR3 for beta chain variable domain of TCR clone 388199 (TRBV20-1, TRBJ2-1)
CSASTGTTNEQFF

SEQ ID NO: 776399 - protein, 11 aa, Homo sapiens
  CDR3 for alpha chain variable domain of TCR clone 388200 (TRAV21, TRAJ34)
FAVTNTDKLIF

SEQ ID NO: 776400 - protein, 17 aa, Homo sapiens
  CDR3 for beta chain variable domain of TCR clone 388200 (TRBV20-1, TRBJ2-1)
CSARSPSGGPPTMSSSS

SEQ ID NO: 776401 - protein, 17 aa, Homo sapiens
  CDR3 for alpha chain variable domain of TCR clone 388201 (TRAV27, TRAJ42)
CAERVIYYGGSQGNLIF

SEQ ID NO: 776402 - protein, 14 aa, Homo sapiens
  CDR3 for beta chain variable domain of TCR clone 388201 (TRBV7-9, TRBJ2-2)
CASSLVQDTGELFF

SEQ ID NO: 776403 - protein, 15 aa, Homo sapiens
  CDR3 for alpha chain variable domain of TCR clone 388202 (TRAV3, TRAJ22)
CAVRDRGGSARQLPF

SEQ ID NO: 776404 - protein, 12 aa, Homo sapiens
  CDR3 for beta chain variable domain of TCR clone 388202 (TRBV5-1, TRBJ2-7)
CASSFRGYEQYL

SEQ ID NO: 776405 - protein, 15 aa, Homo sapiens
  CDR3 for alpha chain variable domain of TCR clone 388203 (TRAV3, TRAJ22)
CAVRDRVGSARQLTF

SEQ ID NO: 776406 - protein, 15 aa, Homo sapiens
  CDR3 for beta chain variable domain of TCR clone 388203 (TRBV10-3, TRBJ2-3)
CAISLTSGGTDTQYF

SEQ ID NO: 776407 - protein, 13 aa, Homo sapiens
  CDR3 for alpha chain variable domain of TCR clone 388204 (TRAV17, TRAJ33)
CASDADSNYQLIW

SEQ ID NO: 776408 - protein, 17 aa, Homo sapiens
  CDR3 for beta chain variable domain of TCR clone 388204 (TRBV20-1, TRBJ2-3)
CSAVSPGLAGGQDTQYL

SEQ ID NO: 776409 - protein, 17 aa, Homo sapiens
  CDR3 for alpha chain variable domain of TCR clone 388205 (TRAV26-1, TRAJ58)
CIVRVGAEETSGSRLTF

SEQ ID NO: 776410 - protein, 12 aa, Homo sapiens
  CDR3 for beta chain variable domain of TCR clone 388205 (TRBV29-1, TRBJ2-3)
CSVTGGADTQYF

SEQ ID NO: 776411 - protein, 11 aa, Homo sapiens
  CDR3 for alpha chain variable domain of TCR clone 388206 (TRAV1-2, TRAJ20)
CAVSNDYKLSF

SEQ ID NO: 776412 - protein, 17 aa, Homo sapiens
  CDR3 for beta chain variable domain of TCR clone 388206 (TRBV7-8, TRBJ2-6)
CASSDGTGGAGATDLTF

SEQ ID NO: 776413 - protein, 13 aa, Homo sapiens
  CDR3 for alpha chain variable domain of TCR clone 388207 (TRAV21, TRAJ57)
CAVIEGGSEKLVF

SEQ ID NO: 776414 - protein, 13 aa, Homo sapiens
  CDR3 for beta chain variable domain of TCR clone 388207 (TRBV4-2, TRBJ1-1)
CASSQAGNTEAFF

SEQ ID NO: 776415 - protein, 13 aa, Homo sapiens
  CDR3 for alpha chain variable domain of TCR clone 388208 (TRAV13-1, TRAJ12)
CAASPDSSYKLIF

SEQ ID NO: 776416 - protein, 17 aa, Homo sapiens
  CDR3 for beta chain variable domain of TCR clone 388208 (TRBV7-8, TRBJ2-6)
CASSAGTGGAGANVLTF

SEQ ID NO: 776417 - protein, 14 aa, Homo sapiens
  CDR3 for alpha chain variable domain of TCR clone 388209 (TRAV13-1, TRAJ23)
CAASRLGRGGKLIF

SEQ ID NO: 776418 - protein, 14 aa, Homo sapiens
  CDR3 for beta chain variable domain of TCR clone 388209 (TRBV7-2, TRBJ2-1)
CQQLSCGEINEQFF

SEQ ID NO: 776419 - protein, 12 aa, Homo sapiens
  CDR3 for alpha chain variable domain of TCR clone 388210 (TRAV12-2, TRAJ16)
CAVNLDGQKLLF

SEQ ID NO: 776420 - protein, 12 aa, Homo sapiens
  CDR3 for beta chain variable domain of TCR clone 388210 (TRBV5-7, TRBJ2-7)
CASSFQGGEQYF

SEQ ID NO: 776421 - protein, 13 aa, Homo sapiens
  CDR3 for alpha chain variable domain of TCR clone 388211 (TRAV12-2, TRAJ47)
CAVFMEYGNKLVF

SEQ ID NO: 776422 - protein, 13 aa, Homo sapiens
  CDR3 for beta chain variable domain of TCR clone 388211 (TRBV7-9, TRBJ1-2)
CASSLKQNYGYTF

SEQ ID NO: 776423 - protein, 10 aa, Homo sapiens
  CDR3 for alpha chain variable domain of TCR clone 388212 (TRAV25, TRAJ17)
CQAAGKKLTF

SEQ ID NO: 776424 - protein, 13 aa, Homo sapiens
  CDR3 for beta chain variable domain of TCR clone 388212 (TRBV6-5, TRBJ2-2)
CASSLPGVGELFF

SEQ ID NO: 776425 - protein, 13 aa, Homo sapiens
  CDR3 for alpha chain variable domain of TCR clone 388213 (TRAV8-3, TRAJ28)
CAVGAVGSYQLTF

SEQ ID NO: 776426 - protein, 16 aa, Homo sapiens
  CDR3 for beta chain variable domain of TCR clone 388213 (TRBV19, TRBJ2-2)
CASSTARASNTGELFF

SEQ ID NO: 776427 - protein, 14 aa, Homo sapiens
  CDR3 for alpha chain variable domain of TCR clone 388214 (TRAV2, TRAJ9)
CAVEDRSGGFKTIF

SEQ ID NO: 776428 - protein, 11 aa, Homo sapiens
  CDR3 for beta chain variable domain of TCR clone 388214 (TRBV7-9, TRBJ2-3)
CASSPTDTQYF

SEQ ID NO: 776429 - protein, 14 aa, Homo sapiens
  CDR3 for alpha chain variable domain of TCR clone 388215 (TRAV26-2, TRAJ45)
TASPIGGGADGLTF

SEQ ID NO: 776430 - protein, 20 aa, Homo sapiens
  CDR3 for beta chain variable domain of TCR clone 388215 (TRBV28, TRBJ2-1)
CASTPIGRSPGLAGGNEQFF

SEQ ID NO: 776431 - protein, 13 aa, Homo sapiens
  CDR3 for alpha chain variable domain of TCR clone 388216 (TRAV12-2, TRAJ9)
CAGGNTGGFKTIF

SEQ ID NO: 776432 - protein, 17 aa, Homo sapiens
  CDR3 for beta chain variable domain of TCR clone 388216 (TRBV4-1, TRBJ2-1)
CASSPGRGGGLYNEQFF

SEQ ID NO: 776433 - protein, 13 aa, Homo sapiens
  CDR3 for alpha chain variable domain of TCR clone 388217 (TRAV1-2, TRAJ24)
CAVTTDSWGKLQF

SEQ ID NO: 776434 - protein, 13 aa, Homo sapiens
  CDR3 for beta chain variable domain of TCR clone 388217 (TRBV12-5, TRBJ2-3)
CASGDRQSDTQYF

SEQ ID NO: 776435 - protein, 12 aa, Homo sapiens
  CDR3 for alpha chain variable domain of TCR clone 388218 (TRAV17, TRAJ57)
CATDGGSEKLVF

SEQ ID NO: 776436 - protein, 14 aa, Homo sapiens
  CDR3 for beta chain variable domain of TCR clone 388218 (TRBV19, TRBJ1-5)
RASSLGPGGEPQHF

SEQ ID NO: 776437 - protein, 14 aa, Homo sapiens
  CDR3 for alpha chain variable domain of TCR clone 388219 (TRAV26-1, TRAJ38)
CIVVGAGNNRKLIW

SEQ ID NO: 776438 - protein, 11 aa, Homo sapiens
  CDR3 for beta chain variable domain of TCR clone 388219 (TRBV20-1, TRBJ2-7)
CSARLSYEQYF

SEQ ID NO: 776439 - protein, 12 aa, Homo sapiens
  CDR3 for alpha chain variable domain of TCR clone 388220 (TRAV1-1, TRAJ15)
CAVGQAGTALIF

SEQ ID NO: 776440 - protein, 13 aa, Homo sapiens
  CDR3 for beta chain variable domain of TCR clone 388220 (TRBV7-9, TRBJ2-3)
CASSPGSTDTQYF

SEQ ID NO: 776441 - protein, 14 aa, Homo sapiens
  CDR3 for alpha chain variable domain of TCR clone 388221 (TRAV23/DV6, TRAJ37)
CAASTSSNTGKLSL

SEQ ID NO: 776442 - protein, 13 aa, Homo sapiens
  CDR3 for beta chain variable domain of TCR clone 388221 (TRBV7-7, TRBJ1-1)
CASSLGANTEAFF

SEQ ID NO: 776443 - protein, 13 aa, Homo sapiens
  CDR3 for alpha chain variable domain of TCR clone 388222 (TRAV8-3, TRAJ28)
CAVGAVGSYQLTF

SEQ ID NO: 776444 - protein, 18 aa, Homo sapiens
  CDR3 for beta chain variable domain of TCR clone 388222 (TRBV4-1, TRBJ1-5)
CASGQDPRGQGLNQPQHF

SEQ ID NO: 776445 - protein, 15 aa, Homo sapiens
  CDR3 for alpha chain variable domain of TCR clone 388223 (TRAV23/DV6, TRAJ18)
CAARYRGATLGRLYF

SEQ ID NO: 776446 - protein, 13 aa, Homo sapiens
  CDR3 for beta chain variable domain of TCR clone 388223 (TRBV7-2, TRBJ2-7)
CASSSPSGSEQYF

SEQ ID NO: 776447 - protein, 14 aa, Homo sapiens
  CDR3 for alpha chain variable domain of TCR clone 388224 (TRAV23/DV6, TRAJ6)
CAESRPGGSYIPTF

SEQ ID NO: 776448 - protein, 17 aa, Homo sapiens
  CDR3 for beta chain variable domain of TCR clone 388224 (TRBV20-1, TRBJ2-1)
CSASASGLAGSYNEQFF

SEQ ID NO: 776449 - protein, 14 aa, Homo sapiens
  CDR3 for alpha chain variable domain of TCR clone 388225 (TRAV12-2, TRAJ24)
CAVTPADSWGKLQF

SEQ ID NO: 776450 - protein, 13 aa, Homo sapiens
  CDR3 for beta chain variable domain of TCR clone 388225 (TRBV19, TRBJ1-2)
CASSVPGQDGYTF

SEQ ID NO: 776451 - protein, 13 aa, Homo sapiens
  CDR3 for alpha chain variable domain of TCR clone 388226 (TRAV13-2, TRAJ48)
CAEMDFGTEKLTF

SEQ ID NO: 776452 - protein, 15 aa, Homo sapiens
  CDR3 for beta chain variable domain of TCR clone 388226 (TRBV2, TRBJ2-1)
CASSELAGSYNEQFF

SEQ ID NO: 776453 - protein, 14 aa, Homo sapiens
  CDR3 for alpha chain variable domain of TCR clone 388227 (TRAV2, TRAJ37)
CAVDLTSNTGKLIF

SEQ ID NO: 776454 - protein, 15 aa, Homo sapiens
  CDR3 for beta chain variable domain of TCR clone 388227 (TRBV10-3, TRBJ2-3)
CAISLTSGGTDTQYF

SEQ ID NO: 776455 - protein, 14 aa, Homo sapiens
  CDR3 for alpha chain variable domain of TCR clone 388228 (TRAV13-1, TRAJ35)
CAASKGGFGNVLHC

SEQ ID NO: 776456 - protein, 15 aa, Homo sapiens
  CDR3 for beta chain variable domain of TCR clone 388228 (TRBV28, TRBJ2-7)
CASSLAGTGVHEQYF

SEQ ID NO: 776457 - protein, 15 aa, Homo sapiens
  CDR3 for alpha chain variable domain of TCR clone 388229 (TRAV8-3, TRAJ37)
CAVGAPSSNTGKLIF

SEQ ID NO: 776458 - protein, 15 aa, Homo sapiens
  CDR3 for beta chain variable domain of TCR clone 388229 (TRBV11-2, TRBJ1-2)
CASSQMRVLNYGYTF

SEQ ID NO: 776459 - protein, 15 aa, Homo sapiens
  CDR3 for alpha chain variable domain of TCR clone 388230 (TRAV13-1, TRAJ17)
CAARIERSAGNKLTF

SEQ ID NO: 776460 - protein, 14 aa, Homo sapiens
  CDR3 for beta chain variable domain of TCR clone 388230 (TRBV4-1, TRBJ2-2)
CASSQAVNTGELFF

SEQ ID NO: 776461 - protein, 13 aa, Homo sapiens
  CDR3 for alpha chain variable domain of TCR clone 388231 (TRAV13-1, TRAJ43)
CAASKNNNNDIRF

SEQ ID NO: 776462 - protein, 14 aa, Homo sapiens
  CDR3 for beta chain variable domain of TCR clone 388231 (TRBV14, TRBJ2-1)
CASSQVQGRGEQFF

SEQ ID NO: 776463 - protein, 16 aa, Homo sapiens
  CDR3 for alpha chain variable domain of TCR clone 388232 (TRAV13-1, TRAJ48)
CSKYRESNFGHENLTF

SEQ ID NO: 776464 - protein, 17 aa, Homo sapiens
  CDR3 for beta chain variable domain of TCR clone 388232 (TRBV28, TRBJ2-1)
CASSSARQALTYNEQFF

SEQ ID NO: 776465 - protein, 15 aa, Homo sapiens
  CDR3 for alpha chain variable domain of TCR clone 388233 (TRAV21, TRAJ53)
CATLNSGGSNYKLTF

SEQ ID NO: 776466 - protein, 15 aa, Homo sapiens
  CDR3 for beta chain variable domain of TCR clone 388233 (TRBV6-1, TRBJ2-5)
CASSEGWGIQETQYF

SEQ ID NO: 776467 - protein, 13 aa, Homo sapiens
  CDR3 for alpha chain variable domain of TCR clone 388234 (TRAV27, TRAJ45)
CRSSGGGADGLTF

SEQ ID NO: 776468 - protein, 15 aa, Homo sapiens
  CDR3 for beta chain variable domain of TCR clone 388234 (TRBV7-2, TRBJ2-7)
CASSFTGQGAQEQYF

SEQ ID NO: 776469 - protein, 15 aa, Homo sapiens
  CDR3 for alpha chain variable domain of TCR clone 388235 (TRAV39, TRAJ42)
CAVVNYGGSQGNLIF

SEQ ID NO: 776470 - protein, 15 aa, Homo sapiens
  CDR3 for beta chain variable domain of TCR clone 388235 (TRBV10-3, TRBJ1-1)
YAISDLGRANTEAFF

SEQ ID NO: 776471 - protein, 16 aa, Homo sapiens
  CDR3 for alpha chain variable domain of TCR clone 388236 (TRAV12-3, TRAJ53)
CAMSPGSGGSDYKLTF

SEQ ID NO: 776472 - protein, 20 aa, Homo sapiens
  CDR3 for beta chain variable domain of TCR clone 388236 (TRBV7-8, TRBJ2-2)
CASSHLFPGPTIHITGELFF

SEQ ID NO: 776473 - protein, 10 aa, Homo sapiens
  CDR3 for alpha chain variable domain of TCR clone 388237 (TRAV26-1, TRAJ22)
CIVSLNFFWF

SEQ ID NO: 776474 - protein, 17 aa, Homo sapiens
  CDR3 for beta chain variable domain of TCR clone 388237 (TRBV4-2, TRBJ1-2)
CASSQRTGGRDGYTLVR

SEQ ID NO: 776475 - protein, 16 aa, Homo sapiens
  CDR3 for alpha chain variable domain of TCR clone 388238 (TRAV26-1, TRAJ23)
CIVRVHPYNLGGKLIF

SEQ ID NO: 776476 - protein, 15 aa, Homo sapiens
  CDR3 for beta chain variable domain of TCR clone 388238 (TRBV5-7, TRBJ2-7)
CASSPYFEGSYEQYF

SEQ ID NO: 776477 - protein, 14 aa, Homo sapiens
  CDR3 for alpha chain variable domain of TCR clone 388239 (TRAV1-2, TRAJ8)
CAVREDTGFQELVF

SEQ ID NO: 776478 - protein, 16 aa, Homo sapiens
  CDR3 for beta chain variable domain of TCR clone 388239 (TRBV12-4, TRBJ1-5)
CASRQPVEGSNQPQHF

SEQ ID NO: 776479 - protein, 13 aa, Homo sapiens
  CDR3 for alpha chain variable domain of TCR clone 388240 (TRAV35, TRAJ42)
CAGIPGSQGNLIF

SEQ ID NO: 776480 - protein, 13 aa, Homo sapiens
  CDR3 for beta chain variable domain of TCR clone 388240 (TRBV29-1, TRBJ2-1)
CSVEGGRVNEQFF

SEQ ID NO: 776481 - protein, 14 aa, Homo sapiens
  CDR3 for alpha chain variable domain of TCR clone 388241 (TRAV14/DV4, TRAJ32)
SNVLPLTPTNKLIF

SEQ ID NO: 776482 - protein, 12 aa, Homo sapiens
  CDR3 for beta chain variable domain of TCR clone 388241 (TRBV7-9, TRBJ2-7)
CASSIKREEQYF

SEQ ID NO: 776483 - protein, 14 aa, Homo sapiens
  CDR3 for alpha chain variable domain of TCR clone 388242 (TRAV17, TRAJ11)
CATDTSRGYSTLTF

SEQ ID NO: 776484 - protein, 13 aa, Homo sapiens
  CDR3 for beta chain variable domain of TCR clone 388242 (TRBV19, TRBJ2-5)
CGSRDSRRETQYF

SEQ ID NO: 776485 - protein, 14 aa, Homo sapiens
  CDR3 for alpha chain variable domain of TCR clone 388243 (TRAV1-2, TRAJ16)
CAVNRFSDGQKLLF

SEQ ID NO: 776486 - protein, 16 aa, Homo sapiens
  CDR3 for beta chain variable domain of TCR clone 388243 (TRBV9, TRBJ2-1)
CDSSALGGIGNNEQFF

SEQ ID NO: 776487 - protein, 12 aa, Homo sapiens
  CDR3 for alpha chain variable domain of TCR clone 388244 (TRAV21, TRAJ33)
CAKLDRNYQLIW

SEQ ID NO: 776488 - protein, 14 aa, Homo sapiens
  CDR3 for beta chain variable domain of TCR clone 388244 (TRBV2, TRBJ2-7)
CASSLTSGGYEQYF

SEQ ID NO: 776489 - protein, 15 aa, Homo sapiens
  CDR3 for alpha chain variable domain of TCR clone 388245 (TRAV17, TRAJ35)
CATAFVIGFGNVLHC

SEQ ID NO: 776490 - protein, 16 aa, Homo sapiens
  CDR3 for beta chain variable domain of TCR clone 388245 (TRBV11-2, TRBJ2-7)
CASSALAGGPRYEQYF

SEQ ID NO: 776491 - protein, 12 aa, Homo sapiens
  CDR3 for alpha chain variable domain of TCR clone 388246 (TRAV3, TRAJ43)
CAVRDPNNDMRF

SEQ ID NO: 776492 - protein, 17 aa, Homo sapiens
  CDR3 for beta chain variable domain of TCR clone 388246 (TRBV7-8, TRBJ2-6)
CASSAGTGGAWANVLTF

SEQ ID NO: 776493 - protein, 16 aa, Homo sapiens
  CDR3 for alpha chain variable domain of TCR clone 388247 (TRAV26-1, TRAJ53)
CIVRVAMGGSNYKLTF

SEQ ID NO: 776494 - protein, 12 aa, Homo sapiens
  CDR3 for beta chain variable domain of TCR clone 388247 (TRBV10-3, TRBJ1-1)
CAIRDMNTEAFF

SEQ ID NO: 776495 - protein, 14 aa, Homo sapiens
  CDR3 for alpha chain variable domain of TCR clone 388248 (TRAV2, TRAJ9)
CAVEDRSVGFKTIF

SEQ ID NO: 776496 - protein, 12 aa, Homo sapiens
  CDR3 for beta chain variable domain of TCR clone 388248 (TRBV12-4, TRBJ2-4)
CASSSSGNMQYF

SEQ ID NO: 776497 - protein, 16 aa, Homo sapiens
  CDR3 for alpha chain variable domain of TCR clone 388249 (TRAV3, TRAJ13)
CAVRDPNSGGYQIVTF

SEQ ID NO: 776498 - protein, 13 aa, Homo sapiens
  CDR3 for beta chain variable domain of TCR clone 388249 (TRBV7-9, TRBJ2-7)
CASSLQGSYEQYF

SEQ ID NO: 776499 - protein, 18 aa, Homo sapiens
  CDR3 for alpha chain variable domain of TCR clone 388250 (TRAV13-1, TRAJ52)
CAAKNPNAVGTSYGKLTF

SEQ ID NO: 776500 - protein, 18 aa, Homo sapiens
  CDR3 for beta chain variable domain of TCR clone 388250 (TRBV4-1, TRBJ1-4)
CASSPRTGGAWTNEKLFF

SEQ ID NO: 776501 - protein, 18 aa, Homo sapiens
  CDR3 for alpha chain variable domain of TCR clone 388251 (TRAV12-3, TRAJ52)
CAMSVGGAGGTSYGKLKF

SEQ ID NO: 776502 - protein, 14 aa, Homo sapiens
  CDR3 for beta chain variable domain of TCR clone 388251 (TRBV7-2, TRBJ2-7)
CASRSQGAAYEQYF

SEQ ID NO: 776503 - protein, 14 aa, Homo sapiens
  CDR3 for alpha chain variable domain of TCR clone 388252 (TRAV1-2, TRAJ16)
CAVNRFSDGQKRLF

SEQ ID NO: 776504 - protein, 15 aa, Homo sapiens
  CDR3 for beta chain variable domain of TCR clone 388252 (TRBV9, TRBJ1-6)
CASSAAGTGDSPLHF

SEQ ID NO: 776505 - protein, 14 aa, Homo sapiens
  CDR3 for alpha chain variable domain of TCR clone 388253 (TRAV12-2, TRAJ17)
CAVLSKAAGNKLTF

SEQ ID NO: 776506 - protein, 11 aa, Homo sapiens
  CDR3 for beta chain variable domain of TCR clone 388253 (TRBV7-6, TRBJ2-5)
CASSSQETQYF

SEQ ID NO: 776507 - protein, 21 aa, Homo sapiens
  CDR3 for alpha chain variable domain of TCR clone 388254 (TRAV12-1, TRAJ37)
CVVNGGLWQHRQTNLWARDNF

SEQ ID NO: 776508 - protein, 12 aa, Homo sapiens
  CDR3 for beta chain variable domain of TCR clone 388254 (TRBV20-1, TRBJ1-2)
SSAPGFNYGYTF

SEQ ID NO: 776509 - protein, 15 aa, Homo sapiens
  CDR3 for alpha chain variable domain of TCR clone 388255 (TRAV8-4, TRAJ9)
CAVSDLEGGGFKTIF

SEQ ID NO: 776510 - protein, 16 aa, Homo sapiens
  CDR3 for beta chain variable domain of TCR clone 388255 (TRBV7-2, TRBJ2-7)
CASSQEGLAISYEQYF

SEQ ID NO: 776511 - protein, 14 aa, Homo sapiens
  CDR3 for alpha chain variable domain of TCR clone 388256 (TRAV12-3, TRAJ10)
SHLPLTGGGNKLTF

SEQ ID NO: 776512 - protein, 14 aa, Homo sapiens
  CDR3 for beta chain variable domain of TCR clone 388256 (TRBV19, TRBJ1-2)
CASSLQGQAYGYTF

SEQ ID NO: 776513 - protein, 14 aa, Homo sapiens
  CDR3 for alpha chain variable domain of TCR clone 388257 (TRAV12-1, TRAJ3)
CGAARYSSASKIIF

SEQ ID NO: 776514 - protein, 15 aa, Homo sapiens
  CDR3 for beta chain variable domain of TCR clone 388257 (TRBV7-2, TRBJ2-6)
CASSREGSGDNVLTF

SEQ ID NO: 776515 - protein, 14 aa, Homo sapiens
  CDR3 for alpha chain variable domain of TCR clone 388258 (TRAV8-3, TRAJ4)
CAVGASGGYNKLIF

SEQ ID NO: 776516 - protein, 16 aa, Homo sapiens
  CDR3 for beta chain variable domain of TCR clone 388258 (TRBV4-3, TRBJ2-2)
CDSSHLQGSGTGELFF

SEQ ID NO: 776517 - protein, 16 aa, Homo sapiens
  CDR3 for alpha chain variable domain of TCR clone 388259 (TRAV12-2, TRAJ28)
CAVITDSGAGSYQLTF

SEQ ID NO: 776518 - protein, 13 aa, Homo sapiens
  CDR3 for beta chain variable domain of TCR clone 388259 (TRBV12-4, TRBJ1-1)
CASSRPGNTEAFF

SEQ ID NO: 776519 - protein, 12 aa, Homo sapiens
  CDR3 for alpha chain variable domain of TCR clone 388260 (TRAV21, TRAJ11)
CAATSGYSTLTF

SEQ ID NO: 776520 - protein, 14 aa, Homo sapiens
  CDR3 for beta chain variable domain of TCR clone 388260 (TRBV20-1, TRBJ2-7)
CSAPGLAGGGEQYF

SEQ ID NO: 776521 - protein, 16 aa, Homo sapiens
  CDR3 for alpha chain variable domain of TCR clone 388261 (TRAV30, TRAJ24)
CGTEIVDADSWGKFQF

SEQ ID NO: 776522 - protein, 14 aa, Homo sapiens
  CDR3 for beta chain variable domain of TCR clone 388261 (TRBV9, TRBJ2-4)
CASSPSGTGGFQYF

SEQ ID NO: 776523 - protein, 10 aa, Homo sapiens
  CDR3 for alpha chain variable domain of TCR clone 388262 (TRAV12-3, TRAJ49)
CAMNDDQFYF

SEQ ID NO: 776524 - protein, 15 aa, Homo sapiens
  CDR3 for beta chain variable domain of TCR clone 388262 (TRBV2, TRBJ2-1)
CASSELAGSYNEQFF

SEQ ID NO: 776525 - protein, 15 aa, Homo sapiens
  CDR3 for alpha chain variable domain of TCR clone 388263 (TRAV8-1, TRAJ6)
CAVNTPPGGSYKPTF

SEQ ID NO: 776526 - protein, 14 aa, Homo sapiens
  CDR3 for beta chain variable domain of TCR clone 388263 (TRBV12-4, TRBJ2-1)
CASSLGQGASEQFF

SEQ ID NO: 776527 - protein, 13 aa, Homo sapiens
  CDR3 for alpha chain variable domain of TCR clone 388264 (TRAV12-1, TRAJ3)
CGVNPRGASKIIF

SEQ ID NO: 776528 - protein, 13 aa, Homo sapiens
  CDR3 for beta chain variable domain of TCR clone 388264 (TRBV28, TRBJ1-5)
CASSDRGNQPQHF

SEQ ID NO: 776529 - protein, 15 aa, Homo sapiens
  CDR3 for alpha chain variable domain of TCR clone 388265 (TRAV8-1, TRAJ6)
CAVNTTPEGSYIPTF

SEQ ID NO: 776530 - protein, 14 aa, Homo sapiens
  CDR3 for beta chain variable domain of TCR clone 388265 (TRBV12-4, TRBJ2-1)
CASSLGQGASEQFF

SEQ ID NO: 776531 - protein, 14 aa, Homo sapiens
  CDR3 for alpha chain variable domain of TCR clone 388266 (TRAV6, TRAJ8)
CALERGTGFQNLVF

SEQ ID NO: 776532 - protein, 15 aa, Homo sapiens
  CDR3 for beta chain variable domain of TCR clone 388266 (TRBV7-9, TRBJ2-7)
CASSLALAEAYEQYF

SEQ ID NO: 776533 - protein, 14 aa, Homo sapiens
  CDR3 for alpha chain variable domain of TCR clone 388267 (TRAV38-1, TRAJ54)
CVFMSPSGAQKLVF

SEQ ID NO: 776534 - protein, 16 aa, Homo sapiens
  CDR3 for beta chain variable domain of TCR clone 388267 (TRBV28, TRBJ2-1)
CASSLGGSGSYNEQFF

SEQ ID NO: 776535 - protein, 16 aa, Homo sapiens
  CDR3 for alpha chain variable domain of TCR clone 388268 (TRAV8-1, TRAJ42)
CAVTSMYGGSQGNLIF

SEQ ID NO: 776536 - protein, 12 aa, Homo sapiens
  CDR3 for beta chain variable domain of TCR clone 388268 (TRBV6-3, TRBJ2-7)
CASSLGRRGLYF

SEQ ID NO: 776537 - protein, 11 aa, Homo sapiens
  CDR3 for alpha chain variable domain of TCR clone 388269 (TRAV1-1, TRAJ23)
CAVRQGGKLVF

SEQ ID NO: 776538 - protein, 13 aa, Homo sapiens
  CDR3 for beta chain variable domain of TCR clone 388269 (TRBV27, TRBJ1-4)
CASSLMGDEKLFF

SEQ ID NO: 776539 - protein, 13 aa, Homo sapiens
  CDR3 for alpha chain variable domain of TCR clone 388270 (TRAV35, TRAJ44)
CAGLSGTASKLTF

SEQ ID NO: 776540 - protein, 15 aa, Homo sapiens
  CDR3 for beta chain variable domain of TCR clone 388270 (TRBV20-1, TRBJ2-7)
CSARDPVKGEGEQYF

SEQ ID NO: 776541 - protein, 12 aa, Homo sapiens
  CDR3 for alpha chain variable domain of TCR clone 388271 (TRAV12-3, TRAJ17)
CAMTLTGNKLTF

SEQ ID NO: 776542 - protein, 15 aa, Homo sapiens
  CDR3 for beta chain variable domain of TCR clone 388271 (TRBV20-1, TRBJ2-7)
CSARDRGSWMDEQYF

SEQ ID NO: 776543 - protein, 19 aa, Homo sapiens
  CDR3 for alpha chain variable domain of TCR clone 388272 (TRAV13-1, TRAJ52)
CAASSSPNDGGTSYGKLTF

SEQ ID NO: 776544 - protein, 15 aa, Homo sapiens
  CDR3 for beta chain variable domain of TCR clone 388272 (TRBV9, TRBJ1-6)
CASSTGGGVDPPLHF

SEQ ID NO: 776545 - protein, 14 aa, Homo sapiens
  CDR3 for alpha chain variable domain of TCR clone 388273 (TRAV12-2, TRAJ36)
SAVNISTGANNLLF

SEQ ID NO: 776546 - protein, 14 aa, Homo sapiens
  CDR3 for beta chain variable domain of TCR clone 388273 (TRBV25-1, TRBJ1-2)
CASSDTTGVVGYTF

SEQ ID NO: 776547 - protein, 16 aa, Homo sapiens
  CDR3 for alpha chain variable domain of TCR clone 388274 (TRAV3, TRAJ10)
CAVRDMRAGGGNKLTF

SEQ ID NO: 776548 - protein, 15 aa, Homo sapiens
  CDR3 for beta chain variable domain of TCR clone 388274 (TRBV28, TRBJ2-4)
CAAGSGTLLMGIQYF

SEQ ID NO: 776549 - protein, 14 aa, Homo sapiens
  CDR3 for alpha chain variable domain of TCR clone 388275 (TRAV1-2, TRAJ33)
CAVRAPDSNYRLIW

SEQ ID NO: 776550 - protein, 15 aa, Homo sapiens
  CDR3 for beta chain variable domain of TCR clone 388275 (TRBV10-3, TRBJ2-3)
CAISLTSGGTDTQYF

SEQ ID NO: 776551 - protein, 13 aa, Homo sapiens
  CDR3 for alpha chain variable domain of TCR clone 388276 (TRAV9-2, TRAJ53)
CALSGGSNYKLTF

SEQ ID NO: 776552 - protein, 16 aa, Homo sapiens
  CDR3 for beta chain variable domain of TCR clone 388276 (TRBV4-2, TRBJ2-3)
CASSQELAGDTDTQYF

SEQ ID NO: 776553 - protein, 14 aa, Homo sapiens
  CDR3 for alpha chain variable domain of TCR clone 388277 (TRAV14/DV4, TRAJ34)
CAMREGRPHRQAHL

SEQ ID NO: 776554 - protein, 13 aa, Homo sapiens
  CDR3 for beta chain variable domain of TCR clone 388277 (TRBV12-4, TRBJ2-5)
CASSLGGSRTQYF

SEQ ID NO: 776555 - protein, 15 aa, Homo sapiens
  CDR3 for alpha chain variable domain of TCR clone 388278 (TRAV12-3, TRAJ6)
CAMSASTGGSYIPPF

SEQ ID NO: 776556 - protein, 16 aa, Homo sapiens
  CDR3 for beta chain variable domain of TCR clone 388278 (TRBV20-1, TRBJ1-2)
CSASMGQGVANCGYTF

SEQ ID NO: 776557 - protein, 17 aa, Homo sapiens
  CDR3 for alpha chain variable domain of TCR clone 388279 (TRAV3, TRAJ42)
CAVRGREYGGSQGNLIF

SEQ ID NO: 776558 - protein, 15 aa, Homo sapiens
  CDR3 for beta chain variable domain of TCR clone 388279 (TRBV3-1, TRBJ2-1)
CASSQVVDDGEEQFF

SEQ ID NO: 776559 - protein, 14 aa, Homo sapiens
  CDR3 for alpha chain variable domain of TCR clone 388280 (TRAV8-4, TRAJ9)
CAVRINTGGFKTIF

SEQ ID NO: 776560 - protein, 14 aa, Homo sapiens
  CDR3 for beta chain variable domain of TCR clone 388280 (TRBV6-1, TRBJ1-3)
CASVQGGGGNSIYF

SEQ ID NO: 776561 - protein, 15 aa, Homo sapiens
  CDR3 for alpha chain variable domain of TCR clone 388281 (TRAV8-1, TRAJ23)
CAVNSHYNQGGKLSF

SEQ ID NO: 776562 - protein, 16 aa, Homo sapiens
  CDR3 for beta chain variable domain of TCR clone 388281 (TRBV11-2, TRBJ1-1)
CASSLRQGGEHSKAFF

SEQ ID NO: 776563 - protein, 14 aa, Homo sapiens
  CDR3 for alpha chain variable domain of TCR clone 388282 (TRAV12-1, TRAJ12)
CVVTRMDSSYKLIF

SEQ ID NO: 776564 - protein, 12 aa, Homo sapiens
  CDR3 for beta chain variable domain of TCR clone 388282 (TRBV12-4, TRBJ1-2)
CASRLQGSGYTF

SEQ ID NO: 776565 - protein, 11 aa, Homo sapiens
  CDR3 for alpha chain variable domain of TCR clone 388283 (TRAV13-1, TRAJ39)
CASHAGNMLTF

SEQ ID NO: 776566 - protein, 15 aa, Homo sapiens
  CDR3 for beta chain variable domain of TCR clone 388283 (TRBV7-9, TRBJ1-5)
CASSQGHQPNQPQHF

SEQ ID NO: 776567 - protein, 12 aa, Homo sapiens
  CDR3 for alpha chain variable domain of TCR clone 388284 (TRAV13-1, TRAJ21)
CAAKEGFNKFYF

SEQ ID NO: 776568 - protein, 20 aa, Homo sapiens
  CDR3 for beta chain variable domain of TCR clone 388284 (TRBV7-8, TRBJ2-2)
CASIHLFPGPTIHITGELFF

SEQ ID NO: 776569 - protein, 15 aa, Homo sapiens
  CDR3 for alpha chain variable domain of TCR clone 388285 (TRAV20, TRAJ50)
CAVRQMKTSYDKVIF

SEQ ID NO: 776570 - protein, 14 aa, Homo sapiens
  CDR3 for beta chain variable domain of TCR clone 388285 (TRBV7-2, TRBJ2-7)
CASRGLAGRGEQYF

SEQ ID NO: 776571 - protein, 13 aa, Homo sapiens
  CDR3 for alpha chain variable domain of TCR clone 388286 (TRAV1-2, TRAJ9)
CAALNTGGFKTIF

SEQ ID NO: 776572 - protein, 17 aa, Homo sapiens
  CDR3 for beta chain variable domain of TCR clone 388286 (TRBV7-3, TRBJ2-3)
CASCPRGQGYGTDTQYF

SEQ ID NO: 776573 - protein, 12 aa, Homo sapiens
  CDR3 for alpha chain variable domain of TCR clone 388287 (TRAV27, TRAJ41)
CAGRNSGYALNF

SEQ ID NO: 776574 - protein, 15 aa, Homo sapiens
  CDR3 for beta chain variable domain of TCR clone 388287 (TRBV6-3, TRBJ2-7)
CASSSPRTVFYEQYF

SEQ ID NO: 776575 - protein, 11 aa, Homo sapiens
  CDR3 for alpha chain variable domain of TCR clone 388288 (TRAV21, TRAJ34)
CAVTNTDKLIF

SEQ ID NO: 776576 - protein, 14 aa, Homo sapiens
  CDR3 for beta chain variable domain of TCR clone 388288 (TRBV20-1, TRBJ1-5)
CSARDDRGNQPQHF

SEQ ID NO: 776577 - protein, 16 aa, Homo sapiens
  CDR3 for alpha chain variable domain of TCR clone 388289 (TRAV8-1, TRAJ18)
CAVNAGRGSTLGRLYF

SEQ ID NO: 776578 - protein, 14 aa, Homo sapiens
  CDR3 for beta chain variable domain of TCR clone 388289 (TRBV7-2, TRBJ2-5)
CQHTRGASGETQYF

SEQ ID NO: 776579 - protein, 11 aa, Homo sapiens
  CDR3 for alpha chain variable domain of TCR clone 388290 (TRAV23/DV6, TRAJ43)
CAASSGNDMRF

SEQ ID NO: 776580 - protein, 14 aa, Homo sapiens
  CDR3 for beta chain variable domain of TCR clone 388290 (TRBV4-1, TRBJ1-2)
CASSQDPLPYGCTF

SEQ ID NO: 776581 - protein, 12 aa, Homo sapiens
  CDR3 for alpha chain variable domain of TCR clone 388291 (TRAV21, TRAJ30)
CAALNRDDKIIF

SEQ ID NO: 776582 - protein, 14 aa, Homo sapiens
  CDR3 for beta chain variable domain of TCR clone 388291 (TRBV19, TRBJ2-1)
CASPTFVLSGEQFF

SEQ ID NO: 776583 - protein, 15 aa, Homo sapiens
  CDR3 for alpha chain variable domain of TCR clone 388292 (TRAV12-3, TRAJ18)
CAMSGGGSTLGRLYF

SEQ ID NO: 776584 - protein, 15 aa, Homo sapiens
  CDR3 for beta chain variable domain of TCR clone 388292 (TRBV20-1, TRBJ2-7)
CSARDRVSGMDEQYF

SEQ ID NO: 776585 - protein, 11 aa, Homo sapiens
  CDR3 for alpha chain variable domain of TCR clone 388293 (TRAV27, TRAJ9)
CGESGGFKTIF

SEQ ID NO: 776586 - protein, 18 aa, Homo sapiens
  CDR3 for beta chain variable domain of TCR clone 388293 (TRBV10-2, TRBJ2-2)
CISAPAVHRQADAGELFF

SEQ ID NO: 776587 - protein, 14 aa, Homo sapiens
  CDR3 for alpha chain variable domain of TCR clone 388294 (TRAV2, TRAJ9)
CAVDPNTGGFKTIF

SEQ ID NO: 776588 - protein, 13 aa, Homo sapiens
  CDR3 for beta chain variable domain of TCR clone 388294 (TRBV7-8, TRBJ2-7)
CASSLTGGREQYF

SEQ ID NO: 776589 - protein, 14 aa, Homo sapiens
  CDR3 for alpha chain variable domain of TCR clone 388295 (TRAV16, TRAJ15)
CVLSFNQAGTALIF

SEQ ID NO: 776590 - protein, 16 aa, Homo sapiens
  CDR3 for beta chain variable domain of TCR clone 388295 (TRBV9, TRBJ2-7)
CASSAGPDRTPYEQYF

SEQ ID NO: 776591 - protein, 15 aa, Homo sapiens
  CDR3 for alpha chain variable domain of TCR clone 388296 (TRAV23/DV6, TRAJ30)
CAASSQESRDDKIIF

SEQ ID NO: 776592 - protein, 17 aa, Homo sapiens
  CDR3 for beta chain variable domain of TCR clone 388296 (TRBV4-3, TRBJ2-1)
CARSQFSSGRASGEQFF

SEQ ID NO: 776593 - protein, 11 aa, Homo sapiens
  CDR3 for alpha chain variable domain of TCR clone 388297 (TRAV13-1, TRAJ34)
CAASKADKLIF

SEQ ID NO: 776594 - protein, 15 aa, Homo sapiens
  CDR3 for beta chain variable domain of TCR clone 388297 (TRBV20-1, TRBJ2-7)
CSARDRVSGMDEQYF

SEQ ID NO: 776595 - protein, 21 aa, Homo sapiens
  CDR3 for alpha chain variable domain of TCR clone 388298 (TRAV36/DV7, TRAJ39)
TATQTGDSAIYLPNAGNMLTF

SEQ ID NO: 776596 - protein, 14 aa, Homo sapiens
  CDR3 for beta chain variable domain of TCR clone 388298 (TRBV19, TRBJ2-1)
CARGARSFQWEQFF

SEQ ID NO: 776597 - protein, 17 aa, Homo sapiens
  CDR3 for alpha chain variable domain of TCR clone 388299 (TRAV13-1, TRAJ52)
CAASSGAGGTSYGKLTF

SEQ ID NO: 776598 - protein, 14 aa, Homo sapiens
  CDR3 for beta chain variable domain of TCR clone 388299 (TRBV7-8, TRBJ2-3)
CASSSRDSTDTQYF

SEQ ID NO: 776599 - protein, 17 aa, Homo sapiens
  CDR3 for alpha chain variable domain of TCR clone 388300 (TRAV3, TRAJ6)
CAVSRRTDTVGSYIPTF

SEQ ID NO: 776600 - protein, 18 aa, Homo sapiens
  CDR3 for beta chain variable domain of TCR clone 388300 (TRBV7-2, TRBJ2-3)
CASSLETSRGRKADMQYF

SEQ ID NO: 776601 - protein, 17 aa, Homo sapiens
  CDR3 for alpha chain variable domain of TCR clone 388301 (TRAV3, TRAJ7)
CAVRDMSPLEGTTDSVL

SEQ ID NO: 776602 - protein, 17 aa, Homo sapiens
  CDR3 for beta chain variable domain of TCR clone 388301 (TRBV15, TRBJ1-2)
CATSGREIDVVNYGYTF

SEQ ID NO: 776603 - protein, 11 aa, Homo sapiens
  CDR3 for alpha chain variable domain of TCR clone 388302 (TRAV35, TRAJ30)
CAPGGDDKIIF

SEQ ID NO: 776604 - protein, 15 aa, Homo sapiens
  CDR3 for beta chain variable domain of TCR clone 388302 (TRBV4-1, TRBJ1-4)
CASSDTGGTNEKLFF

SEQ ID NO: 776605 - protein, 12 aa, Homo sapiens
  CDR3 for alpha chain variable domain of TCR clone 388303 (TRAV12-3, TRAJ17)
CAMTLTGNKLTF

SEQ ID NO: 776606 - protein, 15 aa, Homo sapiens
  CDR3 for beta chain variable domain of TCR clone 388303 (TRBV20-1, TRBJ2-7)
CSARDSVSGMDEQYF

SEQ ID NO: 776607 - protein, 14 aa, Homo sapiens
  CDR3 for alpha chain variable domain of TCR clone 388304 (TRAV26-1, TRAJ26)
CIVRATILGQNFVF

SEQ ID NO: 776608 - protein, 16 aa, Homo sapiens
  CDR3 for beta chain variable domain of TCR clone 388304 (TRBV12-4, TRBJ2-7)
CASRSTGTGPSYEQYF

SEQ ID NO: 776609 - protein, 12 aa, Homo sapiens
  CDR3 for alpha chain variable domain of TCR clone 388305 (TRAV23/DV6, TRAJ30)
CAASKGDDKIIF

SEQ ID NO: 776610 - protein, 18 aa, Homo sapiens
  CDR3 for beta chain variable domain of TCR clone 388305 (TRBV10-3, TRBJ2-3)
CAISEWRVGPMRGDTQYF

SEQ ID NO: 776611 - protein, 15 aa, Homo sapiens
  CDR3 for alpha chain variable domain of TCR clone 388306 (TRAV35, TRAJ52)
CAGPRGGTSYGKLTF

SEQ ID NO: 776612 - protein, 14 aa, Homo sapiens
  CDR3 for beta chain variable domain of TCR clone 388306 (TRBV20-1, TRBJ2-7)
CSAWTALSSYEQYY

SEQ ID NO: 776613 - protein, 11 aa, Homo sapiens
  CDR3 for alpha chain variable domain of TCR clone 388307 (TRAV13-1, TRAJ6)
CATLGSYIPNF

SEQ ID NO: 776614 - protein, 12 aa, Homo sapiens
  CDR3 for beta chain variable domain of TCR clone 388307 (TRBV11-2, TRBJ2-1)
CASSPGNNEQFF

SEQ ID NO: 776615 - protein, 13 aa, Homo sapiens
  CDR3 for alpha chain variable domain of TCR clone 388308 (TRAV12-1, TRAJ21)
CVVIGDNFSKFYF

SEQ ID NO: 776616 - protein, 14 aa, Homo sapiens
  CDR3 for beta chain variable domain of TCR clone 388308 (TRBV7-3, TRBJ2-2)
CASSLYPLTGELFF

SEQ ID NO: 776617 - protein, 18 aa, Homo sapiens
  CDR3 for alpha chain variable domain of TCR clone 388309 (TRAV12-3, TRAJ52)
CAMSVGGAGGTSYGKLTF

SEQ ID NO: 776618 - protein, 15 aa, Homo sapiens
  CDR3 for beta chain variable domain of TCR clone 388309 (TRBV19, TRBJ2-1)
CASSGGGTLYNEQFF

SEQ ID NO: 776619 - protein, 13 aa, Homo sapiens
  CDR3 for alpha chain variable domain of TCR clone 388310 (TRAV36/DV7, TRAJ37)
CAVFSSNTGKLIF

SEQ ID NO: 776620 - protein, 22 aa, Homo sapiens
  CDR3 for beta chain variable domain of TCR clone 388310 (TRBV11-2, TRBJ1-4)
CASSLDITRRGIPRKDNEKLFF

SEQ ID NO: 776621 - protein, 16 aa, Homo sapiens
  CDR3 for alpha chain variable domain of TCR clone 388311 (TRAV12-2, TRAJ43)
CAGDDMRFGAGTRLTV

SEQ ID NO: 776622 - protein, 15 aa, Homo sapiens
  CDR3 for beta chain variable domain of TCR clone 388311 (TRBV7-3, TRBJ2-1)
CASSLDGNSYNEQFF

SEQ ID NO: 776623 - protein, 16 aa, Homo sapiens
  CDR3 for alpha chain variable domain of TCR clone 388312 (TRAV3, TRAJ37)
CALRGKGSGNTGKLIF

SEQ ID NO: 776624 - protein, 14 aa, Homo sapiens
  CDR3 for beta chain variable domain of TCR clone 388312 (TRBV7-2, TRBJ2-7)
CASSPKTSFYEQYF

SEQ ID NO: 776625 - protein, 14 aa, Homo sapiens
  CDR3 for alpha chain variable domain of TCR clone 388313 (TRAV17, TRAJ37)
RATDGSSNTGKLIF

SEQ ID NO: 776626 - protein, 13 aa, Homo sapiens
  CDR3 for beta chain variable domain of TCR clone 388313 (TRBV11-2, TRBJ2-1)
CASSLDLVNEQFF

SEQ ID NO: 776627 - protein, 18 aa, Homo sapiens
  CDR3 for alpha chain variable domain of TCR clone 388314 (TRAV13-2, TRAJ52)
CAETPLNAGGTSYGKMTF

SEQ ID NO: 776628 - protein, 15 aa, Homo sapiens
  CDR3 for beta chain variable domain of TCR clone 388314 (TRBV7-2, TRBJ2-7)
CASSLKGALTYEQYF

SEQ ID NO: 776629 - protein, 14 aa, Homo sapiens
  CDR3 for alpha chain variable domain of TCR clone 388315 (TRAV26-1, TRAJ45)
CIEVTGGGADGLTF

SEQ ID NO: 776630 - protein, 15 aa, Homo sapiens
  CDR3 for beta chain variable domain of TCR clone 388315 (TRBV25-1, TRBJ1-4)
CASSKRIATNEKLFF

SEQ ID NO: 776631 - protein, 18 aa, Homo sapiens
  CDR3 for alpha chain variable domain of TCR clone 388316 (TRAV21, TRAJ52)
CAVRPSPAGGTSYGKVTF

SEQ ID NO: 776632 - protein, 14 aa, Homo sapiens
  CDR3 for beta chain variable domain of TCR clone 388316 (TRBV4-1, TRBJ2-2)
CASSQAVNTGELFF

SEQ ID NO: 776633 - protein, 12 aa, Homo sapiens
  CDR3 for alpha chain variable domain of TCR clone 388317 (TRAV13-1, TRAJ21)
CAAKEGFNKFYF

SEQ ID NO: 776634 - protein, 16 aa, Homo sapiens
  CDR3 for beta chain variable domain of TCR clone 388317 (TRBV29-1, TRBJ2-7)
CSVEVVGTSGSYEQYF

SEQ ID NO: 776635 - protein, 17 aa, Homo sapiens
  CDR3 for alpha chain variable domain of TCR clone 388318 (TRAV3, TRAJ6)
CAVRGGPRAGGSYIPKF

SEQ ID NO: 776636 - protein, 14 aa, Homo sapiens
  CDR3 for beta chain variable domain of TCR clone 388318 (TRBV7-2, TRBJ2-7)
CASSPKTSFYEQYF

SEQ ID NO: 776637 - protein, 14 aa, Homo sapiens
  CDR3 for alpha chain variable domain of TCR clone 388319 (TRAV12-2, TRAJ40)
CAVKIPSGSYKYIF

SEQ ID NO: 776638 - protein, 14 aa, Homo sapiens
  CDR3 for beta chain variable domain of TCR clone 388319 (TRBV12-5, TRBJ2-5)
CASGSRTHQETQYF

SEQ ID NO: 776639 - protein, 15 aa, Homo sapiens
  CDR3 for alpha chain variable domain of TCR clone 388320 (TRAV26-1, )
CIADNASNNHIQNPD

SEQ ID NO: 776640 - protein, 13 aa, Homo sapiens
  CDR3 for beta chain variable domain of TCR clone 388320 (TRBV20-1, TRBJ1-1)
CSARGGGNTEAFF

SEQ ID NO: 776641 - protein, 12 aa, Homo sapiens
  CDR3 for alpha chain variable domain of TCR clone 388321 (TRAV12-1, TRAJ20)
CVVNIDDYKLSF

SEQ ID NO: 776642 - protein, 13 aa, Homo sapiens
  CDR3 for beta chain variable domain of TCR clone 388321 (TRBV7-3, TRBJ2-5)
CASSVRGGETQYF

SEQ ID NO: 776643 - protein, 18 aa, Homo sapiens
  CDR3 for alpha chain variable domain of TCR clone 388322 (TRAV21, TRAJ52)
CAVRPSPAGGTSYGELTF

SEQ ID NO: 776644 - protein, 15 aa, Homo sapiens
  CDR3 for beta chain variable domain of TCR clone 388322 (TRBV20-1, TRBJ2-3)
CSAEPLAGHGDTQYF

SEQ ID NO: 776645 - protein, 15 aa, Homo sapiens
  CDR3 for alpha chain variable domain of TCR clone 388323 (TRAV8-3, TRAJ27)
CAVGPSKTNAGKSTF

SEQ ID NO: 776646 - protein, 15 aa, Homo sapiens
  CDR3 for beta chain variable domain of TCR clone 388323 (TRBV7-2, TRBJ2-1)
CASSSGLAGGNELFF

SEQ ID NO: 776647 - protein, 14 aa, Homo sapiens
  CDR3 for alpha chain variable domain of TCR clone 388324 (TRAV2, TRAJ37)
CAVDFTSNTGKLIF

SEQ ID NO: 776648 - protein, 15 aa, Homo sapiens
  CDR3 for beta chain variable domain of TCR clone 388324 (TRBV2, TRBJ2-1)
CASGELAGSYNEQFF

SEQ ID NO: 776649 - protein, 14 aa, Homo sapiens
  CDR3 for alpha chain variable domain of TCR clone 388325 (TRAV26-1, TRAJ45)
CIVRVVGGGDGLTF

SEQ ID NO: 776650 - protein, 16 aa, Homo sapiens
  CDR3 for beta chain variable domain of TCR clone 388325 (TRBV7-9, TRBJ1-1)
CASSLTQVRSNTEAFF

SEQ ID NO: 776651 - protein, 13 aa, Homo sapiens
  CDR3 for alpha chain variable domain of TCR clone 388326 (TRAV8-6, TRAJ9)
CAVWDTGGFKTIF

SEQ ID NO: 776652 - protein, 14 aa, Homo sapiens
  CDR3 for beta chain variable domain of TCR clone 388326 (TRBV2, TRBJ2-1)
CASSESLIYNEQFF

SEQ ID NO: 776653 - protein, 15 aa, Homo sapiens
  CDR3 for alpha chain variable domain of TCR clone 388327 (TRAV20, TRAJ50)
CAVRQMKTYYDKVIF

SEQ ID NO: 776654 - protein, 17 aa, Homo sapiens
  CDR3 for beta chain variable domain of TCR clone 388327 (TRBV28, TRBJ2-7)
CASSPLHRASGVYEQYF

SEQ ID NO: 776655 - protein, 12 aa, Homo sapiens
  CDR3 for alpha chain variable domain of TCR clone 388328 (TRAV27, TRAJ41)
CAGRNSGNALNF

SEQ ID NO: 776656 - protein, 15 aa, Homo sapiens
  CDR3 for beta chain variable domain of TCR clone 388328 (TRBV20-1, TRBJ1-5)
CSATSDRGLGQPQHF

SEQ ID NO: 776657 - protein, 14 aa, Homo sapiens
  CDR3 for alpha chain variable domain of TCR clone 388329 (TRAV12-3, TRAJ6)
CAMSATGGSYIPTF

SEQ ID NO: 776658 - protein, 16 aa, Homo sapiens
  CDR3 for beta chain variable domain of TCR clone 388329 (TRBV4-2, TRBJ2-1)
CASSPRAGQGANEQFS

SEQ ID NO: 776659 - protein, 14 aa, Homo sapiens
  CDR3 for alpha chain variable domain of TCR clone 388330 (TRAV12-2, TRAJ33)
CAVKRARSKYQLIW

SEQ ID NO: 776660 - protein, 15 aa, Homo sapiens
  CDR3 for beta chain variable domain of TCR clone 388330 (TRBV20-1, TRBJ2-7)
CSARDRVSGMDEQYF

SEQ ID NO: 776661 - protein, 23 aa, Homo sapiens
  CDR3 for alpha chain variable domain of TCR clone 388331 (TRAV12-1, TRAJ26)
CVVNSWVTMVRILSLVPEPDCQC

SEQ ID NO: 776662 - protein, 13 aa, Homo sapiens
  CDR3 for beta chain variable domain of TCR clone 388331 (TRBV10-3, TRBJ2-7)
CASKLAVNYEQYF

SEQ ID NO: 776663 - protein, 17 aa, Homo sapiens
  CDR3 for alpha chain variable domain of TCR clone 388332 (TRAV13-1, TRAJ31)
CAPRDRLMFGDGTQLVV

SEQ ID NO: 776664 - protein, 16 aa, Homo sapiens
  CDR3 for beta chain variable domain of TCR clone 388332 (TRBV7-3, TRBJ2-1)
CASSVEGYRSYNEQFF

SEQ ID NO: 776665 - protein, 10 aa, Homo sapiens
  CDR3 for alpha chain variable domain of TCR clone 388333 (TRAV8-3, TRAJ28)
GAVVSYQLTF

SEQ ID NO: 776666 - protein, 14 aa, Homo sapiens
  CDR3 for beta chain variable domain of TCR clone 388333 (TRBV7-6, TRBJ2-1)
CASSLGGGADEQFF

SEQ ID NO: 776667 - protein, 12 aa, Homo sapiens
  CDR3 for alpha chain variable domain of TCR clone 388334 (TRAV16, TRAJ10)
CSRTGGGNKLTF

SEQ ID NO: 776668 - protein, 13 aa, Homo sapiens
  CDR3 for beta chain variable domain of TCR clone 388334 (TRBV20-1, TRBJ2-7)
CRADPGATYEQYF

SEQ ID NO: 776669 - protein, 14 aa, Homo sapiens
  CDR3 for alpha chain variable domain of TCR clone 388335 (TRAV8-2, TRAJ6)
CVVISAGGSYIPTF

SEQ ID NO: 776670 - protein, 16 aa, Homo sapiens
  CDR3 for beta chain variable domain of TCR clone 388335 (TRBV7-6, TRBJ2-6)
CASSLPGLSGANVLTL

SEQ ID NO: 776671 - protein, 13 aa, Homo sapiens
  CDR3 for alpha chain variable domain of TCR clone 388336 (TRAV23/DV6, TRAJ12)
CAPWVDSSYKLIF

SEQ ID NO: 776672 - protein, 12 aa, Homo sapiens
  CDR3 for beta chain variable domain of TCR clone 388336 (TRBV7-6, TRBJ2-5)
CASSLGQETQYF

SEQ ID NO: 776673 - protein, 18 aa, Homo sapiens
  CDR3 for alpha chain variable domain of TCR clone 388337 (TRAV13-1, TRAJ52)
CAAKNPNAGGTSYGKLTF

SEQ ID NO: 776674 - protein, 12 aa, Homo sapiens
  CDR3 for beta chain variable domain of TCR clone 388337 (TRBV3-1, TRBJ2-1)
CASSQGSSGQFF

SEQ ID NO: 776675 - protein, 16 aa, Homo sapiens
  CDR3 for alpha chain variable domain of TCR clone 388338 (TRAV8-3, TRAJ10)
CAVGPILTGGGNKLTF

SEQ ID NO: 776676 - protein, 12 aa, Homo sapiens
  CDR3 for beta chain variable domain of TCR clone 388338 (TRBV11-2, TRBJ2-2)
CASSLGGGELFF

SEQ ID NO: 776677 - protein, 11 aa, Homo sapiens
  CDR3 for alpha chain variable domain of TCR clone 388339 (TRAV13-1, TRAJ16)
CAALDGQKLLF

SEQ ID NO: 776678 - protein, 14 aa, Homo sapiens
  CDR3 for beta chain variable domain of TCR clone 388339 (TRBV25-1, TRBJ1-1)
CASTHLGGNTEAFF

SEQ ID NO: 776679 - protein, 15 aa, Homo sapiens
  CDR3 for alpha chain variable domain of TCR clone 388340 (TRAV13-2, TRAJ45)
CAESDSGGGADGLTF

SEQ ID NO: 776680 - protein, 15 aa, Homo sapiens
  CDR3 for beta chain variable domain of TCR clone 388340 (TRBV5-1, TRBJ2-1)
CASSPPRAPYNEQFF

SEQ ID NO: 776681 - protein, 14 aa, Homo sapiens
  CDR3 for alpha chain variable domain of TCR clone 388341 (TRAV29/DV5, TRAJ45)
CAASFRGGVDGLTF

SEQ ID NO: 776682 - protein, 11 aa, Homo sapiens
  CDR3 for beta chain variable domain of TCR clone 388341 (TRBV11-2, TRBJ2-2)
CASSLPGELFF

SEQ ID NO: 776683 - protein, 14 aa, Homo sapiens
  CDR3 for alpha chain variable domain of TCR clone 388342 (TRAV1-2, TRAJ8)
CAVREDTGSQKLVF

SEQ ID NO: 776684 - protein, 15 aa, Homo sapiens
  CDR3 for beta chain variable domain of TCR clone 388342 (TRBV11-3, TRBJ2-3)
CASLKDGREGDTQYF

SEQ ID NO: 776685 - protein, 14 aa, Homo sapiens
  CDR3 for alpha chain variable domain of TCR clone 388343 (TRAV12-2, TRAJ40)
CAGKIPSGTYKYNF

SEQ ID NO: 776686 - protein, 14 aa, Homo sapiens
  CDR3 for beta chain variable domain of TCR clone 388343 (TRBV20-1, TRBJ1-1)
CSAQTRIGGTEAFF

SEQ ID NO: 776687 - protein, 23 aa, Homo sapiens
  CDR3 for alpha chain variable domain of TCR clone 388344 (TRAV8-3, TRAJ38)
CAVGASNAGNNHIQNPDPAVYQL

SEQ ID NO: 776688 - protein, 15 aa, Homo sapiens
  CDR3 for beta chain variable domain of TCR clone 388344 (TRBV11-3, TRBJ1-3)
CASSLFGTSGNTIYF

SEQ ID NO: 776689 - protein, 14 aa, Homo sapiens
  CDR3 for alpha chain variable domain of TCR clone 388345 (TRAV8-6, TRAJ54)
CAVSPALGAQKLVF

SEQ ID NO: 776690 - protein, 15 aa, Homo sapiens
  CDR3 for beta chain variable domain of TCR clone 388345 (TRBV4-1, TRBJ1-6)
CASSAGQGYNAPLHF

SEQ ID NO: 776691 - protein, 12 aa, Homo sapiens
  CDR3 for alpha chain variable domain of TCR clone 388346 (TRAV17, TRAJ30)
CVPERRDDKIIF

SEQ ID NO: 776692 - protein, 13 aa, Homo sapiens
  CDR3 for beta chain variable domain of TCR clone 388346 (TRBV7-7, TRBJ2-2)
CQQPGQGTGELFF

SEQ ID NO: 776693 - protein, 16 aa, Homo sapiens
  CDR3 for alpha chain variable domain of TCR clone 388347 (TRAV30, TRAJ24)
CGTEIVDADSWGKFKF

SEQ ID NO: 776694 - protein, 12 aa, Homo sapiens
  CDR3 for beta chain variable domain of TCR clone 388347 (TRBV11-2, TRBJ2-1)
CASSPGNNGQFF

SEQ ID NO: 776695 - protein, 14 aa, Homo sapiens
  CDR3 for alpha chain variable domain of TCR clone 388348 (TRAV1-2, TRAJ8)
FAVREDTGFQKLVF

SEQ ID NO: 776696 - protein, 13 aa, Homo sapiens
  CDR3 for beta chain variable domain of TCR clone 388348 (TRBV7-9, TRBJ1-2)
CASSLKQNYGYTF

SEQ ID NO: 776697 - protein, 16 aa, Homo sapiens
  CDR3 for alpha chain variable domain of TCR clone 388349 (TRAV16, TRAJ42)
CARKMNYGGSQGNLNF

SEQ ID NO: 776698 - protein, 14 aa, Homo sapiens
  CDR3 for beta chain variable domain of TCR clone 388349 (TRBV14, TRBJ2-3)
CQQPDDRDTDTQYF

SEQ ID NO: 776699 - protein, 12 aa, Homo sapiens
  CDR3 for alpha chain variable domain of TCR clone 388350 (TRAV1-1, TRAJ39)
CAVPVVGNMLTF

SEQ ID NO: 776700 - protein, 16 aa, Homo sapiens
  CDR3 for beta chain variable domain of TCR clone 388350 (TRBV28, TRBJ2-7)
CAGSPWVATGDLSQYF

SEQ ID NO: 776701 - protein, 15 aa, Homo sapiens
  CDR3 for alpha chain variable domain of TCR clone 388351 (TRAV2, TRAJ9)
CAVEDRGTGGFKTIF

SEQ ID NO: 776702 - protein, 13 aa, Homo sapiens
  CDR3 for beta chain variable domain of TCR clone 388351 (TRBV7-6, TRBJ2-3)
CASSLRSDNTQYF

SEQ ID NO: 776703 - protein, 12 aa, Homo sapiens
  CDR3 for alpha chain variable domain of TCR clone 388352 (TRAV13-1, TRAJ21)
CAAKEGFNKFYF

SEQ ID NO: 776704 - protein, 15 aa, Homo sapiens
  CDR3 for beta chain variable domain of TCR clone 388352 (TRBV4-1, TRBJ2-3)
CASRSTRAGTDTQYF

SEQ ID NO: 776705 - protein, 12 aa, Homo sapiens
  CDR3 for alpha chain variable domain of TCR clone 388353 (TRAV17, TRAJ49)
CATVTTGNQFYF

SEQ ID NO: 776706 - protein, 18 aa, Homo sapiens
  CDR3 for beta chain variable domain of TCR clone 388353 (TRBV11-2, TRBJ2-6)
CTSSLNPFLGTGANVLTF

SEQ ID NO: 776707 - protein, 14 aa, Homo sapiens
  CDR3 for alpha chain variable domain of TCR clone 388354 (TRAV12-2, TRAJ13)
CAVKKTGGYQQVTF

SEQ ID NO: 776708 - protein, 15 aa, Homo sapiens
  CDR3 for beta chain variable domain of TCR clone 388354 (TRBV27, TRBJ2-1)
CASSNGGVSSNEQFF

SEQ ID NO: 776709 - protein, 15 aa, Homo sapiens
  CDR3 for alpha chain variable domain of TCR clone 388355 (TRAV8-3, TRAJ21)
CAVGALSPRGYKFYF

SEQ ID NO: 776710 - protein, 18 aa, Homo sapiens
  CDR3 for beta chain variable domain of TCR clone 388355 (TRBV25-1, TRBJ1-2)
CASSGLQNGQGLIFGYTF

SEQ ID NO: 776711 - protein, 14 aa, Homo sapiens
  CDR3 for alpha chain variable domain of TCR clone 388356 (TRAV29/DV5, TRAJ36)
CSARRKTGANNLFF

SEQ ID NO: 776712 - protein, 14 aa, Homo sapiens
  CDR3 for beta chain variable domain of TCR clone 388356 (TRBV12-5, TRBJ2-5)
CASGSRTHQGTQYF

SEQ ID NO: 776713 - protein, 18 aa, Homo sapiens
  CDR3 for alpha chain variable domain of TCR clone 388357 (TRAV21, TRAJ52)
CAVRPSPAGGTSYGKLTF

SEQ ID NO: 776714 - protein, 10 aa, Homo sapiens
  CDR3 for beta chain variable domain of TCR clone 388357 (TRBV19, TRBJ1-1)
CASRQVEAFF

SEQ ID NO: 776715 - protein, 11 aa, Homo sapiens
  CDR3 for alpha chain variable domain of TCR clone 388358 (TRAV12-3, TRAJ27)
RAMANAGKSTF

SEQ ID NO: 776716 - protein, 16 aa, Homo sapiens
  CDR3 for beta chain variable domain of TCR clone 388358 (TRBV7-6, TRBJ2-1)
CASSAPGPSSYNEQFF

SEQ ID NO: 776717 - protein, 16 aa, Homo sapiens
  CDR3 for alpha chain variable domain of TCR clone 388359 (TRAV3, TRAJ10)
CAVSDMRAGGGNKLTF

SEQ ID NO: 776718 - protein, 15 aa, Homo sapiens
  CDR3 for beta chain variable domain of TCR clone 388359 (TRBV7-2, TRBJ2-1)
CASSFQADEYNEQFF

SEQ ID NO: 776719 - protein, 13 aa, Homo sapiens
  CDR3 for alpha chain variable domain of TCR clone 388360 (TRAV12-3, TRAJ35)
CAMAIGFGNVRHC

SEQ ID NO: 776720 - protein, 15 aa, Homo sapiens
  CDR3 for beta chain variable domain of TCR clone 388360 (TRBV20-1, TRBJ2-1)
CSARGSATYYNEQFF

SEQ ID NO: 776721 - protein, 13 aa, Homo sapiens
  CDR3 for alpha chain variable domain of TCR clone 388361 (TRAV27, TRAJ40)
CAGPPSGTYKYIL

SEQ ID NO: 776722 - protein, 13 aa, Homo sapiens
  CDR3 for beta chain variable domain of TCR clone 388361 (TRBV28, TRBJ1-2)
CAGRDRGNYGYTF

SEQ ID NO: 776723 - protein, 11 aa, Homo sapiens
  CDR3 for alpha chain variable domain of TCR clone 388362 (TRAV2, TRAJ13)
CASGGYQKVTF

SEQ ID NO: 776724 - protein, 12 aa, Homo sapiens
  CDR3 for beta chain variable domain of TCR clone 388362 (TRBV7-2, TRBJ2-1)
CASSPQDIEQFF

SEQ ID NO: 776725 - protein, 14 aa, Homo sapiens
  CDR3 for alpha chain variable domain of TCR clone 388363 (TRAV12-3, TRAJ30)
CAMSLLNRDAKIIF

SEQ ID NO: 776726 - protein, 12 aa, Homo sapiens
  CDR3 for beta chain variable domain of TCR clone 388363 (TRBV11-2, TRBJ2-2)
CASSLGGGELFF

SEQ ID NO: 776727 - protein, 15 aa, Homo sapiens
  CDR3 for alpha chain variable domain of TCR clone 388364 (TRAV3, TRAJ4)
CAVRDGTGGYNKLIF

SEQ ID NO: 776728 - protein, 17 aa, Homo sapiens
  CDR3 for beta chain variable domain of TCR clone 388364 (TRBV7-9, TRBJ2-6)
CASSFGAGYSGANVLTF

SEQ ID NO: 776729 - protein, 12 aa, Homo sapiens
  CDR3 for alpha chain variable domain of TCR clone 388365 (TRAV12-3, TRAJ17)
CAMTLTGNKLTF

SEQ ID NO: 776730 - protein, 14 aa, Homo sapiens
  CDR3 for beta chain variable domain of TCR clone 388365 (TRBV15, TRBJ2-3)
CATARDGGGDTQYF

SEQ ID NO: 776731 - protein, 13 aa, Homo sapiens
  CDR3 for alpha chain variable domain of TCR clone 388366 (TRAV35, TRAJ13)
CWGSPGGYQKVTF

SEQ ID NO: 776732 - protein, 14 aa, Homo sapiens
  CDR3 for beta chain variable domain of TCR clone 388366 (TRBV19, TRBJ2-2)
CASSMVGLSGELFF

SEQ ID NO: 776733 - protein, 12 aa, Homo sapiens
  CDR3 for alpha chain variable domain of TCR clone 388367 (TRAV26-2, TRAJ47)
CILVEYGNILVF

SEQ ID NO: 776734 - protein, 16 aa, Homo sapiens
  CDR3 for beta chain variable domain of TCR clone 388367 (TRBV18, TRBJ1-4)
CASSPLVGDRAEKLFF

SEQ ID NO: 776735 - protein, 16 aa, Homo sapiens
  CDR3 for alpha chain variable domain of TCR clone 388368 (TRAV30, TRAJ24)
CGTEVVDADSCGKFQF

SEQ ID NO: 776736 - protein, 14 aa, Homo sapiens
  CDR3 for beta chain variable domain of TCR clone 388368 (TRBV12-5, TRBJ2-5)
CASGSRTHQETQYF

SEQ ID NO: 776737 - protein, 15 aa, Homo sapiens
  CDR3 for alpha chain variable domain of TCR clone 388369 (TRAV2, TRAJ22)
WAVPSRGGSARQLTF

SEQ ID NO: 776738 - protein, 11 aa, Homo sapiens
  CDR3 for beta chain variable domain of TCR clone 388369 (TRBV27, TRBJ2-3)
CASSLGDTQYF

SEQ ID NO: 776739 - protein, 12 aa, Homo sapiens
  CDR3 for alpha chain variable domain of TCR clone 388370 (TRAV13-1, TRAJ27)
CAAHTNAGKQTF

SEQ ID NO: 776740 - protein, 14 aa, Homo sapiens
  CDR3 for beta chain variable domain of TCR clone 388370 (TRBV19, TRBJ2-2)
CASSGQGIAGELFF

SEQ ID NO: 776741 - protein, 14 aa, Homo sapiens
  CDR3 for alpha chain variable domain of TCR clone 388371 (TRAV23/DV6, TRAJ49)
CAASKSFVGNQFYF

SEQ ID NO: 776742 - protein, 14 aa, Homo sapiens
  CDR3 for beta chain variable domain of TCR clone 388371 (TRBV4-1, TRBJ2-3)
CASSQVGGADTQYF

SEQ ID NO: 776743 - protein, 12 aa, Homo sapiens
  CDR3 for alpha chain variable domain of TCR clone 388372 (TRAV8-3, TRAJ20)
CAVGANDYKLSF

SEQ ID NO: 776744 - protein, 16 aa, Homo sapiens
  CDR3 for beta chain variable domain of TCR clone 388372 (TRBV4-2, TRBJ2-5)
CASSQELVGSQETQYF

SEQ ID NO: 776745 - protein, 12 aa, Homo sapiens
  CDR3 for alpha chain variable domain of TCR clone 388373 (TRAV13-1, TRAJ15)
CASSQAGTALIF

SEQ ID NO: 776746 - protein, 14 aa, Homo sapiens
  CDR3 for beta chain variable domain of TCR clone 388373 (TRBV19, TRBJ2-2)
CASSTLHRSGELFF

SEQ ID NO: 776747 - protein, 13 aa, Homo sapiens
  CDR3 for alpha chain variable domain of TCR clone 388374 (TRAV12-2, TRAJ6)
CAVNVSSKLHTYI

SEQ ID NO: 776748 - protein, 12 aa, Homo sapiens
  CDR3 for beta chain variable domain of TCR clone 388374 (TRBV29-1, TRBJ2-3)
CSVTGGADTQYF

SEQ ID NO: 776749 - protein, 16 aa, Homo sapiens
  CDR3 for alpha chain variable domain of TCR clone 388375 (TRAV27, TRAJ53)
CAAPEGRGGSNYKLTF

SEQ ID NO: 776750 - protein, 12 aa, Homo sapiens
  CDR3 for beta chain variable domain of TCR clone 388375 (TRBV11-2, TRBJ2-2)
CASSLGGGELFF

SEQ ID NO: 776751 - protein, 14 aa, Homo sapiens
  CDR3 for alpha chain variable domain of TCR clone 388376 (TRAV21, TRAJ38)
CAVGGAGNNRKLIW

SEQ ID NO: 776752 - protein, 13 aa, Homo sapiens
  CDR3 for beta chain variable domain of TCR clone 388376 (TRBV7-9, TRBJ2-3)
CASSPGSTDTQYF

SEQ ID NO: 776753 - protein, 13 aa, Homo sapiens
  CDR3 for alpha chain variable domain of TCR clone 388377 (TRAV12-1, TRAJ6)
CVVFPGGSYIPTF

SEQ ID NO: 776754 - protein, 13 aa, Homo sapiens
  CDR3 for beta chain variable domain of TCR clone 388377 (TRBV7-2, TRBJ2-2)
CASSLAVTGELFF

SEQ ID NO: 776755 - protein, 14 aa, Homo sapiens
  CDR3 for alpha chain variable domain of TCR clone 388378 (TRAV8-4, TRAJ5)
CAVSTDTGRRALTF

SEQ ID NO: 776756 - protein, 13 aa, Homo sapiens
  CDR3 for beta chain variable domain of TCR clone 388378 (TRBV2, TRBJ2-5)
CASGTPYQETQYF

SEQ ID NO: 776757 - protein, 14 aa, Homo sapiens
  CDR3 for alpha chain variable domain of TCR clone 388379 (TRAV13-2, TRAJ16)
CAENNWEDGQKLLF

SEQ ID NO: 776758 - protein, 13 aa, Homo sapiens
  CDR3 for beta chain variable domain of TCR clone 388379 (TRBV7-9, TRBJ1-1)
CQHLGGLKTEAFF

SEQ ID NO: 776759 - protein, 12 aa, Homo sapiens
  CDR3 for alpha chain variable domain of TCR clone 388380 (TRAV13-2, TRAJ23)
CAERHRGGKLIF

SEQ ID NO: 776760 - protein, 13 aa, Homo sapiens
  CDR3 for beta chain variable domain of TCR clone 388380 (TRBV7-9, TRBJ2-2)
CASSLGGAGELFF

SEQ ID NO: 776761 - protein, 13 aa, Homo sapiens
  CDR3 for alpha chain variable domain of TCR clone 388381 (TRAV17, TRAJ54)
CATVIQGAQKLEF

SEQ ID NO: 776762 - protein, 15 aa, Homo sapiens
  CDR3 for beta chain variable domain of TCR clone 388381 (TRBV13, TRBJ2-1)
CASSLLSGLNNEQFF

SEQ ID NO: 776763 - protein, 14 aa, Homo sapiens
  CDR3 for alpha chain variable domain of TCR clone 388382 (TRAV25, TRAJ12)
CAGCDMDSSYKLIF

SEQ ID NO: 776764 - protein, 13 aa, Homo sapiens
  CDR3 for beta chain variable domain of TCR clone 388382 (TRBV7-9, TRBJ2-5)
CASLPSGRETQYF

SEQ ID NO: 776765 - protein, 15 aa, Homo sapiens
  CDR3 for alpha chain variable domain of TCR clone 388383 (TRAV3, TRAJ5)
CAVRDLDTGRRALTF

SEQ ID NO: 776766 - protein, 14 aa, Homo sapiens
  CDR3 for beta chain variable domain of TCR clone 388383 (TRBV25-1, TRBJ1-1)
YASTHLGGNTEAFF

SEQ ID NO: 776767 - protein, 11 aa, Homo sapiens
  CDR3 for alpha chain variable domain of TCR clone 388384 (TRAV4, TRAJ23)
CIVAPGGKLIF

SEQ ID NO: 776768 - protein, 13 aa, Homo sapiens
  CDR3 for beta chain variable domain of TCR clone 388384 (TRBV7-9, TRBJ1-2)
CASSLKQNYGYTF

SEQ ID NO: 776769 - protein, 14 aa, Homo sapiens
  CDR3 for alpha chain variable domain of TCR clone 388385 (TRAV17, TRAJ57)
CATDPQGGSEKLVL

SEQ ID NO: 776770 - protein, 16 aa, Homo sapiens
  CDR3 for beta chain variable domain of TCR clone 388385 (TRBV13, TRBJ2-2)
CASSPRTGEHTGELFV

SEQ ID NO: 776771 - protein, 14 aa, Homo sapiens
  CDR3 for alpha chain variable domain of TCR clone 388386 (TRAV8-3, TRAJ35)
CAVVPQGFGNVLHC

SEQ ID NO: 776772 - protein, 17 aa, Homo sapiens
  CDR3 for beta chain variable domain of TCR clone 388386 (TRBV11-2, TRBJ2-1)
CASSLYPPGVEYNEQFF

SEQ ID NO: 776773 - protein, 14 aa, Homo sapiens
  CDR3 for alpha chain variable domain of TCR clone 388387 (TRAV2, TRAJ9)
CAVEDRSGGFKTIC

SEQ ID NO: 776774 - protein, 13 aa, Homo sapiens
  CDR3 for beta chain variable domain of TCR clone 388387 (TRBV7-3, TRBJ1-1)
CASSQDWGAEAFF

SEQ ID NO: 776775 - protein, 14 aa, Homo sapiens
  CDR3 for alpha chain variable domain of TCR clone 388388 (TRAV1-2, TRAJ16)
CAVNRFSDGQKLLF

SEQ ID NO: 776776 - protein, 15 aa, Homo sapiens
  CDR3 for beta chain variable domain of TCR clone 388388 (TRBV9, TRBJ1-6)
CASSVAEAGDSPLHF

SEQ ID NO: 776777 - protein, 14 aa, Homo sapiens
  CDR3 for alpha chain variable domain of TCR clone 388389 (TRAV12-2, TRAJ17)
CAVLFKAAGTKLTF

SEQ ID NO: 776778 - protein, 14 aa, Homo sapiens
  CDR3 for beta chain variable domain of TCR clone 388389 (TRBV7-7, TRBJ2-2)
CATRQDSDTGELFF

SEQ ID NO: 776779 - protein, 15 aa, Homo sapiens
  CDR3 for alpha chain variable domain of TCR clone 388390 (TRAV26-1, TRAJ22)
CIVRVSFWFCKATDL

SEQ ID NO: 776780 - protein, 13 aa, Homo sapiens
  CDR3 for beta chain variable domain of TCR clone 388390 (TRBV10-3, TRBJ2-7)
CASKLSVNYEQYF

SEQ ID NO: 776781 - protein, 11 aa, Homo sapiens
  CDR3 for alpha chain variable domain of TCR clone 388391 (TRAV3, TRAJ13)
CAVTSYQKVTF

SEQ ID NO: 776782 - protein, 15 aa, Homo sapiens
  CDR3 for beta chain variable domain of TCR clone 388391 (TRBV7-9, TRBJ2-7)
CASSSSGLEVYEQYF

SEQ ID NO: 776783 - protein, 14 aa, Homo sapiens
  CDR3 for alpha chain variable domain of TCR clone 388392 (TRAV1-2, TRAJ16)
CAVNRFSDGQKMLF

SEQ ID NO: 776784 - protein, 13 aa, Homo sapiens
  CDR3 for beta chain variable domain of TCR clone 388392 (TRBV7-7, TRBJ2-2)
CASSLTSAGELFF

SEQ ID NO: 776785 - protein, 14 aa, Homo sapiens
  CDR3 for alpha chain variable domain of TCR clone 388393 (TRAV12-3, TRAJ10)
SHLPLSGGGNKLTF

SEQ ID NO: 776786 - protein, 17 aa, Homo sapiens
  CDR3 for beta chain variable domain of TCR clone 388393 (TRBV28, TRBJ2-3)
RASSPTPAGGRVDTQYF

SEQ ID NO: 776787 - protein, 14 aa, Homo sapiens
  CDR3 for alpha chain variable domain of TCR clone 388394 (TRAV12-3, TRAJ10)
SHLPLTGGGNKLTF

SEQ ID NO: 776788 - protein, 11 aa, Homo sapiens
  CDR3 for beta chain variable domain of TCR clone 388394 (TRBV19, TRBJ1-1)
CDSSIGSEAFF

SEQ ID NO: 776789 - protein, 12 aa, Homo sapiens
  CDR3 for alpha chain variable domain of TCR clone 388395 (TRAV16, TRAJ10)
CSRTGGGNKLTF

SEQ ID NO: 776790 - protein, 14 aa, Homo sapiens
  CDR3 for beta chain variable domain of TCR clone 388395 (TRBV11-2, TRBJ2-5)
CASSRTGGIETQYF

SEQ ID NO: 776791 - protein, 11 aa, Homo sapiens
  CDR3 for alpha chain variable domain of TCR clone 388396 (TRAV17, TRAJ49)
CATDAGNQFYF

SEQ ID NO: 776792 - protein, 16 aa, Homo sapiens
  CDR3 for beta chain variable domain of TCR clone 388396 (TRBV7-2, TRBJ1-2)
CARSPTSGTSLGGYTF

SEQ ID NO: 776793 - protein, 11 aa, Homo sapiens
  CDR3 for alpha chain variable domain of TCR clone 388397 (TRAV26-1, TRAJ37)
CIVRVGRKLIF

SEQ ID NO: 776794 - protein, 16 aa, Homo sapiens
  CDR3 for beta chain variable domain of TCR clone 388397 (TRBV20-1, TRBJ2-1)
CSARDLKQGMNNEQFF

SEQ ID NO: 776795 - protein, 14 aa, Homo sapiens
  CDR3 for alpha chain variable domain of TCR clone 388398 (TRAV12-2, TRAJ17)
CAVLFKAAGNKLTF

SEQ ID NO: 776796 - protein, 14 aa, Homo sapiens
  CDR3 for beta chain variable domain of TCR clone 388398 (TRBV19, TRBJ2-1)
CASKDPGLANEQFF

SEQ ID NO: 776797 - protein, 16 aa, Homo sapiens
  CDR3 for alpha chain variable domain of TCR clone 388399 (TRAV26-1, TRAJ11)
CIVRVAKNSGYSTLTF

SEQ ID NO: 776798 - protein, 13 aa, Homo sapiens
  CDR3 for beta chain variable domain of TCR clone 388399 (TRBV7-9, TRBJ1-2)
CASSLKQNYGYTF

SEQ ID NO: 776799 - protein, 16 aa, Homo sapiens
  CDR3 for alpha chain variable domain of TCR clone 388400 (TRAV30, TRAJ24)
CGTEIVDADSWGKFQF

SEQ ID NO: 776800 - protein, 16 aa, Homo sapiens
  CDR3 for beta chain variable domain of TCR clone 388400 (TRBV19, TRBJ2-2)
CASSFPGQGLAGELFF

SEQ ID NO: 776801 - protein, 15 aa, Homo sapiens
  CDR3 for alpha chain variable domain of TCR clone 388401 (TRAV12-2, TRAJ53)
CAVNGGGGSNYKLTF

SEQ ID NO: 776802 - protein, 14 aa, Homo sapiens
  CDR3 for beta chain variable domain of TCR clone 388401 (TRBV20-1, TRBJ1-1)
CSAQTRIGGTEAFF

SEQ ID NO: 776803 - protein, 16 aa, Homo sapiens
  CDR3 for alpha chain variable domain of TCR clone 388402 (TRAV30, TRAJ24)
CGTEIVDAYSWGKFQF

SEQ ID NO: 776804 - protein, 15 aa, Homo sapiens
  CDR3 for beta chain variable domain of TCR clone 388402 (TRBV27, TRBJ2-1)
CASSNGGGSSNEQFF

SEQ ID NO: 776805 - protein, 16 aa, Homo sapiens
  CDR3 for alpha chain variable domain of TCR clone 388403 (TRAV30, TRAJ24)
CGTEIVDADSWGKFQF

SEQ ID NO: 776806 - protein, 14 aa, Homo sapiens
  CDR3 for beta chain variable domain of TCR clone 388403 (TRBV12-5, TRBJ2-5)
CASGSRAHQENQYF

SEQ ID NO: 776807 - protein, 12 aa, Homo sapiens
  CDR3 for alpha chain variable domain of TCR clone 388404 (TRAV26-2, TRAJ21)
FILKGNFNKFYF

SEQ ID NO: 776808 - protein, 12 aa, Homo sapiens
  CDR3 for beta chain variable domain of TCR clone 388404 (TRBV12-4, TRBJ2-7)
CASSLGGYEQYF

SEQ ID NO: 776809 - protein, 14 aa, Homo sapiens
  CDR3 for alpha chain variable domain of TCR clone 388405 (TRAV13-1, TRAJ31)
CAASSQPNNARLMF

SEQ ID NO: 776810 - protein, 15 aa, Homo sapiens
  CDR3 for beta chain variable domain of TCR clone 388405 (TRBV4-2, TRBJ2-4)
CASSPLGAAKNIQYF

SEQ ID NO: 776811 - protein, 12 aa, Homo sapiens
  CDR3 for alpha chain variable domain of TCR clone 388406 (TRAV6, TRAJ20)
CALDRGDYKLRF

SEQ ID NO: 776812 - protein, 13 aa, Homo sapiens
  CDR3 for beta chain variable domain of TCR clone 388406 (TRBV5-1, TRBJ1-2)
CASSFQDGYGYTF

SEQ ID NO: 776813 - protein, 17 aa, Homo sapiens
  CDR3 for alpha chain variable domain of TCR clone 388407 (TRAV12-2, TRAJ48)
CASNEKLTFGTGTRLTI

SEQ ID NO: 776814 - protein, 20 aa, Homo sapiens
  CDR3 for beta chain variable domain of TCR clone 388407 (TRBV5-1, TRBJ2-5)
GSWCSVSAGCGGAGEKTQYF

SEQ ID NO: 776815 - protein, 12 aa, Homo sapiens
  CDR3 for alpha chain variable domain of TCR clone 388408 (TRAV17, TRAJ20)
CATLANDYKLSF

SEQ ID NO: 776816 - protein, 14 aa, Homo sapiens
  CDR3 for beta chain variable domain of TCR clone 388408 (TRBV10-3, TRBJ1-2)
CAISGDAPYYGYTF

SEQ ID NO: 776817 - protein, 15 aa, Homo sapiens
  CDR3 for alpha chain variable domain of TCR clone 388409 (TRAV26-1, TRAJ29)
CIVIVEGAGNTPLVF

SEQ ID NO: 776818 - protein, 14 aa, Homo sapiens
  CDR3 for beta chain variable domain of TCR clone 388409 (TRBV18, TRBJ2-5)
CASSPGVSQETQYF

SEQ ID NO: 776819 - protein, 14 aa, Homo sapiens
  CDR3 for alpha chain variable domain of TCR clone 388410 (TRAV8-4, TRAJ13)
FAVTLSGGYQKVTF

SEQ ID NO: 776820 - protein, 14 aa, Homo sapiens
  CDR3 for beta chain variable domain of TCR clone 388410 (TRBV7-2, TRBJ1-2)
CASSQTGATYGYTF

SEQ ID NO: 776821 - protein, 15 aa, Homo sapiens
  CDR3 for alpha chain variable domain of TCR clone 388411 (TRAV8-3, TRAJ41)
RAVGSNSNSGYALNF

SEQ ID NO: 776822 - protein, 17 aa, Homo sapiens
  CDR3 for beta chain variable domain of TCR clone 388411 (TRBV25-1, TRBJ2-1)
CASSAYGKGRGVYEQFF

SEQ ID NO: 776823 - protein, 15 aa, Homo sapiens
  CDR3 for alpha chain variable domain of TCR clone 388412 (TRAV21, TRAJ4)
CAEGLFSGGYNKLIF

SEQ ID NO: 776824 - protein, 14 aa, Homo sapiens
  CDR3 for beta chain variable domain of TCR clone 388412 (TRBV13, TRBJ2-5)
CASSLDYPQETQYF

SEQ ID NO: 776825 - protein, 21 aa, Homo sapiens
  CDR3 for alpha chain variable domain of TCR clone 388413 (TRAV6, TRAJ36)
CARQTTSSLGLERDSTLFPIS

SEQ ID NO: 776826 - protein, 14 aa, Homo sapiens
  CDR3 for beta chain variable domain of TCR clone 388413 (TRBV10-2, TRBJ1-5)
CASSSTGRNQPQHF

SEQ ID NO: 776827 - protein, 17 aa, Homo sapiens
  CDR3 for alpha chain variable domain of TCR clone 388414 (TRAV13-1, TRAJ53)
CAASWKSSGGSNDKLTF

SEQ ID NO: 776828 - protein, 19 aa, Homo sapiens
  CDR3 for beta chain variable domain of TCR clone 388414 (TRBV7-9, TRBJ2-1)
CASSHNRGALLRSYNEQFF

SEQ ID NO: 776829 - protein, 14 aa, Homo sapiens
  CDR3 for alpha chain variable domain of TCR clone 388415 (TRAV8-4, TRAJ39)
CAVSLNNAGNMLTF

SEQ ID NO: 776830 - protein, 16 aa, Homo sapiens
  CDR3 for beta chain variable domain of TCR clone 388415 (TRBV13, TRBJ2-7)
CASSSPESGRTYEQYF

SEQ ID NO: 776831 - protein, 14 aa, Homo sapiens
  CDR3 for alpha chain variable domain of TCR clone 388416 (TRAV17, TRAJ57)
CATDPQGGSEKLVF

SEQ ID NO: 776832 - protein, 13 aa, Homo sapiens
  CDR3 for beta chain variable domain of TCR clone 388416 (TRBV2, TRBJ1-1)
CARNPTGGFHAFF

SEQ ID NO: 776833 - protein, 13 aa, Homo sapiens
  CDR3 for alpha chain variable domain of TCR clone 388417 (TRAV3, TRAJ17)
CAVPRAAGNKLTF

SEQ ID NO: 776834 - protein, 14 aa, Homo sapiens
  CDR3 for beta chain variable domain of TCR clone 388417 (TRBV6-1, TRBJ1-3)
CASVQGGGGNTIYF

SEQ ID NO: 776835 - protein, 15 aa, Homo sapiens
  CDR3 for alpha chain variable domain of TCR clone 388418 (TRAV2, TRAJ22)
CTVPSRGGSARQLTF

SEQ ID NO: 776836 - protein, 16 aa, Homo sapiens
  CDR3 for beta chain variable domain of TCR clone 388418 (TRBV12-4, TRBJ1-5)
CASSRPVGGSNQPQHF

SEQ ID NO: 776837 - protein, 12 aa, Homo sapiens
  CDR3 for alpha chain variable domain of TCR clone 388419 (TRAV12-3, TRAJ17)
CAMTLTGNELTF

SEQ ID NO: 776838 - protein, 14 aa, Homo sapiens
  CDR3 for beta chain variable domain of TCR clone 388419 (TRBV7-3, TRBJ1-1)
CASSLKGGNTEAFF

SEQ ID NO: 776839 - protein, 15 aa, Homo sapiens
  CDR3 for alpha chain variable domain of TCR clone 388420 (TRAV21, TRAJ53)
CATLNSGGSNYKLTF

SEQ ID NO: 776840 - protein, 16 aa, Homo sapiens
  CDR3 for beta chain variable domain of TCR clone 388420 (TRBV7-8, TRBJ2-6)
CQQRRDRGRWANVLTF

SEQ ID NO: 776841 - protein, 14 aa, Homo sapiens
  CDR3 for alpha chain variable domain of TCR clone 388421 (TRAV12-2, TRAJ40)
CAVKIPSGTYKYIF

SEQ ID NO: 776842 - protein, 16 aa, Homo sapiens
  CDR3 for beta chain variable domain of TCR clone 388421 (TRBV28, TRBJ1-2)
CASREGQGTPYYGYTF

SEQ ID NO: 776843 - protein, 14 aa, Homo sapiens
  CDR3 for alpha chain variable domain of TCR clone 388422 (TRAV12-2, TRAJ13)
CAVKKTGGYQKVTF

SEQ ID NO: 776844 - protein, 23 aa, Homo sapiens
  CDR3 for beta chain variable domain of TCR clone 388422 (TRBV4-2, TRBJ2-3)
CASSQDTPRASSISGGRGDTQYF

SEQ ID NO: 776845 - protein, 10 aa, Homo sapiens
  CDR3 for alpha chain variable domain of TCR clone 388423 (TRAV13-2, TRAJ24)
TTDSWGKLQF

SEQ ID NO: 776846 - protein, 15 aa, Homo sapiens
  CDR3 for beta chain variable domain of TCR clone 388423 (TRBV7-9, TRBJ1-5)
CASSQGHQPNQPQHF

SEQ ID NO: 776847 - protein, 11 aa, Homo sapiens
  CDR3 for alpha chain variable domain of TCR clone 388424 (TRAV23/DV6, TRAJ48)
CAPRWGEELTF

SEQ ID NO: 776848 - protein, 13 aa, Homo sapiens
  CDR3 for beta chain variable domain of TCR clone 388424 (TRBV12-4, TRBJ2-5)
CASSPGTEETQYF

SEQ ID NO: 776849 - protein, 13 aa, Homo sapiens
  CDR3 for alpha chain variable domain of TCR clone 388425 (TRAV12-3, TRAJ41)
CAIAPNSGDALNF

SEQ ID NO: 776850 - protein, 14 aa, Homo sapiens
  CDR3 for beta chain variable domain of TCR clone 388425 (TRBV7-2, TRBJ1-3)
CASSLGTAGNTMYF

SEQ ID NO: 776851 - protein, 12 aa, Homo sapiens
  CDR3 for alpha chain variable domain of TCR clone 388426 (TRAV21, TRAJ29)
CAVTSGNTPLVF

SEQ ID NO: 776852 - protein, 15 aa, Homo sapiens
  CDR3 for beta chain variable domain of TCR clone 388426 (TRBV10-2, TRBJ2-6)
CASSEQGTGANILTF

SEQ ID NO: 776853 - protein, 18 aa, Homo sapiens
  CDR3 for alpha chain variable domain of TCR clone 388427 (TRAV12-3, TRAJ52)
CAMSVGGAGGTSYGTLTF

SEQ ID NO: 776854 - protein, 15 aa, Homo sapiens
  CDR3 for beta chain variable domain of TCR clone 388427 (TRBV27, TRBJ1-6)
CASSFDRGLGSPLHV

SEQ ID NO: 776855 - protein, 16 aa, Homo sapiens
  CDR3 for alpha chain variable domain of TCR clone 388428 (TRAV14/DV4, TRAJ53)
CAMREGGGGSNYKLTF

SEQ ID NO: 776856 - protein, 15 aa, Homo sapiens
  CDR3 for beta chain variable domain of TCR clone 388428 (TRBV19, TRBJ2-1)
CASIKGRGPYNEQFF

SEQ ID NO: 776857 - protein, 14 aa, Homo sapiens
  CDR3 for alpha chain variable domain of TCR clone 388429 (TRAV26-1, TRAJ45)
CIEVTGGGADGHTF

SEQ ID NO: 776858 - protein, 13 aa, Homo sapiens
  CDR3 for beta chain variable domain of TCR clone 388429 (TRBV7-6, TRBJ1-2)
CASSLVADYGYTF

SEQ ID NO: 776859 - protein, 15 aa, Homo sapiens
  CDR3 for alpha chain variable domain of TCR clone 388430 (TRAV8-3, TRAJ45)
CASSYSGGGDEGLTF

SEQ ID NO: 776860 - protein, 16 aa, Homo sapiens
  CDR3 for beta chain variable domain of TCR clone 388430 (TRBV20-1, TRBJ2-2)
CSASASGIPGAGELFF

SEQ ID NO: 776861 - protein, 12 aa, Homo sapiens
  CDR3 for alpha chain variable domain of TCR clone 388431 (TRAV2, TRAJ36)
CAELTGANNLFF

SEQ ID NO: 776862 - protein, 14 aa, Homo sapiens
  CDR3 for beta chain variable domain of TCR clone 388431 (TRBV19, TRBJ2-1)
CARGARSFQWEQFF

SEQ ID NO: 776863 - protein, 14 aa, Homo sapiens
  CDR3 for alpha chain variable domain of TCR clone 388432 (TRAV12-2, TRAJ40)
CAVKMPSGTYKYIF

SEQ ID NO: 776864 - protein, 17 aa, Homo sapiens
  CDR3 for beta chain variable domain of TCR clone 388432 (TRBV13, TRBJ2-3)
CASGLSRVAGGRNTQYF

SEQ ID NO: 776865 - protein, 12 aa, Homo sapiens
  CDR3 for alpha chain variable domain of TCR clone 388433 (TRAV36/DV7, TRAJ40)
CAVEAGLRNLQI

SEQ ID NO: 776866 - protein, 16 aa, Homo sapiens
  CDR3 for beta chain variable domain of TCR clone 388433 (TRBV2, TRBJ2-1)
CASSVGGSLSYNEQFF

SEQ ID NO: 776867 - protein, 15 aa, Homo sapiens
  CDR3 for alpha chain variable domain of TCR clone 388434 (TRAV5, TRAJ33)
CAEAPAMDSNYQLIW

SEQ ID NO: 776868 - protein, 14 aa, Homo sapiens
  CDR3 for beta chain variable domain of TCR clone 388434 (TRBV19, TRBJ2-7)
CASSIFAGTYEQYF

SEQ ID NO: 776869 - protein, 14 aa, Homo sapiens
  CDR3 for alpha chain variable domain of TCR clone 388435 (TRAV16, TRAJ39)
CALSKNNAGNMLTF

SEQ ID NO: 776870 - protein, 15 aa, Homo sapiens
  CDR3 for beta chain variable domain of TCR clone 388435 (TRBV7-6, TRBJ2-7)
CASSGRRDTFGEQYF

SEQ ID NO: 776871 - protein, 12 aa, Homo sapiens
  CDR3 for alpha chain variable domain of TCR clone 388436 (TRAV2, TRAJ9)
CDVGAGGFKTIF

SEQ ID NO: 776872 - protein, 16 aa, Homo sapiens
  CDR3 for beta chain variable domain of TCR clone 388436 (TRBV13, TRBJ2-2)
CASSPRTGEHTGELFF

SEQ ID NO: 776873 - protein, 16 aa, Homo sapiens
  CDR3 for alpha chain variable domain of TCR clone 388437 (TRAV1-2, TRAJ10)
CAVRGVLTGGGNKLTF

SEQ ID NO: 776874 - protein, 17 aa, Homo sapiens
  CDR3 for beta chain variable domain of TCR clone 388437 (TRBV20-1, TRBJ2-1)
CSAPPRLAGTRYNEQFF

SEQ ID NO: 776875 - protein, 19 aa, Homo sapiens
  CDR3 for alpha chain variable domain of TCR clone 388438 (TRAV27, TRAJ41)
CAVRTQIPDIQNPDPAVSQ

SEQ ID NO: 776876 - protein, 16 aa, Homo sapiens
  CDR3 for beta chain variable domain of TCR clone 388438 (TRBV5-1, TRBJ2-3)
CASSLGLAVYTDTQYF

SEQ ID NO: 776877 - protein, 10 aa, Homo sapiens
  CDR3 for alpha chain variable domain of TCR clone 388439 (TRAV1-2, TRAJ34)
CAVNTDKLIF

SEQ ID NO: 776878 - protein, 18 aa, Homo sapiens
  CDR3 for beta chain variable domain of TCR clone 388439 (TRBV7-9, TRBJ2-7)
CASSLTTSGSRTWYGQYC

SEQ ID NO: 776879 - protein, 12 aa, Homo sapiens
  CDR3 for alpha chain variable domain of TCR clone 388440 (TRAV39, TRAJ49)
CTLSNTGNQFYF

SEQ ID NO: 776880 - protein, 14 aa, Homo sapiens
  CDR3 for beta chain variable domain of TCR clone 388440 (TRBV20-1, TRBJ1-5)
CSATDRGSNQPQHF

SEQ ID NO: 776881 - protein, 15 aa, Homo sapiens
  CDR3 for alpha chain variable domain of TCR clone 388441 (TRAV23/DV6, TRAJ13)
CAAWPGGGGYQKVTF

SEQ ID NO: 776882 - protein, 13 aa, Homo sapiens
  CDR3 for beta chain variable domain of TCR clone 388441 (TRBV7-9, TRBJ2-7)
CASSFWSSYEQYF

SEQ ID NO: 776883 - protein, 14 aa, Homo sapiens
  CDR3 for alpha chain variable domain of TCR clone 388442 (TRAV26-1, TRAJ21)
CIVRVVYNFNKFYF

SEQ ID NO: 776884 - protein, 14 aa, Homo sapiens
  CDR3 for beta chain variable domain of TCR clone 388442 (TRBV7-9, TRBJ2-1)
CASSPRDSLYEQFF

SEQ ID NO: 776885 - protein, 14 aa, Homo sapiens
  CDR3 for alpha chain variable domain of TCR clone 388443 (TRAV9-2, TRAJ39)
CALYISNAGNMLTF

SEQ ID NO: 776886 - protein, 15 aa, Homo sapiens
  CDR3 for beta chain variable domain of TCR clone 388443 (TRBV7-9, TRBJ1-6)
CASSSPGRGNSPLHF

SEQ ID NO: 776887 - protein, 13 aa, Homo sapiens
  CDR3 for alpha chain variable domain of TCR clone 388444 (TRAV2, TRAJ15)
CAVVGQAGTALIF

SEQ ID NO: 776888 - protein, 16 aa, Homo sapiens
  CDR3 for beta chain variable domain of TCR clone 388444 (TRBV6-4, TRBJ2-3)
CASSDRGDSSTDTQYF

SEQ ID NO: 776889 - protein, 14 aa, Homo sapiens
  CDR3 for alpha chain variable domain of TCR clone 388445 (TRAV12-1, TRAJ4)
CVVTPSGGYNKLIF

SEQ ID NO: 776890 - protein, 15 aa, Homo sapiens
  CDR3 for beta chain variable domain of TCR clone 388445 (TRBV12-4, TRBJ2-5)
CASSPPTGLQETQYF

SEQ ID NO: 776891 - protein, 14 aa, Homo sapiens
  CDR3 for alpha chain variable domain of TCR clone 388446 (TRAV13-1, TRAJ35)
CAASKGGFGNVLHC

SEQ ID NO: 776892 - protein, 14 aa, Homo sapiens
  CDR3 for beta chain variable domain of TCR clone 388446 (TRBV7-6, TRBJ2-3)
CASSVAGGTDTQYF

SEQ ID NO: 776893 - protein, 13 aa, Homo sapiens
  CDR3 for alpha chain variable domain of TCR clone 388447 (TRAV25, TRAJ30)
CAGRVDRDDKIIF

SEQ ID NO: 776894 - protein, 14 aa, Homo sapiens
  CDR3 for beta chain variable domain of TCR clone 388447 (TRBV7-9, TRBJ2-5)
CASSLDTAQETQYF

SEQ ID NO: 776895 - protein, 15 aa, Homo sapiens
  CDR3 for alpha chain variable domain of TCR clone 388448 (TRAV3, TRAJ42)
CAVRGGTGSQGNRIF

SEQ ID NO: 776896 - protein, 13 aa, Homo sapiens
  CDR3 for beta chain variable domain of TCR clone 388448 (TRBV10-3, TRBJ2-7)
CASKLAVNYEQYF

SEQ ID NO: 776897 - protein, 16 aa, Homo sapiens
  CDR3 for alpha chain variable domain of TCR clone 388449 (TRAV12-3, TRAJ53)
CAMSPGSGGSNYKLTF

SEQ ID NO: 776898 - protein, 15 aa, Homo sapiens
  CDR3 for beta chain variable domain of TCR clone 388449 (TRBV28, TRBJ2-1)
CASSGLAEVDNEQFF

SEQ ID NO: 776899 - protein, 13 aa, Homo sapiens
  CDR3 for alpha chain variable domain of TCR clone 388450 (TRAV17, TRAJ5)
CALRGTGRRALTF

SEQ ID NO: 776900 - protein, 15 aa, Homo sapiens
  CDR3 for beta chain variable domain of TCR clone 388450 (TRBV6-1, TRBJ1-5)
CASSELREGNQPQRF

SEQ ID NO: 776901 - protein, 12 aa, Homo sapiens
  CDR3 for alpha chain variable domain of TCR clone 388451 (TRAV1-2, TRAJ26)
CAVRYYGQNFVF

SEQ ID NO: 776902 - protein, 16 aa, Homo sapiens
  CDR3 for beta chain variable domain of TCR clone 388451 (TRBV25-1, TRBJ1-1)
CASSGDRDRGRIEAFF

SEQ ID NO: 776903 - protein, 13 aa, Homo sapiens
  CDR3 for alpha chain variable domain of TCR clone 388452 (TRAV17, TRAJ26)
CATVDNYGQNFVF

SEQ ID NO: 776904 - protein, 19 aa, Homo sapiens
  CDR3 for beta chain variable domain of TCR clone 388452 (TRBV25-1, TRBJ2-2)
CAILVYRVDRGRKTGELFF

SEQ ID NO: 776905 - protein, 16 aa, Homo sapiens
  CDR3 for alpha chain variable domain of TCR clone 388453 (TRAV4, TRAJ18)
CCVLLIGGSTLGRLYF

SEQ ID NO: 776906 - protein, 13 aa, Homo sapiens
  CDR3 for beta chain variable domain of TCR clone 388453 (TRBV7-2, TRBJ2-5)
CASSPDRGETQYF

SEQ ID NO: 776907 - protein, 12 aa, Homo sapiens
  CDR3 for alpha chain variable domain of TCR clone 388454 (TRAV1-1, TRAJ9)
CAVDTGGFKTIF

SEQ ID NO: 776908 - protein, 14 aa, Homo sapiens
  CDR3 for beta chain variable domain of TCR clone 388454 (TRBV7-8, TRBJ2-5)
CASSAKGGQETQYF

SEQ ID NO: 776909 - protein, 18 aa, Homo sapiens
  CDR3 for alpha chain variable domain of TCR clone 388455 (TRAV26-1, TRAJ23)
CIVRVGLEVWNQGGKLIF

SEQ ID NO: 776910 - protein, 16 aa, Homo sapiens
  CDR3 for beta chain variable domain of TCR clone 388455 (TRBV12-4, TRBJ2-5)
CASSCFVKGRQETQYF

SEQ ID NO: 776911 - protein, 14 aa, Homo sapiens
  CDR3 for alpha chain variable domain of TCR clone 388456 (TRAV2, TRAJ9)
CAVEDRSAGFKTIF

SEQ ID NO: 776912 - protein, 15 aa, Homo sapiens
  CDR3 for beta chain variable domain of TCR clone 388456 (TRBV11-3, TRBJ2-3)
CASSAGTVVTNTQYF

SEQ ID NO: 776913 - protein, 13 aa, Homo sapiens
  CDR3 for alpha chain variable domain of TCR clone 388457 (TRAV13-1, TRAJ48)
CAAASVGNEKLTF

SEQ ID NO: 776914 - protein, 14 aa, Homo sapiens
  CDR3 for beta chain variable domain of TCR clone 388457 (TRBV18, TRBJ2-1)
CASSPGTSETEQFF

SEQ ID NO: 776915 - protein, 13 aa, Homo sapiens
  CDR3 for alpha chain variable domain of TCR clone 388458 (TRAV8-3, TRAJ36)
CAVGATGANSLYF

SEQ ID NO: 776916 - protein, 15 aa, Homo sapiens
  CDR3 for beta chain variable domain of TCR clone 388458 (TRBV7-2, TRBJ1-2)
CASSPRAGWNYGYTF

SEQ ID NO: 776917 - protein, 14 aa, Homo sapiens
  CDR3 for alpha chain variable domain of TCR clone 388459 (TRAV21, TRAJ52)
CGRAGSTSYGKLTF

SEQ ID NO: 776918 - protein, 14 aa, Homo sapiens
  CDR3 for beta chain variable domain of TCR clone 388459 (TRBV19, TRBJ1-2)
CASSVLGYNYGYTF

SEQ ID NO: 776919 - protein, 15 aa, Homo sapiens
  CDR3 for alpha chain variable domain of TCR clone 388460 (TRAV29/DV5, TRAJ42)
CAAKTDGGSQGNLIF

SEQ ID NO: 776920 - protein, 15 aa, Homo sapiens
  CDR3 for beta chain variable domain of TCR clone 388460 (TRBV28, TRBJ1-5)
CASSRTGGYVQPQHF

SEQ ID NO: 776921 - protein, 16 aa, Homo sapiens
  CDR3 for alpha chain variable domain of TCR clone 388461 (TRAV8-3, TRAJ13)
CAVGAYPSGGYQKVTF

SEQ ID NO: 776922 - protein, 14 aa, Homo sapiens
  CDR3 for beta chain variable domain of TCR clone 388461 (TRBV7-9, TRBJ2-2)
CASSLGHRTGELFF

SEQ ID NO: 776923 - protein, 13 aa, Homo sapiens
  CDR3 for alpha chain variable domain of TCR clone 388462 (TRAV29/DV5, TRAJ47)
CAASAEYGNKLVF

SEQ ID NO: 776924 - protein, 17 aa, Homo sapiens
  CDR3 for beta chain variable domain of TCR clone 388462 (TRBV7-9, TRBJ1-4)
CASSARTGGNEKLFLAV

SEQ ID NO: 776925 - protein, 14 aa, Homo sapiens
  CDR3 for alpha chain variable domain of TCR clone 388463 (TRAV12-3, TRAJ42)
CAMNYGGSQGNLIF

SEQ ID NO: 776926 - protein, 12 aa, Homo sapiens
  CDR3 for beta chain variable domain of TCR clone 388463 (TRBV7-9, TRBJ2-7)
CASSIKREEQYF

SEQ ID NO: 776927 - protein, 13 aa, Homo sapiens
  CDR3 for alpha chain variable domain of TCR clone 388464 (TRAV35, TRAJ57)
CAGPQGGSEKLVF

SEQ ID NO: 776928 - protein, 15 aa, Homo sapiens
  CDR3 for beta chain variable domain of TCR clone 388464 (TRBV20-1, TRBJ2-7)
CSARDRVSGMDEQYF

SEQ ID NO: 776929 - protein, 14 aa, Homo sapiens
  CDR3 for alpha chain variable domain of TCR clone 388465 (TRAV13-1, TRAJ44)
CSAKATGTASKLTF

SEQ ID NO: 776930 - protein, 15 aa, Homo sapiens
  CDR3 for beta chain variable domain of TCR clone 388465 (TRBV7-9, TRBJ1-6)
CASSSPGSGNSPLHF

SEQ ID NO: 776931 - protein, 17 aa, Homo sapiens
  CDR3 for alpha chain variable domain of TCR clone 388466 (TRAV26-1, TRAJ58)
CIVRVGAEETRGSRLTF

SEQ ID NO: 776932 - protein, 12 aa, Homo sapiens
  CDR3 for beta chain variable domain of TCR clone 388466 (TRBV11-2, TRBJ2-5)
CASSLDTQTQYF

SEQ ID NO: 776933 - protein, 17 aa, Homo sapiens
  CDR3 for alpha chain variable domain of TCR clone 388467 (TRAV3, TRAJ6)
CAVREGPRAGGSYIPTF

SEQ ID NO: 776934 - protein, 16 aa, Homo sapiens
  CDR3 for beta chain variable domain of TCR clone 388467 (TRBV7-8, TRBJ2-3)
CASSTEGQRETDTQYF

SEQ ID NO: 776935 - protein, 12 aa, Homo sapiens
  CDR3 for alpha chain variable domain of TCR clone 388468 (TRAV29/DV5, TRAJ34)
CAARHNTDKLIF

SEQ ID NO: 776936 - protein, 15 aa, Homo sapiens
  CDR3 for beta chain variable domain of TCR clone 388468 (TRBV19, TRBJ2-7)
CASSPAGSGEARRYF

SEQ ID NO: 776937 - protein, 14 aa, Homo sapiens
  CDR3 for alpha chain variable domain of TCR clone 388469 (TRAV26-1, TRAJ39)
CIVRANNAGNMLTF

SEQ ID NO: 776938 - protein, 16 aa, Homo sapiens
  CDR3 for beta chain variable domain of TCR clone 388469 (TRBV20-1, TRBJ1-4)
CSAPGQGLLTNEKLFF

SEQ ID NO: 776939 - protein, 15 aa, Homo sapiens
  CDR3 for alpha chain variable domain of TCR clone 388470 (TRAV26-1, TRAJ29)
CIVRVEGSGNTPLVF

SEQ ID NO: 776940 - protein, 11 aa, Homo sapiens
  CDR3 for beta chain variable domain of TCR clone 388470 (TRBV10-3, TRBJ2-7)
CAISEGLEQYF

SEQ ID NO: 776941 - protein, 14 aa, Homo sapiens
  CDR3 for alpha chain variable domain of TCR clone 388471 (TRAV12-2, TRAJ13)
CAVKKTGGYQKVTF

SEQ ID NO: 776942 - protein, 12 aa, Homo sapiens
  CDR3 for beta chain variable domain of TCR clone 388471 (TRBV12-4, TRBJ1-2)
CASSFVWLHLRF

SEQ ID NO: 776943 - protein, 15 aa, Homo sapiens
  CDR3 for alpha chain variable domain of TCR clone 388472 (TRAV12-1, TRAJ4)
CVVNPFSGGNNKLIF

SEQ ID NO: 776944 - protein, 13 aa, Homo sapiens
  CDR3 for beta chain variable domain of TCR clone 388472 (TRBV20-1, TRBJ1-2)
CSARGTADYGYIF

SEQ ID NO: 776945 - protein, 13 aa, Homo sapiens
  CDR3 for alpha chain variable domain of TCR clone 388473 (TRAV8-6, TRAJ49)
CAVITNTGNQFYF

SEQ ID NO: 776946 - protein, 14 aa, Homo sapiens
  CDR3 for beta chain variable domain of TCR clone 388473 (TRBV5-1, TRBJ2-7)
CASSWGESLYEQYF

SEQ ID NO: 776947 - protein, 13 aa, Homo sapiens
  CDR3 for alpha chain variable domain of TCR clone 388474 (TRAV20, TRAJ3)
CSRRYSSASKIIF

SEQ ID NO: 776948 - protein, 12 aa, Homo sapiens
  CDR3 for beta chain variable domain of TCR clone 388474 (TRBV28, TRBJ2-1)
CASSFRGNEQFF

SEQ ID NO: 776949 - protein, 12 aa, Homo sapiens
  CDR3 for alpha chain variable domain of TCR clone 388475 (TRAV13-1, TRAJ21)
CAAKEGFNKFHF

SEQ ID NO: 776950 - protein, 15 aa, Homo sapiens
  CDR3 for beta chain variable domain of TCR clone 388475 (TRBV25-1, TRBJ1-4)
CASSPGDSTNEKLFF

SEQ ID NO: 776951 - protein, 13 aa, Homo sapiens
  CDR3 for alpha chain variable domain of TCR clone 388476 (TRAV8-3, TRAJ40)
CAVGAQYLRNLQI

SEQ ID NO: 776952 - protein, 12 aa, Homo sapiens
  CDR3 for beta chain variable domain of TCR clone 388476 (TRBV11-2, TRBJ2-1)
CASSPGNNEQFF

SEQ ID NO: 776953 - protein, 13 aa, Homo sapiens
  CDR3 for alpha chain variable domain of TCR clone 388477 (TRAV29/DV5, TRAJ31)
CAASRNNNASLMV

SEQ ID NO: 776954 - protein, 16 aa, Homo sapiens
  CDR3 for beta chain variable domain of TCR clone 388477 (TRBV20-1, TRBJ1-4)
CSAPGQGLLTNEKLFF

SEQ ID NO: 776955 - protein, 14 aa, Homo sapiens
  CDR3 for alpha chain variable domain of TCR clone 388478 (TRAV4, TRAJ6)
CLVGEAGGSYIPTF

SEQ ID NO: 776956 - protein, 14 aa, Homo sapiens
  CDR3 for beta chain variable domain of TCR clone 388478 (TRBV7-6, TRBJ2-1)
CASSVAGEINEQFF

SEQ ID NO: 776957 - protein, 14 aa, Homo sapiens
  CDR3 for alpha chain variable domain of TCR clone 388479 (TRAV12-3, TRAJ42)
CAMNYGGSQGNLIF

SEQ ID NO: 776958 - protein, 16 aa, Homo sapiens
  CDR3 for beta chain variable domain of TCR clone 388479 (TRBV28, TRBJ2-1)
CASSSPEYPRDNEQFF

SEQ ID NO: 776959 - protein, 16 aa, Homo sapiens
  CDR3 for alpha chain variable domain of TCR clone 388480 (TRAV3, TRAJ37)
CAVRPHCSGNTGKLIF

SEQ ID NO: 776960 - protein, 11 aa, Homo sapiens
  CDR3 for beta chain variable domain of TCR clone 388480 (TRBV10-3, TRBJ2-7)
CAISEGLEQYF

SEQ ID NO: 776961 - protein, 12 aa, Homo sapiens
  CDR3 for alpha chain variable domain of TCR clone 388481 (TRAV12-3, TRAJ32)
CAGGGATNKLIF

SEQ ID NO: 776962 - protein, 15 aa, Homo sapiens
  CDR3 for beta chain variable domain of TCR clone 388481 (TRBV4-3, TRBJ2-1)
CASSHESAIYNEQFF

SEQ ID NO: 776963 - protein, 14 aa, Homo sapiens
  CDR3 for alpha chain variable domain of TCR clone 388482 (TRAV17, TRAJ48)
CATEGNFGNEKLTF

SEQ ID NO: 776964 - protein, 16 aa, Homo sapiens
  CDR3 for beta chain variable domain of TCR clone 388482 (TRBV6-1, TRBJ2-3)
CASSATLAGGTDTQYF

SEQ ID NO: 776965 - protein, 17 aa, Homo sapiens
  CDR3 for alpha chain variable domain of TCR clone 388483 (TRAV23/DV6, TRAJ18)
CAASMNHRGSTLGRLYF

SEQ ID NO: 776966 - protein, 15 aa, Homo sapiens
  CDR3 for beta chain variable domain of TCR clone 388483 (TRBV12-4, TRBJ2-5)
CASSPPTGLQETQYF

SEQ ID NO: 776967 - protein, 15 aa, Homo sapiens
  CDR3 for alpha chain variable domain of TCR clone 388484 (TRAV16, TRAJ12)
CSKWPLRDSSYKLIF

SEQ ID NO: 776968 - protein, 13 aa, Homo sapiens
  CDR3 for beta chain variable domain of TCR clone 388484 (TRBV4-2, TRBJ1-1)
CASSQAGNTEAFC

SEQ ID NO: 776969 - protein, 15 aa, Homo sapiens
  CDR3 for alpha chain variable domain of TCR clone 388485 (TRAV17, TRAJ57)
CATGPSQGGSEKLVF

SEQ ID NO: 776970 - protein, 15 aa, Homo sapiens
  CDR3 for beta chain variable domain of TCR clone 388485 (TRBV7-3, TRBJ2-1)
CASSPTGGGEGEQFF

SEQ ID NO: 776971 - protein, 14 aa, Homo sapiens
  CDR3 for alpha chain variable domain of TCR clone 388486 (TRAV17, TRAJ6)
CATNPAGGSYIPTF

SEQ ID NO: 776972 - protein, 14 aa, Homo sapiens
  CDR3 for beta chain variable domain of TCR clone 388486 (TRBV7-6, TRBJ2-7)
CASSFRQGADEQYF

SEQ ID NO: 776973 - protein, 15 aa, Homo sapiens
  CDR3 for alpha chain variable domain of TCR clone 388487 (TRAV35, TRAJ50)
CAGQLRKTSYDKVIF

SEQ ID NO: 776974 - protein, 12 aa, Homo sapiens
  CDR3 for beta chain variable domain of TCR clone 388487 (TRBV5-1, TRBJ2-5)
CACSVGLETQYF

SEQ ID NO: 776975 - protein, 12 aa, Homo sapiens
  CDR3 for alpha chain variable domain of TCR clone 388488 (TRAV2, TRAJ31)
CAVKDNNARLMF

SEQ ID NO: 776976 - protein, 14 aa, Homo sapiens
  CDR3 for beta chain variable domain of TCR clone 388488 (TRBV19, TRBJ2-5)
CASSMTGQQETQYF

SEQ ID NO: 776977 - protein, 14 aa, Homo sapiens
  CDR3 for alpha chain variable domain of TCR clone 388489 (TRAV12-2, TRAJ13)
CAVKKTGGYQKVTF

SEQ ID NO: 776978 - protein, 17 aa, Homo sapiens
  CDR3 for beta chain variable domain of TCR clone 388489 (TRBV13, TRBJ2-3)
CASSLSRVAGGEEYAVF

SEQ ID NO: 776979 - protein, 13 aa, Homo sapiens
  CDR3 for alpha chain variable domain of TCR clone 388490 (TRAV21, TRAJ27)
CATRPGNAGKSTF

SEQ ID NO: 776980 - protein, 14 aa, Homo sapiens
  CDR3 for beta chain variable domain of TCR clone 388490 (TRBV7-6, TRBJ2-3)
CASSLGAVTDTQYF

SEQ ID NO: 776981 - protein, 10 aa, Homo sapiens
  CDR3 for alpha chain variable domain of TCR clone 388491 (TRAV12-1, TRAJ20)
CVVNPRKLSF

SEQ ID NO: 776982 - protein, 14 aa, Homo sapiens
  CDR3 for beta chain variable domain of TCR clone 388491 (TRBV7-2, TRBJ2-7)
CASRSQGAAYEQYF

SEQ ID NO: 776983 - protein, 13 aa, Homo sapiens
  CDR3 for alpha chain variable domain of TCR clone 388492 (TRAV8-4, TRAJ36)
CAVSVAGANNLFF

SEQ ID NO: 776984 - protein, 15 aa, Homo sapiens
  CDR3 for beta chain variable domain of TCR clone 388492 (TRBV7-2, TRBJ2-5)
CASSLEGRGVETHYF

SEQ ID NO: 776985 - protein, 18 aa, Homo sapiens
  CDR3 for alpha chain variable domain of TCR clone 388493 (TRAV13-1, TRAJ52)
FAADFPNAGGTSYGKLTF

SEQ ID NO: 776986 - protein, 14 aa, Homo sapiens
  CDR3 for beta chain variable domain of TCR clone 388493 (TRBV11-2, TRBJ2-3)
CASSLYAGRDTQYF

SEQ ID NO: 776987 - protein, 17 aa, Homo sapiens
  CDR3 for alpha chain variable domain of TCR clone 388494 (TRAV3, TRAJ6)
CAVRDSPRAGGSYIPTL

SEQ ID NO: 776988 - protein, 14 aa, Homo sapiens
  CDR3 for beta chain variable domain of TCR clone 388494 (TRBV7-2, TRBJ2-7)
CASSPKTSFYEQYF

SEQ ID NO: 776989 - protein, 17 aa, Homo sapiens
  CDR3 for alpha chain variable domain of TCR clone 388495 (TRAV3, TRAJ6)
CAVRDGARAGGSYIPTF

SEQ ID NO: 776990 - protein, 18 aa, Homo sapiens
  CDR3 for beta chain variable domain of TCR clone 388495 (TRBV7-9, TRBJ2-7)
CASSLTTSGSRTWYEQYF

SEQ ID NO: 776991 - protein, 14 aa, Homo sapiens
  CDR3 for alpha chain variable domain of TCR clone 388496 (TRAV1-1, TRAJ27)
CAVIYNTNAGKSPF

SEQ ID NO: 776992 - protein, 13 aa, Homo sapiens
  CDR3 for beta chain variable domain of TCR clone 388496 (TRBV7-9, TRBJ1-2)
CASSLKQNYGYTF

SEQ ID NO: 776993 - protein, 15 aa, Homo sapiens
  CDR3 for alpha chain variable domain of TCR clone 388497 (TRAV2, TRAJ9)
CAVEDRGTGGFKTVF

SEQ ID NO: 776994 - protein, 14 aa, Homo sapiens
  CDR3 for beta chain variable domain of TCR clone 388497 (TRBV7-8, TRBJ2-3)
CASSLEAGTDTQYF

SEQ ID NO: 776995 - protein, 14 aa, Homo sapiens
  CDR3 for alpha chain variable domain of TCR clone 388498 (TRAV8-3, TRAJ33)
CSVGRMASNYQLIW

SEQ ID NO: 776996 - protein, 15 aa, Homo sapiens
  CDR3 for beta chain variable domain of TCR clone 388498 (TRBV4-1, TRBJ1-1)
CASSQAPGLNTEDFF

SEQ ID NO: 776997 - protein, 13 aa, Homo sapiens
  CDR3 for alpha chain variable domain of TCR clone 388499 (TRAV8-3, TRAJ36)
CAVGATWANNLFF

SEQ ID NO: 776998 - protein, 13 aa, Homo sapiens
  CDR3 for beta chain variable domain of TCR clone 388499 (TRBV12-4, TRBJ1-2)
CASSLRQGKGYTF

SEQ ID NO: 776999 - protein, 16 aa, Homo sapiens
  CDR3 for alpha chain variable domain of TCR clone 388500 (TRAV1-1, TRAJ36)
CAVRDTLLPGANNLFF

SEQ ID NO: 777000 - protein, 13 aa, Homo sapiens
  CDR3 for beta chain variable domain of TCR clone 388500 (TRBV3-1, TRBJ1-1)
CASSQLQGAEAFF

SEQ ID NO: 777001 - protein, 15 aa, Homo sapiens
  CDR3 for alpha chain variable domain of TCR clone 388501 (TRAV17, TRAJ35)
CATAFVIGYGNVLHC

SEQ ID NO: 777002 - protein, 15 aa, Homo sapiens
  CDR3 for beta chain variable domain of TCR clone 388501 (TRBV7-9, TRBJ2-7)
CASSLALAEAYEQYF

SEQ ID NO: 777003 - protein, 14 aa, Homo sapiens
  CDR3 for alpha chain variable domain of TCR clone 388502 (TRAV4, TRAJ17)
CLVGDMAAGNELTF

SEQ ID NO: 777004 - protein, 13 aa, Homo sapiens
  CDR3 for beta chain variable domain of TCR clone 388502 (TRBV18, TRBJ2-7)
CASQSGGGYEQYF

SEQ ID NO: 777005 - protein, 17 aa, Homo sapiens
  CDR3 for alpha chain variable domain of TCR clone 388503 (TRAV3, TRAJ6)
CAVRDGPRAGGSYIPPF

SEQ ID NO: 777006 - protein, 14 aa, Homo sapiens
  CDR3 for beta chain variable domain of TCR clone 388503 (TRBV7-2, TRBJ2-7)
CASSPKTSFYERYF

SEQ ID NO: 777007 - protein, 12 aa, Homo sapiens
  CDR3 for alpha chain variable domain of TCR clone 388504 (TRAV10, TRAJ34)
CVVSGKHRQAHL

SEQ ID NO: 777008 - protein, 14 aa, Homo sapiens
  CDR3 for beta chain variable domain of TCR clone 388504 (TRBV19, TRBJ2-1)
CASPTFVWSGEQFF

SEQ ID NO: 777009 - protein, 16 aa, Homo sapiens
  CDR3 for alpha chain variable domain of TCR clone 388505 (TRAV3, TRAJ10)
CAVRDTRAGGGNKLTF

SEQ ID NO: 777010 - protein, 19 aa, Homo sapiens
  CDR3 for beta chain variable domain of TCR clone 388505 (TRBV6-3, TRBJ1-2)
CASSYSKGRTGPPNYGYTF

SEQ ID NO: 777011 - protein, 15 aa, Homo sapiens
  CDR3 for alpha chain variable domain of TCR clone 388506 (TRAV35, TRAJ33)
CAGQPPRYSNYQLIW

SEQ ID NO: 777012 - protein, 14 aa, Homo sapiens
  CDR3 for beta chain variable domain of TCR clone 388506 (TRBV7-2, TRBJ1-1)
CASSFLTGTTEAFF

SEQ ID NO: 777013 - protein, 12 aa, Homo sapiens
  CDR3 for alpha chain variable domain of TCR clone 388507 (TRAV3, TRAJ26)
CAVRDYGQNFVF

SEQ ID NO: 777014 - protein, 16 aa, Homo sapiens
  CDR3 for beta chain variable domain of TCR clone 388507 (TRBV11-2, TRBJ1-2)
CASSPSEREANYGYTF

SEQ ID NO: 777015 - protein, 14 aa, Homo sapiens
  CDR3 for alpha chain variable domain of TCR clone 388508 (TRAV12-3, TRAJ9)
CAMSPNTGGFKTIF

SEQ ID NO: 777016 - protein, 12 aa, Homo sapiens
  CDR3 for beta chain variable domain of TCR clone 388508 (TRBV5-7, TRBJ1-1)
CASSLGRGKAFF

SEQ ID NO: 777017 - protein, 13 aa, Homo sapiens
  CDR3 for alpha chain variable domain of TCR clone 388509 (TRAV12-3, TRAJ35)
CAMAIGFGNVLHC

SEQ ID NO: 777018 - protein, 15 aa, Homo sapiens
  CDR3 for beta chain variable domain of TCR clone 388509 (TRBV4-1, TRBJ1-4)
CASSDTGGTNEKLFF

SEQ ID NO: 777019 - protein, 13 aa, Homo sapiens
  CDR3 for alpha chain variable domain of TCR clone 388510 (TRAV8-3, TRAJ28)
CAVGAVGSYQLTF

SEQ ID NO: 777020 - protein, 15 aa, Homo sapiens
  CDR3 for beta chain variable domain of TCR clone 388510 (TRBV5-7, TRBJ2-7)
CASSLPGQVFYEQYF

SEQ ID NO: 777021 - protein, 12 aa, Homo sapiens
  CDR3 for alpha chain variable domain of TCR clone 388511 (TRAV36/DV7, TRAJ54)
CAVVRGAQKLVF

SEQ ID NO: 777022 - protein, 15 aa, Homo sapiens
  CDR3 for beta chain variable domain of TCR clone 388511 (TRBV7-2, TRBJ1-2)
CASSPRAGWNYGYTF

SEQ ID NO: 777023 - protein, 14 aa, Homo sapiens
  CDR3 for alpha chain variable domain of TCR clone 388512 (TRAV13-1, TRAJ53)
CAASISGSNYKLTF

SEQ ID NO: 777024 - protein, 17 aa, Homo sapiens
  CDR3 for beta chain variable domain of TCR clone 388512 (TRBV4-1, TRBJ1-4)
CASSDTGGTNEKLFLAV

SEQ ID NO: 777025 - protein, 11 aa, Homo sapiens
  CDR3 for alpha chain variable domain of TCR clone 388513 (TRAV2, TRAJ13)
CASGCYQKVTF

SEQ ID NO: 777026 - protein, 15 aa, Homo sapiens
  CDR3 for beta chain variable domain of TCR clone 388513 (TRBV11-1, TRBJ2-7)
CASSLNYGASYEQYF

SEQ ID NO: 777027 - protein, 14 aa, Homo sapiens
  CDR3 for alpha chain variable domain of TCR clone 388514 (TRAV13-1, TRAJ44)
CAAKATGTASKLTF

SEQ ID NO: 777028 - protein, 17 aa, Homo sapiens
  CDR3 for beta chain variable domain of TCR clone 388514 (TRBV19, TRBJ2-1)
CASSIWSAQPTHNEQFF

SEQ ID NO: 777029 - protein, 14 aa, Homo sapiens
  CDR3 for alpha chain variable domain of TCR clone 388515 (TRAV17, TRAJ45)
CATASGGGADGLTF

SEQ ID NO: 777030 - protein, 13 aa, Homo sapiens
  CDR3 for beta chain variable domain of TCR clone 388515 (TRBV7-9, TRBJ2-2)
CASSLDPTGELFF

SEQ ID NO: 777031 - protein, 14 aa, Homo sapiens
  CDR3 for alpha chain variable domain of TCR clone 388516 (TRAV30, TRAJ50)
CGTALKTSYDKVIF

SEQ ID NO: 777032 - protein, 12 aa, Homo sapiens
  CDR3 for beta chain variable domain of TCR clone 388516 (TRBV5-1, TRBJ2-3)
CASSLAADTQYF

SEQ ID NO: 777033 - protein, 13 aa, Homo sapiens
  CDR3 for alpha chain variable domain of TCR clone 388517 (TRAV21, TRAJ27)
CAARPGNAGKSTF

SEQ ID NO: 777034 - protein, 15 aa, Homo sapiens
  CDR3 for beta chain variable domain of TCR clone 388517 (TRBV7-2, TRBJ2-3)
CASSSTGLETDTQYF

SEQ ID NO: 777035 - protein, 12 aa, Homo sapiens
  CDR3 for alpha chain variable domain of TCR clone 388518 (TRAV8-3, TRAJ26)
CAGDNYGQNFFF

SEQ ID NO: 777036 - protein, 15 aa, Homo sapiens
  CDR3 for beta chain variable domain of TCR clone 388518 (TRBV9, TRBJ2-1)
CASSLAGSSYNEQFL

SEQ ID NO: 777037 - protein, 11 aa, Homo sapiens
  CDR3 for alpha chain variable domain of TCR clone 388519 (TRAV8-6, TRAJ13)
CALGIYQKVTF

SEQ ID NO: 777038 - protein, 15 aa, Homo sapiens
  CDR3 for beta chain variable domain of TCR clone 388519 (TRBV5-1, TRBJ2-7)
CASSLNGGPAREQHF

SEQ ID NO: 777039 - protein, 14 aa, Homo sapiens
  CDR3 for alpha chain variable domain of TCR clone 388520 (TRAV12-2, TRAJ13)
WSVKKTGGYQKVTF

SEQ ID NO: 777040 - protein, 15 aa, Homo sapiens
  CDR3 for beta chain variable domain of TCR clone 388520 (TRBV7-2, TRBJ2-1)
CASSSGLAGGNEQFF

SEQ ID NO: 777041 - protein, 14 aa, Homo sapiens
  CDR3 for alpha chain variable domain of TCR clone 388521 (TRAV35, TRAJ46)
CAGPQKSSGDKLTF

SEQ ID NO: 777042 - protein, 15 aa, Homo sapiens
  CDR3 for beta chain variable domain of TCR clone 388521 (TRBV6-3, TRBJ2-7)
CASSSPGTVLYEQYF

SEQ ID NO: 777043 - protein, 16 aa, Homo sapiens
  CDR3 for alpha chain variable domain of TCR clone 388522 (TRAV3, TRAJ10)
CAVRDMRAGGGNKLTF

SEQ ID NO: 777044 - protein, 16 aa, Homo sapiens
  CDR3 for beta chain variable domain of TCR clone 388522 (TRBV2, TRBJ2-4)
CASSEAPGGEQNIQYF

SEQ ID NO: 777045 - protein, 12 aa, Homo sapiens
  CDR3 for alpha chain variable domain of TCR clone 388523 (TRAV12-2, TRAJ43)
CAVNVNNNDMRF

SEQ ID NO: 777046 - protein, 15 aa, Homo sapiens
  CDR3 for beta chain variable domain of TCR clone 388523 (TRBV11-3, TRBJ2-2)
CASSYFSTGTGELFF

SEQ ID NO: 777047 - protein, 14 aa, Homo sapiens
  CDR3 for alpha chain variable domain of TCR clone 388524 (TRAV12-1, TRAJ13)
CVVIDSGGHQKVTF

SEQ ID NO: 777048 - protein, 17 aa, Homo sapiens
  CDR3 for beta chain variable domain of TCR clone 388524 (TRBV15, TRBJ1-5)
CATSRAPPGTRNQPQHF

SEQ ID NO: 777049 - protein, 14 aa, Homo sapiens
  CDR3 for alpha chain variable domain of TCR clone 388525 (TRAV17, TRAJ48)
CATEGNFGNEKLTF

SEQ ID NO: 777050 - protein, 15 aa, Homo sapiens
  CDR3 for beta chain variable domain of TCR clone 388525 (TRBV5-7, TRBJ2-7)
CASSLGPGRGHEQYF

SEQ ID NO: 777051 - protein, 13 aa, Homo sapiens
  CDR3 for alpha chain variable domain of TCR clone 388526 (TRAV27, TRAJ29)
CAGAHSGNTPLVF

SEQ ID NO: 777052 - protein, 13 aa, Homo sapiens
  CDR3 for beta chain variable domain of TCR clone 388526 (TRBV6-4, TRBJ1-1)
CASSLDREGIAFF

SEQ ID NO: 777053 - protein, 13 aa, Homo sapiens
  CDR3 for alpha chain variable domain of TCR clone 388527 (TRAV27, TRAJ45)
CRSSGGGADGLTL

SEQ ID NO: 777054 - protein, 17 aa, Homo sapiens
  CDR3 for beta chain variable domain of TCR clone 388527 (TRBV11-2, TRBJ2-1)
CASSLYPPGVEYNEQFF

SEQ ID NO: 777055 - protein, 14 aa, Homo sapiens
  CDR3 for alpha chain variable domain of TCR clone 388528 (TRAV13-2, TRAJ49)
CAEILSNTGNQFYF

SEQ ID NO: 777056 - protein, 12 aa, Homo sapiens
  CDR3 for beta chain variable domain of TCR clone 388528 (TRBV2, TRBJ2-1)
GRGLPSYNEQFF

SEQ ID NO: 777057 - protein, 14 aa, Homo sapiens
  CDR3 for alpha chain variable domain of TCR clone 388529 (TRAV23/DV6, TRAJ27)
CAASRDTNAGKSTV

SEQ ID NO: 777058 - protein, 13 aa, Homo sapiens
  CDR3 for beta chain variable domain of TCR clone 388529 (TRBV20-1, TRBJ1-5)
CSASGRGNQPQHF

SEQ ID NO: 777059 - protein, 13 aa, Homo sapiens
  CDR3 for alpha chain variable domain of TCR clone 388530 (TRAV2, TRAJ24)
CAVTTDSWGKLQF

SEQ ID NO: 777060 - protein, 14 aa, Homo sapiens
  CDR3 for beta chain variable domain of TCR clone 388530 (TRBV13, TRBJ2-5)
CARSLGRGQEAQYF

SEQ ID NO: 777061 - protein, 13 aa, Homo sapiens
  CDR3 for alpha chain variable domain of TCR clone 388531 (TRAV17, TRAJ5)
CALRGTGRRALTF

SEQ ID NO: 777062 - protein, 13 aa, Homo sapiens
  CDR3 for beta chain variable domain of TCR clone 388531 (TRBV29-1, TRBJ2-1)
CSVEGGRVNEQFF

SEQ ID NO: 777063 - protein, 12 aa, Homo sapiens
  CDR3 for alpha chain variable domain of TCR clone 388532 (TRAV12-3, TRAJ34)
CAMGYDTDKLIF

SEQ ID NO: 777064 - protein, 14 aa, Homo sapiens
  CDR3 for beta chain variable domain of TCR clone 388532 (TRBV5-7, TRBJ1-5)
CASSRTGGGQPQHF

SEQ ID NO: 777065 - protein, 14 aa, Homo sapiens
  CDR3 for alpha chain variable domain of TCR clone 388533 (TRAV12-3, TRAJ11)
CVMTTNSGYSTLTF

SEQ ID NO: 777066 - protein, 16 aa, Homo sapiens
  CDR3 for beta chain variable domain of TCR clone 388533 (TRBV20-1, TRBJ1-1)
CSARALTQGMNTEAFF

SEQ ID NO: 777067 - protein, 13 aa, Homo sapiens
  CDR3 for alpha chain variable domain of TCR clone 388534 (TRAV12-1, TRAJ26)
CVVRRNYGKNFVF

SEQ ID NO: 777068 - protein, 14 aa, Homo sapiens
  CDR3 for beta chain variable domain of TCR clone 388534 (TRBV25-1, TRBJ1-1)
CASTHLGGNTEAFF

SEQ ID NO: 777069 - protein, 17 aa, Homo sapiens
  CDR3 for alpha chain variable domain of TCR clone 388535 (TRAV13-1, TRAJ52)
CAAGRNAGGTSYGKLTF

SEQ ID NO: 777070 - protein, 15 aa, Homo sapiens
  CDR3 for beta chain variable domain of TCR clone 388535 (TRBV7-9, TRBJ1-4)
CASSARTGGNEKLFF

SEQ ID NO: 777071 - protein, 11 aa, Homo sapiens
  CDR3 for alpha chain variable domain of TCR clone 388536 (TRAV21, TRAJ34)
CAVTNTDKLIF

SEQ ID NO: 777072 - protein, 13 aa, Homo sapiens
  CDR3 for beta chain variable domain of TCR clone 388536 (TRBV5-4, TRBJ2-5)
CASSPVSQETQYF

SEQ ID NO: 777073 - protein, 14 aa, Homo sapiens
  CDR3 for alpha chain variable domain of TCR clone 388537 (TRAV40, TRAJ41)
CLLGPPNSGYALNF

SEQ ID NO: 777074 - protein, 11 aa, Homo sapiens
  CDR3 for beta chain variable domain of TCR clone 388537 (TRBV19, TRBJ2-7)
CDSSILGEQYF

SEQ ID NO: 777075 - protein, 13 aa, Homo sapiens
  CDR3 for alpha chain variable domain of TCR clone 388538 (TRAV3, TRAJ20)
CAVRSLNDYNLSF

SEQ ID NO: 777076 - protein, 19 aa, Homo sapiens
  CDR3 for beta chain variable domain of TCR clone 388538 (TRBV7-2, TRBJ2-3)
CASSFLSRNWGGGTDTQYF

SEQ ID NO: 777077 - protein, 17 aa, Homo sapiens
  CDR3 for alpha chain variable domain of TCR clone 388539 (TRAV21, TRAJ10)
CAVRGYILTGGGNKLTF

SEQ ID NO: 777078 - protein, 16 aa, Homo sapiens
  CDR3 for beta chain variable domain of TCR clone 388539 (TRBV7-2, TRBJ2-5)
CASSYKTGISLETQYF

SEQ ID NO: 777079 - protein, 14 aa, Homo sapiens
  CDR3 for alpha chain variable domain of TCR clone 388540 (TRAV23/DV6, TRAJ11)
CAALIGGGYSTLTF

SEQ ID NO: 777080 - protein, 14 aa, Homo sapiens
  CDR3 for beta chain variable domain of TCR clone 388540 (TRBV27, TRBJ2-3)
CASRKGGRTDTQYF

SEQ ID NO: 777081 - protein, 14 aa, Homo sapiens
  CDR3 for alpha chain variable domain of TCR clone 388541 (TRAV8-1, TRAJ5)
CAVSMDTGRKALTF

SEQ ID NO: 777082 - protein, 15 aa, Homo sapiens
  CDR3 for beta chain variable domain of TCR clone 388541 (TRBV19, TRBJ2-4)
CASRGPRRGENIQYF

SEQ ID NO: 777083 - protein, 14 aa, Homo sapiens
  CDR3 for alpha chain variable domain of TCR clone 388542 (TRAV13-1, TRAJ9)
CAASARTGGFKTIF

SEQ ID NO: 777084 - protein, 16 aa, Homo sapiens
  CDR3 for beta chain variable domain of TCR clone 388542 (TRBV7-8, TRBJ2-4)
CASSAERTLAKNIQYF

SEQ ID NO: 777085 - protein, 19 aa, Homo sapiens
  CDR3 for alpha chain variable domain of TCR clone 388543 (TRAV1-2, TRAJ26)
CLLPLCCERPDNYGQNFVF

SEQ ID NO: 777086 - protein, 15 aa, Homo sapiens
  CDR3 for beta chain variable domain of TCR clone 388543 (TRBV9, TRBJ1-6)
CASSVAGTGDSPFYF

SEQ ID NO: 777087 - protein, 14 aa, Homo sapiens
  CDR3 for alpha chain variable domain of TCR clone 388544 (TRAV1-2, TRAJ8)
CAVREDTGFQKLVF

SEQ ID NO: 777088 - protein, 16 aa, Homo sapiens
  CDR3 for beta chain variable domain of TCR clone 388544 (TRBV5-1, TRBJ2-3)
CASSGTSGIVRNTQYF

SEQ ID NO: 777089 - protein, 10 aa, Homo sapiens
  CDR3 for alpha chain variable domain of TCR clone 388545 (TRAV13-1, TRAJ52)
GGTSHGKLTF

SEQ ID NO: 777090 - protein, 13 aa, Homo sapiens
  CDR3 for beta chain variable domain of TCR clone 388545 (TRBV7-2, TRBJ1-1)
CASNLKGAKVAFF

SEQ ID NO: 777091 - protein, 15 aa, Homo sapiens
  CDR3 for alpha chain variable domain of TCR clone 388546 (TRAV34, TRAJ38)
CGADFTPGNNRKLIW

SEQ ID NO: 777092 - protein, 15 aa, Homo sapiens
  CDR3 for beta chain variable domain of TCR clone 388546 (TRBV2, TRBJ2-3)
CASSDFEKATDTQYF

SEQ ID NO: 777093 - protein, 14 aa, Homo sapiens
  CDR3 for alpha chain variable domain of TCR clone 388547 (TRAV29/DV5, TRAJ49)
CAASAQNTGNQFYF

SEQ ID NO: 777094 - protein, 15 aa, Homo sapiens
  CDR3 for beta chain variable domain of TCR clone 388547 (TRBV6-1, TRBJ2-3)
CASSERGGITDAQYF

SEQ ID NO: 777095 - protein, 13 aa, Homo sapiens
  CDR3 for alpha chain variable domain of TCR clone 388548 (TRAV12-2, TRAJ4)
CAVFFGGYNKLIF

SEQ ID NO: 777096 - protein, 17 aa, Homo sapiens
  CDR3 for beta chain variable domain of TCR clone 388548 (TRBV20-1, TRBJ2-2)
CSASGSGQGGLTGELFF

SEQ ID NO: 777097 - protein, 14 aa, Homo sapiens
  CDR3 for alpha chain variable domain of TCR clone 388549 (TRAV2, TRAJ20)
CAVEDGANDYKLSF

SEQ ID NO: 777098 - protein, 14 aa, Homo sapiens
  CDR3 for beta chain variable domain of TCR clone 388549 (TRBV20-1, TRBJ2-5)
CSARDGRAGETQYF

SEQ ID NO: 777099 - protein, 15 aa, Homo sapiens
  CDR3 for alpha chain variable domain of TCR clone 388550 (TRAV29/DV5, TRAJ29)
CAASERSSGNTPLVF

SEQ ID NO: 777100 - protein, 15 aa, Homo sapiens
  CDR3 for beta chain variable domain of TCR clone 388550 (TRBV29-1, TRBJ2-7)
CSVEFFDRGSYEQYF

SEQ ID NO: 777101 - protein, 11 aa, Homo sapiens
  CDR3 for alpha chain variable domain of TCR clone 388551 (TRAV13-1, TRAJ43)
CAAHNNNDMRF

SEQ ID NO: 777102 - protein, 15 aa, Homo sapiens
  CDR3 for beta chain variable domain of TCR clone 388551 (TRBV6-1, TRBJ2-2)
CASSRLRGDTGQLFF

SEQ ID NO: 777103 - protein, 16 aa, Homo sapiens
  CDR3 for alpha chain variable domain of TCR clone 388552 (TRAV12-3, TRAJ53)
CAMSPGSRGSNYKLTF

SEQ ID NO: 777104 - protein, 13 aa, Homo sapiens
  CDR3 for beta chain variable domain of TCR clone 388552 (TRBV7-3, TRBJ1-1)
CASSQDWGAEAFF

SEQ ID NO: 777105 - protein, 11 aa, Homo sapiens
  CDR3 for alpha chain variable domain of TCR clone 388553 (TRAV3, TRAJ21)
CAVGNFNKFYF

SEQ ID NO: 777106 - protein, 15 aa, Homo sapiens
  CDR3 for beta chain variable domain of TCR clone 388553 (TRBV20-1, TRBJ2-3)
CSAGDSRLITDTQYF

SEQ ID NO: 777107 - protein, 16 aa, Homo sapiens
  CDR3 for alpha chain variable domain of TCR clone 388554 (TRAV3, TRAJ37)
CAVRPHGSVNTDKLIF

SEQ ID NO: 777108 - protein, 14 aa, Homo sapiens
  CDR3 for beta chain variable domain of TCR clone 388554 (TRBV25-1, TRBJ1-1)
CASTHLGGNTEAFF

SEQ ID NO: 777109 - protein, 13 aa, Homo sapiens
  CDR3 for alpha chain variable domain of TCR clone 388555 (TRAV40, TRAJ43)
SAVYYRPNNDMCF

SEQ ID NO: 777110 - protein, 17 aa, Homo sapiens
  CDR3 for beta chain variable domain of TCR clone 388555 (TRBV7-3, TRBJ2-3)
CASSLMKRMRGADTQYF

SEQ ID NO: 777111 - protein, 23 aa, Homo sapiens
  CDR3 for alpha chain variable domain of TCR clone 388556 (TRAV26-1, TRAJ38)
CIADNAGNNHIQNHDPAVYQLRD

SEQ ID NO: 777112 - protein, 12 aa, Homo sapiens
  CDR3 for beta chain variable domain of TCR clone 388556 (TRBV11-2, TRBJ2-2)
CASSLGGGELFF

SEQ ID NO: 777113 - protein, 16 aa, Homo sapiens
  CDR3 for alpha chain variable domain of TCR clone 388557 (TRAV3, TRAJ3)
CAVRDRAKSSAYKIIF

SEQ ID NO: 777114 - protein, 13 aa, Homo sapiens
  CDR3 for beta chain variable domain of TCR clone 388557 (TRBV10-3, TRBJ2-7)
CASKLAVNYEQYF

SEQ ID NO: 777115 - protein, 16 aa, Homo sapiens
  CDR3 for alpha chain variable domain of TCR clone 388558 (TRAV30, TRAJ26)
CGTESVGDNYGQNFVF

SEQ ID NO: 777116 - protein, 13 aa, Homo sapiens
  CDR3 for beta chain variable domain of TCR clone 388558 (TRBV19, TRBJ1-2)
CASSISEDYGFTF

SEQ ID NO: 777117 - protein, 15 aa, Homo sapiens
  CDR3 for alpha chain variable domain of TCR clone 388559 (TRAV22, TRAJ18)
CAASDRGSTLGRLYF

SEQ ID NO: 777118 - protein, 14 aa, Homo sapiens
  CDR3 for beta chain variable domain of TCR clone 388559 (TRBV18, TRBJ1-5)
CASSPGNSNQPQHF

SEQ ID NO: 777119 - protein, 14 aa, Homo sapiens
  CDR3 for alpha chain variable domain of TCR clone 388560 (TRAV13-1, TRAJ40)
CAARRTSGTYKYIF

SEQ ID NO: 777120 - protein, 15 aa, Homo sapiens
  CDR3 for beta chain variable domain of TCR clone 388560 (TRBV7-3, TRBJ2-1)
CASSPTGGGEVEQFF

SEQ ID NO: 777121 - protein, 14 aa, Homo sapiens
  CDR3 for alpha chain variable domain of TCR clone 388561 (TRAV26-1, TRAJ34)
CIVRVAYNTDKLIF

SEQ ID NO: 777122 - protein, 18 aa, Homo sapiens
  CDR3 for beta chain variable domain of TCR clone 388561 (TRBV7-9, TRBJ2-7)
CASSLTTSGSRTWYEQYF

SEQ ID NO: 777123 - protein, 13 aa, Homo sapiens
  CDR3 for alpha chain variable domain of TCR clone 388562 (TRAV12-3, TRAJ33)
CAMSVNSNYQLIW

SEQ ID NO: 777124 - protein, 13 aa, Homo sapiens
  CDR3 for beta chain variable domain of TCR clone 388562 (TRBV7-2, TRBJ2-2)
CSSSLAVTGELFF

SEQ ID NO: 777125 - protein, 15 aa, Homo sapiens
  CDR3 for alpha chain variable domain of TCR clone 388563 (TRAV29/DV5, TRAJ53)
CAASASGGSNYKLTF

SEQ ID NO: 777126 - protein, 16 aa, Homo sapiens
  CDR3 for beta chain variable domain of TCR clone 388563 (TRBV20-1, TRBJ2-5)
CSPGGTSGGYMGTQYF

SEQ ID NO: 777127 - protein, 15 aa, Homo sapiens
  CDR3 for alpha chain variable domain of TCR clone 388564 (TRAV21, TRAJ37)
CCPYRGSSNTGKLIF

SEQ ID NO: 777128 - protein, 14 aa, Homo sapiens
  CDR3 for beta chain variable domain of TCR clone 388564 (TRBV6-1, TRBJ1-3)
CASVQGGGGNTIYF

SEQ ID NO: 777129 - protein, 10 aa, Homo sapiens
  CDR3 for alpha chain variable domain of TCR clone 388565 (TRAV21, TRAJ31)
CAVDNARLMF

SEQ ID NO: 777130 - protein, 14 aa, Homo sapiens
  CDR3 for beta chain variable domain of TCR clone 388565 (TRBV4-2, TRBJ2-1)
CASGLDRAYNEQFF

SEQ ID NO: 777131 - protein, 13 aa, Homo sapiens
  CDR3 for alpha chain variable domain of TCR clone 388566 (TRAV1-1, TRAJ9)
CAAKNTGGFKTIL

SEQ ID NO: 777132 - protein, 14 aa, Homo sapiens
  CDR3 for beta chain variable domain of TCR clone 388566 (TRBV20-1, TRBJ2-1)
CSAQVGGSANEQFF

SEQ ID NO: 777133 - protein, 13 aa, Homo sapiens
  CDR3 for alpha chain variable domain of TCR clone 388567 (TRAV1-1, TRAJ33)
CAVRRDSNYQLIW

SEQ ID NO: 777134 - protein, 14 aa, Homo sapiens
  CDR3 for beta chain variable domain of TCR clone 388567 (TRBV11-1, TRBJ2-7)
CASSFRQGSYEQYF

SEQ ID NO: 777135 - protein, 13 aa, Homo sapiens
  CDR3 for alpha chain variable domain of TCR clone 388568 (TRAV8-6, TRAJ49)
CAVITNTGNQFYF

SEQ ID NO: 777136 - protein, 12 aa, Homo sapiens
  CDR3 for beta chain variable domain of TCR clone 388568 (TRBV11-2, TRBJ2-2)
CASSLGGGELFY

SEQ ID NO: 777137 - protein, 11 aa, Homo sapiens
  CDR3 for alpha chain variable domain of TCR clone 388569 (TRAV2, TRAJ33)
CAVESNYQLIW

SEQ ID NO: 777138 - protein, 15 aa, Homo sapiens
  CDR3 for beta chain variable domain of TCR clone 388569 (TRBV7-2, TRBJ2-3)
CASSLAGAFIDTQYF

SEQ ID NO: 777139 - protein, 12 aa, Homo sapiens
  CDR3 for alpha chain variable domain of TCR clone 388570 (TRAV8-3, TRAJ27)
CAVSAEAGKSTF

SEQ ID NO: 777140 - protein, 14 aa, Homo sapiens
  CDR3 for beta chain variable domain of TCR clone 388570 (TRBV2, TRBJ2-1)
CASRLIVGHDEQFF

SEQ ID NO: 777141 - protein, 18 aa, Homo sapiens
  CDR3 for alpha chain variable domain of TCR clone 388571 (TRAV3, TRAJ17)
CAVRTRRGGRSCRQQANF

SEQ ID NO: 777142 - protein, 14 aa, Homo sapiens
  CDR3 for beta chain variable domain of TCR clone 388571 (TRBV4-1, TRBJ2-2)
CASSQAVNTGELIF

SEQ ID NO: 777143 - protein, 14 aa, Homo sapiens
  CDR3 for alpha chain variable domain of TCR clone 388572 (TRAV1-2, TRAJ8)
CAVREDTGFQKLVF

SEQ ID NO: 777144 - protein, 15 aa, Homo sapiens
  CDR3 for beta chain variable domain of TCR clone 388572 (TRBV7-9, TRBJ2-7)
CASSSSGLAVYEQYF

SEQ ID NO: 777145 - protein, 14 aa, Homo sapiens
  CDR3 for alpha chain variable domain of TCR clone 388573 (TRAV12-2, TRAJ13)
CAVKKTGGYKKVTF

SEQ ID NO: 777146 - protein, 13 aa, Homo sapiens
  CDR3 for beta chain variable domain of TCR clone 388573 (TRBV10-3, TRBJ2-7)
CASKRAVNYEQYF

SEQ ID NO: 777147 - protein, 17 aa, Homo sapiens
  CDR3 for alpha chain variable domain of TCR clone 388574 (TRAV8-6, TRAJ58)
CAVSSWVGETSGYRLTF

SEQ ID NO: 777148 - protein, 17 aa, Homo sapiens
  CDR3 for beta chain variable domain of TCR clone 388574 (TRBV11-2, TRBJ2-1)
CASSLYPPGVEYNGQFF

SEQ ID NO: 777149 - protein, 14 aa, Homo sapiens
  CDR3 for alpha chain variable domain of TCR clone 388575 (TRAV14/DV4, TRAJ32)
GNVLPLTPTNKLIF

SEQ ID NO: 777150 - protein, 14 aa, Homo sapiens
  CDR3 for beta chain variable domain of TCR clone 388575 (TRBV24-1, TRBJ1-5)
CATSDGQLGQPQHF

SEQ ID NO: 777151 - protein, 14 aa, Homo sapiens
  CDR3 for alpha chain variable domain of TCR clone 388576 (TRAV3, TRAJ17)
CALRDAAAGNKLTF

SEQ ID NO: 777152 - protein, 15 aa, Homo sapiens
  CDR3 for beta chain variable domain of TCR clone 388576 (TRBV3-1, TRBJ2-7)
CASSQVRQGAYEQYF

SEQ ID NO: 777153 - protein, 12 aa, Homo sapiens
  CDR3 for alpha chain variable domain of TCR clone 388577 (TRAV2, TRAJ32)
CAVGGATNKLIF

SEQ ID NO: 777154 - protein, 15 aa, Homo sapiens
  CDR3 for beta chain variable domain of TCR clone 388577 (TRBV7-2, TRBJ2-1)
CASSSRTSREDEQIF

SEQ ID NO: 777155 - protein, 13 aa, Homo sapiens
  CDR3 for alpha chain variable domain of TCR clone 388578 (TRAV12-2, TRAJ20)
CAVYPSNDYKLSF

SEQ ID NO: 777156 - protein, 15 aa, Homo sapiens
  CDR3 for beta chain variable domain of TCR clone 388578 (TRBV16, TRBJ1-1)
CASSPSRGGRTEAFF

SEQ ID NO: 777157 - protein, 14 aa, Homo sapiens
  CDR3 for alpha chain variable domain of TCR clone 388579 (TRAV12-2, TRAJ40)
CAVKIPSGTYKYIF

SEQ ID NO: 777158 - protein, 15 aa, Homo sapiens
  CDR3 for beta chain variable domain of TCR clone 388579 (TRBV20-1, TRBJ2-5)
CSAPPRTGFGETQYF

SEQ ID NO: 777159 - protein, 14 aa, Homo sapiens
  CDR3 for alpha chain variable domain of TCR clone 388580 (TRAV8-3, TRAJ37)
CAVGSPGNTGKLII

SEQ ID NO: 777160 - protein, 15 aa, Homo sapiens
  CDR3 for beta chain variable domain of TCR clone 388580 (TRBV11-2, TRBJ1-3)
CASSLSPLVRDTIYF

SEQ ID NO: 777161 - protein, 14 aa, Homo sapiens
  CDR3 for alpha chain variable domain of TCR clone 388581 (TRAV38-1, TRAJ11)
CAFMKHEGYSTLTF

SEQ ID NO: 777162 - protein, 13 aa, Homo sapiens
  CDR3 for beta chain variable domain of TCR clone 388581 (TRBV28, TRBJ2-7)
CASSPSGTYEQYF

SEQ ID NO: 777163 - protein, 15 aa, Homo sapiens
  CDR3 for alpha chain variable domain of TCR clone 388582 (TRAV4, )
CLVDIQNPDPSVYQL

SEQ ID NO: 777164 - protein, 15 aa, Homo sapiens
  CDR3 for beta chain variable domain of TCR clone 388582 (TRBV20-1, TRBJ1-5)
CSASRRGDLGQPQHF

SEQ ID NO: 777165 - protein, 16 aa, Homo sapiens
  CDR3 for alpha chain variable domain of TCR clone 388583 (TRAV12-3, TRAJ53)
CAMSVGSGGSNYKLTF

SEQ ID NO: 777166 - protein, 14 aa, Homo sapiens
  CDR3 for beta chain variable domain of TCR clone 388583 (TRBV7-9, TRBJ2-2)
CASSLVQDTGELFF

SEQ ID NO: 777167 - protein, 12 aa, Homo sapiens
  CDR3 for alpha chain variable domain of TCR clone 388584 (TRAV12-3, TRAJ17)
CAMTLTGNKLTF

SEQ ID NO: 777168 - protein, 14 aa, Homo sapiens
  CDR3 for beta chain variable domain of TCR clone 388584 (TRBV20-1, TRBJ2-7)
CSARWTGGSYEQYF

SEQ ID NO: 777169 - protein, 14 aa, Homo sapiens
  CDR3 for alpha chain variable domain of TCR clone 388585 (TRAV8-4, TRAJ8)
CAVSEDTGFQKIVF

SEQ ID NO: 777170 - protein, 16 aa, Homo sapiens
  CDR3 for beta chain variable domain of TCR clone 388585 (TRBV7-3, TRBJ2-1)
CASSKPLAGGYNEQFF

SEQ ID NO: 777171 - protein, 14 aa, Homo sapiens
  CDR3 for alpha chain variable domain of TCR clone 388586 (TRAV38-1, TRAJ45)
CASHSGGGADGFTF

SEQ ID NO: 777172 - protein, 14 aa, Homo sapiens
  CDR3 for beta chain variable domain of TCR clone 388586 (TRBV20-1, TRBJ1-1)
CSAQTRIGGTEAFF

SEQ ID NO: 777173 - protein, 14 aa, Homo sapiens
  CDR3 for alpha chain variable domain of TCR clone 388587 (TRAV35, TRAJ33)
CAGSSQDSNYQSIR

SEQ ID NO: 777174 - protein, 15 aa, Homo sapiens
  CDR3 for beta chain variable domain of TCR clone 388587 (TRBV20-1, TRBJ2-7)
CSAESGTSGAYEQYF

SEQ ID NO: 777175 - protein, 14 aa, Homo sapiens
  CDR3 for alpha chain variable domain of TCR clone 388588 (TRAV2, TRAJ29)
CAVTPPSGNTPLVF

SEQ ID NO: 777176 - protein, 11 aa, Homo sapiens
  CDR3 for beta chain variable domain of TCR clone 388588 (TRBV19, TRBJ2-5)
CASSIKETQYF

SEQ ID NO: 777177 - protein, 14 aa, Homo sapiens
  CDR3 for alpha chain variable domain of TCR clone 388589 (TRAV26-1, TRAJ38)
CIAYNAGNNRKLIW

SEQ ID NO: 777178 - protein, 13 aa, Homo sapiens
  CDR3 for beta chain variable domain of TCR clone 388589 (TRBV19, TRBJ1-2)
CASSVPGQDGYTF

SEQ ID NO: 777179 - protein, 13 aa, Homo sapiens
  CDR3 for alpha chain variable domain of TCR clone 388590 (TRAV2, TRAJ40)
CTVVTSGTYKYIF

SEQ ID NO: 777180 - protein, 15 aa, Homo sapiens
  CDR3 for beta chain variable domain of TCR clone 388590 (TRBV11-3, TRBJ2-3)
CASLEDGREGETQYF

SEQ ID NO: 777181 - protein, 12 aa, Homo sapiens
  CDR3 for alpha chain variable domain of TCR clone 388591 (TRAV3, TRAJ20)
CAVRDPDYKLSF

SEQ ID NO: 777182 - protein, 13 aa, Homo sapiens
  CDR3 for beta chain variable domain of TCR clone 388591 (TRBV11-2, TRBJ2-5)
CASSFSSQETQYF

SEQ ID NO: 777183 - protein, 13 aa, Homo sapiens
  CDR3 for alpha chain variable domain of TCR clone 388592 (TRAV12-2, TRAJ20)
CAVNRFDDYKLSF

SEQ ID NO: 777184 - protein, 13 aa, Homo sapiens
  CDR3 for beta chain variable domain of TCR clone 388592 (TRBV11-3, TRBJ2-7)
CASSLDKLYEQYF

SEQ ID NO: 777185 - protein, 14 aa, Homo sapiens
  CDR3 for alpha chain variable domain of TCR clone 388593 (TRAV8-1, TRAJ24)
CAVNAADSWGKLQF

SEQ ID NO: 777186 - protein, 16 aa, Homo sapiens
  CDR3 for beta chain variable domain of TCR clone 388593 (TRBV4-3, TRBJ2-1)
CASNPALDRGVNEQFF

SEQ ID NO: 777187 - protein, 13 aa, Homo sapiens
  CDR3 for alpha chain variable domain of TCR clone 388594 (TRAV2, TRAJ24)
CAVPTDSWGKLQF

SEQ ID NO: 777188 - protein, 14 aa, Homo sapiens
  CDR3 for beta chain variable domain of TCR clone 388594 (TRBV12-5, TRBJ2-5)
CASGSRTHQETQYF

SEQ ID NO: 777189 - protein, 14 aa, Homo sapiens
  CDR3 for alpha chain variable domain of TCR clone 388595 (TRAV12-2, TRAJ24)
CAVTPADSWGKLQF

SEQ ID NO: 777190 - protein, 15 aa, Homo sapiens
  CDR3 for beta chain variable domain of TCR clone 388595 (TRBV5-1, TRBJ2-7)
CASSLDLTSSYEQYF

SEQ ID NO: 777191 - protein, 15 aa, Homo sapiens
  CDR3 for alpha chain variable domain of TCR clone 388596 (TRAV3, TRAJ3)
CAVRDRDSSASKIIF

SEQ ID NO: 777192 - protein, 13 aa, Homo sapiens
  CDR3 for beta chain variable domain of TCR clone 388596 (TRBV6-5, TRBJ2-3)
CASSYLRGGTQYF

SEQ ID NO: 777193 - protein, 18 aa, Homo sapiens
  CDR3 for alpha chain variable domain of TCR clone 388597 (TRAV21, TRAJ52)
CAVRPAPAGGTSYGQLTF

SEQ ID NO: 777194 - protein, 13 aa, Homo sapiens
  CDR3 for beta chain variable domain of TCR clone 388597 (TRBV7-3, TRBJ1-1)
CASSQDWGAEAFF

SEQ ID NO: 777195 - protein, 14 aa, Homo sapiens
  CDR3 for alpha chain variable domain of TCR clone 388598 (TRAV13-1, TRAJ40)
CAASMTSGTYKYIF

SEQ ID NO: 777196 - protein, 17 aa, Homo sapiens
  CDR3 for beta chain variable domain of TCR clone 388598 (TRBV11-2, TRBJ2-1)
CASSLYPPGVEYNEQFF

SEQ ID NO: 777197 - protein, 17 aa, Homo sapiens
  CDR3 for alpha chain variable domain of TCR clone 388599 (TRAV14/DV4, TRAJ28)
CAMREGYSGAGSYQLTF

SEQ ID NO: 777198 - protein, 17 aa, Homo sapiens
  CDR3 for beta chain variable domain of TCR clone 388599 (TRBV7-6, TRBJ2-5)
CASSSPQAGDPSETQYF

SEQ ID NO: 777199 - protein, 13 aa, Homo sapiens
  CDR3 for alpha chain variable domain of TCR clone 388600 (TRAV2, TRAJ5)
CAVPDTGRRALTF

SEQ ID NO: 777200 - protein, 15 aa, Homo sapiens
  CDR3 for beta chain variable domain of TCR clone 388600 (TRBV7-2, TRBJ2-2)
FASSTRTGYTGELFF

SEQ ID NO: 777201 - protein, 13 aa, Homo sapiens
  CDR3 for alpha chain variable domain of TCR clone 388601 (TRAV21, TRAJ20)
CAVGLRVDYKLSF

SEQ ID NO: 777202 - protein, 16 aa, Homo sapiens
  CDR3 for beta chain variable domain of TCR clone 388601 (TRBV29-1, TRBJ2-7)
CSVEDAEDGTAYEQYF

SEQ ID NO: 777203 - protein, 11 aa, Homo sapiens
  CDR3 for alpha chain variable domain of TCR clone 388602 (TRAV21, TRAJ11)
CAVNGYSTLTF

SEQ ID NO: 777204 - protein, 14 aa, Homo sapiens
  CDR3 for beta chain variable domain of TCR clone 388602 (TRBV5-1, TRBJ1-2)
CASSLSSGPYGYTF

SEQ ID NO: 777205 - protein, 16 aa, Homo sapiens
  CDR3 for alpha chain variable domain of TCR clone 388603 (TRAV1-1, TRAJ29)
CAVRSTRNSEKTPLVF

SEQ ID NO: 777206 - protein, 16 aa, Homo sapiens
  CDR3 for beta chain variable domain of TCR clone 388603 (TRBV27, TRBJ1-1)
CASSSRGRTGYTEAFF

SEQ ID NO: 777207 - protein, 15 aa, Homo sapiens
  CDR3 for alpha chain variable domain of TCR clone 388604 (TRAV12-3, TRAJ6)
CAMSATTGGSDIPTF

SEQ ID NO: 777208 - protein, 17 aa, Homo sapiens
  CDR3 for beta chain variable domain of TCR clone 388604 (TRBV5-4, TRBJ2-1)
CASSSAGGRGPYNEQFF

SEQ ID NO: 777209 - protein, 12 aa, Homo sapiens
  CDR3 for alpha chain variable domain of TCR clone 388605 (TRAV17, TRAJ12)
CATLRSSYKLIF

SEQ ID NO: 777210 - protein, 14 aa, Homo sapiens
  CDR3 for beta chain variable domain of TCR clone 388605 (TRBV28, TRBJ2-1)
CASSLLQGTNEQFF

SEQ ID NO: 777211 - protein, 18 aa, Homo sapiens
  CDR3 for alpha chain variable domain of TCR clone 388606 (TRAV3, TRAJ17)
CAVRARRGGRSCRQQANF

SEQ ID NO: 777212 - protein, 17 aa, Homo sapiens
  CDR3 for beta chain variable domain of TCR clone 388606 (TRBV11-2, TRBJ2-1)
CASSLYPPGVEYNEQFF

SEQ ID NO: 777213 - protein, 15 aa, Homo sapiens
  CDR3 for alpha chain variable domain of TCR clone 388607 (TRAV35, TRAJ58)
CAGRRQETSGSRLTF

SEQ ID NO: 777214 - protein, 16 aa, Homo sapiens
  CDR3 for beta chain variable domain of TCR clone 388607 (TRBV7-9, TRBJ1-2)
CASSLGFSSGEDGYTF

SEQ ID NO: 777215 - protein, 15 aa, Homo sapiens
  CDR3 for alpha chain variable domain of TCR clone 388608 (TRAV4, TRAJ39)
CLVGPNNNAGNMLTF

SEQ ID NO: 777216 - protein, 15 aa, Homo sapiens
  CDR3 for beta chain variable domain of TCR clone 388608 (TRBV7-9, TRBJ1-6)
CASSSPGRGNSTLHF

SEQ ID NO: 777217 - protein, 11 aa, Homo sapiens
  CDR3 for alpha chain variable domain of TCR clone 388609 (TRAV13-2, TRAJ49)
CAVPTGNQFYF

SEQ ID NO: 777218 - protein, 16 aa, Homo sapiens
  CDR3 for beta chain variable domain of TCR clone 388609 (TRBV7-7, TRBJ2-1)
CASSLASGTSYNEQFF

SEQ ID NO: 777219 - protein, 16 aa, Homo sapiens
  CDR3 for alpha chain variable domain of TCR clone 388610 (TRAV30, TRAJ24)
CGTEIVDAVSWGKFQF

SEQ ID NO: 777220 - protein, 16 aa, Homo sapiens
  CDR3 for beta chain variable domain of TCR clone 388610 (TRBV19, TRBJ2-1)
CASSKAGPSSYNEQFF

SEQ ID NO: 777221 - protein, 13 aa, Homo sapiens
  CDR3 for alpha chain variable domain of TCR clone 388611 (TRAV3, TRAJ3)
CAVRALGASKIIF

SEQ ID NO: 777222 - protein, 18 aa, Homo sapiens
  CDR3 for beta chain variable domain of TCR clone 388611 (TRBV12-4, TRBJ2-5)
CASSPSGGRDPGLRARHA

SEQ ID NO: 777223 - protein, 15 aa, Homo sapiens
  CDR3 for alpha chain variable domain of TCR clone 388612 (TRAV3, TRAJ37)
CCETHGSGNTGKLIF

SEQ ID NO: 777224 - protein, 16 aa, Homo sapiens
  CDR3 for beta chain variable domain of TCR clone 388612 (TRBV9, TRBJ1-2)
CASSVEEKVSPYGYTF

SEQ ID NO: 777225 - protein, 12 aa, Homo sapiens
  CDR3 for alpha chain variable domain of TCR clone 388613 (TRAV12-3, TRAJ17)
CAMTLTGNKLTF

SEQ ID NO: 777226 - protein, 13 aa, Homo sapiens
  CDR3 for beta chain variable domain of TCR clone 388613 (TRBV6-1, TRBJ1-1)
CASSRQGNTEALF

SEQ ID NO: 777227 - protein, 16 aa, Homo sapiens
  CDR3 for alpha chain variable domain of TCR clone 388614 (TRAV12-1, TRAJ8)
CVVNGRGNTGFQKLVL

SEQ ID NO: 777228 - protein, 14 aa, Homo sapiens
  CDR3 for beta chain variable domain of TCR clone 388614 (TRBV7-9, TRBJ2-5)
CASSLVGGEETQYF

SEQ ID NO: 777229 - protein, 11 aa, Homo sapiens
  CDR3 for alpha chain variable domain of TCR clone 388615 (TRAV4, TRAJ31)
CLVGHNARLMF

SEQ ID NO: 777230 - protein, 16 aa, Homo sapiens
  CDR3 for beta chain variable domain of TCR clone 388615 (TRBV7-2, TRBJ2-5)
CASSSKWLSGQETQYF

SEQ ID NO: 777231 - protein, 13 aa, Homo sapiens
  CDR3 for alpha chain variable domain of TCR clone 388616 (TRAV29/DV5, TRAJ31)
CAASRNNDARLMF

SEQ ID NO: 777232 - protein, 17 aa, Homo sapiens
  CDR3 for beta chain variable domain of TCR clone 388616 (TRBV7-8, TRBJ2-6)
CASSAGTGGAGANVLTF

SEQ ID NO: 777233 - protein, 14 aa, Homo sapiens
  CDR3 for alpha chain variable domain of TCR clone 388617 (TRAV36/DV7, TRAJ57)
CAVGFPGGSEKLVF

SEQ ID NO: 777234 - protein, 12 aa, Homo sapiens
  CDR3 for beta chain variable domain of TCR clone 388617 (TRBV19, TRBJ2-7)
CASASGTYEQYF

SEQ ID NO: 777235 - protein, 15 aa, Homo sapiens
  CDR3 for alpha chain variable domain of TCR clone 388618 (TRAV8-2, TRAJ40)
CVVSDRGSGTYKYIF

SEQ ID NO: 777236 - protein, 19 aa, Homo sapiens
  CDR3 for beta chain variable domain of TCR clone 388618 (TRBV5-7, TRBJ2-1)
CASSALRVTGTSVYNEQFF

SEQ ID NO: 777237 - protein, 13 aa, Homo sapiens
  CDR3 for alpha chain variable domain of TCR clone 388619 (TRAV13-2, TRAJ48)
CAEMDFGNEKLTF

SEQ ID NO: 777238 - protein, 13 aa, Homo sapiens
  CDR3 for beta chain variable domain of TCR clone 388619 (TRBV7-2, TRBJ2-5)
CASSQTSVETQYF

SEQ ID NO: 777239 - protein, 22 aa, Homo sapiens
  CDR3 for alpha chain variable domain of TCR clone 388620 (TRAV8-2, TRAJ45)
HLTKPTAHMSDAAEYSADGLTF

SEQ ID NO: 777240 - protein, 13 aa, Homo sapiens
  CDR3 for beta chain variable domain of TCR clone 388620 (TRBV7-3, TRBJ2-1)
CASSPVAYNEQFF

SEQ ID NO: 777241 - protein, 16 aa, Homo sapiens
  CDR3 for alpha chain variable domain of TCR clone 388621 (TRAV38-1, TRAJ32)
WAFMKGGGGATNKLIF

SEQ ID NO: 777242 - protein, 13 aa, Homo sapiens
  CDR3 for beta chain variable domain of TCR clone 388621 (TRBV20-1, TRBJ2-5)
CSAREAFQETQYF

SEQ ID NO: 777243 - protein, 14 aa, Homo sapiens
  CDR3 for alpha chain variable domain of TCR clone 388622 (TRAV12-3, TRAJ29)
CAMILLSGNTPLVF

SEQ ID NO: 777244 - protein, 13 aa, Homo sapiens
  CDR3 for beta chain variable domain of TCR clone 388622 (TRBV7-2, TRBJ2-2)
CASSLAVTGELFF

SEQ ID NO: 777245 - protein, 13 aa, Homo sapiens
  CDR3 for alpha chain variable domain of TCR clone 388623 (TRAV35, TRAJ58)
CAGLETSGSRLTS

SEQ ID NO: 777246 - protein, 15 aa, Homo sapiens
  CDR3 for beta chain variable domain of TCR clone 388623 (TRBV20-1, TRBJ2-1)
CSARFSAGGLNEQFF

SEQ ID NO: 777247 - protein, 19 aa, Homo sapiens
  CDR3 for alpha chain variable domain of TCR clone 388624 (TRAV2, TRAJ8)
CAVEHRLSETCIWNWHPTS

SEQ ID NO: 777248 - protein, 13 aa, Homo sapiens
  CDR3 for beta chain variable domain of TCR clone 388624 (TRBV4-1, TRBJ2-2)
CASSQENTGELFF

SEQ ID NO: 777249 - protein, 14 aa, Homo sapiens
  CDR3 for alpha chain variable domain of TCR clone 388625 (TRAV9-2, TRAJ39)
CALYIYNACNMLTF

SEQ ID NO: 777250 - protein, 14 aa, Homo sapiens
  CDR3 for beta chain variable domain of TCR clone 388625 (TRBV20-1, TRBJ2-1)
CSAQIGGSANEQFF

SEQ ID NO: 777251 - protein, 15 aa, Homo sapiens
  CDR3 for alpha chain variable domain of TCR clone 388626 (TRAV8-1, TRAJ6)
CAVNTPPVGSYIPTF

SEQ ID NO: 777252 - protein, 15 aa, Homo sapiens
  CDR3 for beta chain variable domain of TCR clone 388626 (TRBV11-2, TRBJ2-2)
CASSSDRVNAGELFF

SEQ ID NO: 777253 - protein, 15 aa, Homo sapiens
  CDR3 for alpha chain variable domain of TCR clone 388627 (TRAV17, TRAJ56)
CATEPFTGANSKLTF

SEQ ID NO: 777254 - protein, 15 aa, Homo sapiens
  CDR3 for beta chain variable domain of TCR clone 388627 (TRBV28, TRBJ1-5)
CASSRTGGCVQPQHF

SEQ ID NO: 777255 - protein, 13 aa, Homo sapiens
  CDR3 for alpha chain variable domain of TCR clone 388628 (TRAV12-1, TRAJ29)
CVFRNSGNTPLVF

SEQ ID NO: 777256 - protein, 14 aa, Homo sapiens
  CDR3 for beta chain variable domain of TCR clone 388628 (TRBV7-2, TRBJ2-7)
CASRSQGAAYEQYF

SEQ ID NO: 777257 - protein, 13 aa, Homo sapiens
  CDR3 for alpha chain variable domain of TCR clone 388629 (TRAV12-2, TRAJ49)
CAVKPNTGNQFYF

SEQ ID NO: 777258 - protein, 13 aa, Homo sapiens
  CDR3 for beta chain variable domain of TCR clone 388629 (TRBV7-9, TRBJ1-2)
CASSLKQNYGYTF

SEQ ID NO: 777259 - protein, 12 aa, Homo sapiens
  CDR3 for alpha chain variable domain of TCR clone 388630 (TRAV8-6, TRAJ43)
CAVRYNNNDMRF

SEQ ID NO: 777260 - protein, 14 aa, Homo sapiens
  CDR3 for beta chain variable domain of TCR clone 388630 (TRBV5-1, TRBJ2-7)
CASSRGESLYEQYF

SEQ ID NO: 777261 - protein, 12 aa, Homo sapiens
  CDR3 for alpha chain variable domain of TCR clone 388631 (TRAV17, TRAJ20)
CATQSNDYKLSF

SEQ ID NO: 777262 - protein, 12 aa, Homo sapiens
  CDR3 for beta chain variable domain of TCR clone 388631 (TRBV7-8, TRBJ2-7)
CASSLGDREQYF

SEQ ID NO: 777263 - protein, 18 aa, Homo sapiens
  CDR3 for alpha chain variable domain of TCR clone 388632 (TRAV13-1, TRAJ52)
CAAKNPNAGGTSYGKLTF

SEQ ID NO: 777264 - protein, 17 aa, Homo sapiens
  CDR3 for beta chain variable domain of TCR clone 388632 (TRBV15, TRBJ1-4)
CATSRYGTGDPNEKLFF

SEQ ID NO: 777265 - protein, 15 aa, Homo sapiens
  CDR3 for alpha chain variable domain of TCR clone 388633 (TRAV14/DV4, TRAJ46)
CAMREKKSSGDKLTV

SEQ ID NO: 777266 - protein, 13 aa, Homo sapiens
  CDR3 for beta chain variable domain of TCR clone 388633 (TRBV20-1, TRBJ2-5)
CSAREAFQETQYF

SEQ ID NO: 777267 - protein, 20 aa, Homo sapiens
  CDR3 for alpha chain variable domain of TCR clone 388634 (TRAV8-6, TRAJ42)
CAVRGRKPRKSHLWKRHYTL

SEQ ID NO: 777268 - protein, 13 aa, Homo sapiens
  CDR3 for beta chain variable domain of TCR clone 388634 (TRBV7-3, TRBJ1-1)
CASSQDWGAEAFF

SEQ ID NO: 777269 - protein, 14 aa, Homo sapiens
  CDR3 for alpha chain variable domain of TCR clone 388635 (TRAV1-2, TRAJ8)
CDVREDTGFQKLVF

SEQ ID NO: 777270 - protein, 14 aa, Homo sapiens
  CDR3 for beta chain variable domain of TCR clone 388635 (TRBV15, TRBJ2-3)
CATRSGTSTDTQYF

SEQ ID NO: 777271 - protein, 13 aa, Homo sapiens
  CDR3 for alpha chain variable domain of TCR clone 388636 (TRAV27, TRAJ41)
CAGEGNSGYALNF

SEQ ID NO: 777272 - protein, 14 aa, Homo sapiens
  CDR3 for beta chain variable domain of TCR clone 388636 (TRBV7-2, TRBJ1-1)
CASSFLTGRTEAFF

SEQ ID NO: 777273 - protein, 14 aa, Homo sapiens
  CDR3 for alpha chain variable domain of TCR clone 388637 (TRAV12-2, TRAJ17)
CAVLFKAAGNKQTF

SEQ ID NO: 777274 - protein, 17 aa, Homo sapiens
  CDR3 for beta chain variable domain of TCR clone 388637 (TRBV20-1, TRBJ2-2)
CSTSGSGQGGLTGELFF

SEQ ID NO: 777275 - protein, 15 aa, Homo sapiens
  CDR3 for alpha chain variable domain of TCR clone 388638 (TRAV3, TRAJ20)
CAVRDIKLSDYKLSF

SEQ ID NO: 777276 - protein, 13 aa, Homo sapiens
  CDR3 for beta chain variable domain of TCR clone 388638 (TRBV19, TRBJ2-7)
CASRKAGGSEQYF

SEQ ID NO: 777277 - protein, 14 aa, Homo sapiens
  CDR3 for alpha chain variable domain of TCR clone 388639 (TRAV8-3, TRAJ27)
CAGGRNTNAGTSTI

SEQ ID NO: 777278 - protein, 15 aa, Homo sapiens
  CDR3 for beta chain variable domain of TCR clone 388639 (TRBV11-3, TRBJ2-5)
CASSLRGRVQETQYF

SEQ ID NO: 777279 - protein, 16 aa, Homo sapiens
  CDR3 for alpha chain variable domain of TCR clone 388640 (TRAV1-2, TRAJ10)
CAVRGVLTGGGNKLTF

SEQ ID NO: 777280 - protein, 14 aa, Homo sapiens
  CDR3 for beta chain variable domain of TCR clone 388640 (TRBV7-8, TRBJ2-3)
CASSLDRGTDTQYF

SEQ ID NO: 777281 - protein, 18 aa, Homo sapiens
  CDR3 for alpha chain variable domain of TCR clone 388641 (TRAV26-2, TRAJ54)
CILRDVEVGIEGAQKLVF

SEQ ID NO: 777282 - protein, 15 aa, Homo sapiens
  CDR3 for beta chain variable domain of TCR clone 388641 (TRBV29-1, TRBJ2-1)
CSVPTGLALYNEQFF

SEQ ID NO: 777283 - protein, 12 aa, Homo sapiens
  CDR3 for alpha chain variable domain of TCR clone 388642 (TRAV12-3, TRAJ40)
CAMSSGTYKYLF

SEQ ID NO: 777284 - protein, 15 aa, Homo sapiens
  CDR3 for beta chain variable domain of TCR clone 388642 (TRBV7-3, TRBJ2-2)
CASSETGQGTGELFF

SEQ ID NO: 777285 - protein, 12 aa, Homo sapiens
  CDR3 for alpha chain variable domain of TCR clone 388643 (TRAV13-1, TRAJ49)
CAAPNTGNQFYF

SEQ ID NO: 777286 - protein, 17 aa, Homo sapiens
  CDR3 for beta chain variable domain of TCR clone 388643 (TRBV25-1, TRBJ2-7)
CASSGARVVFASYEQYF

SEQ ID NO: 777287 - protein, 15 aa, Homo sapiens
  CDR3 for alpha chain variable domain of TCR clone 388644 (TRAV26-1, TRAJ23)
CIVRVAGYQGGKLIF

SEQ ID NO: 777288 - protein, 18 aa, Homo sapiens
  CDR3 for beta chain variable domain of TCR clone 388644 (TRBV28, TRBJ2-1)
CASSSTSRRANSYNEQFF

SEQ ID NO: 777289 - protein, 11 aa, Homo sapiens
  CDR3 for alpha chain variable domain of TCR clone 388645 (TRAV12-1, TRAJ43)
CVEYDNNDMRF

SEQ ID NO: 777290 - protein, 15 aa, Homo sapiens
  CDR3 for beta chain variable domain of TCR clone 388645 (TRBV11-3, TRBJ2-3)
CASLKDGREGDTQYF

SEQ ID NO: 777291 - protein, 16 aa, Homo sapiens
  CDR3 for alpha chain variable domain of TCR clone 388646 (TRAV20, TRAJ26)
CAVQHRRDNYGQNFVF

SEQ ID NO: 777292 - protein, 13 aa, Homo sapiens
  CDR3 for beta chain variable domain of TCR clone 388646 (TRBV10-3, TRBJ2-7)
CASKLAVNYEQYF

SEQ ID NO: 777293 - protein, 15 aa, Homo sapiens
  CDR3 for alpha chain variable domain of TCR clone 388647 (TRAV17, TRAJ57)
CATGPSQGGSEKRFF

SEQ ID NO: 777294 - protein, 14 aa, Homo sapiens
  CDR3 for beta chain variable domain of TCR clone 388647 (TRBV11-2, TRBJ1-2)
CASSLYRGNYGYTF

SEQ ID NO: 777295 - protein, 16 aa, Homo sapiens
  CDR3 for alpha chain variable domain of TCR clone 388648 (TRAV20, TRAJ22)
CAVQASSSGSARQLTF

SEQ ID NO: 777296 - protein, 13 aa, Homo sapiens
  CDR3 for beta chain variable domain of TCR clone 388648 (TRBV7-2, TRBJ2-5)
CASSQTSVEARYF

SEQ ID NO: 777297 - protein, 13 aa, Homo sapiens
  CDR3 for alpha chain variable domain of TCR clone 388649 (TRAV13-2, TRAJ48)
CAEMDFVNEKLTF

SEQ ID NO: 777298 - protein, 16 aa, Homo sapiens
  CDR3 for beta chain variable domain of TCR clone 388649 (TRBV27, TRBJ2-2)
CASSFRGLVRTGELFF

SEQ ID NO: 777299 - protein, 13 aa, Homo sapiens
  CDR3 for alpha chain variable domain of TCR clone 388650 (TRAV20, TRAJ31)
CAVQAIGGARLMF

SEQ ID NO: 777300 - protein, 16 aa, Homo sapiens
  CDR3 for beta chain variable domain of TCR clone 388650 (TRBV6-1, TRBJ2-5)
CASSETLDRGAETQYF

SEQ ID NO: 777301 - protein, 13 aa, Homo sapiens
  CDR3 for alpha chain variable domain of TCR clone 388651 (TRAV38-2/DV8, TRAJ34)
CAYRTWNTDKLIF

SEQ ID NO: 777302 - protein, 16 aa, Homo sapiens
  CDR3 for beta chain variable domain of TCR clone 388651 (TRBV20-1, TRBJ1-4)
CSAPGQGLLTNEKLFF

SEQ ID NO: 777303 - protein, 15 aa, Homo sapiens
  CDR3 for alpha chain variable domain of TCR clone 388652 (TRAV3, TRAJ20)
CAVIDIKLSDYKLSF

SEQ ID NO: 777304 - protein, 15 aa, Homo sapiens
  CDR3 for beta chain variable domain of TCR clone 388652 (TRBV7-9, TRBJ1-6)
CASSSPGRGNSPLHF

SEQ ID NO: 777305 - protein, 15 aa, Homo sapiens
  CDR3 for alpha chain variable domain of TCR clone 388653 (TRAV8-2, TRAJ24)
CVVSDRTDSWGKLQF

SEQ ID NO: 777306 - protein, 13 aa, Homo sapiens
  CDR3 for beta chain variable domain of TCR clone 388653 (TRBV7-9, TRBJ1-2)
CASSLKQNYGYTL

SEQ ID NO: 777307 - protein, 12 aa, Homo sapiens
  CDR3 for alpha chain variable domain of TCR clone 388654 (TRAV13-2, TRAJ23)
CAERHRGGKLIF

SEQ ID NO: 777308 - protein, 13 aa, Homo sapiens
  CDR3 for beta chain variable domain of TCR clone 388654 (TRBV15, TRBJ1-6)
CATSGGLNSSLHF

SEQ ID NO: 777309 - protein, 12 aa, Homo sapiens
  CDR3 for alpha chain variable domain of TCR clone 388655 (TRAV13-1, TRAJ21)
CAAKECFNKFYF

SEQ ID NO: 777310 - protein, 15 aa, Homo sapiens
  CDR3 for beta chain variable domain of TCR clone 388655 (TRBV2, TRBJ2-7)
CASSEGPARSYEQYF

SEQ ID NO: 777311 - protein, 14 aa, Homo sapiens
  CDR3 for alpha chain variable domain of TCR clone 388656 (TRAV12-3, TRAJ10)
SHLPLTGGGNKLTF

SEQ ID NO: 777312 - protein, 14 aa, Homo sapiens
  CDR3 for beta chain variable domain of TCR clone 388656 (TRBV5-1, TRBJ2-3)
CASRGQTSTDTQYF

SEQ ID NO: 777313 - protein, 14 aa, Homo sapiens
  CDR3 for alpha chain variable domain of TCR clone 388657 (TRAV26-1, TRAJ38)
CIADNACNNRKLIW

SEQ ID NO: 777314 - protein, 14 aa, Homo sapiens
  CDR3 for beta chain variable domain of TCR clone 388657 (TRBV20-1, TRBJ1-1)
CSAQTRIGGTEAFF

SEQ ID NO: 777315 - protein, 15 aa, Homo sapiens
  CDR3 for alpha chain variable domain of TCR clone 388658 (TRAV2, TRAJ9)
CAVEDRGTGGFKTIF

SEQ ID NO: 777316 - protein, 15 aa, Homo sapiens
  CDR3 for beta chain variable domain of TCR clone 388658 (TRBV6-1, TRBJ2-2)
CASSAGQGYTGELFF

SEQ ID NO: 777317 - protein, 16 aa, Homo sapiens
  CDR3 for alpha chain variable domain of TCR clone 388659 (TRAV3, TRAJ10)
CAVRDMRAGGGNELTF

SEQ ID NO: 777318 - protein, 12 aa, Homo sapiens
  CDR3 for beta chain variable domain of TCR clone 388659 (TRBV11-2, TRBJ2-1)
CASSPGNNEQFF

SEQ ID NO: 777319 - protein, 13 aa, Homo sapiens
  CDR3 for alpha chain variable domain of TCR clone 388660 (TRAV2, TRAJ40)
CAVVTSGTYKYIF

SEQ ID NO: 777320 - protein, 17 aa, Homo sapiens
  CDR3 for beta chain variable domain of TCR clone 388660 (TRBV3-1, TRBJ2-1)
CASSQGPLGTSENEQFF

SEQ ID NO: 777321 - protein, 15 aa, Homo sapiens
  CDR3 for alpha chain variable domain of TCR clone 388661 (TRAV12-3, TRAJ6)
CAMSATTGGSYIPTF

SEQ ID NO: 777322 - protein, 16 aa, Homo sapiens
  CDR3 for beta chain variable domain of TCR clone 388661 (TRBV28, TRBJ1-1)
CASSSGGQPVATEAFF

SEQ ID NO: 777323 - protein, 16 aa, Homo sapiens
  CDR3 for alpha chain variable domain of TCR clone 388662 (TRAV14/DV4, TRAJ20)
CAMREGRSRDDYKLSF

SEQ ID NO: 777324 - protein, 13 aa, Homo sapiens
  CDR3 for beta chain variable domain of TCR clone 388662 (TRBV10-3, TRBJ2-7)
CASKLAVNYEQYF

SEQ ID NO: 777325 - protein, 15 aa, Homo sapiens
  CDR3 for alpha chain variable domain of TCR clone 388663 (TRAV12-1, TRAJ44)
CVVFVNTGTASKLTF

SEQ ID NO: 777326 - protein, 15 aa, Homo sapiens
  CDR3 for beta chain variable domain of TCR clone 388663 (TRBV12-4, TRBJ2-5)
CASTLNSGRGETQYF

SEQ ID NO: 777327 - protein, 15 aa, Homo sapiens
  CDR3 for alpha chain variable domain of TCR clone 388664 (TRAV25, TRAJ17)
CRNLLLQAAGNKLTF

SEQ ID NO: 777328 - protein, 13 aa, Homo sapiens
  CDR3 for beta chain variable domain of TCR clone 388664 (TRBV6-5, TRBJ2-2)
CASSLPGVGELFF

SEQ ID NO: 777329 - protein, 13 aa, Homo sapiens
  CDR3 for alpha chain variable domain of TCR clone 388665 (TRAV13-1, TRAJ10)
CAATAGGGNKLTF

SEQ ID NO: 777330 - protein, 13 aa, Homo sapiens
  CDR3 for beta chain variable domain of TCR clone 388665 (TRBV7-3, TRBJ2-1)
CASSPVAYNEQFF

SEQ ID NO: 777331 - protein, 15 aa, Homo sapiens
  CDR3 for alpha chain variable domain of TCR clone 388666 (TRAV12-3, TRAJ6)
CAMSATTGGSYIPTF

SEQ ID NO: 777332 - protein, 19 aa, Homo sapiens
  CDR3 for beta chain variable domain of TCR clone 388666 (TRBV25-1, TRBJ2-2)
CAILVYRVDRGRKTGELFF

SEQ ID NO: 777333 - protein, 15 aa, Homo sapiens
  CDR3 for alpha chain variable domain of TCR clone 388667 (TRAV21, TRAJ57)
CAVIITQGGSDKLVF

SEQ ID NO: 777334 - protein, 14 aa, Homo sapiens
  CDR3 for beta chain variable domain of TCR clone 388667 (TRBV5-1, TRBJ2-2)
CASSLIWIPGELFF

SEQ ID NO: 777335 - protein, 12 aa, Homo sapiens
  CDR3 for alpha chain variable domain of TCR clone 388668 (TRAV12-3, TRAJ20)
CAMVRGDYKLSF

SEQ ID NO: 777336 - protein, 22 aa, Homo sapiens
  CDR3 for beta chain variable domain of TCR clone 388668 (TRBV5-5, TRBJ2-7)
CASSQRGGREGILRAVLRAGHQ

SEQ ID NO: 777337 - protein, 15 aa, Homo sapiens
  CDR3 for alpha chain variable domain of TCR clone 388669 (TRAV35, TRAJ40)
CAWQLGTSGAYKYIF

SEQ ID NO: 777338 - protein, 14 aa, Homo sapiens
  CDR3 for beta chain variable domain of TCR clone 388669 (TRBV7-3, TRBJ2-1)
CASSLAGGTNEQFF

SEQ ID NO: 777339 - protein, 17 aa, Homo sapiens
  CDR3 for alpha chain variable domain of TCR clone 388670 (TRAV3, TRAJ42)
CAGRDRDYGGSQGNLIF

SEQ ID NO: 777340 - protein, 12 aa, Homo sapiens
  CDR3 for beta chain variable domain of TCR clone 388670 (TRBV11-2, TRBJ2-1)
CASSPGNNEQFF

SEQ ID NO: 777341 - protein, 17 aa, Homo sapiens
  CDR3 for alpha chain variable domain of TCR clone 388671 (TRAV23/DV6, TRAJ57)
CAASYTLSQGGSEKLVF

SEQ ID NO: 777342 - protein, 14 aa, Homo sapiens
  CDR3 for beta chain variable domain of TCR clone 388671 (TRBV7-3, TRBJ1-1)
CASSLKGGNTEAFF

SEQ ID NO: 777343 - protein, 15 aa, Homo sapiens
  CDR3 for alpha chain variable domain of TCR clone 388672 (TRAV38-1, TRAJ57)
CAFMDSKGGSEKLVF

SEQ ID NO: 777344 - protein, 16 aa, Homo sapiens
  CDR3 for beta chain variable domain of TCR clone 388672 (TRBV10-3, TRBJ2-1)
CAIRGGGRGDYNEQFF

SEQ ID NO: 777345 - protein, 14 aa, Homo sapiens
  CDR3 for alpha chain variable domain of TCR clone 388673 (TRAV35, TRAJ42)
CAGRYVGSKGNLIF

SEQ ID NO: 777346 - protein, 15 aa, Homo sapiens
  CDR3 for beta chain variable domain of TCR clone 388673 (TRBV7-9, TRBJ2-1)
CASSLGWGRANEQFF

SEQ ID NO: 777347 - protein, 13 aa, Homo sapiens
  CDR3 for alpha chain variable domain of TCR clone 388674 (TRAV12-3, TRAJ13)
CAMYSGGYQKVTF

SEQ ID NO: 777348 - protein, 16 aa, Homo sapiens
  CDR3 for beta chain variable domain of TCR clone 388674 (TRBV12-5, TRBJ2-5)
CASGPRTSGNQETQYF

SEQ ID NO: 777349 - protein, 14 aa, Homo sapiens
  CDR3 for alpha chain variable domain of TCR clone 388675 (TRAV27, TRAJ12)
CAGARMDSSYKLIF

SEQ ID NO: 777350 - protein, 18 aa, Homo sapiens
  CDR3 for beta chain variable domain of TCR clone 388675 (TRBV10-3, TRBJ2-7)
CGISESGRPSGGRVEQYF

SEQ ID NO: 777351 - protein, 18 aa, Homo sapiens
  CDR3 for alpha chain variable domain of TCR clone 388676 (TRAV1-2, TRAJ18)
CAVRDMGDRGSTLGRLYF

SEQ ID NO: 777352 - protein, 16 aa, Homo sapiens
  CDR3 for beta chain variable domain of TCR clone 388676 (TRBV29-1, TRBJ1-2)
CSVEANRDIANYGYTS

SEQ ID NO: 777353 - protein, 13 aa, Homo sapiens
  CDR3 for alpha chain variable domain of TCR clone 388677 (TRAV17, TRAJ26)
CATVDNYGQNFVF

SEQ ID NO: 777354 - protein, 14 aa, Homo sapiens
  CDR3 for beta chain variable domain of TCR clone 388677 (TRBV19, TRBJ2-5)
CASSTTGQQETQYF

SEQ ID NO: 777355 - protein, 13 aa, Homo sapiens
  CDR3 for alpha chain variable domain of TCR clone 388678 (TRAV27, TRAJ54)
CAGAGQGSQKLVF

SEQ ID NO: 777356 - protein, 15 aa, Homo sapiens
  CDR3 for beta chain variable domain of TCR clone 388678 (TRBV18, TRBJ2-6)
CASSPSYAGANVLTF

SEQ ID NO: 777357 - protein, 15 aa, Homo sapiens
  CDR3 for alpha chain variable domain of TCR clone 388679 (TRAV3, TRAJ5)
CAVRDLYTGRRALTF

SEQ ID NO: 777358 - protein, 17 aa, Homo sapiens
  CDR3 for beta chain variable domain of TCR clone 388679 (TRBV7-2, TRBJ2-3)
CASSARSSGSPTDTQYF

SEQ ID NO: 777359 - protein, 14 aa, Homo sapiens
  CDR3 for alpha chain variable domain of TCR clone 388680 (TRAV2, TRAJ9)
CAVDDRSGGFKTIF

SEQ ID NO: 777360 - protein, 16 aa, Homo sapiens
  CDR3 for beta chain variable domain of TCR clone 388680 (TRBV7-3, TRBJ2-1)
CASSLEGYRSYNEQFF

SEQ ID NO: 777361 - protein, 14 aa, Homo sapiens
  CDR3 for alpha chain variable domain of TCR clone 388681 (TRAV1-2, TRAJ16)
CAVNRFSDGQKLLF

SEQ ID NO: 777362 - protein, 15 aa, Homo sapiens
  CDR3 for beta chain variable domain of TCR clone 388681 (TRBV2, TRBJ2-1)
CARSEEREGDNEQFF

SEQ ID NO: 777363 - protein, 14 aa, Homo sapiens
  CDR3 for alpha chain variable domain of TCR clone 388682 (TRAV2, TRAJ3)
CAVPPYSSASKIIF

SEQ ID NO: 777364 - protein, 14 aa, Homo sapiens
  CDR3 for beta chain variable domain of TCR clone 388682 (TRBV12-5, TRBJ2-5)
CASGSRTHQETQYF

SEQ ID NO: 777365 - protein, 12 aa, Homo sapiens
  CDR3 for alpha chain variable domain of TCR clone 388683 (TRAV12-2, TRAJ21)
CAVRYNFNKFYF

SEQ ID NO: 777366 - protein, 14 aa, Homo sapiens
  CDR3 for beta chain variable domain of TCR clone 388683 (TRBV28, TRBJ2-1)
CARRYYTAYNEQFF

SEQ ID NO: 777367 - protein, 14 aa, Homo sapiens
  CDR3 for alpha chain variable domain of TCR clone 388684 (TRAV12-2, TRAJ17)
CAVLFKDAGNKLTF

SEQ ID NO: 777368 - protein, 12 aa, Homo sapiens
  CDR3 for beta chain variable domain of TCR clone 388684 (TRBV11-2, TRBJ2-2)
CASSLGGGELFF

SEQ ID NO: 777369 - protein, 12 aa, Homo sapiens
  CDR3 for alpha chain variable domain of TCR clone 388685 (TRAV26-1, TRAJ36)
CIVRVRADNLFF

SEQ ID NO: 777370 - protein, 17 aa, Homo sapiens
  CDR3 for beta chain variable domain of TCR clone 388685 (TRBV13, TRBJ2-3)
CASSLSRVAGGRNTQYF

SEQ ID NO: 777371 - protein, 13 aa, Homo sapiens
  CDR3 for alpha chain variable domain of TCR clone 388686 (TRAV21, TRAJ27)
CAARPGNAGKSTF

SEQ ID NO: 777372 - protein, 13 aa, Homo sapiens
  CDR3 for beta chain variable domain of TCR clone 388686 (TRBV28, TRBJ2-7)
CASKAGGVYEQYF

SEQ ID NO: 777373 - protein, 17 aa, Homo sapiens
  CDR3 for alpha chain variable domain of TCR clone 388687 (TRAV13-2, TRAJ10)
EASNTVILTGGGNKLTF

SEQ ID NO: 777374 - protein, 16 aa, Homo sapiens
  CDR3 for beta chain variable domain of TCR clone 388687 (TRBV19, TRBJ1-1)
CASGFGGPVTGTEAFF

SEQ ID NO: 777375 - protein, 13 aa, Homo sapiens
  CDR3 for alpha chain variable domain of TCR clone 388688 (TRAV8-1, TRAJ13)
CAVSKGGYQKGTF

SEQ ID NO: 777376 - protein, 18 aa, Homo sapiens
  CDR3 for beta chain variable domain of TCR clone 388688 (TRBV11-2, TRBJ2-7)
CASSWRTVQTGQSYEQYF

SEQ ID NO: 777377 - protein, 11 aa, Homo sapiens
  CDR3 for alpha chain variable domain of TCR clone 388689 (TRAV20, TRAJ23)
CACNQGGKLIF

SEQ ID NO: 777378 - protein, 16 aa, Homo sapiens
  CDR3 for beta chain variable domain of TCR clone 388689 (TRBV7-8, TRBJ2-5)
CASSFGGQPAQEAQYF

SEQ ID NO: 777379 - protein, 17 aa, Homo sapiens
  CDR3 for alpha chain variable domain of TCR clone 388690 (TRAV23/DV6, TRAJ57)
CAASSTLSQGGSEKLVF

SEQ ID NO: 777380 - protein, 15 aa, Homo sapiens
  CDR3 for beta chain variable domain of TCR clone 388690 (TRBV27, TRBJ1-4)
CASSAQQDLNDKLFF

SEQ ID NO: 777381 - protein, 13 aa, Homo sapiens
  CDR3 for alpha chain variable domain of TCR clone 388691 (TRAV8-3, TRAJ21)
CAVGAYNFNKFYF

SEQ ID NO: 777382 - protein, 16 aa, Homo sapiens
  CDR3 for beta chain variable domain of TCR clone 388691 (TRBV19, TRBJ2-1)
CASSMGGGSYYNEQFF

SEQ ID NO: 777383 - protein, 14 aa, Homo sapiens
  CDR3 for alpha chain variable domain of TCR clone 388692 (TRAV23/DV6, TRAJ11)
CASSLESGYSTLTF

SEQ ID NO: 777384 - protein, 13 aa, Homo sapiens
  CDR3 for beta chain variable domain of TCR clone 388692 (TRBV4-1, TRBJ2-5)
CASSLTRGETQYF

SEQ ID NO: 777385 - protein, 14 aa, Homo sapiens
  CDR3 for alpha chain variable domain of TCR clone 388693 (TRAV16, TRAJ17)
CAPRVKAAGNKLTF

SEQ ID NO: 777386 - protein, 17 aa, Homo sapiens
  CDR3 for beta chain variable domain of TCR clone 388693 (TRBV7-2, TRBJ2-3)
CASSSYSGTRRADTQYF

SEQ ID NO: 777387 - protein, 14 aa, Homo sapiens
  CDR3 for alpha chain variable domain of TCR clone 388694 (TRAV1-2, TRAJ16)
CAVNRFSDGQKLLF

SEQ ID NO: 777388 - protein, 16 aa, Homo sapiens
  CDR3 for beta chain variable domain of TCR clone 388694 (TRBV28, TRBJ2-5)
CQQHAEGDALQETLYF

SEQ ID NO: 777389 - protein, 14 aa, Homo sapiens
  CDR3 for alpha chain variable domain of TCR clone 388695 (TRAV12-2, TRAJ40)
CAVKIPSGTYKYIF

SEQ ID NO: 777390 - protein, 17 aa, Homo sapiens
  CDR3 for beta chain variable domain of TCR clone 388695 (TRBV13, TRBJ2-3)
CASSSLGTSGLTDTQYF

SEQ ID NO: 777391 - protein, 17 aa, Homo sapiens
  CDR3 for alpha chain variable domain of TCR clone 388696 (TRAV26-2, TRAJ42)
CILRDVGYGGSQGNLIF

SEQ ID NO: 777392 - protein, 16 aa, Homo sapiens
  CDR3 for beta chain variable domain of TCR clone 388696 (TRBV15, TRBJ2-6)
CATSVNGGFLANVLTF

SEQ ID NO: 777393 - protein, 16 aa, Homo sapiens
  CDR3 for alpha chain variable domain of TCR clone 388697 (TRAV12-3, TRAJ53)
CAMSPGSGGSNYKLTV

SEQ ID NO: 777394 - protein, 13 aa, Homo sapiens
  CDR3 for beta chain variable domain of TCR clone 388697 (TRBV10-3, TRBJ2-7)
CASKLAVNYEQYF

SEQ ID NO: 777395 - protein, 17 aa, Homo sapiens
  CDR3 for alpha chain variable domain of TCR clone 388698 (TRAV14/DV4, TRAJ28)
CAMREVSSGAGSYQLTF

SEQ ID NO: 777396 - protein, 15 aa, Homo sapiens
  CDR3 for beta chain variable domain of TCR clone 388698 (TRBV11-2, TRBJ1-6)
CASTIRETGNSPLHF

SEQ ID NO: 777397 - protein, 14 aa, Homo sapiens
  CDR3 for alpha chain variable domain of TCR clone 388699 (TRAV12-3, TRAJ10)
SHLPLTGGGNKLTF

SEQ ID NO: 777398 - protein, 13 aa, Homo sapiens
  CDR3 for beta chain variable domain of TCR clone 388699 (TRBV19, TRBJ1-5)
CASSIGGEQQQHF

SEQ ID NO: 777399 - protein, 11 aa, Homo sapiens
  CDR3 for alpha chain variable domain of TCR clone 388700 (TRAV21, TRAJ34)
CAHYNTDKLIF

SEQ ID NO: 777400 - protein, 11 aa, Homo sapiens
  CDR3 for beta chain variable domain of TCR clone 388700 (TRBV29-1, TRBJ2-5)
CSEDWTGTQYF

SEQ ID NO: 777401 - protein, 14 aa, Homo sapiens
  CDR3 for alpha chain variable domain of TCR clone 388701 (TRAV17, TRAJ40)
CATALTSGTYKYIF

SEQ ID NO: 777402 - protein, 13 aa, Homo sapiens
  CDR3 for beta chain variable domain of TCR clone 388701 (TRBV27, TRBJ2-1)
CASSSGSYNEEFF

SEQ ID NO: 777403 - protein, 13 aa, Homo sapiens
  CDR3 for alpha chain variable domain of TCR clone 388702 (TRAV1-2, TRAJ20)
CAVRDGNDYKLSF

SEQ ID NO: 777404 - protein, 14 aa, Homo sapiens
  CDR3 for beta chain variable domain of TCR clone 388702 (TRBV7-2, TRBJ2-3)
CQQLRGGERDTQYF

SEQ ID NO: 777405 - protein, 15 aa, Homo sapiens
  CDR3 for alpha chain variable domain of TCR clone 388703 (TRAV4, TRAJ39)
CPVGPNNNAGNMLTF

SEQ ID NO: 777406 - protein, 13 aa, Homo sapiens
  CDR3 for beta chain variable domain of TCR clone 388703 (TRBV11-2, TRBJ2-7)
CASSSTGEETQYF

SEQ ID NO: 777407 - protein, 13 aa, Homo sapiens
  CDR3 for alpha chain variable domain of TCR clone 388704 (TRAV36/DV7, TRAJ53)
CALSGRSNYKLTF

SEQ ID NO: 777408 - protein, 13 aa, Homo sapiens
  CDR3 for beta chain variable domain of TCR clone 388704 (TRBV28, TRBJ2-4)
CASSQSSKNIQYF

SEQ ID NO: 777409 - protein, 15 aa, Homo sapiens
  CDR3 for alpha chain variable domain of TCR clone 388705 (TRAV23/DV6, TRAJ18)
CAARYRGSTLGRLYF

SEQ ID NO: 777410 - protein, 14 aa, Homo sapiens
  CDR3 for beta chain variable domain of TCR clone 388705 (TRBV7-2, TRBJ1-2)
CASSSQGAHYGYTF

SEQ ID NO: 777411 - protein, 14 aa, Homo sapiens
  CDR3 for alpha chain variable domain of TCR clone 388706 (TRAV9-2, TRAJ57)
CALSPNSGSEKLVF

SEQ ID NO: 777412 - protein, 13 aa, Homo sapiens
  CDR3 for beta chain variable domain of TCR clone 388706 (TRBV4-2, TRBJ1-1)
CASSQAGNTEAFF

SEQ ID NO: 777413 - protein, 16 aa, Homo sapiens
  CDR3 for alpha chain variable domain of TCR clone 388707 (TRAV30, TRAJ24)
CGTEMVDADSWGKFQF

SEQ ID NO: 777414 - protein, 17 aa, Homo sapiens
  CDR3 for beta chain variable domain of TCR clone 388707 (TRBV20-1, TRBJ2-1)
CSASSSGLAGSYNEQFF

SEQ ID NO: 777415 - protein, 12 aa, Homo sapiens
  CDR3 for alpha chain variable domain of TCR clone 388708 (TRAV13-1, TRAJ53)
CAAEGSNYKLTF

SEQ ID NO: 777416 - protein, 11 aa, Homo sapiens
  CDR3 for beta chain variable domain of TCR clone 388708 (TRBV2, TRBJ1-1)
CASREGTEAFF

SEQ ID NO: 777417 - protein, 14 aa, Homo sapiens
  CDR3 for alpha chain variable domain of TCR clone 388709 (TRAV23/DV6, TRAJ24)
CAASLSDSWGKLQF

SEQ ID NO: 777418 - protein, 16 aa, Homo sapiens
  CDR3 for beta chain variable domain of TCR clone 388709 (TRBV7-9, TRBJ2-6)
CASSVKGPLRANVLTF

SEQ ID NO: 777419 - protein, 15 aa, Homo sapiens
  CDR3 for alpha chain variable domain of TCR clone 388710 (TRAV17, TRAJ28)
CATVGSGAGSYQLTF

SEQ ID NO: 777420 - protein, 13 aa, Homo sapiens
  CDR3 for beta chain variable domain of TCR clone 388710 (TRBV4-2, TRBJ1-1)
CASSQAGNTEAFF

SEQ ID NO: 777421 - protein, 15 aa, Homo sapiens
  CDR3 for alpha chain variable domain of TCR clone 388711 (TRAV29/DV5, TRAJ29)
CAASERSSGNTPLVF

SEQ ID NO: 777422 - protein, 13 aa, Homo sapiens
  CDR3 for beta chain variable domain of TCR clone 388711 (TRBV19, TRBJ1-2)
CASIVPGQDGYTF

SEQ ID NO: 777423 - protein, 12 aa, Homo sapiens
  CDR3 for alpha chain variable domain of TCR clone 388712 (TRAV13-1, TRAJ53)
AASGGSNYKLTF

SEQ ID NO: 777424 - protein, 17 aa, Homo sapiens
  CDR3 for beta chain variable domain of TCR clone 388712 (TRBV15, TRBJ1-5)
CATSRAPPGTRNQPQHF

SEQ ID NO: 777425 - protein, 15 aa, Homo sapiens
  CDR3 for alpha chain variable domain of TCR clone 388713 (TRAV1-2, TRAJ12)
CDVIPEVDSSYKLIF

SEQ ID NO: 777426 - protein, 12 aa, Homo sapiens
  CDR3 for beta chain variable domain of TCR clone 388713 (TRBV11-3, TRBJ2-2)
CASSLPTGELFF

SEQ ID NO: 777427 - protein, 13 aa, Homo sapiens
  CDR3 for alpha chain variable domain of TCR clone 388714 (TRAV27, TRAJ45)
CRSSGGGADGLTF

SEQ ID NO: 777428 - protein, 19 aa, Homo sapiens
  CDR3 for beta chain variable domain of TCR clone 388714 (TRBV7-2, TRBJ2-3)
CASSFLSRNWGGGTDTQYF

SEQ ID NO: 777429 - protein, 16 aa, Homo sapiens
  CDR3 for alpha chain variable domain of TCR clone 388715 (TRAV8-4, TRAJ53)
CAVSGTGGGSNYKLTF

SEQ ID NO: 777430 - protein, 19 aa, Homo sapiens
  CDR3 for beta chain variable domain of TCR clone 388715 (TRBV7-2, TRBJ2-3)
CASSFLSRDWGGGTDTQYF

SEQ ID NO: 777431 - protein, 14 aa, Homo sapiens
  CDR3 for alpha chain variable domain of TCR clone 388716 (TRAV12-2, TRAJ17)
CAVLFKAAGNKLTF

SEQ ID NO: 777432 - protein, 17 aa, Homo sapiens
  CDR3 for beta chain variable domain of TCR clone 388716 (TRBV20-1, TRBJ2-2)
CSASGSGQGGLTGELIF

SEQ ID NO: 777433 - protein, 11 aa, Homo sapiens
  CDR3 for alpha chain variable domain of TCR clone 388717 (TRAV12-1, TRAJ42)
VKGGSQGNLIF

SEQ ID NO: 777434 - protein, 18 aa, Homo sapiens
  CDR3 for beta chain variable domain of TCR clone 388717 (TRBV11-2, TRBJ2-3)
CASSLGGASRGAPNTQYF

SEQ ID NO: 777435 - protein, 18 aa, Homo sapiens
  CDR3 for alpha chain variable domain of TCR clone 388718 (TRAV21, TRAJ52)
CAVRPSPSGGTSYGKLTF

SEQ ID NO: 777436 - protein, 15 aa, Homo sapiens
  CDR3 for beta chain variable domain of TCR clone 388718 (TRBV20-1, TRBJ2-5)
CSATPLTGDQETQYF

SEQ ID NO: 777437 - protein, 14 aa, Homo sapiens
  CDR3 for alpha chain variable domain of TCR clone 388719 (TRAV1-2, TRAJ16)
CAVNRFSDGQRLLF

SEQ ID NO: 777438 - protein, 13 aa, Homo sapiens
  CDR3 for beta chain variable domain of TCR clone 388719 (TRBV20-1, TRBJ1-1)
CSARLGQGTEAFF

SEQ ID NO: 777439 - protein, 14 aa, Homo sapiens
  CDR3 for alpha chain variable domain of TCR clone 388720 (TRAV8-4, TRAJ54)
CAVSEVLGAQKLVF

SEQ ID NO: 777440 - protein, 17 aa, Homo sapiens
  CDR3 for beta chain variable domain of TCR clone 388720 (TRBV4-1, TRBJ1-4)
RASSQEGPRGAEEKLFF

SEQ ID NO: 777441 - protein, 15 aa, Homo sapiens
  CDR3 for alpha chain variable domain of TCR clone 388721 (TRAV17, TRAJ57)
CATGPSQGGSEKLVF

SEQ ID NO: 777442 - protein, 16 aa, Homo sapiens
  CDR3 for beta chain variable domain of TCR clone 388721 (TRBV12-4, TRBJ1-5)
CTSSRPFGGPNQPQHF

SEQ ID NO: 777443 - protein, 18 aa, Homo sapiens
  CDR3 for alpha chain variable domain of TCR clone 388722 (TRAV29/DV5, TRAJ52)
CAAGFRGAGGTSYGKLTF

SEQ ID NO: 777444 - protein, 12 aa, Homo sapiens
  CDR3 for beta chain variable domain of TCR clone 388722 (TRBV7-2, TRBJ1-5)
CASSLWSQPQHF

SEQ ID NO: 777445 - protein, 11 aa, Homo sapiens
  CDR3 for alpha chain variable domain of TCR clone 388723 (TRAV21, TRAJ11)
CAVNGYSTLTF

SEQ ID NO: 777446 - protein, 16 aa, Homo sapiens
  CDR3 for beta chain variable domain of TCR clone 388723 (TRBV19, TRBJ2-1)
CASNKAGPSSYNEQFF

SEQ ID NO: 777447 - protein, 15 aa, Homo sapiens
  CDR3 for alpha chain variable domain of TCR clone 388724 (TRAV16, TRAJ12)
CSKWPLRDSSYKLIF

SEQ ID NO: 777448 - protein, 13 aa, Homo sapiens
  CDR3 for beta chain variable domain of TCR clone 388724 (TRBV4-2, TRBJ1-1)
CASSQAGNTEASF

SEQ ID NO: 777449 - protein, 14 aa, Homo sapiens
  CDR3 for alpha chain variable domain of TCR clone 388725 (TRAV1-2, TRAJ15)
CAVRDRQAGTALIF

SEQ ID NO: 777450 - protein, 14 aa, Homo sapiens
  CDR3 for beta chain variable domain of TCR clone 388725 (TRBV28, TRBJ2-7)
CASKPGPDLYEQYF

SEQ ID NO: 777451 - protein, 10 aa, Homo sapiens
  CDR3 for alpha chain variable domain of TCR clone 388726 (TRAV1-2, TRAJ20)
CALNDYKLRF

SEQ ID NO: 777452 - protein, 16 aa, Homo sapiens
  CDR3 for beta chain variable domain of TCR clone 388726 (TRBV20-1, TRBJ1-1)
CSARALTQGMNTEAFF

SEQ ID NO: 777453 - protein, 14 aa, Homo sapiens
  CDR3 for alpha chain variable domain of TCR clone 388727 (TRAV8-4, TRAJ8)
CAVSEDTGFQKLVF

SEQ ID NO: 777454 - protein, 15 aa, Homo sapiens
  CDR3 for beta chain variable domain of TCR clone 388727 (TRBV20-1, TRBJ2-7)
CSARDRVSGMDEQYF

SEQ ID NO: 777455 - protein, 14 aa, Homo sapiens
  CDR3 for alpha chain variable domain of TCR clone 388728 (TRAV1-2, TRAJ8)
CAVREDTGFQKLVF

SEQ ID NO: 777456 - protein, 16 aa, Homo sapiens
  CDR3 for beta chain variable domain of TCR clone 388728 (TRBV29-1, TRBJ2-6)
CSVEDITDSGANVLTF

SEQ ID NO: 777457 - protein, 16 aa, Homo sapiens
  CDR3 for alpha chain variable domain of TCR clone 388729 (TRAV13-1, TRAJ10)
CSAGYILTGGGNKLTF

SEQ ID NO: 777458 - protein, 15 aa, Homo sapiens
  CDR3 for beta chain variable domain of TCR clone 388729 (TRBV12-4, TRBJ2-7)
CASSQTGAISYEQYF

SEQ ID NO: 777459 - protein, 13 aa, Homo sapiens
  CDR3 for alpha chain variable domain of TCR clone 388730 (TRAV13-2, TRAJ22)
CRDPSGAARQLTL

SEQ ID NO: 777460 - protein, 15 aa, Homo sapiens
  CDR3 for beta chain variable domain of TCR clone 388730 (TRBV11-3, TRBJ2-1)
CASSLAGQTYNEQFF

SEQ ID NO: 777461 - protein, 12 aa, Homo sapiens
  CDR3 for alpha chain variable domain of TCR clone 388731 (TRAV12-3, TRAJ42)
CAPGGSQGNLIF

SEQ ID NO: 777462 - protein, 13 aa, Homo sapiens
  CDR3 for beta chain variable domain of TCR clone 388731 (TRBV5-7, TRBJ2-6)
CESTSSGANVLTF

SEQ ID NO: 777463 - protein, 18 aa, Homo sapiens
  CDR3 for alpha chain variable domain of TCR clone 388732 (TRAV29/DV5, TRAJ52)
CAAGFRGAGGTSYGKLTF

SEQ ID NO: 777464 - protein, 11 aa, Homo sapiens
  CDR3 for beta chain variable domain of TCR clone 388732 (TRBV7-3, TRBJ2-2)
CASSLKRDLVR

SEQ ID NO: 777465 - protein, 23 aa, Homo sapiens
  CDR3 for alpha chain variable domain of TCR clone 388733 (TRAV12-2, TRAJ36)
SLLIRDSQPSDSATLERANNLFF

SEQ ID NO: 777466 - protein, 13 aa, Homo sapiens
  CDR3 for beta chain variable domain of TCR clone 388733 (TRBV7-9, TRBJ1-2)
CASGLKQNYGYTF

SEQ ID NO: 777467 - protein, 19 aa, Homo sapiens
  CDR3 for alpha chain variable domain of TCR clone 388734 (TRAV2, TRAJ20)
ILQVREADAAVYRDCKLSF

SEQ ID NO: 777468 - protein, 13 aa, Homo sapiens
  CDR3 for beta chain variable domain of TCR clone 388734 (TRBV15, TRBJ1-6)
CATSVGLNSPLLF

SEQ ID NO: 777469 - protein, 12 aa, Homo sapiens
  CDR3 for alpha chain variable domain of TCR clone 388735 (TRAV12-3, TRAJ20)
CAMVRGDYKLSF

SEQ ID NO: 777470 - protein, 11 aa, Homo sapiens
  CDR3 for beta chain variable domain of TCR clone 388735 (TRBV10-3, TRBJ2-7)
CAISEGLEQYF

SEQ ID NO: 777471 - protein, 14 aa, Homo sapiens
  CDR3 for alpha chain variable domain of TCR clone 388736 (TRAV4, TRAJ15)
CLVGDDQAGTALIF

SEQ ID NO: 777472 - protein, 15 aa, Homo sapiens
  CDR3 for beta chain variable domain of TCR clone 388736 (TRBV7-3, TRBJ2-1)
CASSQRGGALIEQFF

SEQ ID NO: 777473 - protein, 11 aa, Homo sapiens
  CDR3 for alpha chain variable domain of TCR clone 388737 (TRAV2, TRAJ13)
CASGGYQKVTF

SEQ ID NO: 777474 - protein, 12 aa, Homo sapiens
  CDR3 for beta chain variable domain of TCR clone 388737 (TRBV19, TRBJ2-1)
CASSRQGAEQLF

SEQ ID NO: 777475 - protein, 13 aa, Homo sapiens
  CDR3 for alpha chain variable domain of TCR clone 388738 (TRAV13-1, TRAJ12)
CAASQASSYKLIF

SEQ ID NO: 777476 - protein, 15 aa, Homo sapiens
  CDR3 for beta chain variable domain of TCR clone 388738 (TRBV9, TRBJ1-6)
CASSVAGTGDSPLHF

SEQ ID NO: 777477 - protein, 14 aa, Homo sapiens
  CDR3 for alpha chain variable domain of TCR clone 388739 (TRAV26-2, TRAJ38)
CILYNAGNNRKLIW

SEQ ID NO: 777478 - protein, 14 aa, Homo sapiens
  CDR3 for beta chain variable domain of TCR clone 388739 (TRBV3-1, TRBJ1-1)
CAGSQGGRGSEAFF

SEQ ID NO: 777479 - protein, 13 aa, Homo sapiens
  CDR3 for alpha chain variable domain of TCR clone 388740 (TRAV8-3, TRAJ36)
CAVGATGANNLFF

SEQ ID NO: 777480 - protein, 15 aa, Homo sapiens
  CDR3 for beta chain variable domain of TCR clone 388740 (TRBV7-2, TRBJ1-2)
CPSSPRAGWNYGYTF

SEQ ID NO: 777481 - protein, 12 aa, Homo sapiens
  CDR3 for alpha chain variable domain of TCR clone 388741 (TRAV17, TRAJ12)
CATLRSSYKFTF

SEQ ID NO: 777482 - protein, 16 aa, Homo sapiens
  CDR3 for beta chain variable domain of TCR clone 388741 (TRBV28, TRBJ2-7)
CASSLFFETGGPEQYF

SEQ ID NO: 777483 - protein, 15 aa, Homo sapiens
  CDR3 for alpha chain variable domain of TCR clone 388742 (TRAV8-3, TRAJ11)
CAVGLLNSGYSTLTF

SEQ ID NO: 777484 - protein, 13 aa, Homo sapiens
  CDR3 for beta chain variable domain of TCR clone 388742 (TRBV20-1, TRBJ2-7)
CSATHTSGYEQYF

SEQ ID NO: 777485 - protein, 14 aa, Homo sapiens
  CDR3 for alpha chain variable domain of TCR clone 388743 (TRAV26-1, TRAJ40)
CIVRLLSGTYKYIF

SEQ ID NO: 777486 - protein, 12 aa, Homo sapiens
  CDR3 for beta chain variable domain of TCR clone 388743 (TRBV7-3, TRBJ1-1)
CASSHGGTEAFF

SEQ ID NO: 777487 - protein, 11 aa, Homo sapiens
  CDR3 for alpha chain variable domain of TCR clone 388744 (TRAV2, TRAJ33)
CAVESNYQLIW

SEQ ID NO: 777488 - protein, 15 aa, Homo sapiens
  CDR3 for beta chain variable domain of TCR clone 388744 (TRBV28, TRBJ2-3)
CAPTFRDWSTDTQYF

SEQ ID NO: 777489 - protein, 11 aa, Homo sapiens
  CDR3 for alpha chain variable domain of TCR clone 388745 (TRAV12-3, TRAJ43)
CAMSVSNNMRF

SEQ ID NO: 777490 - protein, 16 aa, Homo sapiens
  CDR3 for beta chain variable domain of TCR clone 388745 (TRBV20-1, TRBJ2-1)
CSARDSLGAVYNEQFL

SEQ ID NO: 777491 - protein, 12 aa, Homo sapiens
  CDR3 for alpha chain variable domain of TCR clone 388746 (TRAV12-3, TRAJ21)
CAMFNNFNKFYF

SEQ ID NO: 777492 - protein, 14 aa, Homo sapiens
  CDR3 for beta chain variable domain of TCR clone 388746 (TRBV28, TRBJ2-1)
CASSIQGTVGEQFV

SEQ ID NO: 777493 - protein, 16 aa, Homo sapiens
  CDR3 for alpha chain variable domain of TCR clone 388747 (TRAV20, TRAJ22)
CAVQASSSGSARQLTF

SEQ ID NO: 777494 - protein, 15 aa, Homo sapiens
  CDR3 for beta chain variable domain of TCR clone 388747 (TRBV10-3, TRBJ2-5)
CAIRPGDVDLGTQYF

SEQ ID NO: 777495 - protein, 17 aa, Homo sapiens
  CDR3 for alpha chain variable domain of TCR clone 388748 (TRAV26-1, TRAJ46)
IASSESEKKSRGDKLTF

SEQ ID NO: 777496 - protein, 16 aa, Homo sapiens
  CDR3 for beta chain variable domain of TCR clone 388748 (TRBV27, TRBJ2-2)
CASSFRGLVRTGELFF

SEQ ID NO: 777497 - protein, 14 aa, Homo sapiens
  CDR3 for alpha chain variable domain of TCR clone 388749 (TRAV9-2, TRAJ39)
CALYIYNAGNMLTF

SEQ ID NO: 777498 - protein, 15 aa, Homo sapiens
  CDR3 for beta chain variable domain of TCR clone 388749 (TRBV29-1, TRBJ2-6)
CGVGDRGSGANVLTF

SEQ ID NO: 777499 - protein, 14 aa, Homo sapiens
  CDR3 for alpha chain variable domain of TCR clone 388750 (TRAV12-2, TRAJ5)
CAVNRSTGRRANTF

SEQ ID NO: 777500 - protein, 12 aa, Homo sapiens
  CDR3 for beta chain variable domain of TCR clone 388750 (TRBV19, TRBJ1-5)
CASSIAQQPQHF

SEQ ID NO: 777501 - protein, 13 aa, Homo sapiens
  CDR3 for alpha chain variable domain of TCR clone 388751 (TRAV13-1, TRAJ5)
CAARVTGMRALTF

SEQ ID NO: 777502 - protein, 15 aa, Homo sapiens
  CDR3 for beta chain variable domain of TCR clone 388751 (TRBV7-9, TRBJ2-7)
CASSPGGGLTYEQYF

SEQ ID NO: 777503 - protein, 13 aa, Homo sapiens
  CDR3 for alpha chain variable domain of TCR clone 388752 (TRAV17, TRAJ9)
CATFLTGGVKTIF

SEQ ID NO: 777504 - protein, 16 aa, Homo sapiens
  CDR3 for beta chain variable domain of TCR clone 388752 (TRBV5-7, TRBJ1-4)
CASSPSGGLKTEKLFF

SEQ ID NO: 777505 - protein, 12 aa, Homo sapiens
  CDR3 for alpha chain variable domain of TCR clone 388753 (TRAV1-2, TRAJ33)
CAALDSNYHLIW

SEQ ID NO: 777506 - protein, 16 aa, Homo sapiens
  CDR3 for beta chain variable domain of TCR clone 388753 (TRBV6-4, TRBJ1-2)
CASSEAVGDPNYGYTF

SEQ ID NO: 777507 - protein, 18 aa, Homo sapiens
  CDR3 for alpha chain variable domain of TCR clone 388754 (TRAV12-3, TRAJ52)
CAMSVGGAGGTSYGKLTF

SEQ ID NO: 777508 - protein, 14 aa, Homo sapiens
  CDR3 for beta chain variable domain of TCR clone 388754 (TRBV27, TRBJ1-6)
CQQFRGGLGSPLHF

SEQ ID NO: 777509 - protein, 15 aa, Homo sapiens
  CDR3 for alpha chain variable domain of TCR clone 388755 (TRAV30, TRAJ32)
CSTEILGGATNKRIF

SEQ ID NO: 777510 - protein, 13 aa, Homo sapiens
  CDR3 for beta chain variable domain of TCR clone 388755 (TRBV6-3, TRBJ2-7)
CASSFSGGYEQYF

SEQ ID NO: 777511 - protein, 10 aa, Homo sapiens
  CDR3 for alpha chain variable domain of TCR clone 388756 (TRAV13-2, TRAJ43)
CAETSGDVRF

SEQ ID NO: 777512 - protein, 13 aa, Homo sapiens
  CDR3 for beta chain variable domain of TCR clone 388756 (TRBV24-1, TRBJ2-1)
CATRQGAGNEQFF

SEQ ID NO: 777513 - protein, 18 aa, Homo sapiens
  CDR3 for alpha chain variable domain of TCR clone 388757 (TRAV26-2, TRAJ45)
CILRLWGYSGGGADGLTF

SEQ ID NO: 777514 - protein, 17 aa, Homo sapiens
  CDR3 for beta chain variable domain of TCR clone 388757 (TRBV28, TRBJ2-3)
CAISPTPAGGRVDTQYF

SEQ ID NO: 777515 - protein, 19 aa, Homo sapiens
  CDR3 for alpha chain variable domain of TCR clone 388758 (TRAV3, TRAJ6)
CAVRDRNPIRSGGSYILTF

SEQ ID NO: 777516 - protein, 15 aa, Homo sapiens
  CDR3 for beta chain variable domain of TCR clone 388758 (TRBV18, TRBJ2-7)
CASSPTFMDSYEQYF

SEQ ID NO: 777517 - protein, 14 aa, Homo sapiens
  CDR3 for alpha chain variable domain of TCR clone 388759 (TRAV8-4, TRAJ16)
CAVSSVGRWPEAAL

SEQ ID NO: 777518 - protein, 15 aa, Homo sapiens
  CDR3 for beta chain variable domain of TCR clone 388759 (TRBV7-3, TRBJ1-6)
CASSLGRGAGSPLHF

SEQ ID NO: 777519 - protein, 11 aa, Homo sapiens
  CDR3 for alpha chain variable domain of TCR clone 388760 (TRAV4, TRAJ28)
CLVGDNRTETL

SEQ ID NO: 777520 - protein, 13 aa, Homo sapiens
  CDR3 for beta chain variable domain of TCR clone 388760 (TRBV20-1, TRBJ2-7)
CSATHTSGYEQYF

SEQ ID NO: 777521 - protein, 10 aa, Homo sapiens
  CDR3 for alpha chain variable domain of TCR clone 388761 (TRAV12-1, TRAJ43)
CVVNPHRFGA

SEQ ID NO: 777522 - protein, 14 aa, Homo sapiens
  CDR3 for beta chain variable domain of TCR clone 388761 (TRBV12-4, TRBJ1-1)
CASSLGTGGTEAFF

SEQ ID NO: 777523 - protein, 21 aa, Homo sapiens
  CDR3 for alpha chain variable domain of TCR clone 388762 (TRAV12-1, TRAJ32)
SSVIQPPTSMNYGGATKKLIF

SEQ ID NO: 777524 - protein, 15 aa, Homo sapiens
  CDR3 for beta chain variable domain of TCR clone 388762 (TRBV7-9, TRBJ2-2)
CASGPLDTFPGELFF

SEQ ID NO: 777525 - protein, 14 aa, Homo sapiens
  CDR3 for alpha chain variable domain of TCR clone 388763 (TRAV35, TRAJ24)
CAGPRRDSWGKLQF

SEQ ID NO: 777526 - protein, 12 aa, Homo sapiens
  CDR3 for beta chain variable domain of TCR clone 388763 (TRBV12-4, TRBJ2-3)
CVSSLGQDTLYF

SEQ ID NO: 777527 - protein, 15 aa, Homo sapiens
  CDR3 for alpha chain variable domain of TCR clone 388764 (TRAV17, TRAJ35)
CATAFVIGFGNVLHF

SEQ ID NO: 777528 - protein, 18 aa, Homo sapiens
  CDR3 for beta chain variable domain of TCR clone 388764 (TRBV11-2, TRBJ2-7)
CASSPLAGGRGTSSTSGR

SEQ ID NO: 777529 - protein, 16 aa, Homo sapiens
  CDR3 for alpha chain variable domain of TCR clone 388765 (TRAV3, TRAJ3)
CAVRDRAKSSASKIIF

SEQ ID NO: 777530 - protein, 13 aa, Homo sapiens
  CDR3 for beta chain variable domain of TCR clone 388765 (TRBV10-3, TRBJ2-7)
CASKLAVKYEQYF

SEQ ID NO: 777531 - protein, 20 aa, Homo sapiens
  CDR3 for alpha chain variable domain of TCR clone 388766 (TRAV26-1, TRAJ42)
CCVLLHRQTYYGGSQGNLIF

SEQ ID NO: 777532 - protein, 16 aa, Homo sapiens
  CDR3 for beta chain variable domain of TCR clone 388766 (TRBV7-3, TRBJ2-2)
CASSLKRGTLSGVLFF

SEQ ID NO: 777533 - protein, 14 aa, Homo sapiens
  CDR3 for alpha chain variable domain of TCR clone 388767 (TRAV12-1, TRAJ3)
CGAARSSSASKIIF

SEQ ID NO: 777534 - protein, 15 aa, Homo sapiens
  CDR3 for beta chain variable domain of TCR clone 388767 (TRBV7-2, TRBJ2-6)
CASSREGSGANVLTF

SEQ ID NO: 777535 - protein, 13 aa, Homo sapiens
  CDR3 for alpha chain variable domain of TCR clone 388768 (TRAV12-1, TRAJ40)
CVVPISRTYKYIF

SEQ ID NO: 777536 - protein, 13 aa, Homo sapiens
  CDR3 for beta chain variable domain of TCR clone 388768 (TRBV4-2, TRBJ1-1)
CASSQAGNTEAFF

SEQ ID NO: 777537 - protein, 14 aa, Homo sapiens
  CDR3 for alpha chain variable domain of TCR clone 388769 (TRAV8-3, TRAJ39)
CAVGANNTGNMLTF

SEQ ID NO: 777538 - protein, 13 aa, Homo sapiens
  CDR3 for beta chain variable domain of TCR clone 388769 (TRBV3-1, TRBJ2-5)
CASSPVLSETQYF

SEQ ID NO: 777539 - protein, 12 aa, Homo sapiens
  CDR3 for alpha chain variable domain of TCR clone 388770 (TRAV13-1, TRAJ21)
CAAKEGFNKVYF

SEQ ID NO: 777540 - protein, 15 aa, Homo sapiens
  CDR3 for beta chain variable domain of TCR clone 388770 (TRBV25-1, TRBJ1-4)
CASSPGDSTNEKLFF

SEQ ID NO: 777541 - protein, 11 aa, Homo sapiens
  CDR3 for alpha chain variable domain of TCR clone 388771 (TRAV1-2, TRAJ11)
CAVRGYSTLTF

SEQ ID NO: 777542 - protein, 15 aa, Homo sapiens
  CDR3 for beta chain variable domain of TCR clone 388771 (TRBV5-1, TRBJ2-2)
CASTIQGGDTGELFF

SEQ ID NO: 777543 - protein, 14 aa, Homo sapiens
  CDR3 for alpha chain variable domain of TCR clone 388772 (TRAV13-1, TRAJ9)
CAASALTGGFRTIF

SEQ ID NO: 777544 - protein, 16 aa, Homo sapiens
  CDR3 for beta chain variable domain of TCR clone 388772 (TRBV7-8, TRBJ2-4)
CASSAERTLAKNIQYF

SEQ ID NO: 777545 - protein, 14 aa, Homo sapiens
  CDR3 for alpha chain variable domain of TCR clone 388773 (TRAV8-3, TRAJ42)
CAVGAWGSQGNLIF

SEQ ID NO: 777546 - protein, 15 aa, Homo sapiens
  CDR3 for beta chain variable domain of TCR clone 388773 (TRBV29-1, TRBJ1-2)
CSVVLEAGSNYGYAF

SEQ ID NO: 777547 - protein, 15 aa, Homo sapiens
  CDR3 for alpha chain variable domain of TCR clone 388774 (TRAV2, TRAJ42)
CAVEGYGGSQGNLIF

SEQ ID NO: 777548 - protein, 14 aa, Homo sapiens
  CDR3 for beta chain variable domain of TCR clone 388774 (TRBV19, TRBJ2-5)
CASSMTGQQETQYF

SEQ ID NO: 777549 - protein, 17 aa, Homo sapiens
  CDR3 for alpha chain variable domain of TCR clone 388775 (TRAV8-6, TRAJ58)
CAVSSWVGETRGARLTF

SEQ ID NO: 777550 - protein, 14 aa, Homo sapiens
  CDR3 for beta chain variable domain of TCR clone 388775 (TRBV4-2, TRBJ2-1)
CASGLDRAYNEQFF

SEQ ID NO: 777551 - protein, 15 aa, Homo sapiens
  CDR3 for alpha chain variable domain of TCR clone 388776 (TRAV25, TRAJ52)
CAGRPGGTSYGKLTF

SEQ ID NO: 777552 - protein, 17 aa, Homo sapiens
  CDR3 for beta chain variable domain of TCR clone 388776 (TRBV7-8, TRBJ2-6)
CASGAGTGGAGANDLTF

SEQ ID NO: 777553 - protein, 17 aa, Homo sapiens
  CDR3 for alpha chain variable domain of TCR clone 388777 (TRAV12-2, TRAJ53)
CAPLTDSQEGSNYKLTF

SEQ ID NO: 777554 - protein, 16 aa, Homo sapiens
  CDR3 for beta chain variable domain of TCR clone 388777 (TRBV20-1, TRBJ2-3)
CRAVRDRGPIADTQYF

SEQ ID NO: 777555 - protein, 14 aa, Homo sapiens
  CDR3 for alpha chain variable domain of TCR clone 388778 (TRAV27, TRAJ23)
CAGISYNQGGKLIF

SEQ ID NO: 777556 - protein, 15 aa, Homo sapiens
  CDR3 for beta chain variable domain of TCR clone 388778 (TRBV19, TRBJ2-2)
CASSLNRGVTGELFF

SEQ ID NO: 777557 - protein, 22 aa, Homo sapiens
  CDR3 for alpha chain variable domain of TCR clone 388779 (TRAV27, TRAJ38)
CAARRNAGNNHIQNPDPAGYQL

SEQ ID NO: 777558 - protein, 12 aa, Homo sapiens
  CDR3 for beta chain variable domain of TCR clone 388779 (TRBV11-2, TRBJ2-2)
CASSLGGGELFF

SEQ ID NO: 777559 - protein, 12 aa, Homo sapiens
  CDR3 for alpha chain variable domain of TCR clone 388780 (TRAV17, TRAJ4)
CATDGGYNKLIF

SEQ ID NO: 777560 - protein, 16 aa, Homo sapiens
  CDR3 for beta chain variable domain of TCR clone 388780 (TRBV5-1, TRBJ2-2)
CASSSRTGGRTGELFF

SEQ ID NO: 777561 - protein, 14 aa, Homo sapiens
  CDR3 for alpha chain variable domain of TCR clone 388781 (TRAV1-2, TRAJ8)
CAGREDTGFQKLVF

SEQ ID NO: 777562 - protein, 12 aa, Homo sapiens
  CDR3 for beta chain variable domain of TCR clone 388781 (TRBV11-2, TRBJ2-2)
CASSLPTGELFF

SEQ ID NO: 777563 - protein, 12 aa, Homo sapiens
  CDR3 for alpha chain variable domain of TCR clone 388782 (TRAV21, TRAJ37)
CAVRGNTGKLIF

SEQ ID NO: 777564 - protein, 13 aa, Homo sapiens
  CDR3 for beta chain variable domain of TCR clone 388782 (TRBV7-3, TRBJ2-2)
CASSSTPTGELFF

SEQ ID NO: 777565 - protein, 15 aa, Homo sapiens
  CDR3 for alpha chain variable domain of TCR clone 388783 (TRAV3, TRAJ17)
CAVRDGPAVGNKLTF

SEQ ID NO: 777566 - protein, 12 aa, Homo sapiens
  CDR3 for beta chain variable domain of TCR clone 388783 (TRBV12-4, TRBJ2-1)
CASSPGRNEQFF

SEQ ID NO: 777567 - protein, 13 aa, Homo sapiens
  CDR3 for alpha chain variable domain of TCR clone 388784 (TRAV17, TRAJ40)
CAGALGGTYKYIL

SEQ ID NO: 777568 - protein, 16 aa, Homo sapiens
  CDR3 for beta chain variable domain of TCR clone 388784 (TRBV11-2, TRBJ1-2)
CASSLDTGGADYGYTF

SEQ ID NO: 777569 - protein, 14 aa, Homo sapiens
  CDR3 for alpha chain variable domain of TCR clone 388785 (TRAV8-1, TRAJ5)
CAVRTDTGRRALTF

SEQ ID NO: 777570 - protein, 15 aa, Homo sapiens
  CDR3 for beta chain variable domain of TCR clone 388785 (TRBV4-1, TRBJ2-7)
CASSQGRGGDLEQYF

SEQ ID NO: 777571 - protein, 12 aa, Homo sapiens
  CDR3 for alpha chain variable domain of TCR clone 388786 (TRAV13-2, TRAJ23)
CAERHRGGKLIF

SEQ ID NO: 777572 - protein, 15 aa, Homo sapiens
  CDR3 for beta chain variable domain of TCR clone 388786 (TRBV5-8, TRBJ2-2)
CASSLDRGATGELFF

SEQ ID NO: 777573 - protein, 14 aa, Homo sapiens
  CDR3 for alpha chain variable domain of TCR clone 388787 (TRAV1-2, TRAJ16)
CAVNRFSDGQRLLF

SEQ ID NO: 777574 - protein, 14 aa, Homo sapiens
  CDR3 for beta chain variable domain of TCR clone 388787 (TRBV11-1, TRBJ2-7)
CASSFRQGSYEQYF

SEQ ID NO: 777575 - protein, 16 aa, Homo sapiens
  CDR3 for alpha chain variable domain of TCR clone 388788 (TRAV3, TRAJ28)
RAVLPRSGAGSYQLTF

SEQ ID NO: 777576 - protein, 13 aa, Homo sapiens
  CDR3 for beta chain variable domain of TCR clone 388788 (TRBV12-4, TRBJ2-5)
CASRLAVQETQYF

SEQ ID NO: 777577 - protein, 15 aa, Homo sapiens
  CDR3 for alpha chain variable domain of TCR clone 388789 (TRAV2, TRAJ3)
CAVEDAYSSASKIIF

SEQ ID NO: 777578 - protein, 16 aa, Homo sapiens
  CDR3 for beta chain variable domain of TCR clone 388789 (TRBV19, TRBJ2-1)
CASSKAGPSSYNQQFF

SEQ ID NO: 777579 - protein, 15 aa, Homo sapiens
  CDR3 for alpha chain variable domain of TCR clone 388790 (TRAV13-1, TRAJ50)
CAAKGSETSYDKVIF

SEQ ID NO: 777580 - protein, 18 aa, Homo sapiens
  CDR3 for beta chain variable domain of TCR clone 388790 (TRBV10-3, TRBJ2-1)
CTSVRGVSLRGGVDEQFF

SEQ ID NO: 777581 - protein, 13 aa, Homo sapiens
  CDR3 for alpha chain variable domain of TCR clone 388791 (TRAV1-1, TRAJ9)
CAAKHTGGFTTIF

SEQ ID NO: 777582 - protein, 14 aa, Homo sapiens
  CDR3 for beta chain variable domain of TCR clone 388791 (TRBV20-1, TRBJ2-1)
CSAQIGGSANEQFF

SEQ ID NO: 777583 - protein, 11 aa, Homo sapiens
  CDR3 for alpha chain variable domain of TCR clone 388792 (TRAV12-3, TRAJ43)
CAMGVSNDMRF

SEQ ID NO: 777584 - protein, 15 aa, Homo sapiens
  CDR3 for beta chain variable domain of TCR clone 388792 (TRBV5-1, TRBJ2-1)
CASSPPRAPYNEQFF

SEQ ID NO: 777585 - protein, 11 aa, Homo sapiens
  CDR3 for alpha chain variable domain of TCR clone 388793 (TRAV4, TRAJ23)
CLVAPGGKLIF

SEQ ID NO: 777586 - protein, 17 aa, Homo sapiens
  CDR3 for beta chain variable domain of TCR clone 388793 (TRBV19, TRBJ2-5)
CASSIARTSGGEETQYF

SEQ ID NO: 777587 - protein, 17 aa, Homo sapiens
  CDR3 for alpha chain variable domain of TCR clone 388794 (TRAV3, TRAJ6)
CAVRDGPRAGGSYIPTF

SEQ ID NO: 777588 - protein, 18 aa, Homo sapiens
  CDR3 for beta chain variable domain of TCR clone 388794 (TRBV7-9, TRBJ2-7)
FASSLTTRGSRTWYEQYF

SEQ ID NO: 777589 - protein, 14 aa, Homo sapiens
  CDR3 for alpha chain variable domain of TCR clone 388795 (TRAV12-2, TRAJ13)
CAVKKTAGYQKVTF

SEQ ID NO: 777590 - protein, 12 aa, Homo sapiens
  CDR3 for beta chain variable domain of TCR clone 388795 (TRBV6-3, TRBJ2-7)
CASSLTPYEQYF

SEQ ID NO: 777591 - protein, 14 aa, Homo sapiens
  CDR3 for alpha chain variable domain of TCR clone 388796 (TRAV12-3, TRAJ42)
CAMNYGGSQGNLIF

SEQ ID NO: 777592 - protein, 15 aa, Homo sapiens
  CDR3 for beta chain variable domain of TCR clone 388796 (TRBV5-1, TRBJ1-1)
CASSSTTGTNTEAFF

SEQ ID NO: 777593 - protein, 13 aa, Homo sapiens
  CDR3 for alpha chain variable domain of TCR clone 388797 (TRAV8-4, TRAJ10)
CAAFTGGGNKLTF

SEQ ID NO: 777594 - protein, 13 aa, Homo sapiens
  CDR3 for beta chain variable domain of TCR clone 388797 (TRBV7-9, TRBJ2-7)
CASSLKQNYGYTF

SEQ ID NO: 777595 - protein, 15 aa, Homo sapiens
  CDR3 for alpha chain variable domain of TCR clone 388798 (TRAV12-3, TRAJ6)
CAMSATSGGSDIPTF

SEQ ID NO: 777596 - protein, 13 aa, Homo sapiens
  CDR3 for beta chain variable domain of TCR clone 388798 (TRBV7-9, TRBJ1-2)
CASSLKQNYGYTF

SEQ ID NO: 777597 - protein, 12 aa, Homo sapiens
  CDR3 for alpha chain variable domain of TCR clone 388799 (TRAV12-2, TRAJ47)
CAVAEYGNKLVF

SEQ ID NO: 777598 - protein, 14 aa, Homo sapiens
  CDR3 for beta chain variable domain of TCR clone 388799 (TRBV20-1, TRBJ2-3)
CSARGGTSTDTQYF

SEQ ID NO: 777599 - protein, 13 aa, Homo sapiens
  CDR3 for alpha chain variable domain of TCR clone 388800 (TRAV13-1, TRAJ11)
CAAVLAGYSALTL

SEQ ID NO: 777600 - protein, 17 aa, Homo sapiens
  CDR3 for beta chain variable domain of TCR clone 388800 (TRBV25-1, TRBJ2-7)
CASSDARVVFSSYEQYF

SEQ ID NO: 777601 - protein, 13 aa, Homo sapiens
  CDR3 for alpha chain variable domain of TCR clone 388801 (TRAV23/DV6, TRAJ34)
CAAIENNTDKLIF

SEQ ID NO: 777602 - protein, 12 aa, Homo sapiens
  CDR3 for beta chain variable domain of TCR clone 388801 (TRBV11-3, TRBJ1-1)
CASSHRQGEAFF

SEQ ID NO: 777603 - protein, 12 aa, Homo sapiens
  CDR3 for alpha chain variable domain of TCR clone 388802 (TRAV13-1, TRAJ27)
CAAHTNASKSTS

SEQ ID NO: 777604 - protein, 14 aa, Homo sapiens
  CDR3 for beta chain variable domain of TCR clone 388802 (TRBV19, TRBJ2-2)
CASSGQGIAGELFF

SEQ ID NO: 777605 - protein, 15 aa, Homo sapiens
  CDR3 for alpha chain variable domain of TCR clone 388803 (TRAV16, TRAJ10)
CALRELTGGGNKLTL

SEQ ID NO: 777606 - protein, 14 aa, Homo sapiens
  CDR3 for beta chain variable domain of TCR clone 388803 (TRBV5-5, TRBJ2-7)
CASSLGQGTYEQYF

SEQ ID NO: 777607 - protein, 10 aa, Homo sapiens
  CDR3 for alpha chain variable domain of TCR clone 388804 (TRAV38-2/DV8, TRAJ40)
CASGTYTYIF

SEQ ID NO: 777608 - protein, 18 aa, Homo sapiens
  CDR3 for beta chain variable domain of TCR clone 388804 (TRBV4-1, TRBJ1-5)
CASSQDPRGQGLNQPQHF

SEQ ID NO: 777609 - protein, 12 aa, Homo sapiens
  CDR3 for alpha chain variable domain of TCR clone 388805 (TRAV16, TRAJ9)
CALRAGGFKTNF

SEQ ID NO: 777610 - protein, 13 aa, Homo sapiens
  CDR3 for beta chain variable domain of TCR clone 388805 (TRBV4-3, TRBJ1-1)
CASSQVEGSMAFF

SEQ ID NO: 777611 - protein, 17 aa, Homo sapiens
  CDR3 for alpha chain variable domain of TCR clone 388806 (TRAV26-1, TRAJ20)
CCVLLHRSLLGDYKLSF

SEQ ID NO: 777612 - protein, 12 aa, Homo sapiens
  CDR3 for beta chain variable domain of TCR clone 388806 (TRBV5-1, TRBJ1-2)
CASSLGGLGYAF

SEQ ID NO: 777613 - protein, 14 aa, Homo sapiens
  CDR3 for alpha chain variable domain of TCR clone 388807 (TRAV1-1, TRAJ23)
CAVSIYNQGGKLIF

SEQ ID NO: 777614 - protein, 12 aa, Homo sapiens
  CDR3 for beta chain variable domain of TCR clone 388807 (TRBV28, TRBJ2-3)
CASSLYRDTQYF

SEQ ID NO: 777615 - protein, 12 aa, Homo sapiens
  CDR3 for alpha chain variable domain of TCR clone 388808 (TRAV12-3, TRAJ17)
CAMTLTGNKLTF

SEQ ID NO: 777616 - protein, 14 aa, Homo sapiens
  CDR3 for beta chain variable domain of TCR clone 388808 (TRBV9, TRBJ2-1)
CASSVDPRGKEQFV

SEQ ID NO: 777617 - protein, 13 aa, Homo sapiens
  CDR3 for alpha chain variable domain of TCR clone 388809 (TRAV8-2, TRAJ49)
CVVSPSTGNQFYF

SEQ ID NO: 777618 - protein, 16 aa, Homo sapiens
  CDR3 for beta chain variable domain of TCR clone 388809 (TRBV11-2, TRBJ2-7)
CASSRSGGRASSTSGR

SEQ ID NO: 777619 - protein, 12 aa, Homo sapiens
  CDR3 for alpha chain variable domain of TCR clone 388810 (TRAV21, TRAJ33)
CAKMDSNYQLIW

SEQ ID NO: 777620 - protein, 14 aa, Homo sapiens
  CDR3 for beta chain variable domain of TCR clone 388810 (TRBV28, TRBJ2-1)
CASSYYTAYNEQFF

SEQ ID NO: 777621 - protein, 13 aa, Homo sapiens
  CDR3 for alpha chain variable domain of TCR clone 388811 (TRAV8-3, TRAJ6)
CAVETRRKLHTYI

SEQ ID NO: 777622 - protein, 14 aa, Homo sapiens
  CDR3 for beta chain variable domain of TCR clone 388811 (TRBV7-2, TRBJ1-1)
CASSFLTGTTEAFF

SEQ ID NO: 777623 - protein, 16 aa, Homo sapiens
  CDR3 for alpha chain variable domain of TCR clone 388812 (TRAV16, TRAJ37)
CSKWPDGSSNTGKLIF

SEQ ID NO: 777624 - protein, 13 aa, Homo sapiens
  CDR3 for beta chain variable domain of TCR clone 388812 (TRBV7-2, TRBJ2-2)
CASSLAVTVELFF

SEQ ID NO: 777625 - protein, 16 aa, Homo sapiens
  CDR3 for alpha chain variable domain of TCR clone 388813 (TRAV30, TRAJ24)
CGTEIVDADSWGKFQF

SEQ ID NO: 777626 - protein, 13 aa, Homo sapiens
  CDR3 for beta chain variable domain of TCR clone 388813 (TRBV19, TRBJ1-2)
CASSVPGQDGYIF

SEQ ID NO: 777627 - protein, 14 aa, Homo sapiens
  CDR3 for alpha chain variable domain of TCR clone 388814 (TRAV8-3, TRAJ20)
CAVGPHGNDYKLSF

SEQ ID NO: 777628 - protein, 11 aa, Homo sapiens
  CDR3 for beta chain variable domain of TCR clone 388814 (TRBV10-3, TRBJ2-2)
CATKGTGELFF

SEQ ID NO: 777629 - protein, 14 aa, Homo sapiens
  CDR3 for alpha chain variable domain of TCR clone 388815 (TRAV17, TRAJ12)
CAILPMDSSYKLIF

SEQ ID NO: 777630 - protein, 11 aa, Homo sapiens
  CDR3 for beta chain variable domain of TCR clone 388815 (TRBV19, TRBJ1-1)
CASSSGSEAFF

SEQ ID NO: 777631 - protein, 11 aa, Homo sapiens
  CDR3 for alpha chain variable domain of TCR clone 388816 (TRAV21, TRAJ9)
CAVPGGFKTIF

SEQ ID NO: 777632 - protein, 12 aa, Homo sapiens
  CDR3 for beta chain variable domain of TCR clone 388816 (TRBV20-1, TRBJ2-3)
CSARVGTDTKYF

SEQ ID NO: 777633 - protein, 10 aa, Homo sapiens
  CDR3 for alpha chain variable domain of TCR clone 388817 (TRAV8-6, TRAJ42)
GGGSQGNLIF

SEQ ID NO: 777634 - protein, 13 aa, Homo sapiens
  CDR3 for beta chain variable domain of TCR clone 388817 (TRBV7-3, TRBJ1-1)
CASSQDWGAGAFF

SEQ ID NO: 777635 - protein, 16 aa, Homo sapiens
  CDR3 for alpha chain variable domain of TCR clone 388818 (TRAV30, TRAJ24)
CGTEIVDADSWGKFQV

SEQ ID NO: 777636 - protein, 14 aa, Homo sapiens
  CDR3 for beta chain variable domain of TCR clone 388818 (TRBV20-1, TRBJ2-1)
CSAQIGGSANEQFF

SEQ ID NO: 777637 - protein, 11 aa, Homo sapiens
  CDR3 for alpha chain variable domain of TCR clone 388819 (TRAV17, TRAJ31)
CATSNNARLMF

SEQ ID NO: 777638 - protein, 14 aa, Homo sapiens
  CDR3 for beta chain variable domain of TCR clone 388819 (TRBV19, TRBJ2-2)
CASSTLHRSGELFF

SEQ ID NO: 777639 - protein, 15 aa, Homo sapiens
  CDR3 for alpha chain variable domain of TCR clone 388820 (TRAV3, TRAJ5)
CAVRDLDTGRRALTF

SEQ ID NO: 777640 - protein, 18 aa, Homo sapiens
  CDR3 for beta chain variable domain of TCR clone 388820 (TRBV5-4, TRBJ2-3)
CASSPTAGFLPSTDTQYF

SEQ ID NO: 777641 - protein, 14 aa, Homo sapiens
  CDR3 for alpha chain variable domain of TCR clone 388821 (TRAV1-1, TRAJ23)
CAAPIYNQGGKLIS

SEQ ID NO: 777642 - protein, 13 aa, Homo sapiens
  CDR3 for beta chain variable domain of TCR clone 388821 (TRBV5-1, TRBJ2-5)
CASSWEGEETQYF

SEQ ID NO: 777643 - protein, 12 aa, Homo sapiens
  CDR3 for alpha chain variable domain of TCR clone 388822 (TRAV34, TRAJ27)
CGADTNAGKSTF

SEQ ID NO: 777644 - protein, 16 aa, Homo sapiens
  CDR3 for beta chain variable domain of TCR clone 388822 (TRBV28, TRBJ2-7)
CASSSGTSGRGYEQYF

SEQ ID NO: 777645 - protein, 14 aa, Homo sapiens
  CDR3 for alpha chain variable domain of TCR clone 388823 (TRAV1-2, TRAJ16)
CAVNRVSDGQKLLF

SEQ ID NO: 777646 - protein, 15 aa, Homo sapiens
  CDR3 for beta chain variable domain of TCR clone 388823 (TRBV9, TRBJ1-6)
CASSVAGTGDSHLHF

SEQ ID NO: 777647 - protein, 11 aa, Homo sapiens
  CDR3 for alpha chain variable domain of TCR clone 388824 (TRAV13-1, TRAJ21)
CAKGRLQQILL

SEQ ID NO: 777648 - protein, 15 aa, Homo sapiens
  CDR3 for beta chain variable domain of TCR clone 388824 (TRBV25-1, TRBJ1-4)
CASSPGDSTNEKLFF

SEQ ID NO: 777649 - protein, 17 aa, Homo sapiens
  CDR3 for alpha chain variable domain of TCR clone 388825 (TRAV3, TRAJ6)
CAVRDGPRAGGRYIPTF

SEQ ID NO: 777650 - protein, 16 aa, Homo sapiens
  CDR3 for beta chain variable domain of TCR clone 388825 (TRBV5-1, TRBJ1-3)
CASSPWAASSGNTIYF

SEQ ID NO: 777651 - protein, 12 aa, Homo sapiens
  CDR3 for alpha chain variable domain of TCR clone 388826 (TRAV12-1, TRAJ40)
CVVYSGTYKYIF

SEQ ID NO: 777652 - protein, 14 aa, Homo sapiens
  CDR3 for beta chain variable domain of TCR clone 388826 (TRBV7-9, TRBJ2-5)
CASSLDTAQETQHF

SEQ ID NO: 777653 - protein, 14 aa, Homo sapiens
  CDR3 for alpha chain variable domain of TCR clone 388827 (TRAV23/DV6, TRAJ17)
FAARGRAAGNKLTF

SEQ ID NO: 777654 - protein, 13 aa, Homo sapiens
  CDR3 for beta chain variable domain of TCR clone 388827 (TRBV7-6, TRBJ1-2)
CASSLVADYGYTF

SEQ ID NO: 777655 - protein, 13 aa, Homo sapiens
  CDR3 for alpha chain variable domain of TCR clone 388828 (TRAV29/DV5, TRAJ39)
CAASDNAANMLTF

SEQ ID NO: 777656 - protein, 17 aa, Homo sapiens
  CDR3 for beta chain variable domain of TCR clone 388828 (TRBV7-9, TRBJ2-3)
CASSLEEAGAYPDTQYF

SEQ ID NO: 777657 - protein, 14 aa, Homo sapiens
  CDR3 for alpha chain variable domain of TCR clone 388829 (TRAV26-2, TRAJ23)
CTRTLYNQGGKLIF

SEQ ID NO: 777658 - protein, 15 aa, Homo sapiens
  CDR3 for beta chain variable domain of TCR clone 388829 (TRBV20-1, TRBJ2-7)
CSARDRVSGMDEQYF

SEQ ID NO: 777659 - protein, 10 aa, Homo sapiens
  CDR3 for alpha chain variable domain of TCR clone 388830 (TRAV36/DV7, TRAJ48)
CAVGNEKLTF

SEQ ID NO: 777660 - protein, 15 aa, Homo sapiens
  CDR3 for beta chain variable domain of TCR clone 388830 (TRBV27, TRBJ2-1)
CASSNGGGSSNEQFF

SEQ ID NO: 777661 - protein, 16 aa, Homo sapiens
  CDR3 for alpha chain variable domain of TCR clone 388831 (TRAV35, TRAJ37)
CWAFLRGSSNTGKLIF

SEQ ID NO: 777662 - protein, 13 aa, Homo sapiens
  CDR3 for beta chain variable domain of TCR clone 388831 (TRBV10-2, TRBJ2-7)
CASGASGGYEQYF

SEQ ID NO: 777663 - protein, 11 aa, Homo sapiens
  CDR3 for alpha chain variable domain of TCR clone 388832 (TRAV2, TRAJ33)
CAVDSIYQLIW

SEQ ID NO: 777664 - protein, 12 aa, Homo sapiens
  CDR3 for beta chain variable domain of TCR clone 388832 (TRBV11-2, TRBJ2-2)
CASSLGGGELFF

SEQ ID NO: 777665 - protein, 11 aa, Homo sapiens
  CDR3 for alpha chain variable domain of TCR clone 388833 (TRAV17, TRAJ31)
CATSNNARLMF

SEQ ID NO: 777666 - protein, 14 aa, Homo sapiens
  CDR3 for beta chain variable domain of TCR clone 388833 (TRBV7-8, TRBJ2-5)
CASSPRGSSETQYF

SEQ ID NO: 777667 - protein, 16 aa, Homo sapiens
  CDR3 for alpha chain variable domain of TCR clone 388834 (TRAV26-2, TRAJ57)
CILRDVGSGGSEKLVF

SEQ ID NO: 777668 - protein, 13 aa, Homo sapiens
  CDR3 for beta chain variable domain of TCR clone 388834 (TRBV18, TRBJ2-3)
CARSPGVTDTQYF

SEQ ID NO: 777669 - protein, 16 aa, Homo sapiens
  CDR3 for alpha chain variable domain of TCR clone 388835 (TRAV26-1, TRAJ52)
CIVSNAGGTIYGKLTF

SEQ ID NO: 777670 - protein, 15 aa, Homo sapiens
  CDR3 for beta chain variable domain of TCR clone 388835 (TRBV7-3, TRBJ2-1)
CASSPTGGGEVEQFF

SEQ ID NO: 777671 - protein, 11 aa, Homo sapiens
  CDR3 for alpha chain variable domain of TCR clone 388836 (TRAV12-1, TRAJ9)
CVVKNGFKTIF

SEQ ID NO: 777672 - protein, 15 aa, Homo sapiens
  CDR3 for beta chain variable domain of TCR clone 388836 (TRBV20-1, TRBJ2-7)
CSARVPAAYFYEQYF

SEQ ID NO: 777673 - protein, 12 aa, Homo sapiens
  CDR3 for alpha chain variable domain of TCR clone 388837 (TRAV13-1, TRAJ9)
CASHTGGFKTIF

SEQ ID NO: 777674 - protein, 18 aa, Homo sapiens
  CDR3 for beta chain variable domain of TCR clone 388837 (TRBV11-2, TRBJ2-3)
CASSLGGASRWAPNTQYF

SEQ ID NO: 777675 - protein, 10 aa, Homo sapiens
  CDR3 for alpha chain variable domain of TCR clone 388838 (TRAV2, TRAJ34)
CGVVNDKLIF

SEQ ID NO: 777676 - protein, 15 aa, Homo sapiens
  CDR3 for beta chain variable domain of TCR clone 388838 (TRBV3-1, TRBJ2-2)
CASSQDWTRAGELFF

SEQ ID NO: 777677 - protein, 17 aa, Homo sapiens
  CDR3 for alpha chain variable domain of TCR clone 388839 (TRAV8-6, TRAJ8)
CSVKEGIENTGFQKHVF

SEQ ID NO: 777678 - protein, 12 aa, Homo sapiens
  CDR3 for beta chain variable domain of TCR clone 388839 (TRBV19, TRBJ1-4)
CASKDWPGGLFF

SEQ ID NO: 777679 - protein, 12 aa, Homo sapiens
  CDR3 for alpha chain variable domain of TCR clone 388840 (TRAV12-2, TRAJ45)
CAVTGGADGLTF

SEQ ID NO: 777680 - protein, 11 aa, Homo sapiens
  CDR3 for beta chain variable domain of TCR clone 388840 (TRBV29-1, TRBJ2-5)
CSEDRTGTQYF

SEQ ID NO: 777681 - protein, 12 aa, Homo sapiens
  CDR3 for alpha chain variable domain of TCR clone 388841 (TRAV3, TRAJ43)
CAVRYPNNDMRF

SEQ ID NO: 777682 - protein, 15 aa, Homo sapiens
  CDR3 for beta chain variable domain of TCR clone 388841 (TRBV4-3, TRBJ2-7)
CASSQGDWGDYEQYF

SEQ ID NO: 777683 - protein, 17 aa, Homo sapiens
  CDR3 for alpha chain variable domain of TCR clone 388842 (TRAV3, TRAJ6)
CAVRDGPRAGGSYIPTF

SEQ ID NO: 777684 - protein, 18 aa, Homo sapiens
  CDR3 for beta chain variable domain of TCR clone 388842 (TRBV25-1, TRBJ1-2)
CASSGRQNGQGLIFGYTF

SEQ ID NO: 777685 - protein, 14 aa, Homo sapiens
  CDR3 for alpha chain variable domain of TCR clone 388843 (TRAV12-2, TRAJ45)
CALPERGGADGLTF

SEQ ID NO: 777686 - protein, 14 aa, Homo sapiens
  CDR3 for beta chain variable domain of TCR clone 388843 (TRBV18, TRBJ1-5)
CATSPGNSNQPQHF

SEQ ID NO: 777687 - protein, 15 aa, Homo sapiens
  CDR3 for alpha chain variable domain of TCR clone 388844 (TRAV35, TRAJ24)
CAGQSAQGSWGKLQF

SEQ ID NO: 777688 - protein, 16 aa, Homo sapiens
  CDR3 for beta chain variable domain of TCR clone 388844 (TRBV19, TRBJ2-1)
CASSKAGPSSYNEQFF

SEQ ID NO: 777689 - protein, 14 aa, Homo sapiens
  CDR3 for alpha chain variable domain of TCR clone 388845 (TRAV12-1, TRAJ17)
RVVNPKAAGNKLTF

SEQ ID NO: 777690 - protein, 16 aa, Homo sapiens
  CDR3 for beta chain variable domain of TCR clone 388845 (TRBV20-1, TRBJ2-1)
CSASASGYSSYNEQFF

SEQ ID NO: 777691 - protein, 14 aa, Homo sapiens
  CDR3 for alpha chain variable domain of TCR clone 388846 (TRAV1-2, TRAJ8)
CAVIEDTGFQKLVF

SEQ ID NO: 777692 - protein, 11 aa, Homo sapiens
  CDR3 for beta chain variable domain of TCR clone 388846 (TRBV11-2, TRBJ2-2)
CASSLPGALFF

SEQ ID NO: 777693 - protein, 12 aa, Homo sapiens
  CDR3 for alpha chain variable domain of TCR clone 388847 (TRAV13-2, TRAJ23)
CAERHRGGKLIF

SEQ ID NO: 777694 - protein, 17 aa, Homo sapiens
  CDR3 for beta chain variable domain of TCR clone 388847 (TRBV5-4, TRBJ2-1)
CASSSAGGRGPYNEQFF

SEQ ID NO: 777695 - protein, 19 aa, Homo sapiens
  CDR3 for alpha chain variable domain of TCR clone 388848 (TRAV25, TRAJ43)
TATQTTDVGTYFCAVFMRF

SEQ ID NO: 777696 - protein, 16 aa, Homo sapiens
  CDR3 for beta chain variable domain of TCR clone 388848 (TRBV5-1, TRBJ1-1)
CASSSGGNSLNTEAFF

SEQ ID NO: 777697 - protein, 18 aa, Homo sapiens
  CDR3 for alpha chain variable domain of TCR clone 388849 (TRAV21, TRAJ52)
CAVRPSPAGGTSYGKLTF

SEQ ID NO: 777698 - protein, 15 aa, Homo sapiens
  CDR3 for beta chain variable domain of TCR clone 388849 (TRBV7-2, TRBJ2-3)
CASSLRGGSTDTQYF

SEQ ID NO: 777699 - protein, 12 aa, Homo sapiens
  CDR3 for alpha chain variable domain of TCR clone 388850 (TRAV12-3, TRAJ17)
CAMTLTGNKLTF

SEQ ID NO: 777700 - protein, 15 aa, Homo sapiens
  CDR3 for beta chain variable domain of TCR clone 388850 (TRBV20-1, TRBJ2-7)
CSARDRVSGLDERYF

SEQ ID NO: 777701 - protein, 16 aa, Homo sapiens
  CDR3 for alpha chain variable domain of TCR clone 388851 (TRAV16, TRAJ42)
CARKMNYGGSQGNLIF

SEQ ID NO: 777702 - protein, 13 aa, Homo sapiens
  CDR3 for beta chain variable domain of TCR clone 388851 (TRBV20-1, TRBJ2-7)
CSASPPSSYAQYF

SEQ ID NO: 777703 - protein, 13 aa, Homo sapiens
  CDR3 for alpha chain variable domain of TCR clone 388852 (TRAV8-2, TRAJ44)
CSRGAGTASNLTF

SEQ ID NO: 777704 - protein, 13 aa, Homo sapiens
  CDR3 for beta chain variable domain of TCR clone 388852 (TRBV12-4, TRBJ2-7)
CASSRQASYEQYF

SEQ ID NO: 777705 - protein, 15 aa, Homo sapiens
  CDR3 for alpha chain variable domain of TCR clone 388853 (TRAV17, TRAJ57)
CATGPSQGGSEKLVF

SEQ ID NO: 777706 - protein, 16 aa, Homo sapiens
  CDR3 for beta chain variable domain of TCR clone 388853 (TRBV12-4, TRBJ1-5)
CAISRPVGGSNQPQHF

SEQ ID NO: 777707 - protein, 10 aa, Homo sapiens
  CDR3 for alpha chain variable domain of TCR clone 388854 (TRAV12-3, TRAJ18)
CAMSAEAQPW

SEQ ID NO: 777708 - protein, 12 aa, Homo sapiens
  CDR3 for beta chain variable domain of TCR clone 388854 (TRBV29-1, TRBJ2-3)
CSVTGGADTQYF

SEQ ID NO: 777709 - protein, 16 aa, Homo sapiens
  CDR3 for alpha chain variable domain of TCR clone 388855 (TRAV12-2, TRAJ32)
CAVNLGQGGATNKLIF

SEQ ID NO: 777710 - protein, 15 aa, Homo sapiens
  CDR3 for beta chain variable domain of TCR clone 388855 (TRBV20-1, TRBJ2-7)
CSARGPIAGGREQYF

SEQ ID NO: 777711 - protein, 14 aa, Homo sapiens
  CDR3 for alpha chain variable domain of TCR clone 388856 (TRAV14/DV4, TRAJ41)
CARGGPDSGYELNF

SEQ ID NO: 777712 - protein, 15 aa, Homo sapiens
  CDR3 for beta chain variable domain of TCR clone 388856 (TRBV19, TRBJ2-1)
CASSIQATSYNEQFF

SEQ ID NO: 777713 - protein, 12 aa, Homo sapiens
  CDR3 for alpha chain variable domain of TCR clone 388857 (TRAV13-2, TRAJ23)
CAERHRGGKLIF

SEQ ID NO: 777714 - protein, 16 aa, Homo sapiens
  CDR3 for beta chain variable domain of TCR clone 388857 (TRBV20-1, TRBJ1-4)
FSAPGQGLLTNEKLFF

SEQ ID NO: 777715 - protein, 14 aa, Homo sapiens
  CDR3 for alpha chain variable domain of TCR clone 388858 (TRAV13-2, TRAJ11)
CAETGNSGYSTLTF

SEQ ID NO: 777716 - protein, 13 aa, Homo sapiens
  CDR3 for beta chain variable domain of TCR clone 388858 (TRBV11-2, TRBJ2-7)
CASSGTRPYEQYF

SEQ ID NO: 777717 - protein, 11 aa, Homo sapiens
  CDR3 for alpha chain variable domain of TCR clone 388859 (TRAV35, TRAJ34)
CWARNTDKLIF

SEQ ID NO: 777718 - protein, 17 aa, Homo sapiens
  CDR3 for beta chain variable domain of TCR clone 388859 (TRBV4-1, TRBJ2-3)
CASSQGYVSGGTDTQYF

SEQ ID NO: 777719 - protein, 13 aa, Homo sapiens
  CDR3 for alpha chain variable domain of TCR clone 388860 (TRAV21, TRAJ27)
CAARPGNAGKSTF

SEQ ID NO: 777720 - protein, 13 aa, Homo sapiens
  CDR3 for beta chain variable domain of TCR clone 388860 (TRBV7-6, TRBJ1-2)
CASSLKQNYGYTF

SEQ ID NO: 777721 - protein, 14 aa, Homo sapiens
  CDR3 for alpha chain variable domain of TCR clone 388861 (TRAV1-2, TRAJ16)
CAVNRFSDGQKLLF

SEQ ID NO: 777722 - protein, 14 aa, Homo sapiens
  CDR3 for beta chain variable domain of TCR clone 388861 (TRBV7-9, TRBJ2-3)
CPSSLEDGTDTQYF

SEQ ID NO: 777723 - protein, 10 aa, Homo sapiens
  CDR3 for alpha chain variable domain of TCR clone 388862 (TRAV30, TRAJ24)
CAQRLWMLTA

SEQ ID NO: 777724 - protein, 14 aa, Homo sapiens
  CDR3 for beta chain variable domain of TCR clone 388862 (TRBV12-5, TRBJ2-5)
CASGSWTHQETQYF

SEQ ID NO: 777725 - protein, 17 aa, Homo sapiens
  CDR3 for alpha chain variable domain of TCR clone 388863 (TRAV8-6, TRAJ58)
CAVSPWVGETSGSRLTF

SEQ ID NO: 777726 - protein, 15 aa, Homo sapiens
  CDR3 for beta chain variable domain of TCR clone 388863 (TRBV20-1, TRBJ2-7)
CSARDRVSGMDEQYF

SEQ ID NO: 777727 - protein, 21 aa, Homo sapiens
  CDR3 for alpha chain variable domain of TCR clone 388864 (TRAV20, )
CAVTGANNIQNPDPALYQLRD

SEQ ID NO: 777728 - protein, 14 aa, Homo sapiens
  CDR3 for beta chain variable domain of TCR clone 388864 (TRBV20-1, TRBJ2-5)
CSALVPGYQETQYF

SEQ ID NO: 777729 - protein, 22 aa, Homo sapiens
  CDR3 for alpha chain variable domain of TCR clone 388865 (TRAV12-2, TRAJ53)
SPVIQPPTSVPRILSSNYKLTF

SEQ ID NO: 777730 - protein, 13 aa, Homo sapiens
  CDR3 for beta chain variable domain of TCR clone 388865 (TRBV7-7, TRBJ2-3)
CASSLSRADTQYF

SEQ ID NO: 777731 - protein, 15 aa, Homo sapiens
  CDR3 for alpha chain variable domain of TCR clone 388866 (TRAV23/DV6, TRAJ37)
CAAGEGSSNTGKLIF

SEQ ID NO: 777732 - protein, 17 aa, Homo sapiens
  CDR3 for beta chain variable domain of TCR clone 388866 (TRBV20-1, TRBJ2-7)
CSATRAGGVAGVEEHYF

SEQ ID NO: 777733 - protein, 14 aa, Homo sapiens
  CDR3 for alpha chain variable domain of TCR clone 388867 (TRAV2, TRAJ37)
CAADFTSNTGKLIF

SEQ ID NO: 777734 - protein, 15 aa, Homo sapiens
  CDR3 for beta chain variable domain of TCR clone 388867 (TRBV7-2, TRBJ2-1)
CASTHGTGIYNEQFF

SEQ ID NO: 777735 - protein, 14 aa, Homo sapiens
  CDR3 for alpha chain variable domain of TCR clone 388868 (TRAV23/DV6, TRAJ8)
CAASKNTGFHKLVF

SEQ ID NO: 777736 - protein, 16 aa, Homo sapiens
  CDR3 for beta chain variable domain of TCR clone 388868 (TRBV4-1, TRBJ2-6)
CASSQVGDPGANVLTF

SEQ ID NO: 777737 - protein, 14 aa, Homo sapiens
  CDR3 for alpha chain variable domain of TCR clone 388869 (TRAV12-2, TRAJ17)
CAALFKAAGNKLTF

SEQ ID NO: 777738 - protein, 15 aa, Homo sapiens
  CDR3 for beta chain variable domain of TCR clone 388869 (TRBV18, TRBJ2-3)
CASWPLAGETDTQYF

SEQ ID NO: 777739 - protein, 14 aa, Homo sapiens
  CDR3 for alpha chain variable domain of TCR clone 388870 (TRAV12-1, TRAJ3)
CVVNPGSSATKIIF

SEQ ID NO: 777740 - protein, 14 aa, Homo sapiens
  CDR3 for beta chain variable domain of TCR clone 388870 (TRBV20-1, TRBJ2-3)
CSARGGTSTGTQYF

SEQ ID NO: 777741 - protein, 17 aa, Homo sapiens
  CDR3 for alpha chain variable domain of TCR clone 388871 (TRAV3, TRAJ42)
CAVRDRAYGGSQGNLIF

SEQ ID NO: 777742 - protein, 14 aa, Homo sapiens
  CDR3 for beta chain variable domain of TCR clone 388871 (TRBV12-4, TRBJ1-2)
CASTHGTSNYGYTF

SEQ ID NO: 777743 - protein, 11 aa, Homo sapiens
  CDR3 for alpha chain variable domain of TCR clone 388872 (TRAV13-2, TRAJ39)
CAENAGNMLTF

SEQ ID NO: 777744 - protein, 11 aa, Homo sapiens
  CDR3 for beta chain variable domain of TCR clone 388872 (TRBV11-2, TRBJ2-2)
CASSLPGELFF

SEQ ID NO: 777745 - protein, 14 aa, Homo sapiens
  CDR3 for alpha chain variable domain of TCR clone 388873 (TRAV1-2, TRAJ16)
CAVNRFSDGQKLLF

SEQ ID NO: 777746 - protein, 14 aa, Homo sapiens
  CDR3 for beta chain variable domain of TCR clone 388873 (TRBV5-1, TRBJ2-7)
RASRWDWQFHEQYF

SEQ ID NO: 777747 - protein, 14 aa, Homo sapiens
  CDR3 for alpha chain variable domain of TCR clone 388874 (TRAV38-1, TRAJ45)
CAYYSGGGADGLTF

SEQ ID NO: 777748 - protein, 18 aa, Homo sapiens
  CDR3 for beta chain variable domain of TCR clone 388874 (TRBV24-1, TRBJ2-2)
CATSDSGQGTANTGELFF

SEQ ID NO: 777749 - protein, 14 aa, Homo sapiens
  CDR3 for alpha chain variable domain of TCR clone 388875 (TRAV12-2, TRAJ53)
CAVKGGGSNYKLTF

SEQ ID NO: 777750 - protein, 20 aa, Homo sapiens
  CDR3 for beta chain variable domain of TCR clone 388875 (TRBV28, TRBJ2-1)
CASTPIGRSPGLAGGNEQFF

SEQ ID NO: 777751 - protein, 14 aa, Homo sapiens
  CDR3 for alpha chain variable domain of TCR clone 388876 (TRAV12-3, TRAJ13)
CAMRNSGGNQKVTF

SEQ ID NO: 777752 - protein, 14 aa, Homo sapiens
  CDR3 for beta chain variable domain of TCR clone 388876 (TRBV4-1, TRBJ1-6)
CASSPGSDSSPLHF

SEQ ID NO: 777753 - protein, 14 aa, Homo sapiens
  CDR3 for alpha chain variable domain of TCR clone 388877 (TRAV2, TRAJ37)
CAVDFTSNTGKLIF

SEQ ID NO: 777754 - protein, 14 aa, Homo sapiens
  CDR3 for beta chain variable domain of TCR clone 388877 (TRBV5-4, TRBJ2-5)
CASSFSGGQETQYF

SEQ ID NO: 777755 - protein, 15 aa, Homo sapiens
  CDR3 for alpha chain variable domain of TCR clone 388878 (TRAV17, TRAJ23)
CATDAEDNQGGKLIF

SEQ ID NO: 777756 - protein, 17 aa, Homo sapiens
  CDR3 for beta chain variable domain of TCR clone 388878 (TRBV4-1, TRBJ1-4)
CASSQEGPRGVEEKLFF

SEQ ID NO: 777757 - protein, 13 aa, Homo sapiens
  CDR3 for alpha chain variable domain of TCR clone 388879 (TRAV12-2, TRAJ18)
CAVRCSTLGRLYF

SEQ ID NO: 777758 - protein, 18 aa, Homo sapiens
  CDR3 for beta chain variable domain of TCR clone 388879 (TRBV27, TRBJ2-3)
CASSLSGTSGRGTDTQYF

SEQ ID NO: 777759 - protein, 14 aa, Homo sapiens
  CDR3 for alpha chain variable domain of TCR clone 388880 (TRAV12-1, TRAJ30)
CVVNIGGRDDKIIF

SEQ ID NO: 777760 - protein, 13 aa, Homo sapiens
  CDR3 for beta chain variable domain of TCR clone 388880 (TRBV12-5, TRBJ2-1)
CASGLGRGNEQVF

SEQ ID NO: 777761 - protein, 14 aa, Homo sapiens
  CDR3 for alpha chain variable domain of TCR clone 388881 (TRAV2, TRAJ41)
CAVGTSNSGYALNF

SEQ ID NO: 777762 - protein, 20 aa, Homo sapiens
  CDR3 for beta chain variable domain of TCR clone 388881 (TRBV7-8, TRBJ2-2)
CASSHLFPGPTIHITGELFF

SEQ ID NO: 777763 - protein, 12 aa, Homo sapiens
  CDR3 for alpha chain variable domain of TCR clone 388882 (TRAV12-2, TRAJ30)
CAVRNRDDKIIF

SEQ ID NO: 777764 - protein, 15 aa, Homo sapiens
  CDR3 for beta chain variable domain of TCR clone 388882 (TRBV28, TRBJ2-1)
CASSGLAEVDNEQFF

SEQ ID NO: 777765 - protein, 15 aa, Homo sapiens
  CDR3 for alpha chain variable domain of TCR clone 388883 (TRAV12-2, TRAJ53)
CAVNGGGGSNYKLTF

SEQ ID NO: 777766 - protein, 13 aa, Homo sapiens
  CDR3 for beta chain variable domain of TCR clone 388883 (TRBV11-2, TRBJ2-1)
CASSLGLAGGRFF

SEQ ID NO: 777767 - protein, 14 aa, Homo sapiens
  CDR3 for alpha chain variable domain of TCR clone 388884 (TRAV12-1, TRAJ17)
CVVNYKAAGNKLTF

SEQ ID NO: 777768 - protein, 16 aa, Homo sapiens
  CDR3 for beta chain variable domain of TCR clone 388884 (TRBV15, TRBJ2-3)
CATSRDLGIVTDTQYF

SEQ ID NO: 777769 - protein, 11 aa, Homo sapiens
  CDR3 for alpha chain variable domain of TCR clone 388885 (TRAV3, TRAJ21)
CAVGNFNKFYF

SEQ ID NO: 777770 - protein, 14 aa, Homo sapiens
  CDR3 for beta chain variable domain of TCR clone 388885 (TRBV12-4, TRBJ2-7)
CASSFSGADYEQYF

SEQ ID NO: 777771 - protein, 11 aa, Homo sapiens
  CDR3 for alpha chain variable domain of TCR clone 388886 (TRAV8-3, TRAJ15)
CAVGPGTTLIF

SEQ ID NO: 777772 - protein, 18 aa, Homo sapiens
  CDR3 for beta chain variable domain of TCR clone 388886 (TRBV18, TRBJ2-3)
CASSYTSGAAGGTDTQYF

SEQ ID NO: 777773 - protein, 13 aa, Homo sapiens
  CDR3 for alpha chain variable domain of TCR clone 388887 (TRAV17, TRAJ5)
CAPMDTGRRALTF

SEQ ID NO: 777774 - protein, 15 aa, Homo sapiens
  CDR3 for beta chain variable domain of TCR clone 388887 (TRBV2, TRBJ2-7)
CASSEGLARSYEQYF

SEQ ID NO: 777775 - protein, 12 aa, Homo sapiens
  CDR3 for alpha chain variable domain of TCR clone 388888 (TRAV38-2/DV8, TRAJ47)
CVLMEYGNKLVF

SEQ ID NO: 777776 - protein, 15 aa, Homo sapiens
  CDR3 for beta chain variable domain of TCR clone 388888 (TRBV4-2, TRBJ1-1)
CASSQQGAGDTEAFF

SEQ ID NO: 777777 - protein, 16 aa, Homo sapiens
  CDR3 for alpha chain variable domain of TCR clone 388889 (TRAV8-3, TRAJ8)
GAVPRDGNTGFQKIVF

SEQ ID NO: 777778 - protein, 14 aa, Homo sapiens
  CDR3 for beta chain variable domain of TCR clone 388889 (TRBV28, TRBJ1-1)
CASSESGRGTEAFF

SEQ ID NO: 777779 - protein, 17 aa, Homo sapiens
  CDR3 for alpha chain variable domain of TCR clone 388890 (TRAV3, TRAJ6)
CAVRDGPRAAGSYIPTF

SEQ ID NO: 777780 - protein, 14 aa, Homo sapiens
  CDR3 for beta chain variable domain of TCR clone 388890 (TRBV7-2, TRBJ2-7)
CVSSPKTSFYEQYF

SEQ ID NO: 777781 - protein, 13 aa, Homo sapiens
  CDR3 for alpha chain variable domain of TCR clone 388891 (TRAV13-1, TRAJ39)
CAASIWAGNMLPF

SEQ ID NO: 777782 - protein, 13 aa, Homo sapiens
  CDR3 for beta chain variable domain of TCR clone 388891 (TRBV11-2, TRBJ1-3)
CASSLEPVNTIYF

SEQ ID NO: 777783 - protein, 16 aa, Homo sapiens
  CDR3 for alpha chain variable domain of TCR clone 388892 (TRAV12-3, TRAJ53)
CAMSPGSGGSNYKLKF

SEQ ID NO: 777784 - protein, 16 aa, Homo sapiens
  CDR3 for beta chain variable domain of TCR clone 388892 (TRBV7-3, TRBJ2-2)
CASSLKRGTLSGELFF

SEQ ID NO: 777785 - protein, 14 aa, Homo sapiens
  CDR3 for alpha chain variable domain of TCR clone 388893 (TRAV17, TRAJ57)
CATDPQGGSEKLVF

SEQ ID NO: 777786 - protein, 15 aa, Homo sapiens
  CDR3 for beta chain variable domain of TCR clone 388893 (TRBV29-1, TRBJ2-6)
CSVGDRGSGANALTF

SEQ ID NO: 777787 - protein, 17 aa, Homo sapiens
  CDR3 for alpha chain variable domain of TCR clone 388894 (TRAV8-3, TRAJ10)
EASDTVILTGGGNKLTF

SEQ ID NO: 777788 - protein, 16 aa, Homo sapiens
  CDR3 for beta chain variable domain of TCR clone 388894 (TRBV7-9, TRBJ1-2)
CASSLGFSSGEDGYTF

SEQ ID NO: 777789 - protein, 12 aa, Homo sapiens
  CDR3 for alpha chain variable domain of TCR clone 388895 (TRAV13-1, TRAJ49)
CAASPMGNQFYF

SEQ ID NO: 777790 - protein, 14 aa, Homo sapiens
  CDR3 for beta chain variable domain of TCR clone 388895 (TRBV2, TRBJ2-7)
CASTVGRSSYEQYF

SEQ ID NO: 777791 - protein, 12 aa, Homo sapiens
  CDR3 for alpha chain variable domain of TCR clone 388896 (TRAV9-2, TRAJ3)
CALYSSASQIIF

SEQ ID NO: 777792 - protein, 16 aa, Homo sapiens
  CDR3 for beta chain variable domain of TCR clone 388896 (TRBV10-2, TRBJ1-5)
CASSVRDRASNQPQHF

SEQ ID NO: 777793 - protein, 17 aa, Homo sapiens
  CDR3 for alpha chain variable domain of TCR clone 388897 (TRAV13-1, TRAJ52)
CAAGRNAGGTSYGKLTF

SEQ ID NO: 777794 - protein, 15 aa, Homo sapiens
  CDR3 for beta chain variable domain of TCR clone 388897 (TRBV28, TRBJ2-3)
CASSPPTGSTDTQYF

SEQ ID NO: 777795 - protein, 13 aa, Homo sapiens
  CDR3 for alpha chain variable domain of TCR clone 388898 (TRAV27, TRAJ16)
CAGACSDGQKLLF

SEQ ID NO: 777796 - protein, 14 aa, Homo sapiens
  CDR3 for beta chain variable domain of TCR clone 388898 (TRBV11-2, TRBJ1-3)
CGSSLAVPGNTIYF

SEQ ID NO: 777797 - protein, 12 aa, Homo sapiens
  CDR3 for alpha chain variable domain of TCR clone 388899 (TRAV26-1, TRAJ31)
CIVRDNNARLMF

SEQ ID NO: 777798 - protein, 15 aa, Homo sapiens
  CDR3 for beta chain variable domain of TCR clone 388899 (TRBV20-1, TRBJ2-4)
CSARDLTGGPNIQYF

SEQ ID NO: 777799 - protein, 14 aa, Homo sapiens
  CDR3 for alpha chain variable domain of TCR clone 388900 (TRAV2, TRAJ37)
WAVDFTSNTGKLIF

SEQ ID NO: 777800 - protein, 14 aa, Homo sapiens
  CDR3 for beta chain variable domain of TCR clone 388900 (TRBV7-2, TRBJ2-7)
CASSPKTSFYEQYF

SEQ ID NO: 777801 - protein, 11 aa, Homo sapiens
  CDR3 for alpha chain variable domain of TCR clone 388901 (TRAV1-1, TRAJ5)
CAVRVRRALTF

SEQ ID NO: 777802 - protein, 17 aa, Homo sapiens
  CDR3 for beta chain variable domain of TCR clone 388901 (TRBV7-8, TRBJ2-6)
CASSAGTGGAGANVLTF

SEQ ID NO: 777803 - protein, 14 aa, Homo sapiens
  CDR3 for alpha chain variable domain of TCR clone 388902 (TRAV1-2, TRAJ8)
CAVREDPGFQKLVF

SEQ ID NO: 777804 - protein, 15 aa, Homo sapiens
  CDR3 for beta chain variable domain of TCR clone 388902 (TRBV7-3, TRBJ2-2)
CASSETGQGTGELFF

SEQ ID NO: 777805 - protein, 13 aa, Homo sapiens
  CDR3 for alpha chain variable domain of TCR clone 388903 (TRAV8-6, TRAJ5)
CAVLDTGRTALTF

SEQ ID NO: 777806 - protein, 12 aa, Homo sapiens
  CDR3 for beta chain variable domain of TCR clone 388903 (TRBV7-9, TRBJ1-6)
CASSASESPLHF

SEQ ID NO: 777807 - protein, 15 aa, Homo sapiens
  CDR3 for alpha chain variable domain of TCR clone 388904 (TRAV13-1, TRAJ27)
CAASTFNTNAGKSTF

SEQ ID NO: 777808 - protein, 17 aa, Homo sapiens
  CDR3 for beta chain variable domain of TCR clone 388904 (TRBV11-2, TRBJ2-1)
CASSLYPPGVEYNEQFF

SEQ ID NO: 777809 - protein, 14 aa, Homo sapiens
  CDR3 for alpha chain variable domain of TCR clone 388905 (TRAV8-1, TRAJ32)
CAVNTRGATNKLIF

SEQ ID NO: 777810 - protein, 14 aa, Homo sapiens
  CDR3 for beta chain variable domain of TCR clone 388905 (TRBV9, TRBJ2-7)
CASSVGVGSYEQYF

SEQ ID NO: 777811 - protein, 12 aa, Homo sapiens
  CDR3 for alpha chain variable domain of TCR clone 388906 (TRAV3, TRAJ20)
CAVRDYDYKLSF

SEQ ID NO: 777812 - protein, 11 aa, Homo sapiens
  CDR3 for beta chain variable domain of TCR clone 388906 (TRBV7-9, TRBJ1-1)
CASSFGPEAFF

SEQ ID NO: 777813 - protein, 15 aa, Homo sapiens
  CDR3 for alpha chain variable domain of TCR clone 388907 (TRAV12-3, TRAJ6)
CAMSATTGGSYIPTF

SEQ ID NO: 777814 - protein, 14 aa, Homo sapiens
  CDR3 for beta chain variable domain of TCR clone 388907 (TRBV7-8, TRBJ2-3)
CASSFPDGQDTQYF

SEQ ID NO: 777815 - protein, 12 aa, Homo sapiens
  CDR3 for alpha chain variable domain of TCR clone 388908 (TRAV12-3, TRAJ17)
CAMTITGNKLTF

SEQ ID NO: 777816 - protein, 15 aa, Homo sapiens
  CDR3 for beta chain variable domain of TCR clone 388908 (TRBV19, TRBJ2-1)
CASSILGEGGNEQFF

SEQ ID NO: 777817 - protein, 13 aa, Homo sapiens
  CDR3 for alpha chain variable domain of TCR clone 388909 (TRAV21, TRAJ27)
CAARPGNAGKSTF

SEQ ID NO: 777818 - protein, 13 aa, Homo sapiens
  CDR3 for beta chain variable domain of TCR clone 388909 (TRBV11-2, TRBJ1-5)
CASSFGRNQPQHF

SEQ ID NO: 777819 - protein, 14 aa, Homo sapiens
  CDR3 for alpha chain variable domain of TCR clone 388910 (TRAV16, TRAJ31)
CALSGRNNNARLLF

SEQ ID NO: 777820 - protein, 12 aa, Homo sapiens
  CDR3 for beta chain variable domain of TCR clone 388910 (TRBV11-2, TRBJ1-2)
CASSREGDGYTF

SEQ ID NO: 777821 - protein, 18 aa, Homo sapiens
  CDR3 for alpha chain variable domain of TCR clone 388911 (TRAV26-2, TRAJ54)
CILRDVEVGIQGAQKPVF

SEQ ID NO: 777822 - protein, 16 aa, Homo sapiens
  CDR3 for beta chain variable domain of TCR clone 388911 (TRBV6-1, TRBJ2-5)
CASSETLDRGAETQYF

SEQ ID NO: 777823 - protein, 14 aa, Homo sapiens
  CDR3 for alpha chain variable domain of TCR clone 388912 (TRAV12-1, TRAJ17)
CVVNYKFAGNKLTF

SEQ ID NO: 777824 - protein, 17 aa, Homo sapiens
  CDR3 for beta chain variable domain of TCR clone 388912 (TRBV20-1, TRBJ2-1)
CSASSSGLAGSYNEQFF

SEQ ID NO: 777825 - protein, 13 aa, Homo sapiens
  CDR3 for alpha chain variable domain of TCR clone 388913 (TRAV12-1, TRAJ6)
CVVFTGGSYIPTF

SEQ ID NO: 777826 - protein, 13 aa, Homo sapiens
  CDR3 for beta chain variable domain of TCR clone 388913 (TRBV7-9, TRBJ1-2)
CASSLKQNYGYTF

SEQ ID NO: 777827 - protein, 15 aa, Homo sapiens
  CDR3 for alpha chain variable domain of TCR clone 388914 (TRAV38-1, TRAJ37)
CAFIHGSCNTGKRIF

SEQ ID NO: 777828 - protein, 12 aa, Homo sapiens
  CDR3 for beta chain variable domain of TCR clone 388914 (TRBV7-9, TRBJ2-7)
CASSFGSYEQYF

SEQ ID NO: 777829 - protein, 13 aa, Homo sapiens
  CDR3 for alpha chain variable domain of TCR clone 388915 (TRAV23/DV6, TRAJ58)
CAASEIGGSRLPF

SEQ ID NO: 777830 - protein, 14 aa, Homo sapiens
  CDR3 for beta chain variable domain of TCR clone 388915 (TRBV28, TRBJ2-5)
CASSRLAGGETQYF

SEQ ID NO: 777831 - protein, 14 aa, Homo sapiens
  CDR3 for alpha chain variable domain of TCR clone 388916 (TRAV9-2, TRAJ39)
CALYIYNAGNMLTF

SEQ ID NO: 777832 - protein, 14 aa, Homo sapiens
  CDR3 for beta chain variable domain of TCR clone 388916 (TRBV6-1, TRBJ1-3)
CASVQGGGGNNIYF

SEQ ID NO: 777833 - protein, 14 aa, Homo sapiens
  CDR3 for alpha chain variable domain of TCR clone 388917 (TRAV38-1, TRAJ40)
CALRPTSGTYKYIF

SEQ ID NO: 777834 - protein, 15 aa, Homo sapiens
  CDR3 for beta chain variable domain of TCR clone 388917 (TRBV7-2, TRBJ2-7)
CASSLSGALTYEQYF

SEQ ID NO: 777835 - protein, 11 aa, Homo sapiens
  CDR3 for alpha chain variable domain of TCR clone 388918 (TRAV1-1, TRAJ5)
CAVRVRRALTF

SEQ ID NO: 777836 - protein, 13 aa, Homo sapiens
  CDR3 for beta chain variable domain of TCR clone 388918 (TRBV27, TRBJ1-4)
CASSLMGDEKLFF

SEQ ID NO: 777837 - protein, 13 aa, Homo sapiens
  CDR3 for alpha chain variable domain of TCR clone 388919 (TRAV13-1, TRAJ6)
CAASKGGSYIPTF

SEQ ID NO: 777838 - protein, 12 aa, Homo sapiens
  CDR3 for beta chain variable domain of TCR clone 388919 (TRBV11-2, TRBJ2-1)
CASSPGNNEQFF

SEQ ID NO: 777839 - protein, 14 aa, Homo sapiens
  CDR3 for alpha chain variable domain of TCR clone 388920 (TRAV13-2, TRAJ45)
CAEMSRGGADGLTF

SEQ ID NO: 777840 - protein, 14 aa, Homo sapiens
  CDR3 for beta chain variable domain of TCR clone 388920 (TRBV2, TRBJ1-4)
CASNQGGLSLGLFF

SEQ ID NO: 777841 - protein, 13 aa, Homo sapiens
  CDR3 for alpha chain variable domain of TCR clone 388921 (TRAV8-3, TRAJ28)
CAVGAVWSYQLTF

SEQ ID NO: 777842 - protein, 12 aa, Homo sapiens
  CDR3 for beta chain variable domain of TCR clone 388921 (TRBV11-2, TRBJ2-2)
CASSLGGGELFF

SEQ ID NO: 777843 - protein, 12 aa, Homo sapiens
  CDR3 for alpha chain variable domain of TCR clone 388922 (TRAV12-2, TRAJ45)
CASGGGADGLTF

SEQ ID NO: 777844 - protein, 16 aa, Homo sapiens
  CDR3 for beta chain variable domain of TCR clone 388922 (TRBV19, TRBJ2-3)
CASSPGLLASTDTQYC

SEQ ID NO: 777845 - protein, 13 aa, Homo sapiens
  CDR3 for alpha chain variable domain of TCR clone 388923 (TRAV21, TRAJ27)
CAARPGNAGKSTF

SEQ ID NO: 777846 - protein, 13 aa, Homo sapiens
  CDR3 for beta chain variable domain of TCR clone 388923 (TRBV11-2, TRBJ2-7)
CQQLGAGAYEQYF

SEQ ID NO: 777847 - protein, 14 aa, Homo sapiens
  CDR3 for alpha chain variable domain of TCR clone 388924 (TRAV3, TRAJ34)
CAVRAAGNTDKLIF

SEQ ID NO: 777848 - protein, 17 aa, Homo sapiens
  CDR3 for beta chain variable domain of TCR clone 388924 (TRBV20-1, TRBJ2-7)
CSAAPGLARGISYEQYF

SEQ ID NO: 777849 - protein, 16 aa, Homo sapiens
  CDR3 for alpha chain variable domain of TCR clone 388925 (TRAV27, TRAJ48)
TAAQPGDTGLYLPLTF

SEQ ID NO: 777850 - protein, 14 aa, Homo sapiens
  CDR3 for beta chain variable domain of TCR clone 388925 (TRBV25-1, TRBJ1-1)
CASTHLGGNTEAFF

SEQ ID NO: 777851 - protein, 13 aa, Homo sapiens
  CDR3 for alpha chain variable domain of TCR clone 388926 (TRAV23/DV6, TRAJ15)
CAALPAGRNCSDL

SEQ ID NO: 777852 - protein, 14 aa, Homo sapiens
  CDR3 for beta chain variable domain of TCR clone 388926 (TRBV7-9, TRBJ1-2)
CASSRQCANYGYTF

SEQ ID NO: 777853 - protein, 14 aa, Homo sapiens
  CDR3 for alpha chain variable domain of TCR clone 388927 (TRAV25, TRAJ45)
CAGNSGGGADGLTF

SEQ ID NO: 777854 - protein, 14 aa, Homo sapiens
  CDR3 for beta chain variable domain of TCR clone 388927 (TRBV29-1, TRBJ1-2)
CSTRRGTQTSGYAF

SEQ ID NO: 777855 - protein, 15 aa, Homo sapiens
  CDR3 for alpha chain variable domain of TCR clone 388928 (TRAV8-4, TRAJ12)
CAVSDRVDSGYKLIF

SEQ ID NO: 777856 - protein, 15 aa, Homo sapiens
  CDR3 for beta chain variable domain of TCR clone 388928 (TRBV11-3, TRBJ2-1)
CASSLAGQTYNEQFF

SEQ ID NO: 777857 - protein, 14 aa, Homo sapiens
  CDR3 for alpha chain variable domain of TCR clone 388929 (TRAV12-1, TRAJ17)
CVVNYKAAGNKLTF

SEQ ID NO: 777858 - protein, 12 aa, Homo sapiens
  CDR3 for beta chain variable domain of TCR clone 388929 (TRBV11-2, TRBJ2-5)
CASSLVGETQYF

SEQ ID NO: 777859 - protein, 15 aa, Homo sapiens
  CDR3 for alpha chain variable domain of TCR clone 388930 (TRAV17, TRAJ4)
CATGTWSGGYNKLIF

SEQ ID NO: 777860 - protein, 16 aa, Homo sapiens
  CDR3 for beta chain variable domain of TCR clone 388930 (TRBV4-3, TRBJ2-1)
CASSPALDRGVNEQFF

SEQ ID NO: 777861 - protein, 15 aa, Homo sapiens
  CDR3 for alpha chain variable domain of TCR clone 388931 (TRAV3, TRAJ20)
CAVRDIKLRDFKLSF

SEQ ID NO: 777862 - protein, 15 aa, Homo sapiens
  CDR3 for beta chain variable domain of TCR clone 388931 (TRBV7-9, TRBJ1-6)
CASSSPGRGNSPLHF

SEQ ID NO: 777863 - protein, 18 aa, Homo sapiens
  CDR3 for alpha chain variable domain of TCR clone 388932 (TRAV26-1, TRAJ22)
CIVRVSFWFCKATDLLIW

SEQ ID NO: 777864 - protein, 13 aa, Homo sapiens
  CDR3 for beta chain variable domain of TCR clone 388932 (TRBV7-9, TRBJ1-2)
CASSLKQDYGYTF

SEQ ID NO: 777865 - protein, 12 aa, Homo sapiens
  CDR3 for alpha chain variable domain of TCR clone 388933 (TRAV13-1, TRAJ27)
CAAHTNAGKSTF

SEQ ID NO: 777866 - protein, 15 aa, Homo sapiens
  CDR3 for beta chain variable domain of TCR clone 388933 (TRBV7-9, TRBJ1-6)
CASSSPGRGNTPLHF

SEQ ID NO: 777867 - protein, 16 aa, Homo sapiens
  CDR3 for alpha chain variable domain of TCR clone 388934 (TRAV4, TRAJ18)
CCVLLIGGSTLGRLYF

SEQ ID NO: 777868 - protein, 15 aa, Homo sapiens
  CDR3 for beta chain variable domain of TCR clone 388934 (TRBV7-2, TRBJ2-1)
CASSSGLAGGNEQFF

SEQ ID NO: 777869 - protein, 13 aa, Homo sapiens
  CDR3 for alpha chain variable domain of TCR clone 388935 (TRAV27, TRAJ45)
CRSSGGGADGLTF

SEQ ID NO: 777870 - protein, 17 aa, Homo sapiens
  CDR3 for beta chain variable domain of TCR clone 388935 (TRBV11-2, TRBJ2-1)
CASSLCPPGGEYNEQFF

SEQ ID NO: 777871 - protein, 11 aa, Homo sapiens
  CDR3 for alpha chain variable domain of TCR clone 388936 (TRAV3, TRAJ21)
CAVGNFNKFYS

SEQ ID NO: 777872 - protein, 17 aa, Homo sapiens
  CDR3 for beta chain variable domain of TCR clone 388936 (TRBV24-1, TRBJ2-1)
CATSDVSTSGTYNEQFF

SEQ ID NO: 777873 - protein, 21 aa, Homo sapiens
  CDR3 for alpha chain variable domain of TCR clone 388937 (TRAV8-3, TRAJ10)
CAVGHTHGRRIQTHLWDRHSA

SEQ ID NO: 777874 - protein, 10 aa, Homo sapiens
  CDR3 for beta chain variable domain of TCR clone 388937 (TRBV20-1, TRBJ2-5)
CSARFETQYF

SEQ ID NO: 777875 - protein, 16 aa, Homo sapiens
  CDR3 for alpha chain variable domain of TCR clone 388938 (TRAV3, TRAJ18)
CAVRDGRGSTPGRRYF

SEQ ID NO: 777876 - protein, 15 aa, Homo sapiens
  CDR3 for beta chain variable domain of TCR clone 388938 (TRBV7-9, TRBJ1-6)
CASSSPGRGNSPLHF

SEQ ID NO: 777877 - protein, 14 aa, Homo sapiens
  CDR3 for alpha chain variable domain of TCR clone 388939 (TRAV35, TRAJ50)
CAGHRKTSYDKVIF

SEQ ID NO: 777878 - protein, 17 aa, Homo sapiens
  CDR3 for beta chain variable domain of TCR clone 388939 (TRBV11-2, TRBJ2-1)
CASSLYPPGVEYNEQFF

SEQ ID NO: 777879 - protein, 14 aa, Homo sapiens
  CDR3 for alpha chain variable domain of TCR clone 388940 (TRAV30, TRAJ33)
CGTVAPRSNYQLIW

SEQ ID NO: 777880 - protein, 18 aa, Homo sapiens
  CDR3 for beta chain variable domain of TCR clone 388940 (TRBV25-1, TRBJ1-2)
CASSGLQNGQGLIFGYTF

SEQ ID NO: 777881 - protein, 15 aa, Homo sapiens
  CDR3 for alpha chain variable domain of TCR clone 388941 (TRAV2, TRAJ9)
CAVAALNTGGFKTIF

SEQ ID NO: 777882 - protein, 13 aa, Homo sapiens
  CDR3 for beta chain variable domain of TCR clone 388941 (TRBV12-5, TRBJ2-3)
CASGDRQSDTQYF

SEQ ID NO: 777883 - protein, 15 aa, Homo sapiens
  CDR3 for alpha chain variable domain of TCR clone 388942 (TRAV1-2, TRAJ38)
CAVRENAGNNRKLIW

SEQ ID NO: 777884 - protein, 13 aa, Homo sapiens
  CDR3 for beta chain variable domain of TCR clone 388942 (TRBV27, TRBJ1-2)
CASSPSHRGRYTF

SEQ ID NO: 777885 - protein, 15 aa, Homo sapiens
  CDR3 for alpha chain variable domain of TCR clone 388943 (TRAV1-1, TRAJ20)
CAVTDNVANDYKLSF

SEQ ID NO: 777886 - protein, 13 aa, Homo sapiens
  CDR3 for beta chain variable domain of TCR clone 388943 (TRBV4-1, TRBJ2-2)
CASSQENTGELFF

SEQ ID NO: 777887 - protein, 16 aa, Homo sapiens
  CDR3 for alpha chain variable domain of TCR clone 388944 (TRAV27, TRAJ13)
CAGAKSDSGGYQKVTF

SEQ ID NO: 777888 - protein, 15 aa, Homo sapiens
  CDR3 for beta chain variable domain of TCR clone 388944 (TRBV29-1, TRBJ2-1)
CSVGRDALFYNEQFF

SEQ ID NO: 777889 - protein, 13 aa, Homo sapiens
  CDR3 for alpha chain variable domain of TCR clone 388945 (TRAV13-2, TRAJ48)
CAEMDFGNEKLTF

SEQ ID NO: 777890 - protein, 12 aa, Homo sapiens
  CDR3 for beta chain variable domain of TCR clone 388945 (TRBV29-1, TRBJ2-7)
CSARDRPYEQYF

SEQ ID NO: 777891 - protein, 11 aa, Homo sapiens
  CDR3 for alpha chain variable domain of TCR clone 388946 (TRAV12-1, TRAJ16)
CGDPDGQKLLF

SEQ ID NO: 777892 - protein, 13 aa, Homo sapiens
  CDR3 for beta chain variable domain of TCR clone 388946 (TRBV19, TRBJ2-7)
CASSPRQSYEQYF

SEQ ID NO: 777893 - protein, 10 aa, Homo sapiens
  CDR3 for alpha chain variable domain of TCR clone 388947 (TRAV12-3, TRAJ27)
CNGQCRQINL

SEQ ID NO: 777894 - protein, 14 aa, Homo sapiens
  CDR3 for beta chain variable domain of TCR clone 388947 (TRBV4-1, TRBJ2-2)
CASSQAVNTGELFF

SEQ ID NO: 777895 - protein, 14 aa, Homo sapiens
  CDR3 for alpha chain variable domain of TCR clone 388948 (TRAV23/DV6, TRAJ22)
CAASVSGSARQLTF

SEQ ID NO: 777896 - protein, 13 aa, Homo sapiens
  CDR3 for beta chain variable domain of TCR clone 388948 (TRBV11-2, TRBJ2-5)
CASSSTGEETQYF

SEQ ID NO: 777897 - protein, 17 aa, Homo sapiens
  CDR3 for alpha chain variable domain of TCR clone 388949 (TRAV16, TRAJ58)
CITVLSNGETSGSRLTF

SEQ ID NO: 777898 - protein, 17 aa, Homo sapiens
  CDR3 for beta chain variable domain of TCR clone 388949 (TRBV18, TRBJ2-1)
WASSRGLSGGADNEQFF

SEQ ID NO: 777899 - protein, 14 aa, Homo sapiens
  CDR3 for alpha chain variable domain of TCR clone 388950 (TRAV9-2, TRAJ39)
CALYIYDAGNMLTF

SEQ ID NO: 777900 - protein, 15 aa, Homo sapiens
  CDR3 for beta chain variable domain of TCR clone 388950 (TRBV5-1, TRBJ2-1)
CASSPPRAPYNEQFF

SEQ ID NO: 777901 - protein, 13 aa, Homo sapiens
  CDR3 for alpha chain variable domain of TCR clone 388951 (TRAV24, TRAJ42)
CAFSTGSQGNLIF

SEQ ID NO: 777902 - protein, 13 aa, Homo sapiens
  CDR3 for beta chain variable domain of TCR clone 388951 (TRBV6-1, TRBJ1-1)
CASSRQGNTEAFF

SEQ ID NO: 777903 - protein, 13 aa, Homo sapiens
  CDR3 for alpha chain variable domain of TCR clone 388952 (TRAV8-1, TRAJ39)
CAVANNAGNMLTF

SEQ ID NO: 777904 - protein, 15 aa, Homo sapiens
  CDR3 for beta chain variable domain of TCR clone 388952 (TRBV7-2, TRBJ2-1)
CASSLTRGAYNEQFF

SEQ ID NO: 777905 - protein, 14 aa, Homo sapiens
  CDR3 for alpha chain variable domain of TCR clone 388953 (TRAV1-2, TRAJ16)
CAVNRFSDGQKLLF

SEQ ID NO: 777906 - protein, 15 aa, Homo sapiens
  CDR3 for beta chain variable domain of TCR clone 388953 (TRBV2, TRBJ2-7)
CASSGGLARSYEQYF

SEQ ID NO: 777907 - protein, 15 aa, Homo sapiens
  CDR3 for alpha chain variable domain of TCR clone 388954 (TRAV27, TRAJ38)
CAARRNAGNNRKLIW

SEQ ID NO: 777908 - protein, 17 aa, Homo sapiens
  CDR3 for beta chain variable domain of TCR clone 388954 (TRBV11-2, TRBJ2-1)
CASSLYPPGVEYTEQFF

SEQ ID NO: 777909 - protein, 14 aa, Homo sapiens
  CDR3 for alpha chain variable domain of TCR clone 388955 (TRAV2, TRAJ29)
CAGPFQYGNTPLVF

SEQ ID NO: 777910 - protein, 15 aa, Homo sapiens
  CDR3 for beta chain variable domain of TCR clone 388955 (TRBV7-2, TRBJ2-1)
CASSPTGGGEVEQFF

SEQ ID NO: 777911 - protein, 15 aa, Homo sapiens
  CDR3 for alpha chain variable domain of TCR clone 388956 (TRAV20, TRAJ6)
CAVRLQSGGSYIPTF

SEQ ID NO: 777912 - protein, 14 aa, Homo sapiens
  CDR3 for beta chain variable domain of TCR clone 388956 (TRBV12-4, TRBJ2-7)
RASSASGGWYEQYF

SEQ ID NO: 777913 - protein, 14 aa, Homo sapiens
  CDR3 for alpha chain variable domain of TCR clone 388957 (TRAV12-1, TRAJ12)
CVVTRMDSSYKLIF

SEQ ID NO: 777914 - protein, 14 aa, Homo sapiens
  CDR3 for beta chain variable domain of TCR clone 388957 (TRBV4-1, TRBJ2-7)
CASSPVAGGDQQYF

SEQ ID NO: 777915 - protein, 10 aa, Homo sapiens
  CDR3 for alpha chain variable domain of TCR clone 388958 (TRAV26-2, TRAJ49)
CILLGNQFYF

SEQ ID NO: 777916 - protein, 16 aa, Homo sapiens
  CDR3 for beta chain variable domain of TCR clone 388958 (TRBV28, TRBJ2-6)
CASSNRRGSGANVLTF

SEQ ID NO: 777917 - protein, 15 aa, Homo sapiens
  CDR3 for alpha chain variable domain of TCR clone 388959 (TRAV16, TRAJ12)
CSKWPLRDSSYKLIF

SEQ ID NO: 777918 - protein, 12 aa, Homo sapiens
  CDR3 for beta chain variable domain of TCR clone 388959 (TRBV19, TRBJ1-4)
CASKDWPGGLFF

SEQ ID NO: 777919 - protein, 14 aa, Homo sapiens
  CDR3 for alpha chain variable domain of TCR clone 388960 (TRAV1-2, TRAJ8)
CAVREDTGLQQLVF

SEQ ID NO: 777920 - protein, 15 aa, Homo sapiens
  CDR3 for beta chain variable domain of TCR clone 388960 (TRBV6-3, TRBJ2-7)
CASSSPGTVFYEQYF

SEQ ID NO: 777921 - protein, 15 aa, Homo sapiens
  CDR3 for alpha chain variable domain of TCR clone 388961 (TRAV2, TRAJ24)
CAVEVLTDSWGKFRF

SEQ ID NO: 777922 - protein, 14 aa, Homo sapiens
  CDR3 for beta chain variable domain of TCR clone 388961 (TRBV19, TRBJ2-1)
CASSMGSGRRSSSS

SEQ ID NO: 777923 - protein, 16 aa, Homo sapiens
  CDR3 for alpha chain variable domain of TCR clone 388962 (TRAV3, TRAJ42)
CAVRDIEGGSQGNLLF

SEQ ID NO: 777924 - protein, 14 aa, Homo sapiens
  CDR3 for beta chain variable domain of TCR clone 388962 (TRBV18, TRBJ1-1)
CASSPPTGRTEAFF

SEQ ID NO: 777925 - protein, 14 aa, Homo sapiens
  CDR3 for alpha chain variable domain of TCR clone 388963 (TRAV1-2, TRAJ16)
CAVNLFSDGQKLLF

SEQ ID NO: 777926 - protein, 14 aa, Homo sapiens
  CDR3 for beta chain variable domain of TCR clone 388963 (TRBV12-5, TRBJ2-5)
CASGSRTHQETQYF

SEQ ID NO: 777927 - protein, 13 aa, Homo sapiens
  CDR3 for alpha chain variable domain of TCR clone 388964 (TRAV12-3, TRAJ33)
CAMSVNSNYQLIW

SEQ ID NO: 777928 - protein, 16 aa, Homo sapiens
  CDR3 for beta chain variable domain of TCR clone 388964 (TRBV2, TRBJ2-3)
CASSTPVEGVTDTQYF

SEQ ID NO: 777929 - protein, 12 aa, Homo sapiens
  CDR3 for alpha chain variable domain of TCR clone 388965 (TRAV2, TRAJ9)
CAVGAGGFKTIF

SEQ ID NO: 777930 - protein, 13 aa, Homo sapiens
  CDR3 for beta chain variable domain of TCR clone 388965 (TRBV13, TRBJ2-5)
CASSPEVGETQYF

SEQ ID NO: 777931 - protein, 15 aa, Homo sapiens
  CDR3 for alpha chain variable domain of TCR clone 388966 (TRAV16, TRAJ26)
CSTVLQRNYGQNFVF

SEQ ID NO: 777932 - protein, 15 aa, Homo sapiens
  CDR3 for beta chain variable domain of TCR clone 388966 (TRBV7-2, TRBJ2-3)
CASSLTGTSTDTQYF

SEQ ID NO: 777933 - protein, 15 aa, Homo sapiens
  CDR3 for alpha chain variable domain of TCR clone 388967 (TRAV13-1, TRAJ50)
CEAKGSETSYDKVIF

SEQ ID NO: 777934 - protein, 13 aa, Homo sapiens
  CDR3 for beta chain variable domain of TCR clone 388967 (TRBV20-1, TRBJ2-3)
CSARAGGRDTQYF

SEQ ID NO: 777935 - protein, 13 aa, Homo sapiens
  CDR3 for alpha chain variable domain of TCR clone 388968 (TRAV12-3, TRAJ43)
CAMIRPNNNDMRF

SEQ ID NO: 777936 - protein, 16 aa, Homo sapiens
  CDR3 for beta chain variable domain of TCR clone 388968 (TRBV20-1, TRBJ2-4)
CSATSLAELAKNIQYF

SEQ ID NO: 777937 - protein, 15 aa, Homo sapiens
  CDR3 for alpha chain variable domain of TCR clone 388969 (TRAV23/DV6, TRAJ18)
CAARYRGSTLGRLYF

SEQ ID NO: 777938 - protein, 13 aa, Homo sapiens
  CDR3 for beta chain variable domain of TCR clone 388969 (TRBV7-2, TRBJ2-7)
CASSSPSGSEQDF

SEQ ID NO: 777939 - protein, 14 aa, Homo sapiens
  CDR3 for alpha chain variable domain of TCR clone 388970 (TRAV4, TRAJ9)
CLVGSGTGGFKTIF

SEQ ID NO: 777940 - protein, 15 aa, Homo sapiens
  CDR3 for beta chain variable domain of TCR clone 388970 (TRBV7-2, TRBJ2-1)
CASSLASGLVNEQLF

SEQ ID NO: 777941 - protein, 13 aa, Homo sapiens
  CDR3 for alpha chain variable domain of TCR clone 388971 (TRAV12-2, TRAJ42)
CAVKRGSQGNLIF

SEQ ID NO: 777942 - protein, 16 aa, Homo sapiens
  CDR3 for beta chain variable domain of TCR clone 388971 (TRBV9, TRBJ2-2)
CASRAMGKGNTGELFF

SEQ ID NO: 777943 - protein, 13 aa, Homo sapiens
  CDR3 for alpha chain variable domain of TCR clone 388972 (TRAV3, TRAJ43)
CAVKARNNKNMRF

SEQ ID NO: 777944 - protein, 16 aa, Homo sapiens
  CDR3 for beta chain variable domain of TCR clone 388972 (TRBV7-9, TRBJ2-3)
CASSFSVAGGTDTQYF

SEQ ID NO: 777945 - protein, 12 aa, Homo sapiens
  CDR3 for alpha chain variable domain of TCR clone 388973 (TRAV19, TRAJ23)
CALRAWGGKLIF

SEQ ID NO: 777946 - protein, 15 aa, Homo sapiens
  CDR3 for beta chain variable domain of TCR clone 388973 (TRBV7-6, TRBJ2-5)
CASSKPTGPQETQYF

SEQ ID NO: 777947 - protein, 11 aa, Homo sapiens
  CDR3 for alpha chain variable domain of TCR clone 388974 (TRAV21, TRAJ11)
CAVNGYSTLTF

SEQ ID NO: 777948 - protein, 11 aa, Homo sapiens
  CDR3 for beta chain variable domain of TCR clone 388974 (TRBV27, TRBJ2-3)
CASSLVDTQYF

SEQ ID NO: 777949 - protein, 13 aa, Homo sapiens
  CDR3 for alpha chain variable domain of TCR clone 388975 (TRAV12-2, TRAJ24)
CAVSTDTWGKLQF

SEQ ID NO: 777950 - protein, 12 aa, Homo sapiens
  CDR3 for beta chain variable domain of TCR clone 388975 (TRBV7-6, TRBJ2-7)
CASSLADSEQYF

SEQ ID NO: 777951 - protein, 12 aa, Homo sapiens
  CDR3 for alpha chain variable domain of TCR clone 388976 (TRAV1-2, TRAJ24)
CAVGGSWGKFQF

SEQ ID NO: 777952 - protein, 16 aa, Homo sapiens
  CDR3 for beta chain variable domain of TCR clone 388976 (TRBV3-1, TRBJ2-7)
CASSQGATGVAYEQYF

SEQ ID NO: 777953 - protein, 14 aa, Homo sapiens
  CDR3 for alpha chain variable domain of TCR clone 388977 (TRAV12-3, TRAJ29)
CAMILLSGNTPLVF

SEQ ID NO: 777954 - protein, 14 aa, Homo sapiens
  CDR3 for beta chain variable domain of TCR clone 388977 (TRBV7-3, TRBJ2-7)
CASSLGPTSYEQYF

SEQ ID NO: 777955 - protein, 14 aa, Homo sapiens
  CDR3 for alpha chain variable domain of TCR clone 388978 (TRAV36/DV7, TRAJ44)
CCGANTGTASKLTF

SEQ ID NO: 777956 - protein, 14 aa, Homo sapiens
  CDR3 for beta chain variable domain of TCR clone 388978 (TRBV20-1, TRBJ1-3)
RSASPTGAGNTIYF

SEQ ID NO: 777957 - protein, 17 aa, Homo sapiens
  CDR3 for alpha chain variable domain of TCR clone 388979 (TRAV38-1, TRAJ28)
CAFMKPTSGAGRYQLTF

SEQ ID NO: 777958 - protein, 15 aa, Homo sapiens
  CDR3 for beta chain variable domain of TCR clone 388979 (TRBV5-1, TRBJ2-4)
CASSLGGGGSYIQYF

SEQ ID NO: 777959 - protein, 14 aa, Homo sapiens
  CDR3 for alpha chain variable domain of TCR clone 388980 (TRAV17, TRAJ35)
CATDRPGFGNVLHC

SEQ ID NO: 777960 - protein, 12 aa, Homo sapiens
  CDR3 for beta chain variable domain of TCR clone 388980 (TRBV11-3, TRBJ2-2)
CASSTRPGAKRR

SEQ ID NO: 777961 - protein, 15 aa, Homo sapiens
  CDR3 for alpha chain variable domain of TCR clone 388981 (TRAV26-1, TRAJ56)
CIVRVDNGANSKLTF

SEQ ID NO: 777962 - protein, 15 aa, Homo sapiens
  CDR3 for beta chain variable domain of TCR clone 388981 (TRBV5-1, TRBJ2-1)
CASSLGERGYNEQFF

SEQ ID NO: 777963 - protein, 13 aa, Homo sapiens
  CDR3 for alpha chain variable domain of TCR clone 388982 (TRAV1-1, TRAJ9)
CAAKNTGGFETIF

SEQ ID NO: 777964 - protein, 15 aa, Homo sapiens
  CDR3 for beta chain variable domain of TCR clone 388982 (TRBV7-2, TRBJ2-1)
CASTHGTGIYNEQFF

SEQ ID NO: 777965 - protein, 16 aa, Homo sapiens
  CDR3 for alpha chain variable domain of TCR clone 388983 (TRAV12-1, TRAJ42)
CVVTPYYGGSQGNLIF

SEQ ID NO: 777966 - protein, 15 aa, Homo sapiens
  CDR3 for beta chain variable domain of TCR clone 388983 (TRBV4-3, TRBJ2-7)
CASSQGGRGICEQYF

SEQ ID NO: 777967 - protein, 13 aa, Homo sapiens
  CDR3 for alpha chain variable domain of TCR clone 388984 (TRAV13-1, TRAJ5)
CAAEHTGRRELTF

SEQ ID NO: 777968 - protein, 13 aa, Homo sapiens
  CDR3 for beta chain variable domain of TCR clone 388984 (TRBV10-2, TRBJ2-1)
CASGASGDARQFF

SEQ ID NO: 777969 - protein, 14 aa, Homo sapiens
  CDR3 for alpha chain variable domain of TCR clone 388985 (TRAV3, TRAJ33)
CAVRDMDSDYQLIW

SEQ ID NO: 777970 - protein, 19 aa, Homo sapiens
  CDR3 for beta chain variable domain of TCR clone 388985 (TRBV7-3, TRBJ1-2)
CASSFPQGNDGELWLHLRF

SEQ ID NO: 777971 - protein, 13 aa, Homo sapiens
  CDR3 for alpha chain variable domain of TCR clone 388986 (TRAV12-3, TRAJ7)
CAMTPYGNNRIAF

SEQ ID NO: 777972 - protein, 16 aa, Homo sapiens
  CDR3 for beta chain variable domain of TCR clone 388986 (TRBV20-1, TRBJ1-4)
CSGRPYGGELNDKLFF

SEQ ID NO: 777973 - protein, 14 aa, Homo sapiens
  CDR3 for alpha chain variable domain of TCR clone 388987 (TRAV1-2, TRAJ8)
GAVREDTGFQKLVF

SEQ ID NO: 777974 - protein, 14 aa, Homo sapiens
  CDR3 for beta chain variable domain of TCR clone 388987 (TRBV20-1, TRBJ1-1)
CSAQTRIGGTEAFF

SEQ ID NO: 777975 - protein, 11 aa, Homo sapiens
  CDR3 for alpha chain variable domain of TCR clone 388988 (TRAV12-2, TRAJ54)
CAVEGAQKLVF

SEQ ID NO: 777976 - protein, 17 aa, Homo sapiens
  CDR3 for beta chain variable domain of TCR clone 388988 (TRBV18, TRBJ1-3)
CASSPYPTGPAGNTIYF

SEQ ID NO: 777977 - protein, 12 aa, Homo sapiens
  CDR3 for alpha chain variable domain of TCR clone 388989 (TRAV12-3, TRAJ17)
CAMTLTGNKLTF

SEQ ID NO: 777978 - protein, 15 aa, Homo sapiens
  CDR3 for beta chain variable domain of TCR clone 388989 (TRBV27, TRBJ1-5)
CASSLGQGSVQPQHF

SEQ ID NO: 777979 - protein, 13 aa, Homo sapiens
  CDR3 for alpha chain variable domain of TCR clone 388990 (TRAV13-1, TRAJ39)
CAASIWAGNMRTF

SEQ ID NO: 777980 - protein, 13 aa, Homo sapiens
  CDR3 for beta chain variable domain of TCR clone 388990 (TRBV11-2, TRBJ1-3)
CASSLEPVNTIYF

SEQ ID NO: 777981 - protein, 12 aa, Homo sapiens
  CDR3 for alpha chain variable domain of TCR clone 388991 (TRAV13-1, TRAJ21)
CAAKEGFNKFYF

SEQ ID NO: 777982 - protein, 16 aa, Homo sapiens
  CDR3 for beta chain variable domain of TCR clone 388991 (TRBV7-9, TRBJ2-1)
CSSSDVAGGSYNEQFF

SEQ ID NO: 777983 - protein, 14 aa, Homo sapiens
  CDR3 for alpha chain variable domain of TCR clone 388992 (TRAV38-1, TRAJ40)
CALRPTSGTYKYIF

SEQ ID NO: 777984 - protein, 14 aa, Homo sapiens
  CDR3 for beta chain variable domain of TCR clone 388992 (TRBV6-1, TRBJ2-1)
CASSLGPAGLWEFF

SEQ ID NO: 777985 - protein, 12 aa, Homo sapiens
  CDR3 for alpha chain variable domain of TCR clone 388993 (TRAV26-2, TRAJ21)
CILKGNFNKFYF

SEQ ID NO: 777986 - protein, 16 aa, Homo sapiens
  CDR3 for beta chain variable domain of TCR clone 388993 (TRBV7-3, TRBJ2-1)
CASSLEGYRSYNEQFF

SEQ ID NO: 777987 - protein, 13 aa, Homo sapiens
  CDR3 for alpha chain variable domain of TCR clone 388994 (TRAV35, TRAJ37)
CAGSSGNTGKLIF

SEQ ID NO: 777988 - protein, 12 aa, Homo sapiens
  CDR3 for beta chain variable domain of TCR clone 388994 (TRBV29-1, TRBJ2-2)
CSVDKYAGELFF

SEQ ID NO: 777989 - protein, 15 aa, Homo sapiens
  CDR3 for alpha chain variable domain of TCR clone 388995 (TRAV21, TRAJ53)
CATLNSGGSNYKLTF

SEQ ID NO: 777990 - protein, 16 aa, Homo sapiens
  CDR3 for beta chain variable domain of TCR clone 388995 (TRBV9, TRBJ2-1)
CTSSVGGGGDYNEQFF

SEQ ID NO: 777991 - protein, 13 aa, Homo sapiens
  CDR3 for alpha chain variable domain of TCR clone 388996 (TRAV21, TRAJ9)
CAVRRSGGFKTIF

SEQ ID NO: 777992 - protein, 15 aa, Homo sapiens
  CDR3 for beta chain variable domain of TCR clone 388996 (TRBV4-1, TRBJ1-2)
CASSQERGESYGYTF

SEQ ID NO: 777993 - protein, 14 aa, Homo sapiens
  CDR3 for alpha chain variable domain of TCR clone 388997 (TRAV13-1, TRAJ40)
CAASMTTGTYKYIF

SEQ ID NO: 777994 - protein, 15 aa, Homo sapiens
  CDR3 for beta chain variable domain of TCR clone 388997 (TRBV7-3, TRBJ2-1)
CASSPTGGGEVEQFF

SEQ ID NO: 777995 - protein, 12 aa, Homo sapiens
  CDR3 for alpha chain variable domain of TCR clone 388998 (TRAV27, TRAJ35)
CAGADFRNLLHF

SEQ ID NO: 777996 - protein, 16 aa, Homo sapiens
  CDR3 for beta chain variable domain of TCR clone 388998 (TRBV6-1, TRBJ2-1)
CASILRQGSSYNEQFF

SEQ ID NO: 777997 - protein, 15 aa, Homo sapiens
  CDR3 for alpha chain variable domain of TCR clone 388999 (TRAV26-1, TRAJ29)
CIVKVEGSGNTPLVF

SEQ ID NO: 777998 - protein, 14 aa, Homo sapiens
  CDR3 for beta chain variable domain of TCR clone 388999 (TRBV18, TRBJ2-5)
RASSPGVSQETQYF

SEQ ID NO: 777999 - protein, 12 aa, Homo sapiens
  CDR3 for alpha chain variable domain of TCR clone 389000 (TRAV12-3, TRAJ41)
CAMSYSGYALNF

SEQ ID NO: 778000 - protein, 14 aa, Homo sapiens
  CDR3 for beta chain variable domain of TCR clone 389000 (TRBV11-2, TRBJ2-5)
CASSRTGGIETQYF

SEQ ID NO: 778001 - protein, 13 aa, Homo sapiens
  CDR3 for alpha chain variable domain of TCR clone 389001 (TRAV21, TRAJ27)
CAARPGNACKSTF

SEQ ID NO: 778002 - protein, 14 aa, Homo sapiens
  CDR3 for beta chain variable domain of TCR clone 389001 (TRBV7-6, TRBJ2-1)
CASSLGGGADEQFF

SEQ ID NO: 778003 - protein, 14 aa, Homo sapiens
  CDR3 for alpha chain variable domain of TCR clone 389002 (TRAV8-6, TRAJ49)
CAVSDPGTGNQFFF

SEQ ID NO: 778004 - protein, 16 aa, Homo sapiens
  CDR3 for beta chain variable domain of TCR clone 389002 (TRBV24-1, TRBJ2-1)
CATSGVTGANYNEQFF

SEQ ID NO: 778005 - protein, 12 aa, Homo sapiens
  CDR3 for alpha chain variable domain of TCR clone 389003 (TRAV13-2, TRAJ23)
CAERHRGGKLIF

SEQ ID NO: 778006 - protein, 16 aa, Homo sapiens
  CDR3 for beta chain variable domain of TCR clone 389003 (TRBV29-1, TRBJ2-7)
CSVEVVGTSGSYEQYF

SEQ ID NO: 778007 - protein, 14 aa, Homo sapiens
  CDR3 for alpha chain variable domain of TCR clone 389004 (TRAV1-2, TRAJ16)
CVVNRFSDGQKLLF

SEQ ID NO: 778008 - protein, 15 aa, Homo sapiens
  CDR3 for beta chain variable domain of TCR clone 389004 (TRBV9, TRBJ2-1)
CASSLAGSSYNEQFF

SEQ ID NO: 778009 - protein, 13 aa, Homo sapiens
  CDR3 for alpha chain variable domain of TCR clone 389005 (TRAV36/DV7, TRAJ37)
CAVFSSNTGNLIF

SEQ ID NO: 778010 - protein, 15 aa, Homo sapiens
  CDR3 for beta chain variable domain of TCR clone 389005 (TRBV5-1, TRBJ2-2)
CASSSQGGNTGELFF

SEQ ID NO: 778011 - protein, 13 aa, Homo sapiens
  CDR3 for alpha chain variable domain of TCR clone 389006 (TRAV3, TRAJ27)
CAVTNANSGKSTF

SEQ ID NO: 778012 - protein, 13 aa, Homo sapiens
  CDR3 for beta chain variable domain of TCR clone 389006 (TRBV19, TRBJ2-7)
CASQSYGAGEQYF

SEQ ID NO: 778013 - protein, 15 aa, Homo sapiens
  CDR3 for alpha chain variable domain of TCR clone 389007 (TRAV8-4, TRAJ8)
CAVSDLNTGSQKLVF

SEQ ID NO: 778014 - protein, 14 aa, Homo sapiens
  CDR3 for beta chain variable domain of TCR clone 389007 (TRBV7-2, TRBJ2-3)
CASSQTGSSYTQYF

SEQ ID NO: 778015 - protein, 15 aa, Homo sapiens
  CDR3 for alpha chain variable domain of TCR clone 389008 (TRAV36/DV7, TRAJ53)
CAEEGSGGSNYELTF

SEQ ID NO: 778016 - protein, 16 aa, Homo sapiens
  CDR3 for beta chain variable domain of TCR clone 389008 (TRBV27, TRBJ2-2)
CASSLSGFWVTGELFF

SEQ ID NO: 778017 - protein, 11 aa, Homo sapiens
  CDR3 for alpha chain variable domain of TCR clone 389009 (TRAV3, TRAJ21)
CAVGNFNKFYF

SEQ ID NO: 778018 - protein, 13 aa, Homo sapiens
  CDR3 for beta chain variable domain of TCR clone 389009 (TRBV12-4, TRBJ2-5)
CASSPSGGETQYF

SEQ ID NO: 778019 - protein, 14 aa, Homo sapiens
  CDR3 for alpha chain variable domain of TCR clone 389010 (TRAV13-1, TRAJ44)
CAAKATGTASKLTF

SEQ ID NO: 778020 - protein, 15 aa, Homo sapiens
  CDR3 for beta chain variable domain of TCR clone 389010 (TRBV20-1, TRBJ1-6)
CSARAASSYNSPLHF

SEQ ID NO: 778021 - protein, 11 aa, Homo sapiens
  CDR3 for alpha chain variable domain of TCR clone 389011 (TRAV27, TRAJ37)
CAGTQGGKLIF

SEQ ID NO: 778022 - protein, 12 aa, Homo sapiens
  CDR3 for beta chain variable domain of TCR clone 389011 (TRBV11-2, TRBJ2-2)
CASSLGGGELFF

SEQ ID NO: 778023 - protein, 11 aa, Homo sapiens
  CDR3 for alpha chain variable domain of TCR clone 389012 (TRAV17, TRAJ31)
CATSNNARLMF

SEQ ID NO: 778024 - protein, 16 aa, Homo sapiens
  CDR3 for beta chain variable domain of TCR clone 389012 (TRBV7-8, TRBJ2-4)
CASSAERTLAKNIQYL

SEQ ID NO: 778025 - protein, 12 aa, Homo sapiens
  CDR3 for alpha chain variable domain of TCR clone 389013 (TRAV9-2, TRAJ36)
CALKKGANNLFF

SEQ ID NO: 778026 - protein, 14 aa, Homo sapiens
  CDR3 for beta chain variable domain of TCR clone 389013 (TRBV27, TRBJ2-1)
CAGSIAETYNEQFF

SEQ ID NO: 778027 - protein, 15 aa, Homo sapiens
  CDR3 for alpha chain variable domain of TCR clone 389014 (TRAV13-2, TRAJ10)
CAENKIGGGGNKLTF

SEQ ID NO: 778028 - protein, 14 aa, Homo sapiens
  CDR3 for beta chain variable domain of TCR clone 389014 (TRBV5-5, TRBJ1-5)
CASSGQGVDQPQHF

SEQ ID NO: 778029 - protein, 16 aa, Homo sapiens
  CDR3 for alpha chain variable domain of TCR clone 389015 (TRAV30, TRAJ24)
CGTEIVDAGSWGKFQF

SEQ ID NO: 778030 - protein, 15 aa, Homo sapiens
  CDR3 for beta chain variable domain of TCR clone 389015 (TRBV20-1, TRBJ2-4)
CSARDLTGGPNIQYF

SEQ ID NO: 778031 - protein, 14 aa, Homo sapiens
  CDR3 for alpha chain variable domain of TCR clone 389016 (TRAV12-3, TRAJ33)
CAMSVPGSNYQLIW

SEQ ID NO: 778032 - protein, 15 aa, Homo sapiens
  CDR3 for beta chain variable domain of TCR clone 389016 (TRBV7-9, TRBJ1-2)
CASSLDREPNYGDTF

SEQ ID NO: 778033 - protein, 10 aa, Homo sapiens
  CDR3 for alpha chain variable domain of TCR clone 389017 (TRAV23/DV6, TRAJ57)
CAASSTLSQG

SEQ ID NO: 778034 - protein, 17 aa, Homo sapiens
  CDR3 for beta chain variable domain of TCR clone 389017 (TRBV18, TRBJ2-1)
CASSKGLSGGADNEQFF

SEQ ID NO: 778035 - protein, 17 aa, Homo sapiens
  CDR3 for alpha chain variable domain of TCR clone 389018 (TRAV4, TRAJ18)
RLVVAAGRGSTLGRLYF

SEQ ID NO: 778036 - protein, 17 aa, Homo sapiens
  CDR3 for beta chain variable domain of TCR clone 389018 (TRBV28, TRBJ2-2)
CASSLATGMGDAGELFF

SEQ ID NO: 778037 - protein, 10 aa, Homo sapiens
  CDR3 for alpha chain variable domain of TCR clone 389019 (TRAV13-1, TRAJ15)
INQAGTALIF

SEQ ID NO: 778038 - protein, 14 aa, Homo sapiens
  CDR3 for beta chain variable domain of TCR clone 389019 (TRBV7-9, TRBJ2-1)
CASSDDSGYNEQFF

SEQ ID NO: 778039 - protein, 14 aa, Homo sapiens
  CDR3 for alpha chain variable domain of TCR clone 389020 (TRAV12-2, TRAJ13)
CAVNKTGGYQKVTF

SEQ ID NO: 778040 - protein, 15 aa, Homo sapiens
  CDR3 for beta chain variable domain of TCR clone 389020 (TRBV27, TRBJ2-1)
CASSNGGGSDNEQFF

SEQ ID NO: 778041 - protein, 15 aa, Homo sapiens
  CDR3 for alpha chain variable domain of TCR clone 389021 (TRAV25, TRAJ52)
CAGTSGGTSYGKLTF

SEQ ID NO: 778042 - protein, 16 aa, Homo sapiens
  CDR3 for beta chain variable domain of TCR clone 389021 (TRBV15, TRBJ1-2)
CATSRGPRTGGGGYTF

SEQ ID NO: 778043 - protein, 17 aa, Homo sapiens
  CDR3 for alpha chain variable domain of TCR clone 389022 (TRAV27, TRAJ13)
CAGAGVTRKLPLELLQS

SEQ ID NO: 778044 - protein, 15 aa, Homo sapiens
  CDR3 for beta chain variable domain of TCR clone 389022 (TRBV20-1, TRBJ2-6)
CSARDRGPGANVLTF

SEQ ID NO: 778045 - protein, 22 aa, Homo sapiens
  CDR3 for alpha chain variable domain of TCR clone 389023 (TRAV4, )
CLVGPHNYDIQNPDPAVYQLRD

SEQ ID NO: 778046 - protein, 17 aa, Homo sapiens
  CDR3 for beta chain variable domain of TCR clone 389023 (TRBV24-1, TRBJ2-1)
CATSDVLTSGTYNEQFF

SEQ ID NO: 778047 - protein, 14 aa, Homo sapiens
  CDR3 for alpha chain variable domain of TCR clone 389024 (TRAV17, TRAJ54)
CATDANQGAQTLVF

SEQ ID NO: 778048 - protein, 12 aa, Homo sapiens
  CDR3 for beta chain variable domain of TCR clone 389024 (TRBV7-9, TRBJ2-7)
CASSIKREEQYF

SEQ ID NO: 778049 - protein, 16 aa, Homo sapiens
  CDR3 for alpha chain variable domain of TCR clone 389025 (TRAV1-2, TRAJ10)
CAVRGVLTGGGNKLTF

SEQ ID NO: 778050 - protein, 15 aa, Homo sapiens
  CDR3 for beta chain variable domain of TCR clone 389025 (TRBV6-1, TRBJ2-1)
CASSEAAYSYNEQFF

SEQ ID NO: 778051 - protein, 17 aa, Homo sapiens
  CDR3 for alpha chain variable domain of TCR clone 389026 (TRAV38-1, TRAJ28)
CAFMKHTSGAGSYQLTF

SEQ ID NO: 778052 - protein, 15 aa, Homo sapiens
  CDR3 for beta chain variable domain of TCR clone 389026 (TRBV5-1, TRBJ2-4)
CASSLGGGGSYIQYF

SEQ ID NO: 778053 - protein, 14 aa, Homo sapiens
  CDR3 for alpha chain variable domain of TCR clone 389027 (TRAV13-1, TRAJ13)
CAASRVGGYQKVTF

SEQ ID NO: 778054 - protein, 15 aa, Homo sapiens
  CDR3 for beta chain variable domain of TCR clone 389027 (TRBV3-1, TRBJ2-5)
CASSANLGGPETQYF

SEQ ID NO: 778055 - protein, 12 aa, Homo sapiens
  CDR3 for alpha chain variable domain of TCR clone 389028 (TRAV12-2, TRAJ43)
CALNVNNNDMRF

SEQ ID NO: 778056 - protein, 14 aa, Homo sapiens
  CDR3 for beta chain variable domain of TCR clone 389028 (TRBV7-2, TRBJ2-7)
CASSFLGRVYEQYF

SEQ ID NO: 778057 - protein, 13 aa, Homo sapiens
  CDR3 for alpha chain variable domain of TCR clone 389029 (TRAV27, TRAJ41)
CAGEGNSGYARNF

SEQ ID NO: 778058 - protein, 14 aa, Homo sapiens
  CDR3 for beta chain variable domain of TCR clone 389029 (TRBV7-2, TRBJ2-5)
CASSPRGSSETQYF

SEQ ID NO: 778059 - protein, 15 aa, Homo sapiens
  CDR3 for alpha chain variable domain of TCR clone 389030 (TRAV26-2, TRAJ28)
CILVESGAGSYQLTF

SEQ ID NO: 778060 - protein, 13 aa, Homo sapiens
  CDR3 for beta chain variable domain of TCR clone 389030 (TRBV5-5, TRBJ1-2)
CASSFWRGEDYTF

SEQ ID NO: 778061 - protein, 14 aa, Homo sapiens
  CDR3 for alpha chain variable domain of TCR clone 389031 (TRAV12-3, TRAJ10)
SHLPLTGGGNKLTF

SEQ ID NO: 778062 - protein, 16 aa, Homo sapiens
  CDR3 for beta chain variable domain of TCR clone 389031 (TRBV7-2, TRBJ2-5)
CASSSKWLSGQETQYF

SEQ ID NO: 778063 - protein, 14 aa, Homo sapiens
  CDR3 for alpha chain variable domain of TCR clone 389032 (TRAV8-3, TRAJ39)
CAVGAWGAGNVLTF

SEQ ID NO: 778064 - protein, 16 aa, Homo sapiens
  CDR3 for beta chain variable domain of TCR clone 389032 (TRBV7-2, TRBJ1-3)
CASSSCRVLSGNTIYF

SEQ ID NO: 778065 - protein, 13 aa, Homo sapiens
  CDR3 for alpha chain variable domain of TCR clone 389033 (TRAV30, TRAJ6)
CGFIEGGSYIPTF

SEQ ID NO: 778066 - protein, 15 aa, Homo sapiens
  CDR3 for beta chain variable domain of TCR clone 389033 (TRBV2, TRBJ2-7)
CASSEGLARSYEQYF

SEQ ID NO: 778067 - protein, 14 aa, Homo sapiens
  CDR3 for alpha chain variable domain of TCR clone 389034 (TRAV1-2, TRAJ8)
CAVREDTGFPKLVF

SEQ ID NO: 778068 - protein, 13 aa, Homo sapiens
  CDR3 for beta chain variable domain of TCR clone 389034 (TRBV6-4, TRBJ2-3)
CASSVSWADTQYF

SEQ ID NO: 778069 - protein, 14 aa, Homo sapiens
  CDR3 for alpha chain variable domain of TCR clone 389035 (TRAV2, TRAJ8)
CAGRGNTGFQKLEF

SEQ ID NO: 778070 - protein, 13 aa, Homo sapiens
  CDR3 for beta chain variable domain of TCR clone 389035 (TRBV6-5, TRBJ2-7)
CASRTSGIHEQYF

SEQ ID NO: 778071 - protein, 22 aa, Homo sapiens
  CDR3 for alpha chain variable domain of TCR clone 389036 (TRAV27, TRAJ38)
CAARRNAGNNHIQNPDPAVYQL

SEQ ID NO: 778072 - protein, 16 aa, Homo sapiens
  CDR3 for beta chain variable domain of TCR clone 389036 (TRBV20-1, TRBJ1-2)
CSASMGQGVANYGYAF

SEQ ID NO: 778073 - protein, 13 aa, Homo sapiens
  CDR3 for alpha chain variable domain of TCR clone 389037 (TRAV8-3, TRAJ43)
CAVVPYNNNDMRF

SEQ ID NO: 778074 - protein, 17 aa, Homo sapiens
  CDR3 for beta chain variable domain of TCR clone 389037 (TRBV7-7, TRBJ1-1)
CASIGDSPNLGVTEAFF

SEQ ID NO: 778075 - protein, 13 aa, Homo sapiens
  CDR3 for alpha chain variable domain of TCR clone 389038 (TRAV20, TRAJ49)
CVVQARTGNQFYF

SEQ ID NO: 778076 - protein, 14 aa, Homo sapiens
  CDR3 for beta chain variable domain of TCR clone 389038 (TRBV5-1, TRBJ1-1)
CASSLQGASTEAVF

SEQ ID NO: 778077 - protein, 11 aa, Homo sapiens
  CDR3 for alpha chain variable domain of TCR clone 389039 (TRAV12-3, TRAJ43)
CAMSLSNDMRF

SEQ ID NO: 778078 - protein, 18 aa, Homo sapiens
  CDR3 for beta chain variable domain of TCR clone 389039 (TRBV20-1, TRBJ2-3)
CSASGLAGGPGTTDTQYF

SEQ ID NO: 778079 - protein, 14 aa, Homo sapiens
  CDR3 for alpha chain variable domain of TCR clone 389040 (TRAV12-2, TRAJ40)
CAVKIPPGTYKYIF

SEQ ID NO: 778080 - protein, 19 aa, Homo sapiens
  CDR3 for beta chain variable domain of TCR clone 389040 (TRBV11-3, TRBJ2-2)
CASSTRPGAKTTNTGELFF

SEQ ID NO: 778081 - protein, 14 aa, Homo sapiens
  CDR3 for alpha chain variable domain of TCR clone 389041 (TRAV23/DV6, TRAJ27)
CAASRDTNAGKSTF

SEQ ID NO: 778082 - protein, 15 aa, Homo sapiens
  CDR3 for beta chain variable domain of TCR clone 389041 (TRBV9, TRBJ1-6)
CASSVAGTGDSPLHF

SEQ ID NO: 778083 - protein, 12 aa, Homo sapiens
  CDR3 for alpha chain variable domain of TCR clone 389042 (TRAV2, TRAJ10)
CASTGGGNKLTF

SEQ ID NO: 778084 - protein, 14 aa, Homo sapiens
  CDR3 for beta chain variable domain of TCR clone 389042 (TRBV7-2, TRBJ2-2)
CASRGQGADGGLFF

SEQ ID NO: 778085 - protein, 14 aa, Homo sapiens
  CDR3 for alpha chain variable domain of TCR clone 389043 (TRAV12-2, TRAJ11)
CAVSKNSGYSTLTF

SEQ ID NO: 778086 - protein, 14 aa, Homo sapiens
  CDR3 for beta chain variable domain of TCR clone 389043 (TRBV7-2, TRBJ2-5)
CASWQERFRETQYF

SEQ ID NO: 778087 - protein, 14 aa, Homo sapiens
  CDR3 for alpha chain variable domain of TCR clone 389044 (TRAV2, TRAJ37)
CAVDFTSDTGKLIF

SEQ ID NO: 778088 - protein, 17 aa, Homo sapiens
  CDR3 for beta chain variable domain of TCR clone 389044 (TRBV9, TRBJ2-2)
CASSVGGQGTDTGELFF

SEQ ID NO: 778089 - protein, 17 aa, Homo sapiens
  CDR3 for alpha chain variable domain of TCR clone 389045 (TRAV3, TRAJ42)
CAVRDRDYGGSQGNRIF

SEQ ID NO: 778090 - protein, 17 aa, Homo sapiens
  CDR3 for beta chain variable domain of TCR clone 389045 (TRBV11-2, TRBJ2-1)
CASSLYPPGVEYNEQFF

SEQ ID NO: 778091 - protein, 11 aa, Homo sapiens
  CDR3 for alpha chain variable domain of TCR clone 389046 (TRAV2, TRAJ33)
CAVDSNYQLIW

SEQ ID NO: 778092 - protein, 13 aa, Homo sapiens
  CDR3 for beta chain variable domain of TCR clone 389046 (TRBV7-2, TRBJ2-7)
CASSSASGSEQYF

SEQ ID NO: 778093 - protein, 13 aa, Homo sapiens
  CDR3 for alpha chain variable domain of TCR clone 389047 (TRAV12-3, TRAJ13)
CAMSSGGYQKVTF

SEQ ID NO: 778094 - protein, 12 aa, Homo sapiens
  CDR3 for beta chain variable domain of TCR clone 389047 (TRBV20-1, TRBJ1-1)
QCSSGGHTEAFF

SEQ ID NO: 778095 - protein, 12 aa, Homo sapiens
  CDR3 for alpha chain variable domain of TCR clone 389048 (TRAV6, TRAJ34)
CALHRCTDKLIF

SEQ ID NO: 778096 - protein, 16 aa, Homo sapiens
  CDR3 for beta chain variable domain of TCR clone 389048 (TRBV3-1, TRBJ2-5)
CASSQDWASGQETQYF

SEQ ID NO: 778097 - protein, 14 aa, Homo sapiens
  CDR3 for alpha chain variable domain of TCR clone 389049 (TRAV38-2/DV8, TRAJ33)
CAYRILVSNYQLIW

SEQ ID NO: 778098 - protein, 17 aa, Homo sapiens
  CDR3 for beta chain variable domain of TCR clone 389049 (TRBV18, TRBJ2-1)
CASSPRVAGGSYNEQFF

SEQ ID NO: 778099 - protein, 22 aa, Homo sapiens
  CDR3 for alpha chain variable domain of TCR clone 389050 (TRAV4, )
CLVGPHNYDIQNPDPAVSQLRD

SEQ ID NO: 778100 - protein, 17 aa, Homo sapiens
  CDR3 for beta chain variable domain of TCR clone 389050 (TRBV24-1, TRBJ2-1)
CATSDVSTSGTYNEQFF

SEQ ID NO: 778101 - protein, 15 aa, Homo sapiens
  CDR3 for alpha chain variable domain of TCR clone 389051 (TRAV25, TRAJ53)
CPTSNSGGRNHKLTF

SEQ ID NO: 778102 - protein, 15 aa, Homo sapiens
  CDR3 for beta chain variable domain of TCR clone 389051 (TRBV6-4, TRBJ2-7)
CASSDQGPPNYEQYF

SEQ ID NO: 778103 - protein, 14 aa, Homo sapiens
  CDR3 for alpha chain variable domain of TCR clone 389052 (TRAV20, TRAJ22)
CAVQVSGSARQLTF

SEQ ID NO: 778104 - protein, 15 aa, Homo sapiens
  CDR3 for beta chain variable domain of TCR clone 389052 (TRBV2, TRBJ2-2)
CASSRETVGTGELFF

SEQ ID NO: 778105 - protein, 15 aa, Homo sapiens
  CDR3 for alpha chain variable domain of TCR clone 389053 (TRAV13-1, TRAJ44)
CAASREGGTASKLTF

SEQ ID NO: 778106 - protein, 14 aa, Homo sapiens
  CDR3 for beta chain variable domain of TCR clone 389053 (TRBV7-2, TRBJ2-5)
CASSPRGSSETQYF

SEQ ID NO: 778107 - protein, 17 aa, Homo sapiens
  CDR3 for alpha chain variable domain of TCR clone 389054 (TRAV26-1, TRAJ47)
CIVPSLLYMEYGNKLVL

SEQ ID NO: 778108 - protein, 14 aa, Homo sapiens
  CDR3 for beta chain variable domain of TCR clone 389054 (TRBV7-3, TRBJ1-5)
RASSFSGCNQPQHF

SEQ ID NO: 778109 - protein, 15 aa, Homo sapiens
  CDR3 for alpha chain variable domain of TCR clone 389055 (TRAV13-1, TRAJ27)
CAASGGNTNAGKSTF

SEQ ID NO: 778110 - protein, 15 aa, Homo sapiens
  CDR3 for beta chain variable domain of TCR clone 389055 (TRBV12-4, TRBJ1-5)
CASTRQGSGNQPQHS

SEQ ID NO: 778111 - protein, 13 aa, Homo sapiens
  CDR3 for alpha chain variable domain of TCR clone 389056 (TRAV17, TRAJ9)
CATDYNGGFKTIF

SEQ ID NO: 778112 - protein, 13 aa, Homo sapiens
  CDR3 for beta chain variable domain of TCR clone 389056 (TRBV7-9, TRBJ1-2)
CASSLKQNYGYTF

SEQ ID NO: 778113 - protein, 10 aa, Homo sapiens
  CDR3 for alpha chain variable domain of TCR clone 389057 (TRAV12-1, TRAJ43)
RVVNPHRFGA

SEQ ID NO: 778114 - protein, 16 aa, Homo sapiens
  CDR3 for beta chain variable domain of TCR clone 389057 (TRBV27, TRBJ2-2)
CASSSTGGGDTGELFF

SEQ ID NO: 778115 - protein, 17 aa, Homo sapiens
  CDR3 for alpha chain variable domain of TCR clone 389058 (TRAV8-1, TRAJ43)
CAVTNDMRFGAGTRLTV

SEQ ID NO: 778116 - protein, 16 aa, Homo sapiens
  CDR3 for beta chain variable domain of TCR clone 389058 (TRBV11-2, TRBJ2-3)
CASSPRGGGAGDTQYF

SEQ ID NO: 778117 - protein, 14 aa, Homo sapiens
  CDR3 for alpha chain variable domain of TCR clone 389059 (TRAV12-2, TRAJ17)
CAVLSKAAGNKLTF

SEQ ID NO: 778118 - protein, 16 aa, Homo sapiens
  CDR3 for beta chain variable domain of TCR clone 389059 (TRBV19, TRBJ2-1)
CASSKAGPSSYNEQFF

SEQ ID NO: 778119 - protein, 13 aa, Homo sapiens
  CDR3 for alpha chain variable domain of TCR clone 389060 (TRAV8-2, TRAJ26)
CVVSLGYGQNFVF

SEQ ID NO: 778120 - protein, 13 aa, Homo sapiens
  CDR3 for beta chain variable domain of TCR clone 389060 (TRBV11-2, TRBJ2-2)
CASGRDREEELFF

SEQ ID NO: 778121 - protein, 15 aa, Homo sapiens
  CDR3 for alpha chain variable domain of TCR clone 389061 (TRAV8-3, TRAJ27)
CAVGPSKTNAGKSTF

SEQ ID NO: 778122 - protein, 17 aa, Homo sapiens
  CDR3 for beta chain variable domain of TCR clone 389061 (TRBV7-3, TRBJ2-3)
RASSLMKRMRGADTQYF

SEQ ID NO: 778123 - protein, 15 aa, Homo sapiens
  CDR3 for alpha chain variable domain of TCR clone 389062 (TRAV16, TRAJ16)
CALQGGGSDGQKLPF

SEQ ID NO: 778124 - protein, 15 aa, Homo sapiens
  CDR3 for beta chain variable domain of TCR clone 389062 (TRBV20-1, TRBJ2-7)
CGARDRVSGMDEQYF

SEQ ID NO: 778125 - protein, 14 aa, Homo sapiens
  CDR3 for alpha chain variable domain of TCR clone 389063 (TRAV12-2, TRAJ45)
CPVNIGGGADGLTF

SEQ ID NO: 778126 - protein, 17 aa, Homo sapiens
  CDR3 for beta chain variable domain of TCR clone 389063 (TRBV20-1, TRBJ2-2)
CSASGSGQGGLTGELFF

SEQ ID NO: 778127 - protein, 15 aa, Homo sapiens
  CDR3 for alpha chain variable domain of TCR clone 389064 (TRAV16, TRAJ10)
CALEGLTGGGNKLTF

SEQ ID NO: 778128 - protein, 16 aa, Homo sapiens
  CDR3 for beta chain variable domain of TCR clone 389064 (TRBV5-6, TRBJ1-1)
CASSLVGPRGNTEAFF

SEQ ID NO: 778129 - protein, 16 aa, Homo sapiens
  CDR3 for alpha chain variable domain of TCR clone 389065 (TRAV30, TRAJ24)
CGTEIVDADSWGKFQF

SEQ ID NO: 778130 - protein, 12 aa, Homo sapiens
  CDR3 for beta chain variable domain of TCR clone 389065 (TRBV7-8, TRBJ2-5)
CASSLRAETQYF

SEQ ID NO: 778131 - protein, 14 aa, Homo sapiens
  CDR3 for alpha chain variable domain of TCR clone 389066 (TRAV8-2, TRAJ6)
CVVISAGGSYIPTF

SEQ ID NO: 778132 - protein, 15 aa, Homo sapiens
  CDR3 for beta chain variable domain of TCR clone 389066 (TRBV27, TRBJ2-1)
CASSNGGGSSNEQFF

SEQ ID NO: 778133 - protein, 14 aa, Homo sapiens
  CDR3 for alpha chain variable domain of TCR clone 389067 (TRAV26-1, TRAJ38)
CIADNAGNNSKLIW

SEQ ID NO: 778134 - protein, 15 aa, Homo sapiens
  CDR3 for beta chain variable domain of TCR clone 389067 (TRBV4-1, TRBJ1-1)
CASSQEWGHYTEAFF

SEQ ID NO: 778135 - protein, 13 aa, Homo sapiens
  CDR3 for alpha chain variable domain of TCR clone 389068 (TRAV27, TRAJ45)
CRSSGGGADGLTF

SEQ ID NO: 778136 - protein, 13 aa, Homo sapiens
  CDR3 for beta chain variable domain of TCR clone 389068 (TRBV7-7, TRBJ2-5)
CASSRSGKETQYF

SEQ ID NO: 778137 - protein, 14 aa, Homo sapiens
  CDR3 for alpha chain variable domain of TCR clone 389069 (TRAV8-3, TRAJ39)
CAVGANNAGNMLTF

SEQ ID NO: 778138 - protein, 15 aa, Homo sapiens
  CDR3 for beta chain variable domain of TCR clone 389069 (TRBV4-3, TRBJ1-1)
CASSQELGRETEAFL

SEQ ID NO: 778139 - protein, 14 aa, Homo sapiens
  CDR3 for alpha chain variable domain of TCR clone 389070 (TRAV30, TRAJ39)
CGTEKVNAGNMLTF

SEQ ID NO: 778140 - protein, 17 aa, Homo sapiens
  CDR3 for beta chain variable domain of TCR clone 389070 (TRBV5-1, TRBJ2-5)
CASSPVALGQNQETQYF

SEQ ID NO: 778141 - protein, 14 aa, Homo sapiens
  CDR3 for alpha chain variable domain of TCR clone 389071 (TRAV2, TRAJ9)
CAVDDRSGGFKTIF

SEQ ID NO: 778142 - protein, 14 aa, Homo sapiens
  CDR3 for beta chain variable domain of TCR clone 389071 (TRBV18, TRBJ1-5)
CASSRQQRNQPQHF

SEQ ID NO: 778143 - protein, 13 aa, Homo sapiens
  CDR3 for alpha chain variable domain of TCR clone 389072 (TRAV2, TRAJ21)
CAVEDLNFNKFYF

SEQ ID NO: 778144 - protein, 14 aa, Homo sapiens
  CDR3 for beta chain variable domain of TCR clone 389072 (TRBV7-2, TRBJ2-2)
CASSSDGHTGELFF

SEQ ID NO: 778145 - protein, 14 aa, Homo sapiens
  CDR3 for alpha chain variable domain of TCR clone 389073 (TRAV1-2, TRAJ13)
CAVKHSGGYQKVTF

SEQ ID NO: 778146 - protein, 12 aa, Homo sapiens
  CDR3 for beta chain variable domain of TCR clone 389073 (TRBV7-3, TRBJ2-5)
CARSSPGGTQYF

SEQ ID NO: 778147 - protein, 15 aa, Homo sapiens
  CDR3 for alpha chain variable domain of TCR clone 389074 (TRAV30, TRAJ32)
CGTEILGGATNKFIF

SEQ ID NO: 778148 - protein, 13 aa, Homo sapiens
  CDR3 for beta chain variable domain of TCR clone 389074 (TRBV6-3, TRBJ2-7)
CASSFSGGYEQCF

SEQ ID NO: 778149 - protein, 16 aa, Homo sapiens
  CDR3 for alpha chain variable domain of TCR clone 389075 (TRAV26-1, TRAJ23)
CIVRPHGNNQGGKLIF

SEQ ID NO: 778150 - protein, 13 aa, Homo sapiens
  CDR3 for beta chain variable domain of TCR clone 389075 (TRBV27, TRBJ2-7)
CASSLTTGYEQYL

SEQ ID NO: 778151 - protein, 14 aa, Homo sapiens
  CDR3 for alpha chain variable domain of TCR clone 389076 (TRAV34, TRAJ22)
CGADTSGSARQLTF

SEQ ID NO: 778152 - protein, 16 aa, Homo sapiens
  CDR3 for beta chain variable domain of TCR clone 389076 (TRBV12-5, TRBJ2-5)
CASGPRTSGNQETQYF

SEQ ID NO: 778153 - protein, 13 aa, Homo sapiens
  CDR3 for alpha chain variable domain of TCR clone 389077 (TRAV29/DV5, TRAJ31)
CAASRNNNARLMF

SEQ ID NO: 778154 - protein, 12 aa, Homo sapiens
  CDR3 for beta chain variable domain of TCR clone 389077 (TRBV14, TRBJ1-1)
CASSQPKGLAFF

SEQ ID NO: 778155 - protein, 13 aa, Homo sapiens
  CDR3 for alpha chain variable domain of TCR clone 389078 (TRAV12-3, TRAJ13)
CAMSSGGYQKVTF

SEQ ID NO: 778156 - protein, 13 aa, Homo sapiens
  CDR3 for beta chain variable domain of TCR clone 389078 (TRBV27, TRBJ2-3)
CASSWGRTDTQYF

SEQ ID NO: 778157 - protein, 14 aa, Homo sapiens
  CDR3 for alpha chain variable domain of TCR clone 389079 (TRAV1-2, TRAJ16)
CAVNRFSDGKKLLF

SEQ ID NO: 778158 - protein, 13 aa, Homo sapiens
  CDR3 for beta chain variable domain of TCR clone 389079 (TRBV15, TRBJ1-6)
CATSGGLNSPLHF

SEQ ID NO: 778159 - protein, 18 aa, Homo sapiens
  CDR3 for alpha chain variable domain of TCR clone 389080 (TRAV26-1, TRAJ23)
CIVRAGLEVRNQGGKLIF

SEQ ID NO: 778160 - protein, 16 aa, Homo sapiens
  CDR3 for beta chain variable domain of TCR clone 389080 (TRBV12-4, TRBJ2-5)
CASSFFVRGRQETQYF

SEQ ID NO: 778161 - protein, 14 aa, Homo sapiens
  CDR3 for alpha chain variable domain of TCR clone 389081 (TRAV12-1, TRAJ26)
CVVKGSNYGQNFVF

SEQ ID NO: 778162 - protein, 15 aa, Homo sapiens
  CDR3 for beta chain variable domain of TCR clone 389081 (TRBV10-2, TRBJ2-6)
CASSEQGTGANGLTF

SEQ ID NO: 778163 - protein, 14 aa, Homo sapiens
  CDR3 for alpha chain variable domain of TCR clone 389082 (TRAV12-2, TRAJ13)
CAVKKTGGYQKVTF

SEQ ID NO: 778164 - protein, 14 aa, Homo sapiens
  CDR3 for beta chain variable domain of TCR clone 389082 (TRBV19, TRBJ2-7)
CASSMGQGAIEQYF

SEQ ID NO: 778165 - protein, 10 aa, Homo sapiens
  CDR3 for alpha chain variable domain of TCR clone 389083 (TRAV8-4, TRAJ43)
CAVSADDMRF

SEQ ID NO: 778166 - protein, 15 aa, Homo sapiens
  CDR3 for beta chain variable domain of TCR clone 389083 (TRBV10-2, TRBJ2-6)
CASSEQGTGANVLTF

SEQ ID NO: 778167 - protein, 13 aa, Homo sapiens
  CDR3 for alpha chain variable domain of TCR clone 389084 (TRAV27, TRAJ8)
CAGGPTGFQKLVF

SEQ ID NO: 778168 - protein, 12 aa, Homo sapiens
  CDR3 for beta chain variable domain of TCR clone 389084 (TRBV7-2, TRBJ1-6)
CASSLSSSPLHF

SEQ ID NO: 778169 - protein, 11 aa, Homo sapiens
  CDR3 for alpha chain variable domain of TCR clone 389085 (TRAV12-1, TRAJ43)
CVEYDKNDMRF

SEQ ID NO: 778170 - protein, 16 aa, Homo sapiens
  CDR3 for beta chain variable domain of TCR clone 389085 (TRBV5-4, TRBJ2-1)
CASSLVGSGQDNEQFF

SEQ ID NO: 778171 - protein, 15 aa, Homo sapiens
  CDR3 for alpha chain variable domain of TCR clone 389086 (TRAV4, TRAJ31)
CLVGGFLNNNARLMF

SEQ ID NO: 778172 - protein, 13 aa, Homo sapiens
  CDR3 for beta chain variable domain of TCR clone 389086 (TRBV27, TRBJ2-1)
CASRTLGVGEQFF

SEQ ID NO: 778173 - protein, 13 aa, Homo sapiens
  CDR3 for alpha chain variable domain of TCR clone 389087 (TRAV17, TRAJ40)
CATAPGGTYKYIF

SEQ ID NO: 778174 - protein, 12 aa, Homo sapiens
  CDR3 for beta chain variable domain of TCR clone 389087 (TRBV2, TRBJ1-5)
CASSESRTPQHF

SEQ ID NO: 778175 - protein, 12 aa, Homo sapiens
  CDR3 for alpha chain variable domain of TCR clone 389088 (TRAV13-2, TRAJ13)
VQRISPRLEVTF

SEQ ID NO: 778176 - protein, 14 aa, Homo sapiens
  CDR3 for beta chain variable domain of TCR clone 389088 (TRBV20-1, TRBJ1-5)
CSARDDRGNQPQHF

SEQ ID NO: 778177 - protein, 13 aa, Homo sapiens
  CDR3 for alpha chain variable domain of TCR clone 389089 (TRAV3, TRAJ27)
CAVRPLGAGKSPF

SEQ ID NO: 778178 - protein, 13 aa, Homo sapiens
  CDR3 for beta chain variable domain of TCR clone 389089 (TRBV7-9, TRBJ2-3)
CASSPGSTDTQYV

SEQ ID NO: 778179 - protein, 13 aa, Homo sapiens
  CDR3 for alpha chain variable domain of TCR clone 389090 (TRAV13-1, TRAJ39)
CAASIVMKATCSP

SEQ ID NO: 778180 - protein, 14 aa, Homo sapiens
  CDR3 for beta chain variable domain of TCR clone 389090 (TRBV4-1, TRBJ2-2)
CASSQAVNTGELFF

SEQ ID NO: 778181 - protein, 15 aa, Homo sapiens
  CDR3 for alpha chain variable domain of TCR clone 389091 (TRAV26-1, TRAJ44)
CIVRANTGTPSKPTF

SEQ ID NO: 778182 - protein, 16 aa, Homo sapiens
  CDR3 for beta chain variable domain of TCR clone 389091 (TRBV7-7, TRBJ2-1)
CASSLASGTSYNEQFF

SEQ ID NO: 778183 - protein, 15 aa, Homo sapiens
  CDR3 for alpha chain variable domain of TCR clone 389092 (TRAV25, TRAJ52)
CAGRPGGTSYGKLTF

SEQ ID NO: 778184 - protein, 17 aa, Homo sapiens
  CDR3 for beta chain variable domain of TCR clone 389092 (TRBV7-8, TRBJ2-6)
CASTAGTGGAGANVLTF

SEQ ID NO: 778185 - protein, 17 aa, Homo sapiens
  CDR3 for alpha chain variable domain of TCR clone 389093 (TRAV26-2, TRAJ42)
RILRDVGYGGSQGNLIF

SEQ ID NO: 778186 - protein, 16 aa, Homo sapiens
  CDR3 for beta chain variable domain of TCR clone 389093 (TRBV6-5, TRBJ2-1)
CASSETLAGHYNEQFF

SEQ ID NO: 778187 - protein, 13 aa, Homo sapiens
  CDR3 for alpha chain variable domain of TCR clone 389094 (TRAV21, TRAJ37)
CAVGEINTGKLIF

SEQ ID NO: 778188 - protein, 17 aa, Homo sapiens
  CDR3 for beta chain variable domain of TCR clone 389094 (TRBV28, TRBJ2-5)
CASSTPEGDALQETQYF

SEQ ID NO: 778189 - protein, 14 aa, Homo sapiens
  CDR3 for alpha chain variable domain of TCR clone 389095 (TRAV16, TRAJ26)
CALSSANYGQNFVF

SEQ ID NO: 778190 - protein, 12 aa, Homo sapiens
  CDR3 for beta chain variable domain of TCR clone 389095 (TRBV6-5, TRBJ2-2)
CASRRGTGELFF

SEQ ID NO: 778191 - protein, 15 aa, Homo sapiens
  CDR3 for alpha chain variable domain of TCR clone 389096 (TRAV13-1, TRAJ44)
CAASLGAGTASKLTF

SEQ ID NO: 778192 - protein, 14 aa, Homo sapiens
  CDR3 for beta chain variable domain of TCR clone 389096 (TRBV4-2, TRBJ2-1)
CASGLDRAYNEQFF

SEQ ID NO: 778193 - protein, 14 aa, Homo sapiens
  CDR3 for alpha chain variable domain of TCR clone 389097 (TRAV1-2, TRAJ16)
CAVNRFSDGQKLPF

SEQ ID NO: 778194 - protein, 15 aa, Homo sapiens
  CDR3 for beta chain variable domain of TCR clone 389097 (TRBV20-1, TRBJ1-5)
CSAFKNGQRNQPQHF

SEQ ID NO: 778195 - protein, 15 aa, Homo sapiens
  CDR3 for alpha chain variable domain of TCR clone 389098 (TRAV41, TRAJ45)
CAASYSGGGADGLTF

SEQ ID NO: 778196 - protein, 14 aa, Homo sapiens
  CDR3 for beta chain variable domain of TCR clone 389098 (TRBV27, TRBJ2-2)
CASRPGGNTGELFF

SEQ ID NO: 778197 - protein, 13 aa, Homo sapiens
  CDR3 for alpha chain variable domain of TCR clone 389099 (TRAV12-1, TRAJ7)
CVVNMGGNNRLAF

SEQ ID NO: 778198 - protein, 16 aa, Homo sapiens
  CDR3 for beta chain variable domain of TCR clone 389099 (TRBV20-1, TRBJ1-4)
CSAPGQGLLTNEKLFF

SEQ ID NO: 778199 - protein, 14 aa, Homo sapiens
  CDR3 for alpha chain variable domain of TCR clone 389100 (TRAV17, TRAJ57)
CATDPQAGSEKLVF

SEQ ID NO: 778200 - protein, 15 aa, Homo sapiens
  CDR3 for beta chain variable domain of TCR clone 389100 (TRBV5-1, TRBJ2-7)
CASSLDLTSSYEQYF

SEQ ID NO: 778201 - protein, 12 aa, Homo sapiens
  CDR3 for alpha chain variable domain of TCR clone 389101 (TRAV12-2, TRAJ52)
IGGGTSYGKLTF

SEQ ID NO: 778202 - protein, 13 aa, Homo sapiens
  CDR3 for beta chain variable domain of TCR clone 389101 (TRBV12-4, TRBJ1-1)
CASSPGTGFESFF

SEQ ID NO: 778203 - protein, 15 aa, Homo sapiens
  CDR3 for alpha chain variable domain of TCR clone 389102 (TRAV26-1, TRAJ29)
CIVRVEGQGNTPLVF

SEQ ID NO: 778204 - protein, 14 aa, Homo sapiens
  CDR3 for beta chain variable domain of TCR clone 389102 (TRBV18, TRBJ2-5)
CASSPGVSQETQYF

SEQ ID NO: 778205 - protein, 14 aa, Homo sapiens
  CDR3 for alpha chain variable domain of TCR clone 389103 (TRAV1-2, TRAJ16)
CAVNRFSDGLKLLF

SEQ ID NO: 778206 - protein, 12 aa, Homo sapiens
  CDR3 for beta chain variable domain of TCR clone 389103 (TRBV6-5, TRBJ2-5)
CASSEGSETQDF

SEQ ID NO: 778207 - protein, 14 aa, Homo sapiens
  CDR3 for alpha chain variable domain of TCR clone 389104 (TRAV12-1, TRAJ6)
CVVKRSGGSYIPTF

SEQ ID NO: 778208 - protein, 15 aa, Homo sapiens
  CDR3 for beta chain variable domain of TCR clone 389104 (TRBV20-1, TRBJ2-7)
CSARDRVSGMDEQYF

SEQ ID NO: 778209 - protein, 13 aa, Homo sapiens
  CDR3 for alpha chain variable domain of TCR clone 389105 (TRAV12-3, TRAJ7)
CAMTPYGNNRLAF

SEQ ID NO: 778210 - protein, 16 aa, Homo sapiens
  CDR3 for beta chain variable domain of TCR clone 389105 (TRBV20-1, TRBJ1-4)
CSARPYGGELNETLFF

SEQ ID NO: 778211 - protein, 14 aa, Homo sapiens
  CDR3 for alpha chain variable domain of TCR clone 389106 (TRAV13-1, TRAJ44)
CAPRATGTASKLTF

SEQ ID NO: 778212 - protein, 12 aa, Homo sapiens
  CDR3 for beta chain variable domain of TCR clone 389106 (TRBV11-2, TRBJ2-2)
CASSLGGGELFF

SEQ ID NO: 778213 - protein, 14 aa, Homo sapiens
  CDR3 for alpha chain variable domain of TCR clone 389107 (TRAV1-2, TRAJ16)
FAVNRFSDGRKLLF

SEQ ID NO: 778214 - protein, 15 aa, Homo sapiens
  CDR3 for beta chain variable domain of TCR clone 389107 (TRBV7-9, TRBJ1-6)
CASSSPGRGNSTLHF

SEQ ID NO: 778215 - protein, 14 aa, Homo sapiens
  CDR3 for alpha chain variable domain of TCR clone 389108 (TRAV4, TRAJ17)
CLVGDPLVGNKLTF

SEQ ID NO: 778216 - protein, 20 aa, Homo sapiens
  CDR3 for beta chain variable domain of TCR clone 389108 (TRBV20-1, TRBJ2-1)
RSARPYSVAGGPSYYNEQFF

SEQ ID NO: 778217 - protein, 17 aa, Homo sapiens
  CDR3 for alpha chain variable domain of TCR clone 389109 (TRAV13-1, TRAJ28)
CAASPPYSGAGSFQLTF

SEQ ID NO: 778218 - protein, 15 aa, Homo sapiens
  CDR3 for beta chain variable domain of TCR clone 389109 (TRBV6-3, TRBJ2-2)
CACSFLATLTGELFF

SEQ ID NO: 778219 - protein, 16 aa, Homo sapiens
  CDR3 for alpha chain variable domain of TCR clone 389110 (TRAV30, TRAJ24)
CGTEIVDADSWGKFQF

SEQ ID NO: 778220 - protein, 18 aa, Homo sapiens
  CDR3 for beta chain variable domain of TCR clone 389110 (TRBV2, TRBJ2-3)
CASSDLDRGRQIRSILAQ

SEQ ID NO: 778221 - protein, 19 aa, Homo sapiens
  CDR3 for alpha chain variable domain of TCR clone 389111 (TRAV35, TRAJ52)
CWAASGPNDGGTSYGKLTF

SEQ ID NO: 778222 - protein, 12 aa, Homo sapiens
  CDR3 for beta chain variable domain of TCR clone 389111 (TRBV11-2, TRBJ2-7)
CASSLPTYEQYF

SEQ ID NO: 778223 - protein, 14 aa, Homo sapiens
  CDR3 for alpha chain variable domain of TCR clone 389112 (TRAV35, TRAJ33)
CAGSSQDSNYQLLW

SEQ ID NO: 778224 - protein, 14 aa, Homo sapiens
  CDR3 for beta chain variable domain of TCR clone 389112 (TRBV5-1, TRBJ2-3)
CASSLFGPTDTQYF

SEQ ID NO: 778225 - protein, 14 aa, Homo sapiens
  CDR3 for alpha chain variable domain of TCR clone 389113 (TRAV16, TRAJ15)
CALSGPQAGTALIF

SEQ ID NO: 778226 - protein, 12 aa, Homo sapiens
  CDR3 for beta chain variable domain of TCR clone 389113 (TRBV18, TRBJ2-5)
CVSSPSKETQYF

SEQ ID NO: 778227 - protein, 19 aa, Homo sapiens
  CDR3 for alpha chain variable domain of TCR clone 389114 (TRAV38-2/DV8, TRAJ42)
CAYRSAGMNYGGSQGNPIF

SEQ ID NO: 778228 - protein, 13 aa, Homo sapiens
  CDR3 for beta chain variable domain of TCR clone 389114 (TRBV18, TRBJ2-7)
CASSRSGSYEQYF

SEQ ID NO: 778229 - protein, 14 aa, Homo sapiens
  CDR3 for alpha chain variable domain of TCR clone 389115 (TRAV36/DV7, TRAJ44)
CCGANTGTASKLTF

SEQ ID NO: 778230 - protein, 16 aa, Homo sapiens
  CDR3 for beta chain variable domain of TCR clone 389115 (TRBV2, TRBJ2-1)
CASSVGGSLSYNEQFF

SEQ ID NO: 778231 - protein, 12 aa, Homo sapiens
  CDR3 for alpha chain variable domain of TCR clone 389116 (TRAV21, TRAJ29)
CAVTSGNTPLVF

SEQ ID NO: 778232 - protein, 15 aa, Homo sapiens
  CDR3 for beta chain variable domain of TCR clone 389116 (TRBV19, TRBJ2-6)
CASSIGPSGANVLTF

SEQ ID NO: 778233 - protein, 17 aa, Homo sapiens
  CDR3 for alpha chain variable domain of TCR clone 389117 (TRAV3, TRAJ6)
CAVRDGPRAGGSYIPTF

SEQ ID NO: 778234 - protein, 15 aa, Homo sapiens
  CDR3 for beta chain variable domain of TCR clone 389117 (TRBV7-8, TRBJ1-5)
CASSLERRGLEPQHL

SEQ ID NO: 778235 - protein, 16 aa, Homo sapiens
  CDR3 for alpha chain variable domain of TCR clone 389118 (TRAV3, TRAJ37)
CAVRPHGSGNTGKLTF

SEQ ID NO: 778236 - protein, 17 aa, Homo sapiens
  CDR3 for beta chain variable domain of TCR clone 389118 (TRBV5-1, TRBJ2-5)
CASSPVALGQNQETQYF

SEQ ID NO: 778237 - protein, 13 aa, Homo sapiens
  CDR3 for alpha chain variable domain of TCR clone 389119 (TRAV1-1, TRAJ13)
CAVNSGGYQKVTF

SEQ ID NO: 778238 - protein, 15 aa, Homo sapiens
  CDR3 for beta chain variable domain of TCR clone 389119 (TRBV6-1, TRBJ2-3)
CAARRRGGITDMQYF

SEQ ID NO: 778239 - protein, 13 aa, Homo sapiens
  CDR3 for alpha chain variable domain of TCR clone 389120 (TRAV36/DV7, TRAJ37)
CAVFSSNTGKLLF

SEQ ID NO: 778240 - protein, 16 aa, Homo sapiens
  CDR3 for beta chain variable domain of TCR clone 389120 (TRBV12-4, TRBJ2-5)
CASSFFVRGRRETQYF

SEQ ID NO: 778241 - protein, 13 aa, Homo sapiens
  CDR3 for alpha chain variable domain of TCR clone 389121 (TRAV21, TRAJ53)
CCEMGGSNYKLTF

SEQ ID NO: 778242 - protein, 16 aa, Homo sapiens
  CDR3 for beta chain variable domain of TCR clone 389121 (TRBV7-3, TRBJ2-2)
CASSLKRGTLSGELFF

SEQ ID NO: 778243 - protein, 15 aa, Homo sapiens
  CDR3 for alpha chain variable domain of TCR clone 389122 (TRAV26-1, TRAJ44)
CIVRANTGTASKLTF

SEQ ID NO: 778244 - protein, 15 aa, Homo sapiens
  CDR3 for beta chain variable domain of TCR clone 389122 (TRBV19, TRBJ2-1)
CASSGGGTLYNEQFL

SEQ ID NO: 778245 - protein, 17 aa, Homo sapiens
  CDR3 for alpha chain variable domain of TCR clone 389123 (TRAV3, TRAJ6)
CAVRDGPRAGGRYIPTF

SEQ ID NO: 778246 - protein, 14 aa, Homo sapiens
  CDR3 for beta chain variable domain of TCR clone 389123 (TRBV7-2, TRBJ2-7)
CATSPKTSFYEQYF

SEQ ID NO: 778247 - protein, 13 aa, Homo sapiens
  CDR3 for alpha chain variable domain of TCR clone 389124 (TRAV35, TRAJ21)
CAGQLSNFYKFYF

SEQ ID NO: 778248 - protein, 16 aa, Homo sapiens
  CDR3 for beta chain variable domain of TCR clone 389124 (TRBV4-3, TRBJ2-2)
CASSHLQGSGTGELFF

SEQ ID NO: 778249 - protein, 11 aa, Homo sapiens
  CDR3 for alpha chain variable domain of TCR clone 389125 (TRAV13-2, TRAJ8)
CSWLGFQKLVF

SEQ ID NO: 778250 - protein, 14 aa, Homo sapiens
  CDR3 for beta chain variable domain of TCR clone 389125 (TRBV18, TRBJ1-5)
CASSRQQRNQPQHF

SEQ ID NO: 778251 - protein, 15 aa, Homo sapiens
  CDR3 for alpha chain variable domain of TCR clone 389126 (TRAV9-2, TRAJ49)
CALIPPDHTGNQFYF

SEQ ID NO: 778252 - protein, 14 aa, Homo sapiens
  CDR3 for beta chain variable domain of TCR clone 389126 (TRBV12-4, TRBJ1-1)
CASSLGTGGTEAFF

SEQ ID NO: 778253 - protein, 17 aa, Homo sapiens
  CDR3 for alpha chain variable domain of TCR clone 389127 (TRAV12-3, TRAJ6)
CAMSASGGAGGSYIPTF

SEQ ID NO: 778254 - protein, 12 aa, Homo sapiens
  CDR3 for beta chain variable domain of TCR clone 389127 (TRBV12-4, TRBJ2-3)
CASSTLPDTQYS

SEQ ID NO: 778255 - protein, 14 aa, Homo sapiens
  CDR3 for alpha chain variable domain of TCR clone 389128 (TRAV30, TRAJ33)
CGTVAPRSNYQLIW

SEQ ID NO: 778256 - protein, 16 aa, Homo sapiens
  CDR3 for beta chain variable domain of TCR clone 389128 (TRBV4-1, TRBJ2-1)
CASSQEAGQGSDEQFF

SEQ ID NO: 778257 - protein, 11 aa, Homo sapiens
  CDR3 for alpha chain variable domain of TCR clone 389129 (TRAV9-2, TRAJ47)
CALSAGNKLVF

SEQ ID NO: 778258 - protein, 13 aa, Homo sapiens
  CDR3 for beta chain variable domain of TCR clone 389129 (TRBV2, TRBJ2-7)
CASSVGGSGEQYF

SEQ ID NO: 778259 - protein, 13 aa, Homo sapiens
  CDR3 for alpha chain variable domain of TCR clone 389130 (TRAV21, TRAJ45)
CAVMGGGADGLTF

SEQ ID NO: 778260 - protein, 16 aa, Homo sapiens
  CDR3 for beta chain variable domain of TCR clone 389130 (TRBV11-3, TRBJ2-5)
CASSSVVAGSTETQYF

SEQ ID NO: 778261 - protein, 12 aa, Homo sapiens
  CDR3 for alpha chain variable domain of TCR clone 389131 (TRAV8-3, TRAJ26)
CAGDNYGQNFVF

SEQ ID NO: 778262 - protein, 11 aa, Homo sapiens
  CDR3 for beta chain variable domain of TCR clone 389131 (TRBV19, TRBJ1-1)
CASSIGSEDFF

SEQ ID NO: 778263 - protein, 11 aa, Homo sapiens
  CDR3 for alpha chain variable domain of TCR clone 389132 (TRAV35, TRAJ34)
CWARNTDKFIF

SEQ ID NO: 778264 - protein, 14 aa, Homo sapiens
  CDR3 for beta chain variable domain of TCR clone 389132 (TRBV5-1, TRBJ2-7)
CASSRGESLYEQYF

SEQ ID NO: 778265 - protein, 15 aa, Homo sapiens
  CDR3 for alpha chain variable domain of TCR clone 389133 (TRAV2, TRAJ40)
CAVVTSGTYKYILEQ

SEQ ID NO: 778266 - protein, 15 aa, Homo sapiens
  CDR3 for beta chain variable domain of TCR clone 389133 (TRBV11-3, TRBJ2-3)
CASLKDGREGDTQYF

SEQ ID NO: 778267 - protein, 14 aa, Homo sapiens
  CDR3 for alpha chain variable domain of TCR clone 389134 (TRAV12-2, TRAJ13)
CAVKKTGGYQKVTF

SEQ ID NO: 778268 - protein, 12 aa, Homo sapiens
  CDR3 for beta chain variable domain of TCR clone 389134 (TRBV3-1, TRBJ2-1)
CASSQGSNGQFF

SEQ ID NO: 778269 - protein, 10 aa, Homo sapiens
  CDR3 for alpha chain variable domain of TCR clone 389135 (TRAV21, TRAJ31)
CAVDNARLMF

SEQ ID NO: 778270 - protein, 13 aa, Homo sapiens
  CDR3 for beta chain variable domain of TCR clone 389135 (TRBV5-5, TRBJ2-7)
CASSSQTRQRQYF

SEQ ID NO: 778271 - protein, 16 aa, Homo sapiens
  CDR3 for alpha chain variable domain of TCR clone 389136 (TRAV30, TRAJ24)
CGTEIVDADSWGKFQF

SEQ ID NO: 778272 - protein, 16 aa, Homo sapiens
  CDR3 for beta chain variable domain of TCR clone 389136 (TRBV7-3, TRBJ2-1)
CASSKPLAGGYNEQFF

SEQ ID NO: 778273 - protein, 21 aa, Homo sapiens
  CDR3 for alpha chain variable domain of TCR clone 389137 (TRAV21, )
CAVRQDAGNNHIQNPDPAVNQ

SEQ ID NO: 778274 - protein, 16 aa, Homo sapiens
  CDR3 for beta chain variable domain of TCR clone 389137 (TRBV4-2, TRBJ1-1)
CASRPLDGGGDTEAFF

SEQ ID NO: 778275 - protein, 18 aa, Homo sapiens
  CDR3 for alpha chain variable domain of TCR clone 389138 (TRAV13-1, TRAJ52)
CAAKNPNAGGTSYEKLTF

SEQ ID NO: 778276 - protein, 17 aa, Homo sapiens
  CDR3 for beta chain variable domain of TCR clone 389138 (TRBV7-9, TRBJ2-6)
CASSFGAGYSGANVLTF

SEQ ID NO: 778277 - protein, 19 aa, Homo sapiens
  CDR3 for alpha chain variable domain of TCR clone 389139 (TRAV2, TRAJ20)
ILQVREADAAVYRDCKLSF

SEQ ID NO: 778278 - protein, 13 aa, Homo sapiens
  CDR3 for beta chain variable domain of TCR clone 389139 (TRBV7-2, TRBJ2-2)
CASSLAVTGELFF

SEQ ID NO: 778279 - protein, 16 aa, Homo sapiens
  CDR3 for alpha chain variable domain of TCR clone 389140 (TRAV17, TRAJ53)
CATDALSGGSNYKLTF

SEQ ID NO: 778280 - protein, 18 aa, Homo sapiens
  CDR3 for beta chain variable domain of TCR clone 389140 (TRBV11-2, TRBJ2-3)
CASSLGGASRGAPNTQYF

SEQ ID NO: 778281 - protein, 17 aa, Homo sapiens
  CDR3 for alpha chain variable domain of TCR clone 389141 (TRAV12-2, TRAJ48)
CASNEKLTFGTGTRLTI

SEQ ID NO: 778282 - protein, 18 aa, Homo sapiens
  CDR3 for beta chain variable domain of TCR clone 389141 (TRBV11-2, TRBJ2-3)
CASSLGGASRGAPNTQYF

SEQ ID NO: 778283 - protein, 23 aa, Homo sapiens
  CDR3 for alpha chain variable domain of TCR clone 389142 (TRAV26-1, TRAJ38)
CIADNAGNNHIQNPDPAVYQLRD

SEQ ID NO: 778284 - protein, 12 aa, Homo sapiens
  CDR3 for beta chain variable domain of TCR clone 389142 (TRBV5-7, TRBJ1-1)
CASSLGRGKAFF

SEQ ID NO: 778285 - protein, 16 aa, Homo sapiens
  CDR3 for alpha chain variable domain of TCR clone 389143 (TRAV3, TRAJ10)
CAVRDMRAGGGNKLTF

SEQ ID NO: 778286 - protein, 14 aa, Homo sapiens
  CDR3 for beta chain variable domain of TCR clone 389143 (TRBV7-3, TRBJ1-1)
CASSLGTGYTEASF

SEQ ID NO: 778287 - protein, 16 aa, Homo sapiens
  CDR3 for alpha chain variable domain of TCR clone 389144 (TRAV8-3, TRAJ13)
CAVGAYPSGGYQKVTF

SEQ ID NO: 778288 - protein, 12 aa, Homo sapiens
  CDR3 for beta chain variable domain of TCR clone 389144 (TRBV6-3, TRBJ2-7)
CASSLTPYEQYF

SEQ ID NO: 778289 - protein, 13 aa, Homo sapiens
  CDR3 for alpha chain variable domain of TCR clone 389145 (TRAV21, TRAJ20)
CAVGLRVDYKLSF

SEQ ID NO: 778290 - protein, 12 aa, Homo sapiens
  CDR3 for beta chain variable domain of TCR clone 389145 (TRBV11-3, TRBJ1-1)
CASSHRQGEAFC

SEQ ID NO: 778291 - protein, 13 aa, Homo sapiens
  CDR3 for alpha chain variable domain of TCR clone 389146 (TRAV26-2, TRAJ43)
CILRAVNNNDMRF

SEQ ID NO: 778292 - protein, 13 aa, Homo sapiens
  CDR3 for beta chain variable domain of TCR clone 389146 (TRBV14, TRBJ2-1)
SASSQDRRNEQFF

SEQ ID NO: 778293 - protein, 15 aa, Homo sapiens
  CDR3 for alpha chain variable domain of TCR clone 389147 (TRAV3, TRAJ22)
CAVRDRGGSARQLTF

SEQ ID NO: 778294 - protein, 13 aa, Homo sapiens
  CDR3 for beta chain variable domain of TCR clone 389147 (TRBV4-1, TRBJ2-7)
CASSQGQAYEQYF

SEQ ID NO: 778295 - protein, 11 aa, Homo sapiens
  CDR3 for alpha chain variable domain of TCR clone 389148 (TRAV12-2, TRAJ49)
CALQGGNQFYF

SEQ ID NO: 778296 - protein, 14 aa, Homo sapiens
  CDR3 for beta chain variable domain of TCR clone 389148 (TRBV20-1, TRBJ2-7)
CSAKRGRSSYEQYF

SEQ ID NO: 778297 - protein, 18 aa, Homo sapiens
  CDR3 for alpha chain variable domain of TCR clone 389149 (TRAV13-1, TRAJ52)
CAASRRSAGGTSYGKLTF

SEQ ID NO: 778298 - protein, 15 aa, Homo sapiens
  CDR3 for beta chain variable domain of TCR clone 389149 (TRBV7-2, TRBJ1-2)
CASSPRAGWNYGYTF

SEQ ID NO: 778299 - protein, 14 aa, Homo sapiens
  CDR3 for alpha chain variable domain of TCR clone 389150 (TRAV13-1, TRAJ35)
CAASKGVSGNVLHC

SEQ ID NO: 778300 - protein, 13 aa, Homo sapiens
  CDR3 for beta chain variable domain of TCR clone 389150 (TRBV7-3, TRBJ1-1)
CASSQDWGAEAFF

SEQ ID NO: 778301 - protein, 11 aa, Homo sapiens
  CDR3 for alpha chain variable domain of TCR clone 389151 (TRAV2, TRAJ13)
CASGGYQKVTF

SEQ ID NO: 778302 - protein, 14 aa, Homo sapiens
  CDR3 for beta chain variable domain of TCR clone 389151 (TRBV12-4, TRBJ2-7)
CASSILGVAYEQYF

SEQ ID NO: 778303 - protein, 14 aa, Homo sapiens
  CDR3 for alpha chain variable domain of TCR clone 389152 (TRAV17, TRAJ57)
CATDPQGGSEKLVC

SEQ ID NO: 778304 - protein, 14 aa, Homo sapiens
  CDR3 for beta chain variable domain of TCR clone 389152 (TRBV11-2, TRBJ2-3)
CASSLGGGANTQYF

SEQ ID NO: 778305 - protein, 14 aa, Homo sapiens
  CDR3 for alpha chain variable domain of TCR clone 389153 (TRAV12-3, TRAJ10)
SHLPLTGGGNKLTF

SEQ ID NO: 778306 - protein, 16 aa, Homo sapiens
  CDR3 for beta chain variable domain of TCR clone 389153 (TRBV27, TRBJ2-1)
SMNVEPGTSGDNEQFF

SEQ ID NO: 778307 - protein, 16 aa, Homo sapiens
  CDR3 for alpha chain variable domain of TCR clone 389154 (TRAV4, TRAJ9)
CRVGDPNRPGGFKTIF

SEQ ID NO: 778308 - protein, 16 aa, Homo sapiens
  CDR3 for beta chain variable domain of TCR clone 389154 (TRBV28, TRBJ1-4)
CASSTPYRGRSEKLFF

SEQ ID NO: 778309 - protein, 14 aa, Homo sapiens
  CDR3 for alpha chain variable domain of TCR clone 389155 (TRAV38-2/DV8, TRAJ42)
CAYPEGGSQGNLIF

SEQ ID NO: 778310 - protein, 13 aa, Homo sapiens
  CDR3 for beta chain variable domain of TCR clone 389155 (TRBV19, TRBJ2-7)
CASSPRQSYEQYF

SEQ ID NO: 778311 - protein, 11 aa, Homo sapiens
  CDR3 for alpha chain variable domain of TCR clone 389156 (TRAV35, TRAJ34)
CWARNTDKLIF

SEQ ID NO: 778312 - protein, 17 aa, Homo sapiens
  CDR3 for beta chain variable domain of TCR clone 389156 (TRBV7-8, TRBJ2-6)
CASSAGTGGTGANVLTF

SEQ ID NO: 778313 - protein, 14 aa, Homo sapiens
  CDR3 for alpha chain variable domain of TCR clone 389157 (TRAV21, TRAJ39)
CAVRVNNAGNMLTF

SEQ ID NO: 778314 - protein, 15 aa, Homo sapiens
  CDR3 for beta chain variable domain of TCR clone 389157 (TRBV3-1, TRBJ1-3)
CASSPVGTDRNTMYF

SEQ ID NO: 778315 - protein, 13 aa, Homo sapiens
  CDR3 for alpha chain variable domain of TCR clone 389158 (TRAV2, TRAJ15)
CAVASQAGTALIF

SEQ ID NO: 778316 - protein, 15 aa, Homo sapiens
  CDR3 for beta chain variable domain of TCR clone 389158 (TRBV4-1, TRBJ2-5)
CASSQWDLYQETQYF

SEQ ID NO: 778317 - protein, 14 aa, Homo sapiens
  CDR3 for alpha chain variable domain of TCR clone 389159 (TRAV29/DV5, TRAJ49)
CAASAQNTGNQFYF

SEQ ID NO: 778318 - protein, 16 aa, Homo sapiens
  CDR3 for beta chain variable domain of TCR clone 389159 (TRBV4-1, TRBJ2-7)
CASSQEWTSGPLEQYF

SEQ ID NO: 778319 - protein, 11 aa, Homo sapiens
  CDR3 for alpha chain variable domain of TCR clone 389160 (TRAV3, TRAJ21)
CAVGNFNKFYF

SEQ ID NO: 778320 - protein, 13 aa, Homo sapiens
  CDR3 for beta chain variable domain of TCR clone 389160 (TRBV7-9, TRBJ1-2)
CASSLKQNYGDIF

SEQ ID NO: 778321 - protein, 13 aa, Homo sapiens
  CDR3 for alpha chain variable domain of TCR clone 389161 (TRAV17, TRAJ39)
CATEDNAGNMLTF

SEQ ID NO: 778322 - protein, 14 aa, Homo sapiens
  CDR3 for beta chain variable domain of TCR clone 389161 (TRBV19, TRBJ1-2)
CASSPTGGAGGDTF

SEQ ID NO: 778323 - protein, 12 aa, Homo sapiens
  CDR3 for alpha chain variable domain of TCR clone 389162 (TRAV3, TRAJ20)
CAVRDPDYKLSF

SEQ ID NO: 778324 - protein, 14 aa, Homo sapiens
  CDR3 for beta chain variable domain of TCR clone 389162 (TRBV11-2, TRBJ2-7)
CASSPTGEGYEQYF

SEQ ID NO: 778325 - protein, 14 aa, Homo sapiens
  CDR3 for alpha chain variable domain of TCR clone 389163 (TRAV35, TRAJ41)
CAGQASVRRNALNF

SEQ ID NO: 778326 - protein, 14 aa, Homo sapiens
  CDR3 for beta chain variable domain of TCR clone 389163 (TRBV20-1, TRBJ1-2)
CSASEQRAVYGYTF

SEQ ID NO: 778327 - protein, 14 aa, Homo sapiens
  CDR3 for alpha chain variable domain of TCR clone 389164 (TRAV8-2, TRAJ11)
CVVSEKSGYSTLTF

SEQ ID NO: 778328 - protein, 12 aa, Homo sapiens
  CDR3 for beta chain variable domain of TCR clone 389164 (TRBV11-3, TRBJ1-1)
CASSHRQGEAFF

SEQ ID NO: 778329 - protein, 16 aa, Homo sapiens
  CDR3 for alpha chain variable domain of TCR clone 389165 (TRAV27, TRAJ34)
CAGGGLGDDNTDKLIF

SEQ ID NO: 778330 - protein, 15 aa, Homo sapiens
  CDR3 for beta chain variable domain of TCR clone 389165 (TRBV9, TRBJ1-4)
CTSSVGGSTNEKLFF

SEQ ID NO: 778331 - protein, 16 aa, Homo sapiens
  CDR3 for alpha chain variable domain of TCR clone 389166 (TRAV30, TRAJ24)
CGTEIADADSWGKFQF

SEQ ID NO: 778332 - protein, 14 aa, Homo sapiens
  CDR3 for beta chain variable domain of TCR clone 389166 (TRBV20-1, TRBJ1-1)
CSAQTRIGGTEAFF

SEQ ID NO: 778333 - protein, 16 aa, Homo sapiens
  CDR3 for alpha chain variable domain of TCR clone 389167 (TRAV30, TRAJ24)
CGTEIVDSDSWGTFQF

SEQ ID NO: 778334 - protein, 14 aa, Homo sapiens
  CDR3 for beta chain variable domain of TCR clone 389167 (TRBV12-5, TRBJ2-5)
CASGSRTHQETQYF

SEQ ID NO: 778335 - protein, 13 aa, Homo sapiens
  CDR3 for alpha chain variable domain of TCR clone 389168 (TRAV13-1, TRAJ21)
CAASIYNFNKFYF

SEQ ID NO: 778336 - protein, 14 aa, Homo sapiens
  CDR3 for beta chain variable domain of TCR clone 389168 (TRBV19, TRBJ2-1)
CASPTFVLSGEQFF

SEQ ID NO: 778337 - protein, 12 aa, Homo sapiens
  CDR3 for alpha chain variable domain of TCR clone 389169 (TRAV3, TRAJ20)
CAVRDGDYKLSF

SEQ ID NO: 778338 - protein, 16 aa, Homo sapiens
  CDR3 for beta chain variable domain of TCR clone 389169 (TRBV19, TRBJ2-1)
CASSKAGPSSYNEQFF

SEQ ID NO: 778339 - protein, 20 aa, Homo sapiens
  CDR3 for alpha chain variable domain of TCR clone 389170 (TRAV12-1, TRAJ42)
SSVIQPPTSVKGGTQGNLIF

SEQ ID NO: 778340 - protein, 18 aa, Homo sapiens
  CDR3 for beta chain variable domain of TCR clone 389170 (TRBV11-2, TRBJ2-3)
CASSLGGASRGAPNTQYF

SEQ ID NO: 778341 - protein, 16 aa, Homo sapiens
  CDR3 for alpha chain variable domain of TCR clone 389171 (TRAV3, TRAJ37)
CAVRPHGSGNTGKLIF

SEQ ID NO: 778342 - protein, 17 aa, Homo sapiens
  CDR3 for beta chain variable domain of TCR clone 389171 (TRBV19, TRBJ2-6)
CASSTGQVFSGANVLTF

SEQ ID NO: 778343 - protein, 11 aa, Homo sapiens
  CDR3 for alpha chain variable domain of TCR clone 389172 (TRAV1-1, TRAJ20)
WAVFNDYKLSF

SEQ ID NO: 778344 - protein, 16 aa, Homo sapiens
  CDR3 for beta chain variable domain of TCR clone 389172 (TRBV29-1, TRBJ2-2)
CSVEKTSEGNTGELFF

SEQ ID NO: 778345 - protein, 15 aa, Homo sapiens
  CDR3 for alpha chain variable domain of TCR clone 389173 (TRAV26-1, TRAJ22)
CIVRVSFWFCKATDL

SEQ ID NO: 778346 - protein, 13 aa, Homo sapiens
  CDR3 for beta chain variable domain of TCR clone 389173 (TRBV7-9, TRBJ1-2)
CASSLKQNDGYTF

SEQ ID NO: 778347 - protein, 14 aa, Homo sapiens
  CDR3 for alpha chain variable domain of TCR clone 389174 (TRAV13-1, TRAJ35)
CAASKGGFGNVLHC

SEQ ID NO: 778348 - protein, 12 aa, Homo sapiens
  CDR3 for beta chain variable domain of TCR clone 389174 (TRBV3-1, TRBJ2-7)
CASSQVRYEQYF

SEQ ID NO: 778349 - protein, 14 aa, Homo sapiens
  CDR3 for alpha chain variable domain of TCR clone 389175 (TRAV8-1, TRAJ24)
CAVNAADSWGKLQF

SEQ ID NO: 778350 - protein, 14 aa, Homo sapiens
  CDR3 for beta chain variable domain of TCR clone 389175 (TRBV19, TRBJ1-2)
CASSLQGQAYGYTF

SEQ ID NO: 778351 - protein, 14 aa, Homo sapiens
  CDR3 for alpha chain variable domain of TCR clone 389176 (TRAV17, TRAJ9)
CATVTLGGGFKTIF

SEQ ID NO: 778352 - protein, 17 aa, Homo sapiens
  CDR3 for beta chain variable domain of TCR clone 389176 (TRBV11-2, TRBJ2-1)
CASSLYPPGVEYNEQFF

SEQ ID NO: 778353 - protein, 15 aa, Homo sapiens
  CDR3 for alpha chain variable domain of TCR clone 389177 (TRAV2, TRAJ44)
CAVQAYTGTASKLTF

SEQ ID NO: 778354 - protein, 17 aa, Homo sapiens
  CDR3 for beta chain variable domain of TCR clone 389177 (TRBV12-4, TRBJ2-1)
CASSPGLAGGRINEQFF

SEQ ID NO: 778355 - protein, 12 aa, Homo sapiens
  CDR3 for alpha chain variable domain of TCR clone 389178 (TRAV13-1, TRAJ27)
CAAHTNAGTSTF

SEQ ID NO: 778356 - protein, 14 aa, Homo sapiens
  CDR3 for beta chain variable domain of TCR clone 389178 (TRBV12-5, TRBJ2-5)
CASGSRTHQETQYF

SEQ ID NO: 778357 - protein, 13 aa, Homo sapiens
  CDR3 for alpha chain variable domain of TCR clone 389179 (TRAV2, TRAJ40)
CAVVTSGTYKYIF

SEQ ID NO: 778358 - protein, 14 aa, Homo sapiens
  CDR3 for beta chain variable domain of TCR clone 389179 (TRBV12-5, TRBJ2-1)
CASGSRTHQETQYF

SEQ ID NO: 778359 - protein, 19 aa, Homo sapiens
  CDR3 for alpha chain variable domain of TCR clone 389180 (TRAV26-1, TRAJ22)
CCVLLHRWVFSGSARQLTF

SEQ ID NO: 778360 - protein, 19 aa, Homo sapiens
  CDR3 for beta chain variable domain of TCR clone 389180 (TRBV19, TRBJ2-5)
CASSIGQVTDVFLGETQYF

SEQ ID NO: 778361 - protein, 14 aa, Homo sapiens
  CDR3 for alpha chain variable domain of TCR clone 389181 (TRAV16, TRAJ15)
CALSFNQAGTALIF

SEQ ID NO: 778362 - protein, 17 aa, Homo sapiens
  CDR3 for beta chain variable domain of TCR clone 389181 (TRBV19, TRBJ2-6)
CASSRGQVFSGANVLTF

SEQ ID NO: 778363 - protein, 14 aa, Homo sapiens
  CDR3 for alpha chain variable domain of TCR clone 389182 (TRAV1-2, TRAJ16)
CAVNRFSDGQKLLF

SEQ ID NO: 778364 - protein, 13 aa, Homo sapiens
  CDR3 for beta chain variable domain of TCR clone 389182 (TRBV11-3, TRBJ1-1)
CASSWDGNTEAFF

SEQ ID NO: 778365 - protein, 13 aa, Homo sapiens
  CDR3 for alpha chain variable domain of TCR clone 389183 (TRAV21, TRAJ27)
CAARPGNAGKSTF

SEQ ID NO: 778366 - protein, 13 aa, Homo sapiens
  CDR3 for beta chain variable domain of TCR clone 389183 (TRBV18, TRBJ2-7)
CASQSGGVYEQYF

SEQ ID NO: 778367 - protein, 15 aa, Homo sapiens
  CDR3 for alpha chain variable domain of TCR clone 389184 (TRAV13-1, TRAJ45)
CAASGSGGGADGLTF

SEQ ID NO: 778368 - protein, 12 aa, Homo sapiens
  CDR3 for beta chain variable domain of TCR clone 389184 (TRBV11-2, TRBJ2-2)
CASSLGGGELVF

SEQ ID NO: 778369 - protein, 14 aa, Homo sapiens
  CDR3 for alpha chain variable domain of TCR clone 389185 (TRAV17, TRAJ6)
CATVFQGGSYIPTF

SEQ ID NO: 778370 - protein, 13 aa, Homo sapiens
  CDR3 for beta chain variable domain of TCR clone 389185 (TRBV7-2, TRBJ2-2)
CASSLAVTGELFF

SEQ ID NO: 778371 - protein, 12 aa, Homo sapiens
  CDR3 for alpha chain variable domain of TCR clone 389186 (TRAV16, TRAJ8)
CAPLGGFQKLVF

SEQ ID NO: 778372 - protein, 14 aa, Homo sapiens
  CDR3 for beta chain variable domain of TCR clone 389186 (TRBV12-5, TRBJ2-5)
CASGSRTHQETQYF

SEQ ID NO: 778373 - protein, 18 aa, Homo sapiens
  CDR3 for alpha chain variable domain of TCR clone 389187 (TRAV21, TRAJ52)
CAVRPSPAGGTSYGKLTF

SEQ ID NO: 778374 - protein, 14 aa, Homo sapiens
  CDR3 for beta chain variable domain of TCR clone 389187 (TRBV7-2, TRBJ1-5)
CASSTQGADQPQHF

SEQ ID NO: 778375 - protein, 14 aa, Homo sapiens
  CDR3 for alpha chain variable domain of TCR clone 389188 (TRAV26-1, TRAJ45)
CIEVTGGGADGLTF

SEQ ID NO: 778376 - protein, 15 aa, Homo sapiens
  CDR3 for beta chain variable domain of TCR clone 389188 (TRBV5-1, TRBJ2-5)
CASSFKGGDQETQYF

SEQ ID NO: 778377 - protein, 12 aa, Homo sapiens
  CDR3 for alpha chain variable domain of TCR clone 389189 (TRAV3, TRAJ43)
CAVRDPNNDMRF

SEQ ID NO: 778378 - protein, 14 aa, Homo sapiens
  CDR3 for beta chain variable domain of TCR clone 389189 (TRBV6-5, TRBJ2-1)
CQQLRCGAGNEQFF

SEQ ID NO: 778379 - protein, 12 aa, Homo sapiens
  CDR3 for alpha chain variable domain of TCR clone 389190 (TRAV16, TRAJ26)
CASKDGGQNFVF

SEQ ID NO: 778380 - protein, 13 aa, Homo sapiens
  CDR3 for beta chain variable domain of TCR clone 389190 (TRBV25-1, TRBJ1-1)
CASSDRERAEAFF

SEQ ID NO: 778381 - protein, 10 aa, Homo sapiens
  CDR3 for alpha chain variable domain of TCR clone 389191 (TRAV1-2, TRAJ31)
CVSEDARLMF

SEQ ID NO: 778382 - protein, 14 aa, Homo sapiens
  CDR3 for beta chain variable domain of TCR clone 389191 (TRBV20-1, TRBJ1-3)
CSASPTGAGNNIYF

SEQ ID NO: 778383 - protein, 17 aa, Homo sapiens
  CDR3 for alpha chain variable domain of TCR clone 389192 (TRAV36/DV7, TRAJ52)
CAVAQRDGGTSYGKLTF

SEQ ID NO: 778384 - protein, 14 aa, Homo sapiens
  CDR3 for beta chain variable domain of TCR clone 389192 (TRBV20-1, TRBJ1-1)
CSAQTRIGGTEAFF

SEQ ID NO: 778385 - protein, 10 aa, Homo sapiens
  CDR3 for alpha chain variable domain of TCR clone 389193 (TRAV12-2, TRAJ43)
CAGDDMRFVA

SEQ ID NO: 778386 - protein, 16 aa, Homo sapiens
  CDR3 for beta chain variable domain of TCR clone 389193 (TRBV2, TRBJ2-4)
CASSEAPGGEQNIQYF

SEQ ID NO: 778387 - protein, 16 aa, Homo sapiens
  CDR3 for alpha chain variable domain of TCR clone 389194 (TRAV30, TRAJ24)
CGTEIVDADSWGKCQF

SEQ ID NO: 778388 - protein, 14 aa, Homo sapiens
  CDR3 for beta chain variable domain of TCR clone 389194 (TRBV12-5, TRBJ2-5)
CAGGSRTHQETQYF

SEQ ID NO: 778389 - protein, 14 aa, Homo sapiens
  CDR3 for alpha chain variable domain of TCR clone 389195 (TRAV3, TRAJ34)
CAVRDINNTDKLIF

SEQ ID NO: 778390 - protein, 15 aa, Homo sapiens
  CDR3 for beta chain variable domain of TCR clone 389195 (TRBV20-1, TRBJ2-7)
CSARDRVSGMEEQYF

SEQ ID NO: 778391 - protein, 12 aa, Homo sapiens
  CDR3 for alpha chain variable domain of TCR clone 389196 (TRAV41, TRAJ58)
CAVATSGSRLTF

SEQ ID NO: 778392 - protein, 15 aa, Homo sapiens
  CDR3 for beta chain variable domain of TCR clone 389196 (TRBV29-1, TRBJ2-6)
CSVGDRGSGANVLTF

SEQ ID NO: 778393 - protein, 15 aa, Homo sapiens
  CDR3 for alpha chain variable domain of TCR clone 389197 (TRAV2, TRAJ15)
CAVEDLGQAGTALIF

SEQ ID NO: 778394 - protein, 13 aa, Homo sapiens
  CDR3 for beta chain variable domain of TCR clone 389197 (TRBV10-2, TRBJ2-7)
CASGATGGYEQYF

SEQ ID NO: 778395 - protein, 14 aa, Homo sapiens
  CDR3 for alpha chain variable domain of TCR clone 389198 (TRAV17, TRAJ22)
CATSPSGSARQLTF

SEQ ID NO: 778396 - protein, 15 aa, Homo sapiens
  CDR3 for beta chain variable domain of TCR clone 389198 (TRBV4-1, TRBJ2-5)
CASSQWVLYQETQYF

SEQ ID NO: 778397 - protein, 14 aa, Homo sapiens
  CDR3 for alpha chain variable domain of TCR clone 389199 (TRAV1-2, TRAJ16)
CAVNRFSDGQKLLF

SEQ ID NO: 778398 - protein, 12 aa, Homo sapiens
  CDR3 for beta chain variable domain of TCR clone 389199 (TRBV29-1, TRBJ2-7)
CSARDRPYEQYF

SEQ ID NO: 778399 - protein, 13 aa, Homo sapiens
  CDR3 for alpha chain variable domain of TCR clone 389200 (TRAV3, TRAJ16)
CALRDRNGRKLLF

SEQ ID NO: 778400 - protein, 15 aa, Homo sapiens
  CDR3 for beta chain variable domain of TCR clone 389200 (TRBV5-1, TRBJ2-1)
CASSPPRAPYNEQFF

SEQ ID NO: 778401 - protein, 14 aa, Homo sapiens
  CDR3 for alpha chain variable domain of TCR clone 389201 (TRAV26-1, TRAJ38)
CIADNAGNNRKLIW

SEQ ID NO: 778402 - protein, 13 aa, Homo sapiens
  CDR3 for beta chain variable domain of TCR clone 389201 (TRBV20-1, TRBJ1-1)
CSARGGGDTEDFF

SEQ ID NO: 778403 - protein, 13 aa, Homo sapiens
  CDR3 for alpha chain variable domain of TCR clone 389202 (TRAV2, TRAJ47)
CAVDREYGNKLVF

SEQ ID NO: 778404 - protein, 17 aa, Homo sapiens
  CDR3 for beta chain variable domain of TCR clone 389202 (TRBV15, TRBJ1-5)
CATSRVKGIYSNQRQHF

SEQ ID NO: 778405 - protein, 12 aa, Homo sapiens
  CDR3 for alpha chain variable domain of TCR clone 389203 (TRAV17, TRAJ12)
CATLRSSYKLIF

SEQ ID NO: 778406 - protein, 16 aa, Homo sapiens
  CDR3 for beta chain variable domain of TCR clone 389203 (TRBV28, TRBJ2-7)
CASSLFFERGGPEQYF

SEQ ID NO: 778407 - protein, 17 aa, Homo sapiens
  CDR3 for alpha chain variable domain of TCR clone 389204 (TRAV13-1, TRAJ43)
CAAPPDMRFGAGTRLTV

SEQ ID NO: 778408 - protein, 14 aa, Homo sapiens
  CDR3 for beta chain variable domain of TCR clone 389204 (TRBV20-1, TRBJ2-7)
CSAKRGRSSYEQYF

SEQ ID NO: 778409 - protein, 14 aa, Homo sapiens
  CDR3 for alpha chain variable domain of TCR clone 389205 (TRAV3, TRAJ40)
CAVRDRRGTYKYIF

SEQ ID NO: 778410 - protein, 15 aa, Homo sapiens
  CDR3 for beta chain variable domain of TCR clone 389205 (TRBV11-1, TRBJ1-3)
RASTDPRAFGNTIYF

SEQ ID NO: 778411 - protein, 12 aa, Homo sapiens
  CDR3 for alpha chain variable domain of TCR clone 389206 (TRAV8-4, TRAJ37)
CAVRSNTGKLIF

SEQ ID NO: 778412 - protein, 16 aa, Homo sapiens
  CDR3 for beta chain variable domain of TCR clone 389206 (TRBV7-2, TRBJ2-3)
CASSLVGDASTDTQYV

SEQ ID NO: 778413 - protein, 11 aa, Homo sapiens
  CDR3 for alpha chain variable domain of TCR clone 389207 (TRAV1-2, TRAJ20)
CAVANDYKLSF

SEQ ID NO: 778414 - protein, 13 aa, Homo sapiens
  CDR3 for beta chain variable domain of TCR clone 389207 (TRBV5-1, TRBJ2-5)
CASSLDWGETQYF

SEQ ID NO: 778415 - protein, 15 aa, Homo sapiens
  CDR3 for alpha chain variable domain of TCR clone 389208 (TRAV2, TRAJ15)
CAVEDREQAGTALIF

SEQ ID NO: 778416 - protein, 14 aa, Homo sapiens
  CDR3 for beta chain variable domain of TCR clone 389208 (TRBV2, TRBJ2-7)
CASSLTSGGYEQYF

SEQ ID NO: 778417 - protein, 14 aa, Homo sapiens
  CDR3 for alpha chain variable domain of TCR clone 389209 (TRAV17, TRAJ16)
CATADFSDGQKLLF

SEQ ID NO: 778418 - protein, 13 aa, Homo sapiens
  CDR3 for beta chain variable domain of TCR clone 389209 (TRBV7-3, TRBJ2-2)
CASSLNVLGELFF

SEQ ID NO: 778419 - protein, 15 aa, Homo sapiens
  CDR3 for alpha chain variable domain of TCR clone 389210 (TRAV3, TRAJ5)
CAVRDLDTGRRALTF

SEQ ID NO: 778420 - protein, 15 aa, Homo sapiens
  CDR3 for beta chain variable domain of TCR clone 389210 (TRBV28, TRBJ2-1)
CASSGLAEVDNEQFF

SEQ ID NO: 778421 - protein, 11 aa, Homo sapiens
  CDR3 for alpha chain variable domain of TCR clone 389211 (TRAV12-3, TRAJ43)
CAMSVSNDMRF

SEQ ID NO: 778422 - protein, 15 aa, Homo sapiens
  CDR3 for beta chain variable domain of TCR clone 389211 (TRBV5-5, TRBJ1-5)
CASSLEGASNQPQHF

SEQ ID NO: 778423 - protein, 14 aa, Homo sapiens
  CDR3 for alpha chain variable domain of TCR clone 389212 (TRAV23/DV6, TRAJ24)
CAASLSDSWGKLQF

SEQ ID NO: 778424 - protein, 16 aa, Homo sapiens
  CDR3 for beta chain variable domain of TCR clone 389212 (TRBV7-9, TRBJ2-6)
CASSLKGPLRANFLTF

SEQ ID NO: 778425 - protein, 12 aa, Homo sapiens
  CDR3 for alpha chain variable domain of TCR clone 389213 (TRAV8-4, TRAJ43)
CAVSVNNNNMRF

SEQ ID NO: 778426 - protein, 18 aa, Homo sapiens
  CDR3 for beta chain variable domain of TCR clone 389213 (TRBV5-7, TRBJ2-2)
CASSLGASGGLNTGELFF

SEQ ID NO: 778427 - protein, 12 aa, Homo sapiens
  CDR3 for alpha chain variable domain of TCR clone 389214 (TRAV13-1, TRAJ42)
VNYGGSQGNLIF

SEQ ID NO: 778428 - protein, 12 aa, Homo sapiens
  CDR3 for beta chain variable domain of TCR clone 389214 (TRBV7-9, TRBJ1-5)
CASSSDQATQHF

SEQ ID NO: 778429 - protein, 12 aa, Homo sapiens
  CDR3 for alpha chain variable domain of TCR clone 389215 (TRAV21, TRAJ3)
CCFYSSSSKIIF

SEQ ID NO: 778430 - protein, 16 aa, Homo sapiens
  CDR3 for beta chain variable domain of TCR clone 389215 (TRBV19, TRBJ2-1)
CASSTAGPSSYNEQFF

SEQ ID NO: 778431 - protein, 13 aa, Homo sapiens
  CDR3 for alpha chain variable domain of TCR clone 389216 (TRAV21, TRAJ20)
CAVGLGVDYKPSF

SEQ ID NO: 778432 - protein, 13 aa, Homo sapiens
  CDR3 for beta chain variable domain of TCR clone 389216 (TRBV3-1, TRBJ2-2)
CASLARGSGELFF

SEQ ID NO: 778433 - protein, 15 aa, Homo sapiens
  CDR3 for alpha chain variable domain of TCR clone 389217 (TRAV12-1, TRAJ44)
CVVFVNTGTASKLTF

SEQ ID NO: 778434 - protein, 16 aa, Homo sapiens
  CDR3 for beta chain variable domain of TCR clone 389217 (TRBV7-8, TRBJ2-2)
CASSLKRGTLSGELFF

SEQ ID NO: 778435 - protein, 13 aa, Homo sapiens
  CDR3 for alpha chain variable domain of TCR clone 389218 (TRAV36/DV7, TRAJ57)
CAPLQGGSEKLVF

SEQ ID NO: 778436 - protein, 12 aa, Homo sapiens
  CDR3 for beta chain variable domain of TCR clone 389218 (TRBV27, TRBJ2-5)
CASSPTGETQYF

SEQ ID NO: 778437 - protein, 14 aa, Homo sapiens
  CDR3 for alpha chain variable domain of TCR clone 389219 (TRAV1-2, TRAJ16)
CAVNRFSDGQKLLF

SEQ ID NO: 778438 - protein, 15 aa, Homo sapiens
  CDR3 for beta chain variable domain of TCR clone 389219 (TRBV7-9, TRBJ1-6)
CASSSATADNAPLHF

SEQ ID NO: 778439 - protein, 14 aa, Homo sapiens
  CDR3 for alpha chain variable domain of TCR clone 389220 (TRAV8-1, TRAJ5)
CAVRTDTGRRALTF

SEQ ID NO: 778440 - protein, 12 aa, Homo sapiens
  CDR3 for beta chain variable domain of TCR clone 389220 (TRBV11-2, TRBJ2-1)
CASSPGNNEQFC

SEQ ID NO: 778441 - protein, 13 aa, Homo sapiens
  CDR3 for alpha chain variable domain of TCR clone 389221 (TRAV13-1, TRAJ6)
CAASRGGSYIPTF

SEQ ID NO: 778442 - protein, 15 aa, Homo sapiens
  CDR3 for beta chain variable domain of TCR clone 389221 (TRBV25-1, TRBJ2-5)
CASSDPGTHQETQYF

SEQ ID NO: 778443 - protein, 18 aa, Homo sapiens
  CDR3 for alpha chain variable domain of TCR clone 389222 (TRAV13-1, TRAJ52)
CAAKNPNAGGTSYGKLTF

SEQ ID NO: 778444 - protein, 15 aa, Homo sapiens
  CDR3 for beta chain variable domain of TCR clone 389222 (TRBV2, TRBJ2-2)
CASSRETAGTGELFF

SEQ ID NO: 778445 - protein, 11 aa, Homo sapiens
  CDR3 for alpha chain variable domain of TCR clone 389223 (TRAV12-3, TRAJ27)
CAMANAGKSTF

SEQ ID NO: 778446 - protein, 13 aa, Homo sapiens
  CDR3 for beta chain variable domain of TCR clone 389223 (TRBV3-1, TRBJ1-1)
CASSPGVITEAVF

SEQ ID NO: 778447 - protein, 14 aa, Homo sapiens
  CDR3 for alpha chain variable domain of TCR clone 389224 (TRAV29/DV5, TRAJ36)
CAARRKTGANNLFF

SEQ ID NO: 778448 - protein, 18 aa, Homo sapiens
  CDR3 for beta chain variable domain of TCR clone 389224 (TRBV11-2, TRBJ2-3)
CACSLGGASRGAPNTQYF

SEQ ID NO: 778449 - protein, 14 aa, Homo sapiens
  CDR3 for alpha chain variable domain of TCR clone 389225 (TRAV2, TRAJ9)
CAVEDRSGGFKTIY

SEQ ID NO: 778450 - protein, 15 aa, Homo sapiens
  CDR3 for beta chain variable domain of TCR clone 389225 (TRBV20-1, TRBJ2-7)
CSARDRVSGMDEQYF

SEQ ID NO: 778451 - protein, 13 aa, Homo sapiens
  CDR3 for alpha chain variable domain of TCR clone 389226 (TRAV12-2, TRAJ4)
CAGFSGGDNKLIF

SEQ ID NO: 778452 - protein, 14 aa, Homo sapiens
  CDR3 for beta chain variable domain of TCR clone 389226 (TRBV24-1, TRBJ1-1)
CATSIPRGDTEAFF

SEQ ID NO: 778453 - protein, 19 aa, Homo sapiens
  CDR3 for alpha chain variable domain of TCR clone 389227 (TRAV3, TRAJ6)
CAVRDGQGQEEATYLHLEE

SEQ ID NO: 778454 - protein, 13 aa, Homo sapiens
  CDR3 for beta chain variable domain of TCR clone 389227 (TRBV7-9, TRBJ1-2)
CASSLRQNYGYTF

SEQ ID NO: 778455 - protein, 17 aa, Homo sapiens
  CDR3 for alpha chain variable domain of TCR clone 389228 (TRAV3, TRAJ6)
CAVRDGPRAGGSYIPTS

SEQ ID NO: 778456 - protein, 14 aa, Homo sapiens
  CDR3 for beta chain variable domain of TCR clone 389228 (TRBV7-2, TRBJ2-7)
CASSPKTSFYEQYY

SEQ ID NO: 778457 - protein, 13 aa, Homo sapiens
  CDR3 for alpha chain variable domain of TCR clone 389229 (TRAV13-1, TRAJ43)
CAASLSNNNDMRF

SEQ ID NO: 778458 - protein, 15 aa, Homo sapiens
  CDR3 for beta chain variable domain of TCR clone 389229 (TRBV4-3, TRBJ2-7)
CASSQGGRGIYEQYF

SEQ ID NO: 778459 - protein, 12 aa, Homo sapiens
  CDR3 for alpha chain variable domain of TCR clone 389230 (TRAV13-1, TRAJ20)
CAASRGDYKLSF

SEQ ID NO: 778460 - protein, 16 aa, Homo sapiens
  CDR3 for beta chain variable domain of TCR clone 389230 (TRBV24-1, TRBJ2-3)
CATSDPGTGATDTQYF

SEQ ID NO: 778461 - protein, 13 aa, Homo sapiens
  CDR3 for alpha chain variable domain of TCR clone 389231 (TRAV21, TRAJ29)
CAAPNSGNTPLVF

SEQ ID NO: 778462 - protein, 14 aa, Homo sapiens
  CDR3 for beta chain variable domain of TCR clone 389231 (TRBV7-2, TRBJ2-7)
CASRSQGAAYEQYF

SEQ ID NO: 778463 - protein, 15 aa, Homo sapiens
  CDR3 for alpha chain variable domain of TCR clone 389232 (TRAV8-4, TRAJ37)
CAVSRGSGNTGKLIL

SEQ ID NO: 778464 - protein, 15 aa, Homo sapiens
  CDR3 for beta chain variable domain of TCR clone 389232 (TRBV5-1, TRBJ2-7)
CASSLDLTSSYEQYF

SEQ ID NO: 778465 - protein, 13 aa, Homo sapiens
  CDR3 for alpha chain variable domain of TCR clone 389233 (TRAV8-6, TRAJ49)
CAVSTNTGNQFYF

SEQ ID NO: 778466 - protein, 12 aa, Homo sapiens
  CDR3 for beta chain variable domain of TCR clone 389233 (TRBV11-2, TRBJ2-2)
CASSLGGGELFF

SEQ ID NO: 778467 - protein, 16 aa, Homo sapiens
  CDR3 for alpha chain variable domain of TCR clone 389234 (TRAV1-2, TRAJ10)
CAVRGVLTGGGNKLTF

SEQ ID NO: 778468 - protein, 17 aa, Homo sapiens
  CDR3 for beta chain variable domain of TCR clone 389234 (TRBV7-8, TRBJ2-7)
CASSFTSGRPPSYEQYF

SEQ ID NO: 778469 - protein, 16 aa, Homo sapiens
  CDR3 for alpha chain variable domain of TCR clone 389235 (TRAV8-3, TRAJ10)
CAVGPILTGGGNKLTF

SEQ ID NO: 778470 - protein, 15 aa, Homo sapiens
  CDR3 for beta chain variable domain of TCR clone 389235 (TRBV7-2, TRBJ2-5)
CSSSKWLSGQETQYF

SEQ ID NO: 778471 - protein, 15 aa, Homo sapiens
  CDR3 for alpha chain variable domain of TCR clone 389236 (TRAV8-3, TRAJ23)
CAVGDRYNQGGKLIF

SEQ ID NO: 778472 - protein, 17 aa, Homo sapiens
  CDR3 for beta chain variable domain of TCR clone 389236 (TRBV4-1, TRBJ1-4)
CASSQEGPRGVEEKLLF

SEQ ID NO: 778473 - protein, 15 aa, Homo sapiens
  CDR3 for alpha chain variable domain of TCR clone 389237 (TRAV17, TRAJ57)
CATGPSQGGSEKLVF

SEQ ID NO: 778474 - protein, 16 aa, Homo sapiens
  CDR3 for beta chain variable domain of TCR clone 389237 (TRBV2, TRBJ1-5)
CASSELHKSGFQPQHF

SEQ ID NO: 778475 - protein, 23 aa, Homo sapiens
  CDR3 for alpha chain variable domain of TCR clone 389238 (TRAV4, TRAJ26)
IPADRKSSTLSLPRVYYGQNFVF

SEQ ID NO: 778476 - protein, 16 aa, Homo sapiens
  CDR3 for beta chain variable domain of TCR clone 389238 (TRBV7-2, TRBJ1-2)
CASSSNQDRRGHGYTV

SEQ ID NO: 778477 - protein, 12 aa, Homo sapiens
  CDR3 for alpha chain variable domain of TCR clone 389239 (TRAV17, TRAJ57)
CATDGGSEKLVF

SEQ ID NO: 778478 - protein, 12 aa, Homo sapiens
  CDR3 for beta chain variable domain of TCR clone 389239 (TRBV29-1, TRBJ2-2)
CCVDKYTGELCF

SEQ ID NO: 778479 - protein, 13 aa, Homo sapiens
  CDR3 for alpha chain variable domain of TCR clone 389240 (TRAV27, TRAJ29)
CAGAHSGNTPLDF

SEQ ID NO: 778480 - protein, 18 aa, Homo sapiens
  CDR3 for beta chain variable domain of TCR clone 389240 (TRBV6-6, TRBJ1-3)
CASSYSKWDSISGNTIYF

SEQ ID NO: 778481 - protein, 14 aa, Homo sapiens
  CDR3 for alpha chain variable domain of TCR clone 389241 (TRAV1-2, TRAJ8)
CAVREDSGFQKLVF

SEQ ID NO: 778482 - protein, 14 aa, Homo sapiens
  CDR3 for beta chain variable domain of TCR clone 389241 (TRBV7-2, TRBJ1-1)
CASSFLTGTTEAFF

SEQ ID NO: 778483 - protein, 14 aa, Homo sapiens
  CDR3 for alpha chain variable domain of TCR clone 389242 (TRAV12-1, TRAJ33)
SVVNPEDSNYQLIW

SEQ ID NO: 778484 - protein, 11 aa, Homo sapiens
  CDR3 for beta chain variable domain of TCR clone 389242 (TRBV7-6, TRBJ2-1)
CASSNYGEQFF

SEQ ID NO: 778485 - protein, 14 aa, Homo sapiens
  CDR3 for alpha chain variable domain of TCR clone 389243 (TRAV35, TRAJ22)
CAGLRPGSAGQLTL

SEQ ID NO: 778486 - protein, 15 aa, Homo sapiens
  CDR3 for beta chain variable domain of TCR clone 389243 (TRBV12-4, TRBJ2-5)
CASSPPTGLQETQYF

SEQ ID NO: 778487 - protein, 14 aa, Homo sapiens
  CDR3 for alpha chain variable domain of TCR clone 389244 (TRAV3, TRAJ33)
CAMRDMGSNYQLIW

SEQ ID NO: 778488 - protein, 17 aa, Homo sapiens
  CDR3 for beta chain variable domain of TCR clone 389244 (TRBV19, TRBJ2-1)
CASSIWSAQPTHNEQFF

SEQ ID NO: 778489 - protein, 15 aa, Homo sapiens
  CDR3 for alpha chain variable domain of TCR clone 389245 (TRAV25, TRAJ52)
CAGTSGGTSYGKLTF

SEQ ID NO: 778490 - protein, 15 aa, Homo sapiens
  CDR3 for beta chain variable domain of TCR clone 389245 (TRBV6-1, TRBJ2-4)
CASSEAVWTINIQYF

SEQ ID NO: 778491 - protein, 16 aa, Homo sapiens
  CDR3 for alpha chain variable domain of TCR clone 389246 (TRAV30, TRAJ24)
CGTEIVDADSWGKFQF

SEQ ID NO: 778492 - protein, 16 aa, Homo sapiens
  CDR3 for beta chain variable domain of TCR clone 389246 (TRBV20-1, TRBJ2-5)
CSARPRTGGVQETQYF

SEQ ID NO: 778493 - protein, 14 aa, Homo sapiens
  CDR3 for alpha chain variable domain of TCR clone 389247 (TRAV21, TRAJ15)
CAVSLNQAGTALIF

SEQ ID NO: 778494 - protein, 17 aa, Homo sapiens
  CDR3 for beta chain variable domain of TCR clone 389247 (TRBV11-2, TRBJ2-1)
CASSLYPPGVEYNEQFF

SEQ ID NO: 778495 - protein, 14 aa, Homo sapiens
  CDR3 for alpha chain variable domain of TCR clone 389248 (TRAV1-2, TRAJ16)
CAVNRFSDGQNLLF

SEQ ID NO: 778496 - protein, 13 aa, Homo sapiens
  CDR3 for beta chain variable domain of TCR clone 389248 (TRBV6-1, TRBJ1-1)
CASSRQGNTEAFF

SEQ ID NO: 778497 - protein, 13 aa, Homo sapiens
  CDR3 for alpha chain variable domain of TCR clone 389249 (TRAV1-1, TRAJ23)
CAVVANQGGKLIF

SEQ ID NO: 778498 - protein, 15 aa, Homo sapiens
  CDR3 for beta chain variable domain of TCR clone 389249 (TRBV4-1, TRBJ2-1)
CASSQAQREIYEQFF

SEQ ID NO: 778499 - protein, 14 aa, Homo sapiens
  CDR3 for alpha chain variable domain of TCR clone 389250 (TRAV27, TRAJ23)
CAGLSYNQGGKLIF

SEQ ID NO: 778500 - protein, 12 aa, Homo sapiens
  CDR3 for beta chain variable domain of TCR clone 389250 (TRBV7-8, TRBJ2-7)
CASSLGDREQYF

SEQ ID NO: 778501 - protein, 15 aa, Homo sapiens
  CDR3 for alpha chain variable domain of TCR clone 389251 (TRAV20, TRAJ53)
CAVQASGGSYYKLTF

SEQ ID NO: 778502 - protein, 14 aa, Homo sapiens
  CDR3 for beta chain variable domain of TCR clone 389251 (TRBV12-5, TRBJ2-5)
CASGSRTHQETQYF

SEQ ID NO: 778503 - protein, 13 aa, Homo sapiens
  CDR3 for alpha chain variable domain of TCR clone 389252 (TRAV17, TRAJ29)
CAADAFRKHTSCL

SEQ ID NO: 778504 - protein, 13 aa, Homo sapiens
  CDR3 for beta chain variable domain of TCR clone 389252 (TRBV5-6, TRBJ2-6)
CASTSSGANVLTF

SEQ ID NO: 778505 - protein, 14 aa, Homo sapiens
  CDR3 for alpha chain variable domain of TCR clone 389253 (TRAV13-1, TRAJ44)
CAAKATGTASKLTF

SEQ ID NO: 778506 - protein, 14 aa, Homo sapiens
  CDR3 for beta chain variable domain of TCR clone 389253 (TRBV25-1, TRBJ1-1)
CASTHQGGNTEAFF

SEQ ID NO: 778507 - protein, 10 aa, Homo sapiens
  CDR3 for alpha chain variable domain of TCR clone 389254 (TRAV26-1, TRAJ40)
CIAGTYKYIF

SEQ ID NO: 778508 - protein, 15 aa, Homo sapiens
  CDR3 for beta chain variable domain of TCR clone 389254 (TRBV19, TRBJ2-1)
CASSSLGVPLDEQVF

SEQ ID NO: 778509 - protein, 14 aa, Homo sapiens
  CDR3 for alpha chain variable domain of TCR clone 389255 (TRAV2, TRAJ22)
CAVEDSGSARQLTF

SEQ ID NO: 778510 - protein, 15 aa, Homo sapiens
  CDR3 for beta chain variable domain of TCR clone 389255 (TRBV28, TRBJ1-2)
CACSLPVGHGDGYTF

SEQ ID NO: 778511 - protein, 15 aa, Homo sapiens
  CDR3 for alpha chain variable domain of TCR clone 389256 (TRAV3, TRAJ20)
CALRDSRSNDYKLSF

SEQ ID NO: 778512 - protein, 14 aa, Homo sapiens
  CDR3 for beta chain variable domain of TCR clone 389256 (TRBV20-1, TRBJ2-7)
CSARRGNGIYEQYF

SEQ ID NO: 778513 - protein, 13 aa, Homo sapiens
  CDR3 for alpha chain variable domain of TCR clone 389257 (TRAV13-2, TRAJ48)
CAEVDFGNEKLTF

SEQ ID NO: 778514 - protein, 15 aa, Homo sapiens
  CDR3 for beta chain variable domain of TCR clone 389257 (TRBV7-9, TRBJ1-6)
CASSSPGRGNSPIHF

SEQ ID NO: 778515 - protein, 14 aa, Homo sapiens
  CDR3 for alpha chain variable domain of TCR clone 389258 (TRAV1-2, TRAJ16)
CAVNRFSDGQKLLF

SEQ ID NO: 778516 - protein, 22 aa, Homo sapiens
  CDR3 for beta chain variable domain of TCR clone 389258 (TRBV11-2, TRBJ2-3)
CASSLGGASRGAPNTQYWPRHP

SEQ ID NO: 778517 - protein, 14 aa, Homo sapiens
  CDR3 for alpha chain variable domain of TCR clone 389259 (TRAV2, TRAJ37)
CAVDFTSNTGKLIF

SEQ ID NO: 778518 - protein, 17 aa, Homo sapiens
  CDR3 for beta chain variable domain of TCR clone 389259 (TRBV18, TRBJ2-1)
CASSKGLSGGADNEQFF

SEQ ID NO: 778519 - protein, 15 aa, Homo sapiens
  CDR3 for alpha chain variable domain of TCR clone 389260 (TRAV8-6, TRAJ6)
CAVRDASGGSYIPTL

SEQ ID NO: 778520 - protein, 13 aa, Homo sapiens
  CDR3 for beta chain variable domain of TCR clone 389260 (TRBV2, TRBJ2-2)
CASRAWRTGELFF

SEQ ID NO: 778521 - protein, 15 aa, Homo sapiens
  CDR3 for alpha chain variable domain of TCR clone 389261 (TRAV21, TRAJ13)
CAVRPTSRGYQKVTF

SEQ ID NO: 778522 - protein, 15 aa, Homo sapiens
  CDR3 for beta chain variable domain of TCR clone 389261 (TRBV28, TRBJ2-7)
CASSPGGRGFYEQYF

SEQ ID NO: 778523 - protein, 14 aa, Homo sapiens
  CDR3 for alpha chain variable domain of TCR clone 389262 (TRAV2, TRAJ37)
CAVDFTSNTGELIF

SEQ ID NO: 778524 - protein, 13 aa, Homo sapiens
  CDR3 for beta chain variable domain of TCR clone 389262 (TRBV5-7, TRBJ2-5)
CASSLRLQETQYF

SEQ ID NO: 778525 - protein, 14 aa, Homo sapiens
  CDR3 for alpha chain variable domain of TCR clone 389263 (TRAV12-1, TRAJ17)
CVVNYKAAGNRLTF

SEQ ID NO: 778526 - protein, 16 aa, Homo sapiens
  CDR3 for beta chain variable domain of TCR clone 389263 (TRBV12-4, TRBJ1-5)
CAGSRPVGGSNQTQHF

SEQ ID NO: 778527 - protein, 11 aa, Homo sapiens
  CDR3 for alpha chain variable domain of TCR clone 389264 (TRAV3, TRAJ17)
CAEAAGNTLTF

SEQ ID NO: 778528 - protein, 15 aa, Homo sapiens
  CDR3 for beta chain variable domain of TCR clone 389264 (TRBV12-4, TRBJ2-7)
CASSLGSGGPYEQYF

SEQ ID NO: 778529 - protein, 14 aa, Homo sapiens
  CDR3 for alpha chain variable domain of TCR clone 389265 (TRAV12-1, TRAJ17)
CVVNYNAAGNKLTI

SEQ ID NO: 778530 - protein, 17 aa, Homo sapiens
  CDR3 for beta chain variable domain of TCR clone 389265 (TRBV20-1, TRBJ2-1)
CSASSSGLAGSYNEQFF

SEQ ID NO: 778531 - protein, 12 aa, Homo sapiens
  CDR3 for alpha chain variable domain of TCR clone 389266 (TRAV25, TRAJ54)
CAGGLGAQKLVF

SEQ ID NO: 778532 - protein, 12 aa, Homo sapiens
  CDR3 for beta chain variable domain of TCR clone 389266 (TRBV7-8, TRBJ2-7)
CASSLGDREQYF

SEQ ID NO: 778533 - protein, 11 aa, Homo sapiens
  CDR3 for alpha chain variable domain of TCR clone 389267 (TRAV17, TRAJ31)
CATDRTARLMF

SEQ ID NO: 778534 - protein, 17 aa, Homo sapiens
  CDR3 for beta chain variable domain of TCR clone 389267 (TRBV19, TRBJ1-5)
CASNPNRGPGSNQPQHF

SEQ ID NO: 778535 - protein, 14 aa, Homo sapiens
  CDR3 for alpha chain variable domain of TCR clone 389268 (TRAV1-2, TRAJ15)
CAVRDRQAGTALIS

SEQ ID NO: 778536 - protein, 15 aa, Homo sapiens
  CDR3 for beta chain variable domain of TCR clone 389268 (TRBV7-6, TRBJ2-1)
CASSSLAGEGNEQFF

SEQ ID NO: 778537 - protein, 15 aa, Homo sapiens
  CDR3 for alpha chain variable domain of TCR clone 389269 (TRAV1-2, TRAJ28)
CAVQYSGAGSYQLTF

SEQ ID NO: 778538 - protein, 13 aa, Homo sapiens
  CDR3 for beta chain variable domain of TCR clone 389269 (TRBV20-1, TRBJ2-7)
RSATHTSGYEQYF

SEQ ID NO: 778539 - protein, 12 aa, Homo sapiens
  CDR3 for alpha chain variable domain of TCR clone 389270 (TRAV40, TRAJ20)
CLQGLNDYKLSF

SEQ ID NO: 778540 - protein, 14 aa, Homo sapiens
  CDR3 for beta chain variable domain of TCR clone 389270 (TRBV19, TRBJ2-1)
CASSSGRDYNEQFF

SEQ ID NO: 778541 - protein, 16 aa, Homo sapiens
  CDR3 for alpha chain variable domain of TCR clone 389271 (TRAV30, TRAJ24)
CVTEIVDADSWGKFQF

SEQ ID NO: 778542 - protein, 13 aa, Homo sapiens
  CDR3 for beta chain variable domain of TCR clone 389271 (TRBV9, TRBJ1-1)
CASSPTGSTEAFF

SEQ ID NO: 778543 - protein, 15 aa, Homo sapiens
  CDR3 for alpha chain variable domain of TCR clone 389272 (TRAV8-4, TRAJ37)
CAVTYGSSNTGKLIF

SEQ ID NO: 778544 - protein, 13 aa, Homo sapiens
  CDR3 for beta chain variable domain of TCR clone 389272 (TRBV12-4, TRBJ2-5)
CASSAGGSRTQYF

SEQ ID NO: 778545 - protein, 12 aa, Homo sapiens
  CDR3 for alpha chain variable domain of TCR clone 389273 (TRAV8-3, TRAJ26)
CAGDKYGQNFVF

SEQ ID NO: 778546 - protein, 15 aa, Homo sapiens
  CDR3 for beta chain variable domain of TCR clone 389273 (TRBV28, TRBJ2-7)
CASSPGGRGFYEQYF

SEQ ID NO: 778547 - protein, 15 aa, Homo sapiens
  CDR3 for alpha chain variable domain of TCR clone 389274 (TRAV13-1, TRAJ44)
CAASRGGGTASKLTF

SEQ ID NO: 778548 - protein, 14 aa, Homo sapiens
  CDR3 for beta chain variable domain of TCR clone 389274 (TRBV7-2, TRBJ2-5)
CASSPRGSTETQYF

SEQ ID NO: 778549 - protein, 15 aa, Homo sapiens
  CDR3 for alpha chain variable domain of TCR clone 389275 (TRAV12-2, TRAJ43)
CAFDMRFGAGTRLTV

SEQ ID NO: 778550 - protein, 13 aa, Homo sapiens
  CDR3 for beta chain variable domain of TCR clone 389275 (TRBV9, TRBJ2-1)
CASSVGQGGEQFF

SEQ ID NO: 778551 - protein, 14 aa, Homo sapiens
  CDR3 for alpha chain variable domain of TCR clone 389276 (TRAV13-2, TRAJ5)
CAETAGHGQESTYF

SEQ ID NO: 778552 - protein, 14 aa, Homo sapiens
  CDR3 for beta chain variable domain of TCR clone 389276 (TRBV12-4, TRBJ1-1)
CASSLNDMNTEAFF

SEQ ID NO: 778553 - protein, 18 aa, Homo sapiens
  CDR3 for alpha chain variable domain of TCR clone 389277 (TRAV21, TRAJ52)
CAVRPSPAGGTSYGKRTF

SEQ ID NO: 778554 - protein, 17 aa, Homo sapiens
  CDR3 for beta chain variable domain of TCR clone 389277 (TRBV13, TRBJ2-3)
CASSLSRVAGGRNTQYY

SEQ ID NO: 778555 - protein, 11 aa, Homo sapiens
  CDR3 for alpha chain variable domain of TCR clone 389278 (TRAV12-3, TRAJ20)
CAMSYGYKLSF

SEQ ID NO: 778556 - protein, 14 aa, Homo sapiens
  CDR3 for beta chain variable domain of TCR clone 389278 (TRBV7-2, TRBJ2-7)
CASSPKTSFYEQYF

SEQ ID NO: 778557 - protein, 19 aa, Homo sapiens
  CDR3 for alpha chain variable domain of TCR clone 389279 (TRAV25, TRAJ20)
TATQTTDVGILPHDYKLSF

SEQ ID NO: 778558 - protein, 15 aa, Homo sapiens
  CDR3 for beta chain variable domain of TCR clone 389279 (TRBV7-9, TRBJ1-6)
CASSSPGRGNSPLHF

SEQ ID NO: 778559 - protein, 16 aa, Homo sapiens
  CDR3 for alpha chain variable domain of TCR clone 389280 (TRAV8-6, TRAJ37)
CAVSGLGSSYTGKLIF

SEQ ID NO: 778560 - protein, 15 aa, Homo sapiens
  CDR3 for beta chain variable domain of TCR clone 389280 (TRBV20-1, TRBJ1-5)
CSARSGPSMNQPQHF

SEQ ID NO: 778561 - protein, 13 aa, Homo sapiens
  CDR3 for alpha chain variable domain of TCR clone 389281 (TRAV16, TRAJ31)
CALSAHNNARLMF

SEQ ID NO: 778562 - protein, 17 aa, Homo sapiens
  CDR3 for beta chain variable domain of TCR clone 389281 (TRBV12-4, TRBJ2-1)
CTSSPGLAGGHINEQFF

SEQ ID NO: 778563 - protein, 17 aa, Homo sapiens
  CDR3 for alpha chain variable domain of TCR clone 389282 (TRAV3, TRAJ42)
CAVRDRDYGGCQGNLIF

SEQ ID NO: 778564 - protein, 15 aa, Homo sapiens
  CDR3 for beta chain variable domain of TCR clone 389282 (TRBV5-1, TRBJ2-1)
CASSPPRAPYNEQFF

SEQ ID NO: 778565 - protein, 16 aa, Homo sapiens
  CDR3 for alpha chain variable domain of TCR clone 389283 (TRAV12-3, TRAJ53)
CAMSPGSGGSNYKLTF

SEQ ID NO: 778566 - protein, 15 aa, Homo sapiens
  CDR3 for beta chain variable domain of TCR clone 389283 (TRBV5-1, TRBJ1-1)
CASSWTGRGNTEAFF

SEQ ID NO: 778567 - protein, 12 aa, Homo sapiens
  CDR3 for alpha chain variable domain of TCR clone 389284 (TRAV26-1, TRAJ13)
FIVSRGYQKVTF

SEQ ID NO: 778568 - protein, 16 aa, Homo sapiens
  CDR3 for beta chain variable domain of TCR clone 389284 (TRBV12-4, TRBJ1-5)
GASSRPVGGSNQPQHF

SEQ ID NO: 778569 - protein, 13 aa, Homo sapiens
  CDR3 for alpha chain variable domain of TCR clone 389285 (TRAV2, TRAJ15)
CAVASQAGTALIF

SEQ ID NO: 778570 - protein, 16 aa, Homo sapiens
  CDR3 for beta chain variable domain of TCR clone 389285 (TRBV12-4, TRBJ2-5)
CASSFFVRGRQETQYF

SEQ ID NO: 778571 - protein, 13 aa, Homo sapiens
  CDR3 for alpha chain variable domain of TCR clone 389286 (TRAV2, TRAJ26)
CAVVGNYGQNFVF

SEQ ID NO: 778572 - protein, 14 aa, Homo sapiens
  CDR3 for beta chain variable domain of TCR clone 389286 (TRBV19, TRBJ2-1)
CASPTFVLSGEQFF

SEQ ID NO: 778573 - protein, 12 aa, Homo sapiens
  CDR3 for alpha chain variable domain of TCR clone 389287 (TRAV12-3, TRAJ17)
CAMTLTGNKLTF

SEQ ID NO: 778574 - protein, 13 aa, Homo sapiens
  CDR3 for beta chain variable domain of TCR clone 389287 (TRBV2, TRBJ1-4)
CASSELGVEKLFF

SEQ ID NO: 778575 - protein, 13 aa, Homo sapiens
  CDR3 for alpha chain variable domain of TCR clone 389288 (TRAV3, TRAJ20)
CAVRSLNDYKLSF

SEQ ID NO: 778576 - protein, 13 aa, Homo sapiens
  CDR3 for beta chain variable domain of TCR clone 389288 (TRBV7-3, TRBJ1-1)
CASRQDWGAEAFF

SEQ ID NO: 778577 - protein, 14 aa, Homo sapiens
  CDR3 for alpha chain variable domain of TCR clone 389289 (TRAV27, TRAJ23)
CAGAFDNKGGKLIF

SEQ ID NO: 778578 - protein, 15 aa, Homo sapiens
  CDR3 for beta chain variable domain of TCR clone 389289 (TRBV7-3, TRBJ2-7)
CASSLTGQGKYEQYL

SEQ ID NO: 778579 - protein, 13 aa, Homo sapiens
  CDR3 for alpha chain variable domain of TCR clone 389290 (TRAV17, TRAJ13)
CATDSGGYQKVTF

SEQ ID NO: 778580 - protein, 13 aa, Homo sapiens
  CDR3 for beta chain variable domain of TCR clone 389290 (TRBV18, TRBJ1-1)
CASSGGRNTEAFF

SEQ ID NO: 778581 - protein, 18 aa, Homo sapiens
  CDR3 for alpha chain variable domain of TCR clone 389291 (TRAV26-2, TRAJ54)
CILRDVEVGIQGAQKLVF

SEQ ID NO: 778582 - protein, 17 aa, Homo sapiens
  CDR3 for beta chain variable domain of TCR clone 389291 (TRBV20-1, TRBJ1-5)
CSASLSPGQGGKQPQHF

SEQ ID NO: 778583 - protein, 13 aa, Homo sapiens
  CDR3 for alpha chain variable domain of TCR clone 389292 (TRAV12-1, TRAJ22)
CVASGGSARQLTF

SEQ ID NO: 778584 - protein, 16 aa, Homo sapiens
  CDR3 for beta chain variable domain of TCR clone 389292 (TRBV27, TRBJ2-2)
CASSFRGLVRTGELFF

SEQ ID NO: 778585 - protein, 11 aa, Homo sapiens
  CDR3 for alpha chain variable domain of TCR clone 389293 (TRAV12-1, TRAJ34)
CVVNKGRELIF

SEQ ID NO: 778586 - protein, 14 aa, Homo sapiens
  CDR3 for beta chain variable domain of TCR clone 389293 (TRBV12-5, TRBJ2-5)
CASGSRTHQETQYF

SEQ ID NO: 778587 - protein, 14 aa, Homo sapiens
  CDR3 for alpha chain variable domain of TCR clone 389294 (TRAV26-1, TRAJ6)
CIVSPVGGSYIPTF

SEQ ID NO: 778588 - protein, 16 aa, Homo sapiens
  CDR3 for beta chain variable domain of TCR clone 389294 (TRBV4-1, TRBJ2-5)
CASSSGRAGVLGTQYF

SEQ ID NO: 778589 - protein, 16 aa, Homo sapiens
  CDR3 for alpha chain variable domain of TCR clone 389295 (TRAV16, TRAJ21)
GACGWATTSTNFTLDL

SEQ ID NO: 778590 - protein, 15 aa, Homo sapiens
  CDR3 for beta chain variable domain of TCR clone 389295 (TRBV19, TRBJ2-1)
CASSIQATSYNEQFF

SEQ ID NO: 778591 - protein, 15 aa, Homo sapiens
  CDR3 for alpha chain variable domain of TCR clone 389296 (TRAV3, TRAJ20)
CAVRDIKLSDYKLRF

SEQ ID NO: 778592 - protein, 16 aa, Homo sapiens
  CDR3 for beta chain variable domain of TCR clone 389296 (TRBV20-1, TRBJ1-4)
CSAPGQGLLTNEKLFF

SEQ ID NO: 778593 - protein, 13 aa, Homo sapiens
  CDR3 for alpha chain variable domain of TCR clone 389297 (TRAV16, TRAJ26)
CALLDNYGQNFVF

SEQ ID NO: 778594 - protein, 15 aa, Homo sapiens
  CDR3 for beta chain variable domain of TCR clone 389297 (TRBV27, TRBJ2-1)
CASSNGGGSSNEQFF

SEQ ID NO: 778595 - protein, 11 aa, Homo sapiens
  CDR3 for alpha chain variable domain of TCR clone 389298 (TRAV4, TRAJ23)
CLVAPGGKLIF

SEQ ID NO: 778596 - protein, 16 aa, Homo sapiens
  CDR3 for beta chain variable domain of TCR clone 389298 (TRBV11-2, TRBJ1-1)
CASSLRQGGEHSKAFF

SEQ ID NO: 778597 - protein, 12 aa, Homo sapiens
  CDR3 for alpha chain variable domain of TCR clone 389299 (TRAV36/DV7, TRAJ26)
CAVDNYGQNFVF

SEQ ID NO: 778598 - protein, 13 aa, Homo sapiens
  CDR3 for beta chain variable domain of TCR clone 389299 (TRBV2, TRBJ1-4)
CASSDLFNEKLFF

SEQ ID NO: 778599 - protein, 14 aa, Homo sapiens
  CDR3 for alpha chain variable domain of TCR clone 389300 (TRAV16, TRAJ42)
CALLAGGSQRNLIF

SEQ ID NO: 778600 - protein, 13 aa, Homo sapiens
  CDR3 for beta chain variable domain of TCR clone 389300 (TRBV7-9, TRBJ1-2)
CASSLKQNYGYTF

SEQ ID NO: 778601 - protein, 13 aa, Homo sapiens
  CDR3 for alpha chain variable domain of TCR clone 389301 (TRAV39, TRAJ58)
CSGEETSGSRLTV

SEQ ID NO: 778602 - protein, 13 aa, Homo sapiens
  CDR3 for beta chain variable domain of TCR clone 389301 (TRBV15, TRBJ2-7)
CATSTTGHYEQYF

SEQ ID NO: 778603 - protein, 16 aa, Homo sapiens
  CDR3 for alpha chain variable domain of TCR clone 389302 (TRAV3, TRAJ37)
CAVRGKGSGNTGKIIF

SEQ ID NO: 778604 - protein, 16 aa, Homo sapiens
  CDR3 for beta chain variable domain of TCR clone 389302 (TRBV7-2, TRBJ1-2)
CASSSNQDRRGHGYTF

SEQ ID NO: 778605 - protein, 14 aa, Homo sapiens
  CDR3 for alpha chain variable domain of TCR clone 389303 (TRAV1-2, TRAJ28)
CVARSGAGSYQLTF

SEQ ID NO: 778606 - protein, 15 aa, Homo sapiens
  CDR3 for beta chain variable domain of TCR clone 389303 (TRBV11-2, TRBJ1-6)
CASTLRGTGNSPLHF

SEQ ID NO: 778607 - protein, 13 aa, Homo sapiens
  CDR3 for alpha chain variable domain of TCR clone 389304 (TRAV20, TRAJ34)
CAVSSYNTDKLIF

SEQ ID NO: 778608 - protein, 16 aa, Homo sapiens
  CDR3 for beta chain variable domain of TCR clone 389304 (TRBV7-9, TRBJ1-2)
CASSLGFSSGEDGYTF

SEQ ID NO: 778609 - protein, 11 aa, Homo sapiens
  CDR3 for alpha chain variable domain of TCR clone 389305 (TRAV3, TRAJ13)
CAVTSYQKVTF

SEQ ID NO: 778610 - protein, 16 aa, Homo sapiens
  CDR3 for beta chain variable domain of TCR clone 389305 (TRBV12-5, TRBJ2-5)
CASGPRTSGNQETQYF

SEQ ID NO: 778611 - protein, 12 aa, Homo sapiens
  CDR3 for alpha chain variable domain of TCR clone 389306 (TRAV1-1, TRAJ39)
CAVPVVGNMLTF

SEQ ID NO: 778612 - protein, 11 aa, Homo sapiens
  CDR3 for beta chain variable domain of TCR clone 389306 (TRBV11-2, TRBJ2-2)
CASSLPGELFF

SEQ ID NO: 778613 - protein, 17 aa, Homo sapiens
  CDR3 for alpha chain variable domain of TCR clone 389307 (TRAV26-1, TRAJ53)
CIVRVDDSGGSNYKLTF

SEQ ID NO: 778614 - protein, 15 aa, Homo sapiens
  CDR3 for beta chain variable domain of TCR clone 389307 (TRBV9, TRBJ1-6)
CASSVAGTGDSPLHF

SEQ ID NO: 778615 - protein, 12 aa, Homo sapiens
  CDR3 for alpha chain variable domain of TCR clone 389308 (TRAV26-1, TRAJ26)
CIVFIYGQNFVF

SEQ ID NO: 778616 - protein, 16 aa, Homo sapiens
  CDR3 for beta chain variable domain of TCR clone 389308 (TRBV9, TRBJ2-1)
CASSVGGGGNYNEQFF

SEQ ID NO: 778617 - protein, 15 aa, Homo sapiens
  CDR3 for alpha chain variable domain of TCR clone 389309 (TRAV30, TRAJ57)
CGTAIPQGGYEKLVF

SEQ ID NO: 778618 - protein, 13 aa, Homo sapiens
  CDR3 for beta chain variable domain of TCR clone 389309 (TRBV7-9, TRBJ1-2)
CASSPSNFWGYTF

SEQ ID NO: 778619 - protein, 12 aa, Homo sapiens
  CDR3 for alpha chain variable domain of TCR clone 389310 (TRAV12-3, TRAJ21)
CAMFNNFNKFYF

SEQ ID NO: 778620 - protein, 14 aa, Homo sapiens
  CDR3 for beta chain variable domain of TCR clone 389310 (TRBV28, TRBJ2-1)
CASSIQGTVGEQFY

SEQ ID NO: 778621 - protein, 10 aa, Homo sapiens
  CDR3 for alpha chain variable domain of TCR clone 389311 (TRAV1-2, TRAJ34)
CAVNTDKLVF

SEQ ID NO: 778622 - protein, 18 aa, Homo sapiens
  CDR3 for beta chain variable domain of TCR clone 389311 (TRBV7-9, TRBJ2-7)
CASSLTTSGSRTWYEQYF

SEQ ID NO: 778623 - protein, 15 aa, Homo sapiens
  CDR3 for alpha chain variable domain of TCR clone 389312 (TRAV8-3, TRAJ27)
CVVGPFKTNAGKSTF

SEQ ID NO: 778624 - protein, 15 aa, Homo sapiens
  CDR3 for beta chain variable domain of TCR clone 389312 (TRBV7-2, TRBJ2-1)
CASSSGLAGGNEQFF

SEQ ID NO: 778625 - protein, 14 aa, Homo sapiens
  CDR3 for alpha chain variable domain of TCR clone 389313 (TRAV1-2, TRAJ16)
CAVNRFPDGQKLLF

SEQ ID NO: 778626 - protein, 11 aa, Homo sapiens
  CDR3 for beta chain variable domain of TCR clone 389313 (TRBV12-4, TRBJ1-2)
CASSEGVGYTF

SEQ ID NO: 778627 - protein, 13 aa, Homo sapiens
  CDR3 for alpha chain variable domain of TCR clone 389314 (TRAV12-2, TRAJ49)
CAVNMRTGNQFYF

SEQ ID NO: 778628 - protein, 14 aa, Homo sapiens
  CDR3 for beta chain variable domain of TCR clone 389314 (TRBV11-2, TRBJ1-2)
CASSLGTANYGYTF

SEQ ID NO: 778629 - protein, 15 aa, Homo sapiens
  CDR3 for alpha chain variable domain of TCR clone 389315 (TRAV4, TRAJ39)
CLVGPNNNAGNMLTF

SEQ ID NO: 778630 - protein, 13 aa, Homo sapiens
  CDR3 for beta chain variable domain of TCR clone 389315 (TRBV11-2, TRBJ2-5)
CASSSTREETQYF

SEQ ID NO: 778631 - protein, 17 aa, Homo sapiens
  CDR3 for alpha chain variable domain of TCR clone 389316 (TRAV36/DV7, TRAJ52)
CAVAQRAGGTSYGKLTF

SEQ ID NO: 778632 - protein, 16 aa, Homo sapiens
  CDR3 for beta chain variable domain of TCR clone 389316 (TRBV2, TRBJ2-3)
CASSTSVEGVTDTQYF

SEQ ID NO: 778633 - protein, 11 aa, Homo sapiens
  CDR3 for alpha chain variable domain of TCR clone 389317 (TRAV2, TRAJ33)
CAVDSNYQLIW

SEQ ID NO: 778634 - protein, 13 aa, Homo sapiens
  CDR3 for beta chain variable domain of TCR clone 389317 (TRBV7-2, TRBJ2-4)
CASSREHANIQYL

SEQ ID NO: 778635 - protein, 13 aa, Homo sapiens
  CDR3 for alpha chain variable domain of TCR clone 389318 (TRAV12-3, TRAJ13)
CAMSSGGYQKVTF

SEQ ID NO: 778636 - protein, 13 aa, Homo sapiens
  CDR3 for beta chain variable domain of TCR clone 389318 (TRBV9, TRBJ2-7)
CASSVAEYYEQYF

SEQ ID NO: 778637 - protein, 18 aa, Homo sapiens
  CDR3 for alpha chain variable domain of TCR clone 389319 (TRAV13-1, TRAJ52)
CAAKNPNAGGTSYGKLTF

SEQ ID NO: 778638 - protein, 14 aa, Homo sapiens
  CDR3 for beta chain variable domain of TCR clone 389319 (TRBV28, TRBJ2-1)
CASSLNGRNNEQFF

SEQ ID NO: 778639 - protein, 15 aa, Homo sapiens
  CDR3 for alpha chain variable domain of TCR clone 389320 (TRAV17, TRAJ4)
CATVTWSGGYNKLIF

SEQ ID NO: 778640 - protein, 15 aa, Homo sapiens
  CDR3 for beta chain variable domain of TCR clone 389320 (TRBV7-9, TRBJ1-4)
CASSRTGGFNEKLFF

SEQ ID NO: 778641 - protein, 13 aa, Homo sapiens
  CDR3 for alpha chain variable domain of TCR clone 389321 (TRAV8-6, TRAJ48)
CAGVNFGNEKLTF

SEQ ID NO: 778642 - protein, 13 aa, Homo sapiens
  CDR3 for beta chain variable domain of TCR clone 389321 (TRBV4-1, TRBJ1-1)
CASSRKMNTEAFF

SEQ ID NO: 778643 - protein, 14 aa, Homo sapiens
  CDR3 for alpha chain variable domain of TCR clone 389322 (TRAV35, TRAJ33)
CAGSSEDSNYQLIL

SEQ ID NO: 778644 - protein, 15 aa, Homo sapiens
  CDR3 for beta chain variable domain of TCR clone 389322 (TRBV20-1, TRBJ2-7)
CSAESGTSGAYEQYV

SEQ ID NO: 778645 - protein, 15 aa, Homo sapiens
  CDR3 for alpha chain variable domain of TCR clone 389323 (TRAV12-3, TRAJ6)
CAMSATSGGSYIPTF

SEQ ID NO: 778646 - protein, 13 aa, Homo sapiens
  CDR3 for beta chain variable domain of TCR clone 389323 (TRBV2, TRBJ2-7)
CASSVGGSGEQYF

SEQ ID NO: 778647 - protein, 12 aa, Homo sapiens
  CDR3 for alpha chain variable domain of TCR clone 389324 (TRAV29/DV5, TRAJ49)
CAATDTGNQFYF

SEQ ID NO: 778648 - protein, 18 aa, Homo sapiens
  CDR3 for beta chain variable domain of TCR clone 389324 (TRBV7-3, TRBJ2-3)
CASSSTGTYPGSTDTQYF

SEQ ID NO: 778649 - protein, 14 aa, Homo sapiens
  CDR3 for alpha chain variable domain of TCR clone 389325 (TRAV12-3, TRAJ10)
SHLPLTGGGSKLTF

SEQ ID NO: 778650 - protein, 17 aa, Homo sapiens
  CDR3 for beta chain variable domain of TCR clone 389325 (TRBV15, TRBJ1-1)
CATSRVGGADGDTEAFF

SEQ ID NO: 778651 - protein, 14 aa, Homo sapiens
  CDR3 for alpha chain variable domain of TCR clone 389326 (TRAV12-3, TRAJ12)
CAMSRLDSSYKLIF

SEQ ID NO: 778652 - protein, 14 aa, Homo sapiens
  CDR3 for beta chain variable domain of TCR clone 389326 (TRBV20-1, TRBJ1-4)
CSARSGQSNEKLFF

SEQ ID NO: 778653 - protein, 14 aa, Homo sapiens
  CDR3 for alpha chain variable domain of TCR clone 389327 (TRAV12-2, TRAJ32)
CAHPGSGATNKLIF

SEQ ID NO: 778654 - protein, 14 aa, Homo sapiens
  CDR3 for beta chain variable domain of TCR clone 389327 (TRBV4-2, TRBJ2-3)
CASRETRAPGMQYF

SEQ ID NO: 778655 - protein, 14 aa, Homo sapiens
  CDR3 for alpha chain variable domain of TCR clone 389328 (TRAV12-1, TRAJ12)
CVVPRMDSSYKLIF

SEQ ID NO: 778656 - protein, 15 aa, Homo sapiens
  CDR3 for beta chain variable domain of TCR clone 389328 (TRBV20-1, TRBJ2-7)
CSARDRVSGMDEQYF

SEQ ID NO: 778657 - protein, 16 aa, Homo sapiens
  CDR3 for alpha chain variable domain of TCR clone 389329 (TRAV20, TRAJ53)
CAVQAESGGSNYKLTF

SEQ ID NO: 778658 - protein, 13 aa, Homo sapiens
  CDR3 for beta chain variable domain of TCR clone 389329 (TRBV19, TRBJ1-2)
CASSVPGQDGYTF

SEQ ID NO: 778659 - protein, 13 aa, Homo sapiens
  CDR3 for alpha chain variable domain of TCR clone 389330 (TRAV27, TRAJ39)
CAGVNNAGNMLTF

SEQ ID NO: 778660 - protein, 19 aa, Homo sapiens
  CDR3 for beta chain variable domain of TCR clone 389330 (TRBV5-1, TRBJ2-3)
CASSLWLAGGITTTDTQYY

SEQ ID NO: 778661 - protein, 14 aa, Homo sapiens
  CDR3 for alpha chain variable domain of TCR clone 389331 (TRAV12-2, TRAJ52)
CAVPGGTSYGKLTF

SEQ ID NO: 778662 - protein, 12 aa, Homo sapiens
  CDR3 for beta chain variable domain of TCR clone 389331 (TRBV18, TRBJ2-1)
CASSPGTSVGFF

SEQ ID NO: 778663 - protein, 16 aa, Homo sapiens
  CDR3 for alpha chain variable domain of TCR clone 389332 (TRAV12-1, TRAJ48)
CVVNMVSNFGNEKLTF

SEQ ID NO: 778664 - protein, 18 aa, Homo sapiens
  CDR3 for beta chain variable domain of TCR clone 389332 (TRBV11-2, TRBJ2-6)
CASSFNPVLGTGANVLTF

SEQ ID NO: 778665 - protein, 12 aa, Homo sapiens
  CDR3 for alpha chain variable domain of TCR clone 389333 (TRAV8-3, TRAJ20)
CAVGANDYKLSF

SEQ ID NO: 778666 - protein, 15 aa, Homo sapiens
  CDR3 for beta chain variable domain of TCR clone 389333 (TRBV19, TRBJ2-2)
CQPISRDRGHGELFF

SEQ ID NO: 778667 - protein, 13 aa, Homo sapiens
  CDR3 for alpha chain variable domain of TCR clone 389334 (TRAV3, TRAJ21)
CAVATSTNFTLDL

SEQ ID NO: 778668 - protein, 17 aa, Homo sapiens
  CDR3 for beta chain variable domain of TCR clone 389334 (TRBV24-1, TRBJ2-1)
CANSDVSTSGTYNEQFF

SEQ ID NO: 778669 - protein, 13 aa, Homo sapiens
  CDR3 for alpha chain variable domain of TCR clone 389335 (TRAV17, TRAJ26)
CATVDNYGQNFVF

SEQ ID NO: 778670 - protein, 13 aa, Homo sapiens
  CDR3 for beta chain variable domain of TCR clone 389335 (TRBV12-4, TRBJ2-7)
CASSPTETYEQYF

SEQ ID NO: 778671 - protein, 14 aa, Homo sapiens
  CDR3 for alpha chain variable domain of TCR clone 389336 (TRAV21, TRAJ24)
CCSSSTDSWGKLQF

SEQ ID NO: 778672 - protein, 13 aa, Homo sapiens
  CDR3 for beta chain variable domain of TCR clone 389336 (TRBV11-2, TRBJ2-5)
CASSSTGEETQYF

SEQ ID NO: 778673 - protein, 14 aa, Homo sapiens
  CDR3 for alpha chain variable domain of TCR clone 389337 (TRAV1-2, TRAJ16)
CAVNRFSDGQKLLF

SEQ ID NO: 778674 - protein, 14 aa, Homo sapiens
  CDR3 for beta chain variable domain of TCR clone 389337 (TRBV7-9, TRBJ1-4)
CAITEGEAKEKLFF

SEQ ID NO: 778675 - protein, 16 aa, Homo sapiens
  CDR3 for alpha chain variable domain of TCR clone 389338 (TRAV30, TRAJ24)
CGTEIVDADSWGKFRF

SEQ ID NO: 778676 - protein, 17 aa, Homo sapiens
  CDR3 for beta chain variable domain of TCR clone 389338 (TRBV20-1, TRBJ2-1)
CSASSSGLAGSYNEQFF

SEQ ID NO: 778677 - protein, 13 aa, Homo sapiens
  CDR3 for alpha chain variable domain of TCR clone 389339 (TRAV29/DV5, TRAJ26)
CAASANYGQNLVF

SEQ ID NO: 778678 - protein, 16 aa, Homo sapiens
  CDR3 for beta chain variable domain of TCR clone 389339 (TRBV7-2, TRBJ1-2)
CASSLVRDTVKYGYTF

SEQ ID NO: 778679 - protein, 12 aa, Homo sapiens
  CDR3 for alpha chain variable domain of TCR clone 389340 (TRAV27, TRAJ42)
CAGGGSQGDLIF

SEQ ID NO: 778680 - protein, 13 aa, Homo sapiens
  CDR3 for beta chain variable domain of TCR clone 389340 (TRBV19, TRBJ2-7)
CASSIRSSYEQYF

SEQ ID NO: 778681 - protein, 14 aa, Homo sapiens
  CDR3 for alpha chain variable domain of TCR clone 389341 (TRAV12-2, TRAJ40)
CAVKIPSGTSQYIF

SEQ ID NO: 778682 - protein, 14 aa, Homo sapiens
  CDR3 for beta chain variable domain of TCR clone 389341 (TRBV20-1, TRBJ1-1)
CSAHTRIGGTEAFF

SEQ ID NO: 778683 - protein, 11 aa, Homo sapiens
  CDR3 for alpha chain variable domain of TCR clone 389342 (TRAV3, TRAJ21)
CAVGNFNKFYF

SEQ ID NO: 778684 - protein, 15 aa, Homo sapiens
  CDR3 for beta chain variable domain of TCR clone 389342 (TRBV5-5, TRBJ1-5)
CASSLKGGGEQPQHF

SEQ ID NO: 778685 - protein, 12 aa, Homo sapiens
  CDR3 for alpha chain variable domain of TCR clone 389343 (TRAV21, TRAJ31)
CVLAGNSARLMF

SEQ ID NO: 778686 - protein, 16 aa, Homo sapiens
  CDR3 for beta chain variable domain of TCR clone 389343 (TRBV27, TRBJ2-5)
CASSFGPGGTKETQYF

SEQ ID NO: 778687 - protein, 18 aa, Homo sapiens
  CDR3 for alpha chain variable domain of TCR clone 389344 (TRAV9-2, TRAJ28)
CALSDWGDSGAGSYQLTF

SEQ ID NO: 778688 - protein, 11 aa, Homo sapiens
  CDR3 for beta chain variable domain of TCR clone 389344 (TRBV20-1, TRBJ2-5)
CSADRAETQYF

SEQ ID NO: 778689 - protein, 12 aa, Homo sapiens
  CDR3 for alpha chain variable domain of TCR clone 389345 (TRAV12-3, TRAJ17)
CAMTLTGKKPTF

SEQ ID NO: 778690 - protein, 15 aa, Homo sapiens
  CDR3 for beta chain variable domain of TCR clone 389345 (TRBV20-1, TRBJ2-7)
CSARDRVSGMDEQYF

SEQ ID NO: 778691 - protein, 13 aa, Homo sapiens
  CDR3 for alpha chain variable domain of TCR clone 389346 (TRAV1-2, TRAJ9)
CAVLNTGGFKTIF

SEQ ID NO: 778692 - protein, 16 aa, Homo sapiens
  CDR3 for beta chain variable domain of TCR clone 389346 (TRBV28, TRBJ1-4)
CASSPPYRGRSEKLFF

SEQ ID NO: 778693 - protein, 14 aa, Homo sapiens
  CDR3 for alpha chain variable domain of TCR clone 389347 (TRAV1-2, TRAJ8)
CAVRADTGFQKLLF

SEQ ID NO: 778694 - protein, 15 aa, Homo sapiens
  CDR3 for beta chain variable domain of TCR clone 389347 (TRBV6-3, TRBJ2-7)
CASSSPGTVFYEQYF

SEQ ID NO: 778695 - protein, 12 aa, Homo sapiens
  CDR3 for alpha chain variable domain of TCR clone 389348 (TRAV12-1, TRAJ34)
CELTFNTDKLIF

SEQ ID NO: 778696 - protein, 14 aa, Homo sapiens
  CDR3 for beta chain variable domain of TCR clone 389348 (TRBV19, TRBJ1-1)
CASLRTGLNTEAFF

SEQ ID NO: 778697 - protein, 11 aa, Homo sapiens
  CDR3 for alpha chain variable domain of TCR clone 389349 (TRAV3, TRAJ17)
PRWAAGNKLTF

SEQ ID NO: 778698 - protein, 16 aa, Homo sapiens
  CDR3 for beta chain variable domain of TCR clone 389349 (TRBV7-6, TRBJ2-1)
CASSAPGPSSYNEQFF

SEQ ID NO: 778699 - protein, 13 aa, Homo sapiens
  CDR3 for alpha chain variable domain of TCR clone 389350 (TRAV27, TRAJ45)
CRSSGGGADGLTF

SEQ ID NO: 778700 - protein, 14 aa, Homo sapiens
  CDR3 for beta chain variable domain of TCR clone 389350 (TRBV13, TRBJ2-7)
CASSLKGASYEQYF

SEQ ID NO: 778701 - protein, 11 aa, Homo sapiens
  CDR3 for alpha chain variable domain of TCR clone 389351 (TRAV12-1, TRAJ43)
CVEYENNDMRF

SEQ ID NO: 778702 - protein, 16 aa, Homo sapiens
  CDR3 for beta chain variable domain of TCR clone 389351 (TRBV5-4, TRBJ2-1)
CASSLVGSGQDNEQFF

SEQ ID NO: 778703 - protein, 12 aa, Homo sapiens
  CDR3 for alpha chain variable domain of TCR clone 389352 (TRAV27, TRAJ13)
CAGVRGYQKVTF

SEQ ID NO: 778704 - protein, 16 aa, Homo sapiens
  CDR3 for beta chain variable domain of TCR clone 389352 (TRBV12-5, TRBJ2-5)
CASGPRTSGNQETQYF

SEQ ID NO: 778705 - protein, 18 aa, Homo sapiens
  CDR3 for alpha chain variable domain of TCR clone 389353 (TRAV3, TRAJ32)
CAVRDIRGYGGATNTLIF

SEQ ID NO: 778706 - protein, 10 aa, Homo sapiens
  CDR3 for beta chain variable domain of TCR clone 389353 (TRBV12-4, TRBJ2-2)
CASSLGVRHT

SEQ ID NO: 778707 - protein, 15 aa, Homo sapiens
  CDR3 for alpha chain variable domain of TCR clone 389354 (TRAV8-6, TRAJ37)
CAVIFSSGNTGKLIF

SEQ ID NO: 778708 - protein, 15 aa, Homo sapiens
  CDR3 for beta chain variable domain of TCR clone 389354 (TRBV25-1, TRBJ2-4)
CASSETESAKNIKYF

SEQ ID NO: 778709 - protein, 16 aa, Homo sapiens
  CDR3 for alpha chain variable domain of TCR clone 389355 (TRAV30, TRAJ24)
CGTEMVDADSWGKFQF

SEQ ID NO: 778710 - protein, 14 aa, Homo sapiens
  CDR3 for beta chain variable domain of TCR clone 389355 (TRBV12-5, TRBJ2-5)
CASGSRTHQEAQYF

SEQ ID NO: 778711 - protein, 15 aa, Homo sapiens
  CDR3 for alpha chain variable domain of TCR clone 389356 (TRAV40, TRAJ45)
CLLGDLEGGADGLTF

SEQ ID NO: 778712 - protein, 13 aa, Homo sapiens
  CDR3 for beta chain variable domain of TCR clone 389356 (TRBV7-9, TRBJ1-2)
CASSLKQNYGYTF

SEQ ID NO: 778713 - protein, 13 aa, Homo sapiens
  CDR3 for alpha chain variable domain of TCR clone 389357 (TRAV25, TRAJ47)
CAGHREYGNKPVF

SEQ ID NO: 778714 - protein, 17 aa, Homo sapiens
  CDR3 for beta chain variable domain of TCR clone 389357 (TRBV7-8, TRBJ2-5)
CASSLASGGRFQETQYF

SEQ ID NO: 778715 - protein, 16 aa, Homo sapiens
  CDR3 for alpha chain variable domain of TCR clone 389358 (TRAV16, TRAJ52)
CALSAAGGTSYEKLTF

SEQ ID NO: 778716 - protein, 12 aa, Homo sapiens
  CDR3 for beta chain variable domain of TCR clone 389358 (TRBV12-4, TRBJ1-3)
CASSFSGNTIYF

SEQ ID NO: 778717 - protein, 15 aa, Homo sapiens
  CDR3 for alpha chain variable domain of TCR clone 389359 (TRAV17, TRAJ57)
CATGPSQGESEKLVF

SEQ ID NO: 778718 - protein, 14 aa, Homo sapiens
  CDR3 for beta chain variable domain of TCR clone 389359 (TRBV12-5, TRBJ2-5)
CASGSRTHQETQYF

SEQ ID NO: 778719 - protein, 20 aa, Homo sapiens
  CDR3 for alpha chain variable domain of TCR clone 389360 (TRAV12-1, TRAJ42)
SSVIQPPTSVQGGSQGNLIF

SEQ ID NO: 778720 - protein, 18 aa, Homo sapiens
  CDR3 for beta chain variable domain of TCR clone 389360 (TRBV11-2, TRBJ2-3)
CASSLGGAARGAPNTQYF

SEQ ID NO: 778721 - protein, 14 aa, Homo sapiens
  CDR3 for alpha chain variable domain of TCR clone 389361 (TRAV2, TRAJ8)
CAGRGNTGFQKLVF

SEQ ID NO: 778722 - protein, 13 aa, Homo sapiens
  CDR3 for beta chain variable domain of TCR clone 389361 (TRBV6-5, TRBJ2-7)
CASRTNGIHEQYF

SEQ ID NO: 778723 - protein, 13 aa, Homo sapiens
  CDR3 for alpha chain variable domain of TCR clone 389362 (TRAV20, TRAJ17)
CAVLRDAGNKLTF

SEQ ID NO: 778724 - protein, 14 aa, Homo sapiens
  CDR3 for beta chain variable domain of TCR clone 389362 (TRBV12-5, TRBJ2-5)
CASGSRTHQETQYF

SEQ ID NO: 778725 - protein, 12 aa, Homo sapiens
  CDR3 for alpha chain variable domain of TCR clone 389363 (TRAV3, TRAJ43)
CAVRDPNNDMRF

SEQ ID NO: 778726 - protein, 15 aa, Homo sapiens
  CDR3 for beta chain variable domain of TCR clone 389363 (TRBV6-5, TRBJ2-1)
CASCYDAGAGNEQFF

SEQ ID NO: 778727 - protein, 16 aa, Homo sapiens
  CDR3 for alpha chain variable domain of TCR clone 389364 (TRAV30, TRAJ24)
CGTEIVDADSWGKFQF

SEQ ID NO: 778728 - protein, 13 aa, Homo sapiens
  CDR3 for beta chain variable domain of TCR clone 389364 (TRBV5-5, TRBJ2-7)
CASSSQTRQTQYF

SEQ ID NO: 778729 - protein, 13 aa, Homo sapiens
  CDR3 for alpha chain variable domain of TCR clone 389365 (TRAV12-1, TRAJ21)
CVVIGDKFNKFHF

SEQ ID NO: 778730 - protein, 14 aa, Homo sapiens
  CDR3 for beta chain variable domain of TCR clone 389365 (TRBV7-3, TRBJ2-2)
CASSLYPLTGELFF

SEQ ID NO: 778731 - protein, 13 aa, Homo sapiens
  CDR3 for alpha chain variable domain of TCR clone 389366 (TRAV4, TRAJ28)
CLFIWGWELPTHF

SEQ ID NO: 778732 - protein, 14 aa, Homo sapiens
  CDR3 for beta chain variable domain of TCR clone 389366 (TRBV7-9, TRBJ2-5)
WASSLDTAQETQYF

SEQ ID NO: 778733 - protein, 15 aa, Homo sapiens
  CDR3 for alpha chain variable domain of TCR clone 389367 (TRAV12-1, TRAJ44)
CVAYLPTGTASKLTF

SEQ ID NO: 778734 - protein, 13 aa, Homo sapiens
  CDR3 for beta chain variable domain of TCR clone 389367 (TRBV7-9, TRBJ1-2)
CASSLKQNYGYTF

SEQ ID NO: 778735 - protein, 16 aa, Homo sapiens
  CDR3 for alpha chain variable domain of TCR clone 389368 (TRAV3, TRAJ10)
CSVRDMRAGGGNKLTF

SEQ ID NO: 778736 - protein, 11 aa, Homo sapiens
  CDR3 for beta chain variable domain of TCR clone 389368 (TRBV7-8, TRBJ2-7)
CASSLSLEQYF

SEQ ID NO: 778737 - protein, 15 aa, Homo sapiens
  CDR3 for alpha chain variable domain of TCR clone 389369 (TRAV26-1, TRAJ29)
CIVRVEGSGNTPLVF

SEQ ID NO: 778738 - protein, 15 aa, Homo sapiens
  CDR3 for beta chain variable domain of TCR clone 389369 (TRBV28, TRBJ2-5)
CASSPGQGSIEIQYF

SEQ ID NO: 778739 - protein, 12 aa, Homo sapiens
  CDR3 for alpha chain variable domain of TCR clone 389370 (TRAV12-3, TRAJ42)
YAPGGSQGNLIF

SEQ ID NO: 778740 - protein, 14 aa, Homo sapiens
  CDR3 for beta chain variable domain of TCR clone 389370 (TRBV5-4, TRBJ1-1)
CASSLDSRRDEAFF

SEQ ID NO: 778741 - protein, 12 aa, Homo sapiens
  CDR3 for alpha chain variable domain of TCR clone 389371 (TRAV35, TRAJ28)
GVEGAGSYQLTF

SEQ ID NO: 778742 - protein, 13 aa, Homo sapiens
  CDR3 for beta chain variable domain of TCR clone 389371 (TRBV9, TRBJ2-1)
CASSPSGGSEQIF

SEQ ID NO: 778743 - protein, 14 aa, Homo sapiens
  CDR3 for alpha chain variable domain of TCR clone 389372 (TRAV12-2, TRAJ9)
FAVNALEGGFKTIF

SEQ ID NO: 778744 - protein, 16 aa, Homo sapiens
  CDR3 for beta chain variable domain of TCR clone 389372 (TRBV19, TRBJ1-6)
CASSVAPVAGNSPLHF

SEQ ID NO: 778745 - protein, 11 aa, Homo sapiens
  CDR3 for alpha chain variable domain of TCR clone 389373 (TRAV12-2, TRAJ30)
CAVGRDDKIIF

SEQ ID NO: 778746 - protein, 16 aa, Homo sapiens
  CDR3 for beta chain variable domain of TCR clone 389373 (TRBV7-3, TRBJ2-2)
CASSLKRGTLSGELFF

SEQ ID NO: 778747 - protein, 14 aa, Homo sapiens
  CDR3 for alpha chain variable domain of TCR clone 389374 (TRAV17, TRAJ57)
CATYPQGGSEKLVF

SEQ ID NO: 778748 - protein, 15 aa, Homo sapiens
  CDR3 for beta chain variable domain of TCR clone 389374 (TRBV11-2, TRBJ2-1)
CASSLGTSGLNEQFF

SEQ ID NO: 778749 - protein, 15 aa, Homo sapiens
  CDR3 for alpha chain variable domain of TCR clone 389375 (TRAV21, TRAJ24)
CAARSSTDSWAKLQF

SEQ ID NO: 778750 - protein, 15 aa, Homo sapiens
  CDR3 for beta chain variable domain of TCR clone 389375 (TRBV4-1, TRBJ2-7)
CASSQNTGRLYEQYF

SEQ ID NO: 778751 - protein, 18 aa, Homo sapiens
  CDR3 for alpha chain variable domain of TCR clone 389376 (TRAV1-1, TRAJ12)
CLLLLRCERGDSSYKLIF

SEQ ID NO: 778752 - protein, 15 aa, Homo sapiens
  CDR3 for beta chain variable domain of TCR clone 389376 (TRBV18, TRBJ2-5)
CASTDRGPRQETQYS

SEQ ID NO: 778753 - protein, 14 aa, Homo sapiens
  CDR3 for alpha chain variable domain of TCR clone 389377 (TRAV1-2, TRAJ16)
CAVNRFSDGQKLLF

SEQ ID NO: 778754 - protein, 13 aa, Homo sapiens
  CDR3 for beta chain variable domain of TCR clone 389377 (TRBV12-4, TRBJ2-6)
CASSGTGANVLTF

SEQ ID NO: 778755 - protein, 15 aa, Homo sapiens
  CDR3 for alpha chain variable domain of TCR clone 389378 (TRAV38-2/DV8, TRAJ48)
CAYRSGGFGNERLTF

SEQ ID NO: 778756 - protein, 16 aa, Homo sapiens
  CDR3 for beta chain variable domain of TCR clone 389378 (TRBV28, TRBJ2-7)
CASSPWVATGDLSQYF

SEQ ID NO: 778757 - protein, 17 aa, Homo sapiens
  CDR3 for alpha chain variable domain of TCR clone 389379 (TRAV8-6, TRAJ58)
CAVSSWVGETSGPRLTF

SEQ ID NO: 778758 - protein, 14 aa, Homo sapiens
  CDR3 for beta chain variable domain of TCR clone 389379 (TRBV4-2, TRBJ2-1)
CASGLDRAYNEQFL

SEQ ID NO: 778759 - protein, 15 aa, Homo sapiens
  CDR3 for alpha chain variable domain of TCR clone 389380 (TRAV17, TRAJ17)
CATDASIIRRQQANF

SEQ ID NO: 778760 - protein, 11 aa, Homo sapiens
  CDR3 for beta chain variable domain of TCR clone 389380 (TRBV11-2, TRBJ1-1)
CASSINTEAFF

SEQ ID NO: 778761 - protein, 13 aa, Homo sapiens
  CDR3 for alpha chain variable domain of TCR clone 389381 (TRAV1-1, TRAJ27)
CAFSETPMQANNL

SEQ ID NO: 778762 - protein, 17 aa, Homo sapiens
  CDR3 for beta chain variable domain of TCR clone 389381 (TRBV20-1, TRBJ2-3)
CSARDPKGVSATDTQYF

SEQ ID NO: 778763 - protein, 17 aa, Homo sapiens
  CDR3 for alpha chain variable domain of TCR clone 389382 (TRAV14/DV4, TRAJ28)
CAMREVSSGAGSYQLTF

SEQ ID NO: 778764 - protein, 13 aa, Homo sapiens
  CDR3 for beta chain variable domain of TCR clone 389382 (TRBV13, TRBJ1-4)
CASSSASGEKLFF

SEQ ID NO: 778765 - protein, 13 aa, Homo sapiens
  CDR3 for alpha chain variable domain of TCR clone 389383 (TRAV13-1, TRAJ40)
CAASTSGTYKYIF

SEQ ID NO: 778766 - protein, 16 aa, Homo sapiens
  CDR3 for beta chain variable domain of TCR clone 389383 (TRBV9, TRBJ2-1)
CATSAYFLGGPSEQFF

SEQ ID NO: 778767 - protein, 14 aa, Homo sapiens
  CDR3 for alpha chain variable domain of TCR clone 389384 (TRAV12-2, TRAJ17)
CAVLFKAAGNKLTF

SEQ ID NO: 778768 - protein, 14 aa, Homo sapiens
  CDR3 for beta chain variable domain of TCR clone 389384 (TRBV12-4, TRBJ1-4)
CASSADRGNEKLFF

SEQ ID NO: 778769 - protein, 17 aa, Homo sapiens
  CDR3 for alpha chain variable domain of TCR clone 389385 (TRAV12-2, TRAJ52)
CAVNPYAGGTSYGELTF

SEQ ID NO: 778770 - protein, 16 aa, Homo sapiens
  CDR3 for beta chain variable domain of TCR clone 389385 (TRBV5-5, TRBJ2-2)
CASSGRREGATGELFF

SEQ ID NO: 778771 - protein, 14 aa, Homo sapiens
  CDR3 for alpha chain variable domain of TCR clone 389386 (TRAV29/DV5, TRAJ48)
CAAMALFGNAKLTF

SEQ ID NO: 778772 - protein, 15 aa, Homo sapiens
  CDR3 for beta chain variable domain of TCR clone 389386 (TRBV7-2, TRBJ2-1)
CASTHGTGIYNEQFF

SEQ ID NO: 778773 - protein, 17 aa, Homo sapiens
  CDR3 for alpha chain variable domain of TCR clone 389387 (TRAV26-2, TRAJ42)
CILRDVGYGGSQGNLIF

SEQ ID NO: 778774 - protein, 15 aa, Homo sapiens
  CDR3 for beta chain variable domain of TCR clone 389387 (TRBV7-6, TRBJ2-1)
CASSSLAGEGNEQFF

SEQ ID NO: 778775 - protein, 12 aa, Homo sapiens
  CDR3 for alpha chain variable domain of TCR clone 389388 (TRAV1-1, TRAJ30)
CAVRGRDDKIIF

SEQ ID NO: 778776 - protein, 13 aa, Homo sapiens
  CDR3 for beta chain variable domain of TCR clone 389388 (TRBV12-4, TRBJ1-1)
CASSPGTGFEAFF

SEQ ID NO: 778777 - protein, 12 aa, Homo sapiens
  CDR3 for alpha chain variable domain of TCR clone 389389 (TRAV13-2, TRAJ8)
CAPWLGFQKLVF

SEQ ID NO: 778778 - protein, 14 aa, Homo sapiens
  CDR3 for beta chain variable domain of TCR clone 389389 (TRBV19, TRBJ2-1)
CASGKSPQYNEQFF

SEQ ID NO: 778779 - protein, 14 aa, Homo sapiens
  CDR3 for alpha chain variable domain of TCR clone 389390 (TRAV12-3, TRAJ10)
SHLPLTGRGNKLTF

SEQ ID NO: 778780 - protein, 14 aa, Homo sapiens
  CDR3 for beta chain variable domain of TCR clone 389390 (TRBV19, TRBJ2-7)
CASTVQGRPYEQYL

SEQ ID NO: 778781 - protein, 11 aa, Homo sapiens
  CDR3 for alpha chain variable domain of TCR clone 389391 (TRAV1-2, TRAJ31)
CAVNNNARLMF

SEQ ID NO: 778782 - protein, 17 aa, Homo sapiens
  CDR3 for beta chain variable domain of TCR clone 389391 (TRBV13, TRBJ2-3)
CASSLSRVAGGRNTQYF

SEQ ID NO: 778783 - protein, 17 aa, Homo sapiens
  CDR3 for alpha chain variable domain of TCR clone 389392 (TRAV12-2, TRAJ4)
CAVNVRPASGGYNKLIF

SEQ ID NO: 778784 - protein, 17 aa, Homo sapiens
  CDR3 for beta chain variable domain of TCR clone 389392 (TRBV6-3, TRBJ2-1)
CASSYSSGTRGLDEQFF

SEQ ID NO: 778785 - protein, 13 aa, Homo sapiens
  CDR3 for alpha chain variable domain of TCR clone 389393 (TRAV38-1, TRAJ42)
CARWGGSQGNLIF

SEQ ID NO: 778786 - protein, 17 aa, Homo sapiens
  CDR3 for beta chain variable domain of TCR clone 389393 (TRBV20-1, TRBJ2-1)
CSARDPLAGVWDNEQFF

SEQ ID NO: 778787 - protein, 13 aa, Homo sapiens
  CDR3 for alpha chain variable domain of TCR clone 389394 (TRAV1-2, TRAJ9)
CAALNTGGFKTIF

SEQ ID NO: 778788 - protein, 14 aa, Homo sapiens
  CDR3 for beta chain variable domain of TCR clone 389394 (TRBV6-1, TRBJ1-5)
CASSETGMEQPQHF

SEQ ID NO: 778789 - protein, 13 aa, Homo sapiens
  CDR3 for alpha chain variable domain of TCR clone 389395 (TRAV12-2, TRAJ13)
CREEDWGYQKVTF

SEQ ID NO: 778790 - protein, 14 aa, Homo sapiens
  CDR3 for beta chain variable domain of TCR clone 389395 (TRBV3-1, TRBJ2-5)
CASSQGPDQETQYF

SEQ ID NO: 778791 - protein, 17 aa, Homo sapiens
  CDR3 for alpha chain variable domain of TCR clone 389396 (TRAV3, TRAJ6)
CAARDGPRAGGSYIPTF

SEQ ID NO: 778792 - protein, 14 aa, Homo sapiens
  CDR3 for beta chain variable domain of TCR clone 389396 (TRBV7-2, TRBJ2-7)
CASSPKTSFYEQHF

SEQ ID NO: 778793 - protein, 12 aa, Homo sapiens
  CDR3 for alpha chain variable domain of TCR clone 389397 (TRAV13-2, TRAJ23)
CAERHRGGKLIF

SEQ ID NO: 778794 - protein, 16 aa, Homo sapiens
  CDR3 for beta chain variable domain of TCR clone 389397 (TRBV7-9, TRBJ2-5)
CASSPSGQGVKGTQYF

SEQ ID NO: 778795 - protein, 13 aa, Homo sapiens
  CDR3 for alpha chain variable domain of TCR clone 389398 (TRAV6, TRAJ20)
CALAVSNHYKLSF

SEQ ID NO: 778796 - protein, 16 aa, Homo sapiens
  CDR3 for beta chain variable domain of TCR clone 389398 (TRBV7-9, TRBJ2-1)
CASSDVAGGSYNEQSF

SEQ ID NO: 778797 - protein, 14 aa, Homo sapiens
  CDR3 for alpha chain variable domain of TCR clone 389399 (TRAV27, TRAJ22)
CAGVSVLGKRQLTF

SEQ ID NO: 778798 - protein, 16 aa, Homo sapiens
  CDR3 for beta chain variable domain of TCR clone 389399 (TRBV5-1, TRBJ2-2)
CASSSRTGGRTGELFF

SEQ ID NO: 778799 - protein, 11 aa, Homo sapiens
  CDR3 for alpha chain variable domain of TCR clone 389400 (TRAV17, TRAJ36)
CAPTGASNLFF

SEQ ID NO: 778800 - protein, 12 aa, Homo sapiens
  CDR3 for beta chain variable domain of TCR clone 389400 (TRBV29-1, TRBJ2-3)
CSVTGGADTQYF

SEQ ID NO: 778801 - protein, 17 aa, Homo sapiens
  CDR3 for alpha chain variable domain of TCR clone 389401 (TRAV12-2, TRAJ52)
CAVNPYAGGSSYGKLTF

SEQ ID NO: 778802 - protein, 16 aa, Homo sapiens
  CDR3 for beta chain variable domain of TCR clone 389401 (TRBV5-5, TRBJ2-2)
CASSGRREGATGELFF

SEQ ID NO: 778803 - protein, 13 aa, Homo sapiens
  CDR3 for alpha chain variable domain of TCR clone 389402 (TRAV35, TRAJ42)
CAGFPGSQGDLIF

SEQ ID NO: 778804 - protein, 14 aa, Homo sapiens
  CDR3 for beta chain variable domain of TCR clone 389402 (TRBV4-1, TRBJ2-2)
CASSHAVNTGELFF

SEQ ID NO: 778805 - protein, 14 aa, Homo sapiens
  CDR3 for alpha chain variable domain of TCR clone 389403 (TRAV12-2, TRAJ9)
CAVNMEGGGFKTIF

SEQ ID NO: 778806 - protein, 15 aa, Homo sapiens
  CDR3 for beta chain variable domain of TCR clone 389403 (TRBV11-2, TRBJ1-3)
CASSLDGTVGNTIYF

SEQ ID NO: 778807 - protein, 11 aa, Homo sapiens
  CDR3 for alpha chain variable domain of TCR clone 389404 (TRAV1-2, TRAJ40)
CAVPGTYQYIF

SEQ ID NO: 778808 - protein, 16 aa, Homo sapiens
  CDR3 for beta chain variable domain of TCR clone 389404 (TRBV29-1, TRBJ2-7)
CSVEAVGTSGSYEQYF

SEQ ID NO: 778809 - protein, 14 aa, Homo sapiens
  CDR3 for alpha chain variable domain of TCR clone 389405 (TRAV8-3, TRAJ17)
CAVGAQTAGNKLTF

SEQ ID NO: 778810 - protein, 15 aa, Homo sapiens
  CDR3 for beta chain variable domain of TCR clone 389405 (TRBV5-7, TRBJ1-5)
CASSYGKLWDQPQHF

SEQ ID NO: 778811 - protein, 16 aa, Homo sapiens
  CDR3 for alpha chain variable domain of TCR clone 389406 (TRAV8-4, TRAJ37)
CAVRGKGSGNTGKLIF

SEQ ID NO: 778812 - protein, 13 aa, Homo sapiens
  CDR3 for beta chain variable domain of TCR clone 389406 (TRBV12-4, TRBJ2-3)
CASSSPLGGTQYF

SEQ ID NO: 778813 - protein, 14 aa, Homo sapiens
  CDR3 for alpha chain variable domain of TCR clone 389407 (TRAV4, TRAJ17)
CLVGPRAAGNKLTF

SEQ ID NO: 778814 - protein, 14 aa, Homo sapiens
  CDR3 for beta chain variable domain of TCR clone 389407 (TRBV11-1, TRBJ2-7)
CASSFRQGSYEQYF

SEQ ID NO: 778815 - protein, 14 aa, Homo sapiens
  CDR3 for alpha chain variable domain of TCR clone 389408 (TRAV1-2, TRAJ8)
CAVREDTGFQKLVF

SEQ ID NO: 778816 - protein, 11 aa, Homo sapiens
  CDR3 for beta chain variable domain of TCR clone 389408 (TRBV20-1, TRBJ2-5)
CSADRAETQFF

SEQ ID NO: 778817 - protein, 14 aa, Homo sapiens
  CDR3 for alpha chain variable domain of TCR clone 389409 (TRAV29/DV5, TRAJ45)
CAASFRGGADGLTF

SEQ ID NO: 778818 - protein, 11 aa, Homo sapiens
  CDR3 for beta chain variable domain of TCR clone 389409 (TRBV5-4, TRBJ1-1)
CARGQNTEAFF

SEQ ID NO: 778819 - protein, 13 aa, Homo sapiens
  CDR3 for alpha chain variable domain of TCR clone 389410 (TRAV8-3, TRAJ6)
CAVEKGGSYIPTF

SEQ ID NO: 778820 - protein, 14 aa, Homo sapiens
  CDR3 for beta chain variable domain of TCR clone 389410 (TRBV6-1, TRBJ1-3)
CASVQGGGGSTMYF

SEQ ID NO: 778821 - protein, 18 aa, Homo sapiens
  CDR3 for alpha chain variable domain of TCR clone 389411 (TRAV21, TRAJ52)
CAVRPSPAGGTSDGKLTF

SEQ ID NO: 778822 - protein, 13 aa, Homo sapiens
  CDR3 for beta chain variable domain of TCR clone 389411 (TRBV2, TRBJ1-5)
CATAGPGNQPQHF

SEQ ID NO: 778823 - protein, 12 aa, Homo sapiens
  CDR3 for alpha chain variable domain of TCR clone 389412 (TRAV12-2, TRAJ31)
CAVNTPDARLMF

SEQ ID NO: 778824 - protein, 12 aa, Homo sapiens
  CDR3 for beta chain variable domain of TCR clone 389412 (TRBV7-8, TRBJ2-7)
CASSLGDRDQYF

SEQ ID NO: 778825 - protein, 11 aa, Homo sapiens
  CDR3 for alpha chain variable domain of TCR clone 389413 (TRAV12-3, TRAJ43)
CAMSVANDMRF

SEQ ID NO: 778826 - protein, 13 aa, Homo sapiens
  CDR3 for beta chain variable domain of TCR clone 389413 (TRBV20-1, TRBJ1-1)
CSAPLGGGTKAFF

SEQ ID NO: 778827 - protein, 15 aa, Homo sapiens
  CDR3 for alpha chain variable domain of TCR clone 389414 (TRAV40, TRAJ45)
CLLGALGGGADGLTF

SEQ ID NO: 778828 - protein, 13 aa, Homo sapiens
  CDR3 for beta chain variable domain of TCR clone 389414 (TRBV7-9, TRBJ1-2)
CASSLKQNYGYTF

SEQ ID NO: 778829 - protein, 15 aa, Homo sapiens
  CDR3 for alpha chain variable domain of TCR clone 389415 (TRAV3, TRAJ20)
CAVRDIKLSDYKLSF

SEQ ID NO: 778830 - protein, 19 aa, Homo sapiens
  CDR3 for beta chain variable domain of TCR clone 389415 (TRBV19, TRBJ2-5)
CASSIGQVTDFFLGETQYF

SEQ ID NO: 778831 - protein, 13 aa, Homo sapiens
  CDR3 for alpha chain variable domain of TCR clone 389416 (TRAV27, TRAJ49)
CAPRPYTGNQFYF

SEQ ID NO: 778832 - protein, 18 aa, Homo sapiens
  CDR3 for beta chain variable domain of TCR clone 389416 (TRBV7-3, TRBJ2-5)
CASSLGGAAQGRCETQYF

SEQ ID NO: 778833 - protein, 14 aa, Homo sapiens
  CDR3 for alpha chain variable domain of TCR clone 389417 (TRAV12-3, TRAJ7)
CAMSEIGGNNRLAF

SEQ ID NO: 778834 - protein, 16 aa, Homo sapiens
  CDR3 for beta chain variable domain of TCR clone 389417 (TRBV3-1, TRBJ2-1)
CASSQVGGTSYNEQFF

SEQ ID NO: 778835 - protein, 13 aa, Homo sapiens
  CDR3 for alpha chain variable domain of TCR clone 389418 (TRAV21, TRAJ27)
CAARPGNAGKSTF

SEQ ID NO: 778836 - protein, 14 aa, Homo sapiens
  CDR3 for beta chain variable domain of TCR clone 389418 (TRBV12-4, TRBJ2-5)
CASSQSGGGETQYF

SEQ ID NO: 778837 - protein, 15 aa, Homo sapiens
  CDR3 for alpha chain variable domain of TCR clone 389419 (TRAV19, TRAJ23)
CALSEVGNQGGKLIF

SEQ ID NO: 778838 - protein, 15 aa, Homo sapiens
  CDR3 for beta chain variable domain of TCR clone 389419 (TRBV2, TRBJ2-7)
CASSEGLARSYEQYF

SEQ ID NO: 778839 - protein, 14 aa, Homo sapiens
  CDR3 for alpha chain variable domain of TCR clone 389420 (TRAV12-3, TRAJ57)
CAMSAWGGSEKLVF

SEQ ID NO: 778840 - protein, 12 aa, Homo sapiens
  CDR3 for beta chain variable domain of TCR clone 389420 (TRBV7-9, TRBJ1-4)
CASSTDREKLFF

SEQ ID NO: 778841 - protein, 16 aa, Homo sapiens
  CDR3 for alpha chain variable domain of TCR clone 389421 (TRAV13-1, TRAJ48)
CAASIFGNFGNEKLTF

SEQ ID NO: 778842 - protein, 11 aa, Homo sapiens
  CDR3 for beta chain variable domain of TCR clone 389421 (TRBV7-8, TRBJ2-7)
CASSLSLEQYF

SEQ ID NO: 778843 - protein, 14 aa, Homo sapiens
  CDR3 for alpha chain variable domain of TCR clone 389422 (TRAV1-2, TRAJ8)
CAVREDTGFQKLVV

SEQ ID NO: 778844 - protein, 15 aa, Homo sapiens
  CDR3 for beta chain variable domain of TCR clone 389422 (TRBV10-3, TRBJ1-1)
CAISEAGTGGTEAFF

SEQ ID NO: 778845 - protein, 11 aa, Homo sapiens
  CDR3 for alpha chain variable domain of TCR clone 389423 (TRAV2, TRAJ13)
CASGGYQKVTF

SEQ ID NO: 778846 - protein, 17 aa, Homo sapiens
  CDR3 for beta chain variable domain of TCR clone 389423 (TRBV7-3, TRBJ2-3)
CASSLMKRMWGADTRYF

SEQ ID NO: 778847 - protein, 14 aa, Homo sapiens
  CDR3 for alpha chain variable domain of TCR clone 389424 (TRAV1-2, TRAJ8)
CAVRGDTGFQKLVF

SEQ ID NO: 778848 - protein, 13 aa, Homo sapiens
  CDR3 for beta chain variable domain of TCR clone 389424 (TRBV4-2, TRBJ1-1)
CASSQAGNTEAFF

SEQ ID NO: 778849 - protein, 14 aa, Homo sapiens
  CDR3 for alpha chain variable domain of TCR clone 389425 (TRAV8-3, TRAJ44)
CAVGLTGTASKLTC

SEQ ID NO: 778850 - protein, 12 aa, Homo sapiens
  CDR3 for beta chain variable domain of TCR clone 389425 (TRBV7-3, TRBJ2-1)
CASSLGFNEQFF

SEQ ID NO: 778851 - protein, 14 aa, Homo sapiens
  CDR3 for alpha chain variable domain of TCR clone 389426 (TRAV2, TRAJ37)
CAVDFTSNTGKLIF

SEQ ID NO: 778852 - protein, 16 aa, Homo sapiens
  CDR3 for beta chain variable domain of TCR clone 389426 (TRBV7-9, TRBJ2-1)
CASSDVAGGSYNEQFF

SEQ ID NO: 778853 - protein, 21 aa, Homo sapiens
  CDR3 for alpha chain variable domain of TCR clone 389427 (TRAV3, TRAJ43)
HLKKPSALVSDSALYFGGMRF

SEQ ID NO: 778854 - protein, 16 aa, Homo sapiens
  CDR3 for beta chain variable domain of TCR clone 389427 (TRBV9, TRBJ2-7)
CASSAGPDRSPYEQYF

SEQ ID NO: 778855 - protein, 14 aa, Homo sapiens
  CDR3 for alpha chain variable domain of TCR clone 389428 (TRAV12-2, TRAJ40)
CAVKIPSGTYKYNF

SEQ ID NO: 778856 - protein, 13 aa, Homo sapiens
  CDR3 for beta chain variable domain of TCR clone 389428 (TRBV7-2, TRBJ2-5)
CASSQTSVETQYF

SEQ ID NO: 778857 - protein, 17 aa, Homo sapiens
  CDR3 for alpha chain variable domain of TCR clone 389429 (TRAV3, TRAJ6)
CAVRDGPRAGGSYIPTF

SEQ ID NO: 778858 - protein, 14 aa, Homo sapiens
  CDR3 for beta chain variable domain of TCR clone 389429 (TRBV10-2, TRBJ2-1)
CASSEGTSEDEQFF

SEQ ID NO: 778859 - protein, 14 aa, Homo sapiens
  CDR3 for alpha chain variable domain of TCR clone 389430 (TRAV12-3, TRAJ10)
SHLPLTGGGNKITF

SEQ ID NO: 778860 - protein, 15 aa, Homo sapiens
  CDR3 for beta chain variable domain of TCR clone 389430 (TRBV7-9, TRBJ1-6)
CASSSPGRGNSPLHF

SEQ ID NO: 778861 - protein, 14 aa, Homo sapiens
  CDR3 for alpha chain variable domain of TCR clone 389431 (TRAV16, TRAJ39)
CALSKNNAGNMLTI

SEQ ID NO: 778862 - protein, 16 aa, Homo sapiens
  CDR3 for beta chain variable domain of TCR clone 389431 (TRBV5-1, TRBJ2-5)
CASSSSGLGGAETQYF

SEQ ID NO: 778863 - protein, 14 aa, Homo sapiens
  CDR3 for alpha chain variable domain of TCR clone 389432 (TRAV12-2, TRAJ13)
CAGKKTGGYQKVTF

SEQ ID NO: 778864 - protein, 16 aa, Homo sapiens
  CDR3 for beta chain variable domain of TCR clone 389432 (TRBV20-1, TRBJ1-4)
CSAPGQGLLTNEKLFF

SEQ ID NO: 778865 - protein, 13 aa, Homo sapiens
  CDR3 for alpha chain variable domain of TCR clone 389433 (TRAV29/DV5, TRAJ31)
CAASRNNNARLMF

SEQ ID NO: 778866 - protein, 13 aa, Homo sapiens
  CDR3 for beta chain variable domain of TCR clone 389433 (TRBV12-4, TRBJ1-2)
CASSLDSNYGYTF

SEQ ID NO: 778867 - protein, 21 aa, Homo sapiens
  CDR3 for alpha chain variable domain of TCR clone 389434 (TRAV25, TRAJ7)
TATQTTDVGTYFCPGNKRLAF

SEQ ID NO: 778868 - protein, 14 aa, Homo sapiens
  CDR3 for beta chain variable domain of TCR clone 389434 (TRBV11-2, TRBJ2-2)
CASSLGLRVRELFF

SEQ ID NO: 778869 - protein, 15 aa, Homo sapiens
  CDR3 for alpha chain variable domain of TCR clone 389435 (TRAV3, TRAJ17)
CAVRDTGAAGNKLTF

SEQ ID NO: 778870 - protein, 11 aa, Homo sapiens
  CDR3 for beta chain variable domain of TCR clone 389435 (TRBV7-8, TRBJ2-7)
CASSLSLEQYF

SEQ ID NO: 778871 - protein, 12 aa, Homo sapiens
  CDR3 for alpha chain variable domain of TCR clone 389436 (TRAV23/DV6, TRAJ32)
CSMPGATNKPIF

SEQ ID NO: 778872 - protein, 15 aa, Homo sapiens
  CDR3 for beta chain variable domain of TCR clone 389436 (TRBV19, TRBJ1-6)
CASSTQGAVGSPLHF

SEQ ID NO: 778873 - protein, 13 aa, Homo sapiens
  CDR3 for alpha chain variable domain of TCR clone 389437 (TRAV21, TRAJ20)
CAVGLRVAYKLSF

SEQ ID NO: 778874 - protein, 13 aa, Homo sapiens
  CDR3 for beta chain variable domain of TCR clone 389437 (TRBV6-1, TRBJ1-1)
CASSREGNTEAFF

SEQ ID NO: 778875 - protein, 14 aa, Homo sapiens
  CDR3 for alpha chain variable domain of TCR clone 389438 (TRAV8-6, TRAJ40)
CAVIATSGTYKYIF

SEQ ID NO: 778876 - protein, 16 aa, Homo sapiens
  CDR3 for beta chain variable domain of TCR clone 389438 (TRBV4-2, TRBJ2-7)
CASSQDGGSLRGEQYF

SEQ ID NO: 778877 - protein, 16 aa, Homo sapiens
  CDR3 for alpha chain variable domain of TCR clone 389439 (TRAV23/DV6, TRAJ48)
CAASGVVNCGNEKLTF

SEQ ID NO: 778878 - protein, 15 aa, Homo sapiens
  CDR3 for beta chain variable domain of TCR clone 389439 (TRBV20-1, TRBJ2-5)
CSAGLAGVSQETQYF

SEQ ID NO: 778879 - protein, 12 aa, Homo sapiens
  CDR3 for alpha chain variable domain of TCR clone 389440 (TRAV25, TRAJ7)
CAGSYGNNRLAF

SEQ ID NO: 778880 - protein, 20 aa, Homo sapiens
  CDR3 for beta chain variable domain of TCR clone 389440 (TRBV28, TRBJ2-1)
CASTPIGRSPGLAGGNEQFF

SEQ ID NO: 778881 - protein, 14 aa, Homo sapiens
  CDR3 for alpha chain variable domain of TCR clone 389441 (TRAV8-3, TRAJ28)
CAVVPGAGSYQLTF

SEQ ID NO: 778882 - protein, 15 aa, Homo sapiens
  CDR3 for beta chain variable domain of TCR clone 389441 (TRBV20-1, TRBJ2-1)
CSANVVGGPWDEQFF

SEQ ID NO: 778883 - protein, 14 aa, Homo sapiens
  CDR3 for alpha chain variable domain of TCR clone 389442 (TRAV1-2, TRAJ8)
CAVREDTGFHKLVF

SEQ ID NO: 778884 - protein, 14 aa, Homo sapiens
  CDR3 for beta chain variable domain of TCR clone 389442 (TRBV15, TRBJ2-3)
CATRSGTSTDTQYF

SEQ ID NO: 778885 - protein, 14 aa, Homo sapiens
  CDR3 for alpha chain variable domain of TCR clone 389443 (TRAV26-2, TRAJ32)
CCVGNGGATNKLIF

SEQ ID NO: 778886 - protein, 14 aa, Homo sapiens
  CDR3 for beta chain variable domain of TCR clone 389443 (TRBV4-2, TRBJ2-1)
CASGLDRAYNEQFF

SEQ ID NO: 778887 - protein, 15 aa, Homo sapiens
  CDR3 for alpha chain variable domain of TCR clone 389444 (TRAV8-3, TRAJ27)
CAVGPSKTNAGKSTF

SEQ ID NO: 778888 - protein, 13 aa, Homo sapiens
  CDR3 for beta chain variable domain of TCR clone 389444 (TRBV6-3, TRBJ2-3)
CASSYYPADTQYF

SEQ ID NO: 778889 - protein, 17 aa, Homo sapiens
  CDR3 for alpha chain variable domain of TCR clone 389445 (TRAV17, TRAJ24)
CATANSMTTDSWGKLQF

SEQ ID NO: 778890 - protein, 15 aa, Homo sapiens
  CDR3 for beta chain variable domain of TCR clone 389445 (TRBV5-1, TRBJ2-3)
CASSVTSGSTDTQYF

SEQ ID NO: 778891 - protein, 11 aa, Homo sapiens
  CDR3 for alpha chain variable domain of TCR clone 389446 (TRAV1-2, TRAJ31)
CAVNNNARLMF

SEQ ID NO: 778892 - protein, 14 aa, Homo sapiens
  CDR3 for beta chain variable domain of TCR clone 389446 (TRBV7-2, TRBJ2-3)
CQQLRGGGRDTQYF

SEQ ID NO: 778893 - protein, 15 aa, Homo sapiens
  CDR3 for alpha chain variable domain of TCR clone 389447 (TRAV3, TRAJ22)
CAVRDRGGSARQLTF

SEQ ID NO: 778894 - protein, 16 aa, Homo sapiens
  CDR3 for beta chain variable domain of TCR clone 389447 (TRBV4-1, TRBJ1-2)
CASSQDAGQVLYGCTF

SEQ ID NO: 778895 - protein, 14 aa, Homo sapiens
  CDR3 for alpha chain variable domain of TCR clone 389448 (TRAV17, TRAJ57)
CATDPEGGSEKLVF

SEQ ID NO: 778896 - protein, 14 aa, Homo sapiens
  CDR3 for beta chain variable domain of TCR clone 389448 (TRBV25-1, TRBJ1-1)
CASTHLGGNTEAFF

SEQ ID NO: 778897 - protein, 16 aa, Homo sapiens
  CDR3 for alpha chain variable domain of TCR clone 389449 (TRAV17, TRAJ54)
CATDSDIIQGAQKLVF

SEQ ID NO: 778898 - protein, 13 aa, Homo sapiens
  CDR3 for beta chain variable domain of TCR clone 389449 (TRBV5-4, TRBJ2-5)
CASSPVSQETQYF

SEQ ID NO: 778899 - protein, 12 aa, Homo sapiens
  CDR3 for alpha chain variable domain of TCR clone 389450 (TRAV17, TRAJ20)
CATYSHDYKLSF

SEQ ID NO: 778900 - protein, 11 aa, Homo sapiens
  CDR3 for beta chain variable domain of TCR clone 389450 (TRBV4-1, TRBJ2-2)
CASEHTGELFF

SEQ ID NO: 778901 - protein, 14 aa, Homo sapiens
  CDR3 for alpha chain variable domain of TCR clone 389451 (TRAV26-1, TRAJ21)
CIVRVAHNFNKFYF

SEQ ID NO: 778902 - protein, 15 aa, Homo sapiens
  CDR3 for beta chain variable domain of TCR clone 389451 (TRBV19, TRBJ2-7)
CASRPTPGLSIEQYF

SEQ ID NO: 778903 - protein, 13 aa, Homo sapiens
  CDR3 for alpha chain variable domain of TCR clone 389452 (TRAV26-1, TRAJ34)
CIVRPWITDKLIF

SEQ ID NO: 778904 - protein, 14 aa, Homo sapiens
  CDR3 for beta chain variable domain of TCR clone 389452 (TRBV7-2, TRBJ2-7)
CAGRSQGAAYEQYF

SEQ ID NO: 778905 - protein, 16 aa, Homo sapiens
  CDR3 for alpha chain variable domain of TCR clone 389453 (TRAV20, TRAJ10)
CAVLRGLTGGGNKLTF

SEQ ID NO: 778906 - protein, 15 aa, Homo sapiens
  CDR3 for beta chain variable domain of TCR clone 389453 (TRBV9, TRBJ1-6)
CASSVAGTGDSPLHF

SEQ ID NO: 778907 - protein, 14 aa, Homo sapiens
  CDR3 for alpha chain variable domain of TCR clone 389454 (TRAV1-2, TRAJ16)
CAVNRFSDGQKLLF

SEQ ID NO: 778908 - protein, 14 aa, Homo sapiens
  CDR3 for beta chain variable domain of TCR clone 389454 (TRBV19, TRBJ2-1)
CASPTVVVSGEQFF

SEQ ID NO: 778909 - protein, 15 aa, Homo sapiens
  CDR3 for alpha chain variable domain of TCR clone 389455 (TRAV12-1, TRAJ44)
CVADLPTGTASKLTF

SEQ ID NO: 778910 - protein, 17 aa, Homo sapiens
  CDR3 for beta chain variable domain of TCR clone 389455 (TRBV6-5, TRBJ2-5)
CASSPQGGETQYFARHA

SEQ ID NO: 778911 - protein, 14 aa, Homo sapiens
  CDR3 for alpha chain variable domain of TCR clone 389456 (TRAV1-2, TRAJ8)
CTVREDTGFQKLVF

SEQ ID NO: 778912 - protein, 14 aa, Homo sapiens
  CDR3 for beta chain variable domain of TCR clone 389456 (TRBV19, TRBJ2-7)
CASTVQGRPYEQYF

SEQ ID NO: 778913 - protein, 13 aa, Homo sapiens
  CDR3 for alpha chain variable domain of TCR clone 389457 (TRAV12-1, TRAJ40)
CVVPTSGTYIYIF

SEQ ID NO: 778914 - protein, 18 aa, Homo sapiens
  CDR3 for beta chain variable domain of TCR clone 389457 (TRBV7-6, TRBJ2-1)
CASSPRTSGMSSYNEQFF

SEQ ID NO: 778915 - protein, 12 aa, Homo sapiens
  CDR3 for alpha chain variable domain of TCR clone 389458 (TRAV21, TRAJ23)
CAVMLQGGKLIF

SEQ ID NO: 778916 - protein, 15 aa, Homo sapiens
  CDR3 for beta chain variable domain of TCR clone 389458 (TRBV15, TRBJ1-2)
CATSRVRASGSGYTF

SEQ ID NO: 778917 - protein, 18 aa, Homo sapiens
  CDR3 for alpha chain variable domain of TCR clone 389459 (TRAV13-1, TRAJ52)
CAAKNPNAGGTSYRKLTF

SEQ ID NO: 778918 - protein, 14 aa, Homo sapiens
  CDR3 for beta chain variable domain of TCR clone 389459 (TRBV7-3, TRBJ2-1)
CASSLAGGTNEQFF

SEQ ID NO: 778919 - protein, 12 aa, Homo sapiens
  CDR3 for alpha chain variable domain of TCR clone 389460 (TRAV12-2, TRAJ30)
CAVRNRDDKIIF

SEQ ID NO: 778920 - protein, 15 aa, Homo sapiens
  CDR3 for beta chain variable domain of TCR clone 389460 (TRBV10-3, TRBJ2-3)
CAISLTSGGTDTQYF

SEQ ID NO: 778921 - protein, 16 aa, Homo sapiens
  CDR3 for alpha chain variable domain of TCR clone 389461 (TRAV12-3, TRAJ53)
CAMSPGSGGSNYKLTF

SEQ ID NO: 778922 - protein, 15 aa, Homo sapiens
  CDR3 for beta chain variable domain of TCR clone 389461 (TRBV15, TRBJ2-7)
CHQQRPIQQAYEQYF

SEQ ID NO: 778923 - protein, 12 aa, Homo sapiens
  CDR3 for alpha chain variable domain of TCR clone 389462 (TRAV17, TRAJ57)
CATDGGSEKLVF

SEQ ID NO: 778924 - protein, 13 aa, Homo sapiens
  CDR3 for beta chain variable domain of TCR clone 389462 (TRBV7-9, TRBJ2-7)
CPSSFAGAYEQYF

SEQ ID NO: 778925 - protein, 15 aa, Homo sapiens
  CDR3 for alpha chain variable domain of TCR clone 389463 (TRAV3, TRAJ5)
CAVRDLDTGRRALTF

SEQ ID NO: 778926 - protein, 13 aa, Homo sapiens
  CDR3 for beta chain variable domain of TCR clone 389463 (TRBV12-4, TRBJ2-7)
CASCPTETYEQYF

SEQ ID NO: 778927 - protein, 14 aa, Homo sapiens
  CDR3 for alpha chain variable domain of TCR clone 389464 (TRAV8-6, TRAJ5)
CAVSVDTDRRALTF

SEQ ID NO: 778928 - protein, 11 aa, Homo sapiens
  CDR3 for beta chain variable domain of TCR clone 389464 (TRBV7-3, TRBJ2-5)
CASSLSETQYF

SEQ ID NO: 778929 - protein, 14 aa, Homo sapiens
  CDR3 for alpha chain variable domain of TCR clone 389465 (TRAV13-2, TRAJ57)
CAENFQGGSEKLVF

SEQ ID NO: 778930 - protein, 14 aa, Homo sapiens
  CDR3 for beta chain variable domain of TCR clone 389465 (TRBV18, TRBJ2-7)
CASSPRGGAYEQYF

SEQ ID NO: 778931 - protein, 15 aa, Homo sapiens
  CDR3 for alpha chain variable domain of TCR clone 389466 (TRAV2, TRAJ44)
CAVEAYPGTASKLTF

SEQ ID NO: 778932 - protein, 14 aa, Homo sapiens
  CDR3 for beta chain variable domain of TCR clone 389466 (TRBV11-2, TRBJ2-1)
CASSPGSRDNEQFF

SEQ ID NO: 778933 - protein, 14 aa, Homo sapiens
  CDR3 for alpha chain variable domain of TCR clone 389467 (TRAV3, TRAJ17)
CAVRDRSCRQQANF

SEQ ID NO: 778934 - protein, 16 aa, Homo sapiens
  CDR3 for beta chain variable domain of TCR clone 389467 (TRBV12-5, TRBJ2-5)
CASGPRTSGNQETQYF

SEQ ID NO: 778935 - protein, 13 aa, Homo sapiens
  CDR3 for alpha chain variable domain of TCR clone 389468 (TRAV21, TRAJ27)
CAARPGNAGQSTF

SEQ ID NO: 778936 - protein, 14 aa, Homo sapiens
  CDR3 for beta chain variable domain of TCR clone 389468 (TRBV7-6, TRBJ2-3)
CASSLGTVTDTQYS

SEQ ID NO: 778937 - protein, 17 aa, Homo sapiens
  CDR3 for alpha chain variable domain of TCR clone 389469 (TRAV38-2/DV8, TRAJ54)
CAYRSQLLSQGAQKLVF

SEQ ID NO: 778938 - protein, 15 aa, Homo sapiens
  CDR3 for beta chain variable domain of TCR clone 389469 (TRBV7-9, TRBJ1-6)
CASSSPGRGNSPLHF

SEQ ID NO: 778939 - protein, 17 aa, Homo sapiens
  CDR3 for alpha chain variable domain of TCR clone 389470 (TRAV3, TRAJ12)
CAVRDGGRLDSRYKLIF

SEQ ID NO: 778940 - protein, 13 aa, Homo sapiens
  CDR3 for beta chain variable domain of TCR clone 389470 (TRBV15, TRBJ1-6)
CATSEGLNSPLHF

SEQ ID NO: 778941 - protein, 11 aa, Homo sapiens
  CDR3 for alpha chain variable domain of TCR clone 389471 (TRAV21, TRAJ20)
CCRVNDYKLSF

SEQ ID NO: 778942 - protein, 18 aa, Homo sapiens
  CDR3 for beta chain variable domain of TCR clone 389471 (TRBV11-2, TRBJ2-3)
CASSLGGASRGAPNTQYF

SEQ ID NO: 778943 - protein, 15 aa, Homo sapiens
  CDR3 for alpha chain variable domain of TCR clone 389472 (TRAV12-3, TRAJ27)
CAMRAYNTNAGKSTF

SEQ ID NO: 778944 - protein, 15 aa, Homo sapiens
  CDR3 for beta chain variable domain of TCR clone 389472 (TRBV13, TRBJ2-1)
CASSLLSGLNNEQFF

SEQ ID NO: 778945 - protein, 17 aa, Homo sapiens
  CDR3 for alpha chain variable domain of TCR clone 389473 (TRAV8-4, TRAJ3)
CAVTGENLVQQCSQDNL

SEQ ID NO: 778946 - protein, 16 aa, Homo sapiens
  CDR3 for beta chain variable domain of TCR clone 389473 (TRBV4-2, TRBJ1-1)
CASSQAGFGMNTEAFF

SEQ ID NO: 778947 - protein, 17 aa, Homo sapiens
  CDR3 for alpha chain variable domain of TCR clone 389474 (TRAV3, TRAJ22)
VLLSVRDRGGSARQLTF

SEQ ID NO: 778948 - protein, 13 aa, Homo sapiens
  CDR3 for beta chain variable domain of TCR clone 389474 (TRBV12-4, TRBJ1-2)
CASSLRQGKGYTF

SEQ ID NO: 778949 - protein, 15 aa, Homo sapiens
  CDR3 for alpha chain variable domain of TCR clone 389475 (TRAV26-1, TRAJ29)
FIVRVEGSGNTPLVF

SEQ ID NO: 778950 - protein, 16 aa, Homo sapiens
  CDR3 for beta chain variable domain of TCR clone 389475 (TRBV7-3, TRBJ2-1)
CASSLEGYRSYNEQFF

SEQ ID NO: 778951 - protein, 13 aa, Homo sapiens
  CDR3 for alpha chain variable domain of TCR clone 389476 (TRAV12-2, TRAJ24)
CAVSTDSWRKLQF

SEQ ID NO: 778952 - protein, 12 aa, Homo sapiens
  CDR3 for beta chain variable domain of TCR clone 389476 (TRBV7-6, TRBJ2-7)
CASSLADSEQYF

SEQ ID NO: 778953 - protein, 14 aa, Homo sapiens
  CDR3 for alpha chain variable domain of TCR clone 389477 (TRAV12-2, TRAJ9)
CAVNMEGGGFKTIF

SEQ ID NO: 778954 - protein, 14 aa, Homo sapiens
  CDR3 for beta chain variable domain of TCR clone 389477 (TRBV19, TRBJ1-5)
CASSLGTGGQPQHF

SEQ ID NO: 778955 - protein, 15 aa, Homo sapiens
  CDR3 for alpha chain variable domain of TCR clone 389478 (TRAV2, TRAJ45)
CAVDGTGGGADGPTF

SEQ ID NO: 778956 - protein, 15 aa, Homo sapiens
  CDR3 for beta chain variable domain of TCR clone 389478 (TRBV15, TRBJ2-7)
CATSSGTTATYEQYF

SEQ ID NO: 778957 - protein, 11 aa, Homo sapiens
  CDR3 for alpha chain variable domain of TCR clone 389479 (TRAV2, TRAJ13)
CASGGYQKVNF

SEQ ID NO: 778958 - protein, 15 aa, Homo sapiens
  CDR3 for beta chain variable domain of TCR clone 389479 (TRBV28, TRBJ1-3)
CASSMGWASGNTMYF

SEQ ID NO: 778959 - protein, 14 aa, Homo sapiens
  CDR3 for alpha chain variable domain of TCR clone 389480 (TRAV1-2, TRAJ8)
CAVREDTGFQKLVF

SEQ ID NO: 778960 - protein, 11 aa, Homo sapiens
  CDR3 for beta chain variable domain of TCR clone 389480 (TRBV20-1, TRBJ2-1)
CSLSSGSGQFF

SEQ ID NO: 778961 - protein, 13 aa, Homo sapiens
  CDR3 for alpha chain variable domain of TCR clone 389481 (TRAV20, TRAJ22)
CCAGFCSARQLTF

SEQ ID NO: 778962 - protein, 13 aa, Homo sapiens
  CDR3 for beta chain variable domain of TCR clone 389481 (TRBV20-1, TRBJ2-5)
CSAREGGKETQYF

SEQ ID NO: 778963 - protein, 13 aa, Homo sapiens
  CDR3 for alpha chain variable domain of TCR clone 389482 (TRAV27, TRAJ6)
CAGGTRGSYIPKF

SEQ ID NO: 778964 - protein, 12 aa, Homo sapiens
  CDR3 for beta chain variable domain of TCR clone 389482 (TRBV5-1, TRBJ1-2)
CASSQDTYGYTF

SEQ ID NO: 778965 - protein, 11 aa, Homo sapiens
  CDR3 for alpha chain variable domain of TCR clone 389483 (TRAV3, TRAJ21)
CAVGNFNKFYF

SEQ ID NO: 778966 - protein, 13 aa, Homo sapiens
  CDR3 for beta chain variable domain of TCR clone 389483 (TRBV18, TRBJ1-1)
CASSGGRNTEAFF

SEQ ID NO: 778967 - protein, 14 aa, Homo sapiens
  CDR3 for alpha chain variable domain of TCR clone 389484 (TRAV1-2, TRAJ8)
CAVREDTGFQQLVF

SEQ ID NO: 778968 - protein, 13 aa, Homo sapiens
  CDR3 for beta chain variable domain of TCR clone 389484 (TRBV19, TRBJ2-7)
CASSIDRTYEQYF

SEQ ID NO: 778969 - protein, 14 aa, Homo sapiens
  CDR3 for alpha chain variable domain of TCR clone 389485 (TRAV3, TRAJ28)
CAVRRGAGSYQLTF

SEQ ID NO: 778970 - protein, 16 aa, Homo sapiens
  CDR3 for beta chain variable domain of TCR clone 389485 (TRBV7-3, TRBJ2-2)
CASSLKRGTLSGELFF

SEQ ID NO: 778971 - protein, 15 aa, Homo sapiens
  CDR3 for alpha chain variable domain of TCR clone 389486 (TRAV2, TRAJ9)
CAVAALNTGGFKTIF

SEQ ID NO: 778972 - protein, 15 aa, Homo sapiens
  CDR3 for beta chain variable domain of TCR clone 389486 (TRBV6-3, TRBJ2-7)
CASSSPGTVLYEQYF

SEQ ID NO: 778973 - protein, 13 aa, Homo sapiens
  CDR3 for alpha chain variable domain of TCR clone 389487 (TRAV35, TRAJ42)
CAGFPGSQGNLIF

SEQ ID NO: 778974 - protein, 13 aa, Homo sapiens
  CDR3 for beta chain variable domain of TCR clone 389487 (TRBV12-4, TRBJ1-5)
CASSPDRAQPQHF

SEQ ID NO: 778975 - protein, 15 aa, Homo sapiens
  CDR3 for alpha chain variable domain of TCR clone 389488 (TRAV3, TRAJ11)
CAVRDSGSGYSTLTF

SEQ ID NO: 778976 - protein, 13 aa, Homo sapiens
  CDR3 for beta chain variable domain of TCR clone 389488 (TRBV7-9, TRBJ1-2)
CASSLKQNYGYTF

SEQ ID NO: 778977 - protein, 17 aa, Homo sapiens
  CDR3 for alpha chain variable domain of TCR clone 389489 (TRAV8-6, TRAJ58)
CAVSSWLGETSGSSLTF

SEQ ID NO: 778978 - protein, 14 aa, Homo sapiens
  CDR3 for beta chain variable domain of TCR clone 389489 (TRBV4-2, TRBJ2-1)
CASGLDRAYNEQFF

SEQ ID NO: 778979 - protein, 14 aa, Homo sapiens
  CDR3 for alpha chain variable domain of TCR clone 389490 (TRAV1-2, TRAJ6)
CAVSLSGGSYIPTF

SEQ ID NO: 778980 - protein, 15 aa, Homo sapiens
  CDR3 for beta chain variable domain of TCR clone 389490 (TRBV3-1, TRBJ1-2)
CASSHPGTPGYGYTF

SEQ ID NO: 778981 - protein, 17 aa, Homo sapiens
  CDR3 for alpha chain variable domain of TCR clone 389491 (TRAV3, TRAJ6)
CAVRDGPRAGGSYIPTF

SEQ ID NO: 778982 - protein, 17 aa, Homo sapiens
  CDR3 for beta chain variable domain of TCR clone 389491 (TRBV4-2, TRBJ2-1)
CASSQVSGLAMNNEQFF

SEQ ID NO: 778983 - protein, 15 aa, Homo sapiens
  CDR3 for alpha chain variable domain of TCR clone 389492 (TRAV3, TRAJ5)
CAVRDLYTGRRALTF

SEQ ID NO: 778984 - protein, 14 aa, Homo sapiens
  CDR3 for beta chain variable domain of TCR clone 389492 (TRBV12-5, TRBJ2-5)
CASGSRTHQETQYF

SEQ ID NO: 778985 - protein, 13 aa, Homo sapiens
  CDR3 for alpha chain variable domain of TCR clone 389493 (TRAV2, TRAJ40)
CAVVTSGTYKYIF

SEQ ID NO: 778986 - protein, 14 aa, Homo sapiens
  CDR3 for beta chain variable domain of TCR clone 389493 (TRBV4-2, TRBJ2-1)
CASRLDRAYNEQFF

SEQ ID NO: 778987 - protein, 16 aa, Homo sapiens
  CDR3 for alpha chain variable domain of TCR clone 389494 (TRAV8-3, TRAJ44)
CAVGASNTGTASKLTF

SEQ ID NO: 778988 - protein, 17 aa, Homo sapiens
  CDR3 for beta chain variable domain of TCR clone 389494 (TRBV13, TRBJ2-3)
CASSLSRVAGGRNTQYF

SEQ ID NO: 778989 - protein, 17 aa, Homo sapiens
  CDR3 for alpha chain variable domain of TCR clone 389495 (TRAV3, TRAJ6)
CAVRDGARAGGSYITTF

SEQ ID NO: 778990 - protein, 20 aa, Homo sapiens
  CDR3 for beta chain variable domain of TCR clone 389495 (TRBV28, TRBJ2-1)
CASTPIGRSPGLAGGNEQFF

SEQ ID NO: 778991 - protein, 14 aa, Homo sapiens
  CDR3 for alpha chain variable domain of TCR clone 389496 (TRAV17, TRAJ31)
CATVLRNNNARLMF

SEQ ID NO: 778992 - protein, 15 aa, Homo sapiens
  CDR3 for beta chain variable domain of TCR clone 389496 (TRBV9, TRBJ1-6)
CASSVAGTGDSPLHF

SEQ ID NO: 778993 - protein, 15 aa, Homo sapiens
  CDR3 for alpha chain variable domain of TCR clone 389497 (TRAV26-1, TRAJ56)
CIVRVDNGANSKLTY

SEQ ID NO: 778994 - protein, 14 aa, Homo sapiens
  CDR3 for beta chain variable domain of TCR clone 389497 (TRBV5-1, TRBJ2-7)
CASSRGESLYEQYF

SEQ ID NO: 778995 - protein, 14 aa, Homo sapiens
  CDR3 for alpha chain variable domain of TCR clone 389498 (TRAV12-3, TRAJ29)
CAMHLLSGNTPLVF

SEQ ID NO: 778996 - protein, 16 aa, Homo sapiens
  CDR3 for beta chain variable domain of TCR clone 389498 (TRBV28, TRBJ2-7)
CASSSGTSGRGYEQYF

SEQ ID NO: 778997 - protein, 13 aa, Homo sapiens
  CDR3 for alpha chain variable domain of TCR clone 389499 (TRAV20, TRAJ29)
CAVQAVGNTPLVF

SEQ ID NO: 778998 - protein, 15 aa, Homo sapiens
  CDR3 for beta chain variable domain of TCR clone 389499 (TRBV10-2, TRBJ2-5)
GASRGSGGPQETQYF

SEQ ID NO: 778999 - protein, 15 aa, Homo sapiens
  CDR3 for alpha chain variable domain of TCR clone 389500 (TRAV2, TRAJ9)
CAVAALNTGGFKTIF

SEQ ID NO: 779000 - protein, 15 aa, Homo sapiens
  CDR3 for beta chain variable domain of TCR clone 389500 (TRBV28, TRBJ1-3)
CASSMGWASGNTIYF

SEQ ID NO: 779001 - protein, 11 aa, Homo sapiens
  CDR3 for alpha chain variable domain of TCR clone 389501 (TRAV35, TRAJ30)
CAPGGDDKIIL

SEQ ID NO: 779002 - protein, 14 aa, Homo sapiens
  CDR3 for beta chain variable domain of TCR clone 389501 (TRBV7-6, TRBJ2-1)
CASSLGGVADEQFF

SEQ ID NO: 779003 - protein, 14 aa, Homo sapiens
  CDR3 for alpha chain variable domain of TCR clone 389502 (TRAV1-2, TRAJ16)
CAVNRFSDGQKLFF

SEQ ID NO: 779004 - protein, 12 aa, Homo sapiens
  CDR3 for beta chain variable domain of TCR clone 389502 (TRBV3-1, TRBJ2-2)
CASSLFPGELFF

SEQ ID NO: 779005 - protein, 18 aa, Homo sapiens
  CDR3 for alpha chain variable domain of TCR clone 389503 (TRAV26-1, TRAJ27)
CFVRPSFNYNTNAGKSTF

SEQ ID NO: 779006 - protein, 14 aa, Homo sapiens
  CDR3 for beta chain variable domain of TCR clone 389503 (TRBV10-3, TRBJ1-6)
CAISVDGDESPLHF

SEQ ID NO: 779007 - protein, 13 aa, Homo sapiens
  CDR3 for alpha chain variable domain of TCR clone 389504 (TRAV12-2, TRAJ52)
CAVSGTSYGKMTF

SEQ ID NO: 779008 - protein, 16 aa, Homo sapiens
  CDR3 for beta chain variable domain of TCR clone 389504 (TRBV7-2, TRBJ2-7)
CASTSQAASGGYEQYF

SEQ ID NO: 779009 - protein, 14 aa, Homo sapiens
  CDR3 for alpha chain variable domain of TCR clone 389505 (TRAV9-2, TRAJ39)
CALYIYNAGNMLTF

SEQ ID NO: 779010 - protein, 16 aa, Homo sapiens
  CDR3 for beta chain variable domain of TCR clone 389505 (TRBV10-3, TRBJ2-1)
CAISGVGDGGGGEQFF

SEQ ID NO: 779011 - protein, 14 aa, Homo sapiens
  CDR3 for alpha chain variable domain of TCR clone 389506 (TRAV17, TRAJ57)
CATDPQGGSEKLVF

SEQ ID NO: 779012 - protein, 15 aa, Homo sapiens
  CDR3 for beta chain variable domain of TCR clone 389506 (TRBV10-1, TRBJ2-3)
CASSATSGGFDTQYF

SEQ ID NO: 779013 - protein, 14 aa, Homo sapiens
  CDR3 for alpha chain variable domain of TCR clone 389507 (TRAV12-3, TRAJ9)
CAMSPTTGGSKTIF

SEQ ID NO: 779014 - protein, 12 aa, Homo sapiens
  CDR3 for beta chain variable domain of TCR clone 389507 (TRBV11-2, TRBJ2-2)
CASSLGGGELFF

SEQ ID NO: 779015 - protein, 11 aa, Homo sapiens
  CDR3 for alpha chain variable domain of TCR clone 389508 (TRAV1-1, TRAJ37)
CAVSPQGKLIF

SEQ ID NO: 779016 - protein, 15 aa, Homo sapiens
  CDR3 for beta chain variable domain of TCR clone 389508 (TRBV27, TRBJ1-2)
CASSLSATVNYGYSF

SEQ ID NO: 779017 - protein, 13 aa, Homo sapiens
  CDR3 for alpha chain variable domain of TCR clone 389509 (TRAV21, TRAJ15)
CAVANQAGTALSF

SEQ ID NO: 779018 - protein, 14 aa, Homo sapiens
  CDR3 for beta chain variable domain of TCR clone 389509 (TRBV27, TRBJ2-2)
CASSLGAATGELFF

SEQ ID NO: 779019 - protein, 15 aa, Homo sapiens
  CDR3 for alpha chain variable domain of TCR clone 389510 (TRAV17, TRAJ57)
CATGPSQGGPDKLVF

SEQ ID NO: 779020 - protein, 14 aa, Homo sapiens
  CDR3 for beta chain variable domain of TCR clone 389510 (TRBV12-5, TRBJ2-5)
CASGSRTHQETQYF

SEQ ID NO: 779021 - protein, 18 aa, Homo sapiens
  CDR3 for alpha chain variable domain of TCR clone 389511 (TRAV26-2, TRAJ45)
CILRVDKYSGGGADGLTF

SEQ ID NO: 779022 - protein, 11 aa, Homo sapiens
  CDR3 for beta chain variable domain of TCR clone 389511 (TRBV29-1, TRBJ2-5)
FSEDRTGTQYF

SEQ ID NO: 779023 - protein, 12 aa, Homo sapiens
  CDR3 for alpha chain variable domain of TCR clone 389512 (TRAV12-2, TRAJ45)
CAVTGGADGLTF

SEQ ID NO: 779024 - protein, 14 aa, Homo sapiens
  CDR3 for beta chain variable domain of TCR clone 389512 (TRBV5-5, TRBJ2-7)
CASSLVQGTYEQYF

SEQ ID NO: 779025 - protein, 11 aa, Homo sapiens
  CDR3 for alpha chain variable domain of TCR clone 389513 (TRAV35, TRAJ30)
CAGPGDDKIIF

SEQ ID NO: 779026 - protein, 16 aa, Homo sapiens
  CDR3 for beta chain variable domain of TCR clone 389513 (TRBV2, TRBJ2-3)
CASSTSVEGVTDTQYF

SEQ ID NO: 779027 - protein, 14 aa, Homo sapiens
  CDR3 for alpha chain variable domain of TCR clone 389514 (TRAV8-1, TRAJ3)
CAVGLYSSASKIIF

SEQ ID NO: 779028 - protein, 14 aa, Homo sapiens
  CDR3 for beta chain variable domain of TCR clone 389514 (TRBV12-4, TRBJ2-7)
CASSASGGWYEQYF

SEQ ID NO: 779029 - protein, 12 aa, Homo sapiens
  CDR3 for alpha chain variable domain of TCR clone 389515 (TRAV8-3, TRAJ26)
CAGDNYGQHFVF

SEQ ID NO: 779030 - protein, 14 aa, Homo sapiens
  CDR3 for beta chain variable domain of TCR clone 389515 (TRBV7-2, TRBJ2-7)
CASRSQGAAYEQYF

SEQ ID NO: 779031 - protein, 16 aa, Homo sapiens
  CDR3 for alpha chain variable domain of TCR clone 389516 (TRAV26-2, TRAJ45)
CTTASPIGGGADGLTF

SEQ ID NO: 779032 - protein, 17 aa, Homo sapiens
  CDR3 for beta chain variable domain of TCR clone 389516 (TRBV7-3, TRBJ2-2)
CASSLSGTSGGTGELFF

SEQ ID NO: 779033 - protein, 13 aa, Homo sapiens
  CDR3 for alpha chain variable domain of TCR clone 389517 (TRAV23/DV6, TRAJ12)
CAPRVDSSYKLIF

SEQ ID NO: 779034 - protein, 14 aa, Homo sapiens
  CDR3 for beta chain variable domain of TCR clone 389517 (TRBV11-2, TRBJ1-3)
CASSPRTGGNTIYF

SEQ ID NO: 779035 - protein, 13 aa, Homo sapiens
  CDR3 for alpha chain variable domain of TCR clone 389518 (TRAV13-2, TRAJ48)
CAEMDFGNEKLTF

SEQ ID NO: 779036 - protein, 16 aa, Homo sapiens
  CDR3 for beta chain variable domain of TCR clone 389518 (TRBV10-3, TRBJ2-1)
CAISGVGDGGGGEQFF

SEQ ID NO: 779037 - protein, 13 aa, Homo sapiens
  CDR3 for alpha chain variable domain of TCR clone 389519 (TRAV35, TRAJ42)
CAGFPGSQGNLIF

SEQ ID NO: 779038 - protein, 17 aa, Homo sapiens
  CDR3 for beta chain variable domain of TCR clone 389519 (TRBV7-3, TRBJ2-3)
CASSLMKRMRGADTQYF

SEQ ID NO: 779039 - protein, 15 aa, Homo sapiens
  CDR3 for alpha chain variable domain of TCR clone 389520 (TRAV21, TRAJ33)
CAVRGLMDSNYQLIW

SEQ ID NO: 779040 - protein, 14 aa, Homo sapiens
  CDR3 for beta chain variable domain of TCR clone 389520 (TRBV19, TRBJ2-1)
CASPTFVLSGEQFF

SEQ ID NO: 779041 - protein, 14 aa, Homo sapiens
  CDR3 for alpha chain variable domain of TCR clone 389521 (TRAV12-3, TRAJ10)
SHLPLTGGGNKLTF

SEQ ID NO: 779042 - protein, 15 aa, Homo sapiens
  CDR3 for beta chain variable domain of TCR clone 389521 (TRBV25-1, TRBJ1-4)
CASSKRIATNEKLFF

SEQ ID NO: 779043 - protein, 16 aa, Homo sapiens
  CDR3 for alpha chain variable domain of TCR clone 389522 (TRAV1-1, TRAJ31)
CLLLLRCEANNARLMF

SEQ ID NO: 779044 - protein, 13 aa, Homo sapiens
  CDR3 for beta chain variable domain of TCR clone 389522 (TRBV19, TRBJ1-5)
CASSGGRKQTQHF

SEQ ID NO: 779045 - protein, 14 aa, Homo sapiens
  CDR3 for alpha chain variable domain of TCR clone 389523 (TRAV2, TRAJ22)
CAVGRGGSARQLTF

SEQ ID NO: 779046 - protein, 12 aa, Homo sapiens
  CDR3 for beta chain variable domain of TCR clone 389523 (TRBV19, TRBJ2-1)
CASSMQATEQFF

SEQ ID NO: 779047 - protein, 14 aa, Homo sapiens
  CDR3 for alpha chain variable domain of TCR clone 389524 (TRAV38-1, TRAJ54)
CAFMSPSGAQKLIF

SEQ ID NO: 779048 - protein, 16 aa, Homo sapiens
  CDR3 for beta chain variable domain of TCR clone 389524 (TRBV28, TRBJ2-1)
CASSLGGSGSYNEQFF

SEQ ID NO: 779049 - protein, 16 aa, Homo sapiens
  CDR3 for alpha chain variable domain of TCR clone 389525 (TRAV3, TRAJ10)
CAVRDMRAGGGNKLTF

SEQ ID NO: 779050 - protein, 13 aa, Homo sapiens
  CDR3 for beta chain variable domain of TCR clone 389525 (TRBV7-9, TRBJ1-2)
CASGLKQNYGYTF

SEQ ID NO: 779051 - protein, 17 aa, Homo sapiens
  CDR3 for alpha chain variable domain of TCR clone 389526 (TRAV38-1, TRAJ28)
CAFMKPTSGAGSYQLTF

SEQ ID NO: 779052 - protein, 13 aa, Homo sapiens
  CDR3 for beta chain variable domain of TCR clone 389526 (TRBV20-1, TRBJ1-1)
CSARGGGNTEAFF

SEQ ID NO: 779053 - protein, 16 aa, Homo sapiens
  CDR3 for alpha chain variable domain of TCR clone 389527 (TRAV12-3, TRAJ53)
CAMSPGSGGSNYKLNF

SEQ ID NO: 779054 - protein, 13 aa, Homo sapiens
  CDR3 for beta chain variable domain of TCR clone 389527 (TRBV7-3, TRBJ1-1)
CASSQDWGAEAFF

SEQ ID NO: 779055 - protein, 15 aa, Homo sapiens
  CDR3 for alpha chain variable domain of TCR clone 389528 (TRAV21, TRAJ24)
CAARSSTDSWGKLQF

SEQ ID NO: 779056 - protein, 14 aa, Homo sapiens
  CDR3 for beta chain variable domain of TCR clone 389528 (TRBV11-2, TRBJ2-5)
CASSRKGGIETQYF

SEQ ID NO: 779057 - protein, 11 aa, Homo sapiens
  CDR3 for alpha chain variable domain of TCR clone 389529 (TRAV2, TRAJ13)
CASGGYQKVTF

SEQ ID NO: 779058 - protein, 14 aa, Homo sapiens
  CDR3 for beta chain variable domain of TCR clone 389529 (TRBV12-4, TRBJ1-6)
CASRPDGYNSPLHF

SEQ ID NO: 779059 - protein, 12 aa, Homo sapiens
  CDR3 for alpha chain variable domain of TCR clone 389530 (TRAV20, TRAJ33)
CAVRGSNYQLIW

SEQ ID NO: 779060 - protein, 15 aa, Homo sapiens
  CDR3 for beta chain variable domain of TCR clone 389530 (TRBV11-3, TRBJ2-3)
CASLKDGREGDTQHF

SEQ ID NO: 779061 - protein, 13 aa, Homo sapiens
  CDR3 for alpha chain variable domain of TCR clone 389531 (TRAV12-3, TRAJ54)
CAMFAQGAQKLVF

SEQ ID NO: 779062 - protein, 16 aa, Homo sapiens
  CDR3 for beta chain variable domain of TCR clone 389531 (TRBV7-6, TRBJ2-3)
CASSPRRGGLGDTQYF

SEQ ID NO: 779063 - protein, 14 aa, Homo sapiens
  CDR3 for alpha chain variable domain of TCR clone 389532 (TRAV12-3, TRAJ43)
CAMSLGGAGTRLTV

SEQ ID NO: 779064 - protein, 15 aa, Homo sapiens
  CDR3 for beta chain variable domain of TCR clone 389532 (TRBV6-6, TRBJ2-7)
CASSYSHGGSYEQYF

SEQ ID NO: 779065 - protein, 14 aa, Homo sapiens
  CDR3 for alpha chain variable domain of TCR clone 389533 (TRAV1-2, TRAJ16)
CAVNRFSDGQKLLF

SEQ ID NO: 779066 - protein, 12 aa, Homo sapiens
  CDR3 for beta chain variable domain of TCR clone 389533 (TRBV11-2, TRBJ2-2)
CTSSLPTGELFF

SEQ ID NO: 779067 - protein, 13 aa, Homo sapiens
  CDR3 for alpha chain variable domain of TCR clone 389534 (TRAV35, TRAJ26)
CAGRDNYGQNFVF

SEQ ID NO: 779068 - protein, 11 aa, Homo sapiens
  CDR3 for beta chain variable domain of TCR clone 389534 (TRBV7-3, TRBJ1-2)
CASSLGDGYTF

SEQ ID NO: 779069 - protein, 13 aa, Homo sapiens
  CDR3 for alpha chain variable domain of TCR clone 389535 (TRAV21, TRAJ27)
CAARPGNAGKSTF

SEQ ID NO: 779070 - protein, 14 aa, Homo sapiens
  CDR3 for beta chain variable domain of TCR clone 389535 (TRBV7-6, TRBJ2-3)
AASSLGTVTDTQYF

SEQ ID NO: 779071 - protein, 13 aa, Homo sapiens
  CDR3 for alpha chain variable domain of TCR clone 389536 (TRAV12-3, TRAJ7)
CAMSASGNNRLAF

SEQ ID NO: 779072 - protein, 14 aa, Homo sapiens
  CDR3 for beta chain variable domain of TCR clone 389536 (TRBV13, TRBJ2-5)
CASSLGPRGETRYF

SEQ ID NO: 779073 - protein, 14 aa, Homo sapiens
  CDR3 for alpha chain variable domain of TCR clone 389537 (TRAV3, TRAJ21)
CAVESQANFNKFYF

SEQ ID NO: 779074 - protein, 13 aa, Homo sapiens
  CDR3 for beta chain variable domain of TCR clone 389537 (TRBV10-3, TRBJ2-7)
CASTLAVNYEQYF

SEQ ID NO: 779075 - protein, 15 aa, Homo sapiens
  CDR3 for alpha chain variable domain of TCR clone 389538 (TRAV12-3, TRAJ47)
CAMSALVEYGNKLVF

SEQ ID NO: 779076 - protein, 14 aa, Homo sapiens
  CDR3 for beta chain variable domain of TCR clone 389538 (TRBV11-2, TRBJ2-7)
CASSLGAGAYEQYF

SEQ ID NO: 779077 - protein, 13 aa, Homo sapiens
  CDR3 for alpha chain variable domain of TCR clone 389539 (TRAV3, TRAJ27)
CAVRPLGAGNSPF

SEQ ID NO: 779078 - protein, 13 aa, Homo sapiens
  CDR3 for beta chain variable domain of TCR clone 389539 (TRBV7-9, TRBJ2-3)
CASSPGSTDTQYF

SEQ ID NO: 779079 - protein, 11 aa, Homo sapiens
  CDR3 for alpha chain variable domain of TCR clone 389540 (TRAV12-3, TRAJ43)
CAIYNNNDMRF

SEQ ID NO: 779080 - protein, 15 aa, Homo sapiens
  CDR3 for beta chain variable domain of TCR clone 389540 (TRBV15, TRBJ2-2)
CATSSRESGTGELFF

SEQ ID NO: 779081 - protein, 16 aa, Homo sapiens
  CDR3 for alpha chain variable domain of TCR clone 389541 (TRAV3, TRAJ37)
CAVRPHGSGNTGKLIF

SEQ ID NO: 779082 - protein, 15 aa, Homo sapiens
  CDR3 for beta chain variable domain of TCR clone 389541 (TRBV5-1, TRBJ2-7)
CASSPQGRPLDEQYF

SEQ ID NO: 779083 - protein, 12 aa, Homo sapiens
  CDR3 for alpha chain variable domain of TCR clone 389542 (TRAV12-1, TRAJ33)
CVVIGSNYQLIW

SEQ ID NO: 779084 - protein, 16 aa, Homo sapiens
  CDR3 for beta chain variable domain of TCR clone 389542 (TRBV10-3, TRBJ2-1)
CAISGVGDGGGGEQFF

SEQ ID NO: 779085 - protein, 17 aa, Homo sapiens
  CDR3 for alpha chain variable domain of TCR clone 389543 (TRAV3, TRAJ6)
CAVRDGPMAGGSYIPTF

SEQ ID NO: 779086 - protein, 14 aa, Homo sapiens
  CDR3 for beta chain variable domain of TCR clone 389543 (TRBV7-3, TRBJ2-1)
CASSTSGGWDEQFF

SEQ ID NO: 779087 - protein, 14 aa, Homo sapiens
  CDR3 for alpha chain variable domain of TCR clone 389544 (TRAV8-4, TRAJ4)
CAVSPSGGYNKLFF

SEQ ID NO: 779088 - protein, 15 aa, Homo sapiens
  CDR3 for beta chain variable domain of TCR clone 389544 (TRBV7-8, TRBJ2-3)
CASSLSADSGGAQYF

SEQ ID NO: 779089 - protein, 11 aa, Homo sapiens
  CDR3 for alpha chain variable domain of TCR clone 389545 (TRAV21, TRAJ34)
CAVTNTDRLIF

SEQ ID NO: 779090 - protein, 16 aa, Homo sapiens
  CDR3 for beta chain variable domain of TCR clone 389545 (TRBV15, TRBJ1-2)
CATSRGPRTGGGGYTF

SEQ ID NO: 779091 - protein, 14 aa, Homo sapiens
  CDR3 for alpha chain variable domain of TCR clone 389546 (TRAV1-2, TRAJ16)
CAVNRFSDGQKLLF

SEQ ID NO: 779092 - protein, 12 aa, Homo sapiens
  CDR3 for beta chain variable domain of TCR clone 389546 (TRBV19, TRBJ1-5)
CASKDGDQSQHF

SEQ ID NO: 779093 - protein, 17 aa, Homo sapiens
  CDR3 for alpha chain variable domain of TCR clone 389547 (TRAV3, TRAJ38)
CAVRDCLNAGNNRKLLW

SEQ ID NO: 779094 - protein, 13 aa, Homo sapiens
  CDR3 for beta chain variable domain of TCR clone 389547 (TRBV7-3, TRBJ1-1)
CASSQDWGAEAFF

SEQ ID NO: 779095 - protein, 14 aa, Homo sapiens
  CDR3 for alpha chain variable domain of TCR clone 389548 (TRAV17, TRAJ39)
CATDPVRAGNMLTF

SEQ ID NO: 779096 - protein, 10 aa, Homo sapiens
  CDR3 for beta chain variable domain of TCR clone 389548 (TRBV19, TRBJ1-2)
CASSVPDRMA

SEQ ID NO: 779097 - protein, 15 aa, Homo sapiens
  CDR3 for alpha chain variable domain of TCR clone 389549 (TRAV21, TRAJ52)
CAVRGGGTSYGKLTF

SEQ ID NO: 779098 - protein, 13 aa, Homo sapiens
  CDR3 for beta chain variable domain of TCR clone 389549 (TRBV7-3, TRBJ1-1)
CASSQDWGAEAFF

SEQ ID NO: 779099 - protein, 17 aa, Homo sapiens
  CDR3 for alpha chain variable domain of TCR clone 389550 (TRAV3, TRAJ6)
CAVRDGPRAGGSYIATF

SEQ ID NO: 779100 - protein, 13 aa, Homo sapiens
  CDR3 for beta chain variable domain of TCR clone 389550 (TRBV24-1, TRBJ2-2)
CATSDWSTGELFF

SEQ ID NO: 779101 - protein, 14 aa, Homo sapiens
  CDR3 for alpha chain variable domain of TCR clone 389551 (TRAV16, TRAJ17)
CAPRIKAAGNKLNF

SEQ ID NO: 779102 - protein, 17 aa, Homo sapiens
  CDR3 for beta chain variable domain of TCR clone 389551 (TRBV7-2, TRBJ2-3)
CASSSYSGTRRADTQYF

SEQ ID NO: 779103 - protein, 12 aa, Homo sapiens
  CDR3 for alpha chain variable domain of TCR clone 389552 (TRAV26-1, TRAJ36)
CIVRVRADNLFF

SEQ ID NO: 779104 - protein, 12 aa, Homo sapiens
  CDR3 for beta chain variable domain of TCR clone 389552 (TRBV5-7, TRBJ1-1)
CASSLGRGKAFF

SEQ ID NO: 779105 - protein, 17 aa, Homo sapiens
  CDR3 for alpha chain variable domain of TCR clone 389553 (TRAV3, TRAJ12)
CAVRDGGRMDSSYKLIF

SEQ ID NO: 779106 - protein, 15 aa, Homo sapiens
  CDR3 for beta chain variable domain of TCR clone 389553 (TRBV15, TRBJ2-3)
CATSGAGFGTDTQYF

SEQ ID NO: 779107 - protein, 15 aa, Homo sapiens
  CDR3 for alpha chain variable domain of TCR clone 389554 (TRAV12-1, TRAJ9)
CVMSFGDTGGFKTIF

SEQ ID NO: 779108 - protein, 13 aa, Homo sapiens
  CDR3 for beta chain variable domain of TCR clone 389554 (TRBV2, TRBJ1-4)
CASSERAGEKLFF

SEQ ID NO: 779109 - protein, 13 aa, Homo sapiens
  CDR3 for alpha chain variable domain of TCR clone 389555 (TRAV12-1, TRAJ3)
CVVNPRGASKIIF

SEQ ID NO: 779110 - protein, 13 aa, Homo sapiens
  CDR3 for beta chain variable domain of TCR clone 389555 (TRBV28, TRBJ1-5)
CASSDRGNQPQQF

SEQ ID NO: 779111 - protein, 13 aa, Homo sapiens
  CDR3 for alpha chain variable domain of TCR clone 389556 (TRAV8-3, TRAJ44)
CAVVPGTASKLTF

SEQ ID NO: 779112 - protein, 13 aa, Homo sapiens
  CDR3 for beta chain variable domain of TCR clone 389556 (TRBV7-9, TRBJ1-2)
CASILKQNYGYTF

SEQ ID NO: 779113 - protein, 13 aa, Homo sapiens
  CDR3 for alpha chain variable domain of TCR clone 389557 (TRAV21, TRAJ20)
CAVGLRVDYKPSF

SEQ ID NO: 779114 - protein, 16 aa, Homo sapiens
  CDR3 for beta chain variable domain of TCR clone 389557 (TRBV2, TRBJ2-1)
CASSVGGSLSYNEQFF

SEQ ID NO: 779115 - protein, 13 aa, Homo sapiens
  CDR3 for alpha chain variable domain of TCR clone 389558 (TRAV35, TRAJ57)
CWSPQGGSEKLVF

SEQ ID NO: 779116 - protein, 15 aa, Homo sapiens
  CDR3 for beta chain variable domain of TCR clone 389558 (TRBV10-3, TRBJ2-1)
CAIRNGTSGHNEQFF

SEQ ID NO: 779117 - protein, 14 aa, Homo sapiens
  CDR3 for alpha chain variable domain of TCR clone 389559 (TRAV8-6, TRAJ29)
CAVSRASGNTPLVF

SEQ ID NO: 779118 - protein, 13 aa, Homo sapiens
  CDR3 for beta chain variable domain of TCR clone 389559 (TRBV19, TRBJ1-5)
CASSEGSNQTQHC

SEQ ID NO: 779119 - protein, 14 aa, Homo sapiens
  CDR3 for alpha chain variable domain of TCR clone 389560 (TRAV2, TRAJ9)
CAVEDRSGGFKTIF

SEQ ID NO: 779120 - protein, 17 aa, Homo sapiens
  CDR3 for beta chain variable domain of TCR clone 389560 (TRBV4-1, TRBJ2-7)
CASSRDPLGVRGGERYF

SEQ ID NO: 779121 - protein, 14 aa, Homo sapiens
  CDR3 for alpha chain variable domain of TCR clone 389561 (TRAV1-2, TRAJ16)
CAVNRFSDGQKLLF

SEQ ID NO: 779122 - protein, 17 aa, Homo sapiens
  CDR3 for beta chain variable domain of TCR clone 389561 (TRBV20-1, TRBJ2-1)
CSASSSGLAGSYKEQFF

SEQ ID NO: 779123 - protein, 13 aa, Homo sapiens
  CDR3 for alpha chain variable domain of TCR clone 389562 (TRAV36/DV7, TRAJ37)
RAVFSSNTGKLIF

SEQ ID NO: 779124 - protein, 16 aa, Homo sapiens
  CDR3 for beta chain variable domain of TCR clone 389562 (TRBV3-1, TRBJ2-5)
CASSPGQFNGFGTQYF

SEQ ID NO: 779125 - protein, 13 aa, Homo sapiens
  CDR3 for alpha chain variable domain of TCR clone 389563 (TRAV21, TRAJ27)
CAARPGNAGKSTF

SEQ ID NO: 779126 - protein, 15 aa, Homo sapiens
  CDR3 for beta chain variable domain of TCR clone 389563 (TRBV15, TRBJ1-1)
CATSLQGGRNTEAFF

SEQ ID NO: 779127 - protein, 16 aa, Homo sapiens
  CDR3 for alpha chain variable domain of TCR clone 389564 (TRAV21, TRAJ37)
CAVRPRGSSNTGKLIF

SEQ ID NO: 779128 - protein, 13 aa, Homo sapiens
  CDR3 for beta chain variable domain of TCR clone 389564 (TRBV7-9, TRBJ2-5)
CASLSPGQETEYF

SEQ ID NO: 779129 - protein, 10 aa, Homo sapiens
  CDR3 for alpha chain variable domain of TCR clone 389565 (TRAV21, TRAJ17)
CAVTGNKLTF

SEQ ID NO: 779130 - protein, 16 aa, Homo sapiens
  CDR3 for beta chain variable domain of TCR clone 389565 (TRBV2, TRBJ2-1)
CASSANPRDWQAEQFF

SEQ ID NO: 779131 - protein, 19 aa, Homo sapiens
  CDR3 for alpha chain variable domain of TCR clone 389566 (TRAV12-1, TRAJ45)
CVVTHDVGYSGGGADGLTF

SEQ ID NO: 779132 - protein, 14 aa, Homo sapiens
  CDR3 for beta chain variable domain of TCR clone 389566 (TRBV11-3, TRBJ2-1)
CASSATTSGSIQFF

SEQ ID NO: 779133 - protein, 15 aa, Homo sapiens
  CDR3 for alpha chain variable domain of TCR clone 389567 (TRAV12-1, TRAJ36)
CVVNEHQTGANNLFF

SEQ ID NO: 779134 - protein, 12 aa, Homo sapiens
  CDR3 for beta chain variable domain of TCR clone 389567 (TRBV29-1, TRBJ2-3)
CSVTGGSDTQYF

SEQ ID NO: 779135 - protein, 10 aa, Homo sapiens
  CDR3 for alpha chain variable domain of TCR clone 389568 (TRAV23/DV6, TRAJ43)
CAAAVAALEQ

SEQ ID NO: 779136 - protein, 13 aa, Homo sapiens
  CDR3 for beta chain variable domain of TCR clone 389568 (TRBV4-1, TRBJ2-3)
CASSLDFTDTQYF

SEQ ID NO: 779137 - protein, 14 aa, Homo sapiens
  CDR3 for alpha chain variable domain of TCR clone 389569 (TRAV12-2, TRAJ24)
CAVTPADSWGKLQF

SEQ ID NO: 779138 - protein, 16 aa, Homo sapiens
  CDR3 for beta chain variable domain of TCR clone 389569 (TRBV7-9, TRBJ1-2)
CASSLGFSSGEDGYTF

SEQ ID NO: 779139 - protein, 14 aa, Homo sapiens
  CDR3 for alpha chain variable domain of TCR clone 389570 (TRAV12-2, TRAJ13)
CAVKKTVGYQKVTF

SEQ ID NO: 779140 - protein, 16 aa, Homo sapiens
  CDR3 for beta chain variable domain of TCR clone 389570 (TRBV12-5, TRBJ2-5)
CASGPRTSGNQETQYF

SEQ ID NO: 779141 - protein, 15 aa, Homo sapiens
  CDR3 for alpha chain variable domain of TCR clone 389571 (TRAV8-4, TRAJ3)
CAVTGENLVQQCFQD

SEQ ID NO: 779142 - protein, 15 aa, Homo sapiens
  CDR3 for beta chain variable domain of TCR clone 389571 (TRBV4-2, TRBJ1-1)
CSSQAGFGMNTEAFF

SEQ ID NO: 779143 - protein, 14 aa, Homo sapiens
  CDR3 for alpha chain variable domain of TCR clone 389572 (TRAV38-1, TRAJ45)
CAYYSGGGADGLTF

SEQ ID NO: 779144 - protein, 20 aa, Homo sapiens
  CDR3 for beta chain variable domain of TCR clone 389572 (TRBV28, TRBJ2-1)
WASTPIGRSPGRAGGNEQFF

SEQ ID NO: 779145 - protein, 15 aa, Homo sapiens
  CDR3 for alpha chain variable domain of TCR clone 389573 (TRAV8-2, TRAJ15)
CVVTMGNQAGAALIF

SEQ ID NO: 779146 - protein, 17 aa, Homo sapiens
  CDR3 for beta chain variable domain of TCR clone 389573 (TRBV5-4, TRBJ2-1)
CASSSAGGRGPYNEQFF

SEQ ID NO: 779147 - protein, 17 aa, Homo sapiens
  CDR3 for alpha chain variable domain of TCR clone 389574 (TRAV16, TRAJ58)
CITVLSNGETSGSRLTF

SEQ ID NO: 779148 - protein, 17 aa, Homo sapiens
  CDR3 for beta chain variable domain of TCR clone 389574 (TRBV18, TRBJ2-1)
CASSKGLSGGADNDQFF

SEQ ID NO: 779149 - protein, 12 aa, Homo sapiens
  CDR3 for alpha chain variable domain of TCR clone 389575 (TRAV27, )
CAGALKLATTIA

SEQ ID NO: 779150 - protein, 14 aa, Homo sapiens
  CDR3 for beta chain variable domain of TCR clone 389575 (TRBV2, TRBJ2-1)
CASRTGSSYNEQFF

SEQ ID NO: 779151 - protein, 14 aa, Homo sapiens
  CDR3 for alpha chain variable domain of TCR clone 389576 (TRAV1-2, TRAJ8)
CAVREDTGFQKLEF

SEQ ID NO: 779152 - protein, 13 aa, Homo sapiens
  CDR3 for beta chain variable domain of TCR clone 389576 (TRBV12-4, TRBJ1-2)
CASSSGLTVISTF

SEQ ID NO: 779153 - protein, 13 aa, Homo sapiens
  CDR3 for alpha chain variable domain of TCR clone 389577 (TRAV35, TRAJ36)
CAGPRIGANNLFF

SEQ ID NO: 779154 - protein, 15 aa, Homo sapiens
  CDR3 for beta chain variable domain of TCR clone 389577 (TRBV28, TRBJ2-5)
CASSPPWSSQETQYF

SEQ ID NO: 779155 - protein, 13 aa, Homo sapiens
  CDR3 for alpha chain variable domain of TCR clone 389578 (TRAV20, TRAJ42)
CAVQGGSQGKLIF

SEQ ID NO: 779156 - protein, 15 aa, Homo sapiens
  CDR3 for beta chain variable domain of TCR clone 389578 (TRBV10-1, TRBJ2-1)
CASSEWRGTYNEQFF

SEQ ID NO: 779157 - protein, 14 aa, Homo sapiens
  CDR3 for alpha chain variable domain of TCR clone 389579 (TRAV8-2, TRAJ17)
CAVGEGAAGNKLTF

SEQ ID NO: 779158 - protein, 13 aa, Homo sapiens
  CDR3 for beta chain variable domain of TCR clone 389579 (TRBV19, TRBJ2-1)
CASSMYRVNEQFF

SEQ ID NO: 779159 - protein, 13 aa, Homo sapiens
  CDR3 for alpha chain variable domain of TCR clone 389580 (TRAV13-1, TRAJ5)
CAAEHTGRRALTF

SEQ ID NO: 779160 - protein, 17 aa, Homo sapiens
  CDR3 for beta chain variable domain of TCR clone 389580 (TRBV11-3, TRBJ2-5)
CASSLPGVRGGKETQHF

SEQ ID NO: 779161 - protein, 17 aa, Homo sapiens
  CDR3 for alpha chain variable domain of TCR clone 389581 (TRAV3, TRAJ6)
CAVRDGPRAGGSYIPTF

SEQ ID NO: 779162 - protein, 17 aa, Homo sapiens
  CDR3 for beta chain variable domain of TCR clone 389581 (TRBV5-1, TRBJ2-5)
CASSLLGLAANQETQYF

SEQ ID NO: 779163 - protein, 14 aa, Homo sapiens
  CDR3 for alpha chain variable domain of TCR clone 389582 (TRAV12-2, TRAJ15)
CAPHTGQAGTALIL

SEQ ID NO: 779164 - protein, 17 aa, Homo sapiens
  CDR3 for beta chain variable domain of TCR clone 389582 (TRBV5-5, TRBJ1-2)
CASSLWSLDGQSEGYTF

SEQ ID NO: 779165 - protein, 14 aa, Homo sapiens
  CDR3 for alpha chain variable domain of TCR clone 389583 (TRAV17, TRAJ57)
CATDPQGGSEKLVF

SEQ ID NO: 779166 - protein, 14 aa, Homo sapiens
  CDR3 for beta chain variable domain of TCR clone 389583 (TRBV13, TRBJ2-7)
GASSLKGASYEQYF

SEQ ID NO: 779167 - protein, 19 aa, Homo sapiens
  CDR3 for alpha chain variable domain of TCR clone 389584 (TRAV1-2, TRAJ26)
CLLPLCCERPDNYGQYFVF

SEQ ID NO: 779168 - protein, 17 aa, Homo sapiens
  CDR3 for beta chain variable domain of TCR clone 389584 (TRBV28, TRBJ2-5)
CASSRQGGLAGAETQYF

SEQ ID NO: 779169 - protein, 12 aa, Homo sapiens
  CDR3 for alpha chain variable domain of TCR clone 389585 (TRAV17, TRAJ20)
RATDRYDYKLSF

SEQ ID NO: 779170 - protein, 14 aa, Homo sapiens
  CDR3 for beta chain variable domain of TCR clone 389585 (TRBV19, TRBJ2-1)
CASPTFVLSGEQFF

SEQ ID NO: 779171 - protein, 19 aa, Homo sapiens
  CDR3 for alpha chain variable domain of TCR clone 389586 (TRAV2, TRAJ20)
ILQVREADAAVYRDCKLSF

SEQ ID NO: 779172 - protein, 17 aa, Homo sapiens
  CDR3 for beta chain variable domain of TCR clone 389586 (TRBV20-1, TRBJ2-2)
CSASGSGQGGLTEELFF

SEQ ID NO: 779173 - protein, 16 aa, Homo sapiens
  CDR3 for alpha chain variable domain of TCR clone 389587 (TRAV12-2, TRAJ18)
CAVTTDRGSTLGRLYF

SEQ ID NO: 779174 - protein, 13 aa, Homo sapiens
  CDR3 for beta chain variable domain of TCR clone 389587 (TRBV19, TRBJ2-3)
CATWDKTTDTQYF

SEQ ID NO: 779175 - protein, 17 aa, Homo sapiens
  CDR3 for alpha chain variable domain of TCR clone 389588 (TRAV3, TRAJ42)
CAVRDRDYGGSQGNLIF

SEQ ID NO: 779176 - protein, 13 aa, Homo sapiens
  CDR3 for beta chain variable domain of TCR clone 389588 (TRBV10-3, TRBJ2-7)
CASKRAVNYEQYF

SEQ ID NO: 779177 - protein, 13 aa, Homo sapiens
  CDR3 for alpha chain variable domain of TCR clone 389589 (TRAV27, TRAJ49)
CAPRPYTGNRFYF

SEQ ID NO: 779178 - protein, 13 aa, Homo sapiens
  CDR3 for beta chain variable domain of TCR clone 389589 (TRBV20-1, TRBJ1-1)
CSAPLGGGTEAFF

SEQ ID NO: 779179 - protein, 14 aa, Homo sapiens
  CDR3 for alpha chain variable domain of TCR clone 389590 (TRAV4, TRAJ6)
CLGPASGGSDIPTF

SEQ ID NO: 779180 - protein, 12 aa, Homo sapiens
  CDR3 for beta chain variable domain of TCR clone 389590 (TRBV6-5, TRBJ2-3)
CASSPSTDTQYF

SEQ ID NO: 779181 - protein, 13 aa, Homo sapiens
  CDR3 for alpha chain variable domain of TCR clone 389591 (TRAV12-2, TRAJ39)
CAVNNNASNMLTF

SEQ ID NO: 779182 - protein, 13 aa, Homo sapiens
  CDR3 for beta chain variable domain of TCR clone 389591 (TRBV2, TRBJ1-5)
CATAGPGNQPQHF

SEQ ID NO: 779183 - protein, 13 aa, Homo sapiens
  CDR3 for alpha chain variable domain of TCR clone 389592 (TRAV23/DV6, TRAJ24)
CAASTDSWGKFQF

SEQ ID NO: 779184 - protein, 14 aa, Homo sapiens
  CDR3 for beta chain variable domain of TCR clone 389592 (TRBV13, TRBJ2-5)
CASSLERVGETQYF

SEQ ID NO: 779185 - protein, 15 aa, Homo sapiens
  CDR3 for alpha chain variable domain of TCR clone 389593 (TRAV8-3, TRAJ27)
CAVGPSKTNAGNSTF

SEQ ID NO: 779186 - protein, 15 aa, Homo sapiens
  CDR3 for beta chain variable domain of TCR clone 389593 (TRBV27, TRBJ2-1)
CASSNGGGSSNEQFF

SEQ ID NO: 779187 - protein, 13 aa, Homo sapiens
  CDR3 for alpha chain variable domain of TCR clone 389594 (TRAV13-2, TRAJ13)
CAERPGGYQKVTF

SEQ ID NO: 779188 - protein, 15 aa, Homo sapiens
  CDR3 for beta chain variable domain of TCR clone 389594 (TRBV11-3, TRBJ2-7)
CANSPGPASSYEQYS

SEQ ID NO: 779189 - protein, 11 aa, Homo sapiens
  CDR3 for alpha chain variable domain of TCR clone 389595 (TRAV17, TRAJ31)
CATDQTARLMF

SEQ ID NO: 779190 - protein, 15 aa, Homo sapiens
  CDR3 for beta chain variable domain of TCR clone 389595 (TRBV5-1, TRBJ2-2)
CASSSQGGNTGELFF

SEQ ID NO: 779191 - protein, 15 aa, Homo sapiens
  CDR3 for alpha chain variable domain of TCR clone 389596 (TRAV12-1, TRAJ38)
CVVNHHAGNNRKLIW

SEQ ID NO: 779192 - protein, 15 aa, Homo sapiens
  CDR3 for beta chain variable domain of TCR clone 389596 (TRBV5-1, TRBJ2-1)
CASSPPRAPYNEQFF

SEQ ID NO: 779193 - protein, 11 aa, Homo sapiens
  CDR3 for alpha chain variable domain of TCR clone 389597 (TRAV3, TRAJ21)
CAVGNFNKFYF

SEQ ID NO: 779194 - protein, 17 aa, Homo sapiens
  CDR3 for beta chain variable domain of TCR clone 389597 (TRBV25-1, TRBJ2-5)
CASSRRGGRGGQETQYF

SEQ ID NO: 779195 - protein, 13 aa, Homo sapiens
  CDR3 for alpha chain variable domain of TCR clone 389598 (TRAV21, TRAJ20)
CAVSRLGDYKLSF

SEQ ID NO: 779196 - protein, 13 aa, Homo sapiens
  CDR3 for beta chain variable domain of TCR clone 389598 (TRBV7-3, TRBJ1-1)
CASSPAGGLEDFF

SEQ ID NO: 779197 - protein, 10 aa, Homo sapiens
  CDR3 for alpha chain variable domain of TCR clone 389599 (TRAV23/DV6, TRAJ57)
CAASSTLSQG

SEQ ID NO: 779198 - protein, 14 aa, Homo sapiens
  CDR3 for beta chain variable domain of TCR clone 389599 (TRBV13, TRBJ2-5)
CASSLERVGETQYF

SEQ ID NO: 779199 - protein, 14 aa, Homo sapiens
  CDR3 for alpha chain variable domain of TCR clone 389600 (TRAV26-2, TRAJ31)
CILIPGNNNARPMF

SEQ ID NO: 779200 - protein, 13 aa, Homo sapiens
  CDR3 for beta chain variable domain of TCR clone 389600 (TRBV19, TRBJ2-7)
CASSPRQCYEQYF

SEQ ID NO: 779201 - protein, 10 aa, Homo sapiens
  CDR3 for alpha chain variable domain of TCR clone 389601 (TRAV30, TRAJ48)
CGIGNEKLTF

SEQ ID NO: 779202 - protein, 16 aa, Homo sapiens
  CDR3 for beta chain variable domain of TCR clone 389601 (TRBV2, TRBJ2-3)
CASSTSVEGVTDTQYF

SEQ ID NO: 779203 - protein, 14 aa, Homo sapiens
  CDR3 for alpha chain variable domain of TCR clone 389602 (TRAV2, TRAJ22)
CAVGRGSSARQLTF

SEQ ID NO: 779204 - protein, 12 aa, Homo sapiens
  CDR3 for beta chain variable domain of TCR clone 389602 (TRBV19, TRBJ2-1)
CASIMQDTEQFF

SEQ ID NO: 779205 - protein, 10 aa, Homo sapiens
  CDR3 for alpha chain variable domain of TCR clone 389603 (TRAV23/DV6, TRAJ57)
CAASSTLSQG

SEQ ID NO: 779206 - protein, 14 aa, Homo sapiens
  CDR3 for beta chain variable domain of TCR clone 389603 (TRBV25-1, TRBJ1-1)
CDSTHLGGNTEASF

SEQ ID NO: 779207 - protein, 12 aa, Homo sapiens
  CDR3 for alpha chain variable domain of TCR clone 389604 (TRAV8-3, TRAJ26)
CAGDNYGQNFVF

SEQ ID NO: 779208 - protein, 11 aa, Homo sapiens
  CDR3 for beta chain variable domain of TCR clone 389604 (TRBV29-1, TRBJ2-5)
WSEDRTGTQYF

SEQ ID NO: 779209 - protein, 12 aa, Homo sapiens
  CDR3 for alpha chain variable domain of TCR clone 389605 (TRAV12-2, TRAJ45)
CASGGGADGLTF

SEQ ID NO: 779210 - protein, 16 aa, Homo sapiens
  CDR3 for beta chain variable domain of TCR clone 389605 (TRBV19, TRBJ2-3)
CASSPGLLASTDTQYV

SEQ ID NO: 779211 - protein, 16 aa, Homo sapiens
  CDR3 for alpha chain variable domain of TCR clone 389606 (TRAV26-1, TRAJ45)
CIVEEYSGGGADGITF

SEQ ID NO: 779212 - protein, 15 aa, Homo sapiens
  CDR3 for beta chain variable domain of TCR clone 389606 (TRBV15, TRBJ2-7)
CHQQRPIQQAYEQYF

SEQ ID NO: 779213 - protein, 17 aa, Homo sapiens
  CDR3 for alpha chain variable domain of TCR clone 389607 (TRAV23/DV6, TRAJ57)
WAASSTLSQGGPEKLVF

SEQ ID NO: 779214 - protein, 14 aa, Homo sapiens
  CDR3 for beta chain variable domain of TCR clone 389607 (TRBV25-1, TRBJ1-1)
CASTHLGGNTEAFF

SEQ ID NO: 779215 - protein, 21 aa, Homo sapiens
  CDR3 for alpha chain variable domain of TCR clone 389608 (TRAV9-2, )
CALIQIGDIPNPDPALYQLRD

SEQ ID NO: 779216 - protein, 17 aa, Homo sapiens
  CDR3 for beta chain variable domain of TCR clone 389608 (TRBV7-8, TRBJ2-6)
CASSAGTGGAGANVLTF

SEQ ID NO: 779217 - protein, 10 aa, Homo sapiens
  CDR3 for alpha chain variable domain of TCR clone 389609 (TRAV13-1, TRAJ26)
CAPYGQNFVF

SEQ ID NO: 779218 - protein, 12 aa, Homo sapiens
  CDR3 for beta chain variable domain of TCR clone 389609 (TRBV20-1, TRBJ2-7)
CSASSGANEQYF

SEQ ID NO: 779219 - protein, 15 aa, Homo sapiens
  CDR3 for alpha chain variable domain of TCR clone 389610 (TRAV3, TRAJ47)
CAVRDIGEYGNELAF

SEQ ID NO: 779220 - protein, 14 aa, Homo sapiens
  CDR3 for beta chain variable domain of TCR clone 389610 (TRBV13, TRBJ2-5)
CASSLERVGETQYF

SEQ ID NO: 779221 - protein, 18 aa, Homo sapiens
  CDR3 for alpha chain variable domain of TCR clone 389611 (TRAV8-3, TRAJ34)
LSTSVLWSSGYNTDKLIF

SEQ ID NO: 779222 - protein, 13 aa, Homo sapiens
  CDR3 for beta chain variable domain of TCR clone 389611 (TRBV6-4, TRBJ2-3)
CASSVSWADTQYF

SEQ ID NO: 779223 - protein, 19 aa, Homo sapiens
  CDR3 for alpha chain variable domain of TCR clone 389612 (TRAV26-1, TRAJ29)
CCVLLYRQSRGIGNTPLVF

SEQ ID NO: 779224 - protein, 15 aa, Homo sapiens
  CDR3 for beta chain variable domain of TCR clone 389612 (TRBV7-9, TRBJ1-5)
CASSQGHQPNQPQHF

SEQ ID NO: 779225 - protein, 14 aa, Homo sapiens
  CDR3 for alpha chain variable domain of TCR clone 389613 (TRAV1-2, TRAJ16)
CAVNRFSDGQKLLL

SEQ ID NO: 779226 - protein, 11 aa, Homo sapiens
  CDR3 for beta chain variable domain of TCR clone 389613 (TRBV11-2, TRBJ1-1)
CASSINTEAFF

SEQ ID NO: 779227 - protein, 12 aa, Homo sapiens
  CDR3 for alpha chain variable domain of TCR clone 389614 (TRAV12-1, TRAJ40)
CVVPSGTYKYIF

SEQ ID NO: 779228 - protein, 15 aa, Homo sapiens
  CDR3 for beta chain variable domain of TCR clone 389614 (TRBV12-4, TRBJ2-1)
CASSPLSVRNNEQFF

SEQ ID NO: 779229 - protein, 10 aa, Homo sapiens
  CDR3 for alpha chain variable domain of TCR clone 389615 (TRAV12-2, TRAJ17)
FKAAGNKLTF

SEQ ID NO: 779230 - protein, 17 aa, Homo sapiens
  CDR3 for beta chain variable domain of TCR clone 389615 (TRBV20-1, TRBJ2-2)
CSASGSGQGGLTGELFF

SEQ ID NO: 779231 - protein, 12 aa, Homo sapiens
  CDR3 for alpha chain variable domain of TCR clone 389616 (TRAV8-4, TRAJ43)
RAVSVNNNDMRF

SEQ ID NO: 779232 - protein, 16 aa, Homo sapiens
  CDR3 for beta chain variable domain of TCR clone 389616 (TRBV7-2, TRBJ2-6)
CASSLAGRSGANVLTF

SEQ ID NO: 779233 - protein, 10 aa, Homo sapiens
  CDR3 for alpha chain variable domain of TCR clone 389617 (TRAV2, TRAJ15)
RGQAGTALLF

SEQ ID NO: 779234 - protein, 12 aa, Homo sapiens
  CDR3 for beta chain variable domain of TCR clone 389617 (TRBV11-2, TRBJ2-2)
CASSLGGGELFF

SEQ ID NO: 779235 - protein, 13 aa, Homo sapiens
  CDR3 for alpha chain variable domain of TCR clone 389618 (TRAV16, TRAJ28)
CAPTGAGSYQLTF

SEQ ID NO: 779236 - protein, 16 aa, Homo sapiens
  CDR3 for beta chain variable domain of TCR clone 389618 (TRBV28, TRBJ1-5)
CASSQTGQGWNQPQHF

SEQ ID NO: 779237 - protein, 13 aa, Homo sapiens
  CDR3 for alpha chain variable domain of TCR clone 389619 (TRAV8-3, TRAJ48)
CCGCNFGNEKLIF

SEQ ID NO: 779238 - protein, 12 aa, Homo sapiens
  CDR3 for beta chain variable domain of TCR clone 389619 (TRBV7-2, TRBJ2-5)
CASSQYQETQYF

SEQ ID NO: 779239 - protein, 17 aa, Homo sapiens
  CDR3 for alpha chain variable domain of TCR clone 389620 (TRAV23/DV6, TRAJ9)
CAASLSPPNTGGFKTIF

SEQ ID NO: 779240 - protein, 14 aa, Homo sapiens
  CDR3 for beta chain variable domain of TCR clone 389620 (TRBV11-2, TRBJ2-5)
CASSRTGGIETQYF

SEQ ID NO: 779241 - protein, 16 aa, Homo sapiens
  CDR3 for alpha chain variable domain of TCR clone 389621 (TRAV3, TRAJ10)
CAVRDMRAGGGNKLTF

SEQ ID NO: 779242 - protein, 16 aa, Homo sapiens
  CDR3 for beta chain variable domain of TCR clone 389621 (TRBV12-5, TRBJ2-5)
CASGPRTSGNQENQYF

SEQ ID NO: 779243 - protein, 14 aa, Homo sapiens
  CDR3 for alpha chain variable domain of TCR clone 389622 (TRAV35, TRAJ22)
CAGLRPGSARQLTF

SEQ ID NO: 779244 - protein, 17 aa, Homo sapiens
  CDR3 for beta chain variable domain of TCR clone 389622 (TRBV5-1, TRBJ2-5)
CASSPVALGQNQETQYF

SEQ ID NO: 779245 - protein, 13 aa, Homo sapiens
  CDR3 for alpha chain variable domain of TCR clone 389623 (TRAV30, TRAJ39)
CGTEKNAGNMLTF

SEQ ID NO: 779246 - protein, 12 aa, Homo sapiens
  CDR3 for beta chain variable domain of TCR clone 389623 (TRBV12-4, TRBJ2-5)
CASSSAQATQYF

SEQ ID NO: 779247 - protein, 15 aa, Homo sapiens
  CDR3 for alpha chain variable domain of TCR clone 389624 (TRAV8-3, TRAJ23)
YAVGDRYNQGGKLIF

SEQ ID NO: 779248 - protein, 17 aa, Homo sapiens
  CDR3 for beta chain variable domain of TCR clone 389624 (TRBV7-9, TRBJ1-4)
CASSSGQLGGRSEKLFF

SEQ ID NO: 779249 - protein, 16 aa, Homo sapiens
  CDR3 for alpha chain variable domain of TCR clone 389625 (TRAV12-2, TRAJ43)
CAGADMRFGAGTRLTV

SEQ ID NO: 779250 - protein, 15 aa, Homo sapiens
  CDR3 for beta chain variable domain of TCR clone 389625 (TRBV7-2, TRBJ2-1)
CASSSGLAGGNEQFF

SEQ ID NO: 779251 - protein, 16 aa, Homo sapiens
  CDR3 for alpha chain variable domain of TCR clone 389626 (TRAV8-1, TRAJ42)
CAVTSRYGGSQGNLIF

SEQ ID NO: 779252 - protein, 12 aa, Homo sapiens
  CDR3 for beta chain variable domain of TCR clone 389626 (TRBV6-3, TRBJ2-7)
CASSLGRKGLYF

SEQ ID NO: 779253 - protein, 13 aa, Homo sapiens
  CDR3 for alpha chain variable domain of TCR clone 389627 (TRAV8-6, TRAJ8)
CAFMNTGFQKLVF

SEQ ID NO: 779254 - protein, 13 aa, Homo sapiens
  CDR3 for beta chain variable domain of TCR clone 389627 (TRBV11-2, TRBJ2-1)
CASSSEAYNEQFF

SEQ ID NO: 779255 - protein, 14 aa, Homo sapiens
  CDR3 for alpha chain variable domain of TCR clone 389628 (TRAV1-2, TRAJ8)
CAVREDTGFQQLVF

SEQ ID NO: 779256 - protein, 19 aa, Homo sapiens
  CDR3 for beta chain variable domain of TCR clone 389628 (TRBV28, TRBJ2-1)
CASSFSIRGSGRTRYEQFF

SEQ ID NO: 779257 - protein, 11 aa, Homo sapiens
  CDR3 for alpha chain variable domain of TCR clone 389629 (TRAV12-3, TRAJ49)
CAANTGNQFYF

SEQ ID NO: 779258 - protein, 13 aa, Homo sapiens
  CDR3 for beta chain variable domain of TCR clone 389629 (TRBV4-2, TRBJ1-1)
CASSQAGNTEAFF

SEQ ID NO: 779259 - protein, 15 aa, Homo sapiens
  CDR3 for alpha chain variable domain of TCR clone 389630 (TRAV2, TRAJ28)
CAVPYSGAGSYQLTF

SEQ ID NO: 779260 - protein, 12 aa, Homo sapiens
  CDR3 for beta chain variable domain of TCR clone 389630 (TRBV12-4, TRBJ2-1)
CASSPGRNEQFF

SEQ ID NO: 779261 - protein, 17 aa, Homo sapiens
  CDR3 for alpha chain variable domain of TCR clone 389631 (TRAV13-1, TRAJ52)
CAASSGAGGTSYGKLTF

SEQ ID NO: 779262 - protein, 13 aa, Homo sapiens
  CDR3 for beta chain variable domain of TCR clone 389631 (TRBV7-3, TRBJ2-5)
CASSFRGGETQYF

SEQ ID NO: 779263 - protein, 16 aa, Homo sapiens
  CDR3 for alpha chain variable domain of TCR clone 389632 (TRAV13-2, TRAJ37)
CAENIRGSSNTGKIIF

SEQ ID NO: 779264 - protein, 15 aa, Homo sapiens
  CDR3 for beta chain variable domain of TCR clone 389632 (TRBV5-1, TRBJ2-7)
CASSPQGRPLDELYF

SEQ ID NO: 779265 - protein, 15 aa, Homo sapiens
  CDR3 for alpha chain variable domain of TCR clone 389633 (TRAV1-1, TRAJ20)
CAVRANVANDYKLSF

SEQ ID NO: 779266 - protein, 13 aa, Homo sapiens
  CDR3 for beta chain variable domain of TCR clone 389633 (TRBV4-1, TRBJ2-2)
CASSQENTGELFF

SEQ ID NO: 779267 - protein, 11 aa, Homo sapiens
  CDR3 for alpha chain variable domain of TCR clone 389634 (TRAV4, TRAJ31)
CLAGLNARLMV

SEQ ID NO: 779268 - protein, 16 aa, Homo sapiens
  CDR3 for beta chain variable domain of TCR clone 389634 (TRBV15, TRBJ2-6)
CATSVNGGFLANVLTF

SEQ ID NO: 779269 - protein, 15 aa, Homo sapiens
  CDR3 for alpha chain variable domain of TCR clone 389635 (TRAV27, TRAJ38)
CAARRNAGNNRKLIW

SEQ ID NO: 779270 - protein, 13 aa, Homo sapiens
  CDR3 for beta chain variable domain of TCR clone 389635 (TRBV20-1, TRBJ1-1)
CSAPLGGGTEAFF

SEQ ID NO: 779271 - protein, 12 aa, Homo sapiens
  CDR3 for alpha chain variable domain of TCR clone 389636 (TRAV12-3, TRAJ17)
CAMTLTGNKLTF

SEQ ID NO: 779272 - protein, 16 aa, Homo sapiens
  CDR3 for beta chain variable domain of TCR clone 389636 (TRBV6-3, TRBJ1-2)
CASSRELSGTPYGYTF

SEQ ID NO: 779273 - protein, 14 aa, Homo sapiens
  CDR3 for alpha chain variable domain of TCR clone 389637 (TRAV13-1, TRAJ24)
CAASPADSWGKFQF

SEQ ID NO: 779274 - protein, 13 aa, Homo sapiens
  CDR3 for beta chain variable domain of TCR clone 389637 (TRBV2, TRBJ1-1)
CARNPTGGFHAFF

SEQ ID NO: 779275 - protein, 12 aa, Homo sapiens
  CDR3 for alpha chain variable domain of TCR clone 389638 (TRAV1-1, TRAJ39)
CAVPVVGNMLTF

SEQ ID NO: 779276 - protein, 14 aa, Homo sapiens
  CDR3 for beta chain variable domain of TCR clone 389638 (TRBV6-6, TRBJ1-5)
CASVDSGFNQPQHF

SEQ ID NO: 779277 - protein, 13 aa, Homo sapiens
  CDR3 for alpha chain variable domain of TCR clone 389639 (TRAV13-2, TRAJ13)
CAERPGGYQKVTF

SEQ ID NO: 779278 - protein, 21 aa, Homo sapiens
  CDR3 for beta chain variable domain of TCR clone 389639 (TRBV18, TRBJ2-5)
CASSPPSSGGGEHPVLRARHA

SEQ ID NO: 779279 - protein, 14 aa, Homo sapiens
  CDR3 for alpha chain variable domain of TCR clone 389640 (TRAV8-1, TRAJ34)
CALPRGTTSSSLGL

SEQ ID NO: 779280 - protein, 15 aa, Homo sapiens
  CDR3 for beta chain variable domain of TCR clone 389640 (TRBV19, TRBJ2-2)
CASSPRTGWTGELFF

SEQ ID NO: 779281 - protein, 12 aa, Homo sapiens
  CDR3 for alpha chain variable domain of TCR clone 389641 (TRAV21, TRAJ33)
CAKMDSNYRLIC

SEQ ID NO: 779282 - protein, 14 aa, Homo sapiens
  CDR3 for beta chain variable domain of TCR clone 389641 (TRBV2, TRBJ2-7)
CASSLTSGGYEQYF

SEQ ID NO: 779283 - protein, 14 aa, Homo sapiens
  CDR3 for alpha chain variable domain of TCR clone 389642 (TRAV35, TRAJ33)
CAGSSQDSNYQLIW

SEQ ID NO: 779284 - protein, 16 aa, Homo sapiens
  CDR3 for beta chain variable domain of TCR clone 389642 (TRBV4-1, TRBJ2-7)
CASRPSGGGADNEQYF

SEQ ID NO: 779285 - protein, 15 aa, Homo sapiens
  CDR3 for alpha chain variable domain of TCR clone 389643 (TRAV17, TRAJ4)
CSTGTWSGGYNKLIF

SEQ ID NO: 779286 - protein, 13 aa, Homo sapiens
  CDR3 for beta chain variable domain of TCR clone 389643 (TRBV6-6, TRBJ2-7)
CASSPKHLAEQYF

SEQ ID NO: 779287 - protein, 14 aa, Homo sapiens
  CDR3 for alpha chain variable domain of TCR clone 389644 (TRAV9-2, TRAJ39)
CALYIYNAGNMLTF

SEQ ID NO: 779288 - protein, 15 aa, Homo sapiens
  CDR3 for beta chain variable domain of TCR clone 389644 (TRBV19, TRBJ1-2)
CASTLDSTGNYGYTF

SEQ ID NO: 779289 - protein, 14 aa, Homo sapiens
  CDR3 for alpha chain variable domain of TCR clone 389645 (TRAV23/DV6, TRAJ39)
CAASIGNAGNMLTF

SEQ ID NO: 779290 - protein, 12 aa, Homo sapiens
  CDR3 for beta chain variable domain of TCR clone 389645 (TRBV20-1, TRBJ2-5)
CSVLTGSETQYF

SEQ ID NO: 779291 - protein, 13 aa, Homo sapiens
  CDR3 for alpha chain variable domain of TCR clone 389646 (TRAV21, TRAJ27)
CAARPGNAGKSTF

SEQ ID NO: 779292 - protein, 17 aa, Homo sapiens
  CDR3 for beta chain variable domain of TCR clone 389646 (TRBV7-3, TRBJ2-3)
CASSPRGQGYGTDTQYF

SEQ ID NO: 779293 - protein, 12 aa, Homo sapiens
  CDR3 for alpha chain variable domain of TCR clone 389647 (TRAV1-2, TRAJ24)
CALGGSWGKFQF

SEQ ID NO: 779294 - protein, 15 aa, Homo sapiens
  CDR3 for beta chain variable domain of TCR clone 389647 (TRBV6-1, TRBJ2-7)
CASSEGVGNPYEQYF

SEQ ID NO: 779295 - protein, 13 aa, Homo sapiens
  CDR3 for alpha chain variable domain of TCR clone 389648 (TRAV29/DV5, TRAJ31)
CAASRNDNARLMF

SEQ ID NO: 779296 - protein, 13 aa, Homo sapiens
  CDR3 for beta chain variable domain of TCR clone 389648 (TRBV14, TRBJ1-1)
CASSREFGTEAFF

SEQ ID NO: 779297 - protein, 16 aa, Homo sapiens
  CDR3 for alpha chain variable domain of TCR clone 389649 (TRAV23/DV6, TRAJ9)
CAASIGGNTGGFKHIF

SEQ ID NO: 779298 - protein, 14 aa, Homo sapiens
  CDR3 for beta chain variable domain of TCR clone 389649 (TRBV19, TRBJ2-1)
CASPTFVLSGEQFF

SEQ ID NO: 779299 - protein, 14 aa, Homo sapiens
  CDR3 for alpha chain variable domain of TCR clone 389650 (TRAV12-3, TRAJ20)
CAMSARRGDYKLSC

SEQ ID NO: 779300 - protein, 14 aa, Homo sapiens
  CDR3 for beta chain variable domain of TCR clone 389650 (TRBV7-3, TRBJ2-3)
CASSPSARTDTQYF

SEQ ID NO: 779301 - protein, 16 aa, Homo sapiens
  CDR3 for alpha chain variable domain of TCR clone 389651 (TRAV8-3, TRAJ10)
CAVGPILTGGGNKLTF

SEQ ID NO: 779302 - protein, 15 aa, Homo sapiens
  CDR3 for beta chain variable domain of TCR clone 389651 (TRBV5-1, TRBJ1-1)
CASSSTTGTNTEAFF

SEQ ID NO: 779303 - protein, 15 aa, Homo sapiens
  CDR3 for alpha chain variable domain of TCR clone 389652 (TRAV4, TRAJ39)
CLVGPNNNAGNMITF

SEQ ID NO: 779304 - protein, 16 aa, Homo sapiens
  CDR3 for beta chain variable domain of TCR clone 389652 (TRBV13, TRBJ2-2)
CASSPRTGEHTGELFF

SEQ ID NO: 779305 - protein, 22 aa, Homo sapiens
  CDR3 for alpha chain variable domain of TCR clone 389653 (TRAV27, TRAJ38)
CAARRNAGNNHIQNPDPAVYQL

SEQ ID NO: 779306 - protein, 13 aa, Homo sapiens
  CDR3 for beta chain variable domain of TCR clone 389653 (TRBV12-5, TRBJ2-3)
CASGERQSDTQYF

SEQ ID NO: 779307 - protein, 13 aa, Homo sapiens
  CDR3 for alpha chain variable domain of TCR clone 389654 (TRAV38-2/DV8, TRAJ34)
CAYRTWNTDKLIF

SEQ ID NO: 779308 - protein, 13 aa, Homo sapiens
  CDR3 for beta chain variable domain of TCR clone 389654 (TRBV20-1, TRBJ2-2)
CSASAAGTGELFF

SEQ ID NO: 779309 - protein, 14 aa, Homo sapiens
  CDR3 for alpha chain variable domain of TCR clone 389655 (TRAV1-2, TRAJ16)
CAVNRFSAGQKLLF

SEQ ID NO: 779310 - protein, 14 aa, Homo sapiens
  CDR3 for beta chain variable domain of TCR clone 389655 (TRBV13, TRBJ2-5)
CASSLGREQETQYF

SEQ ID NO: 779311 - protein, 15 aa, Homo sapiens
  CDR3 for alpha chain variable domain of TCR clone 389656 (TRAV26-1, TRAJ44)
CIARVPFGTASKLTF

SEQ ID NO: 779312 - protein, 17 aa, Homo sapiens
  CDR3 for beta chain variable domain of TCR clone 389656 (TRBV24-1, TRBJ2-4)
CATSDAEARGVRNIQYV

SEQ ID NO: 779313 - protein, 16 aa, Homo sapiens
  CDR3 for alpha chain variable domain of TCR clone 389657 (TRAV21, TRAJ45)
CAVSWGSGGGADGLTF

SEQ ID NO: 779314 - protein, 14 aa, Homo sapiens
  CDR3 for beta chain variable domain of TCR clone 389657 (TRBV4-1, TRBJ2-2)
CASSQAVNTGELFF

SEQ ID NO: 779315 - protein, 12 aa, Homo sapiens
  CDR3 for alpha chain variable domain of TCR clone 389658 (TRAV20, TRAJ20)
CAVQVNDYKLSF

SEQ ID NO: 779316 - protein, 15 aa, Homo sapiens
  CDR3 for beta chain variable domain of TCR clone 389658 (TRBV5-1, TRBJ1-2)
CASSSYGEFDYGYTF

SEQ ID NO: 779317 - protein, 16 aa, Homo sapiens
  CDR3 for alpha chain variable domain of TCR clone 389659 (TRAV12-2, TRAJ32)
CAVNLAQGGATNKLIF

SEQ ID NO: 779318 - protein, 15 aa, Homo sapiens
  CDR3 for beta chain variable domain of TCR clone 389659 (TRBV20-1, TRBJ2-7)
CSARGPLAGGREQYF

SEQ ID NO: 779319 - protein, 14 aa, Homo sapiens
  CDR3 for alpha chain variable domain of TCR clone 389660 (TRAV1-2, TRAJ8)
CAVREDTGFLQLVF

SEQ ID NO: 779320 - protein, 14 aa, Homo sapiens
  CDR3 for beta chain variable domain of TCR clone 389660 (TRBV20-1, TRBJ1-1)
CSAQTRIGGTEAFF

SEQ ID NO: 779321 - protein, 12 aa, Homo sapiens
  CDR3 for alpha chain variable domain of TCR clone 389661 (TRAV12-3, TRAJ17)
CAMTLTGNKLTF

SEQ ID NO: 779322 - protein, 15 aa, Homo sapiens
  CDR3 for beta chain variable domain of TCR clone 389661 (TRBV20-1, TRBJ2-7)
CSARGWVAGMDEQYF

SEQ ID NO: 779323 - protein, 12 aa, Homo sapiens
  CDR3 for alpha chain variable domain of TCR clone 389662 (TRAV13-1, TRAJ49)
CASPNTGNQFYF

SEQ ID NO: 779324 - protein, 17 aa, Homo sapiens
  CDR3 for beta chain variable domain of TCR clone 389662 (TRBV25-1, TRBJ2-7)
CASSDARVVFSSYEQYF

SEQ ID NO: 779325 - protein, 12 aa, Homo sapiens
  CDR3 for alpha chain variable domain of TCR clone 389663 (TRAV3, TRAJ20)
CAVRDPDYKLSF

SEQ ID NO: 779326 - protein, 14 aa, Homo sapiens
  CDR3 for beta chain variable domain of TCR clone 389663 (TRBV20-1, TRBJ2-5)
CSALVPGYQETQYF

SEQ ID NO: 779327 - protein, 15 aa, Homo sapiens
  CDR3 for alpha chain variable domain of TCR clone 389664 (TRAV16, TRAJ57)
CALSGGQGGSEKLVF

SEQ ID NO: 779328 - protein, 17 aa, Homo sapiens
  CDR3 for beta chain variable domain of TCR clone 389664 (TRBV3-1, TRBJ2-2)
CASSFELGQRNTGELFF

SEQ ID NO: 779329 - protein, 13 aa, Homo sapiens
  CDR3 for alpha chain variable domain of TCR clone 389665 (TRAV12-3, TRAJ33)
CAMSVNSNYQVIW

SEQ ID NO: 779330 - protein, 12 aa, Homo sapiens
  CDR3 for beta chain variable domain of TCR clone 389665 (TRBV11-2, TRBJ2-2)
CASSLGGGELFF

SEQ ID NO: 779331 - protein, 14 aa, Homo sapiens
  CDR3 for alpha chain variable domain of TCR clone 389666 (TRAV12-2, TRAJ40)
CAVKIPSGTYKHIF

SEQ ID NO: 779332 - protein, 17 aa, Homo sapiens
  CDR3 for beta chain variable domain of TCR clone 389666 (TRBV11-2, TRBJ2-1)
CASSLYPPGVEYNEQFF

SEQ ID NO: 779333 - protein, 15 aa, Homo sapiens
  CDR3 for alpha chain variable domain of TCR clone 389667 (TRAV13-1, TRAJ45)
CAASGAGGGADGLTF

SEQ ID NO: 779334 - protein, 17 aa, Homo sapiens
  CDR3 for beta chain variable domain of TCR clone 389667 (TRBV20-1, TRBJ2-2)
CSASGSGQGGLTGELFF

SEQ ID NO: 779335 - protein, 14 aa, Homo sapiens
  CDR3 for alpha chain variable domain of TCR clone 389668 (TRAV1-2, TRAJ16)
CAVNRFSDGQKLLV

SEQ ID NO: 779336 - protein, 13 aa, Homo sapiens
  CDR3 for beta chain variable domain of TCR clone 389668 (TRBV7-3, TRBJ1-1)
CASSQDWGAEAFF

SEQ ID NO: 779337 - protein, 16 aa, Homo sapiens
  CDR3 for alpha chain variable domain of TCR clone 389669 (TRAV8-3, TRAJ13)
CAVGAYPSGGYQKVTF

SEQ ID NO: 779338 - protein, 14 aa, Homo sapiens
  CDR3 for beta chain variable domain of TCR clone 389669 (TRBV7-8, TRBJ2-3)
CASSSRDSTDTQYF

SEQ ID NO: 779339 - protein, 16 aa, Homo sapiens
  CDR3 for alpha chain variable domain of TCR clone 389670 (TRAV8-3, TRAJ13)
CAVGAYPSGGYQKVTF

SEQ ID NO: 779340 - protein, 14 aa, Homo sapiens
  CDR3 for beta chain variable domain of TCR clone 389670 (TRBV27, TRBJ2-3)
CATWTSGRPWGQYF

SEQ ID NO: 779341 - protein, 13 aa, Homo sapiens
  CDR3 for alpha chain variable domain of TCR clone 389671 (TRAV21, TRAJ27)
CAALNTYAGKSTF

SEQ ID NO: 779342 - protein, 14 aa, Homo sapiens
  CDR3 for beta chain variable domain of TCR clone 389671 (TRBV27, TRBJ1-1)
CASSLLSGLSEAFF

SEQ ID NO: 779343 - protein, 11 aa, Homo sapiens
  CDR3 for alpha chain variable domain of TCR clone 389672 (TRAV1-1, TRAJ3)
CAVRSASKIIF

SEQ ID NO: 779344 - protein, 14 aa, Homo sapiens
  CDR3 for beta chain variable domain of TCR clone 389672 (TRBV12-5, TRBJ2-5)
CASGSRTHQETQYF

SEQ ID NO: 779345 - protein, 14 aa, Homo sapiens
  CDR3 for alpha chain variable domain of TCR clone 389673 (TRAV12-2, TRAJ13)
CAVKKTGGYQKVTF

SEQ ID NO: 779346 - protein, 15 aa, Homo sapiens
  CDR3 for beta chain variable domain of TCR clone 389673 (TRBV20-1, TRBJ1-1)
CCASWDRFLNTEAFF

SEQ ID NO: 779347 - protein, 14 aa, Homo sapiens
  CDR3 for alpha chain variable domain of TCR clone 389674 (TRAV23/DV6, TRAJ24)
CAASLSDSWGKLQF

SEQ ID NO: 779348 - protein, 16 aa, Homo sapiens
  CDR3 for beta chain variable domain of TCR clone 389674 (TRBV7-9, TRBJ2-6)
CASSLKVPLRANVLTF

SEQ ID NO: 779349 - protein, 14 aa, Homo sapiens
  CDR3 for alpha chain variable domain of TCR clone 389675 (TRAV12-3, TRAJ10)
SHLPLTGGGNKLTF

SEQ ID NO: 779350 - protein, 16 aa, Homo sapiens
  CDR3 for beta chain variable domain of TCR clone 389675 (TRBV7-2, TRBJ2-6)
CASSERRASGANVLTF

SEQ ID NO: 779351 - protein, 15 aa, Homo sapiens
  CDR3 for alpha chain variable domain of TCR clone 389676 (TRAV27, TRAJ38)
CAARRNAGTNRKLIW

SEQ ID NO: 779352 - protein, 17 aa, Homo sapiens
  CDR3 for beta chain variable domain of TCR clone 389676 (TRBV13, TRBJ2-3)
CASSLSRVARGRNTHYF

SEQ ID NO: 779353 - protein, 12 aa, Homo sapiens
  CDR3 for alpha chain variable domain of TCR clone 389677 (TRAV30, TRAJ43)
CGTQERGNDMRF

SEQ ID NO: 779354 - protein, 11 aa, Homo sapiens
  CDR3 for beta chain variable domain of TCR clone 389677 (TRBV29-1, TRBJ2-5)
CSEDRTGTQYF

SEQ ID NO: 779355 - protein, 14 aa, Homo sapiens
  CDR3 for alpha chain variable domain of TCR clone 389678 (TRAV1-2, TRAJ16)
CAVNRFSDGQKLLF

SEQ ID NO: 779356 - protein, 22 aa, Homo sapiens
  CDR3 for beta chain variable domain of TCR clone 389678 (TRBV11-2, TRBJ2-2)
QSSRTRPCISVPAASLPGSCFF

SEQ ID NO: 779357 - protein, 14 aa, Homo sapiens
  CDR3 for alpha chain variable domain of TCR clone 389679 (TRAV12-2, TRAJ5)
CAVNRSTGRRALTF

SEQ ID NO: 779358 - protein, 11 aa, Homo sapiens
  CDR3 for beta chain variable domain of TCR clone 389679 (TRBV29-1, TRBJ2-5)
CSEERTGSQYF

SEQ ID NO: 779359 - protein, 11 aa, Homo sapiens
  CDR3 for alpha chain variable domain of TCR clone 389680 (TRAV12-1, TRAJ21)
CVVYNFNKFYF

SEQ ID NO: 779360 - protein, 16 aa, Homo sapiens
  CDR3 for beta chain variable domain of TCR clone 389680 (TRBV6-5, TRBJ2-7)
CASGYFRVGISDEQYF

SEQ ID NO: 779361 - protein, 14 aa, Homo sapiens
  CDR3 for alpha chain variable domain of TCR clone 389681 (TRAV20, TRAJ26)
CAVQAAIYGQNFVF

SEQ ID NO: 779362 - protein, 14 aa, Homo sapiens
  CDR3 for beta chain variable domain of TCR clone 389681 (TRBV27, TRBJ2-2)
CASSVGDTTGELFF

SEQ ID NO: 779363 - protein, 12 aa, Homo sapiens
  CDR3 for alpha chain variable domain of TCR clone 389682 (TRAV3, TRAJ39)
CAVIEWSNMLTF

SEQ ID NO: 779364 - protein, 14 aa, Homo sapiens
  CDR3 for beta chain variable domain of TCR clone 389682 (TRBV7-8, TRBJ2-3)
CASSFPDGEDTQYF

SEQ ID NO: 779365 - protein, 17 aa, Homo sapiens
  CDR3 for alpha chain variable domain of TCR clone 389683 (TRAV1-2, TRAJ22)
CLLPLCCEPGSARQLTF

SEQ ID NO: 779366 - protein, 11 aa, Homo sapiens
  CDR3 for beta chain variable domain of TCR clone 389683 (TRBV7-8, TRBJ2-7)
CASSLSREQYF

SEQ ID NO: 779367 - protein, 10 aa, Homo sapiens
  CDR3 for alpha chain variable domain of TCR clone 389684 (TRAV30, TRAJ48)
CGIGNEKLTF

SEQ ID NO: 779368 - protein, 15 aa, Homo sapiens
  CDR3 for beta chain variable domain of TCR clone 389684 (TRBV11-2, TRBJ1-6)
CASTGFGTAVSPLHF

SEQ ID NO: 779369 - protein, 14 aa, Homo sapiens
  CDR3 for alpha chain variable domain of TCR clone 389685 (TRAV16, TRAJ15)
CALSFNQPGTALIF

SEQ ID NO: 779370 - protein, 16 aa, Homo sapiens
  CDR3 for beta chain variable domain of TCR clone 389685 (TRBV9, TRBJ2-7)
CASSAGPDRSPYEQYF

SEQ ID NO: 779371 - protein, 12 aa, Homo sapiens
  CDR3 for alpha chain variable domain of TCR clone 389686 (TRAV21, TRAJ11)
CAVRGGNSTLTS

SEQ ID NO: 779372 - protein, 15 aa, Homo sapiens
  CDR3 for beta chain variable domain of TCR clone 389686 (TRBV6-1, TRBJ2-7)
CASSEPIAATTEQYF

SEQ ID NO: 779373 - protein, 13 aa, Homo sapiens
  CDR3 for alpha chain variable domain of TCR clone 389687 (TRAV26-2, TRAJ43)
CILRAVNNNDMGF

SEQ ID NO: 779374 - protein, 13 aa, Homo sapiens
  CDR3 for beta chain variable domain of TCR clone 389687 (TRBV14, TRBJ2-1)
CASSQDRRNEQFF

SEQ ID NO: 779375 - protein, 13 aa, Homo sapiens
  CDR3 for alpha chain variable domain of TCR clone 389688 (TRAV12-1, TRAJ29)
CVVDTSGNTPLVF

SEQ ID NO: 779376 - protein, 14 aa, Homo sapiens
  CDR3 for beta chain variable domain of TCR clone 389688 (TRBV12-4, TRBJ2-3)
RASSLVPSTDTQYF

SEQ ID NO: 779377 - protein, 15 aa, Homo sapiens
  CDR3 for alpha chain variable domain of TCR clone 389689 (TRAV3, TRAJ3)
CAVRAGHSSASKIIF

SEQ ID NO: 779378 - protein, 17 aa, Homo sapiens
  CDR3 for beta chain variable domain of TCR clone 389689 (TRBV25-1, TRBJ2-7)
CASSDARVVFSSYEQYF

SEQ ID NO: 779379 - protein, 14 aa, Homo sapiens
  CDR3 for alpha chain variable domain of TCR clone 389690 (TRAV17, TRAJ16)
CATADFSDGQKLLF

SEQ ID NO: 779380 - protein, 14 aa, Homo sapiens
  CDR3 for beta chain variable domain of TCR clone 389690 (TRBV4-1, TRBJ2-2)
CASSQAVNTGELFF

SEQ ID NO: 779381 - protein, 11 aa, Homo sapiens
  CDR3 for alpha chain variable domain of TCR clone 389691 (TRAV13-1, TRAJ15)
CAATPGTALIF

SEQ ID NO: 779382 - protein, 13 aa, Homo sapiens
  CDR3 for beta chain variable domain of TCR clone 389691 (TRBV7-2, TRBJ2-1)
CASGLGVYNEQFF

SEQ ID NO: 779383 - protein, 17 aa, Homo sapiens
  CDR3 for alpha chain variable domain of TCR clone 389692 (TRAV14/DV4, TRAJ3)
CAMREGPEYSSASKISF

SEQ ID NO: 779384 - protein, 17 aa, Homo sapiens
  CDR3 for beta chain variable domain of TCR clone 389692 (TRBV20-1, TRBJ1-5)
CSARVGGERQGNQPQHF

SEQ ID NO: 779385 - protein, 12 aa, Homo sapiens
  CDR3 for alpha chain variable domain of TCR clone 389693 (TRAV21, TRAJ13)
PGPSGGYQKVTF

SEQ ID NO: 779386 - protein, 14 aa, Homo sapiens
  CDR3 for beta chain variable domain of TCR clone 389693 (TRBV19, TRBJ1-2)
CASSIGAGSYGYTF

SEQ ID NO: 779387 - protein, 14 aa, Homo sapiens
  CDR3 for alpha chain variable domain of TCR clone 389694 (TRAV1-2, TRAJ16)
CAVNRFSDGQKLLF

SEQ ID NO: 779388 - protein, 14 aa, Homo sapiens
  CDR3 for beta chain variable domain of TCR clone 389694 (TRBV25-1, TRBJ2-1)
CASSPRGPYNEQFF

SEQ ID NO: 779389 - protein, 14 aa, Homo sapiens
  CDR3 for alpha chain variable domain of TCR clone 389695 (TRAV1-2, TRAJ8)
CAVREDTGFQKLVF

SEQ ID NO: 779390 - protein, 15 aa, Homo sapiens
  CDR3 for beta chain variable domain of TCR clone 389695 (TRBV5-1, TRBJ2-5)
CASSLGLGEIKTQYF

SEQ ID NO: 779391 - protein, 13 aa, Homo sapiens
  CDR3 for alpha chain variable domain of TCR clone 389696 (TRAV30, TRAJ24)
CGTVTDSWGKLQF

SEQ ID NO: 779392 - protein, 12 aa, Homo sapiens
  CDR3 for beta chain variable domain of TCR clone 389696 (TRBV12-4, TRBJ2-3)
CASSSTTDTQYF

SEQ ID NO: 779393 - protein, 16 aa, Homo sapiens
  CDR3 for alpha chain variable domain of TCR clone 389697 (TRAV26-1, TRAJ50)
CIVRALMKTSYDKVIF

SEQ ID NO: 779394 - protein, 14 aa, Homo sapiens
  CDR3 for beta chain variable domain of TCR clone 389697 (TRBV11-1, TRBJ2-7)
CASSFRQGSYEQYF

SEQ ID NO: 779395 - protein, 13 aa, Homo sapiens
  CDR3 for alpha chain variable domain of TCR clone 389698 (TRAV17, TRAJ4)
CATKSGGYDKLIF

SEQ ID NO: 779396 - protein, 14 aa, Homo sapiens
  CDR3 for beta chain variable domain of TCR clone 389698 (TRBV20-1, TRBJ1-5)
YSARDDRGNQPQHF

SEQ ID NO: 779397 - protein, 10 aa, Homo sapiens
  CDR3 for alpha chain variable domain of TCR clone 389699 (TRAV26-1, TRAJ40)
CIAGTYKYIF

SEQ ID NO: 779398 - protein, 15 aa, Homo sapiens
  CDR3 for beta chain variable domain of TCR clone 389699 (TRBV10-1, TRBJ2-3)
CASSATSGGFDTQYF

SEQ ID NO: 779399 - protein, 17 aa, Homo sapiens
  CDR3 for alpha chain variable domain of TCR clone 389700 (TRAV17, TRAJ7)
CATLGRLAFGKGNQVVV

SEQ ID NO: 779400 - protein, 15 aa, Homo sapiens
  CDR3 for beta chain variable domain of TCR clone 389700 (TRBV7-3, TRBJ2-1)
CASSPTGGGEVEQFF

SEQ ID NO: 779401 - protein, 11 aa, Homo sapiens
  CDR3 for alpha chain variable domain of TCR clone 389701 (TRAV12-2, TRAJ23)
CARGRGGKLIF

SEQ ID NO: 779402 - protein, 14 aa, Homo sapiens
  CDR3 for beta chain variable domain of TCR clone 389701 (TRBV28, TRBJ2-5)
CASSLGGRAETQYF

SEQ ID NO: 779403 - protein, 14 aa, Homo sapiens
  CDR3 for alpha chain variable domain of TCR clone 389702 (TRAV2, TRAJ9)
CAVEDRSGGFKTIF

SEQ ID NO: 779404 - protein, 13 aa, Homo sapiens
  CDR3 for beta chain variable domain of TCR clone 389702 (TRBV6-5, TRBJ2-7)
CASSGGSFYEQYF

SEQ ID NO: 779405 - protein, 13 aa, Homo sapiens
  CDR3 for alpha chain variable domain of TCR clone 389703 (TRAV26-2, TRAJ43)
CILRAVNNNDMRF

SEQ ID NO: 779406 - protein, 15 aa, Homo sapiens
  CDR3 for beta chain variable domain of TCR clone 389703 (TRBV5-1, TRBJ2-3)
CASSVTSGSTDTQYF

SEQ ID NO: 779407 - protein, 14 aa, Homo sapiens
  CDR3 for alpha chain variable domain of TCR clone 389704 (TRAV13-2, TRAJ23)
CAENTYNQGGKLIF

SEQ ID NO: 779408 - protein, 12 aa, Homo sapiens
  CDR3 for beta chain variable domain of TCR clone 389704 (TRBV11-2, TRBJ2-2)
CASSLGGGELFF

SEQ ID NO: 779409 - protein, 15 aa, Homo sapiens
  CDR3 for alpha chain variable domain of TCR clone 389705 (TRAV12-3, TRAJ6)
CAMSATTGGSYIPTV

SEQ ID NO: 779410 - protein, 15 aa, Homo sapiens
  CDR3 for beta chain variable domain of TCR clone 389705 (TRBV28, TRBJ2-5)
CASSPPWSYQETQYF

SEQ ID NO: 779411 - protein, 14 aa, Homo sapiens
  CDR3 for alpha chain variable domain of TCR clone 389706 (TRAV1-2, TRAJ16)
CADNRFSDGQKLLY

SEQ ID NO: 779412 - protein, 13 aa, Homo sapiens
  CDR3 for beta chain variable domain of TCR clone 389706 (TRBV4-1, TRBJ2-1)
CASSQAGGDEQFF

SEQ ID NO: 779413 - protein, 16 aa, Homo sapiens
  CDR3 for alpha chain variable domain of TCR clone 389707 (TRAV16, TRAJ4)
CITVLPFSGGYNKLIF

SEQ ID NO: 779414 - protein, 14 aa, Homo sapiens
  CDR3 for beta chain variable domain of TCR clone 389707 (TRBV19, TRBJ2-7)
CASSMGQGAIVQYF

SEQ ID NO: 779415 - protein, 14 aa, Homo sapiens
  CDR3 for alpha chain variable domain of TCR clone 389708 (TRAV2, TRAJ37)
CAVDFTSNKGKIIF

SEQ ID NO: 779416 - protein, 15 aa, Homo sapiens
  CDR3 for beta chain variable domain of TCR clone 389708 (TRBV20-1, TRBJ1-1)
CSASRGVTGNTEAFF

SEQ ID NO: 779417 - protein, 14 aa, Homo sapiens
  CDR3 for alpha chain variable domain of TCR clone 389709 (TRAV3, TRAJ21)
CAVESQANFNKFYF

SEQ ID NO: 779418 - protein, 16 aa, Homo sapiens
  CDR3 for beta chain variable domain of TCR clone 389709 (TRBV12-4, TRBJ1-5)
CASSRPVGGSNQPQHF

SEQ ID NO: 779419 - protein, 11 aa, Homo sapiens
  CDR3 for alpha chain variable domain of TCR clone 389710 (TRAV21, TRAJ34)
CAVTNTDKLIF

SEQ ID NO: 779420 - protein, 16 aa, Homo sapiens
  CDR3 for beta chain variable domain of TCR clone 389710 (TRBV7-8, TRBJ2-5)
CASSPAGGRNQETQYF

SEQ ID NO: 779421 - protein, 12 aa, Homo sapiens
  CDR3 for alpha chain variable domain of TCR clone 389711 (TRAV13-1, TRAJ21)
CAAKEGFNKFYF

SEQ ID NO: 779422 - protein, 15 aa, Homo sapiens
  CDR3 for beta chain variable domain of TCR clone 389711 (TRBV20-1, TRBJ2-7)
CSARDRVSGVDEQYF

SEQ ID NO: 779423 - protein, 13 aa, Homo sapiens
  CDR3 for alpha chain variable domain of TCR clone 389712 (TRAV8-1, TRAJ34)
CAVRPYNTDKLIF

SEQ ID NO: 779424 - protein, 14 aa, Homo sapiens
  CDR3 for beta chain variable domain of TCR clone 389712 (TRBV11-2, TRBJ1-5)
CASSLDRGRQPQHF

SEQ ID NO: 779425 - protein, 17 aa, Homo sapiens
  CDR3 for alpha chain variable domain of TCR clone 389713 (TRAV17, TRAJ4)
CFLLLCYGRGGYNKLIF

SEQ ID NO: 779426 - protein, 17 aa, Homo sapiens
  CDR3 for beta chain variable domain of TCR clone 389713 (TRBV4-3, TRBJ2-3)
CASSQDPLAGAVDTQYF

SEQ ID NO: 779427 - protein, 16 aa, Homo sapiens
  CDR3 for alpha chain variable domain of TCR clone 389714 (TRAV27, TRAJ52)
CAGAPAGCTSYGKLTF

SEQ ID NO: 779428 - protein, 12 aa, Homo sapiens
  CDR3 for beta chain variable domain of TCR clone 389714 (TRBV27, TRBJ2-1)
CASRGFYNEQFF

SEQ ID NO: 779429 - protein, 12 aa, Homo sapiens
  CDR3 for alpha chain variable domain of TCR clone 389715 (TRAV21, TRAJ11)
CDATSGYSTLTF

SEQ ID NO: 779430 - protein, 14 aa, Homo sapiens
  CDR3 for beta chain variable domain of TCR clone 389715 (TRBV20-1, TRBJ2-7)
CSAPELAGVGEQYF

SEQ ID NO: 779431 - protein, 16 aa, Homo sapiens
  CDR3 for alpha chain variable domain of TCR clone 389716 (TRAV3, TRAJ10)
CAVRDMRAGGGNKLTF

SEQ ID NO: 779432 - protein, 17 aa, Homo sapiens
  CDR3 for beta chain variable domain of TCR clone 389716 (TRBV7-6, TRBJ2-5)
CASSSPQAGDPSETQYF

SEQ ID NO: 779433 - protein, 16 aa, Homo sapiens
  CDR3 for alpha chain variable domain of TCR clone 389717 (TRAV26-1, TRAJ40)
CIVRGYPTSGTYKYIF

SEQ ID NO: 779434 - protein, 14 aa, Homo sapiens
  CDR3 for beta chain variable domain of TCR clone 389717 (TRBV5-1, TRBJ1-4)
CASSSGQGGETLFF

SEQ ID NO: 779435 - protein, 17 aa, Homo sapiens
  CDR3 for alpha chain variable domain of TCR clone 389718 (TRAV26-1, TRAJ10)
CIVSFRGLTGGGNKLTF

SEQ ID NO: 779436 - protein, 13 aa, Homo sapiens
  CDR3 for beta chain variable domain of TCR clone 389718 (TRBV7-8, TRBJ2-7)
CASSFAGLYERYF

SEQ ID NO: 779437 - protein, 16 aa, Homo sapiens
  CDR3 for alpha chain variable domain of TCR clone 389719 (TRAV3, TRAJ21)
CAVRDIERGNFNKFYC

SEQ ID NO: 779438 - protein, 13 aa, Homo sapiens
  CDR3 for beta chain variable domain of TCR clone 389719 (TRBV29-1, TRBJ2-1)
CSVEGGRVNEQFF

SEQ ID NO: 779439 - protein, 18 aa, Homo sapiens
  CDR3 for alpha chain variable domain of TCR clone 389720 (TRAV21, TRAJ52)
CAVRPSPAGGTSYGKLTF

SEQ ID NO: 779440 - protein, 13 aa, Homo sapiens
  CDR3 for beta chain variable domain of TCR clone 389720 (TRBV10-3, TRBJ2-7)
CTSKLAVNYEQYF

SEQ ID NO: 779441 - protein, 15 aa, Homo sapiens
  CDR3 for alpha chain variable domain of TCR clone 389721 (TRAV13-2, TRAJ22)
CAENSRPGPARQLTF

SEQ ID NO: 779442 - protein, 17 aa, Homo sapiens
  CDR3 for beta chain variable domain of TCR clone 389721 (TRBV20-1, TRBJ2-6)
CSATRDRGPSGANVLTF

SEQ ID NO: 779443 - protein, 10 aa, Homo sapiens
  CDR3 for alpha chain variable domain of TCR clone 389722 (TRAV30, TRAJ24)
WMLTWGKFQF

SEQ ID NO: 779444 - protein, 14 aa, Homo sapiens
  CDR3 for beta chain variable domain of TCR clone 389722 (TRBV12-5, TRBJ2-5)
CASGSRTHQETQYF

SEQ ID NO: 779445 - protein, 15 aa, Homo sapiens
  CDR3 for alpha chain variable domain of TCR clone 389723 (TRAV26-1, TRAJ29)
CIFRGEGSGNTPLVF

SEQ ID NO: 779446 - protein, 15 aa, Homo sapiens
  CDR3 for beta chain variable domain of TCR clone 389723 (TRBV7-9, TRBJ1-5)
CASSQGHQPNQPQHF

SEQ ID NO: 779447 - protein, 13 aa, Homo sapiens
  CDR3 for alpha chain variable domain of TCR clone 389724 (TRAV3, TRAJ36)
CAVRDTGANNLFF

SEQ ID NO: 779448 - protein, 15 aa, Homo sapiens
  CDR3 for beta chain variable domain of TCR clone 389724 (TRBV24-1, TRBJ2-1)
CATSGSGGFHNEQFF

SEQ ID NO: 779449 - protein, 14 aa, Homo sapiens
  CDR3 for alpha chain variable domain of TCR clone 389725 (TRAV12-2, TRAJ53)
CAGKGGGSNYNLTF

SEQ ID NO: 779450 - protein, 14 aa, Homo sapiens
  CDR3 for beta chain variable domain of TCR clone 389725 (TRBV19, TRBJ2-1)
CASPTFVLSGEQFF

SEQ ID NO: 779451 - protein, 13 aa, Homo sapiens
  CDR3 for alpha chain variable domain of TCR clone 389726 (TRAV8-3, TRAJ44)
CAVVPGTASNLTF

SEQ ID NO: 779452 - protein, 13 aa, Homo sapiens
  CDR3 for beta chain variable domain of TCR clone 389726 (TRBV10-3, TRBJ1-2)
CAISERDSYGYTF

SEQ ID NO: 779453 - protein, 13 aa, Homo sapiens
  CDR3 for alpha chain variable domain of TCR clone 389727 (TRAV12-1, TRAJ33)
CGDAPDSNYQLIW

SEQ ID NO: 779454 - protein, 17 aa, Homo sapiens
  CDR3 for beta chain variable domain of TCR clone 389727 (TRBV20-1, TRBJ2-2)
CSASGSGQGGLTGELFF

SEQ ID NO: 779455 - protein, 13 aa, Homo sapiens
  CDR3 for alpha chain variable domain of TCR clone 389728 (TRAV27, TRAJ49)
CAPRPYTGNQFYF

SEQ ID NO: 779456 - protein, 15 aa, Homo sapiens
  CDR3 for beta chain variable domain of TCR clone 389728 (TRBV11-2, TRBJ2-2)
CASSSDRVNAGELFF

SEQ ID NO: 779457 - protein, 13 aa, Homo sapiens
  CDR3 for alpha chain variable domain of TCR clone 389729 (TRAV3, TRAJ29)
CAVRDIIDTPLVL

SEQ ID NO: 779458 - protein, 14 aa, Homo sapiens
  CDR3 for beta chain variable domain of TCR clone 389729 (TRBV27, TRBJ2-1)
CASSATGGYNEQFF

SEQ ID NO: 779459 - protein, 17 aa, Homo sapiens
  CDR3 for alpha chain variable domain of TCR clone 389730 (TRAV12-2, TRAJ22)
CAVNRIPFSGSARQLTF

SEQ ID NO: 779460 - protein, 13 aa, Homo sapiens
  CDR3 for beta chain variable domain of TCR clone 389730 (TRBV11-3, TRBJ1-1)
CASSSNRDSEAFF

SEQ ID NO: 779461 - protein, 16 aa, Homo sapiens
  CDR3 for alpha chain variable domain of TCR clone 389731 (TRAV12-3, TRAJ53)
CAMSPGSGGSNSKLTF

SEQ ID NO: 779462 - protein, 15 aa, Homo sapiens
  CDR3 for beta chain variable domain of TCR clone 389731 (TRBV19, TRBJ2-1)
CASSIVRGEGREQFF

SEQ ID NO: 779463 - protein, 14 aa, Homo sapiens
  CDR3 for alpha chain variable domain of TCR clone 389732 (TRAV26-1, TRAJ45)
CIVRVVGGADGLTF

SEQ ID NO: 779464 - protein, 16 aa, Homo sapiens
  CDR3 for beta chain variable domain of TCR clone 389732 (TRBV7-9, TRBJ1-1)
CASSLTQVRSNTEAFC

SEQ ID NO: 779465 - protein, 11 aa, Homo sapiens
  CDR3 for alpha chain variable domain of TCR clone 389733 (TRAV17, TRAJ9)
CATTGGFKTIF

SEQ ID NO: 779466 - protein, 16 aa, Homo sapiens
  CDR3 for beta chain variable domain of TCR clone 389733 (TRBV28, TRBJ2-7)
CASSPWVATGDLSQYF

SEQ ID NO: 779467 - protein, 17 aa, Homo sapiens
  CDR3 for alpha chain variable domain of TCR clone 389734 (TRAV4, TRAJ13)
CIVGVQGSSGGYQKVTF

SEQ ID NO: 779468 - protein, 15 aa, Homo sapiens
  CDR3 for beta chain variable domain of TCR clone 389734 (TRBV5-5, TRBJ2-7)
CASSLAAPLSYEQYF

SEQ ID NO: 779469 - protein, 14 aa, Homo sapiens
  CDR3 for alpha chain variable domain of TCR clone 389735 (TRAV2, TRAJ37)
CAVEGSSNTGKLIV

SEQ ID NO: 779470 - protein, 15 aa, Homo sapiens
  CDR3 for beta chain variable domain of TCR clone 389735 (TRBV24-1, TRBJ2-4)
CATSDPRDRANIQYF

SEQ ID NO: 779471 - protein, 16 aa, Homo sapiens
  CDR3 for alpha chain variable domain of TCR clone 389736 (TRAV1-1, TRAJ45)
CAVRAYSGGGDDGLTF

SEQ ID NO: 779472 - protein, 13 aa, Homo sapiens
  CDR3 for beta chain variable domain of TCR clone 389736 (TRBV20-1, TRBJ1-2)
CSARGTADYGYTF

SEQ ID NO: 779473 - protein, 14 aa, Homo sapiens
  CDR3 for alpha chain variable domain of TCR clone 389737 (TRAV8-4, TRAJ9)
CAVTFNTGGFTTIF

SEQ ID NO: 779474 - protein, 15 aa, Homo sapiens
  CDR3 for beta chain variable domain of TCR clone 389737 (TRBV7-9, TRBJ2-2)
CASSPETGAGGELFF

SEQ ID NO: 779475 - protein, 14 aa, Homo sapiens
  CDR3 for alpha chain variable domain of TCR clone 389738 (TRAV1-2, TRAJ16)
CAVNRFSDGQKLLF

SEQ ID NO: 779476 - protein, 15 aa, Homo sapiens
  CDR3 for beta chain variable domain of TCR clone 389738 (TRBV20-1, TRBJ1-6)
CSARAGGTFNSPLHF

SEQ ID NO: 779477 - protein, 18 aa, Homo sapiens
  CDR3 for alpha chain variable domain of TCR clone 389739 (TRAV8-4, TRAJ52)
CAVASFNAGGTSFGKLTF

SEQ ID NO: 779478 - protein, 14 aa, Homo sapiens
  CDR3 for beta chain variable domain of TCR clone 389739 (TRBV18, TRBJ1-5)
CASSRQQRNQPQHF

SEQ ID NO: 779479 - protein, 16 aa, Homo sapiens
  CDR3 for alpha chain variable domain of TCR clone 389740 (TRAV3, TRAJ37)
CAVRGKGSGNTGKLIF

SEQ ID NO: 779480 - protein, 13 aa, Homo sapiens
  CDR3 for beta chain variable domain of TCR clone 389740 (TRBV7-3, TRBJ1-1)
CASSQDWGAEASL

SEQ ID NO: 779481 - protein, 14 aa, Homo sapiens
  CDR3 for alpha chain variable domain of TCR clone 389741 (TRAV38-1, TRAJ40)
CALRPTSGTYKYIF

SEQ ID NO: 779482 - protein, 14 aa, Homo sapiens
  CDR3 for beta chain variable domain of TCR clone 389741 (TRBV25-1, TRBJ1-1)
CSSTHLGWNTEAFF

SEQ ID NO: 779483 - protein, 17 aa, Homo sapiens
  CDR3 for alpha chain variable domain of TCR clone 389742 (TRAV12-2, TRAJ52)
CAVNPYAGGTSYGKLTF

SEQ ID NO: 779484 - protein, 15 aa, Homo sapiens
  CDR3 for beta chain variable domain of TCR clone 389742 (TRBV5-4, TRBJ2-3)
CASSLDQRATDTQYF

SEQ ID NO: 779485 - protein, 12 aa, Homo sapiens
  CDR3 for alpha chain variable domain of TCR clone 389743 (TRAV29/DV5, TRAJ49)
CAATDTGNQFYF

SEQ ID NO: 779486 - protein, 15 aa, Homo sapiens
  CDR3 for beta chain variable domain of TCR clone 389743 (TRBV2, TRBJ2-1)
CASSEARSAYNEQFF

SEQ ID NO: 779487 - protein, 12 aa, Homo sapiens
  CDR3 for alpha chain variable domain of TCR clone 389744 (TRAV13-1, TRAJ40)
CAASWATYKYIF

SEQ ID NO: 779488 - protein, 15 aa, Homo sapiens
  CDR3 for beta chain variable domain of TCR clone 389744 (TRBV7-8, TRBJ2-1)
CASSSRLAAYNEQFI

SEQ ID NO: 779489 - protein, 13 aa, Homo sapiens
  CDR3 for alpha chain variable domain of TCR clone 389745 (TRAV27, TRAJ8)
CAGGPTGFQKLVF

SEQ ID NO: 779490 - protein, 15 aa, Homo sapiens
  CDR3 for beta chain variable domain of TCR clone 389745 (TRBV12-4, TRBJ2-5)
CASSPPTGLQETQYF

SEQ ID NO: 779491 - protein, 15 aa, Homo sapiens
  CDR3 for alpha chain variable domain of TCR clone 389746 (TRAV35, TRAJ40)
CAGQLGTSGTYKYIF

SEQ ID NO: 779492 - protein, 14 aa, Homo sapiens
  CDR3 for beta chain variable domain of TCR clone 389746 (TRBV7-3, TRBJ2-1)
CASSLAGGTNEQCV

SEQ ID NO: 779493 - protein, 10 aa, Homo sapiens
  CDR3 for alpha chain variable domain of TCR clone 389747 (TRAV23/DV6, TRAJ57)
CAASSNLSQG

SEQ ID NO: 779494 - protein, 15 aa, Homo sapiens
  CDR3 for beta chain variable domain of TCR clone 389747 (TRBV19, TRBJ1-2)
CASSVGQVLNYGYTF

SEQ ID NO: 779495 - protein, 13 aa, Homo sapiens
  CDR3 for alpha chain variable domain of TCR clone 389748 (TRAV8-3, TRAJ28)
CAVGAVGSYQLTL

SEQ ID NO: 779496 - protein, 18 aa, Homo sapiens
  CDR3 for beta chain variable domain of TCR clone 389748 (TRBV20-1, TRBJ2-6)
CSAETTPTHGSGANVLTF

SEQ ID NO: 779497 - protein, 11 aa, Homo sapiens
  CDR3 for alpha chain variable domain of TCR clone 389749 (TRAV2, TRAJ13)
CASGGYQKVNF

SEQ ID NO: 779498 - protein, 15 aa, Homo sapiens
  CDR3 for beta chain variable domain of TCR clone 389749 (TRBV6-1, TRBJ2-2)
CASSRLRGDTGELFF

SEQ ID NO: 779499 - protein, 16 aa, Homo sapiens
  CDR3 for alpha chain variable domain of TCR clone 389750 (TRAV26-1, TRAJ45)
CIVEKYSGGGSDGLTF

SEQ ID NO: 779500 - protein, 15 aa, Homo sapiens
  CDR3 for beta chain variable domain of TCR clone 389750 (TRBV15, TRBJ2-7)
CHQQRPIQQAYEQYF

SEQ ID NO: 779501 - protein, 13 aa, Homo sapiens
  CDR3 for alpha chain variable domain of TCR clone 389751 (TRAV2, TRAJ21)
CAVEDNNFNKFYF

SEQ ID NO: 779502 - protein, 19 aa, Homo sapiens
  CDR3 for beta chain variable domain of TCR clone 389751 (TRBV2, TRBJ2-7)
CASSRGPNDQGLASYEQYF

SEQ ID NO: 779503 - protein, 14 aa, Homo sapiens
  CDR3 for alpha chain variable domain of TCR clone 389752 (TRAV23/DV6, TRAJ27)
CAASRDTNAGKSTC

SEQ ID NO: 779504 - protein, 13 aa, Homo sapiens
  CDR3 for beta chain variable domain of TCR clone 389752 (TRBV20-1, TRBJ1-5)
CSASGRGNQPQHF

SEQ ID NO: 779505 - protein, 14 aa, Homo sapiens
  CDR3 for alpha chain variable domain of TCR clone 389753 (TRAV14/DV4, TRAJ26)
CAMREGTYGQNFVF

SEQ ID NO: 779506 - protein, 16 aa, Homo sapiens
  CDR3 for beta chain variable domain of TCR clone 389753 (TRBV13, TRBJ2-2)
CASSPRTGEHTGELFF

SEQ ID NO: 779507 - protein, 15 aa, Homo sapiens
  CDR3 for alpha chain variable domain of TCR clone 389754 (TRAV12-1, TRAJ47)
CVLTNRLKGGNKLVF

SEQ ID NO: 779508 - protein, 19 aa, Homo sapiens
  CDR3 for beta chain variable domain of TCR clone 389754 (TRBV20-1, TRBJ2-5)
CSARPQGLAGTSKSGTQYF

SEQ ID NO: 779509 - protein, 15 aa, Homo sapiens
  CDR3 for alpha chain variable domain of TCR clone 389755 (TRAV3, TRAJ22)
CAVRDRGGSARQPTF

SEQ ID NO: 779510 - protein, 15 aa, Homo sapiens
  CDR3 for beta chain variable domain of TCR clone 389755 (TRBV6-6, TRBJ2-5)
CASSPGGGLEETQYF

SEQ ID NO: 779511 - protein, 12 aa, Homo sapiens
  CDR3 for alpha chain variable domain of TCR clone 389756 (TRAV38-2/DV8, TRAJ47)
CAYMEYGNKLVF

SEQ ID NO: 779512 - protein, 14 aa, Homo sapiens
  CDR3 for beta chain variable domain of TCR clone 389756 (TRBV6-5, TRBJ2-7)
CASSYRPGSYEQYF

SEQ ID NO: 779513 - protein, 12 aa, Homo sapiens
  CDR3 for alpha chain variable domain of TCR clone 389757 (TRAV21, TRAJ11)
CAATSGYSTLTF

SEQ ID NO: 779514 - protein, 14 aa, Homo sapiens
  CDR3 for beta chain variable domain of TCR clone 389757 (TRBV7-3, TRBJ2-2)
CASSSGGYTVELFF

SEQ ID NO: 779515 - protein, 14 aa, Homo sapiens
  CDR3 for alpha chain variable domain of TCR clone 389758 (TRAV38-1, TRAJ11)
CAFMKHEGYSPLTF

SEQ ID NO: 779516 - protein, 12 aa, Homo sapiens
  CDR3 for beta chain variable domain of TCR clone 389758 (TRBV10-3, TRBJ2-3)
CAISESPQARVF

SEQ ID NO: 779517 - protein, 16 aa, Homo sapiens
  CDR3 for alpha chain variable domain of TCR clone 389759 (TRAV30, TRAJ57)
CGTGWAPQGGSEKLVF

SEQ ID NO: 779518 - protein, 14 aa, Homo sapiens
  CDR3 for beta chain variable domain of TCR clone 389759 (TRBV18, TRBJ1-1)
CASSPGFQGAEAFF

SEQ ID NO: 779519 - protein, 11 aa, Homo sapiens
  CDR3 for alpha chain variable domain of TCR clone 389760 (TRAV12-3, TRAJ43)
CAMSVSNDMRF

SEQ ID NO: 779520 - protein, 15 aa, Homo sapiens
  CDR3 for beta chain variable domain of TCR clone 389760 (TRBV7-9, TRBJ2-7)
CASSPTGLRTYEQYF

SEQ ID NO: 779521 - protein, 13 aa, Homo sapiens
  CDR3 for alpha chain variable domain of TCR clone 389761 (TRAV12-3, TRAJ7)
CAMSASGNNRLAF

SEQ ID NO: 779522 - protein, 14 aa, Homo sapiens
  CDR3 for beta chain variable domain of TCR clone 389761 (TRBV27, TRBJ2-1)
CASSATGGYNEQFF

SEQ ID NO: 779523 - protein, 14 aa, Homo sapiens
  CDR3 for alpha chain variable domain of TCR clone 389762 (TRAV9-2, TRAJ39)
CALYIYNAGNMLTF

SEQ ID NO: 779524 - protein, 13 aa, Homo sapiens
  CDR3 for beta chain variable domain of TCR clone 389762 (TRBV19, TRBJ2-7)
CASSRDRSYEQYF

SEQ ID NO: 779525 - protein, 17 aa, Homo sapiens
  CDR3 for alpha chain variable domain of TCR clone 389763 (TRAV3, TRAJ6)
CAVRDGPRAGGSYIPTF

SEQ ID NO: 779526 - protein, 13 aa, Homo sapiens
  CDR3 for beta chain variable domain of TCR clone 389763 (TRBV7-3, TRBJ2-5)
CASSSDREETQYF

SEQ ID NO: 779527 - protein, 17 aa, Homo sapiens
  CDR3 for alpha chain variable domain of TCR clone 389764 (TRAV3, TRAJ12)
CAVRDGGRMDSSYKLIF

SEQ ID NO: 779528 - protein, 13 aa, Homo sapiens
  CDR3 for beta chain variable domain of TCR clone 389764 (TRBV14, TRBJ1-1)
CASSQEAGTEAFF

SEQ ID NO: 779529 - protein, 13 aa, Homo sapiens
  CDR3 for alpha chain variable domain of TCR clone 389765 (TRAV17, TRAJ13)
RATDSGGYQKVTF

SEQ ID NO: 779530 - protein, 14 aa, Homo sapiens
  CDR3 for beta chain variable domain of TCR clone 389765 (TRBV19, TRBJ2-1)
CASPTFVLSGEQFF

SEQ ID NO: 779531 - protein, 14 aa, Homo sapiens
  CDR3 for alpha chain variable domain of TCR clone 389766 (TRAV12-2, TRAJ45)
CAVYSGGGADGLTF

SEQ ID NO: 779532 - protein, 13 aa, Homo sapiens
  CDR3 for beta chain variable domain of TCR clone 389766 (TRBV7-9, TRBJ2-1)
CASSLDVGNEQFF

SEQ ID NO: 779533 - protein, 11 aa, Homo sapiens
  CDR3 for alpha chain variable domain of TCR clone 389767 (TRAV2, TRAJ16)
CAVGDGQKLLF

SEQ ID NO: 779534 - protein, 15 aa, Homo sapiens
  CDR3 for beta chain variable domain of TCR clone 389767 (TRBV11-2, TRBJ2-1)
CASSPSGQSLNEQFF

SEQ ID NO: 779535 - protein, 20 aa, Homo sapiens
  CDR3 for alpha chain variable domain of TCR clone 389768 (TRAV12-3, TRAJ41)
SLFIRDSQPSDSATPEALNF

SEQ ID NO: 779536 - protein, 16 aa, Homo sapiens
  CDR3 for beta chain variable domain of TCR clone 389768 (TRBV12-5, TRBJ2-5)
CASGPRTSGNQETQYF

SEQ ID NO: 779537 - protein, 13 aa, Homo sapiens
  CDR3 for alpha chain variable domain of TCR clone 389769 (TRAV26-1, TRAJ40)
CIVRVEGTYKYIF

SEQ ID NO: 779538 - protein, 14 aa, Homo sapiens
  CDR3 for beta chain variable domain of TCR clone 389769 (TRBV2, TRBJ2-7)
CASSLTSGGYEQYF

SEQ ID NO: 779539 - protein, 17 aa, Homo sapiens
  CDR3 for alpha chain variable domain of TCR clone 389770 (TRAV12-2, TRAJ6)
CAPQGPPRAGGSYIPTF

SEQ ID NO: 779540 - protein, 16 aa, Homo sapiens
  CDR3 for beta chain variable domain of TCR clone 389770 (TRBV19, TRBJ2-2)
CAGSTTRASNTGELFF

SEQ ID NO: 779541 - protein, 14 aa, Homo sapiens
  CDR3 for alpha chain variable domain of TCR clone 389771 (TRAV36/DV7, TRAJ57)
CAVGFSGGSEKLVF

SEQ ID NO: 779542 - protein, 12 aa, Homo sapiens
  CDR3 for beta chain variable domain of TCR clone 389771 (TRBV19, TRBJ2-7)
CASTSGTYEQYF

SEQ ID NO: 779543 - protein, 18 aa, Homo sapiens
  CDR3 for alpha chain variable domain of TCR clone 389772 (TRAV21, TRAJ52)
CAVRPSPAGGTSYGKLTF

SEQ ID NO: 779544 - protein, 17 aa, Homo sapiens
  CDR3 for beta chain variable domain of TCR clone 389772 (TRBV13, TRBJ2-3)
CASSSSRVAGGRNTQYF

SEQ ID NO: 779545 - protein, 14 aa, Homo sapiens
  CDR3 for alpha chain variable domain of TCR clone 389773 (TRAV12-2, TRAJ9)
CAVNMEGGGFETIF

SEQ ID NO: 779546 - protein, 14 aa, Homo sapiens
  CDR3 for beta chain variable domain of TCR clone 389773 (TRBV2, TRBJ2-5)
CVSSEVLAQETQYF

SEQ ID NO: 779547 - protein, 14 aa, Homo sapiens
  CDR3 for alpha chain variable domain of TCR clone 389774 (TRAV12-3, TRAJ22)
CAMSLFGSARQLTF

SEQ ID NO: 779548 - protein, 11 aa, Homo sapiens
  CDR3 for beta chain variable domain of TCR clone 389774 (TRBV12-4, TRBJ2-2)
CASSSAGEMFF

SEQ ID NO: 779549 - protein, 17 aa, Homo sapiens
  CDR3 for alpha chain variable domain of TCR clone 389775 (TRAV3, TRAJ6)
CAVRDGPRAGGRYIPTF

SEQ ID NO: 779550 - protein, 15 aa, Homo sapiens
  CDR3 for beta chain variable domain of TCR clone 389775 (TRBV11-3, TRBJ2-7)
CASSPGPASSYEQYF

SEQ ID NO: 779551 - protein, 14 aa, Homo sapiens
  CDR3 for alpha chain variable domain of TCR clone 389776 (TRAV4, TRAJ9)
CLVGSGTGGFKTIF

SEQ ID NO: 779552 - protein, 15 aa, Homo sapiens
  CDR3 for beta chain variable domain of TCR clone 389776 (TRBV7-2, TRBJ2-1)
CASSLASGRVNKQFF

SEQ ID NO: 779553 - protein, 12 aa, Homo sapiens
  CDR3 for alpha chain variable domain of TCR clone 389777 (TRAV17, TRAJ20)
CATDANDYKLGF

SEQ ID NO: 779554 - protein, 17 aa, Homo sapiens
  CDR3 for beta chain variable domain of TCR clone 389777 (TRBV5-1, TRBJ2-2)
CASSMAGIAGGTGELFF

SEQ ID NO: 779555 - protein, 21 aa, Homo sapiens
  CDR3 for alpha chain variable domain of TCR clone 389778 (TRAV27, TRAJ24)
ASTSVRNDIPTTTDSWGKLQF

SEQ ID NO: 779556 - protein, 14 aa, Homo sapiens
  CDR3 for beta chain variable domain of TCR clone 389778 (TRBV11-2, TRBJ2-7)
CASSLGAGAYEQYF

SEQ ID NO: 779557 - protein, 12 aa, Homo sapiens
  CDR3 for alpha chain variable domain of TCR clone 389779 (TRAV17, TRAJ4)
CATDGGYNKLIF

SEQ ID NO: 779558 - protein, 14 aa, Homo sapiens
  CDR3 for beta chain variable domain of TCR clone 389779 (TRBV7-3, TRBJ2-3)
CASSPGASRDTRYF

SEQ ID NO: 779559 - protein, 14 aa, Homo sapiens
  CDR3 for alpha chain variable domain of TCR clone 389780 (TRAV26-1, TRAJ39)
CIVRGSRAGNMLTF

SEQ ID NO: 779560 - protein, 14 aa, Homo sapiens
  CDR3 for beta chain variable domain of TCR clone 389780 (TRBV13, TRBJ2-3)
CASSLGGPQRPQYF

SEQ ID NO: 779561 - protein, 15 aa, Homo sapiens
  CDR3 for alpha chain variable domain of TCR clone 389781 (TRAV3, TRAJ5)
CAVRDLDTGRRALTC

SEQ ID NO: 779562 - protein, 14 aa, Homo sapiens
  CDR3 for beta chain variable domain of TCR clone 389781 (TRBV25-1, TRBJ1-4)
CASSGGGQPEKLFF

SEQ ID NO: 779563 - protein, 13 aa, Homo sapiens
  CDR3 for alpha chain variable domain of TCR clone 389782 (TRAV13-2, TRAJ5)
CAESDTGRRALTF

SEQ ID NO: 779564 - protein, 14 aa, Homo sapiens
  CDR3 for beta chain variable domain of TCR clone 389782 (TRBV2, TRBJ1-1)
CASTQVGENTEAFV

SEQ ID NO: 779565 - protein, 13 aa, Homo sapiens
  CDR3 for alpha chain variable domain of TCR clone 389783 (TRAV12-3, TRAJ26)
CAMSEPRGQNFVF

SEQ ID NO: 779566 - protein, 16 aa, Homo sapiens
  CDR3 for beta chain variable domain of TCR clone 389783 (TRBV27, TRBJ2-2)
CASSFRGLVRTGELFF

SEQ ID NO: 779567 - protein, 13 aa, Homo sapiens
  CDR3 for alpha chain variable domain of TCR clone 389784 (TRAV1-2, TRAJ12)
CAVSMDSSYKLIF

SEQ ID NO: 779568 - protein, 14 aa, Homo sapiens
  CDR3 for beta chain variable domain of TCR clone 389784 (TRBV18, TRBJ2-5)
CASSPGVSQETQYF

SEQ ID NO: 779569 - protein, 14 aa, Homo sapiens
  CDR3 for alpha chain variable domain of TCR clone 389785 (TRAV4, TRAJ9)
CLVGSGTGGFTTIF

SEQ ID NO: 779570 - protein, 14 aa, Homo sapiens
  CDR3 for beta chain variable domain of TCR clone 389785 (TRBV7-9, TRBJ2-4)
CASSLAMGGNIQYF

SEQ ID NO: 779571 - protein, 15 aa, Homo sapiens
  CDR3 for alpha chain variable domain of TCR clone 389786 (TRAV23/DV6, TRAJ44)
CAAMKPTGTASTLTF

SEQ ID NO: 779572 - protein, 16 aa, Homo sapiens
  CDR3 for beta chain variable domain of TCR clone 389786 (TRBV28, TRBJ2-5)
CATSGWPSRLKETQYF

SEQ ID NO: 779573 - protein, 12 aa, Homo sapiens
  CDR3 for alpha chain variable domain of TCR clone 389787 (TRAV21, TRAJ11)
CAATSGYSTLTL

SEQ ID NO: 779574 - protein, 14 aa, Homo sapiens
  CDR3 for beta chain variable domain of TCR clone 389787 (TRBV7-2, TRBJ2-7)
CASRSQGAAYEQYF

SEQ ID NO: 779575 - protein, 10 aa, Homo sapiens
  CDR3 for alpha chain variable domain of TCR clone 389788 (TRAV26-1, TRAJ40)
CIAGTYKYIF

SEQ ID NO: 779576 - protein, 15 aa, Homo sapiens
  CDR3 for beta chain variable domain of TCR clone 389788 (TRBV19, TRBJ2-1)
CASSSPGVPLDEQFI

SEQ ID NO: 779577 - protein, 13 aa, Homo sapiens
  CDR3 for alpha chain variable domain of TCR clone 389789 (TRAV27, TRAJ41)
CAGEGNSGYALNF

SEQ ID NO: 779578 - protein, 14 aa, Homo sapiens
  CDR3 for beta chain variable domain of TCR clone 389789 (TRBV25-1, TRBJ1-1)
CASTHLGGNTESFF

SEQ ID NO: 779579 - protein, 14 aa, Homo sapiens
  CDR3 for alpha chain variable domain of TCR clone 389790 (TRAV16, TRAJ33)
CALSAMDSNYQLIW

SEQ ID NO: 779580 - protein, 12 aa, Homo sapiens
  CDR3 for beta chain variable domain of TCR clone 389790 (TRBV5-1, TRBJ2-7)
CASSFRGYEQYL

SEQ ID NO: 779581 - protein, 13 aa, Homo sapiens
  CDR3 for alpha chain variable domain of TCR clone 389791 (TRAV23/DV6, TRAJ21)
CAASIGNFNKFYF

SEQ ID NO: 779582 - protein, 16 aa, Homo sapiens
  CDR3 for beta chain variable domain of TCR clone 389791 (TRBV4-2, TRBJ1-2)
CASSQERRIHYIGYTF

SEQ ID NO: 779583 - protein, 15 aa, Homo sapiens
  CDR3 for alpha chain variable domain of TCR clone 389792 (TRAV2, TRAJ33)
CAVEDPGDSNYQLIW

SEQ ID NO: 779584 - protein, 15 aa, Homo sapiens
  CDR3 for beta chain variable domain of TCR clone 389792 (TRBV27, TRBJ1-6)
CASSFDRGLGSPLHF

SEQ ID NO: 779585 - protein, 15 aa, Homo sapiens
  CDR3 for alpha chain variable domain of TCR clone 389793 (TRAV13-1, TRAJ50)
CAAKGSETSYDKVKF

SEQ ID NO: 779586 - protein, 18 aa, Homo sapiens
  CDR3 for beta chain variable domain of TCR clone 389793 (TRBV10-3, TRBJ2-1)
CTSVPSVSLRGGVDEQFF

SEQ ID NO: 779587 - protein, 16 aa, Homo sapiens
  CDR3 for alpha chain variable domain of TCR clone 389794 (TRAV16, TRAJ4)
CALSRMFSGGYNKLIF

SEQ ID NO: 779588 - protein, 13 aa, Homo sapiens
  CDR3 for beta chain variable domain of TCR clone 389794 (TRBV12-4, TRBJ1-2)
CASSLRQGKGYTF

SEQ ID NO: 779589 - protein, 13 aa, Homo sapiens
  CDR3 for alpha chain variable domain of TCR clone 389795 (TRAV2, TRAJ29)
CAAGNFRKHTSCL

SEQ ID NO: 779590 - protein, 16 aa, Homo sapiens
  CDR3 for beta chain variable domain of TCR clone 389795 (TRBV7-9, TRBJ1-2)
CASSPGGGAINYGYTF

SEQ ID NO: 779591 - protein, 21 aa, Homo sapiens
  CDR3 for alpha chain variable domain of TCR clone 389796 (TRAV2, TRAJ20)
AAHPPGREADAAVYRDCKLSF

SEQ ID NO: 779592 - protein, 12 aa, Homo sapiens
  CDR3 for beta chain variable domain of TCR clone 389796 (TRBV11-2, TRBJ2-2)
CASSLGGGELFF

SEQ ID NO: 779593 - protein, 13 aa, Homo sapiens
  CDR3 for alpha chain variable domain of TCR clone 389797 (TRAV1-1, TRAJ9)
CAAKNTGGLRTIF

SEQ ID NO: 779594 - protein, 14 aa, Homo sapiens
  CDR3 for beta chain variable domain of TCR clone 389797 (TRBV20-1, TRBJ2-1)
CSAQIGGSANEQFF

SEQ ID NO: 779595 - protein, 15 aa, Homo sapiens
  CDR3 for alpha chain variable domain of TCR clone 389798 (TRAV1-1, TRAJ37)
CAVRDQVATQANSSL

SEQ ID NO: 779596 - protein, 14 aa, Homo sapiens
  CDR3 for beta chain variable domain of TCR clone 389798 (TRBV29-1, TRBJ2-2)
CSALGGVGAGELFF

SEQ ID NO: 779597 - protein, 15 aa, Homo sapiens
  CDR3 for alpha chain variable domain of TCR clone 389799 (TRAV13-2, TRAJ6)
CAEKVLAGGSYIPTF

SEQ ID NO: 779598 - protein, 15 aa, Homo sapiens
  CDR3 for beta chain variable domain of TCR clone 389799 (TRBV7-8, TRBJ2-7)
CASSLERAGSYEQYF

SEQ ID NO: 779599 - protein, 11 aa, Homo sapiens
  CDR3 for alpha chain variable domain of TCR clone 389800 (TRAV2, TRAJ13)
CASGGYQKVTF

SEQ ID NO: 779600 - protein, 16 aa, Homo sapiens
  CDR3 for beta chain variable domain of TCR clone 389800 (TRBV6-1, TRBJ2-5)
CASSETLDRGAEDQYF

SEQ ID NO: 779601 - protein, 14 aa, Homo sapiens
  CDR3 for alpha chain variable domain of TCR clone 389801 (TRAV38-1, TRAJ40)
CALRPTSGTYKYIF

SEQ ID NO: 779602 - protein, 13 aa, Homo sapiens
  CDR3 for beta chain variable domain of TCR clone 389801 (TRBV29-1, TRBJ1-1)
CSVGDSRNTEAFF

SEQ ID NO: 779603 - protein, 12 aa, Homo sapiens
  CDR3 for alpha chain variable domain of TCR clone 389802 (TRAV13-2, TRAJ23)
CAERHRGGKLIF

SEQ ID NO: 779604 - protein, 14 aa, Homo sapiens
  CDR3 for beta chain variable domain of TCR clone 389802 (TRBV7-9, TRBJ2-1)
CASSLGVADNEQFF

SEQ ID NO: 779605 - protein, 15 aa, Homo sapiens
  CDR3 for alpha chain variable domain of TCR clone 389803 (TRAV12-2, TRAJ43)
CAFDIRFGAGTRLTV

SEQ ID NO: 779606 - protein, 15 aa, Homo sapiens
  CDR3 for beta chain variable domain of TCR clone 389803 (TRBV20-1, TRBJ2-7)
CSARDRVSGMDEQYF

SEQ ID NO: 779607 - protein, 14 aa, Homo sapiens
  CDR3 for alpha chain variable domain of TCR clone 389804 (TRAV1-2, TRAJ16)
CAVNRFSDGQKLLF

SEQ ID NO: 779608 - protein, 14 aa, Homo sapiens
  CDR3 for beta chain variable domain of TCR clone 389804 (TRBV11-2, TRBJ2-7)
CASSSLADGYEQYF

SEQ ID NO: 779609 - protein, 19 aa, Homo sapiens
  CDR3 for alpha chain variable domain of TCR clone 389805 (TRAV1-2, TRAJ26)
CLLPLCCEIPDNYGQNFVF

SEQ ID NO: 779610 - protein, 15 aa, Homo sapiens
  CDR3 for beta chain variable domain of TCR clone 389805 (TRBV9, TRBJ1-6)
CASSVAGTGDSPLHF

SEQ ID NO: 779611 - protein, 14 aa, Homo sapiens
  CDR3 for alpha chain variable domain of TCR clone 389806 (TRAV12-1, TRAJ17)
CVVNYKAAGNKLTF

SEQ ID NO: 779612 - protein, 15 aa, Homo sapiens
  CDR3 for beta chain variable domain of TCR clone 389806 (TRBV20-1, TRBJ2-7)
CSARDRVAGMDEQYF

SEQ ID NO: 779613 - protein, 14 aa, Homo sapiens
  CDR3 for alpha chain variable domain of TCR clone 389807 (TRAV26-1, TRAJ24)
FIVRRVGGWGKFQF

SEQ ID NO: 779614 - protein, 16 aa, Homo sapiens
  CDR3 for beta chain variable domain of TCR clone 389807 (TRBV6-3, TRBJ2-1)
CASSYRRGDSYNEQFF

SEQ ID NO: 779615 - protein, 15 aa, Homo sapiens
  CDR3 for alpha chain variable domain of TCR clone 389808 (TRAV29/DV5, TRAJ42)
CAEKTDGGSQGNLIF

SEQ ID NO: 779616 - protein, 15 aa, Homo sapiens
  CDR3 for beta chain variable domain of TCR clone 389808 (TRBV5-1, TRBJ2-2)
CASSSQGGNTGELFF

SEQ ID NO: 779617 - protein, 18 aa, Homo sapiens
  CDR3 for alpha chain variable domain of TCR clone 389809 (TRAV29/DV5, TRAJ52)
CAAGFRGAGGTSYGKLTF

SEQ ID NO: 779618 - protein, 14 aa, Homo sapiens
  CDR3 for beta chain variable domain of TCR clone 389809 (TRBV18, TRBJ2-5)
CASSPGVSQETQYF

SEQ ID NO: 779619 - protein, 14 aa, Homo sapiens
  CDR3 for alpha chain variable domain of TCR clone 389810 (TRAV14/DV4, TRAJ20)
CAMRESLNDYKLSF

SEQ ID NO: 779620 - protein, 14 aa, Homo sapiens
  CDR3 for beta chain variable domain of TCR clone 389810 (TRBV6-1, TRBJ1-3)
CASVQGGGGNTIYF

SEQ ID NO: 779621 - protein, 13 aa, Homo sapiens
  CDR3 for alpha chain variable domain of TCR clone 389811 (TRAV12-1, TRAJ11)
CVVTRGGYSTLTF

SEQ ID NO: 779622 - protein, 13 aa, Homo sapiens
  CDR3 for beta chain variable domain of TCR clone 389811 (TRBV20-1, TRBJ1-2)
CSARDQGAYGYSF

SEQ ID NO: 779623 - protein, 14 aa, Homo sapiens
  CDR3 for alpha chain variable domain of TCR clone 389812 (TRAV8-3, TRAJ39)
CAVGAWGAGNMLTF

SEQ ID NO: 779624 - protein, 16 aa, Homo sapiens
  CDR3 for beta chain variable domain of TCR clone 389812 (TRBV7-2, TRBJ1-3)
CASSSGRVLAGNTIYF

SEQ ID NO: 779625 - protein, 15 aa, Homo sapiens
  CDR3 for alpha chain variable domain of TCR clone 389813 (TRAV3, TRAJ4)
CAVRDGTGGYNKLIF

SEQ ID NO: 779626 - protein, 16 aa, Homo sapiens
  CDR3 for beta chain variable domain of TCR clone 389813 (TRBV27, TRBJ2-2)
CACSSSGVSNTGELFF

SEQ ID NO: 779627 - protein, 13 aa, Homo sapiens
  CDR3 for alpha chain variable domain of TCR clone 389814 (TRAV21, TRAJ10)
CAIPTGGGNKLTF

SEQ ID NO: 779628 - protein, 22 aa, Homo sapiens
  CDR3 for beta chain variable domain of TCR clone 389814 (TRBV19, TRBJ2-1)
CASSVRDRVTGTSGRIYNEQFF

SEQ ID NO: 779629 - protein, 15 aa, Homo sapiens
  CDR3 for alpha chain variable domain of TCR clone 389815 (TRAV26-1, TRAJ22)
CIVRVSFWFCKATDL

SEQ ID NO: 779630 - protein, 11 aa, Homo sapiens
  CDR3 for beta chain variable domain of TCR clone 389815 (TRBV7-2, TRBJ2-3)
CASSSSDTQYF

SEQ ID NO: 779631 - protein, 13 aa, Homo sapiens
  CDR3 for alpha chain variable domain of TCR clone 389816 (TRAV12-3, TRAJ33)
CAMSVNSNYQLIW

SEQ ID NO: 779632 - protein, 13 aa, Homo sapiens
  CDR3 for beta chain variable domain of TCR clone 389816 (TRBV15, TRBJ1-6)
CATSGGLNSPLHF

SEQ ID NO: 779633 - protein, 12 aa, Homo sapiens
  CDR3 for alpha chain variable domain of TCR clone 389817 (TRAV17, TRAJ12)
CATLRTSYKLIF

SEQ ID NO: 779634 - protein, 16 aa, Homo sapiens
  CDR3 for beta chain variable domain of TCR clone 389817 (TRBV28, TRBJ2-7)
CASSLFFETGGPEQYF

SEQ ID NO: 779635 - protein, 14 aa, Homo sapiens
  CDR3 for alpha chain variable domain of TCR clone 389818 (TRAV23/DV6, TRAJ11)
CAASLESGYSTLTF

SEQ ID NO: 779636 - protein, 15 aa, Homo sapiens
  CDR3 for beta chain variable domain of TCR clone 389818 (TRBV7-9, TRBJ1-6)
CASSSPGRGNSPLHF

SEQ ID NO: 779637 - protein, 10 aa, Homo sapiens
  CDR3 for alpha chain variable domain of TCR clone 389819 (TRAV23/DV6, TRAJ57)
CAASFTLSQG

SEQ ID NO: 779638 - protein, 14 aa, Homo sapiens
  CDR3 for beta chain variable domain of TCR clone 389819 (TRBV19, TRBJ2-1)
CASSKDRGQDEQFF

SEQ ID NO: 779639 - protein, 21 aa, Homo sapiens
  CDR3 for alpha chain variable domain of TCR clone 389820 (TRAV1-2, TRAJ8)
CAVREDTGSQKTCIWNWHPTS

SEQ ID NO: 779640 - protein, 15 aa, Homo sapiens
  CDR3 for beta chain variable domain of TCR clone 389820 (TRBV28, TRBJ2-6)
CASSLAGSGANVLTF

SEQ ID NO: 779641 - protein, 14 aa, Homo sapiens
  CDR3 for alpha chain variable domain of TCR clone 389821 (TRAV1-2, TRAJ8)
CAVREDTGFQKLVC

SEQ ID NO: 779642 - protein, 12 aa, Homo sapiens
  CDR3 for beta chain variable domain of TCR clone 389821 (TRBV11-2, TRBJ2-2)
CASSLGGGELFF

SEQ ID NO: 779643 - protein, 12 aa, Homo sapiens
  CDR3 for alpha chain variable domain of TCR clone 389822 (TRAV12-1, TRAJ40)
CVVYSGTYKYIF

SEQ ID NO: 779644 - protein, 15 aa, Homo sapiens
  CDR3 for beta chain variable domain of TCR clone 389822 (TRBV7-9, TRBJ2-7)
CASSSPGRGNSPLHF

SEQ ID NO: 779645 - protein, 16 aa, Homo sapiens
  CDR3 for alpha chain variable domain of TCR clone 389823 (TRAV21, TRAJ37)
CAVRTAGSSETGKLIF

SEQ ID NO: 779646 - protein, 13 aa, Homo sapiens
  CDR3 for beta chain variable domain of TCR clone 389823 (TRBV7-9, TRBJ2-5)
CASLPSGRETQYF

SEQ ID NO: 779647 - protein, 12 aa, Homo sapiens
  CDR3 for alpha chain variable domain of TCR clone 389824 (TRAV8-3, TRAJ26)
CAGDNYVQNFVF

SEQ ID NO: 779648 - protein, 13 aa, Homo sapiens
  CDR3 for beta chain variable domain of TCR clone 389824 (TRBV10-3, TRBJ2-7)
CASKLAVNYEQYF

SEQ ID NO: 779649 - protein, 16 aa, Homo sapiens
  CDR3 for alpha chain variable domain of TCR clone 389825 (TRAV16, TRAJ4)
CARSRMFSGGYNKLIF

SEQ ID NO: 779650 - protein, 16 aa, Homo sapiens
  CDR3 for beta chain variable domain of TCR clone 389825 (TRBV24-1, TRBJ2-3)
CATSDPATGATDTQYF

SEQ ID NO: 779651 - protein, 11 aa, Homo sapiens
  CDR3 for alpha chain variable domain of TCR clone 389826 (TRAV3, TRAJ21)
CAVGNFNKFYF

SEQ ID NO: 779652 - protein, 19 aa, Homo sapiens
  CDR3 for beta chain variable domain of TCR clone 389826 (TRBV4-1, TRBJ2-1)
CASSQGPLPGLGSRNEQFF

SEQ ID NO: 779653 - protein, 10 aa, Homo sapiens
  CDR3 for alpha chain variable domain of TCR clone 389827 (TRAV8-4, TRAJ43)
CAVSADDMRF

SEQ ID NO: 779654 - protein, 15 aa, Homo sapiens
  CDR3 for beta chain variable domain of TCR clone 389827 (TRBV28, TRBJ2-3)
CASSQELGGTDTQYF

SEQ ID NO: 779655 - protein, 13 aa, Homo sapiens
  CDR3 for alpha chain variable domain of TCR clone 389828 (TRAV13-1, TRAJ12)
CAASPDSSYKLIF

SEQ ID NO: 779656 - protein, 14 aa, Homo sapiens
  CDR3 for beta chain variable domain of TCR clone 389828 (TRBV19, TRBJ2-5)
CASSMTGQQETQYF

SEQ ID NO: 779657 - protein, 15 aa, Homo sapiens
  CDR3 for alpha chain variable domain of TCR clone 389829 (TRAV16, TRAJ26)
CITLLQGNYGQNFVF

SEQ ID NO: 779658 - protein, 15 aa, Homo sapiens
  CDR3 for beta chain variable domain of TCR clone 389829 (TRBV7-2, TRBJ2-3)
CASSLTGTSTDTQYF

SEQ ID NO: 779659 - protein, 15 aa, Homo sapiens
  CDR3 for alpha chain variable domain of TCR clone 389830 (TRAV8-3, TRAJ40)
CAAPSLGSGPYKYIF

SEQ ID NO: 779660 - protein, 13 aa, Homo sapiens
  CDR3 for beta chain variable domain of TCR clone 389830 (TRBV10-3, TRBJ2-7)
CASKLAVNYEQYF

SEQ ID NO: 779661 - protein, 16 aa, Homo sapiens
  CDR3 for alpha chain variable domain of TCR clone 389831 (TRAV3, TRAJ10)
CAVRDMRAGGGNKLTF

SEQ ID NO: 779662 - protein, 14 aa, Homo sapiens
  CDR3 for beta chain variable domain of TCR clone 389831 (TRBV7-2, TRBJ2-7)
CASSLYPGRYEQYF

SEQ ID NO: 779663 - protein, 12 aa, Homo sapiens
  CDR3 for alpha chain variable domain of TCR clone 389832 (TRAV1-2, TRAJ29)
CAVPSGDTPLVF

SEQ ID NO: 779664 - protein, 12 aa, Homo sapiens
  CDR3 for beta chain variable domain of TCR clone 389832 (TRBV7-9, TRBJ2-7)
SASSFGSYEQYF

SEQ ID NO: 779665 - protein, 14 aa, Homo sapiens
  CDR3 for alpha chain variable domain of TCR clone 389833 (TRAV12-2, TRAJ38)
CAPQTAGNNRKLIG

SEQ ID NO: 779666 - protein, 18 aa, Homo sapiens
  CDR3 for beta chain variable domain of TCR clone 389833 (TRBV28, TRBJ1-3)
CASKTPVGQIGSGNTIYF

SEQ ID NO: 779667 - protein, 11 aa, Homo sapiens
  CDR3 for alpha chain variable domain of TCR clone 389834 (TRAV1-2, TRAJ20)
CAVSNDYKISF

SEQ ID NO: 779668 - protein, 16 aa, Homo sapiens
  CDR3 for beta chain variable domain of TCR clone 389834 (TRBV12-5, TRBJ2-5)
CASGPRTSGNQETQYF

SEQ ID NO: 779669 - protein, 12 aa, Homo sapiens
  CDR3 for alpha chain variable domain of TCR clone 389835 (TRAV21, TRAJ49)
CAVNDGGNQFYF

SEQ ID NO: 779670 - protein, 14 aa, Homo sapiens
  CDR3 for beta chain variable domain of TCR clone 389835 (TRBV18, TRBJ2-7)
CASSPRGGSYEQSF

SEQ ID NO: 779671 - protein, 14 aa, Homo sapiens
  CDR3 for alpha chain variable domain of TCR clone 389836 (TRAV20, TRAJ32)
CCGRYGGATNKLIF

SEQ ID NO: 779672 - protein, 14 aa, Homo sapiens
  CDR3 for beta chain variable domain of TCR clone 389836 (TRBV7-2, TRBJ2-7)
CASSPKTSFYEQYF

SEQ ID NO: 779673 - protein, 14 aa, Homo sapiens
  CDR3 for alpha chain variable domain of TCR clone 389837 (TRAV8-3, TRAJ36)
CAVGPITGANNLVF

SEQ ID NO: 779674 - protein, 15 aa, Homo sapiens
  CDR3 for beta chain variable domain of TCR clone 389837 (TRBV4-1, TRBJ2-1)
CASSQDPGNYNEQFF

SEQ ID NO: 779675 - protein, 13 aa, Homo sapiens
  CDR3 for alpha chain variable domain of TCR clone 389838 (TRAV2, TRAJ40)
CAVVTSGTYKYIF

SEQ ID NO: 779676 - protein, 14 aa, Homo sapiens
  CDR3 for beta chain variable domain of TCR clone 389838 (TRBV19, TRBJ1-1)
CASTGHRLNTEAFF

SEQ ID NO: 779677 - protein, 15 aa, Homo sapiens
  CDR3 for alpha chain variable domain of TCR clone 389839 (TRAV26-1, TRAJ29)
CIVRVEGSGNTPLVF

SEQ ID NO: 779678 - protein, 13 aa, Homo sapiens
  CDR3 for beta chain variable domain of TCR clone 389839 (TRBV7-9, TRBJ2-2)
CASSLDPTGELFF

SEQ ID NO: 779679 - protein, 15 aa, Homo sapiens
  CDR3 for alpha chain variable domain of TCR clone 389840 (TRAV2, TRAJ11)
CAVEDPNSGYSTLTF

SEQ ID NO: 779680 - protein, 15 aa, Homo sapiens
  CDR3 for beta chain variable domain of TCR clone 389840 (TRBV20-1, TRBJ2-7)
CSARDRVSGMDEQYF

SEQ ID NO: 779681 - protein, 12 aa, Homo sapiens
  CDR3 for alpha chain variable domain of TCR clone 389841 (TRAV35, TRAJ43)
CAGSYNNNDMRF

SEQ ID NO: 779682 - protein, 14 aa, Homo sapiens
  CDR3 for beta chain variable domain of TCR clone 389841 (TRBV2, TRBJ2-2)
CASSWQGATGELFF

SEQ ID NO: 779683 - protein, 14 aa, Homo sapiens
  CDR3 for alpha chain variable domain of TCR clone 389842 (TRAV27, TRAJ50)
CAGGMKTSYDKVIF

SEQ ID NO: 779684 - protein, 15 aa, Homo sapiens
  CDR3 for beta chain variable domain of TCR clone 389842 (TRBV7-9, TRBJ2-2)
CASNSWGGRTGELFF

SEQ ID NO: 779685 - protein, 16 aa, Homo sapiens
  CDR3 for alpha chain variable domain of TCR clone 389843 (TRAV30, TRAJ24)
CGTEIVDADSWGTFHF

SEQ ID NO: 779686 - protein, 14 aa, Homo sapiens
  CDR3 for beta chain variable domain of TCR clone 389843 (TRBV19, TRBJ2-1)
CASSRLASINEQFF

SEQ ID NO: 779687 - protein, 13 aa, Homo sapiens
  CDR3 for alpha chain variable domain of TCR clone 389844 (TRAV17, TRAJ6)
CATGFGGRYIPTF

SEQ ID NO: 779688 - protein, 14 aa, Homo sapiens
  CDR3 for beta chain variable domain of TCR clone 389844 (TRBV5-1, TRBJ2-5)
CASSFGGSQETQYF

SEQ ID NO: 779689 - protein, 15 aa, Homo sapiens
  CDR3 for alpha chain variable domain of TCR clone 389845 (TRAV26-1, TRAJ29)
CIVRVKGSGNTPLVF

SEQ ID NO: 779690 - protein, 15 aa, Homo sapiens
  CDR3 for beta chain variable domain of TCR clone 389845 (TRBV7-9, TRBJ1-5)
CASSQGHQPNQTQHF

SEQ ID NO: 779691 - protein, 14 aa, Homo sapiens
  CDR3 for alpha chain variable domain of TCR clone 389846 (TRAV13-2, TRAJ45)
CAEMSGGGADGLTF

SEQ ID NO: 779692 - protein, 17 aa, Homo sapiens
  CDR3 for beta chain variable domain of TCR clone 389846 (TRBV25-1, TRBJ2-7)
CASSDARVVFSSYEQYF

SEQ ID NO: 779693 - protein, 12 aa, Homo sapiens
  CDR3 for alpha chain variable domain of TCR clone 389847 (TRAV8-3, TRAJ26)
CAGDNYGENFVF

SEQ ID NO: 779694 - protein, 12 aa, Homo sapiens
  CDR3 for beta chain variable domain of TCR clone 389847 (TRBV7-9, TRBJ1-5)
CASSSDQAPQHF

SEQ ID NO: 779695 - protein, 17 aa, Homo sapiens
  CDR3 for alpha chain variable domain of TCR clone 389848 (TRAV12-2, TRAJ6)
CAPQGPPRAGGSYIPTF

SEQ ID NO: 779696 - protein, 16 aa, Homo sapiens
  CDR3 for beta chain variable domain of TCR clone 389848 (TRBV19, TRBJ2-2)
CASSTARASNAGELFF

SEQ ID NO: 779697 - protein, 16 aa, Homo sapiens
  CDR3 for alpha chain variable domain of TCR clone 389849 (TRAV12-3, TRAJ53)
CAMGPGSGGSNDKLTF

SEQ ID NO: 779698 - protein, 11 aa, Homo sapiens
  CDR3 for beta chain variable domain of TCR clone 389849 (TRBV29-1, TRBJ2-5)
CSEDRTGTQYF

SEQ ID NO: 779699 - protein, 14 aa, Homo sapiens
  CDR3 for alpha chain variable domain of TCR clone 389850 (TRAV2, TRAJ3)
CAVDRYSSASKIIV

SEQ ID NO: 779700 - protein, 16 aa, Homo sapiens
  CDR3 for beta chain variable domain of TCR clone 389850 (TRBV20-1, TRBJ1-5)
CSAELPGQQTNQPQHF

SEQ ID NO: 779701 - protein, 11 aa, Homo sapiens
  CDR3 for alpha chain variable domain of TCR clone 389851 (TRAV2, TRAJ33)
CAVESNYQLIW

SEQ ID NO: 779702 - protein, 15 aa, Homo sapiens
  CDR3 for beta chain variable domain of TCR clone 389851 (TRBV11-3, TRBJ2-3)
CASLKDRREGDTQYF

SEQ ID NO: 779703 - protein, 14 aa, Homo sapiens
  CDR3 for alpha chain variable domain of TCR clone 389852 (TRAV20, TRAJ32)
CCGRYGGATNKLIF

SEQ ID NO: 779704 - protein, 12 aa, Homo sapiens
  CDR3 for beta chain variable domain of TCR clone 389852 (TRBV7-9, TRBJ1-4)
CASSTDREKLFF

SEQ ID NO: 779705 - protein, 16 aa, Homo sapiens
  CDR3 for alpha chain variable domain of TCR clone 389853 (TRAV3, TRAJ37)
CAVRGQGSGNTGKLSF

SEQ ID NO: 779706 - protein, 13 aa, Homo sapiens
  CDR3 for beta chain variable domain of TCR clone 389853 (TRBV14, TRBJ2-7)
CASSQDRRYEQYF

SEQ ID NO: 779707 - protein, 14 aa, Homo sapiens
  CDR3 for alpha chain variable domain of TCR clone 389854 (TRAV35, TRAJ24)
CAGPRRDSWGKLQF

SEQ ID NO: 779708 - protein, 14 aa, Homo sapiens
  CDR3 for beta chain variable domain of TCR clone 389854 (TRBV7-6, TRBJ2-3)
CASSLGTVTDTQYF

SEQ ID NO: 779709 - protein, 14 aa, Homo sapiens
  CDR3 for alpha chain variable domain of TCR clone 389855 (TRAV26-1, TRAJ38)
CNADNAGNNRKLIW

SEQ ID NO: 779710 - protein, 13 aa, Homo sapiens
  CDR3 for beta chain variable domain of TCR clone 389855 (TRBV20-1, TRBJ1-1)
CSARGGGNTEAFS

SEQ ID NO: 779711 - protein, 14 aa, Homo sapiens
  CDR3 for alpha chain variable domain of TCR clone 389856 (TRAV13-1, TRAJ35)
CAASKGGFGNVLHC

SEQ ID NO: 779712 - protein, 14 aa, Homo sapiens
  CDR3 for beta chain variable domain of TCR clone 389856 (TRBV7-2, TRBJ1-6)
CASSLQGANSPLHF

SEQ ID NO: 779713 - protein, 19 aa, Homo sapiens
  CDR3 for alpha chain variable domain of TCR clone 389857 (TRAV3, TRAJ37)
CAVRDIVGDYPSNTGKLIF

SEQ ID NO: 779714 - protein, 14 aa, Homo sapiens
  CDR3 for beta chain variable domain of TCR clone 389857 (TRBV7-8, TRBJ2-3)
CASSLEAGTDTQYF

SEQ ID NO: 779715 - protein, 14 aa, Homo sapiens
  CDR3 for alpha chain variable domain of TCR clone 389858 (TRAV20, TRAJ22)
YAVALGGSARQLTF

SEQ ID NO: 779716 - protein, 15 aa, Homo sapiens
  CDR3 for beta chain variable domain of TCR clone 389858 (TRBV7-2, TRBJ1-1)
CASSFAGDRDTEAFF

SEQ ID NO: 779717 - protein, 16 aa, Homo sapiens
  CDR3 for alpha chain variable domain of TCR clone 389859 (TRAV20, TRAJ53)
CAVRRGSGGSNYKLKF

SEQ ID NO: 779718 - protein, 12 aa, Homo sapiens
  CDR3 for beta chain variable domain of TCR clone 389859 (TRBV29-1, TRBJ2-3)
CSVVLGADTQYF

SEQ ID NO: 779719 - protein, 11 aa, Homo sapiens
  CDR3 for alpha chain variable domain of TCR clone 389860 (TRAV12-2, TRAJ31)
CAILNHARLMF

SEQ ID NO: 779720 - protein, 13 aa, Homo sapiens
  CDR3 for beta chain variable domain of TCR clone 389860 (TRBV20-1, TRBJ1-1)
CSARLGQGTEAFF

SEQ ID NO: 779721 - protein, 15 aa, Homo sapiens
  CDR3 for alpha chain variable domain of TCR clone 389861 (TRAV8-6, TRAJ10)
CAVSDQAGGGNKLNF

SEQ ID NO: 779722 - protein, 14 aa, Homo sapiens
  CDR3 for beta chain variable domain of TCR clone 389861 (TRBV7-8, TRBJ2-3)
CASSLEAGTDTQYF

SEQ ID NO: 779723 - protein, 13 aa, Homo sapiens
  CDR3 for alpha chain variable domain of TCR clone 389862 (TRAV21, TRAJ27)
CAARPGNAGKSTF

SEQ ID NO: 779724 - protein, 16 aa, Homo sapiens
  CDR3 for beta chain variable domain of TCR clone 389862 (TRBV2, TRBJ2-5)
CASSETQGVGEETQYF

SEQ ID NO: 779725 - protein, 17 aa, Homo sapiens
  CDR3 for alpha chain variable domain of TCR clone 389863 (TRAV3, TRAJ6)
CAVRDSSRAGGSYIPTF

SEQ ID NO: 779726 - protein, 14 aa, Homo sapiens
  CDR3 for beta chain variable domain of TCR clone 389863 (TRBV7-2, TRBJ2-7)
CASSPKTSFYEQYF

SEQ ID NO: 779727 - protein, 14 aa, Homo sapiens
  CDR3 for alpha chain variable domain of TCR clone 389864 (TRAV13-1, TRAJ35)
CAASKGGFGNVLHC

SEQ ID NO: 779728 - protein, 13 aa, Homo sapiens
  CDR3 for beta chain variable domain of TCR clone 389864 (TRBV7-3, TRBJ1-1)
CASSQDWGAEACV

SEQ ID NO: 779729 - protein, 12 aa, Homo sapiens
  CDR3 for alpha chain variable domain of TCR clone 389865 (TRAV34, TRAJ27)
CGADTNAGKSTF

SEQ ID NO: 779730 - protein, 14 aa, Homo sapiens
  CDR3 for beta chain variable domain of TCR clone 389865 (TRBV19, TRBJ2-1)
CASPTFVLSGEQFF

SEQ ID NO: 779731 - protein, 17 aa, Homo sapiens
  CDR3 for alpha chain variable domain of TCR clone 389866 (TRAV4, TRAJ42)
CLVGVLNYGGSQGNLIF

SEQ ID NO: 779732 - protein, 17 aa, Homo sapiens
  CDR3 for beta chain variable domain of TCR clone 389866 (TRBV13, TRBJ2-3)
CASSLSRVAGGRNTQYF

SEQ ID NO: 779733 - protein, 15 aa, Homo sapiens
  CDR3 for alpha chain variable domain of TCR clone 389867 (TRAV30, TRAJ32)
CGTEILGGATNKLIF

SEQ ID NO: 779734 - protein, 13 aa, Homo sapiens
  CDR3 for beta chain variable domain of TCR clone 389867 (TRBV2, TRBJ1-4)
CASSERAGEKLFF

SEQ ID NO: 779735 - protein, 12 aa, Homo sapiens
  CDR3 for alpha chain variable domain of TCR clone 389868 (TRAV13-1, TRAJ27)
CAAHTNAGKSTF

SEQ ID NO: 779736 - protein, 16 aa, Homo sapiens
  CDR3 for beta chain variable domain of TCR clone 389868 (TRBV12-4, TRBJ2-7)
CASSLIGGTGTYEQYL

SEQ ID NO: 779737 - protein, 14 aa, Homo sapiens
  CDR3 for alpha chain variable domain of TCR clone 389869 (TRAV17, TRAJ6)
CATSAMGGSYIPTF

SEQ ID NO: 779738 - protein, 12 aa, Homo sapiens
  CDR3 for beta chain variable domain of TCR clone 389869 (TRBV19, TRBJ2-1)
CASSMQDTEQFF

SEQ ID NO: 779739 - protein, 12 aa, Homo sapiens
  CDR3 for alpha chain variable domain of TCR clone 389870 (TRAV29/DV5, TRAJ34)
CAARHNTVKLIF

SEQ ID NO: 779740 - protein, 16 aa, Homo sapiens
  CDR3 for beta chain variable domain of TCR clone 389870 (TRBV19, TRBJ2-1)
CASSKAGPSSYNEQFF

SEQ ID NO: 779741 - protein, 20 aa, Homo sapiens
  CDR3 for alpha chain variable domain of TCR clone 389871 (TRAV1-1, TRAJ4)
CLLLLRCEGFLSGGYNKLIF

SEQ ID NO: 779742 - protein, 13 aa, Homo sapiens
  CDR3 for beta chain variable domain of TCR clone 389871 (TRBV5-1, TRBJ1-2)
CASSIDRPEGYTF

SEQ ID NO: 779743 - protein, 14 aa, Homo sapiens
  CDR3 for alpha chain variable domain of TCR clone 389872 (TRAV12-1, TRAJ9)
CVVTGYTGGFKTIF

SEQ ID NO: 779744 - protein, 17 aa, Homo sapiens
  CDR3 for beta chain variable domain of TCR clone 389872 (TRBV5-1, TRBJ2-2)
CASSEKPNFANTGELFF

SEQ ID NO: 779745 - protein, 15 aa, Homo sapiens
  CDR3 for alpha chain variable domain of TCR clone 389873 (TRAV35, TRAJ41)
CAGQLFSNSGYALNF

SEQ ID NO: 779746 - protein, 14 aa, Homo sapiens
  CDR3 for beta chain variable domain of TCR clone 389873 (TRBV7-2, TRBJ1-2)
CASSRGGTSYGYTF

SEQ ID NO: 779747 - protein, 15 aa, Homo sapiens
  CDR3 for alpha chain variable domain of TCR clone 389874 (TRAV26-1, TRAJ29)
CIVRVEGSGNTPLVF

SEQ ID NO: 779748 - protein, 12 aa, Homo sapiens
  CDR3 for beta chain variable domain of TCR clone 389874 (TRBV24-1, TRBJ2-7)
CATSDPGYEQYF

SEQ ID NO: 779749 - protein, 17 aa, Homo sapiens
  CDR3 for alpha chain variable domain of TCR clone 389875 (TRAV3, TRAJ6)
CAVRDGPRTGGSYIPTF

SEQ ID NO: 779750 - protein, 12 aa, Homo sapiens
  CDR3 for beta chain variable domain of TCR clone 389875 (TRBV2, TRBJ2-7)
CASSDPDYEQYF

SEQ ID NO: 779751 - protein, 14 aa, Homo sapiens
  CDR3 for alpha chain variable domain of TCR clone 389876 (TRAV1-2, TRAJ16)
CAVNRFSDGQKLLF

SEQ ID NO: 779752 - protein, 17 aa, Homo sapiens
  CDR3 for beta chain variable domain of TCR clone 389876 (TRBV28, TRBJ2-5)
CANSRQGGLAGAETQYF

SEQ ID NO: 779753 - protein, 12 aa, Homo sapiens
  CDR3 for alpha chain variable domain of TCR clone 389877 (TRAV8-3, TRAJ20)
CAVGANDHKLSF

SEQ ID NO: 779754 - protein, 15 aa, Homo sapiens
  CDR3 for beta chain variable domain of TCR clone 389877 (TRBV7-3, TRBJ2-1)
CASSLTSGSYNEQFF

SEQ ID NO: 779755 - protein, 12 aa, Homo sapiens
  CDR3 for alpha chain variable domain of TCR clone 389878 (TRAV12-2, TRAJ34)
CAVSYNTDKLIF

SEQ ID NO: 779756 - protein, 16 aa, Homo sapiens
  CDR3 for beta chain variable domain of TCR clone 389878 (TRBV27, TRBJ2-5)
CAISYGPGGQKETQYF

SEQ ID NO: 779757 - protein, 11 aa, Homo sapiens
  CDR3 for alpha chain variable domain of TCR clone 389879 (TRAV13-1, TRAJ52)
PGGTSYGRLTF

SEQ ID NO: 779758 - protein, 16 aa, Homo sapiens
  CDR3 for beta chain variable domain of TCR clone 389879 (TRBV28, TRBJ2-7)
CASSPWVATGDLSQYL

SEQ ID NO: 779759 - protein, 15 aa, Homo sapiens
  CDR3 for alpha chain variable domain of TCR clone 389880 (TRAV27, TRAJ38)
CAARRNAGNNRKLIW

SEQ ID NO: 779760 - protein, 13 aa, Homo sapiens
  CDR3 for beta chain variable domain of TCR clone 389880 (TRBV7-8, TRBJ2-7)
CASSLTGGREQYF

SEQ ID NO: 779761 - protein, 16 aa, Homo sapiens
  CDR3 for alpha chain variable domain of TCR clone 389881 (TRAV30, TRAJ24)
LGTEIVDADSWGKFQF

SEQ ID NO: 779762 - protein, 14 aa, Homo sapiens
  CDR3 for beta chain variable domain of TCR clone 389881 (TRBV12-5, TRBJ2-5)
CASGSRTHQETQYF

SEQ ID NO: 779763 - protein, 15 aa, Homo sapiens
  CDR3 for alpha chain variable domain of TCR clone 389882 (TRAV12-2, TRAJ13)
CRESLGSGGYQKVTF

SEQ ID NO: 779764 - protein, 13 aa, Homo sapiens
  CDR3 for beta chain variable domain of TCR clone 389882 (TRBV5-1, TRBJ2-2)
CASIVARTGELFF

SEQ ID NO: 779765 - protein, 10 aa, Homo sapiens
  CDR3 for alpha chain variable domain of TCR clone 389883 (TRAV12-3, TRAJ18)
CAMSAEAQSW

SEQ ID NO: 779766 - protein, 13 aa, Homo sapiens
  CDR3 for beta chain variable domain of TCR clone 389883 (TRBV15, TRBJ1-6)
CATSGGLNSPLHF

SEQ ID NO: 779767 - protein, 16 aa, Homo sapiens
  CDR3 for alpha chain variable domain of TCR clone 389884 (TRAV26-1, TRAJ40)
CIVRGYTTSGTYKYIF

SEQ ID NO: 779768 - protein, 14 aa, Homo sapiens
  CDR3 for beta chain variable domain of TCR clone 389884 (TRBV5-1, TRBJ1-4)
CASSSGQGGEKLFF

SEQ ID NO: 779769 - protein, 15 aa, Homo sapiens
  CDR3 for alpha chain variable domain of TCR clone 389885 (TRAV3, TRAJ5)
RAVRDLDTGRRALTF

SEQ ID NO: 779770 - protein, 14 aa, Homo sapiens
  CDR3 for beta chain variable domain of TCR clone 389885 (TRBV25-1, TRBJ1-1)
CASTHLGGNTEAFF

SEQ ID NO: 779771 - protein, 14 aa, Homo sapiens
  CDR3 for alpha chain variable domain of TCR clone 389886 (TRAV2, TRAJ8)
CAVEHRLSETCIWN

SEQ ID NO: 779772 - protein, 15 aa, Homo sapiens
  CDR3 for beta chain variable domain of TCR clone 389886 (TRBV15, TRBJ2-7)
CATSSRQESSYEQYF

SEQ ID NO: 779773 - protein, 14 aa, Homo sapiens
  CDR3 for alpha chain variable domain of TCR clone 389887 (TRAV26-1, TRAJ39)
CIVRGSMAGKMLTF

SEQ ID NO: 779774 - protein, 15 aa, Homo sapiens
  CDR3 for beta chain variable domain of TCR clone 389887 (TRBV7-9, TRBJ1-5)
CASSQGHQPNQPQHF

SEQ ID NO: 779775 - protein, 14 aa, Homo sapiens
  CDR3 for alpha chain variable domain of TCR clone 389888 (TRAV8-6, TRAJ29)
CALSRASGNTPLVF

SEQ ID NO: 779776 - protein, 13 aa, Homo sapiens
  CDR3 for beta chain variable domain of TCR clone 389888 (TRBV19, TRBJ1-5)
CASSEGSNQPQHF

SEQ ID NO: 779777 - protein, 16 aa, Homo sapiens
  CDR3 for alpha chain variable domain of TCR clone 389889 (TRAV3, TRAJ37)
CAVRPHGSGNTGKLIV

SEQ ID NO: 779778 - protein, 17 aa, Homo sapiens
  CDR3 for beta chain variable domain of TCR clone 389889 (TRBV20-1, TRBJ2-1)
CSASSSGLAGSYNEQFF

SEQ ID NO: 779779 - protein, 14 aa, Homo sapiens
  CDR3 for alpha chain variable domain of TCR clone 389890 (TRAV36/DV7, TRAJ57)
CVVGFPGGSEKLVF

SEQ ID NO: 779780 - protein, 12 aa, Homo sapiens
  CDR3 for beta chain variable domain of TCR clone 389890 (TRBV19, TRBJ2-7)
CASTSGTYEQYF

SEQ ID NO: 779781 - protein, 14 aa, Homo sapiens
  CDR3 for alpha chain variable domain of TCR clone 389891 (TRAV12-3, TRAJ29)
CAMILLSGNTPLVF

SEQ ID NO: 779782 - protein, 13 aa, Homo sapiens
  CDR3 for beta chain variable domain of TCR clone 389891 (TRBV19, TRBJ1-2)
CASSVPGQDGYTF

SEQ ID NO: 779783 - protein, 12 aa, Homo sapiens
  CDR3 for alpha chain variable domain of TCR clone 389892 (TRAV30, TRAJ39)
CVRGNAGNMLTF

SEQ ID NO: 779784 - protein, 15 aa, Homo sapiens
  CDR3 for beta chain variable domain of TCR clone 389892 (TRBV5-1, TRBJ1-1)
CASSWTGRGNTEAFF

SEQ ID NO: 779785 - protein, 11 aa, Homo sapiens
  CDR3 for alpha chain variable domain of TCR clone 389893 (TRAV2, TRAJ13)
CASGGYQKVTF

SEQ ID NO: 779786 - protein, 16 aa, Homo sapiens
  CDR3 for beta chain variable domain of TCR clone 389893 (TRBV6-1, TRBJ2-5)
CASSETLDRGAEQQYF

SEQ ID NO: 779787 - protein, 18 aa, Homo sapiens
  CDR3 for alpha chain variable domain of TCR clone 389894 (TRAV21, TRAJ52)
CAVRPSPAGGTSYGKLTF

SEQ ID NO: 779788 - protein, 15 aa, Homo sapiens
  CDR3 for beta chain variable domain of TCR clone 389894 (TRBV5-1, TRBJ2-7)
CASSLNGGPAREQYF

SEQ ID NO: 779789 - protein, 12 aa, Homo sapiens
  CDR3 for alpha chain variable domain of TCR clone 389895 (TRAV21, TRAJ30)
CAVMNRYDKIIF

SEQ ID NO: 779790 - protein, 17 aa, Homo sapiens
  CDR3 for beta chain variable domain of TCR clone 389895 (TRBV5-1, TRBJ1-1)
CASRPIRTGGVNTEAFF

SEQ ID NO: 779791 - protein, 14 aa, Homo sapiens
  CDR3 for alpha chain variable domain of TCR clone 389896 (TRAV35, TRAJ33)
CAGSSQDSNYQLIW

SEQ ID NO: 779792 - protein, 14 aa, Homo sapiens
  CDR3 for beta chain variable domain of TCR clone 389896 (TRBV5-1, TRBJ2-7)
RASSRGESLYEQYF

SEQ ID NO: 779793 - protein, 16 aa, Homo sapiens
  CDR3 for alpha chain variable domain of TCR clone 389897 (TRAV27, TRAJ34)
CAGGGLGDYNTAKLIF

SEQ ID NO: 779794 - protein, 15 aa, Homo sapiens
  CDR3 for beta chain variable domain of TCR clone 389897 (TRBV9, TRBJ1-4)
CASSVGGSTNEKLFF

SEQ ID NO: 779795 - protein, 12 aa, Homo sapiens
  CDR3 for alpha chain variable domain of TCR clone 389898 (TRAV12-2, TRAJ30)
CAVRNRDDKIIF

SEQ ID NO: 779796 - protein, 15 aa, Homo sapiens
  CDR3 for beta chain variable domain of TCR clone 389898 (TRBV6-3, TRBJ1-5)
CASRVDRWSNQPQHL

SEQ ID NO: 779797 - protein, 16 aa, Homo sapiens
  CDR3 for alpha chain variable domain of TCR clone 389899 (TRAV30, TRAJ24)
CGTEIVDADSWGKFQF

SEQ ID NO: 779798 - protein, 12 aa, Homo sapiens
  CDR3 for beta chain variable domain of TCR clone 389899 (TRBV11-2, TRBJ2-2)
CAVPRNTGELFF

SEQ ID NO: 779799 - protein, 17 aa, Homo sapiens
  CDR3 for alpha chain variable domain of TCR clone 389900 (TRAV12-3, TRAJ52)
CNERGRGWCTSYGKLTF

SEQ ID NO: 779800 - protein, 14 aa, Homo sapiens
  CDR3 for beta chain variable domain of TCR clone 389900 (TRBV7-2, TRBJ2-7)
CASRSQGAAYEQYF

SEQ ID NO: 779801 - protein, 15 aa, Homo sapiens
  CDR3 for alpha chain variable domain of TCR clone 389901 (TRAV3, TRAJ22)
CAVRDRGGSARQLPF

SEQ ID NO: 779802 - protein, 13 aa, Homo sapiens
  CDR3 for beta chain variable domain of TCR clone 389901 (TRBV12-4, TRBJ1-2)
CASSLRQGKGYTF

SEQ ID NO: 779803 - protein, 13 aa, Homo sapiens
  CDR3 for alpha chain variable domain of TCR clone 389902 (TRAV21, TRAJ20)
CAVGLRVGYKLSF

SEQ ID NO: 779804 - protein, 15 aa, Homo sapiens
  CDR3 for beta chain variable domain of TCR clone 389902 (TRBV29-1, TRBJ2-1)
CSVPTGLALYNEQFF

SEQ ID NO: 779805 - protein, 12 aa, Homo sapiens
  CDR3 for alpha chain variable domain of TCR clone 389903 (TRAV13-1, TRAJ53)
AASGGSNFKLTF

SEQ ID NO: 779806 - protein, 15 aa, Homo sapiens
  CDR3 for beta chain variable domain of TCR clone 389903 (TRBV5-1, TRBJ2-1)
CASSPPRAPYNEQFF

SEQ ID NO: 779807 - protein, 14 aa, Homo sapiens
  CDR3 for alpha chain variable domain of TCR clone 389904 (TRAV12-1, TRAJ23)
CAVMIYNQGGKLIF

SEQ ID NO: 779808 - protein, 23 aa, Homo sapiens
  CDR3 for beta chain variable domain of TCR clone 389904 (TRBV7-3, TRBJ1-6)
CASSLTSRDEASDPSSYNSPLHF

SEQ ID NO: 779809 - protein, 14 aa, Homo sapiens
  CDR3 for alpha chain variable domain of TCR clone 389905 (TRAV1-2, TRAJ16)
CAVNRFSDGQKLLF

SEQ ID NO: 779810 - protein, 13 aa, Homo sapiens
  CDR3 for beta chain variable domain of TCR clone 389905 (TRBV27, TRBJ2-7)
CSSSLTTGYEQYF

SEQ ID NO: 779811 - protein, 15 aa, Homo sapiens
  CDR3 for alpha chain variable domain of TCR clone 389906 (TRAV8-3, TRAJ45)
WASSYSGGGADGLTF

SEQ ID NO: 779812 - protein, 16 aa, Homo sapiens
  CDR3 for beta chain variable domain of TCR clone 389906 (TRBV20-1, TRBJ2-2)
CSASASGIPGAGELFF

SEQ ID NO: 779813 - protein, 14 aa, Homo sapiens
  CDR3 for alpha chain variable domain of TCR clone 389907 (TRAV13-2, TRAJ17)
CAENSKAAGNKRTF

SEQ ID NO: 779814 - protein, 11 aa, Homo sapiens
  CDR3 for beta chain variable domain of TCR clone 389907 (TRBV6-3, TRBJ2-3)
CATGQADTQYF

SEQ ID NO: 779815 - protein, 15 aa, Homo sapiens
  CDR3 for alpha chain variable domain of TCR clone 389908 (TRAV3, TRAJ20)
CAVRDIKLNDYKLSF

SEQ ID NO: 779816 - protein, 15 aa, Homo sapiens
  CDR3 for beta chain variable domain of TCR clone 389908 (TRBV7-9, TRBJ1-6)
CASSSPGRGNSPLHF

SEQ ID NO: 779817 - protein, 13 aa, Homo sapiens
  CDR3 for alpha chain variable domain of TCR clone 389909 (TRAV8-3, TRAJ48)
CAVVPFGNEKLTL

SEQ ID NO: 779818 - protein, 15 aa, Homo sapiens
  CDR3 for beta chain variable domain of TCR clone 389909 (TRBV11-2, TRBJ2-1)
CASSSPSTRYNEQFF

SEQ ID NO: 779819 - protein, 16 aa, Homo sapiens
  CDR3 for alpha chain variable domain of TCR clone 389910 (TRAV12-2, TRAJ10)
CAVNRVLTGGGNKLTF

SEQ ID NO: 779820 - protein, 15 aa, Homo sapiens
  CDR3 for beta chain variable domain of TCR clone 389910 (TRBV27, TRBJ2-6)
CASSLQGSGANVLTF

SEQ ID NO: 779821 - protein, 13 aa, Homo sapiens
  CDR3 for alpha chain variable domain of TCR clone 389911 (TRAV27, TRAJ57)
CRRAQGGSEKLVF

SEQ ID NO: 779822 - protein, 11 aa, Homo sapiens
  CDR3 for beta chain variable domain of TCR clone 389911 (TRBV11-2, TRBJ1-1)
CASSINTEAFV

SEQ ID NO: 779823 - protein, 13 aa, Homo sapiens
  CDR3 for alpha chain variable domain of TCR clone 389912 (TRAV20, TRAJ48)
CAVQGVGNEKLTF

SEQ ID NO: 779824 - protein, 19 aa, Homo sapiens
  CDR3 for beta chain variable domain of TCR clone 389912 (TRBV2, TRBJ2-2)
CASSQPGRAGGGNTGEPFF

SEQ ID NO: 779825 - protein, 14 aa, Homo sapiens
  CDR3 for alpha chain variable domain of TCR clone 389913 (TRAV12-3, TRAJ10)
SHLPLTGGGNKLNF

SEQ ID NO: 779826 - protein, 14 aa, Homo sapiens
  CDR3 for beta chain variable domain of TCR clone 389913 (TRBV7-2, TRBJ2-7)
CASSPKTSFYEQYF

SEQ ID NO: 779827 - protein, 13 aa, Homo sapiens
  CDR3 for alpha chain variable domain of TCR clone 389914 (TRAV12-2, TRAJ12)
CAVNGDSSYKLIF

SEQ ID NO: 779828 - protein, 16 aa, Homo sapiens
  CDR3 for beta chain variable domain of TCR clone 389914 (TRBV19, TRBJ2-1)
CASSKAGPSSYNEQFF

SEQ ID NO: 779829 - protein, 15 aa, Homo sapiens
  CDR3 for alpha chain variable domain of TCR clone 389915 (TRAV26-1, TRAJ40)
CIVRDVPSGTYKYIF

SEQ ID NO: 779830 - protein, 16 aa, Homo sapiens
  CDR3 for beta chain variable domain of TCR clone 389915 (TRBV7-2, TRBJ2-2)
CASSLRGQANTGELFF

SEQ ID NO: 779831 - protein, 13 aa, Homo sapiens
  CDR3 for alpha chain variable domain of TCR clone 389916 (TRAV22, TRAJ48)
CAVERFGNEKLTF

SEQ ID NO: 779832 - protein, 13 aa, Homo sapiens
  CDR3 for beta chain variable domain of TCR clone 389916 (TRBV12-4, TRBJ1-2)
CASSVRQGKGYTF

SEQ ID NO: 779833 - protein, 16 aa, Homo sapiens
  CDR3 for alpha chain variable domain of TCR clone 389917 (TRAV30, TRAJ24)
CGTEIVDADSWGKFQF

SEQ ID NO: 779834 - protein, 14 aa, Homo sapiens
  CDR3 for beta chain variable domain of TCR clone 389917 (TRBV7-8, TRBJ2-3)
CANSLEAGTDTQYF

SEQ ID NO: 779835 - protein, 15 aa, Homo sapiens
  CDR3 for alpha chain variable domain of TCR clone 389918 (TRAV13-2, TRAJ10)
CAENKIWGGGNKLTF

SEQ ID NO: 779836 - protein, 15 aa, Homo sapiens
  CDR3 for beta chain variable domain of TCR clone 389918 (TRBV5-1, TRBJ1-2)
CASSPGDRGSYGYTF

SEQ ID NO: 779837 - protein, 17 aa, Homo sapiens
  CDR3 for alpha chain variable domain of TCR clone 389919 (TRAV3, TRAJ38)
CAVRDCLNAGNNRKPIW

SEQ ID NO: 779838 - protein, 12 aa, Homo sapiens
  CDR3 for beta chain variable domain of TCR clone 389919 (TRBV12-4, TRBJ2-7)
CASSLGGYEQYF

SEQ ID NO: 779839 - protein, 13 aa, Homo sapiens
  CDR3 for alpha chain variable domain of TCR clone 389920 (TRAV13-2, TRAJ48)
CVEMDFGNEKLTF

SEQ ID NO: 779840 - protein, 15 aa, Homo sapiens
  CDR3 for beta chain variable domain of TCR clone 389920 (TRBV7-9, TRBJ1-6)
CASSSTGRGNSPLHF

SEQ ID NO: 779841 - protein, 15 aa, Homo sapiens
  CDR3 for alpha chain variable domain of TCR clone 389921 (TRAV8-3, TRAJ45)
CASSHSGGGADGLTF

SEQ ID NO: 779842 - protein, 13 aa, Homo sapiens
  CDR3 for beta chain variable domain of TCR clone 389921 (TRBV10-3, TRBJ2-7)
CASKLGVNYEQYF

SEQ ID NO: 779843 - protein, 14 aa, Homo sapiens
  CDR3 for alpha chain variable domain of TCR clone 389922 (TRAV29/DV5, TRAJ36)
CAARRKTGSNNLFF

SEQ ID NO: 779844 - protein, 15 aa, Homo sapiens
  CDR3 for beta chain variable domain of TCR clone 389922 (TRBV5-1, TRBJ2-7)
CASSLNGGPAREQYF

SEQ ID NO: 779845 - protein, 12 aa, Homo sapiens
  CDR3 for alpha chain variable domain of TCR clone 389923 (TRAV21, TRAJ33)
CAKMDSNYQLIW

SEQ ID NO: 779846 - protein, 17 aa, Homo sapiens
  CDR3 for beta chain variable domain of TCR clone 389923 (TRBV20-1, TRBJ2-2)
YSASGSGQGGLTGELFF

SEQ ID NO: 779847 - protein, 13 aa, Homo sapiens
  CDR3 for alpha chain variable domain of TCR clone 389924 (TRAV3, TRAJ20)
CDVRDTPRYKLSF

SEQ ID NO: 779848 - protein, 16 aa, Homo sapiens
  CDR3 for beta chain variable domain of TCR clone 389924 (TRBV20-1, TRBJ2-7)
CSARAPGLALSYEQYF

SEQ ID NO: 779849 - protein, 17 aa, Homo sapiens
  CDR3 for alpha chain variable domain of TCR clone 389925 (TRAV3, TRAJ6)
CAVRDGPRAGGSYIPTF

SEQ ID NO: 779850 - protein, 16 aa, Homo sapiens
  CDR3 for beta chain variable domain of TCR clone 389925 (TRBV7-2, TRBJ2-7)
CASSPKTSFTSSTSGW

SEQ ID NO: 779851 - protein, 14 aa, Homo sapiens
  CDR3 for alpha chain variable domain of TCR clone 389926 (TRAV25, TRAJ42)
CAGNYGGSQGNLIF

SEQ ID NO: 779852 - protein, 16 aa, Homo sapiens
  CDR3 for beta chain variable domain of TCR clone 389926 (TRBV4-3, TRBJ2-2)
CASSHLQGSGTGELFF

SEQ ID NO: 779853 - protein, 12 aa, Homo sapiens
  CDR3 for alpha chain variable domain of TCR clone 389927 (TRAV12-3, TRAJ17)
CAMTLTGNKLTF

SEQ ID NO: 779854 - protein, 16 aa, Homo sapiens
  CDR3 for beta chain variable domain of TCR clone 389927 (TRBV6-1, TRBJ2-5)
CASSETQDRGAETQYF

SEQ ID NO: 779855 - protein, 13 aa, Homo sapiens
  CDR3 for alpha chain variable domain of TCR clone 389928 (TRAV12-3, TRAJ33)
CAMSVNSNYQLIW

SEQ ID NO: 779856 - protein, 13 aa, Homo sapiens
  CDR3 for beta chain variable domain of TCR clone 389928 (TRBV19, TRBJ2-2)
CASQEGIHGELFF

SEQ ID NO: 779857 - protein, 14 aa, Homo sapiens
  CDR3 for alpha chain variable domain of TCR clone 389929 (TRAV14/DV4, TRAJ42)
CPRGSLRSQGNLIF

SEQ ID NO: 779858 - protein, 14 aa, Homo sapiens
  CDR3 for beta chain variable domain of TCR clone 389929 (TRBV12-4, TRBJ2-1)
CASSLGQGASEQFF

SEQ ID NO: 779859 - protein, 11 aa, Homo sapiens
  CDR3 for alpha chain variable domain of TCR clone 389930 (TRAV4, TRAJ23)
CLVAPGGKLIF

SEQ ID NO: 779860 - protein, 15 aa, Homo sapiens
  CDR3 for beta chain variable domain of TCR clone 389930 (TRBV7-2, TRBJ2-5)
CASSLRGASGETQYF

SEQ ID NO: 779861 - protein, 13 aa, Homo sapiens
  CDR3 for alpha chain variable domain of TCR clone 389931 (TRAV12-3, TRAJ40)
CAMSDSGTYKYIF

SEQ ID NO: 779862 - protein, 14 aa, Homo sapiens
  CDR3 for beta chain variable domain of TCR clone 389931 (TRBV7-2, TRBJ1-5)
CASSIQGAGQPQHF

SEQ ID NO: 779863 - protein, 15 aa, Homo sapiens
  CDR3 for alpha chain variable domain of TCR clone 389932 (TRAV35, TRAJ58)
CAGRRQETSGSRLTF

SEQ ID NO: 779864 - protein, 15 aa, Homo sapiens
  CDR3 for beta chain variable domain of TCR clone 389932 (TRBV5-1, TRBJ1-1)
CASSLGEGENTEAFF

SEQ ID NO: 779865 - protein, 11 aa, Homo sapiens
  CDR3 for alpha chain variable domain of TCR clone 389933 (TRAV38-1, TRAJ53)
CAFMKHGLESG

SEQ ID NO: 779866 - protein, 13 aa, Homo sapiens
  CDR3 for beta chain variable domain of TCR clone 389933 (TRBV19, TRBJ2-7)
CASSPRQSYEQYF

SEQ ID NO: 779867 - protein, 12 aa, Homo sapiens
  CDR3 for alpha chain variable domain of TCR clone 389934 (TRAV3, TRAJ26)
CAVRDYGQDFVF

SEQ ID NO: 779868 - protein, 16 aa, Homo sapiens
  CDR3 for beta chain variable domain of TCR clone 389934 (TRBV11-2, TRBJ1-2)
SASSPSGREANYGYTF

SEQ ID NO: 779869 - protein, 12 aa, Homo sapiens
  CDR3 for alpha chain variable domain of TCR clone 389935 (TRAV12-3, TRAJ17)
CAMTLTGNKLTF

SEQ ID NO: 779870 - protein, 16 aa, Homo sapiens
  CDR3 for beta chain variable domain of TCR clone 389935 (TRBV18, TRBJ1-5)
CASSPRTGGGNQPQHF

SEQ ID NO: 779871 - protein, 13 aa, Homo sapiens
  CDR3 for alpha chain variable domain of TCR clone 389936 (TRAV21, TRAJ45)
CAVMGGGTDGLTF

SEQ ID NO: 779872 - protein, 14 aa, Homo sapiens
  CDR3 for beta chain variable domain of TCR clone 389936 (TRBV4-3, TRBJ1-4)
CASSPLQRNEKLFF

SEQ ID NO: 779873 - protein, 14 aa, Homo sapiens
  CDR3 for alpha chain variable domain of TCR clone 389937 (TRAV25, TRAJ45)
CRAGSGGGADGLTF

SEQ ID NO: 779874 - protein, 15 aa, Homo sapiens
  CDR3 for beta chain variable domain of TCR clone 389937 (TRBV27, TRBJ1-5)
CASSLGTGFDQPQHF

SEQ ID NO: 779875 - protein, 15 aa, Homo sapiens
  CDR3 for alpha chain variable domain of TCR clone 389938 (TRAV8-3, TRAJ23)
CAMGDRYNQGGKLIF

SEQ ID NO: 779876 - protein, 22 aa, Homo sapiens
  CDR3 for beta chain variable domain of TCR clone 389938 (TRBV29-1, TRBJ2-5)
TVSNMSPEDSSIYLCSAGTQYF

SEQ ID NO: 779877 - protein, 11 aa, Homo sapiens
  CDR3 for alpha chain variable domain of TCR clone 389939 (TRAV2, TRAJ20)
CAVLNDYKLSF

SEQ ID NO: 779878 - protein, 14 aa, Homo sapiens
  CDR3 for beta chain variable domain of TCR clone 389939 (TRBV7-8, TRBJ2-7)
CASSPGLADYEQYF

SEQ ID NO: 779879 - protein, 13 aa, Homo sapiens
  CDR3 for alpha chain variable domain of TCR clone 389940 (TRAV26-1, TRAJ30)
CIVRVESNDKILF

SEQ ID NO: 779880 - protein, 17 aa, Homo sapiens
  CDR3 for beta chain variable domain of TCR clone 389940 (TRBV13, TRBJ2-3)
CASSLSRVAGGRNTQYF

SEQ ID NO: 779881 - protein, 15 aa, Homo sapiens
  CDR3 for alpha chain variable domain of TCR clone 389941 (TRAV2, TRAJ9)
CAVEDRGTGDFKTIF

SEQ ID NO: 779882 - protein, 15 aa, Homo sapiens
  CDR3 for beta chain variable domain of TCR clone 389941 (TRBV6-3, TRBJ2-7)
CASSSPGTVFYEQYF

SEQ ID NO: 779883 - protein, 12 aa, Homo sapiens
  CDR3 for alpha chain variable domain of TCR clone 389942 (TRAV13-2, TRAJ23)
CAERHRGGKLIF

SEQ ID NO: 779884 - protein, 17 aa, Homo sapiens
  CDR3 for beta chain variable domain of TCR clone 389942 (TRBV25-1, TRBJ2-1)
CASSAYGQGRGVYEQFF

SEQ ID NO: 779885 - protein, 13 aa, Homo sapiens
  CDR3 for alpha chain variable domain of TCR clone 389943 (TRAV21, TRAJ27)
CAARPSNAGKSTF

SEQ ID NO: 779886 - protein, 13 aa, Homo sapiens
  CDR3 for beta chain variable domain of TCR clone 389943 (TRBV27, TRBJ2-1)
CASRTLGVGEQFI

SEQ ID NO: 779887 - protein, 13 aa, Homo sapiens
  CDR3 for alpha chain variable domain of TCR clone 389944 (TRAV13-1, TRAJ33)
CAARRAGNYQLIW

SEQ ID NO: 779888 - protein, 12 aa, Homo sapiens
  CDR3 for beta chain variable domain of TCR clone 389944 (TRBV11-2, TRBJ1-2)
CASSREGDGYTF

SEQ ID NO: 779889 - protein, 13 aa, Homo sapiens
  CDR3 for alpha chain variable domain of TCR clone 389945 (TRAV21, TRAJ27)
CAARPGNAGKSTF

SEQ ID NO: 779890 - protein, 15 aa, Homo sapiens
  CDR3 for beta chain variable domain of TCR clone 389945 (TRBV7-9, TRBJ1-5)
CASSIHGPGDQPQHF

SEQ ID NO: 779891 - protein, 13 aa, Homo sapiens
  CDR3 for alpha chain variable domain of TCR clone 389946 (TRAV12-3, TRAJ33)
CAMSVNSNYQLIW

SEQ ID NO: 779892 - protein, 13 aa, Homo sapiens
  CDR3 for beta chain variable domain of TCR clone 389946 (TRBV27, TRBJ2-1)
CASRTLGVGEQFF

SEQ ID NO: 779893 - protein, 20 aa, Homo sapiens
  CDR3 for alpha chain variable domain of TCR clone 389947 (TRAV26-1, TRAJ42)
CCVLLHRQTYYGGSQGKLIF

SEQ ID NO: 779894 - protein, 16 aa, Homo sapiens
  CDR3 for beta chain variable domain of TCR clone 389947 (TRBV7-3, TRBJ2-2)
CVSSLKRGTLSGELFF

SEQ ID NO: 779895 - protein, 11 aa, Homo sapiens
  CDR3 for alpha chain variable domain of TCR clone 389948 (TRAV12-1, TRAJ16)
CGDPHGQKLLF

SEQ ID NO: 779896 - protein, 11 aa, Homo sapiens
  CDR3 for beta chain variable domain of TCR clone 389948 (TRBV29-1, TRBJ2-5)
CSEDRTGTQYF

SEQ ID NO: 779897 - protein, 15 aa, Homo sapiens
  CDR3 for alpha chain variable domain of TCR clone 389949 (TRAV21, TRAJ53)
CATLNSGGSNYKLTF

SEQ ID NO: 779898 - protein, 16 aa, Homo sapiens
  CDR3 for beta chain variable domain of TCR clone 389949 (TRBV4-3, TRBJ2-1)
CASSPALDRGVNEQFF

SEQ ID NO: 779899 - protein, 13 aa, Homo sapiens
  CDR3 for alpha chain variable domain of TCR clone 389950 (TRAV2, TRAJ47)
CAVDREYGNKLGF

SEQ ID NO: 779900 - protein, 17 aa, Homo sapiens
  CDR3 for beta chain variable domain of TCR clone 389950 (TRBV15, TRBJ1-5)
CATSRVKGIYSNQPQHF

SEQ ID NO: 779901 - protein, 13 aa, Homo sapiens
  CDR3 for alpha chain variable domain of TCR clone 389951 (TRAV12-2, TRAJ33)
CRERARSNYQLIG

SEQ ID NO: 779902 - protein, 12 aa, Homo sapiens
  CDR3 for beta chain variable domain of TCR clone 389951 (TRBV24-1, TRBJ2-3)
CATSDSTDTQYF

SEQ ID NO: 779903 - protein, 13 aa, Homo sapiens
  CDR3 for alpha chain variable domain of TCR clone 389952 (TRAV12-1, TRAJ39)
CVVPQRAGNMITF

SEQ ID NO: 779904 - protein, 14 aa, Homo sapiens
  CDR3 for beta chain variable domain of TCR clone 389952 (TRBV13, TRBJ2-5)
CASSLERVGETQYF

SEQ ID NO: 779905 - protein, 14 aa, Homo sapiens
  CDR3 for alpha chain variable domain of TCR clone 389953 (TRAV12-3, TRAJ9)
CAMSTNTGGFKTIF

SEQ ID NO: 779906 - protein, 12 aa, Homo sapiens
  CDR3 for beta chain variable domain of TCR clone 389953 (TRBV11-2, TRBJ2-2)
CASSLGGGELFF

SEQ ID NO: 779907 - protein, 14 aa, Homo sapiens
  CDR3 for alpha chain variable domain of TCR clone 389954 (TRAV8-2, TRAJ23)
CVVSDDNQGGKLIF

SEQ ID NO: 779908 - protein, 12 aa, Homo sapiens
  CDR3 for beta chain variable domain of TCR clone 389954 (TRBV24-1, TRBJ1-1)
CATLYPDTEAFF

SEQ ID NO: 779909 - protein, 13 aa, Homo sapiens
  CDR3 for alpha chain variable domain of TCR clone 389955 (TRAV12-1, TRAJ9)
CVVLNTGGFKTIF

SEQ ID NO: 779910 - protein, 13 aa, Homo sapiens
  CDR3 for beta chain variable domain of TCR clone 389955 (TRBV20-1, TRBJ1-1)
CSARGGGNAEAFF

SEQ ID NO: 779911 - protein, 16 aa, Homo sapiens
  CDR3 for alpha chain variable domain of TCR clone 389956 (TRAV12-3, TRAJ53)
CAMSPGSGGSNYKLTF

SEQ ID NO: 779912 - protein, 13 aa, Homo sapiens
  CDR3 for beta chain variable domain of TCR clone 389956 (TRBV19, TRBJ1-2)
CASSVPGQDGYAF

SEQ ID NO: 779913 - protein, 16 aa, Homo sapiens
  CDR3 for alpha chain variable domain of TCR clone 389957 (TRAV12-3, TRAJ53)
CAMSPGSGGGNYKLTF

SEQ ID NO: 779914 - protein, 19 aa, Homo sapiens
  CDR3 for beta chain variable domain of TCR clone 389957 (TRBV7-2, TRBJ2-3)
CASSFLSRNWGGGTDTQYF

SEQ ID NO: 779915 - protein, 14 aa, Homo sapiens
  CDR3 for alpha chain variable domain of TCR clone 389958 (TRAV25, TRAJ6)
CAGRESGGSYIPTF

SEQ ID NO: 779916 - protein, 14 aa, Homo sapiens
  CDR3 for beta chain variable domain of TCR clone 389958 (TRBV4-1, TRBJ2-2)
CASSQAVNTGELFF

SEQ ID NO: 779917 - protein, 12 aa, Homo sapiens
  CDR3 for alpha chain variable domain of TCR clone 389959 (TRAV16, TRAJ10)
CSRKGGGNKLTF

SEQ ID NO: 779918 - protein, 13 aa, Homo sapiens
  CDR3 for beta chain variable domain of TCR clone 389959 (TRBV20-1, TRBJ2-7)
CSADPGATYEQYF

SEQ ID NO: 779919 - protein, 15 aa, Homo sapiens
  CDR3 for alpha chain variable domain of TCR clone 389960 (TRAV20, TRAJ53)
WAVQASGGSNYKLTF

SEQ ID NO: 779920 - protein, 12 aa, Homo sapiens
  CDR3 for beta chain variable domain of TCR clone 389960 (TRBV7-6, TRBJ2-5)
CASSLSQETQYF

SEQ ID NO: 779921 - protein, 15 aa, Homo sapiens
  CDR3 for alpha chain variable domain of TCR clone 389961 (TRAV12-2, TRAJ53)
CAVNGGGGSNYKLTF

SEQ ID NO: 779922 - protein, 14 aa, Homo sapiens
  CDR3 for beta chain variable domain of TCR clone 389961 (TRBV6-1, TRBJ1-3)
CASVQGGGVNTIYF

SEQ ID NO: 779923 - protein, 13 aa, Homo sapiens
  CDR3 for alpha chain variable domain of TCR clone 389962 (TRAV20, TRAJ37)
CAGCSSNTGKLIF

SEQ ID NO: 779924 - protein, 21 aa, Homo sapiens
  CDR3 for beta chain variable domain of TCR clone 389962 (TRBV4-2, TRBJ2-3)
PCSQKTRPCISVPAAPDTQYF

SEQ ID NO: 779925 - protein, 13 aa, Homo sapiens
  CDR3 for alpha chain variable domain of TCR clone 389963 (TRAV30, TRAJ24)
CGTVTDSWGRLQF

SEQ ID NO: 779926 - protein, 15 aa, Homo sapiens
  CDR3 for beta chain variable domain of TCR clone 389963 (TRBV19, TRBJ1-1)
CASTSGQIQNTDAFF

SEQ ID NO: 779927 - protein, 14 aa, Homo sapiens
  CDR3 for alpha chain variable domain of TCR clone 389964 (TRAV12-1, TRAJ24)
CVVRSTDSWGKLQF

SEQ ID NO: 779928 - protein, 13 aa, Homo sapiens
  CDR3 for beta chain variable domain of TCR clone 389964 (TRBV2, TRBJ2-3)
CASILAGGQGQYF

SEQ ID NO: 779929 - protein, 16 aa, Homo sapiens
  CDR3 for alpha chain variable domain of TCR clone 389965 (TRAV3, TRAJ37)
CAVRGKGSGSTGKLIF

SEQ ID NO: 779930 - protein, 13 aa, Homo sapiens
  CDR3 for beta chain variable domain of TCR clone 389965 (TRBV7-2, TRBJ2-2)
CASSSVRAGELFF

SEQ ID NO: 779931 - protein, 18 aa, Homo sapiens
  CDR3 for alpha chain variable domain of TCR clone 389966 (TRAV26-1, TRAJ22)
CIVRVALISSGSARQLTF

SEQ ID NO: 779932 - protein, 17 aa, Homo sapiens
  CDR3 for beta chain variable domain of TCR clone 389966 (TRBV13, TRBJ2-3)
CASSLSRVAGGRNTQYF

SEQ ID NO: 779933 - protein, 13 aa, Homo sapiens
  CDR3 for alpha chain variable domain of TCR clone 389967 (TRAV13-1, TRAJ39)
CAASIWAGNMLTF

SEQ ID NO: 779934 - protein, 13 aa, Homo sapiens
  CDR3 for beta chain variable domain of TCR clone 389967 (TRBV10-3, TRBJ2-7)
CASKLAVNYEQYF

SEQ ID NO: 779935 - protein, 15 aa, Homo sapiens
  CDR3 for alpha chain variable domain of TCR clone 389968 (TRAV17, TRAJ57)
CATGPSQGGSENLVF

SEQ ID NO: 779936 - protein, 15 aa, Homo sapiens
  CDR3 for beta chain variable domain of TCR clone 389968 (TRBV9, TRBJ1-6)
CASSVAGTGDSPLHF

SEQ ID NO: 779937 - protein, 12 aa, Homo sapiens
  CDR3 for alpha chain variable domain of TCR clone 389969 (TRAV17, TRAJ12)
CAGGDSSYKLIF

SEQ ID NO: 779938 - protein, 15 aa, Homo sapiens
  CDR3 for beta chain variable domain of TCR clone 389969 (TRBV11-3, TRBJ2-3)
CASLKDWREGDTQYF

SEQ ID NO: 779939 - protein, 13 aa, Homo sapiens
  CDR3 for alpha chain variable domain of TCR clone 389970 (TRAV16, TRAJ27)
CALGGPMQASQPL

SEQ ID NO: 779940 - protein, 15 aa, Homo sapiens
  CDR3 for beta chain variable domain of TCR clone 389970 (TRBV18, TRBJ2-1)
CASSPPSASYNEQFF

SEQ ID NO: 779941 - protein, 16 aa, Homo sapiens
  CDR3 for alpha chain variable domain of TCR clone 389971 (TRAV3, TRAJ5)
CAVRNLMDTGRRALTF

SEQ ID NO: 779942 - protein, 16 aa, Homo sapiens
  CDR3 for beta chain variable domain of TCR clone 389971 (TRBV12-5, TRBJ2-5)
CASGPRTSGNQETQCF

SEQ ID NO: 779943 - protein, 12 aa, Homo sapiens
  CDR3 for alpha chain variable domain of TCR clone 389972 (TRAV16, TRAJ21)
CALLGNFNKFYF

SEQ ID NO: 779944 - protein, 15 aa, Homo sapiens
  CDR3 for beta chain variable domain of TCR clone 389972 (TRBV3-1, TRBJ2-2)
CASSQAVMETGELFF

SEQ ID NO: 779945 - protein, 14 aa, Homo sapiens
  CDR3 for alpha chain variable domain of TCR clone 389973 (TRAV1-2, TRAJ8)
CAVREDTGFQQLVF

SEQ ID NO: 779946 - protein, 14 aa, Homo sapiens
  CDR3 for beta chain variable domain of TCR clone 389973 (TRBV18, TRBJ2-7)
CASSPTAGGYEQYF

SEQ ID NO: 779947 - protein, 14 aa, Homo sapiens
  CDR3 for alpha chain variable domain of TCR clone 389974 (TRAV12-3, TRAJ57)
CAMSAWGGSEKLVF

SEQ ID NO: 779948 - protein, 14 aa, Homo sapiens
  CDR3 for beta chain variable domain of TCR clone 389974 (TRBV7-8, TRBJ2-7)
CASSPRERVYEQYF

SEQ ID NO: 779949 - protein, 11 aa, Homo sapiens
  CDR3 for alpha chain variable domain of TCR clone 389975 (TRAV3, TRAJ13)
CAVTSYQKVTF

SEQ ID NO: 779950 - protein, 15 aa, Homo sapiens
  CDR3 for beta chain variable domain of TCR clone 389975 (TRBV7-9, TRBJ2-7)
CASSSSGLAIYEQYF

SEQ ID NO: 779951 - protein, 16 aa, Homo sapiens
  CDR3 for alpha chain variable domain of TCR clone 389976 (TRAV12-2, TRAJ13)
CAVKKTGGYQKVTLEL

SEQ ID NO: 779952 - protein, 13 aa, Homo sapiens
  CDR3 for beta chain variable domain of TCR clone 389976 (TRBV19, TRBJ2-2)
CASSIWSTGELFF

SEQ ID NO: 779953 - protein, 18 aa, Homo sapiens
  CDR3 for alpha chain variable domain of TCR clone 389977 (TRAV26-2, TRAJ54)
CILRDVEVGIQGAQKLVF

SEQ ID NO: 779954 - protein, 17 aa, Homo sapiens
  CDR3 for beta chain variable domain of TCR clone 389977 (TRBV20-1, TRBJ1-5)
CSASWSPGQGGNQPQHF

SEQ ID NO: 779955 - protein, 13 aa, Homo sapiens
  CDR3 for alpha chain variable domain of TCR clone 389978 (TRAV12-2, TRAJ9)
CAVLETGGFKTIF

SEQ ID NO: 779956 - protein, 15 aa, Homo sapiens
  CDR3 for beta chain variable domain of TCR clone 389978 (TRBV6-3, TRBJ2-7)
CASSRTGVNLYKQYF

SEQ ID NO: 779957 - protein, 13 aa, Homo sapiens
  CDR3 for alpha chain variable domain of TCR clone 389979 (TRAV12-2, TRAJ40)
CAVSTSGTYKYIF

SEQ ID NO: 779958 - protein, 12 aa, Homo sapiens
  CDR3 for beta chain variable domain of TCR clone 389979 (TRBV7-9, TRBJ2-7)
CASSQQSYEQYF

SEQ ID NO: 779959 - protein, 14 aa, Homo sapiens
  CDR3 for alpha chain variable domain of TCR clone 389980 (TRAV16, TRAJ30)
CALSLMNRDDKIIF

SEQ ID NO: 779960 - protein, 16 aa, Homo sapiens
  CDR3 for beta chain variable domain of TCR clone 389980 (TRBV7-9, TRBJ1-2)
CASSLGFSSGEDGYTF

SEQ ID NO: 779961 - protein, 16 aa, Homo sapiens
  CDR3 for alpha chain variable domain of TCR clone 389981 (TRAV30, TRAJ24)
CGTEIVDVDSWGKFQF

SEQ ID NO: 779962 - protein, 16 aa, Homo sapiens
  CDR3 for beta chain variable domain of TCR clone 389981 (TRBV6-1, TRBJ2-1)
CASILRQGSSYNEQFF

SEQ ID NO: 779963 - protein, 13 aa, Homo sapiens
  CDR3 for alpha chain variable domain of TCR clone 389982 (TRAV12-3, TRAJ5)
CAMRPTGRRALTF

SEQ ID NO: 779964 - protein, 13 aa, Homo sapiens
  CDR3 for beta chain variable domain of TCR clone 389982 (TRBV2, TRBJ2-7)
CASSVAEAYEQYF

SEQ ID NO: 779965 - protein, 13 aa, Homo sapiens
  CDR3 for alpha chain variable domain of TCR clone 389983 (TRAV6, TRAJ20)
CALAVSNDYELSF

SEQ ID NO: 779966 - protein, 16 aa, Homo sapiens
  CDR3 for beta chain variable domain of TCR clone 389983 (TRBV7-9, TRBJ2-1)
CASSDVAGGSYNEQFF

SEQ ID NO: 779967 - protein, 16 aa, Homo sapiens
  CDR3 for alpha chain variable domain of TCR clone 389984 (TRAV12-3, TRAJ53)
CAMSPGSGSSNYKLKF

SEQ ID NO: 779968 - protein, 11 aa, Homo sapiens
  CDR3 for beta chain variable domain of TCR clone 389984 (TRBV29-1, TRBJ2-5)
CSEDRTGTQYF

SEQ ID NO: 779969 - protein, 14 aa, Homo sapiens
  CDR3 for alpha chain variable domain of TCR clone 389985 (TRAV8-3, TRAJ36)
CAAVGNNGANNLFF

SEQ ID NO: 779970 - protein, 11 aa, Homo sapiens
  CDR3 for beta chain variable domain of TCR clone 389985 (TRBV29-1, TRBJ2-5)
CSEDRTGTQYF

SEQ ID NO: 779971 - protein, 21 aa, Homo sapiens
  CDR3 for alpha chain variable domain of TCR clone 389986 (TRAV26-1, TRAJ38)
CIADNAGNNHIQKPDPAVYQL

SEQ ID NO: 779972 - protein, 13 aa, Homo sapiens
  CDR3 for beta chain variable domain of TCR clone 389986 (TRBV20-1, TRBJ1-1)
CSARGGGNTEAFF

SEQ ID NO: 779973 - protein, 14 aa, Homo sapiens
  CDR3 for alpha chain variable domain of TCR clone 389987 (TRAV35, TRAJ33)
CAGSSKDSNYQLIW

SEQ ID NO: 779974 - protein, 15 aa, Homo sapiens
  CDR3 for beta chain variable domain of TCR clone 389987 (TRBV5-1, TRBJ1-4)
FAPAAWKDGNEKLFF

SEQ ID NO: 779975 - protein, 15 aa, Homo sapiens
  CDR3 for alpha chain variable domain of TCR clone 389988 (TRAV26-1, TRAJ27)
CIVRVEGSGNTPLVF

SEQ ID NO: 779976 - protein, 14 aa, Homo sapiens
  CDR3 for beta chain variable domain of TCR clone 389988 (TRBV18, TRBJ2-5)
CASSPGVSKETQYF

SEQ ID NO: 779977 - protein, 14 aa, Homo sapiens
  CDR3 for alpha chain variable domain of TCR clone 389989 (TRAV2, TRAJ9)
CAVEDRSGGFKTIF

SEQ ID NO: 779978 - protein, 12 aa, Homo sapiens
  CDR3 for beta chain variable domain of TCR clone 389989 (TRBV12-5, TRBJ2-5)
CASGQGVEAQYF

SEQ ID NO: 779979 - protein, 12 aa, Homo sapiens
  CDR3 for alpha chain variable domain of TCR clone 389990 (TRAV13-1, TRAJ27)
CAAHTNAGKSTF

SEQ ID NO: 779980 - protein, 14 aa, Homo sapiens
  CDR3 for beta chain variable domain of TCR clone 389990 (TRBV13, TRBJ2-5)
CASSLGPRGATQYF

SEQ ID NO: 779981 - protein, 13 aa, Homo sapiens
  CDR3 for alpha chain variable domain of TCR clone 389991 (TRAV12-3, TRAJ7)
CAMTPYGNNRLAF

SEQ ID NO: 779982 - protein, 16 aa, Homo sapiens
  CDR3 for beta chain variable domain of TCR clone 389991 (TRBV28, TRBJ1-1)
CASSLSGTGWNTEAFF

SEQ ID NO: 779983 - protein, 14 aa, Homo sapiens
  CDR3 for alpha chain variable domain of TCR clone 389992 (TRAV12-2, TRAJ38)
CVPQTAGNNRKLIW

SEQ ID NO: 779984 - protein, 18 aa, Homo sapiens
  CDR3 for beta chain variable domain of TCR clone 389992 (TRBV28, TRBJ1-3)
CASKTTVGQIGSGNTVYF

SEQ ID NO: 779985 - protein, 17 aa, Homo sapiens
  CDR3 for alpha chain variable domain of TCR clone 389993 (TRAV3, TRAJ42)
CAVRDRDYGGSQGNLIF

SEQ ID NO: 779986 - protein, 13 aa, Homo sapiens
  CDR3 for beta chain variable domain of TCR clone 389993 (TRBV6-3, TRBJ2-3)
CASEGELKDTQYF

SEQ ID NO: 779987 - protein, 14 aa, Homo sapiens
  CDR3 for alpha chain variable domain of TCR clone 389994 (TRAV21, TRAJ37)
CAVKGSSNTGKLIF

SEQ ID NO: 779988 - protein, 14 aa, Homo sapiens
  CDR3 for beta chain variable domain of TCR clone 389994 (TRBV25-1, TRBJ1-2)
CASSEAGTAYGYTF

SEQ ID NO: 779989 - protein, 12 aa, Homo sapiens
  CDR3 for alpha chain variable domain of TCR clone 389995 (TRAV26-2, TRAJ21)
CILKGNFNKFYF

SEQ ID NO: 779990 - protein, 13 aa, Homo sapiens
  CDR3 for beta chain variable domain of TCR clone 389995 (TRBV10-3, TRBJ2-7)
CASKLAVNYEQYF

SEQ ID NO: 779991 - protein, 14 aa, Homo sapiens
  CDR3 for alpha chain variable domain of TCR clone 389996 (TRAV16, TRAJ54)
CALSVVQGAQKLVF

SEQ ID NO: 779992 - protein, 15 aa, Homo sapiens
  CDR3 for beta chain variable domain of TCR clone 389996 (TRBV18, TRBJ2-2)
CASSTSGLHTGELFF

SEQ ID NO: 779993 - protein, 14 aa, Homo sapiens
  CDR3 for alpha chain variable domain of TCR clone 389997 (TRAV12-2, TRAJ13)
CAVKKSGGYQKVTF

SEQ ID NO: 779994 - protein, 13 aa, Homo sapiens
  CDR3 for beta chain variable domain of TCR clone 389997 (TRBV2, TRBJ2-7)
CASSVGGSGEQYF

SEQ ID NO: 779995 - protein, 13 aa, Homo sapiens
  CDR3 for alpha chain variable domain of TCR clone 389998 (TRAV3, TRAJ27)
CAVSPLGAGKSTF

SEQ ID NO: 779996 - protein, 16 aa, Homo sapiens
  CDR3 for beta chain variable domain of TCR clone 389998 (TRBV12-5, TRBJ2-5)
CASGPRTSGNQETQYF

SEQ ID NO: 779997 - protein, 14 aa, Homo sapiens
  CDR3 for alpha chain variable domain of TCR clone 389999 (TRAV3, TRAJ28)
CAVRRGAGSYQLTF

SEQ ID NO: 779998 - protein, 16 aa, Homo sapiens
  CDR3 for beta chain variable domain of TCR clone 389999 (TRBV4-1, TRBJ2-7)
CASGQEWTSGPLEQYF

SEQ ID NO: 779999 - protein, 10 aa, Homo sapiens
  CDR3 for alpha chain variable domain of TCR clone 390000 (TRAV1-2, TRAJ23)
CSGQGGKLIF

SEQ ID NO: 780000 - protein, 12 aa, Homo sapiens
  CDR3 for beta chain variable domain of TCR clone 390000 (TRBV14, TRBJ2-5)
CASSQLKETQYF

SEQ ID NO: 780001 - protein, 14 aa, Homo sapiens
  CDR3 for alpha chain variable domain of TCR clone 390001 (TRAV17, TRAJ56)
CATVPAGANSKLTF

SEQ ID NO: 780002 - protein, 14 aa, Homo sapiens
  CDR3 for beta chain variable domain of TCR clone 390001 (TRBV7-6, TRBJ2-3)
CASSLGTVTDTQYF

SEQ ID NO: 780003 - protein, 12 aa, Homo sapiens
  CDR3 for alpha chain variable domain of TCR clone 390002 (TRAV36/DV7, TRAJ37)
CACSGNTGKLIF

SEQ ID NO: 780004 - protein, 13 aa, Homo sapiens
  CDR3 for beta chain variable domain of TCR clone 390002 (TRBV10-3, TRBJ2-7)
CASKLAVNYEQYF

SEQ ID NO: 780005 - protein, 15 aa, Homo sapiens
  CDR3 for alpha chain variable domain of TCR clone 390003 (TRAV26-1, TRAJ29)
CIVRFEGSGNTPLFF

SEQ ID NO: 780006 - protein, 15 aa, Homo sapiens
  CDR3 for beta chain variable domain of TCR clone 390003 (TRBV7-9, TRBJ1-5)
CASSQGHQPNQPQHF

SEQ ID NO: 780007 - protein, 12 aa, Homo sapiens
  CDR3 for alpha chain variable domain of TCR clone 390004 (TRAV6, TRAJ34)
CALHRGTDKPIF

SEQ ID NO: 780008 - protein, 16 aa, Homo sapiens
  CDR3 for beta chain variable domain of TCR clone 390004 (TRBV3-1, TRBJ2-5)
CASSQDWASGQETQYF

SEQ ID NO: 780009 - protein, 14 aa, Homo sapiens
  CDR3 for alpha chain variable domain of TCR clone 390005 (TRAV12-2, TRAJ17)
CAVLFKAAGNKLTF

SEQ ID NO: 780010 - protein, 14 aa, Homo sapiens
  CDR3 for beta chain variable domain of TCR clone 390005 (TRBV20-1, TRBJ2-2)
CSAPDTANTGELFF

SEQ ID NO: 780011 - protein, 13 aa, Homo sapiens
  CDR3 for alpha chain variable domain of TCR clone 390006 (TRAV36/DV7, TRAJ54)
CAVDIQGAQKLVF

SEQ ID NO: 780012 - protein, 12 aa, Homo sapiens
  CDR3 for beta chain variable domain of TCR clone 390006 (TRBV20-1, TRBJ2-1)
CSAQYTYNEQFF

SEQ ID NO: 780013 - protein, 11 aa, Homo sapiens
  CDR3 for alpha chain variable domain of TCR clone 390007 (TRAV12-2, TRAJ26)
CAVEGGQNFVF

SEQ ID NO: 780014 - protein, 17 aa, Homo sapiens
  CDR3 for beta chain variable domain of TCR clone 390007 (TRBV20-1, TRBJ2-1)
CSASGGENTVAYNEQFF

SEQ ID NO: 780015 - protein, 14 aa, Homo sapiens
  CDR3 for alpha chain variable domain of TCR clone 390008 (TRAV1-2, TRAJ16)
CAVNRFSDGQKPLF

SEQ ID NO: 780016 - protein, 13 aa, Homo sapiens
  CDR3 for beta chain variable domain of TCR clone 390008 (TRBV11-3, TRBJ2-3)
CASSHDTKDTQYF

SEQ ID NO: 780017 - protein, 11 aa, Homo sapiens
  CDR3 for alpha chain variable domain of TCR clone 390009 (TRAV22, TRAJ20)
CAPLHDYKLSF

SEQ ID NO: 780018 - protein, 13 aa, Homo sapiens
  CDR3 for beta chain variable domain of TCR clone 390009 (TRBV11-2, TRBJ2-5)
CASSRGPSETQYF

SEQ ID NO: 780019 - protein, 15 aa, Homo sapiens
  CDR3 for alpha chain variable domain of TCR clone 390010 (TRAV9-2, TRAJ39)
CALSARNNAGNMLTF

SEQ ID NO: 780020 - protein, 15 aa, Homo sapiens
  CDR3 for beta chain variable domain of TCR clone 390010 (TRBV10-3, TRBJ2-2)
CAISPGRTNTGELFF

SEQ ID NO: 780021 - protein, 16 aa, Homo sapiens
  CDR3 for alpha chain variable domain of TCR clone 390011 (TRAV26-1, TRAJ45)
CIVEKYSGGGADGLTF

SEQ ID NO: 780022 - protein, 16 aa, Homo sapiens
  CDR3 for beta chain variable domain of TCR clone 390011 (TRBV7-3, TRBJ2-2)
CASSLKRGTLSGELFF

SEQ ID NO: 780023 - protein, 17 aa, Homo sapiens
  CDR3 for alpha chain variable domain of TCR clone 390012 (TRAV26-1, TRAJ53)
CIVRVDDSGGSNYKLNF

SEQ ID NO: 780024 - protein, 15 aa, Homo sapiens
  CDR3 for beta chain variable domain of TCR clone 390012 (TRBV20-1, TRBJ2-7)
CSARDRVSGMDEQYF

SEQ ID NO: 780025 - protein, 14 aa, Homo sapiens
  CDR3 for alpha chain variable domain of TCR clone 390013 (TRAV27, TRAJ23)
CAGLSSNQGGKLIF

SEQ ID NO: 780026 - protein, 15 aa, Homo sapiens
  CDR3 for beta chain variable domain of TCR clone 390013 (TRBV20-1, TRBJ2-7)
CSARDRVSGMDEQYF

SEQ ID NO: 780027 - protein, 13 aa, Homo sapiens
  CDR3 for alpha chain variable domain of TCR clone 390014 (TRAV8-1, TRAJ9)
CAVNSVGGFKTIF

SEQ ID NO: 780028 - protein, 15 aa, Homo sapiens
  CDR3 for beta chain variable domain of TCR clone 390014 (TRBV11-2, TRBJ2-3)
CASGGRDGLTDTQYF

SEQ ID NO: 780029 - protein, 12 aa, Homo sapiens
  CDR3 for alpha chain variable domain of TCR clone 390015 (TRAV35, TRAJ31)
CAAASNNARLMV

SEQ ID NO: 780030 - protein, 14 aa, Homo sapiens
  CDR3 for beta chain variable domain of TCR clone 390015 (TRBV2, TRBJ2-2)
CASSLFGGNGELFF

SEQ ID NO: 780031 - protein, 11 aa, Homo sapiens
  CDR3 for alpha chain variable domain of TCR clone 390016 (TRAV3, TRAJ21)
CAVGNFNKFYF

SEQ ID NO: 780032 - protein, 14 aa, Homo sapiens
  CDR3 for beta chain variable domain of TCR clone 390016 (TRBV19, TRBJ1-2)
CASEGTGVTYGDTF

SEQ ID NO: 780033 - protein, 17 aa, Homo sapiens
  CDR3 for alpha chain variable domain of TCR clone 390017 (TRAV13-1, TRAJ31)
CAPRDRLMFGDGTQLVV

SEQ ID NO: 780034 - protein, 12 aa, Homo sapiens
  CDR3 for beta chain variable domain of TCR clone 390017 (TRBV7-9, TRBJ2-1)
CASSLEGYEQFF

SEQ ID NO: 780035 - protein, 14 aa, Homo sapiens
  CDR3 for alpha chain variable domain of TCR clone 390018 (TRAV1-2, TRAJ8)
CAVREDTGFQKLLF

SEQ ID NO: 780036 - protein, 10 aa, Homo sapiens
  CDR3 for beta chain variable domain of TCR clone 390018 (TRBV6-3, TRBJ2-7)
CASSPPGQFS

SEQ ID NO: 780037 - protein, 14 aa, Homo sapiens
  CDR3 for alpha chain variable domain of TCR clone 390019 (TRAV12-2, TRAJ6)
CAGIASGGSYIPTF

SEQ ID NO: 780038 - protein, 12 aa, Homo sapiens
  CDR3 for beta chain variable domain of TCR clone 390019 (TRBV5-1, TRBJ1-2)
CASSQDTYGYTF

SEQ ID NO: 780039 - protein, 12 aa, Homo sapiens
  CDR3 for alpha chain variable domain of TCR clone 390020 (TRAV8-3, TRAJ20)
CAVGSNDYKLSF

SEQ ID NO: 780040 - protein, 16 aa, Homo sapiens
  CDR3 for beta chain variable domain of TCR clone 390020 (TRBV19, TRBJ2-2)
CANRSPGTGATGELFF

SEQ ID NO: 780041 - protein, 13 aa, Homo sapiens
  CDR3 for alpha chain variable domain of TCR clone 390021 (TRAV12-2, TRAJ42)
CAVKRGSQGNLIF

SEQ ID NO: 780042 - protein, 14 aa, Homo sapiens
  CDR3 for beta chain variable domain of TCR clone 390021 (TRBV19, TRBJ2-2)
CASSTLHRSGELFF

SEQ ID NO: 780043 - protein, 14 aa, Homo sapiens
  CDR3 for alpha chain variable domain of TCR clone 390022 (TRAV1-1, TRAJ27)
CAVIYNTNAGKSTF

SEQ ID NO: 780044 - protein, 11 aa, Homo sapiens
  CDR3 for beta chain variable domain of TCR clone 390022 (TRBV25-1, TRBJ1-1)
PTWGGNTEAFF

SEQ ID NO: 780045 - protein, 16 aa, Homo sapiens
  CDR3 for alpha chain variable domain of TCR clone 390023 (TRAV27, TRAJ13)
CAGGKSDSGGYQKVTF

SEQ ID NO: 780046 - protein, 15 aa, Homo sapiens
  CDR3 for beta chain variable domain of TCR clone 390023 (TRBV29-1, TRBJ2-1)
CSVGRHALFYNEQFF

SEQ ID NO: 780047 - protein, 14 aa, Homo sapiens
  CDR3 for alpha chain variable domain of TCR clone 390024 (TRAV14/DV4, TRAJ50)
CAMREFPTDDKVIF

SEQ ID NO: 780048 - protein, 15 aa, Homo sapiens
  CDR3 for beta chain variable domain of TCR clone 390024 (TRBV7-9, TRBJ1-5)
CASSLAGGGRQPQHF

SEQ ID NO: 780049 - protein, 20 aa, Homo sapiens
  CDR3 for alpha chain variable domain of TCR clone 390025 (TRAV12-2, TRAJ52)
SPVIQPPARAGGTSYGKLTF

SEQ ID NO: 780050 - protein, 17 aa, Homo sapiens
  CDR3 for beta chain variable domain of TCR clone 390025 (TRBV7-3, TRBJ2-5)
CASSLGSGRSGSETQYF

SEQ ID NO: 780051 - protein, 13 aa, Homo sapiens
  CDR3 for alpha chain variable domain of TCR clone 390026 (TRAV36/DV7, TRAJ38)
CVANAGNNRKLIW

SEQ ID NO: 780052 - protein, 13 aa, Homo sapiens
  CDR3 for beta chain variable domain of TCR clone 390026 (TRBV19, TRBJ1-5)
CASSIGGNQPQHF

SEQ ID NO: 780053 - protein, 14 aa, Homo sapiens
  CDR3 for alpha chain variable domain of TCR clone 390027 (TRAV13-2, TRAJ9)
CAENFFTGGFKTIF

SEQ ID NO: 780054 - protein, 13 aa, Homo sapiens
  CDR3 for beta chain variable domain of TCR clone 390027 (TRBV19, TRBJ2-7)
CASSIDRTYEQYF

SEQ ID NO: 780055 - protein, 18 aa, Homo sapiens
  CDR3 for alpha chain variable domain of TCR clone 390028 (TRAV21, TRAJ52)
CAVRPSPARGTSYGKLTF

SEQ ID NO: 780056 - protein, 13 aa, Homo sapiens
  CDR3 for beta chain variable domain of TCR clone 390028 (TRBV2, TRBJ1-5)
CATAGPGNQPQHF

SEQ ID NO: 780057 - protein, 15 aa, Homo sapiens
  CDR3 for alpha chain variable domain of TCR clone 390029 (TRAV3, TRAJ22)
CAVRDRGGSTRQLTF

SEQ ID NO: 780058 - protein, 12 aa, Homo sapiens
  CDR3 for beta chain variable domain of TCR clone 390029 (TRBV5-4, TRBJ2-7)
CASSLEAYEQYF

SEQ ID NO: 780059 - protein, 14 aa, Homo sapiens
  CDR3 for alpha chain variable domain of TCR clone 390030 (TRAV13-1, TRAJ3)
CAASKSSSASKIIF

SEQ ID NO: 780060 - protein, 15 aa, Homo sapiens
  CDR3 for beta chain variable domain of TCR clone 390030 (TRBV5-5, TRBJ2-2)
CASSRQASWAGELFF

SEQ ID NO: 780061 - protein, 15 aa, Homo sapiens
  CDR3 for alpha chain variable domain of TCR clone 390031 (TRAV3, TRAJ17)
CAVRDTGAAGNDLTF

SEQ ID NO: 780062 - protein, 14 aa, Homo sapiens
  CDR3 for beta chain variable domain of TCR clone 390031 (TRBV6-3, TRBJ1-1)
CASSNLLPGAEAFF

SEQ ID NO: 780063 - protein, 14 aa, Homo sapiens
  CDR3 for alpha chain variable domain of TCR clone 390032 (TRAV12-2, TRAJ40)
CAVKIPSGTYKYIF

SEQ ID NO: 780064 - protein, 16 aa, Homo sapiens
  CDR3 for beta chain variable domain of TCR clone 390032 (TRBV7-3, TRBJ2-1)
CASSKPLAGGYNEQFF

SEQ ID NO: 780065 - protein, 14 aa, Homo sapiens
  CDR3 for alpha chain variable domain of TCR clone 390033 (TRAV38-1, TRAJ45)
CASHSGGGADGLTF

SEQ ID NO: 780066 - protein, 13 aa, Homo sapiens
  CDR3 for beta chain variable domain of TCR clone 390033 (TRBV10-3, TRBJ1-2)
CAISERDSDGYTF

SEQ ID NO: 780067 - protein, 14 aa, Homo sapiens
  CDR3 for alpha chain variable domain of TCR clone 390034 (TRAV9-2, TRAJ39)
CALYLYNAGNMLTF

SEQ ID NO: 780068 - protein, 16 aa, Homo sapiens
  CDR3 for beta chain variable domain of TCR clone 390034 (TRBV19, TRBJ2-2)
CASRSPGTGATGELFF

SEQ ID NO: 780069 - protein, 10 aa, Homo sapiens
  CDR3 for alpha chain variable domain of TCR clone 390035 (TRAV8-4, TRAJ43)
CAVSADDMRF

SEQ ID NO: 780070 - protein, 16 aa, Homo sapiens
  CDR3 for beta chain variable domain of TCR clone 390035 (TRBV13, TRBJ2-2)
CASSPRTGEHTGELFF

SEQ ID NO: 780071 - protein, 19 aa, Homo sapiens
  CDR3 for alpha chain variable domain of TCR clone 390036 (TRAV25, TRAJ43)
TATHTTDVGTYFCAVFMRF

SEQ ID NO: 780072 - protein, 13 aa, Homo sapiens
  CDR3 for beta chain variable domain of TCR clone 390036 (TRBV7-9, TRBJ1-2)
CASSLKQNYGYTF

SEQ ID NO: 780073 - protein, 19 aa, Homo sapiens
  CDR3 for alpha chain variable domain of TCR clone 390037 (TRAV17, TRAJ17)
CATDGRPGVIKAACNKLTF

SEQ ID NO: 780074 - protein, 17 aa, Homo sapiens
  CDR3 for beta chain variable domain of TCR clone 390037 (TRBV12-4, TRBJ1-1)
CASSLSGFRTMNTEAFF

SEQ ID NO: 780075 - protein, 16 aa, Homo sapiens
  CDR3 for alpha chain variable domain of TCR clone 390038 (TRAV1-2, TRAJ10)
CAVRGGTHGRRKQTHL

SEQ ID NO: 780076 - protein, 15 aa, Homo sapiens
  CDR3 for beta chain variable domain of TCR clone 390038 (TRBV6-3, TRBJ2-7)
CASSSPGTVFYEQYF

SEQ ID NO: 780077 - protein, 11 aa, Homo sapiens
  CDR3 for alpha chain variable domain of TCR clone 390039 (TRAV2, TRAJ13)
CASVGYQKVTF

SEQ ID NO: 780078 - protein, 13 aa, Homo sapiens
  CDR3 for beta chain variable domain of TCR clone 390039 (TRBV9, TRBJ2-3)
CASSVGGRDTQYF

SEQ ID NO: 780079 - protein, 13 aa, Homo sapiens
  CDR3 for alpha chain variable domain of TCR clone 390040 (TRAV16, TRAJ47)
FALSRGYGNKLVF

SEQ ID NO: 780080 - protein, 17 aa, Homo sapiens
  CDR3 for beta chain variable domain of TCR clone 390040 (TRBV28, TRBJ2-5)
CASSTPEGDALQETQYF

SEQ ID NO: 780081 - protein, 17 aa, Homo sapiens
  CDR3 for alpha chain variable domain of TCR clone 390041 (TRAV3, TRAJ6)
CAVRDGPRAGRSYIPTF

SEQ ID NO: 780082 - protein, 15 aa, Homo sapiens
  CDR3 for beta chain variable domain of TCR clone 390041 (TRBV7-9, TRBJ1-6)
CASSSPGRGNSPLHF

SEQ ID NO: 780083 - protein, 13 aa, Homo sapiens
  CDR3 for alpha chain variable domain of TCR clone 390042 (TRAV25, TRAJ26)
CAGMDNYGQNFVF

SEQ ID NO: 780084 - protein, 15 aa, Homo sapiens
  CDR3 for beta chain variable domain of TCR clone 390042 (TRBV27, TRBJ2-1)
CASSNGGGSSNEQFF

SEQ ID NO: 780085 - protein, 12 aa, Homo sapiens
  CDR3 for alpha chain variable domain of TCR clone 390043 (TRAV35, TRAJ12)
CAGMDSSYKFIF

SEQ ID NO: 780086 - protein, 14 aa, Homo sapiens
  CDR3 for beta chain variable domain of TCR clone 390043 (TRBV28, TRBJ2-5)
CASSLYRGTETQYF

SEQ ID NO: 780087 - protein, 11 aa, Homo sapiens
  CDR3 for alpha chain variable domain of TCR clone 390044 (TRAV35, TRAJ30)
CAGERDDKIIF

SEQ ID NO: 780088 - protein, 15 aa, Homo sapiens
  CDR3 for beta chain variable domain of TCR clone 390044 (TRBV27, TRBJ2-2)
CASSPLAGVVGELFF

SEQ ID NO: 780089 - protein, 13 aa, Homo sapiens
  CDR3 for alpha chain variable domain of TCR clone 390045 (TRAV12-3, TRAJ7)
CAMNPYGNNRLAS

SEQ ID NO: 780090 - protein, 16 aa, Homo sapiens
  CDR3 for beta chain variable domain of TCR clone 390045 (TRBV20-1, TRBJ1-4)
CSARPYGGELNEKLFF

SEQ ID NO: 780091 - protein, 15 aa, Homo sapiens
  CDR3 for alpha chain variable domain of TCR clone 390046 (TRAV16, TRAJ16)
CALQGGGSDGEKLLF

SEQ ID NO: 780092 - protein, 15 aa, Homo sapiens
  CDR3 for beta chain variable domain of TCR clone 390046 (TRBV20-1, TRBJ2-7)
CSARDRVSGMDEQYF

SEQ ID NO: 780093 - protein, 15 aa, Homo sapiens
  CDR3 for alpha chain variable domain of TCR clone 390047 (TRAV25, TRAJ52)
CAGRPGGTSYGKLTF

SEQ ID NO: 780094 - protein, 15 aa, Homo sapiens
  CDR3 for beta chain variable domain of TCR clone 390047 (TRBV7-2, TRBJ2-1)
CASSLVAGRYNERFF

SEQ ID NO: 780095 - protein, 13 aa, Homo sapiens
  CDR3 for alpha chain variable domain of TCR clone 390048 (TRAV21, TRAJ27)
CAVRPGNAGKSTF

SEQ ID NO: 780096 - protein, 14 aa, Homo sapiens
  CDR3 for beta chain variable domain of TCR clone 390048 (TRBV20-1, TRBJ2-1)
CSAAGSGEYNEQFF

SEQ ID NO: 780097 - protein, 14 aa, Homo sapiens
  CDR3 for alpha chain variable domain of TCR clone 390049 (TRAV8-3, TRAJ4)
CAVGAAGGYNKLIF

SEQ ID NO: 780098 - protein, 14 aa, Homo sapiens
  CDR3 for beta chain variable domain of TCR clone 390049 (TRBV2, TRBJ2-2)
CASSWQGATGELFF

SEQ ID NO: 780099 - protein, 13 aa, Homo sapiens
  CDR3 for alpha chain variable domain of TCR clone 390050 (TRAV13-2, TRAJ13)
CAERPGGYQKVTF

SEQ ID NO: 780100 - protein, 16 aa, Homo sapiens
  CDR3 for beta chain variable domain of TCR clone 390050 (TRBV18, TRBJ2-5)
CASSPPSSGGAKTQYS

SEQ ID NO: 780101 - protein, 14 aa, Homo sapiens
  CDR3 for alpha chain variable domain of TCR clone 390051 (TRAV17, TRAJ53)
CALNSGGSNYKLTF

SEQ ID NO: 780102 - protein, 14 aa, Homo sapiens
  CDR3 for beta chain variable domain of TCR clone 390051 (TRBV19, TRBJ2-2)
CASSTLHRSGELFF

SEQ ID NO: 780103 - protein, 23 aa, Homo sapiens
  CDR3 for alpha chain variable domain of TCR clone 390052 (TRAV26-1, )
CIADNAGNNYIQNPDPAVYQLSD

SEQ ID NO: 780104 - protein, 13 aa, Homo sapiens
  CDR3 for beta chain variable domain of TCR clone 390052 (TRBV20-1, TRBJ1-1)
CSARGGGNTEAFF

SEQ ID NO: 780105 - protein, 13 aa, Homo sapiens
  CDR3 for alpha chain variable domain of TCR clone 390053 (TRAV3, TRAJ27)
CAVRPLGAGKSTF

SEQ ID NO: 780106 - protein, 15 aa, Homo sapiens
  CDR3 for beta chain variable domain of TCR clone 390053 (TRBV19, TRBJ2-7)
CASSFNSGGVWEQYF

SEQ ID NO: 780107 - protein, 14 aa, Homo sapiens
  CDR3 for alpha chain variable domain of TCR clone 390054 (TRAV12-3, TRAJ22)
CAMSLFGSARQLTF

SEQ ID NO: 780108 - protein, 11 aa, Homo sapiens
  CDR3 for beta chain variable domain of TCR clone 390054 (TRBV12-4, TRBJ2-2)
CDSSSAGELFF

SEQ ID NO: 780109 - protein, 12 aa, Homo sapiens
  CDR3 for alpha chain variable domain of TCR clone 390055 (TRAV21, TRAJ33)
CAKMDSNYQLSC

SEQ ID NO: 780110 - protein, 14 aa, Homo sapiens
  CDR3 for beta chain variable domain of TCR clone 390055 (TRBV2, TRBJ2-7)
CASSLTSGGYEQYF

SEQ ID NO: 780111 - protein, 16 aa, Homo sapiens
  CDR3 for alpha chain variable domain of TCR clone 390056 (TRAV12-1, TRAJ43)
CVVNPHRFGAGTRLTV

SEQ ID NO: 780112 - protein, 13 aa, Homo sapiens
  CDR3 for beta chain variable domain of TCR clone 390056 (TRBV20-1, TRBJ1-1)
CSARGGGNTEAFF

SEQ ID NO: 780113 - protein, 14 aa, Homo sapiens
  CDR3 for alpha chain variable domain of TCR clone 390057 (TRAV35, TRAJ42)
CAGRYGGSQGNLIV

SEQ ID NO: 780114 - protein, 15 aa, Homo sapiens
  CDR3 for beta chain variable domain of TCR clone 390057 (TRBV7-9, TRBJ2-1)
CASSLGWGRANEQFF

SEQ ID NO: 780115 - protein, 15 aa, Homo sapiens
  CDR3 for alpha chain variable domain of TCR clone 390058 (TRAV8-6, TRAJ6)
CAVRDASGGSYMPTF

SEQ ID NO: 780116 - protein, 13 aa, Homo sapiens
  CDR3 for beta chain variable domain of TCR clone 390058 (TRBV2, TRBJ2-2)
CASRAWRTGELFF

SEQ ID NO: 780117 - protein, 23 aa, Homo sapiens
  CDR3 for alpha chain variable domain of TCR clone 390059 (TRAV20, TRAJ32)
CAVDGMVVLQTSSSLELAICLLP

SEQ ID NO: 780118 - protein, 16 aa, Homo sapiens
  CDR3 for beta chain variable domain of TCR clone 390059 (TRBV19, TRBJ2-2)
CASRSPGTGATGELFF

SEQ ID NO: 780119 - protein, 13 aa, Homo sapiens
  CDR3 for alpha chain variable domain of TCR clone 390060 (TRAV21, TRAJ20)
CAVGLRVDYKPSF

SEQ ID NO: 780120 - protein, 18 aa, Homo sapiens
  CDR3 for beta chain variable domain of TCR clone 390060 (TRBV20-1, TRBJ2-2)
CSARVQTARPSGTGELFF

SEQ ID NO: 780121 - protein, 13 aa, Homo sapiens
  CDR3 for alpha chain variable domain of TCR clone 390061 (TRAV12-2, TRAJ12)
CTVNWDSSYKLIF

SEQ ID NO: 780122 - protein, 14 aa, Homo sapiens
  CDR3 for beta chain variable domain of TCR clone 390061 (TRBV11-2, TRBJ2-7)
CASSSTGEGYEQYF

SEQ ID NO: 780123 - protein, 14 aa, Homo sapiens
  CDR3 for alpha chain variable domain of TCR clone 390062 (TRAV26-1, TRAJ34)
CIVRESYKTDKLIF

SEQ ID NO: 780124 - protein, 13 aa, Homo sapiens
  CDR3 for beta chain variable domain of TCR clone 390062 (TRBV19, TRBJ2-1)
CATSRGVYNEQFF

SEQ ID NO: 780125 - protein, 17 aa, Homo sapiens
  CDR3 for alpha chain variable domain of TCR clone 390063 (TRAV3, TRAJ6)
CAVGDGPRAGGSYIPTI

SEQ ID NO: 780126 - protein, 13 aa, Homo sapiens
  CDR3 for beta chain variable domain of TCR clone 390063 (TRBV10-3, TRBJ1-2)
CAISERDSYGYTF

SEQ ID NO: 780127 - protein, 16 aa, Homo sapiens
  CDR3 for alpha chain variable domain of TCR clone 390064 (TRAV36/DV7, TRAJ30)
CAVETYGLDRDDKITF

SEQ ID NO: 780128 - protein, 15 aa, Homo sapiens
  CDR3 for beta chain variable domain of TCR clone 390064 (TRBV6-6, TRBJ2-5)
CASSYGKIIQETQYF

SEQ ID NO: 780129 - protein, 12 aa, Homo sapiens
  CDR3 for alpha chain variable domain of TCR clone 390065 (TRAV13-1, TRAJ53)
AASGGSNYKLTF

SEQ ID NO: 780130 - protein, 15 aa, Homo sapiens
  CDR3 for beta chain variable domain of TCR clone 390065 (TRBV5-1, TRBJ2-1)
CASSPPRAPTMSSSS

SEQ ID NO: 780131 - protein, 14 aa, Homo sapiens
  CDR3 for alpha chain variable domain of TCR clone 390066 (TRAV23/DV6, TRAJ13)
CAALYSGGYQKVTF

SEQ ID NO: 780132 - protein, 14 aa, Homo sapiens
  CDR3 for beta chain variable domain of TCR clone 390066 (TRBV7-9, TRBJ2-1)
CASSPRDSLYEQFF

SEQ ID NO: 780133 - protein, 12 aa, Homo sapiens
  CDR3 for alpha chain variable domain of TCR clone 390067 (TRAV25, TRAJ48)
CTGDFGNEKLTF

SEQ ID NO: 780134 - protein, 12 aa, Homo sapiens
  CDR3 for beta chain variable domain of TCR clone 390067 (TRBV2, TRBJ2-5)
CASKEYGETQYF

SEQ ID NO: 780135 - protein, 14 aa, Homo sapiens
  CDR3 for alpha chain variable domain of TCR clone 390068 (TRAV2, TRAJ3)
CAVDRYSSASKIIF

SEQ ID NO: 780136 - protein, 16 aa, Homo sapiens
  CDR3 for beta chain variable domain of TCR clone 390068 (TRBV20-1, TRBJ1-5)
CSADLPGQQTNQPQHF

SEQ ID NO: 780137 - protein, 14 aa, Homo sapiens
  CDR3 for alpha chain variable domain of TCR clone 390069 (TRAV12-2, TRAJ45)
CALPERGGADGLTF

SEQ ID NO: 780138 - protein, 15 aa, Homo sapiens
  CDR3 for beta chain variable domain of TCR clone 390069 (TRBV7-2, TRBJ2-5)
CASSGILAGAETQYF

SEQ ID NO: 780139 - protein, 13 aa, Homo sapiens
  CDR3 for alpha chain variable domain of TCR clone 390070 (TRAV2, TRAJ29)
CAAGGPGNTPLVF

SEQ ID NO: 780140 - protein, 15 aa, Homo sapiens
  CDR3 for beta chain variable domain of TCR clone 390070 (TRBV7-3, TRBJ2-7)
CASSPPVALNYEQYF

SEQ ID NO: 780141 - protein, 14 aa, Homo sapiens
  CDR3 for alpha chain variable domain of TCR clone 390071 (TRAV22, TRAJ29)
CAVPRISGNTPLVF

SEQ ID NO: 780142 - protein, 13 aa, Homo sapiens
  CDR3 for beta chain variable domain of TCR clone 390071 (TRBV9, TRBJ2-1)
CASSVGQGGEQFF

SEQ ID NO: 780143 - protein, 13 aa, Homo sapiens
  CDR3 for alpha chain variable domain of TCR clone 390072 (TRAV21, TRAJ34)
CAPLDTESSSLGL

SEQ ID NO: 780144 - protein, 16 aa, Homo sapiens
  CDR3 for beta chain variable domain of TCR clone 390072 (TRBV5-1, TRBJ2-3)
CASSVAGDRGTDTQYF

SEQ ID NO: 780145 - protein, 14 aa, Homo sapiens
  CDR3 for alpha chain variable domain of TCR clone 390073 (TRAV12-2, TRAJ45)
CAVNIGGGADGLTF

SEQ ID NO: 780146 - protein, 17 aa, Homo sapiens
  CDR3 for beta chain variable domain of TCR clone 390073 (TRBV20-1, TRBJ2-2)
WSASGSGQGGLTGELFF

SEQ ID NO: 780147 - protein, 14 aa, Homo sapiens
  CDR3 for alpha chain variable domain of TCR clone 390074 (TRAV35, TRAJ53)
CAGNSGGSNYKLTF

SEQ ID NO: 780148 - protein, 13 aa, Homo sapiens
  CDR3 for beta chain variable domain of TCR clone 390074 (TRBV6-5, TRBJ1-1)
CASSYREGRKAFF

SEQ ID NO: 780149 - protein, 13 aa, Homo sapiens
  CDR3 for alpha chain variable domain of TCR clone 390075 (TRAV38-1, TRAJ42)
CARWGGSQGNLIF

SEQ ID NO: 780150 - protein, 10 aa, Homo sapiens
  CDR3 for beta chain variable domain of TCR clone 390075 (TRBV2, TRBJ2-5)
CATSAATQYF

SEQ ID NO: 780151 - protein, 11 aa, Homo sapiens
  CDR3 for alpha chain variable domain of TCR clone 390076 (TRAV21, TRAJ34)
CAHYNTDKLIF

SEQ ID NO: 780152 - protein, 16 aa, Homo sapiens
  CDR3 for beta chain variable domain of TCR clone 390076 (TRBV18, TRBJ2-7)
CQLTRGSGESSYEQYF

SEQ ID NO: 780153 - protein, 14 aa, Homo sapiens
  CDR3 for alpha chain variable domain of TCR clone 390077 (TRAV3, TRAJ20)
CAVPPAPNDYKLSF

SEQ ID NO: 780154 - protein, 15 aa, Homo sapiens
  CDR3 for beta chain variable domain of TCR clone 390077 (TRBV20-1, TRBJ2-1)
CSARGIGGTYNEQFF

SEQ ID NO: 780155 - protein, 15 aa, Homo sapiens
  CDR3 for alpha chain variable domain of TCR clone 390078 (TRAV16, TRAJ10)
CALRELTGGGNKLTY

SEQ ID NO: 780156 - protein, 14 aa, Homo sapiens
  CDR3 for beta chain variable domain of TCR clone 390078 (TRBV5-5, TRBJ2-7)
CASSLGQGTYEQYF

SEQ ID NO: 780157 - protein, 12 aa, Homo sapiens
  CDR3 for alpha chain variable domain of TCR clone 390079 (TRAV17, TRAJ5)
CSYDTGRRALTF

SEQ ID NO: 780158 - protein, 13 aa, Homo sapiens
  CDR3 for beta chain variable domain of TCR clone 390079 (TRBV7-9, TRBJ1-2)
CASSLEQNYGYTF

SEQ ID NO: 780159 - protein, 15 aa, Homo sapiens
  CDR3 for alpha chain variable domain of TCR clone 390080 (TRAV21, TRAJ32)
CAVNSYGGATNKLIF

SEQ ID NO: 780160 - protein, 13 aa, Homo sapiens
  CDR3 for beta chain variable domain of TCR clone 390080 (TRBV3-1, TRBJ1-5)
CAITRRDGQPQHF

SEQ ID NO: 780161 - protein, 16 aa, Homo sapiens
  CDR3 for alpha chain variable domain of TCR clone 390081 (TRAV3, TRAJ3)
CAVRDRAKSRASKIIF

SEQ ID NO: 780162 - protein, 13 aa, Homo sapiens
  CDR3 for beta chain variable domain of TCR clone 390081 (TRBV10-3, TRBJ2-7)
CASKLAVNYKQYF

SEQ ID NO: 780163 - protein, 13 aa, Homo sapiens
  CDR3 for alpha chain variable domain of TCR clone 390082 (TRAV13-1, TRAJ5)
CAAEHTGRRALTF

SEQ ID NO: 780164 - protein, 14 aa, Homo sapiens
  CDR3 for beta chain variable domain of TCR clone 390082 (TRBV7-2, TRBJ2-7)
CASSPKTSFYEQYF

SEQ ID NO: 780165 - protein, 13 aa, Homo sapiens
  CDR3 for alpha chain variable domain of TCR clone 390083 (TRAV17, TRAJ9)
CATFLTGGFKTIF

SEQ ID NO: 780166 - protein, 13 aa, Homo sapiens
  CDR3 for beta chain variable domain of TCR clone 390083 (TRBV7-8, TRBJ2-7)
CASSLTGGREQYF

SEQ ID NO: 780167 - protein, 18 aa, Homo sapiens
  CDR3 for alpha chain variable domain of TCR clone 390084 (TRAV13-1, TRAJ52)
CAAKNPNSGGTSYGKLTF

SEQ ID NO: 780168 - protein, 18 aa, Homo sapiens
  CDR3 for beta chain variable domain of TCR clone 390084 (TRBV12-4, TRBJ2-4)
CASSRTGAVDVAKNIQYF

SEQ ID NO: 780169 - protein, 15 aa, Homo sapiens
  CDR3 for alpha chain variable domain of TCR clone 390085 (TRAV26-1, TRAJ37)
CIVRVATGNTGKLIF

SEQ ID NO: 780170 - protein, 17 aa, Homo sapiens
  CDR3 for beta chain variable domain of TCR clone 390085 (TRBV19, TRBJ2-6)
CASSTGQVFSGANVLNF

SEQ ID NO: 780171 - protein, 16 aa, Homo sapiens
  CDR3 for alpha chain variable domain of TCR clone 390086 (TRAV4, TRAJ22)
CLVGDLYSGSARQLTF

SEQ ID NO: 780172 - protein, 16 aa, Homo sapiens
  CDR3 for beta chain variable domain of TCR clone 390086 (TRBV19, TRBJ1-1)
CASSPTRFWPGTEAFF

SEQ ID NO: 780173 - protein, 16 aa, Homo sapiens
  CDR3 for alpha chain variable domain of TCR clone 390087 (TRAV3, TRAJ10)
CAVRDMREGGGNKLTF

SEQ ID NO: 780174 - protein, 16 aa, Homo sapiens
  CDR3 for beta chain variable domain of TCR clone 390087 (TRBV20-1, TRBJ1-4)
CSAPGQGLLTNEKLFF

SEQ ID NO: 780175 - protein, 14 aa, Homo sapiens
  CDR3 for alpha chain variable domain of TCR clone 390088 (TRAV12-2, TRAJ13)
CAVKKTGGYQKVPF

SEQ ID NO: 780176 - protein, 11 aa, Homo sapiens
  CDR3 for beta chain variable domain of TCR clone 390088 (TRBV29-1, TRBJ2-5)
CSEDRTGTQYF

SEQ ID NO: 780177 - protein, 15 aa, Homo sapiens
  CDR3 for alpha chain variable domain of TCR clone 390089 (TRAV4, TRAJ10)
FLVGDEEGGGNKLTF

SEQ ID NO: 780178 - protein, 17 aa, Homo sapiens
  CDR3 for beta chain variable domain of TCR clone 390089 (TRBV19, TRBJ2-6)
CASSTGQVFSGANVLTF

SEQ ID NO: 780179 - protein, 11 aa, Homo sapiens
  CDR3 for alpha chain variable domain of TCR clone 390090 (TRAV17, TRAJ9)
CATTGGFKTIF

SEQ ID NO: 780180 - protein, 14 aa, Homo sapiens
  CDR3 for beta chain variable domain of TCR clone 390090 (TRBV2, TRBJ2-7)
CASSLTSGGYEQYF

SEQ ID NO: 780181 - protein, 14 aa, Homo sapiens
  CDR3 for alpha chain variable domain of TCR clone 390091 (TRAV12-1, TRAJ42)
CVVIYGGSQGNLIF

SEQ ID NO: 780182 - protein, 14 aa, Homo sapiens
  CDR3 for beta chain variable domain of TCR clone 390091 (TRBV9, TRBJ2-7)
CASSVGVGSYEQYF

SEQ ID NO: 780183 - protein, 13 aa, Homo sapiens
  CDR3 for alpha chain variable domain of TCR clone 390092 (TRAV13-1, TRAJ20)
CAARVSNDYKLSF

SEQ ID NO: 780184 - protein, 18 aa, Homo sapiens
  CDR3 for beta chain variable domain of TCR clone 390092 (TRBV20-1, TRBJ2-3)
CSASGLAGGPGTTDTQYF

SEQ ID NO: 780185 - protein, 15 aa, Homo sapiens
  CDR3 for alpha chain variable domain of TCR clone 390093 (TRAV29/DV5, TRAJ53)
CPASASGGSNYKLTF

SEQ ID NO: 780186 - protein, 19 aa, Homo sapiens
  CDR3 for beta chain variable domain of TCR clone 390093 (TRBV5-1, TRBJ2-3)
CASSLWLAGGIATTDTQYF

SEQ ID NO: 780187 - protein, 15 aa, Homo sapiens
  CDR3 for alpha chain variable domain of TCR clone 390094 (TRAV12-1, TRAJ8)
CVVNVENTGFQKLVF

SEQ ID NO: 780188 - protein, 15 aa, Homo sapiens
  CDR3 for beta chain variable domain of TCR clone 390094 (TRBV12-4, TRBJ1-6)
CASSLGRGFRSPLHF

SEQ ID NO: 780189 - protein, 15 aa, Homo sapiens
  CDR3 for alpha chain variable domain of TCR clone 390095 (TRAV26-1, TRAJ40)
CIVSFATSGTYKYIF

SEQ ID NO: 780190 - protein, 15 aa, Homo sapiens
  CDR3 for beta chain variable domain of TCR clone 390095 (TRBV5-7, TRBJ2-3)
CASSPGLATTETQYF

SEQ ID NO: 780191 - protein, 16 aa, Homo sapiens
  CDR3 for alpha chain variable domain of TCR clone 390096 (TRAV17, TRAJ17)
CATALQEEAAGNKLTF

SEQ ID NO: 780192 - protein, 12 aa, Homo sapiens
  CDR3 for beta chain variable domain of TCR clone 390096 (TRBV4-2, TRBJ2-5)
CTSGGAQETQYF

SEQ ID NO: 780193 - protein, 11 aa, Homo sapiens
  CDR3 for alpha chain variable domain of TCR clone 390097 (TRAV21, TRAJ34)
CAVTNIDKLIF

SEQ ID NO: 780194 - protein, 12 aa, Homo sapiens
  CDR3 for beta chain variable domain of TCR clone 390097 (TRBV7-9, TRBJ1-1)
CASSLVRGEAFF

SEQ ID NO: 780195 - protein, 20 aa, Homo sapiens
  CDR3 for alpha chain variable domain of TCR clone 390098 (TRAV12-3, TRAJ41)
SLFIRDSQPSDSATPEALNF

SEQ ID NO: 780196 - protein, 12 aa, Homo sapiens
  CDR3 for beta chain variable domain of TCR clone 390098 (TRBV7-8, TRBJ2-7)
CASSLGDREQYF

SEQ ID NO: 780197 - protein, 13 aa, Homo sapiens
  CDR3 for alpha chain variable domain of TCR clone 390099 (TRAV17, TRAJ5)
CATVDTGRRALTF

SEQ ID NO: 780198 - protein, 14 aa, Homo sapiens
  CDR3 for beta chain variable domain of TCR clone 390099 (TRBV12-5, TRBJ2-5)
CASGSRTHQETQYF

SEQ ID NO: 780199 - protein, 16 aa, Homo sapiens
  CDR3 for alpha chain variable domain of TCR clone 390100 (TRAV21, TRAJ45)
RAVSWGSGGGADGLTF

SEQ ID NO: 780200 - protein, 14 aa, Homo sapiens
  CDR3 for beta chain variable domain of TCR clone 390100 (TRBV4-2, TRBJ1-2)
CASSPGGSNYGYNF

SEQ ID NO: 780201 - protein, 15 aa, Homo sapiens
  CDR3 for alpha chain variable domain of TCR clone 390101 (TRAV8-4, TRAJ7)
CAVSGGNYGNNRLAF

SEQ ID NO: 780202 - protein, 11 aa, Homo sapiens
  CDR3 for beta chain variable domain of TCR clone 390101 (TRBV20-1, TRBJ2-1)
CSLSSGSEQFL

SEQ ID NO: 780203 - protein, 17 aa, Homo sapiens
  CDR3 for alpha chain variable domain of TCR clone 390102 (TRAV3, TRAJ6)
CAVRDGPRAGGRYIPTF

SEQ ID NO: 780204 - protein, 15 aa, Homo sapiens
  CDR3 for beta chain variable domain of TCR clone 390102 (TRBV7-2, TRBJ2-1)
CASTHGTGIYNEQFF

SEQ ID NO: 780205 - protein, 17 aa, Homo sapiens
  CDR3 for alpha chain variable domain of TCR clone 390103 (TRAV13-1, TRAJ28)
CAASPPYSGAGSHQLTF

SEQ ID NO: 780206 - protein, 12 aa, Homo sapiens
  CDR3 for beta chain variable domain of TCR clone 390103 (TRBV11-2, TRBJ2-2)
CARSLPTGELFF

SEQ ID NO: 780207 - protein, 14 aa, Homo sapiens
  CDR3 for alpha chain variable domain of TCR clone 390104 (TRAV17, TRAJ34)
CATDSLEGTDKLIF

SEQ ID NO: 780208 - protein, 13 aa, Homo sapiens
  CDR3 for beta chain variable domain of TCR clone 390104 (TRBV11-2, TRBJ2-7)
CASGGTRPYEQYF

SEQ ID NO: 780209 - protein, 12 aa, Homo sapiens
  CDR3 for alpha chain variable domain of TCR clone 390105 (TRAV12-3, TRAJ17)
CAMTLTGNKLTF

SEQ ID NO: 780210 - protein, 13 aa, Homo sapiens
  CDR3 for beta chain variable domain of TCR clone 390105 (TRBV20-1, TRBJ2-7)
CSASSFSSYEQYF

SEQ ID NO: 780211 - protein, 18 aa, Homo sapiens
  CDR3 for alpha chain variable domain of TCR clone 390106 (TRAV26-2, TRAJ45)
CILRVDKYTGGGADGLTF

SEQ ID NO: 780212 - protein, 16 aa, Homo sapiens
  CDR3 for beta chain variable domain of TCR clone 390106 (TRBV2, TRBJ1-4)
CASNLLQGATNEKLFF

SEQ ID NO: 780213 - protein, 17 aa, Homo sapiens
  CDR3 for alpha chain variable domain of TCR clone 390107 (TRAV3, TRAJ6)
CAVRDGPRAGGSYIPPF

SEQ ID NO: 780214 - protein, 20 aa, Homo sapiens
  CDR3 for beta chain variable domain of TCR clone 390107 (TRBV28, TRBJ2-1)
CASTPIGRSPGLAGGNEQFF

SEQ ID NO: 780215 - protein, 15 aa, Homo sapiens
  CDR3 for alpha chain variable domain of TCR clone 390108 (TRAV3, TRAJ22)
CAVRDRGGSARQQAS

SEQ ID NO: 780216 - protein, 16 aa, Homo sapiens
  CDR3 for beta chain variable domain of TCR clone 390108 (TRBV5-4, TRBJ2-3)
CASQQPGAGGADTQYF

SEQ ID NO: 780217 - protein, 14 aa, Homo sapiens
  CDR3 for alpha chain variable domain of TCR clone 390109 (TRAV8-3, TRAJ26)
CAVAPGNYGQNFVF

SEQ ID NO: 780218 - protein, 16 aa, Homo sapiens
  CDR3 for beta chain variable domain of TCR clone 390109 (TRBV6-1, TRBJ1-2)
CASSGAWQGRSHGYTF

SEQ ID NO: 780219 - protein, 15 aa, Homo sapiens
  CDR3 for alpha chain variable domain of TCR clone 390110 (TRAV35, TRAJ40)
CAVQLGTSGTYKYIF

SEQ ID NO: 780220 - protein, 13 aa, Homo sapiens
  CDR3 for beta chain variable domain of TCR clone 390110 (TRBV10-3, TRBJ2-7)
CASKLAVNYEQYF

SEQ ID NO: 780221 - protein, 14 aa, Homo sapiens
  CDR3 for alpha chain variable domain of TCR clone 390111 (TRAV8-3, TRAJ4)
CAVGAAGGYNNLIF

SEQ ID NO: 780222 - protein, 15 aa, Homo sapiens
  CDR3 for beta chain variable domain of TCR clone 390111 (TRBV6-5, TRBJ2-1)
CASSYGAGAGNEQFF

SEQ ID NO: 780223 - protein, 11 aa, Homo sapiens
  CDR3 for alpha chain variable domain of TCR clone 390112 (TRAV1-1, TRAJ23)
CAVRQGGKLIF

SEQ ID NO: 780224 - protein, 20 aa, Homo sapiens
  CDR3 for beta chain variable domain of TCR clone 390112 (TRBV7-8, TRBJ2-2)
CASSHLFLGPTIHIPGELFF

SEQ ID NO: 780225 - protein, 15 aa, Homo sapiens
  CDR3 for alpha chain variable domain of TCR clone 390113 (TRAV23/DV6, TRAJ12)
CAAIDLGAMDSSYEL

SEQ ID NO: 780226 - protein, 12 aa, Homo sapiens
  CDR3 for beta chain variable domain of TCR clone 390113 (TRBV10-3, TRBJ2-2)
CAIRENTGELFF

SEQ ID NO: 780227 - protein, 16 aa, Homo sapiens
  CDR3 for alpha chain variable domain of TCR clone 390114 (TRAV38-1, TRAJ42)
CAFRLVRGGSQGNLIF

SEQ ID NO: 780228 - protein, 15 aa, Homo sapiens
  CDR3 for beta chain variable domain of TCR clone 390114 (TRBV19, TRBJ1-1)
CASTSGQIQNTEAFF

SEQ ID NO: 780229 - protein, 15 aa, Homo sapiens
  CDR3 for alpha chain variable domain of TCR clone 390115 (TRAV8-2, TRAJ16)
CVVSDGVSDGQKLLF

SEQ ID NO: 780230 - protein, 15 aa, Homo sapiens
  CDR3 for beta chain variable domain of TCR clone 390115 (TRBV7-2, TRBJ2-1)
CASSSGLAGGNEQFF

SEQ ID NO: 780231 - protein, 15 aa, Homo sapiens
  CDR3 for alpha chain variable domain of TCR clone 390116 (TRAV3, TRAJ22)
CAVRDRGGSARQPPF

SEQ ID NO: 780232 - protein, 17 aa, Homo sapiens
  CDR3 for beta chain variable domain of TCR clone 390116 (TRBV11-2, TRBJ2-1)
CASSLYPPGVEYNEQFF

SEQ ID NO: 780233 - protein, 12 aa, Homo sapiens
  CDR3 for alpha chain variable domain of TCR clone 390117 (TRAV1-1, TRAJ39)
CAVPVAGTMLTF

SEQ ID NO: 780234 - protein, 15 aa, Homo sapiens
  CDR3 for beta chain variable domain of TCR clone 390117 (TRBV19, TRBJ1-6)
CASSTQGAVGSPLHF

SEQ ID NO: 780235 - protein, 15 aa, Homo sapiens
  CDR3 for alpha chain variable domain of TCR clone 390118 (TRAV40, TRAJ45)
CLLGDLGGGADGLTF

SEQ ID NO: 780236 - protein, 12 aa, Homo sapiens
  CDR3 for beta chain variable domain of TCR clone 390118 (TRBV24-1, TRBJ1-1)
CATLYPDTEAFF

SEQ ID NO: 780237 - protein, 13 aa, Homo sapiens
  CDR3 for alpha chain variable domain of TCR clone 390119 (TRAV20, TRAJ21)
CAVEGYNFNKFYF

SEQ ID NO: 780238 - protein, 12 aa, Homo sapiens
  CDR3 for beta chain variable domain of TCR clone 390119 (TRBV11-2, TRBJ2-1)
CASSPGNNEQFF

SEQ ID NO: 780239 - protein, 14 aa, Homo sapiens
  CDR3 for alpha chain variable domain of TCR clone 390120 (TRAV16, TRAJ8)
CALLLNTGFQKLVF

SEQ ID NO: 780240 - protein, 15 aa, Homo sapiens
  CDR3 for beta chain variable domain of TCR clone 390120 (TRBV7-7, TRBJ2-2)
CATSKLAKNTGELFS

SEQ ID NO: 780241 - protein, 16 aa, Homo sapiens
  CDR3 for alpha chain variable domain of TCR clone 390121 (TRAV4, TRAJ28)
CTTAFLFGAGSYQLTF

SEQ ID NO: 780242 - protein, 14 aa, Homo sapiens
  CDR3 for beta chain variable domain of TCR clone 390121 (TRBV7-8, TRBJ1-2)
CASSPDSLSYGYTF

SEQ ID NO: 780243 - protein, 14 aa, Homo sapiens
  CDR3 for alpha chain variable domain of TCR clone 390122 (TRAV27, TRAJ22)
CAGVSVLGKRQLTF

SEQ ID NO: 780244 - protein, 17 aa, Homo sapiens
  CDR3 for beta chain variable domain of TCR clone 390122 (TRBV14, TRBJ2-1)
CASSQDRRVTSYNAQFF

SEQ ID NO: 780245 - protein, 13 aa, Homo sapiens
  CDR3 for alpha chain variable domain of TCR clone 390123 (TRAV2, TRAJ40)
CAVVTSGNYKYIF

SEQ ID NO: 780246 - protein, 16 aa, Homo sapiens
  CDR3 for beta chain variable domain of TCR clone 390123 (TRBV7-9, TRBJ1-3)
CASSLGAGSSGNTIYF

SEQ ID NO: 780247 - protein, 11 aa, Homo sapiens
  CDR3 for alpha chain variable domain of TCR clone 390124 (TRAV1-2, TRAJ20)
CAVANDYKLSF

SEQ ID NO: 780248 - protein, 18 aa, Homo sapiens
  CDR3 for beta chain variable domain of TCR clone 390124 (TRBV20-1, TRBJ2-6)
CSAETTPTHGPGANGLTF

SEQ ID NO: 780249 - protein, 10 aa, Homo sapiens
  CDR3 for alpha chain variable domain of TCR clone 390125 (TRAV23/DV6, TRAJ57)
CAASSTLSQG

SEQ ID NO: 780250 - protein, 13 aa, Homo sapiens
  CDR3 for beta chain variable domain of TCR clone 390125 (TRBV25-1, TRBJ1-1)
CQRPPGGNTEAFF

SEQ ID NO: 780251 - protein, 13 aa, Homo sapiens
  CDR3 for alpha chain variable domain of TCR clone 390126 (TRAV12-3, TRAJ5)
CAMRPTGRRALTF

SEQ ID NO: 780252 - protein, 12 aa, Homo sapiens
  CDR3 for beta chain variable domain of TCR clone 390126 (TRBV6-5, TRBJ2-2)
CASRTGTGELFF

SEQ ID NO: 780253 - protein, 12 aa, Homo sapiens
  CDR3 for alpha chain variable domain of TCR clone 390127 (TRAV12-3, TRAJ20)
CAMVRGDYKLSF

SEQ ID NO: 780254 - protein, 16 aa, Homo sapiens
  CDR3 for beta chain variable domain of TCR clone 390127 (TRBV19, TRBJ2-1)
CAGSKAGPSSYNEQFF

SEQ ID NO: 780255 - protein, 17 aa, Homo sapiens
  CDR3 for alpha chain variable domain of TCR clone 390128 (TRAV3, TRAJ13)
CAVRDMRRTGGYQKVTF

SEQ ID NO: 780256 - protein, 14 aa, Homo sapiens
  CDR3 for beta chain variable domain of TCR clone 390128 (TRBV5-1, TRBJ2-7)
CASSLIGSGYEQYF

SEQ ID NO: 780257 - protein, 15 aa, Homo sapiens
  CDR3 for alpha chain variable domain of TCR clone 390129 (TRAV1-2, TRAJ28)
CAVRNSGAGSYQLTF

SEQ ID NO: 780258 - protein, 15 aa, Homo sapiens
  CDR3 for beta chain variable domain of TCR clone 390129 (TRBV7-2, TRBJ1-5)
CASSSTGVDNQPQHF

SEQ ID NO: 780259 - protein, 17 aa, Homo sapiens
  CDR3 for alpha chain variable domain of TCR clone 390130 (TRAV3, TRAJ6)
CAVRDGPRAGGGYVPTF

SEQ ID NO: 780260 - protein, 15 aa, Homo sapiens
  CDR3 for beta chain variable domain of TCR clone 390130 (TRBV11-3, TRBJ2-7)
CASSPGPASSYEQYF

SEQ ID NO: 780261 - protein, 18 aa, Homo sapiens
  CDR3 for alpha chain variable domain of TCR clone 390131 (TRAV12-3, TRAJ52)
CAMSVGGAGGTRYGKLTF

SEQ ID NO: 780262 - protein, 15 aa, Homo sapiens
  CDR3 for beta chain variable domain of TCR clone 390131 (TRBV27, TRBJ1-6)
CASSFDRGLESPLHF

SEQ ID NO: 780263 - protein, 13 aa, Homo sapiens
  CDR3 for alpha chain variable domain of TCR clone 390132 (TRAV39, TRAJ58)
CAGEATSGSRLPF

SEQ ID NO: 780264 - protein, 13 aa, Homo sapiens
  CDR3 for beta chain variable domain of TCR clone 390132 (TRBV15, TRBJ2-7)
CATSTTGHYEQYF

SEQ ID NO: 780265 - protein, 13 aa, Homo sapiens
  CDR3 for alpha chain variable domain of TCR clone 390133 (TRAV1-2, TRAJ12)
CAVSMDISYKLIF

SEQ ID NO: 780266 - protein, 15 aa, Homo sapiens
  CDR3 for beta chain variable domain of TCR clone 390133 (TRBV6-1, TRBJ2-1)
CASSELRGQYNEQFF

SEQ ID NO: 780267 - protein, 16 aa, Homo sapiens
  CDR3 for alpha chain variable domain of TCR clone 390134 (TRAV3, TRAJ10)
CAVRDMRSGGGNKLTF

SEQ ID NO: 780268 - protein, 15 aa, Homo sapiens
  CDR3 for beta chain variable domain of TCR clone 390134 (TRBV11-3, TRBJ2-7)
CASSPGPASSYEQYF

SEQ ID NO: 780269 - protein, 13 aa, Homo sapiens
  CDR3 for alpha chain variable domain of TCR clone 390135 (TRAV2, TRAJ5)
CAVPDTGRRALTF

SEQ ID NO: 780270 - protein, 16 aa, Homo sapiens
  CDR3 for beta chain variable domain of TCR clone 390135 (TRBV12-4, TRBJ2-5)
CASSFFVRGRQETQYF

SEQ ID NO: 780271 - protein, 14 aa, Homo sapiens
  CDR3 for alpha chain variable domain of TCR clone 390136 (TRAV13-1, TRAJ48)
CAASTAFGNEKLTF

SEQ ID NO: 780272 - protein, 15 aa, Homo sapiens
  CDR3 for beta chain variable domain of TCR clone 390136 (TRBV10-2, TRBJ2-5)
CASKPEDRRQETQYF

SEQ ID NO: 780273 - protein, 15 aa, Homo sapiens
  CDR3 for alpha chain variable domain of TCR clone 390137 (TRAV17, TRAJ56)
CATDANTGANSKLTF

SEQ ID NO: 780274 - protein, 12 aa, Homo sapiens
  CDR3 for beta chain variable domain of TCR clone 390137 (TRBV28, TRBJ2-6)
CAIQTGANVLTF

SEQ ID NO: 780275 - protein, 18 aa, Homo sapiens
  CDR3 for alpha chain variable domain of TCR clone 390138 (TRAV1-2, TRAJ18)
CAVRDMGDRGSTLGRLYY

SEQ ID NO: 780276 - protein, 16 aa, Homo sapiens
  CDR3 for beta chain variable domain of TCR clone 390138 (TRBV29-1, TRBJ1-2)
CSVEANRDIANYGYTF

SEQ ID NO: 780277 - protein, 14 aa, Homo sapiens
  CDR3 for alpha chain variable domain of TCR clone 390139 (TRAV12-1, TRAJ9)
CGEFRGYWRLKTIF

SEQ ID NO: 780278 - protein, 13 aa, Homo sapiens
  CDR3 for beta chain variable domain of TCR clone 390139 (TRBV2, TRBJ1-4)
CASSERAGEKLFF

SEQ ID NO: 780279 - protein, 16 aa, Homo sapiens
  CDR3 for alpha chain variable domain of TCR clone 390140 (TRAV17, TRAJ17)
RATALREEAAGNKPTF

SEQ ID NO: 780280 - protein, 12 aa, Homo sapiens
  CDR3 for beta chain variable domain of TCR clone 390140 (TRBV4-2, TRBJ2-5)
CASGGAQETQYF

SEQ ID NO: 780281 - protein, 14 aa, Homo sapiens
  CDR3 for alpha chain variable domain of TCR clone 390141 (TRAV35, TRAJ22)
CAGLRPGSARQLTF

SEQ ID NO: 780282 - protein, 14 aa, Homo sapiens
  CDR3 for beta chain variable domain of TCR clone 390141 (TRBV28, TRBJ2-1)
CASSYYTAYNEQFF

SEQ ID NO: 780283 - protein, 14 aa, Homo sapiens
  CDR3 for alpha chain variable domain of TCR clone 390142 (TRAV17, TRAJ39)
CATDPVRAGKMLTF

SEQ ID NO: 780284 - protein, 13 aa, Homo sapiens
  CDR3 for beta chain variable domain of TCR clone 390142 (TRBV19, TRBJ1-2)
CASSVPGQDGYTF

SEQ ID NO: 780285 - protein, 16 aa, Homo sapiens
  CDR3 for alpha chain variable domain of TCR clone 390143 (TRAV16, TRAJ52)
CALSAAGGTSYGKLKF

SEQ ID NO: 780286 - protein, 16 aa, Homo sapiens
  CDR3 for beta chain variable domain of TCR clone 390143 (TRBV12-4, TRBJ1-5)
CASSRPVGGSNQPQHF

SEQ ID NO: 780287 - protein, 12 aa, Homo sapiens
  CDR3 for alpha chain variable domain of TCR clone 390144 (TRAV13-1, TRAJ49)
CAASPMGNQFYL

SEQ ID NO: 780288 - protein, 14 aa, Homo sapiens
  CDR3 for beta chain variable domain of TCR clone 390144 (TRBV20-1, TRBJ2-2)
SAVLVPRAPGSCFF

SEQ ID NO: 780289 - protein, 13 aa, Homo sapiens
  CDR3 for alpha chain variable domain of TCR clone 390145 (TRAV8-3, TRAJ43)
CAVVPYNNNDMRF

SEQ ID NO: 780290 - protein, 12 aa, Homo sapiens
  CDR3 for beta chain variable domain of TCR clone 390145 (TRBV27, TRBJ2-5)
CASSLKGETQYF

SEQ ID NO: 780291 - protein, 13 aa, Homo sapiens
  CDR3 for alpha chain variable domain of TCR clone 390146 (TRAV23/DV6, TRAJ15)
CTALPAGRNCSDL

SEQ ID NO: 780292 - protein, 14 aa, Homo sapiens
  CDR3 for beta chain variable domain of TCR clone 390146 (TRBV7-9, TRBJ1-2)
CASSRQGANYGYTF

SEQ ID NO: 780293 - protein, 16 aa, Homo sapiens
  CDR3 for alpha chain variable domain of TCR clone 390147 (TRAV12-3, TRAJ53)
CAMSPVSGGSNYKLTF

SEQ ID NO: 780294 - protein, 11 aa, Homo sapiens
  CDR3 for beta chain variable domain of TCR clone 390147 (TRBV29-1, TRBJ2-5)
CSENRTGTQYF

SEQ ID NO: 780295 - protein, 15 aa, Homo sapiens
  CDR3 for alpha chain variable domain of TCR clone 390148 (TRAV21, TRAJ53)
CATLNSGGSNYKLKF

SEQ ID NO: 780296 - protein, 14 aa, Homo sapiens
  CDR3 for beta chain variable domain of TCR clone 390148 (TRBV7-2, TRBJ2-7)
CASRSQGAAYEQYF

SEQ ID NO: 780297 - protein, 14 aa, Homo sapiens
  CDR3 for alpha chain variable domain of TCR clone 390149 (TRAV29/DV5, TRAJ36)
CAARRKTGANNLFF

SEQ ID NO: 780298 - protein, 15 aa, Homo sapiens
  CDR3 for beta chain variable domain of TCR clone 390149 (TRBV28, TRBJ1-1)
CASTSTRGLNTEAFF

SEQ ID NO: 780299 - protein, 14 aa, Homo sapiens
  CDR3 for alpha chain variable domain of TCR clone 390150 (TRAV30, TRAJ33)
CGTVAPRSNYQLIW

SEQ ID NO: 780300 - protein, 16 aa, Homo sapiens
  CDR3 for beta chain variable domain of TCR clone 390150 (TRBV7-9, TRBJ2-1)
CASSDVAGGSYNEQFF

SEQ ID NO: 780301 - protein, 12 aa, Homo sapiens
  CDR3 for alpha chain variable domain of TCR clone 390151 (TRAV23/DV6, TRAJ30)
CAASKGDDKIIF

SEQ ID NO: 780302 - protein, 17 aa, Homo sapiens
  CDR3 for beta chain variable domain of TCR clone 390151 (TRBV13, TRBJ2-3)
CASSLSRVAGGRNTQYY

SEQ ID NO: 780303 - protein, 13 aa, Homo sapiens
  CDR3 for alpha chain variable domain of TCR clone 390152 (TRAV12-2, TRAJ26)
CAVNENYGQNFVF

SEQ ID NO: 780304 - protein, 13 aa, Homo sapiens
  CDR3 for beta chain variable domain of TCR clone 390152 (TRBV18, TRBJ2-2)
CASSPTRGGELCF

SEQ ID NO: 780305 - protein, 15 aa, Homo sapiens
  CDR3 for alpha chain variable domain of TCR clone 390153 (TRAV8-4, TRAJ11)
CAVSRALSGYSTLTF

SEQ ID NO: 780306 - protein, 13 aa, Homo sapiens
  CDR3 for beta chain variable domain of TCR clone 390153 (TRBV10-3, TRBJ2-5)
CASKLAVNYEQYF

SEQ ID NO: 780307 - protein, 13 aa, Homo sapiens
  CDR3 for alpha chain variable domain of TCR clone 390154 (TRAV12-3, TRAJ7)
CAMSASGNNRLAF

SEQ ID NO: 780308 - protein, 14 aa, Homo sapiens
  CDR3 for beta chain variable domain of TCR clone 390154 (TRBV13, TRBJ2-5)
CASSLCPRGETQYV

SEQ ID NO: 780309 - protein, 12 aa, Homo sapiens
  CDR3 for alpha chain variable domain of TCR clone 390155 (TRAV13-1, TRAJ21)
CAAEEGFNKFYF

SEQ ID NO: 780310 - protein, 15 aa, Homo sapiens
  CDR3 for beta chain variable domain of TCR clone 390155 (TRBV11-3, TRBJ2-3)
CASLKDGREGDTQYF

SEQ ID NO: 780311 - protein, 14 aa, Homo sapiens
  CDR3 for alpha chain variable domain of TCR clone 390156 (TRAV26-1, TRAJ49)
CIVRPSNTGNQFYS

SEQ ID NO: 780312 - protein, 15 aa, Homo sapiens
  CDR3 for beta chain variable domain of TCR clone 390156 (TRBV19, TRBJ1-1)
CASRGFRDVNTEAFF

SEQ ID NO: 780313 - protein, 13 aa, Homo sapiens
  CDR3 for alpha chain variable domain of TCR clone 390157 (TRAV13-2, TRAJ48)
CAEMDFGNEKLTF

SEQ ID NO: 780314 - protein, 13 aa, Homo sapiens
  CDR3 for beta chain variable domain of TCR clone 390157 (TRBV28, TRBJ2-7)
CASRSSGVYEQYF

SEQ ID NO: 780315 - protein, 19 aa, Homo sapiens
  CDR3 for alpha chain variable domain of TCR clone 390158 (TRAV2, TRAJ20)
ILQVREADAAVYRDCKLSF

SEQ ID NO: 780316 - protein, 13 aa, Homo sapiens
  CDR3 for beta chain variable domain of TCR clone 390158 (TRBV20-1, TRBJ1-1)
CSARGGGNTEAFF

SEQ ID NO: 780317 - protein, 12 aa, Homo sapiens
  CDR3 for alpha chain variable domain of TCR clone 390159 (TRAV17, TRAJ12)
CATSRSSYKLIF

SEQ ID NO: 780318 - protein, 14 aa, Homo sapiens
  CDR3 for beta chain variable domain of TCR clone 390159 (TRBV19, TRBJ2-1)
CARGARSFQWEQFF

SEQ ID NO: 780319 - protein, 14 aa, Homo sapiens
  CDR3 for alpha chain variable domain of TCR clone 390160 (TRAV17, TRAJ45)
CATDARGGADGLTF

SEQ ID NO: 780320 - protein, 19 aa, Homo sapiens
  CDR3 for beta chain variable domain of TCR clone 390160 (TRBV7-9, TRBJ2-1)
CASSLWGSTRKSSYNEQSF

SEQ ID NO: 780321 - protein, 16 aa, Homo sapiens
  CDR3 for alpha chain variable domain of TCR clone 390161 (TRAV1-2, TRAJ10)
CAVRGVLTGGGNKRTF

SEQ ID NO: 780322 - protein, 20 aa, Homo sapiens
  CDR3 for beta chain variable domain of TCR clone 390161 (TRBV7-8, TRBJ2-2)
CASSHLFPGPTIHITGELFF

SEQ ID NO: 780323 - protein, 16 aa, Homo sapiens
  CDR3 for alpha chain variable domain of TCR clone 390162 (TRAV3, TRAJ37)
CAVRGKGSGNTGKLIF

SEQ ID NO: 780324 - protein, 13 aa, Homo sapiens
  CDR3 for beta chain variable domain of TCR clone 390162 (TRBV19, TRBJ1-2)
CASSVPGQDGDTL

SEQ ID NO: 780325 - protein, 14 aa, Homo sapiens
  CDR3 for alpha chain variable domain of TCR clone 390163 (TRAV1-2, TRAJ16)
CAVNRFSDGQKLLF

SEQ ID NO: 780326 - protein, 15 aa, Homo sapiens
  CDR3 for beta chain variable domain of TCR clone 390163 (TRBV5-1, TRBJ2-1)
SASSPPRAPYNEQFF

SEQ ID NO: 780327 - protein, 12 aa, Homo sapiens
  CDR3 for alpha chain variable domain of TCR clone 390164 (TRAV8-3, TRAJ26)
CDGDNYGQSFVF

SEQ ID NO: 780328 - protein, 15 aa, Homo sapiens
  CDR3 for beta chain variable domain of TCR clone 390164 (TRBV9, TRBJ2-1)
CASSLAGSSYNEQFF

SEQ ID NO: 780329 - protein, 12 aa, Homo sapiens
  CDR3 for alpha chain variable domain of TCR clone 390165 (TRAV17, TRAJ39)
CATGAAGNMLTF

SEQ ID NO: 780330 - protein, 14 aa, Homo sapiens
  CDR3 for beta chain variable domain of TCR clone 390165 (TRBV6-1, TRBJ2-1)
CASAGGAIKNEQFF

SEQ ID NO: 780331 - protein, 14 aa, Homo sapiens
  CDR3 for alpha chain variable domain of TCR clone 390166 (TRAV35, TRAJ58)
CAGPEETSGSRLTF

SEQ ID NO: 780332 - protein, 15 aa, Homo sapiens
  CDR3 for beta chain variable domain of TCR clone 390166 (TRBV9, TRBJ2-1)
CASSLAGSSYNEQFF

SEQ ID NO: 780333 - protein, 13 aa, Homo sapiens
  CDR3 for alpha chain variable domain of TCR clone 390167 (TRAV27, TRAJ43)
CAGAGNTNNDMRF

SEQ ID NO: 780334 - protein, 15 aa, Homo sapiens
  CDR3 for beta chain variable domain of TCR clone 390167 (TRBV20-1, TRBJ2-7)
CSARDRVSGMDEQYF

SEQ ID NO: 780335 - protein, 12 aa, Homo sapiens
  CDR3 for alpha chain variable domain of TCR clone 390168 (TRAV26-1, TRAJ26)
CIVFIYGQNFVF

SEQ ID NO: 780336 - protein, 15 aa, Homo sapiens
  CDR3 for beta chain variable domain of TCR clone 390168 (TRBV28, TRBJ2-3)
CASGFGTRLADTQYF

SEQ ID NO: 780337 - protein, 15 aa, Homo sapiens
  CDR3 for alpha chain variable domain of TCR clone 390169 (TRAV3, TRAJ15)
CDVRPANQAGTALIF

SEQ ID NO: 780338 - protein, 14 aa, Homo sapiens
  CDR3 for beta chain variable domain of TCR clone 390169 (TRBV4-1, TRBJ2-2)
CASSQAVNTGELFF

SEQ ID NO: 780339 - protein, 10 aa, Homo sapiens
  CDR3 for alpha chain variable domain of TCR clone 390170 (TRAV12-3, TRAJ49)
CAMNDDQFYF

SEQ ID NO: 780340 - protein, 13 aa, Homo sapiens
  CDR3 for beta chain variable domain of TCR clone 390170 (TRBV7-6, TRBJ1-2)
CASSLVADYGYTF

SEQ ID NO: 780341 - protein, 16 aa, Homo sapiens
  CDR3 for alpha chain variable domain of TCR clone 390171 (TRAV3, TRAJ37)
CAVRGKGSGNTGKLIF

SEQ ID NO: 780342 - protein, 13 aa, Homo sapiens
  CDR3 for beta chain variable domain of TCR clone 390171 (TRBV14, TRBJ2-7)
CASSQDRRYEQYV

SEQ ID NO: 780343 - protein, 11 aa, Homo sapiens
  CDR3 for alpha chain variable domain of TCR clone 390172 (TRAV17, TRAJ43)
CSTPRSNDMRF

SEQ ID NO: 780344 - protein, 15 aa, Homo sapiens
  CDR3 for beta chain variable domain of TCR clone 390172 (TRBV11-2, TRBJ2-1)
CASSLGTSGLNGQFF

SEQ ID NO: 780345 - protein, 12 aa, Homo sapiens
  CDR3 for alpha chain variable domain of TCR clone 390173 (TRAV21, TRAJ49)
CAVNDGGNQFYF

SEQ ID NO: 780346 - protein, 14 aa, Homo sapiens
  CDR3 for beta chain variable domain of TCR clone 390173 (TRBV18, TRBJ2-7)
CARSPRGGSYEQYF

SEQ ID NO: 780347 - protein, 15 aa, Homo sapiens
  CDR3 for alpha chain variable domain of TCR clone 390174 (TRAV25, TRAJ52)
CAGRPGGTSYGKLTF

SEQ ID NO: 780348 - protein, 14 aa, Homo sapiens
  CDR3 for beta chain variable domain of TCR clone 390174 (TRBV7-9, TRBJ2-2)
CASSLVQDTGELFF

SEQ ID NO: 780349 - protein, 14 aa, Homo sapiens
  CDR3 for alpha chain variable domain of TCR clone 390175 (TRAV12-3, TRAJ41)
CAMSAGNSGYAHNF

SEQ ID NO: 780350 - protein, 11 aa, Homo sapiens
  CDR3 for beta chain variable domain of TCR clone 390175 (TRBV7-2, TRBJ2-3)
CASSSSDTQYF

SEQ ID NO: 780351 - protein, 16 aa, Homo sapiens
  CDR3 for alpha chain variable domain of TCR clone 390176 (TRAV26-1, TRAJ23)
CIVRVERYNQGGNLIF

SEQ ID NO: 780352 - protein, 15 aa, Homo sapiens
  CDR3 for beta chain variable domain of TCR clone 390176 (TRBV18, TRBJ2-7)
CASSPRGGKGYEQYF

SEQ ID NO: 780353 - protein, 17 aa, Homo sapiens
  CDR3 for alpha chain variable domain of TCR clone 390177 (TRAV3, TRAJ6)
CAVRDGPRAGGSSIPTF

SEQ ID NO: 780354 - protein, 15 aa, Homo sapiens
  CDR3 for beta chain variable domain of TCR clone 390177 (TRBV7-9, TRBJ1-6)
CASSSPGRGNSPLHF

SEQ ID NO: 780355 - protein, 17 aa, Homo sapiens
  CDR3 for alpha chain variable domain of TCR clone 390178 (TRAV3, TRAJ42)
CAVRDRDYGGSKGNLIF

SEQ ID NO: 780356 - protein, 14 aa, Homo sapiens
  CDR3 for beta chain variable domain of TCR clone 390178 (TRBV7-2, TRBJ2-7)
CASRSQGAAYEQYF

SEQ ID NO: 780357 - protein, 13 aa, Homo sapiens
  CDR3 for alpha chain variable domain of TCR clone 390179 (TRAV13-1, TRAJ5)
CAASDTGRIALTF

SEQ ID NO: 780358 - protein, 12 aa, Homo sapiens
  CDR3 for beta chain variable domain of TCR clone 390179 (TRBV28, TRBJ2-3)
CASSLYRDTQYC

SEQ ID NO: 780359 - protein, 14 aa, Homo sapiens
  CDR3 for alpha chain variable domain of TCR clone 390180 (TRAV1-2, TRAJ8)
CAVREDTGFQKLVL

SEQ ID NO: 780360 - protein, 17 aa, Homo sapiens
  CDR3 for beta chain variable domain of TCR clone 390180 (TRBV18, TRBJ2-1)
CASSKGLSGGADNEQFF

SEQ ID NO: 780361 - protein, 15 aa, Homo sapiens
  CDR3 for alpha chain variable domain of TCR clone 390181 (TRAV1-2, TRAJ32)
CAVRRYGGATNKLIF

SEQ ID NO: 780362 - protein, 15 aa, Homo sapiens
  CDR3 for beta chain variable domain of TCR clone 390181 (TRBV25-1, TRBJ2-5)
CASSDTGTHQETQYF

SEQ ID NO: 780363 - protein, 14 aa, Homo sapiens
  CDR3 for alpha chain variable domain of TCR clone 390182 (TRAV12-2, TRAJ45)
CAVYSGGGADGLTF

SEQ ID NO: 780364 - protein, 14 aa, Homo sapiens
  CDR3 for beta chain variable domain of TCR clone 390182 (TRBV6-5, TRBJ1-2)
CASTRVGGSDGYTF

SEQ ID NO: 780365 - protein, 14 aa, Homo sapiens
  CDR3 for alpha chain variable domain of TCR clone 390183 (TRAV16, TRAJ8)
CALLLNTGFQKLVF

SEQ ID NO: 780366 - protein, 15 aa, Homo sapiens
  CDR3 for beta chain variable domain of TCR clone 390183 (TRBV7-7, TRBJ2-2)
CATSELAKNTGELFF

SEQ ID NO: 780367 - protein, 13 aa, Homo sapiens
  CDR3 for alpha chain variable domain of TCR clone 390184 (TRAV13-2, TRAJ48)
CAEMDFGNQKLTF

SEQ ID NO: 780368 - protein, 15 aa, Homo sapiens
  CDR3 for beta chain variable domain of TCR clone 390184 (TRBV7-9, TRBJ1-6)
CASSSPGRGNSPLHF

SEQ ID NO: 780369 - protein, 11 aa, Homo sapiens
  CDR3 for alpha chain variable domain of TCR clone 390185 (TRAV13-1, TRAJ24)
FAASGWGKLQF

SEQ ID NO: 780370 - protein, 15 aa, Homo sapiens
  CDR3 for beta chain variable domain of TCR clone 390185 (TRBV11-2, TRBJ2-2)
CASSLDTGNTGELFF

SEQ ID NO: 780371 - protein, 12 aa, Homo sapiens
  CDR3 for alpha chain variable domain of TCR clone 390186 (TRAV21, TRAJ39)
CAADNAGNMLTF

SEQ ID NO: 780372 - protein, 15 aa, Homo sapiens
  CDR3 for beta chain variable domain of TCR clone 390186 (TRBV28, TRBJ2-7)
CASSQLGAGGHEQYF

SEQ ID NO: 780373 - protein, 12 aa, Homo sapiens
  CDR3 for alpha chain variable domain of TCR clone 390187 (TRAV8-3, TRAJ41)
CAVALSGDALNF

SEQ ID NO: 780374 - protein, 14 aa, Homo sapiens
  CDR3 for beta chain variable domain of TCR clone 390187 (TRBV7-9, TRBJ2-1)
CASSPWDSLYEQFF

SEQ ID NO: 780375 - protein, 10 aa, Homo sapiens
  CDR3 for alpha chain variable domain of TCR clone 390188 (TRAV30, TRAJ48)
CGIGNEKLTF

SEQ ID NO: 780376 - protein, 13 aa, Homo sapiens
  CDR3 for beta chain variable domain of TCR clone 390188 (TRBV7-6, TRBJ2-3)
CASSLSRADTQYF

SEQ ID NO: 780377 - protein, 12 aa, Homo sapiens
  CDR3 for alpha chain variable domain of TCR clone 390189 (TRAV8-3, TRAJ26)
CAGDNYGQNFVF

SEQ ID NO: 780378 - protein, 12 aa, Homo sapiens
  CDR3 for beta chain variable domain of TCR clone 390189 (TRBV11-2, TRBJ2-2)
CASSLGGRELFF

SEQ ID NO: 780379 - protein, 11 aa, Homo sapiens
  CDR3 for alpha chain variable domain of TCR clone 390190 (TRAV12-2, TRAJ33)
CAVTSNYHIIW

SEQ ID NO: 780380 - protein, 14 aa, Homo sapiens
  CDR3 for beta chain variable domain of TCR clone 390190 (TRBV28, TRBJ2-2)
CASRIRSGTGELFF

SEQ ID NO: 780381 - protein, 13 aa, Homo sapiens
  CDR3 for alpha chain variable domain of TCR clone 390191 (TRAV12-2, TRAJ6)
CAVNGSRKLHTYI

SEQ ID NO: 780382 - protein, 12 aa, Homo sapiens
  CDR3 for beta chain variable domain of TCR clone 390191 (TRBV29-1, TRBJ2-3)
CSVTGGADTQYF

SEQ ID NO: 780383 - protein, 14 aa, Homo sapiens
  CDR3 for alpha chain variable domain of TCR clone 390192 (TRAV2, TRAJ37)
CAVDFTSNTGKLIF

SEQ ID NO: 780384 - protein, 13 aa, Homo sapiens
  CDR3 for beta chain variable domain of TCR clone 390192 (TRBV19, TRBJ1-1)
CASSPSNGGEAFF

SEQ ID NO: 780385 - protein, 20 aa, Homo sapiens
  CDR3 for alpha chain variable domain of TCR clone 390193 (TRAV4, TRAJ29)
CCVLLPRGCVPFSGNTPLVF

SEQ ID NO: 780386 - protein, 17 aa, Homo sapiens
  CDR3 for beta chain variable domain of TCR clone 390193 (TRBV25-1, TRBJ2-7)
CASGDARVVFSSYEQYF

SEQ ID NO: 780387 - protein, 12 aa, Homo sapiens
  CDR3 for alpha chain variable domain of TCR clone 390194 (TRAV12-2, TRAJ21)
CAVRYNVNKFYF

SEQ ID NO: 780388 - protein, 14 aa, Homo sapiens
  CDR3 for beta chain variable domain of TCR clone 390194 (TRBV28, TRBJ2-1)
CASSYYTAYTEQFF

SEQ ID NO: 780389 - protein, 11 aa, Homo sapiens
  CDR3 for alpha chain variable domain of TCR clone 390195 (TRAV12-1, TRAJ30)
CVVNGQDKIIF

SEQ ID NO: 780390 - protein, 16 aa, Homo sapiens
  CDR3 for beta chain variable domain of TCR clone 390195 (TRBV24-1, TRBJ2-3)
CAASDAISGITDTQYF

SEQ ID NO: 780391 - protein, 14 aa, Homo sapiens
  CDR3 for alpha chain variable domain of TCR clone 390196 (TRAV1-2, TRAJ16)
CAVNRFSDGQKLLF

SEQ ID NO: 780392 - protein, 15 aa, Homo sapiens
  CDR3 for beta chain variable domain of TCR clone 390196 (TRBV9, TRBJ1-6)
CASSVSGTGDSTLHF

SEQ ID NO: 780393 - protein, 14 aa, Homo sapiens
  CDR3 for alpha chain variable domain of TCR clone 390197 (TRAV12-2, TRAJ40)
CAAKIPSGTYKYIF

SEQ ID NO: 780394 - protein, 14 aa, Homo sapiens
  CDR3 for beta chain variable domain of TCR clone 390197 (TRBV20-1, TRBJ1-1)
CSGQTRIGGTEAFF

SEQ ID NO: 780395 - protein, 16 aa, Homo sapiens
  CDR3 for alpha chain variable domain of TCR clone 390198 (TRAV38-1, TRAJ32)
CAFMKGGGGATNKIIF

SEQ ID NO: 780396 - protein, 13 aa, Homo sapiens
  CDR3 for beta chain variable domain of TCR clone 390198 (TRBV20-1, TRBJ2-5)
CSAREAFQETQYF

SEQ ID NO: 780397 - protein, 11 aa, Homo sapiens
  CDR3 for alpha chain variable domain of TCR clone 390199 (TRAV12-2, TRAJ36)
CAVDGANNLFF

SEQ ID NO: 780398 - protein, 13 aa, Homo sapiens
  CDR3 for beta chain variable domain of TCR clone 390199 (TRBV28, TRBJ2-2)
CASIRESTGELFF

SEQ ID NO: 780399 - protein, 14 aa, Homo sapiens
  CDR3 for alpha chain variable domain of TCR clone 390200 (TRAV16, TRAJ33)
CALSAMDSNYQLIW

SEQ ID NO: 780400 - protein, 16 aa, Homo sapiens
  CDR3 for beta chain variable domain of TCR clone 390200 (TRBV12-4, TRBJ2-3)
RASSFPSNTNTDTQYF

SEQ ID NO: 780401 - protein, 15 aa, Homo sapiens
  CDR3 for alpha chain variable domain of TCR clone 390201 (TRAV3, TRAJ17)
CAVRDTGAAGNKLTF

SEQ ID NO: 780402 - protein, 17 aa, Homo sapiens
  CDR3 for beta chain variable domain of TCR clone 390201 (TRBV20-1, TRBJ2-2)
CSASGSGQGGLTGELFF

SEQ ID NO: 780403 - protein, 15 aa, Homo sapiens
  CDR3 for alpha chain variable domain of TCR clone 390202 (TRAV23/DV6, TRAJ15)
CAALPAGRNCSDVLE

SEQ ID NO: 780404 - protein, 14 aa, Homo sapiens
  CDR3 for beta chain variable domain of TCR clone 390202 (TRBV7-9, TRBJ1-2)
CASSRQGANYGYTF

SEQ ID NO: 780405 - protein, 13 aa, Homo sapiens
  CDR3 for alpha chain variable domain of TCR clone 390203 (TRAV2, TRAJ36)
CAVDQTGANNLFF

SEQ ID NO: 780406 - protein, 12 aa, Homo sapiens
  CDR3 for beta chain variable domain of TCR clone 390203 (TRBV19, TRBJ1-1)
CGSMNRYTEAFF

SEQ ID NO: 780407 - protein, 13 aa, Homo sapiens
  CDR3 for alpha chain variable domain of TCR clone 390204 (TRAV13-1, TRAJ37)
CAAVSGNTGKLIF

SEQ ID NO: 780408 - protein, 15 aa, Homo sapiens
  CDR3 for beta chain variable domain of TCR clone 390204 (TRBV6-3, TRBJ2-7)
CASSSPGTVFYEQYF

SEQ ID NO: 780409 - protein, 12 aa, Homo sapiens
  CDR3 for alpha chain variable domain of TCR clone 390205 (TRAV21, TRAJ31)
CAVSPTRGRRMF

SEQ ID NO: 780410 - protein, 14 aa, Homo sapiens
  CDR3 for beta chain variable domain of TCR clone 390205 (TRBV28, TRBJ2-7)
CASSLLRISYEQYF

SEQ ID NO: 780411 - protein, 14 aa, Homo sapiens
  CDR3 for alpha chain variable domain of TCR clone 390206 (TRAV26-1, TRAJ38)
CIADNAGNNRKLIW

SEQ ID NO: 780412 - protein, 14 aa, Homo sapiens
  CDR3 for beta chain variable domain of TCR clone 390206 (TRBV20-1, TRBJ1-1)
CSAQTRIRGTEAFF

SEQ ID NO: 780413 - protein, 16 aa, Homo sapiens
  CDR3 for alpha chain variable domain of TCR clone 390207 (TRAV12-2, TRAJ32)
CAVNLVQGGATNKLIF

SEQ ID NO: 780414 - protein, 13 aa, Homo sapiens
  CDR3 for beta chain variable domain of TCR clone 390207 (TRBV9, TRBJ2-2)
CASSPRPAGELFF

SEQ ID NO: 780415 - protein, 10 aa, Homo sapiens
  CDR3 for alpha chain variable domain of TCR clone 390208 (TRAV23/DV6, TRAJ57)
CAASSTLSQG

SEQ ID NO: 780416 - protein, 15 aa, Homo sapiens
  CDR3 for beta chain variable domain of TCR clone 390208 (TRBV12-4, TRBJ2-5)
CASSPPTGLQETQYF

SEQ ID NO: 780417 - protein, 14 aa, Homo sapiens
  CDR3 for alpha chain variable domain of TCR clone 390209 (TRAV12-2, TRAJ13)
CAVKKTWGYQKVTF

SEQ ID NO: 780418 - protein, 14 aa, Homo sapiens
  CDR3 for beta chain variable domain of TCR clone 390209 (TRBV12-5, TRBJ2-5)
CASGSRTHQETQYF

SEQ ID NO: 780419 - protein, 15 aa, Homo sapiens
  CDR3 for alpha chain variable domain of TCR clone 390210 (TRAV17, TRAJ23)
CATDAEDNQGGKLIF

SEQ ID NO: 780420 - protein, 15 aa, Homo sapiens
  CDR3 for beta chain variable domain of TCR clone 390210 (TRBV2, TRBJ1-3)
CASSISPRSGNTIYF

SEQ ID NO: 780421 - protein, 13 aa, Homo sapiens
  CDR3 for alpha chain variable domain of TCR clone 390211 (TRAV17, TRAJ34)
FATVPYNTDKLIF

SEQ ID NO: 780422 - protein, 14 aa, Homo sapiens
  CDR3 for beta chain variable domain of TCR clone 390211 (TRBV9, TRBJ2-3)
CASSAGGGPDTQYF

SEQ ID NO: 780423 - protein, 11 aa, Homo sapiens
  CDR3 for alpha chain variable domain of TCR clone 390212 (TRAV29/DV5, TRAJ31)
YAAMNNARLMF

SEQ ID NO: 780424 - protein, 14 aa, Homo sapiens
  CDR3 for beta chain variable domain of TCR clone 390212 (TRBV15, TRBJ2-5)
CATSIGGRGETQYF

SEQ ID NO: 780425 - protein, 14 aa, Homo sapiens
  CDR3 for alpha chain variable domain of TCR clone 390213 (TRAV13-1, TRAJ44)
CAAKSTGTASKLTF

SEQ ID NO: 780426 - protein, 11 aa, Homo sapiens
  CDR3 for beta chain variable domain of TCR clone 390213 (TRBV24-1, TRBJ2-3)
CATASTDTQYF

SEQ ID NO: 780427 - protein, 13 aa, Homo sapiens
  CDR3 for alpha chain variable domain of TCR clone 390214 (TRAV12-2, TRAJ34)
CAARGYNTDKLIF

SEQ ID NO: 780428 - protein, 18 aa, Homo sapiens
  CDR3 for beta chain variable domain of TCR clone 390214 (TRBV11-2, TRBJ2-3)
CASSLGGASRGAPNTQYF

SEQ ID NO: 780429 - protein, 15 aa, Homo sapiens
  CDR3 for alpha chain variable domain of TCR clone 390215 (TRAV12-2, TRAJ43)
CAFDMRFGAGTRLRV

SEQ ID NO: 780430 - protein, 14 aa, Homo sapiens
  CDR3 for beta chain variable domain of TCR clone 390215 (TRBV20-1, TRBJ2-3)
RTSGGPGTTDTQYF

SEQ ID NO: 780431 - protein, 15 aa, Homo sapiens
  CDR3 for alpha chain variable domain of TCR clone 390216 (TRAV12-2, TRAJ9)
CAVNNERTGGFKTIF

SEQ ID NO: 780432 - protein, 14 aa, Homo sapiens
  CDR3 for beta chain variable domain of TCR clone 390216 (TRBV4-1, TRBJ1-4)
CASSQERKNERLFF

SEQ ID NO: 780433 - protein, 16 aa, Homo sapiens
  CDR3 for alpha chain variable domain of TCR clone 390217 (TRAV17, TRAJ35)
CATAEGGIGFGNVLHC

SEQ ID NO: 780434 - protein, 16 aa, Homo sapiens
  CDR3 for beta chain variable domain of TCR clone 390217 (TRBV6-5, TRBJ2-7)
GASSSDPTSGFYEQYF

SEQ ID NO: 780435 - protein, 12 aa, Homo sapiens
  CDR3 for alpha chain variable domain of TCR clone 390218 (TRAV12-3, TRAJ17)
CAMTLTGNKLTF

SEQ ID NO: 780436 - protein, 15 aa, Homo sapiens
  CDR3 for beta chain variable domain of TCR clone 390218 (TRBV6-6, TRBJ2-5)
RASSPGGGLEETQYF

SEQ ID NO: 780437 - protein, 16 aa, Homo sapiens
  CDR3 for alpha chain variable domain of TCR clone 390219 (TRAV17, TRAJ53)
CATDALSGGSNYKLTF

SEQ ID NO: 780438 - protein, 12 aa, Homo sapiens
  CDR3 for beta chain variable domain of TCR clone 390219 (TRBV5-1, TRBJ2-7)
CASSLRGYEQYF

SEQ ID NO: 780439 - protein, 16 aa, Homo sapiens
  CDR3 for alpha chain variable domain of TCR clone 390220 (TRAV4, TRAJ9)
CLVGEPNRPGGFKTIF

SEQ ID NO: 780440 - protein, 13 aa, Homo sapiens
  CDR3 for beta chain variable domain of TCR clone 390220 (TRBV5-5, TRBJ1-2)
CASSFWRGEDYTF

SEQ ID NO: 780441 - protein, 14 aa, Homo sapiens
  CDR3 for alpha chain variable domain of TCR clone 390221 (TRAV12-3, TRAJ42)
CAMNYGGSQGNLIF

SEQ ID NO: 780442 - protein, 15 aa, Homo sapiens
  CDR3 for beta chain variable domain of TCR clone 390221 (TRBV5-7, TRBJ1-5)
CASSYGKLWNQPQHF

SEQ ID NO: 780443 - protein, 16 aa, Homo sapiens
  CDR3 for alpha chain variable domain of TCR clone 390222 (TRAV26-1, TRAJ38)
CIVRVELGGNNRKLSW

SEQ ID NO: 780444 - protein, 14 aa, Homo sapiens
  CDR3 for beta chain variable domain of TCR clone 390222 (TRBV5-1, TRBJ2-3)
CASSPGLAADTQYF

SEQ ID NO: 780445 - protein, 13 aa, Homo sapiens
  CDR3 for alpha chain variable domain of TCR clone 390223 (TRAV17, TRAJ5)
CAPMDTGRRALTF

SEQ ID NO: 780446 - protein, 15 aa, Homo sapiens
  CDR3 for beta chain variable domain of TCR clone 390223 (TRBV6-6, TRBJ2-5)
CASSPGGGLEETQYS

SEQ ID NO: 780447 - protein, 11 aa, Homo sapiens
  CDR3 for alpha chain variable domain of TCR clone 390224 (TRAV12-1, TRAJ44)
SLRGTASKLTF

SEQ ID NO: 780448 - protein, 14 aa, Homo sapiens
  CDR3 for beta chain variable domain of TCR clone 390224 (TRBV25-1, TRBJ1-1)
CASTHLGGNTEAFF

SEQ ID NO: 780449 - protein, 12 aa, Homo sapiens
  CDR3 for alpha chain variable domain of TCR clone 390225 (TRAV8-3, TRAJ41)
CAVGALGYALNI

SEQ ID NO: 780450 - protein, 16 aa, Homo sapiens
  CDR3 for beta chain variable domain of TCR clone 390225 (TRBV7-6, TRBJ2-3)
CASSDSRGEGTDTQYF

SEQ ID NO: 780451 - protein, 13 aa, Homo sapiens
  CDR3 for alpha chain variable domain of TCR clone 390226 (TRAV13-1, TRAJ21)
CAASIYNFNKFYL

SEQ ID NO: 780452 - protein, 16 aa, Homo sapiens
  CDR3 for beta chain variable domain of TCR clone 390226 (TRBV20-1, TRBJ1-4)
CSAPGQGLLTNEKLFF

SEQ ID NO: 780453 - protein, 14 aa, Homo sapiens
  CDR3 for alpha chain variable domain of TCR clone 390227 (TRAV8-2, TRAJ4)
CVVSPSGGYNKLIF

SEQ ID NO: 780454 - protein, 12 aa, Homo sapiens
  CDR3 for beta chain variable domain of TCR clone 390227 (TRBV2, TRBJ2-1)
CAKREGYNEQFF

SEQ ID NO: 780455 - protein, 16 aa, Homo sapiens
  CDR3 for alpha chain variable domain of TCR clone 390228 (TRAV21, TRAJ37)
CAVRTAGSSNTGKLIF

SEQ ID NO: 780456 - protein, 12 aa, Homo sapiens
  CDR3 for beta chain variable domain of TCR clone 390228 (TRBV7-9, TRBJ2-5)
CQPPSGRETQYF

SEQ ID NO: 780457 - protein, 23 aa, Homo sapiens
  CDR3 for alpha chain variable domain of TCR clone 390229 (TRAV3, TRAJ38)
CAVRDCLNAGNNHIQNPDPAVSQ

SEQ ID NO: 780458 - protein, 15 aa, Homo sapiens
  CDR3 for beta chain variable domain of TCR clone 390229 (TRBV6-5, TRBJ2-1)
CASSYDAGAGNEQFF

SEQ ID NO: 780459 - protein, 15 aa, Homo sapiens
  CDR3 for alpha chain variable domain of TCR clone 390230 (TRAV12-1, TRAJ44)
CVVFVNTGTTSKLTF

SEQ ID NO: 780460 - protein, 17 aa, Homo sapiens
  CDR3 for beta chain variable domain of TCR clone 390230 (TRBV7-8, TRBJ2-6)
CASSAGTGGAGANVLTF

SEQ ID NO: 780461 - protein, 13 aa, Homo sapiens
  CDR3 for alpha chain variable domain of TCR clone 390231 (TRAV17, TRAJ20)
CAPLGVDDYKLCF

SEQ ID NO: 780462 - protein, 12 aa, Homo sapiens
  CDR3 for beta chain variable domain of TCR clone 390231 (TRBV29-1, TRBJ2-3)
CSVTGGADTQYF

SEQ ID NO: 780463 - protein, 17 aa, Homo sapiens
  CDR3 for alpha chain variable domain of TCR clone 390232 (TRAV1-2, TRAJ8)
CAVRDPDENTGFQKLVF

SEQ ID NO: 780464 - protein, 16 aa, Homo sapiens
  CDR3 for beta chain variable domain of TCR clone 390232 (TRBV19, TRBJ2-1)
CASSKAGPSSYNEQFF

SEQ ID NO: 780465 - protein, 15 aa, Homo sapiens
  CDR3 for alpha chain variable domain of TCR clone 390233 (TRAV8-2, TRAJ28)
CVVSESGAGGYQLTF

SEQ ID NO: 780466 - protein, 16 aa, Homo sapiens
  CDR3 for beta chain variable domain of TCR clone 390233 (TRBV6-1, TRBJ2-5)
CASSETLDRGAETQYF

SEQ ID NO: 780467 - protein, 14 aa, Homo sapiens
  CDR3 for alpha chain variable domain of TCR clone 390234 (TRAV1-2, TRAJ8)
CAVREDTGFQKLVF

SEQ ID NO: 780468 - protein, 17 aa, Homo sapiens
  CDR3 for beta chain variable domain of TCR clone 390234 (TRBV10-2, TRBJ2-6)
CVSASSEQGTGANVLTF

SEQ ID NO: 780469 - protein, 14 aa, Homo sapiens
  CDR3 for alpha chain variable domain of TCR clone 390235 (TRAV1-2, TRAJ16)
CAVNRFSDGQKLLF

SEQ ID NO: 780470 - protein, 15 aa, Homo sapiens
  CDR3 for beta chain variable domain of TCR clone 390235 (TRBV11-2, TRBJ1-4)
CASSPAPGPGEKLFF

SEQ ID NO: 780471 - protein, 14 aa, Homo sapiens
  CDR3 for alpha chain variable domain of TCR clone 390236 (TRAV8-4, TRAJ54)
CAVSEVLVAQKLVF

SEQ ID NO: 780472 - protein, 13 aa, Homo sapiens
  CDR3 for beta chain variable domain of TCR clone 390236 (TRBV27, TRBJ2-7)
CASSLVSSYEQYF

SEQ ID NO: 780473 - protein, 18 aa, Homo sapiens
  CDR3 for alpha chain variable domain of TCR clone 390237 (TRAV21, TRAJ53)
CAVKGGENSGGSNYKLTF

SEQ ID NO: 780474 - protein, 12 aa, Homo sapiens
  CDR3 for beta chain variable domain of TCR clone 390237 (TRBV7-8, TRBJ2-7)
CASSLGDREQYF

SEQ ID NO: 780475 - protein, 14 aa, Homo sapiens
  CDR3 for alpha chain variable domain of TCR clone 390238 (TRAV26-1, TRAJ49)
CIVRLTNTGNQFYF

SEQ ID NO: 780476 - protein, 13 aa, Homo sapiens
  CDR3 for beta chain variable domain of TCR clone 390238 (TRBV4-1, TRBJ2-7)
CASSQVQAYEQYF

SEQ ID NO: 780477 - protein, 12 aa, Homo sapiens
  CDR3 for alpha chain variable domain of TCR clone 390239 (TRAV17, TRAJ16)
CATVLPGQTLLF

SEQ ID NO: 780478 - protein, 15 aa, Homo sapiens
  CDR3 for beta chain variable domain of TCR clone 390239 (TRBV6-3, TRBJ2-2)
CASSFLATLTGELFF

SEQ ID NO: 780479 - protein, 14 aa, Homo sapiens
  CDR3 for alpha chain variable domain of TCR clone 390240 (TRAV1-2, TRAJ16)
CVVNRFSDGQKLLF

SEQ ID NO: 780480 - protein, 15 aa, Homo sapiens
  CDR3 for beta chain variable domain of TCR clone 390240 (TRBV9, TRBJ1-6)
CTSSVAGTGDSPLHF

SEQ ID NO: 780481 - protein, 14 aa, Homo sapiens
  CDR3 for alpha chain variable domain of TCR clone 390241 (TRAV14/DV4, TRAJ15)
CAMRRYQAGTALIF

SEQ ID NO: 780482 - protein, 11 aa, Homo sapiens
  CDR3 for beta chain variable domain of TCR clone 390241 (TRBV7-2, TRBJ2-7)
CASSSGLWQYF

SEQ ID NO: 780483 - protein, 15 aa, Homo sapiens
  CDR3 for alpha chain variable domain of TCR clone 390242 (TRAV27, TRAJ38)
CAARRNAGNNRKLIW

SEQ ID NO: 780484 - protein, 10 aa, Homo sapiens
  CDR3 for beta chain variable domain of TCR clone 390242 (TRBV12-4, TRBJ2-2)
CQQLRRELFF

SEQ ID NO: 780485 - protein, 13 aa, Homo sapiens
  CDR3 for alpha chain variable domain of TCR clone 390243 (TRAV3, TRAJ27)
CAVRPLGSGQSTF

SEQ ID NO: 780486 - protein, 13 aa, Homo sapiens
  CDR3 for beta chain variable domain of TCR clone 390243 (TRBV7-9, TRBJ2-3)
CASSPGSTDTQYF

SEQ ID NO: 780487 - protein, 14 aa, Homo sapiens
  CDR3 for alpha chain variable domain of TCR clone 390244 (TRAV12-2, TRAJ40)
RAVKIPSGTYKYIF

SEQ ID NO: 780488 - protein, 16 aa, Homo sapiens
  CDR3 for beta chain variable domain of TCR clone 390244 (TRBV28, TRBJ2-5)
CASSFSPAGGWETQYF

SEQ ID NO: 780489 - protein, 16 aa, Homo sapiens
  CDR3 for alpha chain variable domain of TCR clone 390245 (TRAV27, TRAJ53)
CAAPEGSGGSNYKLTF

SEQ ID NO: 780490 - protein, 14 aa, Homo sapiens
  CDR3 for beta chain variable domain of TCR clone 390245 (TRBV7-8, TRBJ2-3)
CASSFPDGQDTQYF

SEQ ID NO: 780491 - protein, 14 aa, Homo sapiens
  CDR3 for alpha chain variable domain of TCR clone 390246 (TRAV23/DV6, TRAJ39)
CAASIGNAGNMLTF

SEQ ID NO: 780492 - protein, 12 aa, Homo sapiens
  CDR3 for beta chain variable domain of TCR clone 390246 (TRBV20-1, TRBJ2-5)
CRVGTGSETQYF

SEQ ID NO: 780493 - protein, 10 aa, Homo sapiens
  CDR3 for alpha chain variable domain of TCR clone 390247 (TRAV25, TRAJ20)
CAGNDYKLSF

SEQ ID NO: 780494 - protein, 15 aa, Homo sapiens
  CDR3 for beta chain variable domain of TCR clone 390247 (TRBV9, TRBJ1-6)
CASSVAGTGDSALHF

SEQ ID NO: 780495 - protein, 14 aa, Homo sapiens
  CDR3 for alpha chain variable domain of TCR clone 390248 (TRAV27, TRAJ22)
CAGVVPGSARQLTF

SEQ ID NO: 780496 - protein, 15 aa, Homo sapiens
  CDR3 for beta chain variable domain of TCR clone 390248 (TRBV20-1, TRBJ2-3)
CSTTPVMLGTDTQYF

SEQ ID NO: 780497 - protein, 18 aa, Homo sapiens
  CDR3 for alpha chain variable domain of TCR clone 390249 (TRAV14/DV4, TRAJ52)
CAMREANAGGTSYGKMTF

SEQ ID NO: 780498 - protein, 14 aa, Homo sapiens
  CDR3 for beta chain variable domain of TCR clone 390249 (TRBV4-1, TRBJ2-5)
CASSRSGSGETQYF

SEQ ID NO: 780499 - protein, 16 aa, Homo sapiens
  CDR3 for alpha chain variable domain of TCR clone 390250 (TRAV3, TRAJ37)
CAVRPHGSGNTGKLIF

SEQ ID NO: 780500 - protein, 14 aa, Homo sapiens
  CDR3 for beta chain variable domain of TCR clone 390250 (TRBV7-2, TRBJ2-5)
CASSPRGSSETQYF

SEQ ID NO: 780501 - protein, 12 aa, Homo sapiens
  CDR3 for alpha chain variable domain of TCR clone 390251 (TRAV2, TRAJ33)
CAVPDSNYQLIW

SEQ ID NO: 780502 - protein, 15 aa, Homo sapiens
  CDR3 for beta chain variable domain of TCR clone 390251 (TRBV19, TRBJ1-2)
CASSVGQVLNYGYTF

SEQ ID NO: 780503 - protein, 13 aa, Homo sapiens
  CDR3 for alpha chain variable domain of TCR clone 390252 (TRAV36/DV7, TRAJ57)
CAVVLGGSQKLVF

SEQ ID NO: 780504 - protein, 14 aa, Homo sapiens
  CDR3 for beta chain variable domain of TCR clone 390252 (TRBV4-1, TRBJ1-2)
CASSQDGQVRGYTF

SEQ ID NO: 780505 - protein, 12 aa, Homo sapiens
  CDR3 for alpha chain variable domain of TCR clone 390253 (TRAV2, TRAJ33)
CAVPDINYQLIW

SEQ ID NO: 780506 - protein, 15 aa, Homo sapiens
  CDR3 for beta chain variable domain of TCR clone 390253 (TRBV15, TRBJ1-5)
CATSRDPVSNQPQHF

SEQ ID NO: 780507 - protein, 15 aa, Homo sapiens
  CDR3 for alpha chain variable domain of TCR clone 390254 (TRAV12-2, TRAJ53)
CAVNGGGGSNYKLTF

SEQ ID NO: 780508 - protein, 16 aa, Homo sapiens
  CDR3 for beta chain variable domain of TCR clone 390254 (TRBV4-2, TRBJ2-7)
CASSQEGLANSYEQYF

SEQ ID NO: 780509 - protein, 16 aa, Homo sapiens
  CDR3 for alpha chain variable domain of TCR clone 390255 (TRAV16, TRAJ42)
CARKMNYGGSQGNLIF

SEQ ID NO: 780510 - protein, 13 aa, Homo sapiens
  CDR3 for beta chain variable domain of TCR clone 390255 (TRBV20-1, TRBJ2-7)
CSASPPAAYEQYF

SEQ ID NO: 780511 - protein, 12 aa, Homo sapiens
  CDR3 for alpha chain variable domain of TCR clone 390256 (TRAV1-1, TRAJ9)
CAVDTGGFKTIF

SEQ ID NO: 780512 - protein, 15 aa, Homo sapiens
  CDR3 for beta chain variable domain of TCR clone 390256 (TRBV10-3, TRBJ2-1)
CAISLGLVGGNEQFF

SEQ ID NO: 780513 - protein, 17 aa, Homo sapiens
  CDR3 for alpha chain variable domain of TCR clone 390257 (TRAV13-1, TRAJ52)
CAASSGAGGTSYGKLTF

SEQ ID NO: 780514 - protein, 17 aa, Homo sapiens
  CDR3 for beta chain variable domain of TCR clone 390257 (TRBV7-3, TRBJ2-3)
CASSLMKRMRGADTQYF

SEQ ID NO: 780515 - protein, 15 aa, Homo sapiens
  CDR3 for alpha chain variable domain of TCR clone 390258 (TRAV13-1, TRAJ5)
CSASPRGHGQESTYF

SEQ ID NO: 780516 - protein, 17 aa, Homo sapiens
  CDR3 for beta chain variable domain of TCR clone 390258 (TRBV3-1, TRBJ2-2)
CASSQFRDKVDTGELFF

SEQ ID NO: 780517 - protein, 15 aa, Homo sapiens
  CDR3 for alpha chain variable domain of TCR clone 390259 (TRAV22, TRAJ43)
CAFDMRFGAGARLTV

SEQ ID NO: 780518 - protein, 18 aa, Homo sapiens
  CDR3 for beta chain variable domain of TCR clone 390259 (TRBV20-1, TRBJ2-3)
CSASGLAGGPGTTDTQYF

SEQ ID NO: 780519 - protein, 18 aa, Homo sapiens
  CDR3 for alpha chain variable domain of TCR clone 390260 (TRAV21, TRAJ52)
CAVRPSPAGGTSYGKLTF

SEQ ID NO: 780520 - protein, 16 aa, Homo sapiens
  CDR3 for beta chain variable domain of TCR clone 390260 (TRBV7-3, TRBJ2-1)
FASSLEGYRAYNEQFF

SEQ ID NO: 780521 - protein, 13 aa, Homo sapiens
  CDR3 for alpha chain variable domain of TCR clone 390261 (TRAV13-1, TRAJ53)
SPDSGGSNYKLTF

SEQ ID NO: 780522 - protein, 13 aa, Homo sapiens
  CDR3 for beta chain variable domain of TCR clone 390261 (TRBV19, TRBJ1-2)
CASSVPGQDGYTF

SEQ ID NO: 780523 - protein, 11 aa, Homo sapiens
  CDR3 for alpha chain variable domain of TCR clone 390262 (TRAV1-2, TRAJ20)
CAVANAYKLSF

SEQ ID NO: 780524 - protein, 14 aa, Homo sapiens
  CDR3 for beta chain variable domain of TCR clone 390262 (TRBV7-9, TRBJ1-1)
CASTPLQSYTEAFF

SEQ ID NO: 780525 - protein, 14 aa, Homo sapiens
  CDR3 for alpha chain variable domain of TCR clone 390263 (TRAV3, TRAJ9)
CAVKLNTGGFKTIF

SEQ ID NO: 780526 - protein, 13 aa, Homo sapiens
  CDR3 for beta chain variable domain of TCR clone 390263 (TRBV7-9, TRBJ1-2)
CASSLKQNYGYTF

SEQ ID NO: 780527 - protein, 11 aa, Homo sapiens
  CDR3 for alpha chain variable domain of TCR clone 390264 (TRAV12-1, TRAJ26)
CVVAYGQNFVF

SEQ ID NO: 780528 - protein, 15 aa, Homo sapiens
  CDR3 for beta chain variable domain of TCR clone 390264 (TRBV12-4, TRBJ2-5)
CASSGTGQAQETQSF

SEQ ID NO: 780529 - protein, 14 aa, Homo sapiens
  CDR3 for alpha chain variable domain of TCR clone 390265 (TRAV12-3, TRAJ6)
CAMSATGGSYIPTF

SEQ ID NO: 780530 - protein, 17 aa, Homo sapiens
  CDR3 for beta chain variable domain of TCR clone 390265 (TRBV13, TRBJ2-3)
CASSLSRVAGGRNTQYF

SEQ ID NO: 780531 - protein, 11 aa, Homo sapiens
  CDR3 for alpha chain variable domain of TCR clone 390266 (TRAV13-1, TRAJ52)
PGGTSYGKLTF

SEQ ID NO: 780532 - protein, 18 aa, Homo sapiens
  CDR3 for beta chain variable domain of TCR clone 390266 (TRBV28, TRBJ2-7)
CASSPWVATGTFHSTSGR

SEQ ID NO: 780533 - protein, 15 aa, Homo sapiens
  CDR3 for alpha chain variable domain of TCR clone 390267 (TRAV3, TRAJ17)
CAVRDTGTAGNKLTF

SEQ ID NO: 780534 - protein, 15 aa, Homo sapiens
  CDR3 for beta chain variable domain of TCR clone 390267 (TRBV27, TRBJ2-1)
CASSNGGGSSNEQFF

SEQ ID NO: 780535 - protein, 17 aa, Homo sapiens
  CDR3 for alpha chain variable domain of TCR clone 390268 (TRAV3, TRAJ6)
CSVRDGPRAGGSYIPTF

SEQ ID NO: 780536 - protein, 16 aa, Homo sapiens
  CDR3 for beta chain variable domain of TCR clone 390268 (TRBV19, TRBJ2-2)
CASRSPGTGATGELFF

SEQ ID NO: 780537 - protein, 14 aa, Homo sapiens
  CDR3 for alpha chain variable domain of TCR clone 390269 (TRAV27, TRAJ23)
CAGRIYNQGGKLIF

SEQ ID NO: 780538 - protein, 13 aa, Homo sapiens
  CDR3 for beta chain variable domain of TCR clone 390269 (TRBV12-4, TRBJ2-7)
CASSPTETYEQYF

SEQ ID NO: 780539 - protein, 13 aa, Homo sapiens
  CDR3 for alpha chain variable domain of TCR clone 390270 (TRAV3, TRAJ21)
CAVREPDFNKFYF

SEQ ID NO: 780540 - protein, 16 aa, Homo sapiens
  CDR3 for beta chain variable domain of TCR clone 390270 (TRBV10-2, TRBJ2-7)
CASSESPGSSGFEQYF

SEQ ID NO: 780541 - protein, 13 aa, Homo sapiens
  CDR3 for alpha chain variable domain of TCR clone 390271 (TRAV21, TRAJ27)
CAARPGNAGKSTF

SEQ ID NO: 780542 - protein, 14 aa, Homo sapiens
  CDR3 for beta chain variable domain of TCR clone 390271 (TRBV7-6, TRBJ2-3)
CASSLGTVTATPYF

SEQ ID NO: 780543 - protein, 11 aa, Homo sapiens
  CDR3 for alpha chain variable domain of TCR clone 390272 (TRAV26-1, TRAJ27)
CIDPNAGKSTF

SEQ ID NO: 780544 - protein, 18 aa, Homo sapiens
  CDR3 for beta chain variable domain of TCR clone 390272 (TRBV7-9, TRBJ2-6)
CASSFPGEGISGANVLTF

SEQ ID NO: 780545 - protein, 13 aa, Homo sapiens
  CDR3 for alpha chain variable domain of TCR clone 390273 (TRAV2, TRAJ29)
CAEQHSGNTPLVF

SEQ ID NO: 780546 - protein, 13 aa, Homo sapiens
  CDR3 for beta chain variable domain of TCR clone 390273 (TRBV28, TRBJ1-2)
CASSPGSRNGYTF

SEQ ID NO: 780547 - protein, 11 aa, Homo sapiens
  CDR3 for alpha chain variable domain of TCR clone 390274 (TRAV30, TRAJ43)
CGTDGNNDMRF

SEQ ID NO: 780548 - protein, 13 aa, Homo sapiens
  CDR3 for beta chain variable domain of TCR clone 390274 (TRBV7-3, TRBJ1-1)
CASSQDWGAEAFF

SEQ ID NO: 780549 - protein, 14 aa, Homo sapiens
  CDR3 for alpha chain variable domain of TCR clone 390275 (TRAV8-4, TRAJ54)
CAVSEVLGAQKLVF

SEQ ID NO: 780550 - protein, 17 aa, Homo sapiens
  CDR3 for beta chain variable domain of TCR clone 390275 (TRBV4-1, TRBJ1-4)
CASSQGGPRGVEEKLFF

SEQ ID NO: 780551 - protein, 14 aa, Homo sapiens
  CDR3 for alpha chain variable domain of TCR clone 390276 (TRAV3, TRAJ34)
CAVRAPGNTDQLIF

SEQ ID NO: 780552 - protein, 17 aa, Homo sapiens
  CDR3 for beta chain variable domain of TCR clone 390276 (TRBV20-1, TRBJ2-7)
CSAAPGLARGISYEQYF

SEQ ID NO: 780553 - protein, 14 aa, Homo sapiens
  CDR3 for alpha chain variable domain of TCR clone 390277 (TRAV1-2, TRAJ16)
CAVNRFSDGQRLLF

SEQ ID NO: 780554 - protein, 15 aa, Homo sapiens
  CDR3 for beta chain variable domain of TCR clone 390277 (TRBV7-2, TRBJ2-7)
CASSLKGALTYEQYF

SEQ ID NO: 780555 - protein, 10 aa, Homo sapiens
  CDR3 for alpha chain variable domain of TCR clone 390278 (TRAV23/DV6, TRAJ4)
CASRDFWSRD

SEQ ID NO: 780556 - protein, 13 aa, Homo sapiens
  CDR3 for beta chain variable domain of TCR clone 390278 (TRBV7-2, TRBJ1-1)
CASSRNTNTEAFF

SEQ ID NO: 780557 - protein, 13 aa, Homo sapiens
  CDR3 for alpha chain variable domain of TCR clone 390279 (TRAV26-1, TRAJ48)
CIVRVVGAEKLTF

SEQ ID NO: 780558 - protein, 18 aa, Homo sapiens
  CDR3 for beta chain variable domain of TCR clone 390279 (TRBV4-3, TRBJ1-6)
CASSQETPASSYNSPLHF

SEQ ID NO: 780559 - protein, 14 aa, Homo sapiens
  CDR3 for alpha chain variable domain of TCR clone 390280 (TRAV17, TRAJ34)
CATDSLEGTDKLIF

SEQ ID NO: 780560 - protein, 13 aa, Homo sapiens
  CDR3 for beta chain variable domain of TCR clone 390280 (TRBV19, TRBJ2-2)
CASSPLGIGELFF

SEQ ID NO: 780561 - protein, 15 aa, Homo sapiens
  CDR3 for alpha chain variable domain of TCR clone 390281 (TRAV1-2, TRAJ13)
CAVRGSSWGYQKVTF

SEQ ID NO: 780562 - protein, 15 aa, Homo sapiens
  CDR3 for beta chain variable domain of TCR clone 390281 (TRBV11-3, TRBJ1-3)
CASSLSGTSGNTIYF

SEQ ID NO: 780563 - protein, 13 aa, Homo sapiens
  CDR3 for alpha chain variable domain of TCR clone 390282 (TRAV23/DV6, TRAJ47)
CVASIRNGIWKQT

SEQ ID NO: 780564 - protein, 13 aa, Homo sapiens
  CDR3 for beta chain variable domain of TCR clone 390282 (TRBV19, TRBJ1-2)
CASSQGQVYGYTF

SEQ ID NO: 780565 - protein, 14 aa, Homo sapiens
  CDR3 for alpha chain variable domain of TCR clone 390283 (TRAV16, TRAJ4)
FALHFSGGYNKLIF

SEQ ID NO: 780566 - protein, 15 aa, Homo sapiens
  CDR3 for beta chain variable domain of TCR clone 390283 (TRBV7-2, TRBJ2-7)
CASSTRLAGVDEQYF

SEQ ID NO: 780567 - protein, 16 aa, Homo sapiens
  CDR3 for alpha chain variable domain of TCR clone 390284 (TRAV30, TRAJ24)
CGTEIVDADSWGKFQV

SEQ ID NO: 780568 - protein, 15 aa, Homo sapiens
  CDR3 for beta chain variable domain of TCR clone 390284 (TRBV28, TRBJ1-3)
CASSMGWASGNTIYF

SEQ ID NO: 780569 - protein, 16 aa, Homo sapiens
  CDR3 for alpha chain variable domain of TCR clone 390285 (TRAV3, TRAJ10)
CAVRDMRAGGGNKLTF

SEQ ID NO: 780570 - protein, 16 aa, Homo sapiens
  CDR3 for beta chain variable domain of TCR clone 390285 (TRBV20-1, TRBJ1-4)
CSAPGQGLLTNEKLVF

SEQ ID NO: 780571 - protein, 12 aa, Homo sapiens
  CDR3 for alpha chain variable domain of TCR clone 390286 (TRAV12-3, TRAJ41)
CAMSYSGYALNF

SEQ ID NO: 780572 - protein, 12 aa, Homo sapiens
  CDR3 for beta chain variable domain of TCR clone 390286 (TRBV19, TRBJ2-7)
CASTSGTYEQYF

SEQ ID NO: 780573 - protein, 13 aa, Homo sapiens
  CDR3 for alpha chain variable domain of TCR clone 390287 (TRAV23/DV6, TRAJ58)
CAARLIRGSRLTF

SEQ ID NO: 780574 - protein, 13 aa, Homo sapiens
  CDR3 for beta chain variable domain of TCR clone 390287 (TRBV2, TRBJ1-6)
CADSGSYNSPLLF

SEQ ID NO: 780575 - protein, 13 aa, Homo sapiens
  CDR3 for alpha chain variable domain of TCR clone 390288 (TRAV26-1, TRAJ20)
CIVRVDSDYKLTF

SEQ ID NO: 780576 - protein, 11 aa, Homo sapiens
  CDR3 for beta chain variable domain of TCR clone 390288 (TRBV7-3, TRBJ2-2)
CACSLNSGGLA

SEQ ID NO: 780577 - protein, 13 aa, Homo sapiens
  CDR3 for alpha chain variable domain of TCR clone 390289 (TRAV13-1, TRAJ4)
CAASIGGYNKLIF

SEQ ID NO: 780578 - protein, 17 aa, Homo sapiens
  CDR3 for beta chain variable domain of TCR clone 390289 (TRBV4-2, TRBJ2-5)
CASSQDPTSGPQETQYF

SEQ ID NO: 780579 - protein, 13 aa, Homo sapiens
  CDR3 for alpha chain variable domain of TCR clone 390290 (TRAV13-2, TRAJ48)
CAEMDFGNEKLTF

SEQ ID NO: 780580 - protein, 12 aa, Homo sapiens
  CDR3 for beta chain variable domain of TCR clone 390290 (TRBV11-2, TRBJ2-2)
CASSRGGGELFF

SEQ ID NO: 780581 - protein, 10 aa, Homo sapiens
  CDR3 for alpha chain variable domain of TCR clone 390291 (TRAV23/DV6, TRAJ57)
CAASPTLSLG

SEQ ID NO: 780582 - protein, 14 aa, Homo sapiens
  CDR3 for beta chain variable domain of TCR clone 390291 (TRBV25-1, TRBJ1-1)
CASTHLGGNTEAFF

SEQ ID NO: 780583 - protein, 15 aa, Homo sapiens
  CDR3 for alpha chain variable domain of TCR clone 390292 (TRAV27, TRAJ38)
CAARRNAGNNRKLIW

SEQ ID NO: 780584 - protein, 13 aa, Homo sapiens
  CDR3 for beta chain variable domain of TCR clone 390292 (TRBV28, TRBJ2-5)
CAGVSRGEETQNF

SEQ ID NO: 780585 - protein, 18 aa, Homo sapiens
  CDR3 for alpha chain variable domain of TCR clone 390293 (TRAV21, TRAJ52)
CAVRPSPAGGTSYGKLTF

SEQ ID NO: 780586 - protein, 14 aa, Homo sapiens
  CDR3 for beta chain variable domain of TCR clone 390293 (TRBV7-8, TRBJ1-5)
CASSTGTVGGPQHF

SEQ ID NO: 780587 - protein, 19 aa, Homo sapiens
  CDR3 for alpha chain variable domain of TCR clone 390294 (TRAV26-1, TRAJ29)
CCVLLHRQSRGIRKHTSVF

SEQ ID NO: 780588 - protein, 15 aa, Homo sapiens
  CDR3 for beta chain variable domain of TCR clone 390294 (TRBV7-9, TRBJ1-5)
CASSQGHQPNQPQHF

SEQ ID NO: 780589 - protein, 14 aa, Homo sapiens
  CDR3 for alpha chain variable domain of TCR clone 390295 (TRAV12-2, TRAJ11)
CGGEGGSGYSTLTF

SEQ ID NO: 780590 - protein, 16 aa, Homo sapiens
  CDR3 for beta chain variable domain of TCR clone 390295 (TRBV6-1, TRBJ1-2)
CASSGAWQGRSHGYTF

SEQ ID NO: 780591 - protein, 13 aa, Homo sapiens
  CDR3 for alpha chain variable domain of TCR clone 390296 (TRAV2, TRAJ40)
CAVVTSGTYKYIF

SEQ ID NO: 780592 - protein, 14 aa, Homo sapiens
  CDR3 for beta chain variable domain of TCR clone 390296 (TRBV12-4, TRBJ1-4)
CASGFPGTPEKLFF

SEQ ID NO: 780593 - protein, 16 aa, Homo sapiens
  CDR3 for alpha chain variable domain of TCR clone 390297 (TRAV25, TRAJ24)
CAQRRGTTDSWGKLQF

SEQ ID NO: 780594 - protein, 12 aa, Homo sapiens
  CDR3 for beta chain variable domain of TCR clone 390297 (TRBV7-8, TRBJ2-7)
CASSLGDREQYF

SEQ ID NO: 780595 - protein, 17 aa, Homo sapiens
  CDR3 for alpha chain variable domain of TCR clone 390298 (TRAV3, TRAJ6)
CAARDGPRAGGSYIPTC

SEQ ID NO: 780596 - protein, 14 aa, Homo sapiens
  CDR3 for beta chain variable domain of TCR clone 390298 (TRBV7-2, TRBJ2-7)
CASSPKTSFYEQYF

SEQ ID NO: 780597 - protein, 15 aa, Homo sapiens
  CDR3 for alpha chain variable domain of TCR clone 390299 (TRAV27, TRAJ33)
CAGADIMDSNYQLIW

SEQ ID NO: 780598 - protein, 15 aa, Homo sapiens
  CDR3 for beta chain variable domain of TCR clone 390299 (TRBV5-8, TRBJ2-2)
CASSLDRGATGELFF

SEQ ID NO: 780599 - protein, 14 aa, Homo sapiens
  CDR3 for alpha chain variable domain of TCR clone 390300 (TRAV38-1, TRAJ29)
CAFITPSGNTPLVF

SEQ ID NO: 780600 - protein, 15 aa, Homo sapiens
  CDR3 for beta chain variable domain of TCR clone 390300 (TRBV7-9, TRBJ1-4)
CASSARTGGNEKLFF

SEQ ID NO: 780601 - protein, 12 aa, Homo sapiens
  CDR3 for alpha chain variable domain of TCR clone 390301 (TRAV1-1, TRAJ8)
CVGGTGFQKLLF

SEQ ID NO: 780602 - protein, 17 aa, Homo sapiens
  CDR3 for beta chain variable domain of TCR clone 390301 (TRBV4-3, TRBJ2-1)
CASSQELAIVSSNEQFF

SEQ ID NO: 780603 - protein, 14 aa, Homo sapiens
  CDR3 for alpha chain variable domain of TCR clone 390302 (TRAV4, TRAJ22)
CLARLSGSARQLTF

SEQ ID NO: 780604 - protein, 14 aa, Homo sapiens
  CDR3 for beta chain variable domain of TCR clone 390302 (TRBV4-3, TRBJ2-7)
CASSQDVAGGEQYF

SEQ ID NO: 780605 - protein, 14 aa, Homo sapiens
  CDR3 for alpha chain variable domain of TCR clone 390303 (TRAV21, TRAJ32)
CCGYYGGATNKLIF

SEQ ID NO: 780606 - protein, 15 aa, Homo sapiens
  CDR3 for beta chain variable domain of TCR clone 390303 (TRBV9, TRBJ1-6)
CASSVAGTGDSPLHF

SEQ ID NO: 780607 - protein, 14 aa, Homo sapiens
  CDR3 for alpha chain variable domain of TCR clone 390304 (TRAV26-1, TRAJ38)
CIADNAGNNRKLIW

SEQ ID NO: 780608 - protein, 13 aa, Homo sapiens
  CDR3 for beta chain variable domain of TCR clone 390304 (TRBV2, TRBJ1-5)
CATAGPDNQPQHF

SEQ ID NO: 780609 - protein, 14 aa, Homo sapiens
  CDR3 for alpha chain variable domain of TCR clone 390305 (TRAV8-6, TRAJ30)
CAVRPVNRDDKIIF

SEQ ID NO: 780610 - protein, 13 aa, Homo sapiens
  CDR3 for beta chain variable domain of TCR clone 390305 (TRBV12-4, TRBJ2-7)
CASSPTETYEQYF

SEQ ID NO: 780611 - protein, 14 aa, Homo sapiens
  CDR3 for alpha chain variable domain of TCR clone 390306 (TRAV35, TRAJ33)
CAGSSQDSNYQLIW

SEQ ID NO: 780612 - protein, 11 aa, Homo sapiens
  CDR3 for beta chain variable domain of TCR clone 390306 (TRBV11-2, TRBJ1-1)
CASSINTEAFF

SEQ ID NO: 780613 - protein, 17 aa, Homo sapiens
  CDR3 for alpha chain variable domain of TCR clone 390307 (TRAV12-1, TRAJ32)
QPPTSMNYGGATNKLIF

SEQ ID NO: 780614 - protein, 18 aa, Homo sapiens
  CDR3 for beta chain variable domain of TCR clone 390307 (TRBV20-1, TRBJ2-3)
CSASGLAGGPGTTDTQYF

SEQ ID NO: 780615 - protein, 11 aa, Homo sapiens
  CDR3 for alpha chain variable domain of TCR clone 390308 (TRAV13-1, TRAJ31)
CAPRDRLMFGD

SEQ ID NO: 780616 - protein, 12 aa, Homo sapiens
  CDR3 for beta chain variable domain of TCR clone 390308 (TRBV7-9, TRBJ2-7)
RASSLEGYEQYF

SEQ ID NO: 780617 - protein, 14 aa, Homo sapiens
  CDR3 for alpha chain variable domain of TCR clone 390309 (TRAV3, TRAJ40)
CAVRDRRGTYKYIF

SEQ ID NO: 780618 - protein, 15 aa, Homo sapiens
  CDR3 for beta chain variable domain of TCR clone 390309 (TRBV28, TRBJ1-4)
CASSRSGTGNEKLFF

SEQ ID NO: 780619 - protein, 18 aa, Homo sapiens
  CDR3 for alpha chain variable domain of TCR clone 390310 (TRAV8-3, TRAJ6)
CAVGAEHQEEATYLHLEV

SEQ ID NO: 780620 - protein, 14 aa, Homo sapiens
  CDR3 for beta chain variable domain of TCR clone 390310 (TRBV6-6, TRBJ2-7)
CASSDSGAGYEQYF

SEQ ID NO: 780621 - protein, 14 aa, Homo sapiens
  CDR3 for alpha chain variable domain of TCR clone 390311 (TRAV4, TRAJ26)
CLVGLHNYGKNFVF

SEQ ID NO: 780622 - protein, 17 aa, Homo sapiens
  CDR3 for beta chain variable domain of TCR clone 390311 (TRBV24-1, TRBJ2-1)
CATSDVSTSGTYNEQFF

SEQ ID NO: 780623 - protein, 13 aa, Homo sapiens
  CDR3 for alpha chain variable domain of TCR clone 390312 (TRAV21, TRAJ15)
CAVRNQAGTALIF

SEQ ID NO: 780624 - protein, 16 aa, Homo sapiens
  CDR3 for beta chain variable domain of TCR clone 390312 (TRBV20-1, TRBJ2-5)
CSPGGTSGGCMETQYF

SEQ ID NO: 780625 - protein, 14 aa, Homo sapiens
  CDR3 for alpha chain variable domain of TCR clone 390313 (TRAV17, TRAJ15)
CATAPNQARTALIF

SEQ ID NO: 780626 - protein, 14 aa, Homo sapiens
  CDR3 for beta chain variable domain of TCR clone 390313 (TRBV19, TRBJ2-7)
CASSMGQGAIEQYF

SEQ ID NO: 780627 - protein, 12 aa, Homo sapiens
  CDR3 for alpha chain variable domain of TCR clone 390314 (TRAV13-1, TRAJ52)
HAGGTSYGKLTF

SEQ ID NO: 780628 - protein, 16 aa, Homo sapiens
  CDR3 for beta chain variable domain of TCR clone 390314 (TRBV12-4, TRBJ1-5)
CASSRPVGGSNQPQHF

SEQ ID NO: 780629 - protein, 14 aa, Homo sapiens
  CDR3 for alpha chain variable domain of TCR clone 390315 (TRAV35, TRAJ22)
CAGLRPGSARQQTF

SEQ ID NO: 780630 - protein, 15 aa, Homo sapiens
  CDR3 for beta chain variable domain of TCR clone 390315 (TRBV12-4, TRBJ2-5)
CASSPPTGVQETQYF

SEQ ID NO: 780631 - protein, 11 aa, Homo sapiens
  CDR3 for alpha chain variable domain of TCR clone 390316 (TRAV8-6, TRAJ13)
CALGIYQKVTF

SEQ ID NO: 780632 - protein, 15 aa, Homo sapiens
  CDR3 for beta chain variable domain of TCR clone 390316 (TRBV5-1, TRBJ2-7)
CASSLNGGPARKQYF

SEQ ID NO: 780633 - protein, 14 aa, Homo sapiens
  CDR3 for alpha chain variable domain of TCR clone 390317 (TRAV9-2, TRAJ39)
CALYIYNAGNMPPF

SEQ ID NO: 780634 - protein, 13 aa, Homo sapiens
  CDR3 for beta chain variable domain of TCR clone 390317 (TRBV12-5, TRBJ2-3)
CASGDRQSDTQYF

SEQ ID NO: 780635 - protein, 15 aa, Homo sapiens
  CDR3 for alpha chain variable domain of TCR clone 390318 (TRAV12-2, TRAJ20)
CAVKGGFGAGTTVTV

SEQ ID NO: 780636 - protein, 16 aa, Homo sapiens
  CDR3 for beta chain variable domain of TCR clone 390318 (TRBV4-2, TRBJ2-3)
CASSQELARDTDTQYF

SEQ ID NO: 780637 - protein, 16 aa, Homo sapiens
  CDR3 for alpha chain variable domain of TCR clone 390319 (TRAV25, TRAJ24)
CAQRRGTTDSWGKWQF

SEQ ID NO: 780638 - protein, 14 aa, Homo sapiens
  CDR3 for beta chain variable domain of TCR clone 390319 (TRBV6-6, TRBJ1-5)
CASSYGPANQPQHF

SEQ ID NO: 780639 - protein, 15 aa, Homo sapiens
  CDR3 for alpha chain variable domain of TCR clone 390320 (TRAV2, TRAJ32)
CAVANYGGATNKPIF

SEQ ID NO: 780640 - protein, 15 aa, Homo sapiens
  CDR3 for beta chain variable domain of TCR clone 390320 (TRBV7-7, TRBJ2-5)
CASSQLERAEETQYF

SEQ ID NO: 780641 - protein, 13 aa, Homo sapiens
  CDR3 for alpha chain variable domain of TCR clone 390321 (TRAV27, TRAJ42)
CAGARGSQGNLIF

SEQ ID NO: 780642 - protein, 15 aa, Homo sapiens
  CDR3 for beta chain variable domain of TCR clone 390321 (TRBV10-3, TRBJ2-2)
CAIRTDREGTGELFF

SEQ ID NO: 780643 - protein, 13 aa, Homo sapiens
  CDR3 for alpha chain variable domain of TCR clone 390322 (TRAV30, TRAJ29)
CGTEDSGNTPLVF

SEQ ID NO: 780644 - protein, 15 aa, Homo sapiens
  CDR3 for beta chain variable domain of TCR clone 390322 (TRBV6-1, TRBJ2-3)
CASSARGGITDTQYF

SEQ ID NO: 780645 - protein, 17 aa, Homo sapiens
  CDR3 for alpha chain variable domain of TCR clone 390323 (TRAV3, TRAJ13)
CAVRDMRRTGGYQKVTF

SEQ ID NO: 780646 - protein, 12 aa, Homo sapiens
  CDR3 for beta chain variable domain of TCR clone 390323 (TRBV25-1, TRBJ1-1)
CASSQTRTEAFF

SEQ ID NO: 780647 - protein, 15 aa, Homo sapiens
  CDR3 for alpha chain variable domain of TCR clone 390324 (TRAV8-3, )
CAVDIQNPDPAVYQL

SEQ ID NO: 780648 - protein, 14 aa, Homo sapiens
  CDR3 for beta chain variable domain of TCR clone 390324 (TRBV28, TRBJ1-2)
CASRIQGANYGYTF

SEQ ID NO: 780649 - protein, 11 aa, Homo sapiens
  CDR3 for alpha chain variable domain of TCR clone 390325 (TRAV12-3, TRAJ43)
CAMSVSNDMRF

SEQ ID NO: 780650 - protein, 14 aa, Homo sapiens
  CDR3 for beta chain variable domain of TCR clone 390325 (TRBV14, TRBJ2-5)
CASSPQRHYETQYF

SEQ ID NO: 780651 - protein, 14 aa, Homo sapiens
  CDR3 for alpha chain variable domain of TCR clone 390326 (TRAV8-1, TRAJ36)
CAVNSPTGADNLFF

SEQ ID NO: 780652 - protein, 15 aa, Homo sapiens
  CDR3 for beta chain variable domain of TCR clone 390326 (TRBV7-2, TRBJ2-3)
CASSLEQGGTDTQYF

SEQ ID NO: 780653 - protein, 13 aa, Homo sapiens
  CDR3 for alpha chain variable domain of TCR clone 390327 (TRAV1-2, TRAJ9)
CAALNTGGFKTIF

SEQ ID NO: 780654 - protein, 23 aa, Homo sapiens
  CDR3 for beta chain variable domain of TCR clone 390327 (TRBV4-2, TRBJ2-3)
CASSQDPPRASSTSGGGGDTQYF

SEQ ID NO: 780655 - protein, 13 aa, Homo sapiens
  CDR3 for alpha chain variable domain of TCR clone 390328 (TRAV1-1, TRAJ31)
CASYLNNNARIMF

SEQ ID NO: 780656 - protein, 13 aa, Homo sapiens
  CDR3 for beta chain variable domain of TCR clone 390328 (TRBV15, TRBJ1-6)
CATSGGLNSPLHF

SEQ ID NO: 780657 - protein, 16 aa, Homo sapiens
  CDR3 for alpha chain variable domain of TCR clone 390329 (TRAV30, TRAJ24)
CGTEVVDADSWGKFQF

SEQ ID NO: 780658 - protein, 14 aa, Homo sapiens
  CDR3 for beta chain variable domain of TCR clone 390329 (TRBV12-5, TRBJ2-5)
CSSGSRTHQETQYF

SEQ ID NO: 780659 - protein, 18 aa, Homo sapiens
  CDR3 for alpha chain variable domain of TCR clone 390330 (TRAV29/DV5, TRAJ53)
CSVLLCSKRGGSNYKLIF

SEQ ID NO: 780660 - protein, 17 aa, Homo sapiens
  CDR3 for beta chain variable domain of TCR clone 390330 (TRBV7-8, TRBJ2-6)
CASSAGTGGAGANVLTF

SEQ ID NO: 780661 - protein, 17 aa, Homo sapiens
  CDR3 for alpha chain variable domain of TCR clone 390331 (TRAV26-1, TRAJ37)
CIVRVITVSSNTGKLIF

SEQ ID NO: 780662 - protein, 13 aa, Homo sapiens
  CDR3 for beta chain variable domain of TCR clone 390331 (TRBV7-3, TRBJ2-1)
CASSLWPYNEQFF

SEQ ID NO: 780663 - protein, 14 aa, Homo sapiens
  CDR3 for alpha chain variable domain of TCR clone 390332 (TRAV27, TRAJ15)
CAGFDNQAGTALSF

SEQ ID NO: 780664 - protein, 11 aa, Homo sapiens
  CDR3 for beta chain variable domain of TCR clone 390332 (TRBV29-1, TRBJ1-1)
CSVEVGTRTVF

SEQ ID NO: 780665 - protein, 14 aa, Homo sapiens
  CDR3 for alpha chain variable domain of TCR clone 390333 (TRAV12-1, TRAJ3)
CVVNPGSSASKIIF

SEQ ID NO: 780666 - protein, 14 aa, Homo sapiens
  CDR3 for beta chain variable domain of TCR clone 390333 (TRBV20-1, TRBJ2-3)
CSARGGTSTDKQYF

SEQ ID NO: 780667 - protein, 11 aa, Homo sapiens
  CDR3 for alpha chain variable domain of TCR clone 390334 (TRAV12-2, TRAJ6)
CAVNVSRKLHA

SEQ ID NO: 780668 - protein, 12 aa, Homo sapiens
  CDR3 for beta chain variable domain of TCR clone 390334 (TRBV29-1, TRBJ2-3)
CSVTGGADTQYF

SEQ ID NO: 780669 - protein, 14 aa, Homo sapiens
  CDR3 for alpha chain variable domain of TCR clone 390335 (TRAV3, TRAJ22)
CTVRDYGSARQLTF

SEQ ID NO: 780670 - protein, 13 aa, Homo sapiens
  CDR3 for beta chain variable domain of TCR clone 390335 (TRBV11-2, TRBJ2-5)
CASGHGAKETQYF

SEQ ID NO: 780671 - protein, 12 aa, Homo sapiens
  CDR3 for alpha chain variable domain of TCR clone 390336 (TRAV12-3, TRAJ17)
CAMTLTGNKLTF

SEQ ID NO: 780672 - protein, 15 aa, Homo sapiens
  CDR3 for beta chain variable domain of TCR clone 390336 (TRBV10-3, TRBJ2-1)
CAIRNGTSGHNEQFF

SEQ ID NO: 780673 - protein, 12 aa, Homo sapiens
  CDR3 for alpha chain variable domain of TCR clone 390337 (TRAV16, TRAJ49)
CALNEGGIQFYF

SEQ ID NO: 780674 - protein, 14 aa, Homo sapiens
  CDR3 for beta chain variable domain of TCR clone 390337 (TRBV7-9, TRBJ2-1)
CASRPTGLRNEQFF

SEQ ID NO: 780675 - protein, 15 aa, Homo sapiens
  CDR3 for alpha chain variable domain of TCR clone 390338 (TRAV12-1, TRAJ6)
CVVNSPSGGSYIHAF

SEQ ID NO: 780676 - protein, 15 aa, Homo sapiens
  CDR3 for beta chain variable domain of TCR clone 390338 (TRBV18, TRBJ1-1)
CASSGRTGEVTEAFF

SEQ ID NO: 780677 - protein, 11 aa, Homo sapiens
  CDR3 for alpha chain variable domain of TCR clone 390339 (TRAV13-1, TRAJ24)
CAASGWGKLQF

SEQ ID NO: 780678 - protein, 15 aa, Homo sapiens
  CDR3 for beta chain variable domain of TCR clone 390339 (TRBV11-2, TRBJ2-2)
CASSLDTGNTGELVF

SEQ ID NO: 780679 - protein, 12 aa, Homo sapiens
  CDR3 for alpha chain variable domain of TCR clone 390340 (TRAV29/DV5, TRAJ22)
CAASGSARQLTF

SEQ ID NO: 780680 - protein, 15 aa, Homo sapiens
  CDR3 for beta chain variable domain of TCR clone 390340 (TRBV9, TRBJ1-6)
CASSVAGTGDSPLHF

SEQ ID NO: 780681 - protein, 15 aa, Homo sapiens
  CDR3 for alpha chain variable domain of TCR clone 390341 (TRAV26-1, TRAJ29)
CIVRVEGSGNTPLVF

SEQ ID NO: 780682 - protein, 14 aa, Homo sapiens
  CDR3 for beta chain variable domain of TCR clone 390341 (TRBV18, TRBJ2-5)
CASSPGVSTETQYF

SEQ ID NO: 780683 - protein, 19 aa, Homo sapiens
  CDR3 for alpha chain variable domain of TCR clone 390342 (TRAV2, TRAJ20)
ILQVREADAAVYRDCKLSF

SEQ ID NO: 780684 - protein, 14 aa, Homo sapiens
  CDR3 for beta chain variable domain of TCR clone 390342 (TRBV7-9, TRBJ2-7)
CASSLDRPTDEQYF

SEQ ID NO: 780685 - protein, 14 aa, Homo sapiens
  CDR3 for alpha chain variable domain of TCR clone 390343 (TRAV12-3, TRAJ54)
CAMRGTQGAQKLVV

SEQ ID NO: 780686 - protein, 13 aa, Homo sapiens
  CDR3 for beta chain variable domain of TCR clone 390343 (TRBV19, TRBJ1-1)
CASSPSNGGEAFF

SEQ ID NO: 780687 - protein, 17 aa, Homo sapiens
  CDR3 for alpha chain variable domain of TCR clone 390344 (TRAV3, TRAJ38)
CAVRDCLNAGNNRKLIW

SEQ ID NO: 780688 - protein, 14 aa, Homo sapiens
  CDR3 for beta chain variable domain of TCR clone 390344 (TRBV5-5, TRBJ1-5)
CASSGQGVDQPQHY

SEQ ID NO: 780689 - protein, 11 aa, Homo sapiens
  CDR3 for alpha chain variable domain of TCR clone 390345 (TRAV2, TRAJ4)
CAVGWYNKLIF

SEQ ID NO: 780690 - protein, 14 aa, Homo sapiens
  CDR3 for beta chain variable domain of TCR clone 390345 (TRBV12-4, TRBJ2-5)
CASSLWQKQETQYF

SEQ ID NO: 780691 - protein, 10 aa, Homo sapiens
  CDR3 for alpha chain variable domain of TCR clone 390346 (TRAV1-2, TRAJ31)
CAFFDARLMF

SEQ ID NO: 780692 - protein, 14 aa, Homo sapiens
  CDR3 for beta chain variable domain of TCR clone 390346 (TRBV10-3, TRBJ2-7)
CHQCGISETYEQYF

SEQ ID NO: 780693 - protein, 16 aa, Homo sapiens
  CDR3 for alpha chain variable domain of TCR clone 390347 (TRAV30, TRAJ24)
CGTEIVDADSWGKFQF

SEQ ID NO: 780694 - protein, 14 aa, Homo sapiens
  CDR3 for beta chain variable domain of TCR clone 390347 (TRBV6-3, TRBJ1-2)
CASSEGGGSYGYTF

SEQ ID NO: 780695 - protein, 12 aa, Homo sapiens
  CDR3 for alpha chain variable domain of TCR clone 390348 (TRAV26-1, TRAJ48)
RIVSGGNEKLTF

SEQ ID NO: 780696 - protein, 13 aa, Homo sapiens
  CDR3 for beta chain variable domain of TCR clone 390348 (TRBV18, TRBJ2-7)
CASFRDSAYEQYF

SEQ ID NO: 780697 - protein, 12 aa, Homo sapiens
  CDR3 for alpha chain variable domain of TCR clone 390349 (TRAV12-3, TRAJ17)
CAMTLTGNKLTF

SEQ ID NO: 780698 - protein, 15 aa, Homo sapiens
  CDR3 for beta chain variable domain of TCR clone 390349 (TRBV7-2, TRBJ2-1)
CASSLVLAGGNEQFF

SEQ ID NO: 780699 - protein, 19 aa, Homo sapiens
  CDR3 for alpha chain variable domain of TCR clone 390350 (TRAV13-1, TRAJ52)
CAASPYQHAGGTSYGKLTF

SEQ ID NO: 780700 - protein, 14 aa, Homo sapiens
  CDR3 for beta chain variable domain of TCR clone 390350 (TRBV19, TRBJ2-7)
CASTVQGRPYEQYF

SEQ ID NO: 780701 - protein, 16 aa, Homo sapiens
  CDR3 for alpha chain variable domain of TCR clone 390351 (TRAV38-1, TRAJ37)
CAFKGDGSSNTGKLIF

SEQ ID NO: 780702 - protein, 13 aa, Homo sapiens
  CDR3 for beta chain variable domain of TCR clone 390351 (TRBV12-4, TRBJ1-2)
CASSSGLTVISTF

SEQ ID NO: 780703 - protein, 11 aa, Homo sapiens
  CDR3 for alpha chain variable domain of TCR clone 390352 (TRAV2, TRAJ23)
CAVETRGKLIF

SEQ ID NO: 780704 - protein, 14 aa, Homo sapiens
  CDR3 for beta chain variable domain of TCR clone 390352 (TRBV2, TRBJ2-3)
CASSEGQNPDTQYF

SEQ ID NO: 780705 - protein, 10 aa, Homo sapiens
  CDR3 for alpha chain variable domain of TCR clone 390353 (TRAV8-3, TRAJ43)
CAVALADMRF

SEQ ID NO: 780706 - protein, 14 aa, Homo sapiens
  CDR3 for beta chain variable domain of TCR clone 390353 (TRBV4-2, TRBJ2-1)
CASGLDWAYNEQFF

SEQ ID NO: 780707 - protein, 13 aa, Homo sapiens
  CDR3 for alpha chain variable domain of TCR clone 390354 (TRAV13-2, TRAJ13)
CAERPGGYQKVTF

SEQ ID NO: 780708 - protein, 12 aa, Homo sapiens
  CDR3 for beta chain variable domain of TCR clone 390354 (TRBV18, TRBJ2-1)
CASSSDEDEQFF

SEQ ID NO: 780709 - protein, 18 aa, Homo sapiens
  CDR3 for alpha chain variable domain of TCR clone 390355 (TRAV13-1, TRAJ45)
CAASIGVYSGGGADGLTF

SEQ ID NO: 780710 - protein, 14 aa, Homo sapiens
  CDR3 for beta chain variable domain of TCR clone 390355 (TRBV7-2, TRBJ2-7)
CASRSQGAAYEQYF

SEQ ID NO: 780711 - protein, 13 aa, Homo sapiens
  CDR3 for alpha chain variable domain of TCR clone 390356 (TRAV36/DV7, TRAJ37)
CAVFSSNTGKLIF

SEQ ID NO: 780712 - protein, 20 aa, Homo sapiens
  CDR3 for beta chain variable domain of TCR clone 390356 (TRBV4-1, TRBJ2-2)
CASSQASPPGLASNTGELFF

SEQ ID NO: 780713 - protein, 18 aa, Homo sapiens
  CDR3 for alpha chain variable domain of TCR clone 390357 (TRAV12-2, )
CAVEDIQNPDPAVYQLRD

SEQ ID NO: 780714 - protein, 16 aa, Homo sapiens
  CDR3 for beta chain variable domain of TCR clone 390357 (TRBV6-1, TRBJ1-2)
CASSGAWQGRAHGYTF

SEQ ID NO: 780715 - protein, 12 aa, Homo sapiens
  CDR3 for alpha chain variable domain of TCR clone 390358 (TRAV29/DV5, TRAJ49)
CAASAIGNQLYF

SEQ ID NO: 780716 - protein, 17 aa, Homo sapiens
  CDR3 for beta chain variable domain of TCR clone 390358 (TRBV5-1, TRBJ2-2)
CASSRTSGRFSTGELFF

SEQ ID NO: 780717 - protein, 12 aa, Homo sapiens
  CDR3 for alpha chain variable domain of TCR clone 390359 (TRAV21, TRAJ13)
LGPSGGYQKVTF

SEQ ID NO: 780718 - protein, 13 aa, Homo sapiens
  CDR3 for beta chain variable domain of TCR clone 390359 (TRBV12-4, TRBJ2-2)
CASSITGSGELFF

SEQ ID NO: 780719 - protein, 14 aa, Homo sapiens
  CDR3 for alpha chain variable domain of TCR clone 390360 (TRAV2, TRAJ9)
CAVEDRCGGFKTIF

SEQ ID NO: 780720 - protein, 15 aa, Homo sapiens
  CDR3 for beta chain variable domain of TCR clone 390360 (TRBV10-2, TRBJ2-6)
CASSEQGTGANVLTF

SEQ ID NO: 780721 - protein, 15 aa, Homo sapiens
  CDR3 for alpha chain variable domain of TCR clone 390361 (TRAV36/DV7, TRAJ54)
CAVEKPLQGAQKLVF

SEQ ID NO: 780722 - protein, 14 aa, Homo sapiens
  CDR3 for beta chain variable domain of TCR clone 390361 (TRBV4-3, TRBJ2-2)
CASSQGHVTGELFF

SEQ ID NO: 780723 - protein, 16 aa, Homo sapiens
  CDR3 for alpha chain variable domain of TCR clone 390362 (TRAV12-1, TRAJ42)
CVVTPSYGGSQGNLIF

SEQ ID NO: 780724 - protein, 18 aa, Homo sapiens
  CDR3 for beta chain variable domain of TCR clone 390362 (TRBV24-1, TRBJ2-3)
CATSDLPRLAGGADTQYF

SEQ ID NO: 780725 - protein, 17 aa, Homo sapiens
  CDR3 for alpha chain variable domain of TCR clone 390363 (TRAV3, TRAJ6)
CAVRDGPRAGGSYIPTF

SEQ ID NO: 780726 - protein, 17 aa, Homo sapiens
  CDR3 for beta chain variable domain of TCR clone 390363 (TRBV7-3, TRBJ2-5)
CASSVGSGRSGSETQYF

SEQ ID NO: 780727 - protein, 15 aa, Homo sapiens
  CDR3 for alpha chain variable domain of TCR clone 390364 (TRAV21, TRAJ53)
CATLNSGGSNYKLTF

SEQ ID NO: 780728 - protein, 15 aa, Homo sapiens
  CDR3 for beta chain variable domain of TCR clone 390364 (TRBV20-1, TRBJ2-7)
CSASDRVSGMDEQYF

SEQ ID NO: 780729 - protein, 14 aa, Homo sapiens
  CDR3 for alpha chain variable domain of TCR clone 390365 (TRAV26-1, TRAJ38)
CIADNAGNNRKLIW

SEQ ID NO: 780730 - protein, 16 aa, Homo sapiens
  CDR3 for beta chain variable domain of TCR clone 390365 (TRBV5-5, TRBJ2-2)
CASSGRREGATGELFF

SEQ ID NO: 780731 - protein, 15 aa, Homo sapiens
  CDR3 for alpha chain variable domain of TCR clone 390366 (TRAV17, TRAJ57)
CATGPSQGGSEKLVF

SEQ ID NO: 780732 - protein, 18 aa, Homo sapiens
  CDR3 for beta chain variable domain of TCR clone 390366 (TRBV7-9, TRBJ2-7)
CASSLTTSGSRTWYEHYF

SEQ ID NO: 780733 - protein, 18 aa, Homo sapiens
  CDR3 for alpha chain variable domain of TCR clone 390367 (TRAV12-3, TRAJ52)
CAMSVGGGGGTSYGKLTF

SEQ ID NO: 780734 - protein, 15 aa, Homo sapiens
  CDR3 for beta chain variable domain of TCR clone 390367 (TRBV27, TRBJ1-6)
CASSFDRGLGSPLHF

SEQ ID NO: 780735 - protein, 12 aa, Homo sapiens
  CDR3 for alpha chain variable domain of TCR clone 390368 (TRAV13-1, TRAJ21)
CAAKEGFNKFYF

SEQ ID NO: 780736 - protein, 14 aa, Homo sapiens
  CDR3 for beta chain variable domain of TCR clone 390368 (TRBV5-4, TRBJ1-1)
CASSLDSRMDEAFF

SEQ ID NO: 780737 - protein, 13 aa, Homo sapiens
  CDR3 for alpha chain variable domain of TCR clone 390369 (TRAV13-1, TRAJ39)
CSKYSNAGNMLTF

SEQ ID NO: 780738 - protein, 16 aa, Homo sapiens
  CDR3 for beta chain variable domain of TCR clone 390369 (TRBV7-2, TRBJ2-3)
CPSSLVALYSTDTQYF

SEQ ID NO: 780739 - protein, 15 aa, Homo sapiens
  CDR3 for alpha chain variable domain of TCR clone 390370 (TRAV21, TRAJ24)
CAARSSTDSWGKLQF

SEQ ID NO: 780740 - protein, 11 aa, Homo sapiens
  CDR3 for beta chain variable domain of TCR clone 390370 (TRBV11-2, TRBJ2-2)
CACSLPGELFF

SEQ ID NO: 780741 - protein, 14 aa, Homo sapiens
  CDR3 for alpha chain variable domain of TCR clone 390371 (TRAV29/DV5, TRAJ20)
CAATIRSNDYKLSF

SEQ ID NO: 780742 - protein, 11 aa, Homo sapiens
  CDR3 for beta chain variable domain of TCR clone 390371 (TRBV6-3, TRBJ2-3)
CATGQADTQYF

SEQ ID NO: 780743 - protein, 15 aa, Homo sapiens
  CDR3 for alpha chain variable domain of TCR clone 390372 (TRAV17, TRAJ57)
CATGPSPGGSEKLVF

SEQ ID NO: 780744 - protein, 16 aa, Homo sapiens
  CDR3 for beta chain variable domain of TCR clone 390372 (TRBV12-4, TRBJ1-5)
CASSRPVGGSNQPRHF

SEQ ID NO: 780745 - protein, 15 aa, Homo sapiens
  CDR3 for alpha chain variable domain of TCR clone 390373 (TRAV23/DV6, TRAJ4)
CAASPLRGGYNKLIF

SEQ ID NO: 780746 - protein, 15 aa, Homo sapiens
  CDR3 for beta chain variable domain of TCR clone 390373 (TRBV7-9, TRBJ1-6)
CASSYPGRGNSPLHF

SEQ ID NO: 780747 - protein, 14 aa, Homo sapiens
  CDR3 for alpha chain variable domain of TCR clone 390374 (TRAV3, TRAJ33)
CAVRDMGSDYQLIW

SEQ ID NO: 780748 - protein, 17 aa, Homo sapiens
  CDR3 for beta chain variable domain of TCR clone 390374 (TRBV19, TRBJ2-1)
CASSIWSAQPTHNERFF

SEQ ID NO: 780749 - protein, 15 aa, Homo sapiens
  CDR3 for alpha chain variable domain of TCR clone 390375 (TRAV26-1, TRAJ29)
CIVRVEGSGNTPLIL

SEQ ID NO: 780750 - protein, 14 aa, Homo sapiens
  CDR3 for beta chain variable domain of TCR clone 390375 (TRBV18, TRBJ2-5)
CASSPGVSQETQYF

SEQ ID NO: 780751 - protein, 14 aa, Homo sapiens
  CDR3 for alpha chain variable domain of TCR clone 390376 (TRAV30, TRAJ26)
CGTEIVSYGQNFVF

SEQ ID NO: 780752 - protein, 12 aa, Homo sapiens
  CDR3 for beta chain variable domain of TCR clone 390376 (TRBV19, TRBJ2-1)
CASSMQDTEQFF

SEQ ID NO: 780753 - protein, 11 aa, Homo sapiens
  CDR3 for alpha chain variable domain of TCR clone 390377 (TRAV29/DV5, TRAJ47)
CAATYGNKLVF

SEQ ID NO: 780754 - protein, 17 aa, Homo sapiens
  CDR3 for beta chain variable domain of TCR clone 390377 (TRBV7-9, TRBJ2-1)
CDSSLVASYPSYNEQFF

SEQ ID NO: 780755 - protein, 17 aa, Homo sapiens
  CDR3 for alpha chain variable domain of TCR clone 390378 (TRAV3, TRAJ6)
CAVRDGPRAGGRYIPTF

SEQ ID NO: 780756 - protein, 14 aa, Homo sapiens
  CDR3 for beta chain variable domain of TCR clone 390378 (TRBV19, TRBJ2-1)
CASPTFVLSGEQFF

SEQ ID NO: 780757 - protein, 13 aa, Homo sapiens
  CDR3 for alpha chain variable domain of TCR clone 390379 (TRAV26-2, TRAJ54)
CIPRVGGAQKPVF

SEQ ID NO: 780758 - protein, 16 aa, Homo sapiens
  CDR3 for beta chain variable domain of TCR clone 390379 (TRBV4-1, TRBJ1-1)
CASSSMSERPNTEAFF

SEQ ID NO: 780759 - protein, 16 aa, Homo sapiens
  CDR3 for alpha chain variable domain of TCR clone 390380 (TRAV3, TRAJ10)
CAVRDMRAGGGNKLTF

SEQ ID NO: 780760 - protein, 17 aa, Homo sapiens
  CDR3 for beta chain variable domain of TCR clone 390380 (TRBV20-1, TRBJ2-2)
CSASGSGQGGVTGELFF

SEQ ID NO: 780761 - protein, 11 aa, Homo sapiens
  CDR3 for alpha chain variable domain of TCR clone 390381 (TRAV13-2, TRAJ36)
CAETGANNLYF

SEQ ID NO: 780762 - protein, 13 aa, Homo sapiens
  CDR3 for beta chain variable domain of TCR clone 390381 (TRBV7-9, TRBJ2-4)
CATEGLAGNIQYF

SEQ ID NO: 780763 - protein, 16 aa, Homo sapiens
  CDR3 for alpha chain variable domain of TCR clone 390382 (TRAV3, TRAJ37)
CAVRPHGSGNTGKLIF

SEQ ID NO: 780764 - protein, 12 aa, Homo sapiens
  CDR3 for beta chain variable domain of TCR clone 390382 (TRBV7-9, TRBJ1-4)
CASSTDREKLFF

SEQ ID NO: 780765 - protein, 12 aa, Homo sapiens
  CDR3 for alpha chain variable domain of TCR clone 390383 (TRAV12-3, TRAJ17)
CAMTLTGNNLTF

SEQ ID NO: 780766 - protein, 15 aa, Homo sapiens
  CDR3 for beta chain variable domain of TCR clone 390383 (TRBV20-1, TRBJ2-7)
CSARDRVSGRDEQYF

SEQ ID NO: 780767 - protein, 16 aa, Homo sapiens
  CDR3 for alpha chain variable domain of TCR clone 390384 (TRAV12-2, )
CAVEDIQNPDPAVYQL

SEQ ID NO: 780768 - protein, 11 aa, Homo sapiens
  CDR3 for beta chain variable domain of TCR clone 390384 (TRBV25-1, TRBJ2-1)
CATTRISEQFF

SEQ ID NO: 780769 - protein, 14 aa, Homo sapiens
  CDR3 for alpha chain variable domain of TCR clone 390385 (TRAV14/DV4, TRAJ32)
SHVLPLTPTNKLIF

SEQ ID NO: 780770 - protein, 17 aa, Homo sapiens
  CDR3 for beta chain variable domain of TCR clone 390385 (TRBV20-1, TRBJ2-1)
CSASSSGLAGSYNEQFF

SEQ ID NO: 780771 - protein, 14 aa, Homo sapiens
  CDR3 for alpha chain variable domain of TCR clone 390386 (TRAV8-3, TRAJ39)
CALGANNAGNMLTF

SEQ ID NO: 780772 - protein, 15 aa, Homo sapiens
  CDR3 for beta chain variable domain of TCR clone 390386 (TRBV4-3, TRBJ1-1)
CASSQELGRGTEAFF

SEQ ID NO: 780773 - protein, 19 aa, Homo sapiens
  CDR3 for alpha chain variable domain of TCR clone 390387 (TRAV3, TRAJ6)
CAVRDRNPSRSGGSYIPTF

SEQ ID NO: 780774 - protein, 15 aa, Homo sapiens
  CDR3 for beta chain variable domain of TCR clone 390387 (TRBV18, TRBJ2-7)
CDSSPTFMDSYEQYF

SEQ ID NO: 780775 - protein, 14 aa, Homo sapiens
  CDR3 for alpha chain variable domain of TCR clone 390388 (TRAV38-1, TRAJ35)
FAFLTIGFGNVLHC

SEQ ID NO: 780776 - protein, 17 aa, Homo sapiens
  CDR3 for beta chain variable domain of TCR clone 390388 (TRBV28, TRBJ1-1)
CASSGDLRTESNTEAFF

SEQ ID NO: 780777 - protein, 23 aa, Homo sapiens
  CDR3 for alpha chain variable domain of TCR clone 390389 (TRAV1-1, TRAJ20)
CAVRDRTPSSALEPEPQELKEQI

SEQ ID NO: 780778 - protein, 14 aa, Homo sapiens
  CDR3 for beta chain variable domain of TCR clone 390389 (TRBV7-2, TRBJ2-7)
CASRSQGAAYEQYF

SEQ ID NO: 780779 - protein, 15 aa, Homo sapiens
  CDR3 for alpha chain variable domain of TCR clone 390390 (TRAV16, TRAJ16)
CALQGGGSDGQKLLF

SEQ ID NO: 780780 - protein, 11 aa, Homo sapiens
  CDR3 for beta chain variable domain of TCR clone 390390 (TRBV27, TRBJ2-3)
CASSLGDTQYF

SEQ ID NO: 780781 - protein, 14 aa, Homo sapiens
  CDR3 for alpha chain variable domain of TCR clone 390391 (TRAV12-1, TRAJ12)
CVMGPSVSSYKLIF

SEQ ID NO: 780782 - protein, 13 aa, Homo sapiens
  CDR3 for beta chain variable domain of TCR clone 390391 (TRBV4-2, TRBJ1-1)
CASSQAGNTEAFF

SEQ ID NO: 780783 - protein, 12 aa, Homo sapiens
  CDR3 for alpha chain variable domain of TCR clone 390392 (TRAV20, TRAJ56)
CAVTGANSKLTF

SEQ ID NO: 780784 - protein, 15 aa, Homo sapiens
  CDR3 for beta chain variable domain of TCR clone 390392 (TRBV19, TRBJ2-7)
CASSIGGGLVNEQYF

SEQ ID NO: 780785 - protein, 17 aa, Homo sapiens
  CDR3 for alpha chain variable domain of TCR clone 390393 (TRAV26-1, TRAJ46)
IASSESEKKSSGDKLTF

SEQ ID NO: 780786 - protein, 16 aa, Homo sapiens
  CDR3 for beta chain variable domain of TCR clone 390393 (TRBV27, TRBJ2-2)
CASSFRGLGRTGELFF

SEQ ID NO: 780787 - protein, 13 aa, Homo sapiens
  CDR3 for alpha chain variable domain of TCR clone 390394 (TRAV27, TRAJ42)
CAGARGSQGNIIF

SEQ ID NO: 780788 - protein, 15 aa, Homo sapiens
  CDR3 for beta chain variable domain of TCR clone 390394 (TRBV10-3, TRBJ2-2)
CAIRTDREDTGELFF

SEQ ID NO: 780789 - protein, 14 aa, Homo sapiens
  CDR3 for alpha chain variable domain of TCR clone 390395 (TRAV26-1, TRAJ38)
CIADNAGNNRKLIW

SEQ ID NO: 780790 - protein, 17 aa, Homo sapiens
  CDR3 for beta chain variable domain of TCR clone 390395 (TRBV11-2, TRBJ2-3)
CASSPTGTGGLTDTQYF

SEQ ID NO: 780791 - protein, 17 aa, Homo sapiens
  CDR3 for alpha chain variable domain of TCR clone 390396 (TRAV1-2, TRAJ8)
CAVRDPDENTRFQKLVF

SEQ ID NO: 780792 - protein, 16 aa, Homo sapiens
  CDR3 for beta chain variable domain of TCR clone 390396 (TRBV7-9, TRBJ2-2)
CASSGFGGANTGELFF

SEQ ID NO: 780793 - protein, 16 aa, Homo sapiens
  CDR3 for alpha chain variable domain of TCR clone 390397 (TRAV3, TRAJ10)
CAVRDMRAGGGNKLTF

SEQ ID NO: 780794 - protein, 12 aa, Homo sapiens
  CDR3 for beta chain variable domain of TCR clone 390397 (TRBV7-6, TRBJ2-7)
CASSVADSEQYF

SEQ ID NO: 780795 - protein, 13 aa, Homo sapiens
  CDR3 for alpha chain variable domain of TCR clone 390398 (TRAV8-2, TRAJ34)
CVLSDRRTDKLIF

SEQ ID NO: 780796 - protein, 15 aa, Homo sapiens
  CDR3 for beta chain variable domain of TCR clone 390398 (TRBV20-1, TRBJ2-3)
CSARVVGGSTDTQYF

SEQ ID NO: 780797 - protein, 17 aa, Homo sapiens
  CDR3 for alpha chain variable domain of TCR clone 390399 (TRAV23/DV6, TRAJ57)
CAASSTLSQGGSEKLVF

SEQ ID NO: 780798 - protein, 11 aa, Homo sapiens
  CDR3 for beta chain variable domain of TCR clone 390399 (TRBV6-3, TRBJ2-3)
CATGQADTQYF

SEQ ID NO: 780799 - protein, 16 aa, Homo sapiens
  CDR3 for alpha chain variable domain of TCR clone 390400 (TRAV30, TRAJ24)
CGTEIVDAHSWGKFQF

SEQ ID NO: 780800 - protein, 13 aa, Homo sapiens
  CDR3 for beta chain variable domain of TCR clone 390400 (TRBV20-1, TRBJ1-1)
CSARGGGNTEAFF

SEQ ID NO: 780801 - protein, 15 aa, Homo sapiens
  CDR3 for alpha chain variable domain of TCR clone 390401 (TRAV35, TRAJ52)
CAGPRGGTSYGKLTF

SEQ ID NO: 780802 - protein, 17 aa, Homo sapiens
  CDR3 for beta chain variable domain of TCR clone 390401 (TRBV25-1, TRBJ2-7)
CASSDARVVFSSYEQYF

SEQ ID NO: 780803 - protein, 14 aa, Homo sapiens
  CDR3 for alpha chain variable domain of TCR clone 390402 (TRAV29/DV5, TRAJ36)
CAARRKTGANNLFF

SEQ ID NO: 780804 - protein, 14 aa, Homo sapiens
  CDR3 for beta chain variable domain of TCR clone 390402 (TRBV7-9, TRBJ1-1)
CASTPLQSYTEAFF

SEQ ID NO: 780805 - protein, 15 aa, Homo sapiens
  CDR3 for alpha chain variable domain of TCR clone 390403 (TRAV12-1, TRAJ9)
CVVSFGDTGGFKTIL

SEQ ID NO: 780806 - protein, 16 aa, Homo sapiens
  CDR3 for beta chain variable domain of TCR clone 390403 (TRBV27, TRBJ2-5)
CASSFGPGGTKETQYF

SEQ ID NO: 780807 - protein, 14 aa, Homo sapiens
  CDR3 for alpha chain variable domain of TCR clone 390404 (TRAV16, TRAJ33)
CALSAMDSNYQLIW

SEQ ID NO: 780808 - protein, 16 aa, Homo sapiens
  CDR3 for beta chain variable domain of TCR clone 390404 (TRBV12-4, TRBJ2-3)
CASSFPPNTNTDTQYF

SEQ ID NO: 780809 - protein, 15 aa, Homo sapiens
  CDR3 for alpha chain variable domain of TCR clone 390405 (TRAV8-6, TRAJ10)
CAVSDQAGGGNKLPF

SEQ ID NO: 780810 - protein, 14 aa, Homo sapiens
  CDR3 for beta chain variable domain of TCR clone 390405 (TRBV4-1, TRBJ2-2)
CASSQAVNTGELFF

SEQ ID NO: 780811 - protein, 15 aa, Homo sapiens
  CDR3 for alpha chain variable domain of TCR clone 390406 (TRAV17, TRAJ37)
CATDGGSSNTGKLIF

SEQ ID NO: 780812 - protein, 15 aa, Homo sapiens
  CDR3 for beta chain variable domain of TCR clone 390406 (TRBV28, TRBJ2-5)
CASSSGRTVQETQYF

SEQ ID NO: 780813 - protein, 13 aa, Homo sapiens
  CDR3 for alpha chain variable domain of TCR clone 390407 (TRAV2, TRAJ40)
CAVVTSGTYKYIF

SEQ ID NO: 780814 - protein, 13 aa, Homo sapiens
  CDR3 for beta chain variable domain of TCR clone 390407 (TRBV10-2, TRBJ2-7)
CASSAESPYEQYF

SEQ ID NO: 780815 - protein, 13 aa, Homo sapiens
  CDR3 for alpha chain variable domain of TCR clone 390408 (TRAV27, TRAJ41)
CAGEGNSGYALNF

SEQ ID NO: 780816 - protein, 13 aa, Homo sapiens
  CDR3 for beta chain variable domain of TCR clone 390408 (TRBV11-2, TRBJ2-5)
CASSRGPSETQYF

SEQ ID NO: 780817 - protein, 13 aa, Homo sapiens
  CDR3 for alpha chain variable domain of TCR clone 390409 (TRAV12-2, TRAJ7)
CAVNLYGNNRLAF

SEQ ID NO: 780818 - protein, 14 aa, Homo sapiens
  CDR3 for beta chain variable domain of TCR clone 390409 (TRBV25-1, TRBJ1-2)
CASSEAIGPYGYTF

SEQ ID NO: 780819 - protein, 12 aa, Homo sapiens
  CDR3 for alpha chain variable domain of TCR clone 390410 (TRAV12-1, TRAJ40)
CVVNGETYKYTF

SEQ ID NO: 780820 - protein, 14 aa, Homo sapiens
  CDR3 for beta chain variable domain of TCR clone 390410 (TRBV12-5, TRBJ2-5)
CASGSRTHQETQYF

SEQ ID NO: 780821 - protein, 13 aa, Homo sapiens
  CDR3 for alpha chain variable domain of TCR clone 390411 (TRAV21, TRAJ27)
CAALTTNAGKSTF

SEQ ID NO: 780822 - protein, 14 aa, Homo sapiens
  CDR3 for beta chain variable domain of TCR clone 390411 (TRBV27, TRBJ1-1)
CASSLLSGLSEAFF

SEQ ID NO: 780823 - protein, 14 aa, Homo sapiens
  CDR3 for alpha chain variable domain of TCR clone 390412 (TRAV12-2, TRAJ15)
CAPRTGQAGTALIF

SEQ ID NO: 780824 - protein, 14 aa, Homo sapiens
  CDR3 for beta chain variable domain of TCR clone 390412 (TRBV7-2, TRBJ2-7)
CASSPKTSFYGQYF

SEQ ID NO: 780825 - protein, 15 aa, Homo sapiens
  CDR3 for alpha chain variable domain of TCR clone 390413 (TRAV12-2, TRAJ53)
CAVNGGGGSNYKLTF

SEQ ID NO: 780826 - protein, 17 aa, Homo sapiens
  CDR3 for beta chain variable domain of TCR clone 390413 (TRBV7-3, TRBJ2-3)
RASILMKRMRGADTQYF

SEQ ID NO: 780827 - protein, 13 aa, Homo sapiens
  CDR3 for alpha chain variable domain of TCR clone 390414 (TRAV17, TRAJ26)
CATVDNYGQNFVF

SEQ ID NO: 780828 - protein, 14 aa, Homo sapiens
  CDR3 for beta chain variable domain of TCR clone 390414 (TRBV7-7, TRBJ2-7)
CASSLGRGVGEQYF

SEQ ID NO: 780829 - protein, 16 aa, Homo sapiens
  CDR3 for alpha chain variable domain of TCR clone 390415 (TRAV3, TRAJ10)
CAVRDMRAGGGNKLTF

SEQ ID NO: 780830 - protein, 13 aa, Homo sapiens
  CDR3 for beta chain variable domain of TCR clone 390415 (TRBV6-1, TRBJ1-1)
CASSRQGNTEASF

SEQ ID NO: 780831 - protein, 10 aa, Homo sapiens
  CDR3 for alpha chain variable domain of TCR clone 390416 (TRAV23/DV6, TRAJ9)
CASNYWRLQN

SEQ ID NO: 780832 - protein, 14 aa, Homo sapiens
  CDR3 for beta chain variable domain of TCR clone 390416 (TRBV6-1, TRBJ2-7)
CASTRAGDYYEQYF

SEQ ID NO: 780833 - protein, 12 aa, Homo sapiens
  CDR3 for alpha chain variable domain of TCR clone 390417 (TRAV12-3, TRAJ20)
CAMVRGDYKLSF

SEQ ID NO: 780834 - protein, 18 aa, Homo sapiens
  CDR3 for beta chain variable domain of TCR clone 390417 (TRBV7-8, TRBJ2-1)
CASSPYLGQRGSNNEQFF

SEQ ID NO: 780835 - protein, 10 aa, Homo sapiens
  CDR3 for alpha chain variable domain of TCR clone 390418 (TRAV1-2, TRAJ20)
CVPNDYKLSF

SEQ ID NO: 780836 - protein, 13 aa, Homo sapiens
  CDR3 for beta chain variable domain of TCR clone 390418 (TRBV7-6, TRBJ2-1)
CQQLGGGADEQFF

SEQ ID NO: 780837 - protein, 14 aa, Homo sapiens
  CDR3 for alpha chain variable domain of TCR clone 390419 (TRAV12-2, TRAJ17)
CAVLFKAAGNKLTF

SEQ ID NO: 780838 - protein, 13 aa, Homo sapiens
  CDR3 for beta chain variable domain of TCR clone 390419 (TRBV12-4, TRBJ2-7)
CASSLSGVYEQYF

SEQ ID NO: 780839 - protein, 15 aa, Homo sapiens
  CDR3 for alpha chain variable domain of TCR clone 390420 (TRAV29/DV5, TRAJ44)
CAASAGTGTASKLTF

SEQ ID NO: 780840 - protein, 13 aa, Homo sapiens
  CDR3 for beta chain variable domain of TCR clone 390420 (TRBV7-9, TRBJ1-2)
CASSLKQNYGYTF

SEQ ID NO: 780841 - protein, 15 aa, Homo sapiens
  CDR3 for alpha chain variable domain of TCR clone 390421 (TRAV8-4, TRAJ47)
CAVSDPEEYGNKLVF

SEQ ID NO: 780842 - protein, 15 aa, Homo sapiens
  CDR3 for beta chain variable domain of TCR clone 390421 (TRBV11-2, TRBJ2-1)
CASSLGPDSYNKQFF

SEQ ID NO: 780843 - protein, 20 aa, Homo sapiens
  CDR3 for alpha chain variable domain of TCR clone 390422 (TRAV21, TRAJ30)
CAVRRRMTRSSLEKGHDFIF

SEQ ID NO: 780844 - protein, 20 aa, Homo sapiens
  CDR3 for beta chain variable domain of TCR clone 390422 (TRBV28, TRBJ2-1)
CASTPIGRSPGLAGGNEQLF

SEQ ID NO: 780845 - protein, 11 aa, Homo sapiens
  CDR3 for alpha chain variable domain of TCR clone 390423 (TRAV5, TRAJ3)
CAPGSASRIIF

SEQ ID NO: 780846 - protein, 12 aa, Homo sapiens
  CDR3 for beta chain variable domain of TCR clone 390423 (TRBV18, TRBJ2-1)
CASSSDEDEQFF

SEQ ID NO: 780847 - protein, 12 aa, Homo sapiens
  CDR3 for alpha chain variable domain of TCR clone 390424 (TRAV13-1, TRAJ9)
CASHTGGFKTIF

SEQ ID NO: 780848 - protein, 18 aa, Homo sapiens
  CDR3 for beta chain variable domain of TCR clone 390424 (TRBV11-2, TRBJ2-3)
CASSLGGDSRGAPNTQYF

SEQ ID NO: 780849 - protein, 18 aa, Homo sapiens
  CDR3 for alpha chain variable domain of TCR clone 390425 (TRAV26-1, TRAJ22)
CIVRVSFWFCNATDLLIW

SEQ ID NO: 780850 - protein, 13 aa, Homo sapiens
  CDR3 for beta chain variable domain of TCR clone 390425 (TRBV7-9, TRBJ1-2)
CASSLKQNYGYTF

SEQ ID NO: 780851 - protein, 14 aa, Homo sapiens
  CDR3 for alpha chain variable domain of TCR clone 390426 (TRAV30, TRAJ33)
CGTVATRSNYQLIW

SEQ ID NO: 780852 - protein, 16 aa, Homo sapiens
  CDR3 for beta chain variable domain of TCR clone 390426 (TRBV3-1, TRBJ2-5)
CASSPGQFNGFGTQYF

SEQ ID NO: 780853 - protein, 17 aa, Homo sapiens
  CDR3 for alpha chain variable domain of TCR clone 390427 (TRAV13-1, TRAJ52)
CAASSGAGGTSYGKLTF

SEQ ID NO: 780854 - protein, 17 aa, Homo sapiens
  CDR3 for beta chain variable domain of TCR clone 390427 (TRBV11-2, TRBJ2-1)
CASSLYPPGVEYNEQFL

SEQ ID NO: 780855 - protein, 16 aa, Homo sapiens
  CDR3 for alpha chain variable domain of TCR clone 390428 (TRAV26-1, TRAJ53)
CIVRVAMGGSNYKLTF

SEQ ID NO: 780856 - protein, 12 aa, Homo sapiens
  CDR3 for beta chain variable domain of TCR clone 390428 (TRBV7-9, TRBJ1-5)
CASSPQGQSQHF

SEQ ID NO: 780857 - protein, 13 aa, Homo sapiens
  CDR3 for alpha chain variable domain of TCR clone 390429 (TRAV1-2, TRAJ9)
CAALNTGGFKTIF

SEQ ID NO: 780858 - protein, 14 aa, Homo sapiens
  CDR3 for beta chain variable domain of TCR clone 390429 (TRBV13, TRBJ2-5)
CASSLERVGENQYF

SEQ ID NO: 780859 - protein, 17 aa, Homo sapiens
  CDR3 for alpha chain variable domain of TCR clone 390430 (TRAV3, TRAJ6)
CAVRDGPRAGGSYIPTF

SEQ ID NO: 780860 - protein, 13 aa, Homo sapiens
  CDR3 for beta chain variable domain of TCR clone 390430 (TRBV7-2, TRBJ1-1)
CASSQAGNTEAFF

SEQ ID NO: 780861 - protein, 15 aa, Homo sapiens
  CDR3 for alpha chain variable domain of TCR clone 390431 (TRAV3, TRAJ5)
FAVRDLATGRRALTF

SEQ ID NO: 780862 - protein, 13 aa, Homo sapiens
  CDR3 for beta chain variable domain of TCR clone 390431 (TRBV12-4, TRBJ2-7)
CASSPTETYEQYF

SEQ ID NO: 780863 - protein, 14 aa, Homo sapiens
  CDR3 for alpha chain variable domain of TCR clone 390432 (TRAV12-3, TRAJ9)
CAMSPNTGGFKTIF

SEQ ID NO: 780864 - protein, 12 aa, Homo sapiens
  CDR3 for beta chain variable domain of TCR clone 390432 (TRBV19, TRBJ1-5)
CASSIAQQPQHF

SEQ ID NO: 780865 - protein, 17 aa, Homo sapiens
  CDR3 for alpha chain variable domain of TCR clone 390433 (TRAV3, TRAJ6)
CPVRDGPRAGGSYIPTF

SEQ ID NO: 780866 - protein, 14 aa, Homo sapiens
  CDR3 for beta chain variable domain of TCR clone 390433 (TRBV7-2, TRBJ2-7)
CASNPKTSFYEQYF

SEQ ID NO: 780867 - protein, 14 aa, Homo sapiens
  CDR3 for alpha chain variable domain of TCR clone 390434 (TRAV12-2, TRAJ33)
CAVKRARSNYQIIW

SEQ ID NO: 780868 - protein, 12 aa, Homo sapiens
  CDR3 for beta chain variable domain of TCR clone 390434 (TRBV24-1, TRBJ2-3)
CATSDSTDTQYF

SEQ ID NO: 780869 - protein, 16 aa, Homo sapiens
  CDR3 for alpha chain variable domain of TCR clone 390435 (TRAV30, TRAJ24)
CGTEIEDADSWGKFQF

SEQ ID NO: 780870 - protein, 15 aa, Homo sapiens
  CDR3 for beta chain variable domain of TCR clone 390435 (TRBV5-1, TRBJ1-1)
CASSSTTGTNTEAFF

SEQ ID NO: 780871 - protein, 17 aa, Homo sapiens
  CDR3 for alpha chain variable domain of TCR clone 390436 (TRAV3, TRAJ42)
CAVRDRDYGGSQGNLIF

SEQ ID NO: 780872 - protein, 14 aa, Homo sapiens
  CDR3 for beta chain variable domain of TCR clone 390436 (TRBV7-2, TRBJ2-2)
CASRGQGAAGELFF

SEQ ID NO: 780873 - protein, 16 aa, Homo sapiens
  CDR3 for alpha chain variable domain of TCR clone 390437 (TRAV30, TRAJ24)
CGTEIVDADSWGKFQF

SEQ ID NO: 780874 - protein, 15 aa, Homo sapiens
  CDR3 for beta chain variable domain of TCR clone 390437 (TRBV9, TRBJ2-1)
CASSLAGSAYNEQFF

SEQ ID NO: 780875 - protein, 15 aa, Homo sapiens
  CDR3 for alpha chain variable domain of TCR clone 390438 (TRAV2, TRAJ37)
CAVGDGSSNTGKLIF

SEQ ID NO: 780876 - protein, 13 aa, Homo sapiens
  CDR3 for beta chain variable domain of TCR clone 390438 (TRBV20-1, TRBJ2-7)
CSAQTGLSCEQYF

SEQ ID NO: 780877 - protein, 14 aa, Homo sapiens
  CDR3 for alpha chain variable domain of TCR clone 390439 (TRAV34, TRAJ44)
CGADGTGTASKLTF

SEQ ID NO: 780878 - protein, 15 aa, Homo sapiens
  CDR3 for beta chain variable domain of TCR clone 390439 (TRBV5-1, TRBJ2-1)
CATTPPRAPYNEQFF

SEQ ID NO: 780879 - protein, 13 aa, Homo sapiens
  CDR3 for alpha chain variable domain of TCR clone 390440 (TRAV17, TRAJ34)
CATDSLGHRQAHL

SEQ ID NO: 780880 - protein, 13 aa, Homo sapiens
  CDR3 for beta chain variable domain of TCR clone 390440 (TRBV11-2, TRBJ2-7)
CASSGTRPYEQYF

SEQ ID NO: 780881 - protein, 14 aa, Homo sapiens
  CDR3 for alpha chain variable domain of TCR clone 390441 (TRAV30, TRAJ49)
CGTEIVAPVTSSIL

SEQ ID NO: 780882 - protein, 16 aa, Homo sapiens
  CDR3 for beta chain variable domain of TCR clone 390441 (TRBV12-4, TRBJ1-2)
CASSPTATGKTRGYTF

SEQ ID NO: 780883 - protein, 16 aa, Homo sapiens
  CDR3 for alpha chain variable domain of TCR clone 390442 (TRAV1-2, TRAJ10)
CAVRGVLTGGGNKLTI

SEQ ID NO: 780884 - protein, 12 aa, Homo sapiens
  CDR3 for beta chain variable domain of TCR clone 390442 (TRBV7-8, TRBJ2-7)
CASSLGDRDQYF

SEQ ID NO: 780885 - protein, 12 aa, Homo sapiens
  CDR3 for alpha chain variable domain of TCR clone 390443 (TRAV12-3, TRAJ21)
CAMFNNFNKFYF

SEQ ID NO: 780886 - protein, 12 aa, Homo sapiens
  CDR3 for beta chain variable domain of TCR clone 390443 (TRBV11-2, TRBJ2-2)
CASSLGGGEFFF

SEQ ID NO: 780887 - protein, 18 aa, Homo sapiens
  CDR3 for alpha chain variable domain of TCR clone 390444 (TRAV26-1, TRAJ37)
CIVRVDMHGSSNTGKLIF

SEQ ID NO: 780888 - protein, 13 aa, Homo sapiens
  CDR3 for beta chain variable domain of TCR clone 390444 (TRBV7-2, TRBJ1-6)
CASSLKFDSPLHF

SEQ ID NO: 780889 - protein, 14 aa, Homo sapiens
  CDR3 for alpha chain variable domain of TCR clone 390445 (TRAV1-2, TRAJ24)
CAVFTTDSWGKFQF

SEQ ID NO: 780890 - protein, 21 aa, Homo sapiens
  CDR3 for beta chain variable domain of TCR clone 390445 (TRBV6-5, TRBJ1-3)
CASSYWEKIAQGMSSGNTIYF

SEQ ID NO: 780891 - protein, 13 aa, Homo sapiens
  CDR3 for alpha chain variable domain of TCR clone 390446 (TRAV21, TRAJ34)
CAHYNTTSSSLGL

SEQ ID NO: 780892 - protein, 13 aa, Homo sapiens
  CDR3 for beta chain variable domain of TCR clone 390446 (TRBV7-6, TRBJ1-2)
CASSLVADYGYTF

SEQ ID NO: 780893 - protein, 13 aa, Homo sapiens
  CDR3 for alpha chain variable domain of TCR clone 390447 (TRAV12-3, TRAJ20)
CAISATNDYKLSF

SEQ ID NO: 780894 - protein, 16 aa, Homo sapiens
  CDR3 for beta chain variable domain of TCR clone 390447 (TRBV18, TRBJ2-7)
CASSPYRDGQTYEQYF

SEQ ID NO: 780895 - protein, 12 aa, Homo sapiens
  CDR3 for alpha chain variable domain of TCR clone 390448 (TRAV1-1, TRAJ9)
CAVDTGGFKTIV

SEQ ID NO: 780896 - protein, 14 aa, Homo sapiens
  CDR3 for beta chain variable domain of TCR clone 390448 (TRBV7-8, TRBJ2-5)
CASSATGGQETQYF

SEQ ID NO: 780897 - protein, 13 aa, Homo sapiens
  CDR3 for alpha chain variable domain of TCR clone 390449 (TRAV3, TRAJ30)
CAVRDRGDDKIIF

SEQ ID NO: 780898 - protein, 16 aa, Homo sapiens
  CDR3 for beta chain variable domain of TCR clone 390449 (TRBV7-3, TRBJ2-2)
CASSLKRVTLSGELFF

SEQ ID NO: 780899 - protein, 19 aa, Homo sapiens
  CDR3 for alpha chain variable domain of TCR clone 390450 (TRAV26-1, TRAJ44)
CCVLLHRQSQYRTASKLTF

SEQ ID NO: 780900 - protein, 16 aa, Homo sapiens
  CDR3 for beta chain variable domain of TCR clone 390450 (TRBV7-7, TRBJ2-1)
CASSLASGTSYNEQFF

SEQ ID NO: 780901 - protein, 11 aa, Homo sapiens
  CDR3 for alpha chain variable domain of TCR clone 390451 (TRAV3, TRAJ21)
CALGNFNNFYF

SEQ ID NO: 780902 - protein, 16 aa, Homo sapiens
  CDR3 for beta chain variable domain of TCR clone 390451 (TRBV19, TRBJ2-1)
CASSKAGPSSYNEQFF

SEQ ID NO: 780903 - protein, 14 aa, Homo sapiens
  CDR3 for alpha chain variable domain of TCR clone 390452 (TRAV17, TRAJ57)
CATDPQSGSEKLVF

SEQ ID NO: 780904 - protein, 18 aa, Homo sapiens
  CDR3 for beta chain variable domain of TCR clone 390452 (TRBV6-6, TRBJ1-3)
CASSYSEWDSISGNTIYF

SEQ ID NO: 780905 - protein, 15 aa, Homo sapiens
  CDR3 for alpha chain variable domain of TCR clone 390453 (TRAV25, TRAJ52)
CAGRPGGTSYGKLTF

SEQ ID NO: 780906 - protein, 14 aa, Homo sapiens
  CDR3 for beta chain variable domain of TCR clone 390453 (TRBV20-1, TRBJ2-7)
CSAKRGRSSYEQYF

SEQ ID NO: 780907 - protein, 14 aa, Homo sapiens
  CDR3 for alpha chain variable domain of TCR clone 390454 (TRAV8-3, TRAJ4)
CAVCAAVGYNKLIF

SEQ ID NO: 780908 - protein, 15 aa, Homo sapiens
  CDR3 for beta chain variable domain of TCR clone 390454 (TRBV6-5, TRBJ2-1)
CASSYDAGAGNEQFF

SEQ ID NO: 780909 - protein, 16 aa, Homo sapiens
  CDR3 for alpha chain variable domain of TCR clone 390455 (TRAV30, TRAJ24)
CGTEIVDADSWWKFQF

SEQ ID NO: 780910 - protein, 13 aa, Homo sapiens
  CDR3 for beta chain variable domain of TCR clone 390455 (TRBV20-1, TRBJ1-1)
CSAPPGGHTEAFF

SEQ ID NO: 780911 - protein, 15 aa, Homo sapiens
  CDR3 for alpha chain variable domain of TCR clone 390456 (TRAV2, TRAJ37)
CAVEDGSSNTGKLIF

SEQ ID NO: 780912 - protein, 13 aa, Homo sapiens
  CDR3 for beta chain variable domain of TCR clone 390456 (TRBV20-1, TRBJ1-1)
CSARVGGNTEAFF

SEQ ID NO: 780913 - protein, 14 aa, Homo sapiens
  CDR3 for alpha chain variable domain of TCR clone 390457 (TRAV1-2, TRAJ8)
CAVREDTGFQKRVF

SEQ ID NO: 780914 - protein, 14 aa, Homo sapiens
  CDR3 for beta chain variable domain of TCR clone 390457 (TRBV12-5, TRBJ2-5)
CASGSRTHQETQYF

SEQ ID NO: 780915 - protein, 14 aa, Homo sapiens
  CDR3 for alpha chain variable domain of TCR clone 390458 (TRAV12-2, TRAJ13)
CAVKKTGDYQKVTF

SEQ ID NO: 780916 - protein, 16 aa, Homo sapiens
  CDR3 for beta chain variable domain of TCR clone 390458 (TRBV20-1, TRBJ1-4)
CSAPGQGLLTNEKLFF

SEQ ID NO: 780917 - protein, 15 aa, Homo sapiens
  CDR3 for alpha chain variable domain of TCR clone 390459 (TRAV13-1, TRAJ17)
CAASIERAAGNTLTF

SEQ ID NO: 780918 - protein, 12 aa, Homo sapiens
  CDR3 for beta chain variable domain of TCR clone 390459 (TRBV5-7, TRBJ1-1)
CASSLGRGKAFF

SEQ ID NO: 780919 - protein, 13 aa, Homo sapiens
  CDR3 for alpha chain variable domain of TCR clone 390460 (TRAV1-2, TRAJ9)
CAALNTGGFETIF

SEQ ID NO: 780920 - protein, 12 aa, Homo sapiens
  CDR3 for beta chain variable domain of TCR clone 390460 (TRBV11-3, TRBJ1-1)
CASSHRQGEAFF

SEQ ID NO: 780921 - protein, 14 aa, Homo sapiens
  CDR3 for alpha chain variable domain of TCR clone 390461 (TRAV26-1, TRAJ38)
CIADNAGNNRKLIW

SEQ ID NO: 780922 - protein, 14 aa, Homo sapiens
  CDR3 for beta chain variable domain of TCR clone 390461 (TRBV11-2, TRBJ1-2)
CASSLGTANYGYTF

SEQ ID NO: 780923 - protein, 16 aa, Homo sapiens
  CDR3 for alpha chain variable domain of TCR clone 390462 (TRAV30, TRAJ24)
CGTEIVDADSWGKFQF

SEQ ID NO: 780924 - protein, 15 aa, Homo sapiens
  CDR3 for beta chain variable domain of TCR clone 390462 (TRBV7-2, TRBJ2-2)
CASRRPGQNTGEPFF

SEQ ID NO: 780925 - protein, 11 aa, Homo sapiens
  CDR3 for alpha chain variable domain of TCR clone 390463 (TRAV1-1, TRAJ23)
CAVRQGGKLIF

SEQ ID NO: 780926 - protein, 11 aa, Homo sapiens
  CDR3 for beta chain variable domain of TCR clone 390463 (TRBV20-1, TRBJ2-7)
CSARLSYEQYF

SEQ ID NO: 780927 - protein, 14 aa, Homo sapiens
  CDR3 for alpha chain variable domain of TCR clone 390464 (TRAV12-2, TRAJ13)
CALKKTGGYQKVTF

SEQ ID NO: 780928 - protein, 15 aa, Homo sapiens
  CDR3 for beta chain variable domain of TCR clone 390464 (TRBV27, TRBJ2-1)
CARSNGGGSSNEQFF

SEQ ID NO: 780929 - protein, 12 aa, Homo sapiens
  CDR3 for alpha chain variable domain of TCR clone 390465 (TRAV9-2, TRAJ20)
CALSEGDYKLSF

SEQ ID NO: 780930 - protein, 13 aa, Homo sapiens
  CDR3 for beta chain variable domain of TCR clone 390465 (TRBV11-2, TRBJ1-6)
CASSLAGVSPLYF

SEQ ID NO: 780931 - protein, 14 aa, Homo sapiens
  CDR3 for alpha chain variable domain of TCR clone 390466 (TRAV13-1, TRAJ44)
CAAKATGTASKLTF

SEQ ID NO: 780932 - protein, 14 aa, Homo sapiens
  CDR3 for beta chain variable domain of TCR clone 390466 (TRBV4-1, TRBJ2-7)
CASSPVAGGDEQYF

SEQ ID NO: 780933 - protein, 14 aa, Homo sapiens
  CDR3 for alpha chain variable domain of TCR clone 390467 (TRAV25, TRAJ6)
CAGRESGGSYIPTF

SEQ ID NO: 780934 - protein, 13 aa, Homo sapiens
  CDR3 for beta chain variable domain of TCR clone 390467 (TRBV2, TRBJ1-5)
CATAGPGNQPQHF

SEQ ID NO: 780935 - protein, 13 aa, Homo sapiens
  CDR3 for alpha chain variable domain of TCR clone 390468 (TRAV2, TRAJ20)
CAVEDPSEYKLSF

SEQ ID NO: 780936 - protein, 18 aa, Homo sapiens
  CDR3 for beta chain variable domain of TCR clone 390468 (TRBV25-1, TRBJ2-7)
CASSELTGGGIYESTSGR

SEQ ID NO: 780937 - protein, 19 aa, Homo sapiens
  CDR3 for alpha chain variable domain of TCR clone 390469 (TRAV30, TRAJ52)
CGTEANTNAGGTSYGKLTL

SEQ ID NO: 780938 - protein, 17 aa, Homo sapiens
  CDR3 for beta chain variable domain of TCR clone 390469 (TRBV28, TRBJ2-7)
CASSPLRGRRWKGGQYF

SEQ ID NO: 780939 - protein, 16 aa, Homo sapiens
  CDR3 for alpha chain variable domain of TCR clone 390470 (TRAV17, TRAJ52)
CATGIIGDTSYGKLTF

SEQ ID NO: 780940 - protein, 12 aa, Homo sapiens
  CDR3 for beta chain variable domain of TCR clone 390470 (TRBV7-3, TRBJ2-1)
CASSFINNEQFF

SEQ ID NO: 780941 - protein, 15 aa, Homo sapiens
  CDR3 for alpha chain variable domain of TCR clone 390471 (TRAV17, TRAJ56)
CATDANTGANSKLTF

SEQ ID NO: 780942 - protein, 13 aa, Homo sapiens
  CDR3 for beta chain variable domain of TCR clone 390471 (TRBV12-4, TRBJ2-2)
CASSPLPPGELFF

SEQ ID NO: 780943 - protein, 13 aa, Homo sapiens
  CDR3 for alpha chain variable domain of TCR clone 390472 (TRAV12-3, TRAJ33)
CAMSVNSNYQLIW

SEQ ID NO: 780944 - protein, 13 aa, Homo sapiens
  CDR3 for beta chain variable domain of TCR clone 390472 (TRBV7-7, TRBJ2-3)
CASSLSRADTQYF

SEQ ID NO: 780945 - protein, 12 aa, Homo sapiens
  CDR3 for alpha chain variable domain of TCR clone 390473 (TRAV22, TRAJ29)
CAHPSGNTPLVF

SEQ ID NO: 780946 - protein, 14 aa, Homo sapiens
  CDR3 for beta chain variable domain of TCR clone 390473 (TRBV11-2, TRBJ2-7)
CASSLGAGAYEQYF

SEQ ID NO: 780947 - protein, 12 aa, Homo sapiens
  CDR3 for alpha chain variable domain of TCR clone 390474 (TRAV12-3, TRAJ20)
CAMVRGDYKLSF

SEQ ID NO: 780948 - protein, 12 aa, Homo sapiens
  CDR3 for beta chain variable domain of TCR clone 390474 (TRBV11-2, TRBJ2-2)
CASRLGGGELFF

SEQ ID NO: 780949 - protein, 15 aa, Homo sapiens
  CDR3 for alpha chain variable domain of TCR clone 390475 (TRAV3, TRAJ4)
CAVRDRAGGYNKLIF

SEQ ID NO: 780950 - protein, 15 aa, Homo sapiens
  CDR3 for beta chain variable domain of TCR clone 390475 (TRBV10-2, TRBJ2-6)
CASSEQGTGANVLTF

SEQ ID NO: 780951 - protein, 12 aa, Homo sapiens
  CDR3 for alpha chain variable domain of TCR clone 390476 (TRAV13-1, TRAJ21)
CAAKEGFNKFYF

SEQ ID NO: 780952 - protein, 18 aa, Homo sapiens
  CDR3 for beta chain variable domain of TCR clone 390476 (TRBV4-1, TRBJ2-3)
CASSQLTSGGGIRSILAQ

SEQ ID NO: 780953 - protein, 13 aa, Homo sapiens
  CDR3 for alpha chain variable domain of TCR clone 390477 (TRAV2, TRAJ15)
CAVASHAGTALIF

SEQ ID NO: 780954 - protein, 15 aa, Homo sapiens
  CDR3 for beta chain variable domain of TCR clone 390477 (TRBV7-3, TRBJ2-2)
CASSETGQGTGELFF

SEQ ID NO: 780955 - protein, 10 aa, Homo sapiens
  CDR3 for alpha chain variable domain of TCR clone 390478 (TRAV23/DV6, TRAJ57)
CAESSTLSQR

SEQ ID NO: 780956 - protein, 14 aa, Homo sapiens
  CDR3 for beta chain variable domain of TCR clone 390478 (TRBV25-1, TRBJ1-1)
CASTHLGGNTEAFF

SEQ ID NO: 780957 - protein, 17 aa, Homo sapiens
  CDR3 for alpha chain variable domain of TCR clone 390479 (TRAV8-6, TRAJ58)
CAVSSWVGDTSGSRFTF

SEQ ID NO: 780958 - protein, 14 aa, Homo sapiens
  CDR3 for beta chain variable domain of TCR clone 390479 (TRBV4-2, TRBJ2-1)
CASGLDRAYNEQFF

SEQ ID NO: 780959 - protein, 13 aa, Homo sapiens
  CDR3 for alpha chain variable domain of TCR clone 390480 (TRAV27, TRAJ45)
CMSSGGGADGLAF

SEQ ID NO: 780960 - protein, 17 aa, Homo sapiens
  CDR3 for beta chain variable domain of TCR clone 390480 (TRBV11-2, TRBJ2-1)
SASSLYPPGVEYNEQFF

SEQ ID NO: 780961 - protein, 12 aa, Homo sapiens
  CDR3 for alpha chain variable domain of TCR clone 390481 (TRAV21, TRAJ3)
CCFYSSASKIIF

SEQ ID NO: 780962 - protein, 12 aa, Homo sapiens
  CDR3 for beta chain variable domain of TCR clone 390481 (TRBV11-2, TRBJ2-5)
CASSLVGETQYF

SEQ ID NO: 780963 - protein, 14 aa, Homo sapiens
  CDR3 for alpha chain variable domain of TCR clone 390482 (TRAV12-2, TRAJ40)
CAVKIPSGTYKYIF

SEQ ID NO: 780964 - protein, 14 aa, Homo sapiens
  CDR3 for beta chain variable domain of TCR clone 390482 (TRBV20-1, TRBJ2-7)
CSARVGSFSYEQYF

SEQ ID NO: 780965 - protein, 16 aa, Homo sapiens
  CDR3 for alpha chain variable domain of TCR clone 390483 (TRAV3, TRAJ10)
CAVRDMNAGGGNKLTF

SEQ ID NO: 780966 - protein, 12 aa, Homo sapiens
  CDR3 for beta chain variable domain of TCR clone 390483 (TRBV29-1, TRBJ2-3)
CSVTGGADTQYF

SEQ ID NO: 780967 - protein, 15 aa, Homo sapiens
  CDR3 for alpha chain variable domain of TCR clone 390484 (TRAV8-4, TRAJ5)
CAVKSRDTGRRALTF

SEQ ID NO: 780968 - protein, 14 aa, Homo sapiens
  CDR3 for beta chain variable domain of TCR clone 390484 (TRBV7-3, TRBJ1-1)
CASSLKGGNTEAFF

SEQ ID NO: 780969 - protein, 16 aa, Homo sapiens
  CDR3 for alpha chain variable domain of TCR clone 390485 (TRAV2, TRAJ10)
CCGGSTVTGGGNKLTF

SEQ ID NO: 780970 - protein, 14 aa, Homo sapiens
  CDR3 for beta chain variable domain of TCR clone 390485 (TRBV19, TRBJ2-1)
CASPTFVLSGEQFF

SEQ ID NO: 780971 - protein, 15 aa, Homo sapiens
  CDR3 for alpha chain variable domain of TCR clone 390486 (TRAV1-2, TRAJ24)
CAVRGSTDSWGKLQF

SEQ ID NO: 780972 - protein, 16 aa, Homo sapiens
  CDR3 for beta chain variable domain of TCR clone 390486 (TRBV20-1, TRBJ2-1)
CSAATQGPVSYNEQFF

SEQ ID NO: 780973 - protein, 14 aa, Homo sapiens
  CDR3 for alpha chain variable domain of TCR clone 390487 (TRAV12-3, TRAJ30)
CAMSLLHRDDKIIF

SEQ ID NO: 780974 - protein, 12 aa, Homo sapiens
  CDR3 for beta chain variable domain of TCR clone 390487 (TRBV11-2, TRBJ2-2)
CASSLGGGELFF

SEQ ID NO: 780975 - protein, 16 aa, Homo sapiens
  CDR3 for alpha chain variable domain of TCR clone 390488 (TRAV6, TRAJ37)
CALDLFGSSNTGKLIF

SEQ ID NO: 780976 - protein, 14 aa, Homo sapiens
  CDR3 for beta chain variable domain of TCR clone 390488 (TRBV5-7, TRBJ2-7)
CASSLRSATYEQYF

SEQ ID NO: 780977 - protein, 14 aa, Homo sapiens
  CDR3 for alpha chain variable domain of TCR clone 390489 (TRAV1-2, TRAJ8)
CAVREDTGFQKLVF

SEQ ID NO: 780978 - protein, 16 aa, Homo sapiens
  CDR3 for beta chain variable domain of TCR clone 390489 (TRBV10-2, TRBJ2-2)
SAPAGHRQADAGELFF

SEQ ID NO: 780979 - protein, 14 aa, Homo sapiens
  CDR3 for alpha chain variable domain of TCR clone 390490 (TRAV38-1, TRAJ40)
CALRPTSGTYKYIF

SEQ ID NO: 780980 - protein, 14 aa, Homo sapiens
  CDR3 for beta chain variable domain of TCR clone 390490 (TRBV5-4, TRBJ1-1)
CASSLDSRRDEAVF

SEQ ID NO: 780981 - protein, 13 aa, Homo sapiens
  CDR3 for alpha chain variable domain of TCR clone 390491 (TRAV30, TRAJ31)
CGTETRNNARLMF

SEQ ID NO: 780982 - protein, 16 aa, Homo sapiens
  CDR3 for beta chain variable domain of TCR clone 390491 (TRBV28, TRBJ1-5)
CASSFRGGYSNQPQHF

SEQ ID NO: 780983 - protein, 16 aa, Homo sapiens
  CDR3 for alpha chain variable domain of TCR clone 390492 (TRAV12-3, TRAJ45)
CAMGWGLGGGADGLTF

SEQ ID NO: 780984 - protein, 15 aa, Homo sapiens
  CDR3 for beta chain variable domain of TCR clone 390492 (TRBV20-1, TRBJ2-7)
CSARDRVSGMDEQYF

SEQ ID NO: 780985 - protein, 14 aa, Homo sapiens
  CDR3 for alpha chain variable domain of TCR clone 390493 (TRAV8-3, TRAJ7)
CAAIELYGNNRLAF

SEQ ID NO: 780986 - protein, 15 aa, Homo sapiens
  CDR3 for beta chain variable domain of TCR clone 390493 (TRBV11-2, TRBJ2-2)
CASSSDRVNAGELFF

SEQ ID NO: 780987 - protein, 15 aa, Homo sapiens
  CDR3 for alpha chain variable domain of TCR clone 390494 (TRAV12-3, TRAJ6)
CAMSATTGGSYIPKF

SEQ ID NO: 780988 - protein, 16 aa, Homo sapiens
  CDR3 for beta chain variable domain of TCR clone 390494 (TRBV20-1, TRBJ1-2)
CSASMGQGVDNYGYTF

SEQ ID NO: 780989 - protein, 14 aa, Homo sapiens
  CDR3 for alpha chain variable domain of TCR clone 390495 (TRAV1-2, TRAJ8)
CAVREDTGFQKLVF

SEQ ID NO: 780990 - protein, 15 aa, Homo sapiens
  CDR3 for beta chain variable domain of TCR clone 390495 (TRBV28, TRBJ2-5)
CASSFRQGALETQYF

SEQ ID NO: 780991 - protein, 17 aa, Homo sapiens
  CDR3 for alpha chain variable domain of TCR clone 390496 (TRAV3, TRAJ4)
CTSVLRDGTGGYTKLIF

SEQ ID NO: 780992 - protein, 16 aa, Homo sapiens
  CDR3 for beta chain variable domain of TCR clone 390496 (TRBV27, TRBJ2-2)
CASSSSGVSNTGELFF

SEQ ID NO: 780993 - protein, 14 aa, Homo sapiens
  CDR3 for alpha chain variable domain of TCR clone 390497 (TRAV12-1, TRAJ54)
CVVNIYQGAQKLVF

SEQ ID NO: 780994 - protein, 13 aa, Homo sapiens
  CDR3 for beta chain variable domain of TCR clone 390497 (TRBV12-4, TRBJ1-2)
CASSSGLTVISTF

SEQ ID NO: 780995 - protein, 13 aa, Homo sapiens
  CDR3 for alpha chain variable domain of TCR clone 390498 (TRAV1-1, TRAJ9)
CAAKTTGGFTTIF

SEQ ID NO: 780996 - protein, 16 aa, Homo sapiens
  CDR3 for beta chain variable domain of TCR clone 390498 (TRBV12-5, TRBJ2-5)
CASGPRTSGNQETQYF

SEQ ID NO: 780997 - protein, 14 aa, Homo sapiens
  CDR3 for alpha chain variable domain of TCR clone 390499 (TRAV12-2, TRAJ13)
CAVKKTGDYQKVTF

SEQ ID NO: 780998 - protein, 11 aa, Homo sapiens
  CDR3 for beta chain variable domain of TCR clone 390499 (TRBV12-4, TRBJ2-2)
CASSSAGELFF

SEQ ID NO: 780999 - protein, 16 aa, Homo sapiens
  CDR3 for alpha chain variable domain of TCR clone 390500 (TRAV12-2, TRAJ32)
CAVNLGQGGATNKPIF

SEQ ID NO: 781000 - protein, 15 aa, Homo sapiens
  CDR3 for beta chain variable domain of TCR clone 390500 (TRBV20-1, TRBJ2-7)
YSARGPLAGGREQYF

SEQ ID NO: 781001 - protein, 13 aa, Homo sapiens
  CDR3 for alpha chain variable domain of TCR clone 390501 (TRAV29/DV5, TRAJ31)
CAASRNNNARPMF

SEQ ID NO: 781002 - protein, 16 aa, Homo sapiens
  CDR3 for beta chain variable domain of TCR clone 390501 (TRBV20-1, TRBJ1-4)
CSAPGQGLLTNEKLFF

SEQ ID NO: 781003 - protein, 12 aa, Homo sapiens
  CDR3 for alpha chain variable domain of TCR clone 390502 (TRAV25, TRAJ38)
CAGTGNNRKLIW

SEQ ID NO: 781004 - protein, 15 aa, Homo sapiens
  CDR3 for beta chain variable domain of TCR clone 390502 (TRBV2, TRBJ2-1)
CASDIGLAGEGEQFF

SEQ ID NO: 781005 - protein, 12 aa, Homo sapiens
  CDR3 for alpha chain variable domain of TCR clone 390503 (TRAV12-3, TRAJ17)
CAMTLTGDKLTF

SEQ ID NO: 781006 - protein, 15 aa, Homo sapiens
  CDR3 for beta chain variable domain of TCR clone 390503 (TRBV20-1, TRBJ2-7)
CSARDRVAGMDEQYF

SEQ ID NO: 781007 - protein, 14 aa, Homo sapiens
  CDR3 for alpha chain variable domain of TCR clone 390504 (TRAV13-1, TRAJ41)
CAARSGDSGYALNF

SEQ ID NO: 781008 - protein, 15 aa, Homo sapiens
  CDR3 for beta chain variable domain of TCR clone 390504 (TRBV29-1, TRBJ2-5)
CSVAGASGTQETQSF

SEQ ID NO: 781009 - protein, 14 aa, Homo sapiens
  CDR3 for alpha chain variable domain of TCR clone 390505 (TRAV12-3, TRAJ10)
SHLPLAGGGNKLTF

SEQ ID NO: 781010 - protein, 14 aa, Homo sapiens
  CDR3 for beta chain variable domain of TCR clone 390505 (TRBV6-1, TRBJ1-3)
CASVQGGGGNAIYF

SEQ ID NO: 781011 - protein, 15 aa, Homo sapiens
  CDR3 for alpha chain variable domain of TCR clone 390506 (TRAV8-3, TRAJ45)
CASSYSGGGADGPTF

SEQ ID NO: 781012 - protein, 18 aa, Homo sapiens
  CDR3 for beta chain variable domain of TCR clone 390506 (TRBV20-1, TRBJ2-6)
CSAETTPTHGSGANVLTF

SEQ ID NO: 781013 - protein, 14 aa, Homo sapiens
  CDR3 for alpha chain variable domain of TCR clone 390507 (TRAV12-2, TRAJ13)
CAVKKTGGYQKVTS

SEQ ID NO: 781014 - protein, 13 aa, Homo sapiens
  CDR3 for beta chain variable domain of TCR clone 390507 (TRBV11-2, TRBJ2-1)
CASSLGLAGGRFF

SEQ ID NO: 781015 - protein, 13 aa, Homo sapiens
  CDR3 for alpha chain variable domain of TCR clone 390508 (TRAV21, TRAJ20)
CAVGLRVDYKLSF

SEQ ID NO: 781016 - protein, 16 aa, Homo sapiens
  CDR3 for beta chain variable domain of TCR clone 390508 (TRBV7-9, TRBJ2-3)
CASSLQGNPGTDTQYF

SEQ ID NO: 781017 - protein, 13 aa, Homo sapiens
  CDR3 for alpha chain variable domain of TCR clone 390509 (TRAV29/DV5, TRAJ33)
CAASVESNYQLIW

SEQ ID NO: 781018 - protein, 14 aa, Homo sapiens
  CDR3 for beta chain variable domain of TCR clone 390509 (TRBV5-7, TRBJ1-1)
CASGLAGDWTEAFF

SEQ ID NO: 781019 - protein, 13 aa, Homo sapiens
  CDR3 for alpha chain variable domain of TCR clone 390510 (TRAV13-2, TRAJ13)
CAETAGGFQKVTF

SEQ ID NO: 781020 - protein, 15 aa, Homo sapiens
  CDR3 for beta chain variable domain of TCR clone 390510 (TRBV20-1, TRBJ1-5)
CSARVGRVVSQTQHF

SEQ ID NO: 781021 - protein, 12 aa, Homo sapiens
  CDR3 for alpha chain variable domain of TCR clone 390511 (TRAV12-3, TRAJ17)
CAMTLTGNKLTF

SEQ ID NO: 781022 - protein, 10 aa, Homo sapiens
  CDR3 for beta chain variable domain of TCR clone 390511 (TRBV24-1, TRBJ2-2)
CTTSEADLER

SEQ ID NO: 781023 - protein, 13 aa, Homo sapiens
  CDR3 for alpha chain variable domain of TCR clone 390512 (TRAV1-2, TRAJ9)
CAVLNTGGFKTIF

SEQ ID NO: 781024 - protein, 14 aa, Homo sapiens
  CDR3 for beta chain variable domain of TCR clone 390512 (TRBV28, TRBJ1-2)
CASRIQGANYGYTF

SEQ ID NO: 781025 - protein, 14 aa, Homo sapiens
  CDR3 for alpha chain variable domain of TCR clone 390513 (TRAV2, TRAJ9)
CAVEDRSGGFKTIF

SEQ ID NO: 781026 - protein, 13 aa, Homo sapiens
  CDR3 for beta chain variable domain of TCR clone 390513 (TRBV15, TRBJ1-6)
CATLGGLNSPLHF

SEQ ID NO: 781027 - protein, 14 aa, Homo sapiens
  CDR3 for alpha chain variable domain of TCR clone 390514 (TRAV25, TRAJ44)
CAVFPTGTASKLTL

SEQ ID NO: 781028 - protein, 14 aa, Homo sapiens
  CDR3 for beta chain variable domain of TCR clone 390514 (TRBV19, TRBJ1-1)
CASTGHRLNTEAFF

SEQ ID NO: 781029 - protein, 14 aa, Homo sapiens
  CDR3 for alpha chain variable domain of TCR clone 390515 (TRAV9-2, TRAJ39)
CALYIYNAGNMLTF

SEQ ID NO: 781030 - protein, 16 aa, Homo sapiens
  CDR3 for beta chain variable domain of TCR clone 390515 (TRBV11-1, TRBJ1-1)
CASSPRGAHMNSEAFF

SEQ ID NO: 781031 - protein, 11 aa, Homo sapiens
  CDR3 for alpha chain variable domain of TCR clone 390516 (TRAV2, TRAJ13)
CASGGYQEVTF

SEQ ID NO: 781032 - protein, 14 aa, Homo sapiens
  CDR3 for beta chain variable domain of TCR clone 390516 (TRBV4-1, TRBJ2-2)
CASSQAVNTGELFF

SEQ ID NO: 781033 - protein, 12 aa, Homo sapiens
  CDR3 for alpha chain variable domain of TCR clone 390517 (TRAV21, TRAJ39)
CAADSAGNMLTF

SEQ ID NO: 781034 - protein, 15 aa, Homo sapiens
  CDR3 for beta chain variable domain of TCR clone 390517 (TRBV27, TRBJ2-1)
CASSNGGGSSNEQFF

SEQ ID NO: 781035 - protein, 13 aa, Homo sapiens
  CDR3 for alpha chain variable domain of TCR clone 390518 (TRAV12-3, TRAJ33)
CAMSVNSNYQLIW

SEQ ID NO: 781036 - protein, 16 aa, Homo sapiens
  CDR3 for beta chain variable domain of TCR clone 390518 (TRBV19, TRBJ2-2)
CASSFPGQGLAGELFF

SEQ ID NO: 781037 - protein, 14 aa, Homo sapiens
  CDR3 for alpha chain variable domain of TCR clone 390519 (TRAV16, TRAJ26)
CALSGCNYGQNFVF

SEQ ID NO: 781038 - protein, 12 aa, Homo sapiens
  CDR3 for beta chain variable domain of TCR clone 390519 (TRBV5-1, TRBJ2-7)
CASSLDSYEQYF

SEQ ID NO: 781039 - protein, 13 aa, Homo sapiens
  CDR3 for alpha chain variable domain of TCR clone 390520 (TRAV2, TRAJ15)
CAVASQAGTALIF

SEQ ID NO: 781040 - protein, 14 aa, Homo sapiens
  CDR3 for beta chain variable domain of TCR clone 390520 (TRBV19, TRBJ2-1)
CASPTFVVSGEQFF

SEQ ID NO: 781041 - protein, 14 aa, Homo sapiens
  CDR3 for alpha chain variable domain of TCR clone 390521 (TRAV4, TRAJ31)
CLVGDRDNNARLMF

SEQ ID NO: 781042 - protein, 16 aa, Homo sapiens
  CDR3 for beta chain variable domain of TCR clone 390521 (TRBV9, TRBJ1-2)
CASSVEEKVSPYGYTF

SEQ ID NO: 781043 - protein, 13 aa, Homo sapiens
  CDR3 for alpha chain variable domain of TCR clone 390522 (TRAV1-2, TRAJ20)
CAVRDGNDYKLSF

SEQ ID NO: 781044 - protein, 14 aa, Homo sapiens
  CDR3 for beta chain variable domain of TCR clone 390522 (TRBV7-2, TRBJ2-3)
CASSLGGGGDTQYF

SEQ ID NO: 781045 - protein, 11 aa, Homo sapiens
  CDR3 for alpha chain variable domain of TCR clone 390523 (TRAV16, TRAJ33)
CALHSNYPLIW

SEQ ID NO: 781046 - protein, 15 aa, Homo sapiens
  CDR3 for beta chain variable domain of TCR clone 390523 (TRBV4-1, TRBJ2-7)
CASSQQGQGFDEQHF

SEQ ID NO: 781047 - protein, 13 aa, Homo sapiens
  CDR3 for alpha chain variable domain of TCR clone 390524 (TRAV3, TRAJ21)
CAVREPDFNKFYF

SEQ ID NO: 781048 - protein, 15 aa, Homo sapiens
  CDR3 for beta chain variable domain of TCR clone 390524 (TRBV4-3, TRBJ2-2)
RASSQGQGGTGELFF

SEQ ID NO: 781049 - protein, 12 aa, Homo sapiens
  CDR3 for alpha chain variable domain of TCR clone 390525 (TRAV3, TRAJ31)
CAVRDGNASLMF

SEQ ID NO: 781050 - protein, 18 aa, Homo sapiens
  CDR3 for beta chain variable domain of TCR clone 390525 (TRBV7-2, TRBJ2-3)
CASSLKREGSGITDTQHF

SEQ ID NO: 781051 - protein, 16 aa, Homo sapiens
  CDR3 for alpha chain variable domain of TCR clone 390526 (TRAV3, TRAJ18)
CALRDGRGSTLGRLYF

SEQ ID NO: 781052 - protein, 17 aa, Homo sapiens
  CDR3 for beta chain variable domain of TCR clone 390526 (TRBV5-1, TRBJ2-3)
CASSKIGLVDRTDTQYF

SEQ ID NO: 781053 - protein, 14 aa, Homo sapiens
  CDR3 for alpha chain variable domain of TCR clone 390527 (TRAV26-1, TRAJ34)
CIVRVAYNTDKLIF

SEQ ID NO: 781054 - protein, 19 aa, Homo sapiens
  CDR3 for beta chain variable domain of TCR clone 390527 (TRBV25-1, TRBJ2-2)
WAILVYRVDRGRKTGELFF

SEQ ID NO: 781055 - protein, 12 aa, Homo sapiens
  CDR3 for alpha chain variable domain of TCR clone 390528 (TRAV27, TRAJ13)
CAGVRGYQKVTF

SEQ ID NO: 781056 - protein, 20 aa, Homo sapiens
  CDR3 for beta chain variable domain of TCR clone 390528 (TRBV5-1, TRBJ2-3)
CASSLWLAGAITTRTDTQYF

SEQ ID NO: 781057 - protein, 10 aa, Homo sapiens
  CDR3 for alpha chain variable domain of TCR clone 390529 (TRAV30, TRAJ24)
CGTEIWMLTA

SEQ ID NO: 781058 - protein, 18 aa, Homo sapiens
  CDR3 for beta chain variable domain of TCR clone 390529 (TRBV7-9, TRBJ2-7)
CASSLTTSGSRTWYEQYF

SEQ ID NO: 781059 - protein, 11 aa, Homo sapiens
  CDR3 for alpha chain variable domain of TCR clone 390530 (TRAV1-1, TRAJ23)
CAVRQGGKLIF

SEQ ID NO: 781060 - protein, 20 aa, Homo sapiens
  CDR3 for beta chain variable domain of TCR clone 390530 (TRBV7-8, TRBJ2-2)
CASSHLFPGPTIHITGKLSF

SEQ ID NO: 781061 - protein, 11 aa, Homo sapiens
  CDR3 for alpha chain variable domain of TCR clone 390531 (TRAV20, TRAJ23)
CACNQGGKLIF

SEQ ID NO: 781062 - protein, 16 aa, Homo sapiens
  CDR3 for beta chain variable domain of TCR clone 390531 (TRBV7-8, TRBJ2-5)
CASSFGGQPAQDTQYF

SEQ ID NO: 781063 - protein, 14 aa, Homo sapiens
  CDR3 for alpha chain variable domain of TCR clone 390532 (TRAV17, TRAJ6)
CATNPAGGSYIPTF

SEQ ID NO: 781064 - protein, 14 aa, Homo sapiens
  CDR3 for beta chain variable domain of TCR clone 390532 (TRBV4-2, TRBJ2-3)
CASRETRAPGMQYF

SEQ ID NO: 781065 - protein, 15 aa, Homo sapiens
  CDR3 for alpha chain variable domain of TCR clone 390533 (TRAV12-3, TRAJ42)
CAMITSGGSQGNLIF

SEQ ID NO: 781066 - protein, 14 aa, Homo sapiens
  CDR3 for beta chain variable domain of TCR clone 390533 (TRBV6-1, TRBJ1-3)
CASVQGGGGNTIYF

SEQ ID NO: 781067 - protein, 15 aa, Homo sapiens
  CDR3 for alpha chain variable domain of TCR clone 390534 (TRAV8-4, TRAJ3)
SAVTGENLVKQCFQD

SEQ ID NO: 781068 - protein, 16 aa, Homo sapiens
  CDR3 for beta chain variable domain of TCR clone 390534 (TRBV4-2, TRBJ1-1)
CASSQAGFGMNTEAFF

SEQ ID NO: 781069 - protein, 10 aa, Homo sapiens
  CDR3 for alpha chain variable domain of TCR clone 390535 (TRAV36/DV7, TRAJ49)
CALTGNQFYF

SEQ ID NO: 781070 - protein, 14 aa, Homo sapiens
  CDR3 for beta chain variable domain of TCR clone 390535 (TRBV4-2, TRBJ2-1)
CASGLDRAYNEQFF

SEQ ID NO: 781071 - protein, 11 aa, Homo sapiens
  CDR3 for alpha chain variable domain of TCR clone 390536 (TRAV12-1, TRAJ15)
CVVNAGTALIF

SEQ ID NO: 781072 - protein, 15 aa, Homo sapiens
  CDR3 for beta chain variable domain of TCR clone 390536 (TRBV4-1, TRBJ1-4)
CASSQTGGQAEKLFF

SEQ ID NO: 781073 - protein, 14 aa, Homo sapiens
  CDR3 for alpha chain variable domain of TCR clone 390537 (TRAV2, TRAJ37)
CAVDFTSNTGKLIF

SEQ ID NO: 781074 - protein, 15 aa, Homo sapiens
  CDR3 for beta chain variable domain of TCR clone 390537 (TRBV6-6, TRBJ2-1)
CASSPGLAVENEQFF

SEQ ID NO: 781075 - protein, 16 aa, Homo sapiens
  CDR3 for alpha chain variable domain of TCR clone 390538 (TRAV12-3, TRAJ53)
CAMSVSSGGSNYKLTF

SEQ ID NO: 781076 - protein, 13 aa, Homo sapiens
  CDR3 for beta chain variable domain of TCR clone 390538 (TRBV7-6, TRBJ1-2)
CASSLVADYGYTF

SEQ ID NO: 781077 - protein, 16 aa, Homo sapiens
  CDR3 for alpha chain variable domain of TCR clone 390539 (TRAV30, TRAJ24)
CGTEMVDADSWGKFQI

SEQ ID NO: 781078 - protein, 14 aa, Homo sapiens
  CDR3 for beta chain variable domain of TCR clone 390539 (TRBV12-5, TRBJ2-5)
CASGSRTHQETQYF

SEQ ID NO: 781079 - protein, 18 aa, Homo sapiens
  CDR3 for alpha chain variable domain of TCR clone 390540 (TRAV9-2, TRAJ52)
CALNRHNAGGTSYGKLTF

SEQ ID NO: 781080 - protein, 13 aa, Homo sapiens
  CDR3 for beta chain variable domain of TCR clone 390540 (TRBV7-9, TRBJ1-2)
CASSLKQNYGYTF

SEQ ID NO: 781081 - protein, 11 aa, Homo sapiens
  CDR3 for alpha chain variable domain of TCR clone 390541 (TRAV3, TRAJ21)
CAVGNFNKCYF

SEQ ID NO: 781082 - protein, 11 aa, Homo sapiens
  CDR3 for beta chain variable domain of TCR clone 390541 (TRBV13, TRBJ2-3)
CASGNADTQYF

SEQ ID NO: 781083 - protein, 19 aa, Homo sapiens
  CDR3 for alpha chain variable domain of TCR clone 390542 (TRAV26-1, TRAJ52)
CIVRAHRNAGATSYGKLTF

SEQ ID NO: 781084 - protein, 15 aa, Homo sapiens
  CDR3 for beta chain variable domain of TCR clone 390542 (TRBV29-1, TRBJ2-1)
CSGRDRKSSYNEQFF

SEQ ID NO: 781085 - protein, 12 aa, Homo sapiens
  CDR3 for alpha chain variable domain of TCR clone 390543 (TRAV3, TRAJ43)
WAVRDPNNDMRF

SEQ ID NO: 781086 - protein, 17 aa, Homo sapiens
  CDR3 for beta chain variable domain of TCR clone 390543 (TRBV7-8, TRBJ2-6)
CASSAGTGGAGANVLTF

SEQ ID NO: 781087 - protein, 12 aa, Homo sapiens
  CDR3 for alpha chain variable domain of TCR clone 390544 (TRAV16, TRAJ10)
CSRTGGGNKLTF

SEQ ID NO: 781088 - protein, 15 aa, Homo sapiens
  CDR3 for beta chain variable domain of TCR clone 390544 (TRBV7-3, TRBJ2-2)
CASSETGQGTGELFF

SEQ ID NO: 781089 - protein, 14 aa, Homo sapiens
  CDR3 for alpha chain variable domain of TCR clone 390545 (TRAV1-2, TRAJ16)
CAVNRFSDGQKLLF

SEQ ID NO: 781090 - protein, 15 aa, Homo sapiens
  CDR3 for beta chain variable domain of TCR clone 390545 (TRBV7-9, TRBJ1-6)
CASSAPGRGNSPLHL

SEQ ID NO: 781091 - protein, 16 aa, Homo sapiens
  CDR3 for alpha chain variable domain of TCR clone 390546 (TRAV23/DV6, TRAJ9)
CAASIGGNTGGFKTIF

SEQ ID NO: 781092 - protein, 15 aa, Homo sapiens
  CDR3 for beta chain variable domain of TCR clone 390546 (TRBV2, TRBJ2-2)
CASSRETVGTGELFF

SEQ ID NO: 781093 - protein, 13 aa, Homo sapiens
  CDR3 for alpha chain variable domain of TCR clone 390547 (TRAV27, TRAJ41)
CAGEVNSGYALNF

SEQ ID NO: 781094 - protein, 13 aa, Homo sapiens
  CDR3 for beta chain variable domain of TCR clone 390547 (TRBV27, TRBJ2-7)
CASSFVSSYEQYF

SEQ ID NO: 781095 - protein, 18 aa, Homo sapiens
  CDR3 for alpha chain variable domain of TCR clone 390548 (TRAV26-1, TRAJ27)
CIVRPSFNYNTNAGKSTF

SEQ ID NO: 781096 - protein, 14 aa, Homo sapiens
  CDR3 for beta chain variable domain of TCR clone 390548 (TRBV10-3, TRBJ1-6)
CAISVDGDESPLPF

SEQ ID NO: 781097 - protein, 13 aa, Homo sapiens
  CDR3 for alpha chain variable domain of TCR clone 390549 (TRAV12-2, TRAJ3)
CAFQYSSASRIIF

SEQ ID NO: 781098 - protein, 11 aa, Homo sapiens
  CDR3 for beta chain variable domain of TCR clone 390549 (TRBV20-1, TRBJ2-3)
CSGTSSTTQYF

SEQ ID NO: 781099 - protein, 13 aa, Homo sapiens
  CDR3 for alpha chain variable domain of TCR clone 390550 (TRAV3, TRAJ20)
CAVRDIGDYKLSF

SEQ ID NO: 781100 - protein, 15 aa, Homo sapiens
  CDR3 for beta chain variable domain of TCR clone 390550 (TRBV20-1, TRBJ2-7)
CSARDRVSGMDEQYF

SEQ ID NO: 781101 - protein, 14 aa, Homo sapiens
  CDR3 for alpha chain variable domain of TCR clone 390551 (TRAV26-1, TRAJ34)
CIVIVAYNTDKLIF

SEQ ID NO: 781102 - protein, 14 aa, Homo sapiens
  CDR3 for beta chain variable domain of TCR clone 390551 (TRBV20-1, TRBJ2-7)
CSAWTALSSYEQYF

SEQ ID NO: 781103 - protein, 12 aa, Homo sapiens
  CDR3 for alpha chain variable domain of TCR clone 390552 (TRAV12-3, TRAJ17)
CAMTLTGNKLTF

SEQ ID NO: 781104 - protein, 12 aa, Homo sapiens
  CDR3 for beta chain variable domain of TCR clone 390552 (TRBV12-4, TRBJ1-2)
CQQFTTGKGYTF

SEQ ID NO: 781105 - protein, 19 aa, Homo sapiens
  CDR3 for alpha chain variable domain of TCR clone 390553 (TRAV1-1, TRAJ37)
CAVPSSGRYGSGNTGKLIF

SEQ ID NO: 781106 - protein, 15 aa, Homo sapiens
  CDR3 for beta chain variable domain of TCR clone 390553 (TRBV5-1, TRBJ2-7)
CASSLNGGPAREQYF

SEQ ID NO: 781107 - protein, 13 aa, Homo sapiens
  CDR3 for alpha chain variable domain of TCR clone 390554 (TRAV21, TRAJ20)
CAVGLRVDYKLSF

SEQ ID NO: 781108 - protein, 13 aa, Homo sapiens
  CDR3 for beta chain variable domain of TCR clone 390554 (TRBV6-1, TRBJ1-1)
CASSRQGRTEAFF

SEQ ID NO: 781109 - protein, 16 aa, Homo sapiens
  CDR3 for alpha chain variable domain of TCR clone 390555 (TRAV16, TRAJ4)
CALSRMFSGGYNKRIF

SEQ ID NO: 781110 - protein, 16 aa, Homo sapiens
  CDR3 for beta chain variable domain of TCR clone 390555 (TRBV24-1, TRBJ2-3)
CATSDPGTGVTDTQYF

SEQ ID NO: 781111 - protein, 14 aa, Homo sapiens
  CDR3 for alpha chain variable domain of TCR clone 390556 (TRAV12-2, TRAJ13)
CAVKKTGGYQKVTF

SEQ ID NO: 781112 - protein, 15 aa, Homo sapiens
  CDR3 for beta chain variable domain of TCR clone 390556 (TRBV20-1, TRBJ2-1)
CSARGIGETYNEQFF

SEQ ID NO: 781113 - protein, 13 aa, Homo sapiens
  CDR3 for alpha chain variable domain of TCR clone 390557 (TRAV22, TRAJ29)
CAVGGSGNTPLVF

SEQ ID NO: 781114 - protein, 13 aa, Homo sapiens
  CDR3 for beta chain variable domain of TCR clone 390557 (TRBV4-2, TRBJ1-1)
CSSSQAGNTEAFF

SEQ ID NO: 781115 - protein, 15 aa, Homo sapiens
  CDR3 for alpha chain variable domain of TCR clone 390558 (TRAV3, TRAJ45)
CAVRTPWGGADGLTC

SEQ ID NO: 781116 - protein, 16 aa, Homo sapiens
  CDR3 for beta chain variable domain of TCR clone 390558 (TRBV6-1, TRBJ2-2)
CASSFGQGANTGELFF

SEQ ID NO: 781117 - protein, 15 aa, Homo sapiens
  CDR3 for alpha chain variable domain of TCR clone 390559 (TRAV23/DV6, TRAJ38)
CPARSNAGNNRKLIW

SEQ ID NO: 781118 - protein, 16 aa, Homo sapiens
  CDR3 for beta chain variable domain of TCR clone 390559 (TRBV10-2, TRBJ1-5)
CASSRDRDYSNQPQHF

SEQ ID NO: 781119 - protein, 12 aa, Homo sapiens
  CDR3 for alpha chain variable domain of TCR clone 390560 (TRAV12-3, TRAJ17)
FAMTLTGNKLTF

SEQ ID NO: 781120 - protein, 20 aa, Homo sapiens
  CDR3 for beta chain variable domain of TCR clone 390560 (TRBV19, TRBJ2-1)
CASSISRTVTSTRLNNEQFF

SEQ ID NO: 781121 - protein, 15 aa, Homo sapiens
  CDR3 for alpha chain variable domain of TCR clone 390561 (TRAV12-2, TRAJ53)
CAVNGGGGSNYKLTF

SEQ ID NO: 781122 - protein, 14 aa, Homo sapiens
  CDR3 for beta chain variable domain of TCR clone 390561 (TRBV7-3, TRBJ1-1)
CASSLKGGNTEAFF

SEQ ID NO: 781123 - protein, 15 aa, Homo sapiens
  CDR3 for alpha chain variable domain of TCR clone 390562 (TRAV38-2/DV8, TRAJ26)
CAYRSRDNYGKNFVF

SEQ ID NO: 781124 - protein, 14 aa, Homo sapiens
  CDR3 for beta chain variable domain of TCR clone 390562 (TRBV29-1, TRBJ1-3)
CSVADRVVGNTIYF

SEQ ID NO: 781125 - protein, 15 aa, Homo sapiens
  CDR3 for alpha chain variable domain of TCR clone 390563 (TRAV12-1, TRAJ44)
CVVDEHTGTASKLTF

SEQ ID NO: 781126 - protein, 14 aa, Homo sapiens
  CDR3 for beta chain variable domain of TCR clone 390563 (TRBV5-1, TRBJ1-2)
CASSLEPVNYGYTF

SEQ ID NO: 781127 - protein, 11 aa, Homo sapiens
  CDR3 for alpha chain variable domain of TCR clone 390564 (TRAV2, TRAJ33)
CAVHSNYQLIW

SEQ ID NO: 781128 - protein, 15 aa, Homo sapiens
  CDR3 for beta chain variable domain of TCR clone 390564 (TRBV19, TRBJ1-2)
CASSVGQVLNYGYTF

SEQ ID NO: 781129 - protein, 10 aa, Homo sapiens
  CDR3 for alpha chain variable domain of TCR clone 390565 (TRAV38-1, TRAJ34)
CAFMDGKLIF

SEQ ID NO: 781130 - protein, 17 aa, Homo sapiens
  CDR3 for beta chain variable domain of TCR clone 390565 (TRBV11-3, TRBJ2-3)
CASSLGLTGGGTDTQYF

SEQ ID NO: 781131 - protein, 11 aa, Homo sapiens
  CDR3 for alpha chain variable domain of TCR clone 390566 (TRAV12-2, TRAJ49)
CALQGGNQFYF

SEQ ID NO: 781132 - protein, 14 aa, Homo sapiens
  CDR3 for beta chain variable domain of TCR clone 390566 (TRBV4-1, TRBJ2-2)
CASSQAVNTGELFF

SEQ ID NO: 781133 - protein, 16 aa, Homo sapiens
  CDR3 for alpha chain variable domain of TCR clone 390567 (TRAV27, TRAJ53)
CAAPEGSGGSNFKLTF

SEQ ID NO: 781134 - protein, 15 aa, Homo sapiens
  CDR3 for beta chain variable domain of TCR clone 390567 (TRBV20-1, TRBJ1-1)
CSASRGVTGNTEAFF

SEQ ID NO: 781135 - protein, 19 aa, Homo sapiens
  CDR3 for alpha chain variable domain of TCR clone 390568 (TRAV16, )
CALSGDIQNPYPAVYQLRD

SEQ ID NO: 781136 - protein, 16 aa, Homo sapiens
  CDR3 for beta chain variable domain of TCR clone 390568 (TRBV12-5, TRBJ2-5)
CASGPRTSGNQETQYF

SEQ ID NO: 781137 - protein, 15 aa, Homo sapiens
  CDR3 for alpha chain variable domain of TCR clone 390569 (TRAV21, TRAJ53)
CATLNSGGSNYKLTF

SEQ ID NO: 781138 - protein, 16 aa, Homo sapiens
  CDR3 for beta chain variable domain of TCR clone 390569 (TRBV29-1, TRBJ1-2)
CSVEANRDIANYSYTV

SEQ ID NO: 781139 - protein, 16 aa, Homo sapiens
  CDR3 for alpha chain variable domain of TCR clone 390570 (TRAV8-6, TRAJ4)
CAVTKILSGGYNKLLF

SEQ ID NO: 781140 - protein, 13 aa, Homo sapiens
  CDR3 for beta chain variable domain of TCR clone 390570 (TRBV29-1, TRBJ2-1)
CSEGTSGYNEQFF

SEQ ID NO: 781141 - protein, 12 aa, Homo sapiens
  CDR3 for alpha chain variable domain of TCR clone 390571 (TRAV13-1, TRAJ48)
CAANFGNEKLTF

SEQ ID NO: 781142 - protein, 12 aa, Homo sapiens
  CDR3 for beta chain variable domain of TCR clone 390571 (TRBV11-2, TRBJ2-1)
CASSPGNNGQSF

SEQ ID NO: 781143 - protein, 13 aa, Homo sapiens
  CDR3 for alpha chain variable domain of TCR clone 390572 (TRAV8-6, TRAJ9)
CAVSDTGGFKTIF

SEQ ID NO: 781144 - protein, 13 aa, Homo sapiens
  CDR3 for beta chain variable domain of TCR clone 390572 (TRBV7-9, TRBJ2-7)
CASSFAGAYEQYF

SEQ ID NO: 781145 - protein, 14 aa, Homo sapiens
  CDR3 for alpha chain variable domain of TCR clone 390573 (TRAV16, TRAJ44)
CALSTTGTASQLTF

SEQ ID NO: 781146 - protein, 14 aa, Homo sapiens
  CDR3 for beta chain variable domain of TCR clone 390573 (TRBV20-1, TRBJ2-7)
CSAISREASYEQYF

SEQ ID NO: 781147 - protein, 18 aa, Homo sapiens
  CDR3 for alpha chain variable domain of TCR clone 390574 (TRAV13-1, TRAJ52)
CAAKNPNAVGTSYGKLTF

SEQ ID NO: 781148 - protein, 15 aa, Homo sapiens
  CDR3 for beta chain variable domain of TCR clone 390574 (TRBV28, TRBJ2-3)
CASSPDRQGANTQYF

SEQ ID NO: 781149 - protein, 17 aa, Homo sapiens
  CDR3 for alpha chain variable domain of TCR clone 390575 (TRAV12-2, TRAJ53)
CAPLTDSQEGSNYKLTF

SEQ ID NO: 781150 - protein, 15 aa, Homo sapiens
  CDR3 for beta chain variable domain of TCR clone 390575 (TRBV20-1, TRBJ2-7)
CSARDRVSGMDEQYF

SEQ ID NO: 781151 - protein, 13 aa, Homo sapiens
  CDR3 for alpha chain variable domain of TCR clone 390576 (TRAV36/DV7, TRAJ54)
CAVDIQGAQKLVF

SEQ ID NO: 781152 - protein, 13 aa, Homo sapiens
  CDR3 for beta chain variable domain of TCR clone 390576 (TRBV7-6, TRBJ2-3)
CASSLRSDNTQYF

SEQ ID NO: 781153 - protein, 11 aa, Homo sapiens
  CDR3 for alpha chain variable domain of TCR clone 390577 (TRAV17, TRAJ49)
CATDAGNQFYF

SEQ ID NO: 781154 - protein, 14 aa, Homo sapiens
  CDR3 for beta chain variable domain of TCR clone 390577 (TRBV23-1, TRBJ2-5)
CASSFLRSQETQYF

SEQ ID NO: 781155 - protein, 13 aa, Homo sapiens
  CDR3 for alpha chain variable domain of TCR clone 390578 (TRAV8-3, TRAJ4)
WVFYSGGYNKLIF

SEQ ID NO: 781156 - protein, 16 aa, Homo sapiens
  CDR3 for beta chain variable domain of TCR clone 390578 (TRBV7-8, TRBJ2-3)
CASSTEGLRETDTQYF

SEQ ID NO: 781157 - protein, 15 aa, Homo sapiens
  CDR3 for alpha chain variable domain of TCR clone 390579 (TRAV3, TRAJ22)
CAVRDRGGSARQLTF

SEQ ID NO: 781158 - protein, 16 aa, Homo sapiens
  CDR3 for beta chain variable domain of TCR clone 390579 (TRBV20-1, TRBJ2-2)
CSARSAGGLGTGELFF

SEQ ID NO: 781159 - protein, 11 aa, Homo sapiens
  CDR3 for alpha chain variable domain of TCR clone 390580 (TRAV41, TRAJ49)
CAVRSRNQFYF

SEQ ID NO: 781160 - protein, 14 aa, Homo sapiens
  CDR3 for beta chain variable domain of TCR clone 390580 (TRBV12-5, TRBJ2-5)
CASGSRTHQETQYF

SEQ ID NO: 781161 - protein, 14 aa, Homo sapiens
  CDR3 for alpha chain variable domain of TCR clone 390581 (TRAV1-2, TRAJ8)
CAVREDTGFQKLVI

SEQ ID NO: 781162 - protein, 12 aa, Homo sapiens
  CDR3 for beta chain variable domain of TCR clone 390581 (TRBV4-2, TRBJ1-2)
CASSHRQDGYTF

SEQ ID NO: 781163 - protein, 14 aa, Homo sapiens
  CDR3 for alpha chain variable domain of TCR clone 390582 (TRAV2, TRAJ37)
CAVDFTSNTGKLIL

SEQ ID NO: 781164 - protein, 15 aa, Homo sapiens
  CDR3 for beta chain variable domain of TCR clone 390582 (TRBV20-1, TRBJ1-1)
CSASRGVTGNTEAFC

SEQ ID NO: 781165 - protein, 20 aa, Homo sapiens
  CDR3 for alpha chain variable domain of TCR clone 390583 (TRAV25, TRAJ21)
TATQTTDVGTYPLSFTKFYF

SEQ ID NO: 781166 - protein, 14 aa, Homo sapiens
  CDR3 for beta chain variable domain of TCR clone 390583 (TRBV20-1, TRBJ2-7)
CSAPELAGVGEQYF

SEQ ID NO: 781167 - protein, 14 aa, Homo sapiens
  CDR3 for alpha chain variable domain of TCR clone 390584 (TRAV3, TRAJ34)
CAVRDINNTDKLIF

SEQ ID NO: 781168 - protein, 15 aa, Homo sapiens
  CDR3 for beta chain variable domain of TCR clone 390584 (TRBV20-1, TRBJ2-7)
CSARDRVSGVDEQYF

SEQ ID NO: 781169 - protein, 16 aa, Homo sapiens
  CDR3 for alpha chain variable domain of TCR clone 390585 (TRAV30, TRAJ44)
CGTEDKRTGTASKLTF

SEQ ID NO: 781170 - protein, 16 aa, Homo sapiens
  CDR3 for beta chain variable domain of TCR clone 390585 (TRBV19, TRBJ1-3)
CASSMDRALPGNTIYF

SEQ ID NO: 781171 - protein, 12 aa, Homo sapiens
  CDR3 for alpha chain variable domain of TCR clone 390586 (TRAV12-3, TRAJ5)
CAMDTGSRALTF

SEQ ID NO: 781172 - protein, 14 aa, Homo sapiens
  CDR3 for beta chain variable domain of TCR clone 390586 (TRBV20-1, TRBJ2-1)
CSAQIGGSANEQFF

SEQ ID NO: 781173 - protein, 14 aa, Homo sapiens
  CDR3 for alpha chain variable domain of TCR clone 390587 (TRAV12-3, TRAJ22)
CAMSLFGSARQLTF

SEQ ID NO: 781174 - protein, 13 aa, Homo sapiens
  CDR3 for beta chain variable domain of TCR clone 390587 (TRBV27, TRBJ1-4)
CASSLMGDEKLFF

SEQ ID NO: 781175 - protein, 14 aa, Homo sapiens
  CDR3 for alpha chain variable domain of TCR clone 390588 (TRAV26-1, TRAJ45)
CIEVTGGGADGLTF

SEQ ID NO: 781176 - protein, 13 aa, Homo sapiens
  CDR3 for beta chain variable domain of TCR clone 390588 (TRBV7-6, TRBJ1-2)
CASSLVADYAYTF

SEQ ID NO: 781177 - protein, 15 aa, Homo sapiens
  CDR3 for alpha chain variable domain of TCR clone 390589 (TRAV12-1, TRAJ12)
CVVNMDTDSSYKLIF

SEQ ID NO: 781178 - protein, 15 aa, Homo sapiens
  CDR3 for beta chain variable domain of TCR clone 390589 (TRBV6-1, TRBJ2-1)
CASSELRGQYNEQFF

SEQ ID NO: 781179 - protein, 13 aa, Homo sapiens
  CDR3 for alpha chain variable domain of TCR clone 390590 (TRAV12-3, TRAJ40)
CAMSDSGTYKDIF

SEQ ID NO: 781180 - protein, 14 aa, Homo sapiens
  CDR3 for beta chain variable domain of TCR clone 390590 (TRBV7-2, TRBJ1-5)
CASSTQGAGQPQHF

SEQ ID NO: 781181 - protein, 15 aa, Homo sapiens
  CDR3 for alpha chain variable domain of TCR clone 390591 (TRAV35, TRAJ40)
CAGQLGTSGTYNSIF

SEQ ID NO: 781182 - protein, 11 aa, Homo sapiens
  CDR3 for beta chain variable domain of TCR clone 390591 (TRBV23-1, TRBJ2-7)
SSSGTGLEQYF

SEQ ID NO: 781183 - protein, 12 aa, Homo sapiens
  CDR3 for alpha chain variable domain of TCR clone 390592 (TRAV21, TRAJ33)
CAKMDSSYQLIW

SEQ ID NO: 781184 - protein, 17 aa, Homo sapiens
  CDR3 for beta chain variable domain of TCR clone 390592 (TRBV11-2, TRBJ2-1)
CASSLYPPGVEYNEQFF

SEQ ID NO: 781185 - protein, 14 aa, Homo sapiens
  CDR3 for alpha chain variable domain of TCR clone 390593 (TRAV23/DV6, TRAJ8)
CAASKHTGFQKLVF

SEQ ID NO: 781186 - protein, 16 aa, Homo sapiens
  CDR3 for beta chain variable domain of TCR clone 390593 (TRBV4-1, TRBJ2-6)
CASSQVGDPGANVLTF

SEQ ID NO: 781187 - protein, 11 aa, Homo sapiens
  CDR3 for alpha chain variable domain of TCR clone 390594 (TRAV2, TRAJ33)
CAVDSNYQLIW

SEQ ID NO: 781188 - protein, 15 aa, Homo sapiens
  CDR3 for beta chain variable domain of TCR clone 390594 (TRBV20-1, TRBJ2-7)
CSARVPAAYFYEQYF

SEQ ID NO: 781189 - protein, 22 aa, Homo sapiens
  CDR3 for alpha chain variable domain of TCR clone 390595 (TRAV3, TRAJ38)
CAVRDCLNAGNNHIQNPDPAVY

SEQ ID NO: 781190 - protein, 13 aa, Homo sapiens
  CDR3 for beta chain variable domain of TCR clone 390595 (TRBV20-1, TRBJ1-2)
CSASTERIYGYTF

SEQ ID NO: 781191 - protein, 13 aa, Homo sapiens
  CDR3 for alpha chain variable domain of TCR clone 390596 (TRAV1-2, TRAJ9)
CAALNTGGFKTIF

SEQ ID NO: 781192 - protein, 13 aa, Homo sapiens
  CDR3 for beta chain variable domain of TCR clone 390596 (TRBV19, TRBJ1-2)
CASSVPGQYGYTV

SEQ ID NO: 781193 - protein, 14 aa, Homo sapiens
  CDR3 for alpha chain variable domain of TCR clone 390597 (TRAV2, TRAJ9)
CAVEDRSGGFKTIF

SEQ ID NO: 781194 - protein, 15 aa, Homo sapiens
  CDR3 for beta chain variable domain of TCR clone 390597 (TRBV19, TRBJ2-1)
CASSSPGVPLDEQVF

SEQ ID NO: 781195 - protein, 15 aa, Homo sapiens
  CDR3 for alpha chain variable domain of TCR clone 390598 (TRAV25, TRAJ52)
CAGTSGGTSYGKLTF

SEQ ID NO: 781196 - protein, 11 aa, Homo sapiens
  CDR3 for beta chain variable domain of TCR clone 390598 (TRBV11-2, TRBJ2-2)
CASSLPGELFF

SEQ ID NO: 781197 - protein, 16 aa, Homo sapiens
  CDR3 for alpha chain variable domain of TCR clone 390599 (TRAV16, TRAJ52)
CALSAAGGTSYGKLTF

SEQ ID NO: 781198 - protein, 19 aa, Homo sapiens
  CDR3 for beta chain variable domain of TCR clone 390599 (TRBV19, TRBJ2-5)
CASSIGQVTDFFLGDTQYF

SEQ ID NO: 781199 - protein, 14 aa, Homo sapiens
  CDR3 for alpha chain variable domain of TCR clone 390600 (TRAV20, TRAJ56)
CAVQFGGANSKLTF

SEQ ID NO: 781200 - protein, 14 aa, Homo sapiens
  CDR3 for beta chain variable domain of TCR clone 390600 (TRBV7-2, TRBJ1-1)
CASTFLTGTTEAFF

SEQ ID NO: 781201 - protein, 14 aa, Homo sapiens
  CDR3 for alpha chain variable domain of TCR clone 390601 (TRAV21, TRAJ58)
CAVRRGRSGSRLNF

SEQ ID NO: 781202 - protein, 13 aa, Homo sapiens
  CDR3 for beta chain variable domain of TCR clone 390601 (TRBV7-2, TRBJ1-6)
CASSLKFDSPLHF

SEQ ID NO: 781203 - protein, 14 aa, Homo sapiens
  CDR3 for alpha chain variable domain of TCR clone 390602 (TRAV3, TRAJ17)
CAVRERSCRQQANF

SEQ ID NO: 781204 - protein, 17 aa, Homo sapiens
  CDR3 for beta chain variable domain of TCR clone 390602 (TRBV13, TRBJ2-3)
CASSLSRIAGGRNTQYF

SEQ ID NO: 781205 - protein, 13 aa, Homo sapiens
  CDR3 for alpha chain variable domain of TCR clone 390603 (TRAV13-2, TRAJ48)
CAEMDFGNEKLTF

SEQ ID NO: 781206 - protein, 15 aa, Homo sapiens
  CDR3 for beta chain variable domain of TCR clone 390603 (TRBV7-8, TRBJ2-1)
CASSLADSLYNEQFL

SEQ ID NO: 781207 - protein, 14 aa, Homo sapiens
  CDR3 for alpha chain variable domain of TCR clone 390604 (TRAV3, TRAJ9)
CAVRLNTGGFKTIF

SEQ ID NO: 781208 - protein, 14 aa, Homo sapiens
  CDR3 for beta chain variable domain of TCR clone 390604 (TRBV4-1, TRBJ2-2)
CASSQAVNTGELFF

SEQ ID NO: 781209 - protein, 17 aa, Homo sapiens
  CDR3 for alpha chain variable domain of TCR clone 390605 (TRAV12-2, TRAJ6)
CAPQGPPRTGGSYIPPF

SEQ ID NO: 781210 - protein, 16 aa, Homo sapiens
  CDR3 for beta chain variable domain of TCR clone 390605 (TRBV19, TRBJ2-2)
CASSTARASNTGELFF

SEQ ID NO: 781211 - protein, 15 aa, Homo sapiens
  CDR3 for alpha chain variable domain of TCR clone 390606 (TRAV3, TRAJ15)
CAVRPANQAGTALSF

SEQ ID NO: 781212 - protein, 15 aa, Homo sapiens
  CDR3 for beta chain variable domain of TCR clone 390606 (TRBV7-7, TRBJ1-3)
CASSQGEHSGNTIYF

SEQ ID NO: 781213 - protein, 16 aa, Homo sapiens
  CDR3 for alpha chain variable domain of TCR clone 390607 (TRAV26-1, TRAJ23)
CIVRVEKPGRKAYLRT

SEQ ID NO: 781214 - protein, 15 aa, Homo sapiens
  CDR3 for beta chain variable domain of TCR clone 390607 (TRBV15, TRBJ1-5)
CATSRDPVSNQPQHF

SEQ ID NO: 781215 - protein, 14 aa, Homo sapiens
  CDR3 for alpha chain variable domain of TCR clone 390608 (TRAV2, TRAJ9)
CAVEDRSGGFKTSF

SEQ ID NO: 781216 - protein, 11 aa, Homo sapiens
  CDR3 for beta chain variable domain of TCR clone 390608 (TRBV12-4, TRBJ2-3)
CASTATDTQYF

SEQ ID NO: 781217 - protein, 16 aa, Homo sapiens
  CDR3 for alpha chain variable domain of TCR clone 390609 (TRAV26-1, TRAJ37)
CIVRGDGSGNTGKLIF

SEQ ID NO: 781218 - protein, 17 aa, Homo sapiens
  CDR3 for beta chain variable domain of TCR clone 390609 (TRBV11-2, TRBJ2-1)
CASSLYPPGVVYNEQFF

SEQ ID NO: 781219 - protein, 18 aa, Homo sapiens
  CDR3 for alpha chain variable domain of TCR clone 390610 (TRAV8-4, TRAJ52)
CAVTRANAGGTSYGKLTF

SEQ ID NO: 781220 - protein, 20 aa, Homo sapiens
  CDR3 for beta chain variable domain of TCR clone 390610 (TRBV19, TRBJ2-1)
FASSISRTVTSTRLNNEQFF

SEQ ID NO: 781221 - protein, 12 aa, Homo sapiens
  CDR3 for alpha chain variable domain of TCR clone 390611 (TRAV21, TRAJ33)
SAKMDSNYQLIW

SEQ ID NO: 781222 - protein, 13 aa, Homo sapiens
  CDR3 for beta chain variable domain of TCR clone 390611 (TRBV10-3, TRBJ2-7)
CASKLAVNYEQYF

SEQ ID NO: 781223 - protein, 14 aa, Homo sapiens
  CDR3 for alpha chain variable domain of TCR clone 390612 (TRAV12-3, TRAJ35)
CAMSLIGFGNVLHC

SEQ ID NO: 781224 - protein, 14 aa, Homo sapiens
  CDR3 for beta chain variable domain of TCR clone 390612 (TRBV7-2, TRBJ2-7)
CASRSQGAAYEQYF

SEQ ID NO: 781225 - protein, 10 aa, Homo sapiens
  CDR3 for alpha chain variable domain of TCR clone 390613 (TRAV1-2, TRAJ20)
CACNDYKLSF

SEQ ID NO: 781226 - protein, 17 aa, Homo sapiens
  CDR3 for beta chain variable domain of TCR clone 390613 (TRBV18, TRBJ2-3)
CASSAAGTSGSTDTQYF

SEQ ID NO: 781227 - protein, 16 aa, Homo sapiens
  CDR3 for alpha chain variable domain of TCR clone 390614 (TRAV30, TRAJ24)
CGTKIVDADSWGKFQF

SEQ ID NO: 781228 - protein, 13 aa, Homo sapiens
  CDR3 for beta chain variable domain of TCR clone 390614 (TRBV19, TRBJ1-2)
CASSVPGQDGYTF

SEQ ID NO: 781229 - protein, 14 aa, Homo sapiens
  CDR3 for alpha chain variable domain of TCR clone 390615 (TRAV1-2, TRAJ16)
CAVNRFSYGQKLLF

SEQ ID NO: 781230 - protein, 15 aa, Homo sapiens
  CDR3 for beta chain variable domain of TCR clone 390615 (TRBV20-1, TRBJ2-2)
SAVPRTPRTPGSCFF

SEQ ID NO: 781231 - protein, 12 aa, Homo sapiens
  CDR3 for alpha chain variable domain of TCR clone 390616 (TRAV36/DV7, TRAJ37)
CACYGNTGKLIF

SEQ ID NO: 781232 - protein, 19 aa, Homo sapiens
  CDR3 for beta chain variable domain of TCR clone 390616 (TRBV5-1, TRBJ1-6)
CASSADRETGRSYNSPLHF

SEQ ID NO: 781233 - protein, 13 aa, Homo sapiens
  CDR3 for alpha chain variable domain of TCR clone 390617 (TRAV22, TRAJ29)
CAVGGSGNTPLVF

SEQ ID NO: 781234 - protein, 13 aa, Homo sapiens
  CDR3 for beta chain variable domain of TCR clone 390617 (TRBV4-3, TRBJ1-1)
CASSQAGNTVAFF

SEQ ID NO: 781235 - protein, 14 aa, Homo sapiens
  CDR3 for alpha chain variable domain of TCR clone 390618 (TRAV12-3, TRAJ10)
SHLPLTGGGNKLTF

SEQ ID NO: 781236 - protein, 15 aa, Homo sapiens
  CDR3 for beta chain variable domain of TCR clone 390618 (TRBV7-3, TRBJ2-2)
CASSETGQGTGGLFF

SEQ ID NO: 781237 - protein, 14 aa, Homo sapiens
  CDR3 for alpha chain variable domain of TCR clone 390619 (TRAV8-3, TRAJ7)
CAAIELYGNNRIAF

SEQ ID NO: 781238 - protein, 15 aa, Homo sapiens
  CDR3 for beta chain variable domain of TCR clone 390619 (TRBV3-1, TRBJ2-1)
CASSTGDTNYNEQFF

SEQ ID NO: 781239 - protein, 13 aa, Homo sapiens
  CDR3 for alpha chain variable domain of TCR clone 390620 (TRAV2, TRAJ40)
CAVVTSGTYKYIF

SEQ ID NO: 781240 - protein, 14 aa, Homo sapiens
  CDR3 for beta chain variable domain of TCR clone 390620 (TRBV11-3, TRBJ2-3)
CARSLAASTDTQYF

SEQ ID NO: 781241 - protein, 16 aa, Homo sapiens
  CDR3 for alpha chain variable domain of TCR clone 390621 (TRAV4, TRAJ22)
CLVGDLYSGSARQLTF

SEQ ID NO: 781242 - protein, 16 aa, Homo sapiens
  CDR3 for beta chain variable domain of TCR clone 390621 (TRBV28, TRBJ2-7)
CASSSGTSGRGYEQYF

SEQ ID NO: 781243 - protein, 12 aa, Homo sapiens
  CDR3 for alpha chain variable domain of TCR clone 390622 (TRAV29/DV5, TRAJ49)
CSATATGNQFYF

SEQ ID NO: 781244 - protein, 12 aa, Homo sapiens
  CDR3 for beta chain variable domain of TCR clone 390622 (TRBV12-4, TRBJ2-7)
CASSLGGYEQYF

SEQ ID NO: 781245 - protein, 13 aa, Homo sapiens
  CDR3 for alpha chain variable domain of TCR clone 390623 (TRAV3, TRAJ21)
CAVREPDFNKFYF

SEQ ID NO: 781246 - protein, 14 aa, Homo sapiens
  CDR3 for beta chain variable domain of TCR clone 390623 (TRBV19, TRBJ2-1)
CASPTVVLSGEQFF

SEQ ID NO: 781247 - protein, 13 aa, Homo sapiens
  CDR3 for alpha chain variable domain of TCR clone 390624 (TRAV21, TRAJ27)
CAARPGNAGKSPV

SEQ ID NO: 781248 - protein, 14 aa, Homo sapiens
  CDR3 for beta chain variable domain of TCR clone 390624 (TRBV7-6, TRBJ2-3)
CASSLGTVTDTQYF

SEQ ID NO: 781249 - protein, 11 aa, Homo sapiens
  CDR3 for alpha chain variable domain of TCR clone 390625 (TRAV25, TRAJ34)
CAGPSTDKLIF

SEQ ID NO: 781250 - protein, 14 aa, Homo sapiens
  CDR3 for beta chain variable domain of TCR clone 390625 (TRBV25-1, TRBJ1-1)
CASTHLGGNTEAFF

SEQ ID NO: 781251 - protein, 13 aa, Homo sapiens
  CDR3 for alpha chain variable domain of TCR clone 390626 (TRAV12-3, TRAJ13)
CAMTSGGYQKVTF

SEQ ID NO: 781252 - protein, 16 aa, Homo sapiens
  CDR3 for beta chain variable domain of TCR clone 390626 (TRBV24-1, TRBJ2-3)
CATSDPGTGATDTQYF

SEQ ID NO: 781253 - protein, 16 aa, Homo sapiens
  CDR3 for alpha chain variable domain of TCR clone 390627 (TRAV26-1, TRAJ31)
CIVRPPVLNNNARLMF

SEQ ID NO: 781254 - protein, 11 aa, Homo sapiens
  CDR3 for beta chain variable domain of TCR clone 390627 (TRBV7-8, TRBJ2-7)
CASSLSLQQYF

SEQ ID NO: 781255 - protein, 16 aa, Homo sapiens
  CDR3 for alpha chain variable domain of TCR clone 390628 (TRAV29/DV5, TRAJ36)
CAASAHYQSGANNLFF

SEQ ID NO: 781256 - protein, 16 aa, Homo sapiens
  CDR3 for beta chain variable domain of TCR clone 390628 (TRBV4-2, TRBJ2-3)
CASSQELAEDTDTQYF

SEQ ID NO: 781257 - protein, 14 aa, Homo sapiens
  CDR3 for alpha chain variable domain of TCR clone 390629 (TRAV8-6, TRAJ40)
CAVSVSSGTYKYIF

SEQ ID NO: 781258 - protein, 15 aa, Homo sapiens
  CDR3 for beta chain variable domain of TCR clone 390629 (TRBV20-1, TRBJ2-7)
CSARSPGLAGDEQYF

SEQ ID NO: 781259 - protein, 10 aa, Homo sapiens
  CDR3 for alpha chain variable domain of TCR clone 390630 (TRAV21, TRAJ20)
CAVNVGRLHA

SEQ ID NO: 781260 - protein, 15 aa, Homo sapiens
  CDR3 for beta chain variable domain of TCR clone 390630 (TRBV6-1, TRBJ2-5)
CASSEFPLMGETQYF

SEQ ID NO: 781261 - protein, 16 aa, Homo sapiens
  CDR3 for alpha chain variable domain of TCR clone 390631 (TRAV12-3, TRAJ20)
CAMDKLSFGAGTTVTV

SEQ ID NO: 781262 - protein, 14 aa, Homo sapiens
  CDR3 for beta chain variable domain of TCR clone 390631 (TRBV6-1, TRBJ1-3)
CANVQGGGGNTIYF

SEQ ID NO: 781263 - protein, 14 aa, Homo sapiens
  CDR3 for alpha chain variable domain of TCR clone 390632 (TRAV17, TRAJ22)
CATSPSDSAWQLTF

SEQ ID NO: 781264 - protein, 15 aa, Homo sapiens
  CDR3 for beta chain variable domain of TCR clone 390632 (TRBV4-1, TRBJ2-5)
CASSQWDLYQETQYF

SEQ ID NO: 781265 - protein, 15 aa, Homo sapiens
  CDR3 for alpha chain variable domain of TCR clone 390633 (TRAV21, TRAJ52)
CAVMGGGTSYGKLTF

SEQ ID NO: 781266 - protein, 15 aa, Homo sapiens
  CDR3 for beta chain variable domain of TCR clone 390633 (TRBV18, TRBJ1-5)
CASSPSDRSNQHQHF

SEQ ID NO: 781267 - protein, 14 aa, Homo sapiens
  CDR3 for alpha chain variable domain of TCR clone 390634 (TRAV12-2, TRAJ11)
CAVEGGSGYSTLTF

SEQ ID NO: 781268 - protein, 13 aa, Homo sapiens
  CDR3 for beta chain variable domain of TCR clone 390634 (TRBV7-7, TRBJ2-5)
CASSRSGQETQYF

SEQ ID NO: 781269 - protein, 18 aa, Homo sapiens
  CDR3 for alpha chain variable domain of TCR clone 390635 (TRAV21, TRAJ52)
CAVSPSPAGGTSFGKLTF

SEQ ID NO: 781270 - protein, 13 aa, Homo sapiens
  CDR3 for beta chain variable domain of TCR clone 390635 (TRBV20-1, TRBJ1-1)
CSARVGGNTEAFF

SEQ ID NO: 781271 - protein, 15 aa, Homo sapiens
  CDR3 for alpha chain variable domain of TCR clone 390636 (TRAV21, TRAJ10)
CAVPLLTGGGNKLTF

SEQ ID NO: 781272 - protein, 13 aa, Homo sapiens
  CDR3 for beta chain variable domain of TCR clone 390636 (TRBV11-2, TRBJ2-5)
CASSFSSQETQYF

SEQ ID NO: 781273 - protein, 15 aa, Homo sapiens
  CDR3 for alpha chain variable domain of TCR clone 390637 (TRAV1-1, TRAJ5)
CAVRHMDTGRRELTF

SEQ ID NO: 781274 - protein, 17 aa, Homo sapiens
  CDR3 for beta chain variable domain of TCR clone 390637 (TRBV28, TRBJ2-7)
CASSPGLAGGDSYEQYF

SEQ ID NO: 781275 - protein, 13 aa, Homo sapiens
  CDR3 for alpha chain variable domain of TCR clone 390638 (TRAV13-1, TRAJ6)
CAASSGGSYIPTF

SEQ ID NO: 781276 - protein, 15 aa, Homo sapiens
  CDR3 for beta chain variable domain of TCR clone 390638 (TRBV12-3, TRBJ2-5)
CASSPPTGLQETQYF

SEQ ID NO: 781277 - protein, 13 aa, Homo sapiens
  CDR3 for alpha chain variable domain of TCR clone 390639 (TRAV17, TRAJ4)
CATKSGGYDKLNF

SEQ ID NO: 781278 - protein, 14 aa, Homo sapiens
  CDR3 for beta chain variable domain of TCR clone 390639 (TRBV20-1, TRBJ1-5)
CSARDDRGNQPQHF

SEQ ID NO: 781279 - protein, 13 aa, Homo sapiens
  CDR3 for alpha chain variable domain of TCR clone 390640 (TRAV13-1, TRAJ33)
CAASKAGNYQLIG

SEQ ID NO: 781280 - protein, 15 aa, Homo sapiens
  CDR3 for beta chain variable domain of TCR clone 390640 (TRBV7-9, TRBJ1-6)
CASSSPGRGNSPLHF

SEQ ID NO: 781281 - protein, 15 aa, Homo sapiens
  CDR3 for alpha chain variable domain of TCR clone 390641 (TRAV8-2, TRAJ40)
CVALGTTSVTYKYIF

SEQ ID NO: 781282 - protein, 16 aa, Homo sapiens
  CDR3 for beta chain variable domain of TCR clone 390641 (TRBV7-3, TRBJ2-1)
CASSLEGYRSYNEQFF

SEQ ID NO: 781283 - protein, 21 aa, Homo sapiens
  CDR3 for alpha chain variable domain of TCR clone 390642 (TRAV2, TRAJ20)
AAHPPGAGGRCCCLPRLKLSF

SEQ ID NO: 781284 - protein, 12 aa, Homo sapiens
  CDR3 for beta chain variable domain of TCR clone 390642 (TRBV11-2, TRBJ2-2)
CASSLGGGELFF

SEQ ID NO: 781285 - protein, 12 aa, Homo sapiens
  CDR3 for alpha chain variable domain of TCR clone 390643 (TRAV3, TRAJ43)
CAVRDPNNDMRF

SEQ ID NO: 781286 - protein, 12 aa, Homo sapiens
  CDR3 for beta chain variable domain of TCR clone 390643 (TRBV6-3, TRBJ2-1)
CASSGSYNEQFF

SEQ ID NO: 781287 - protein, 15 aa, Homo sapiens
  CDR3 for alpha chain variable domain of TCR clone 390644 (TRAV8-1, TRAJ6)
CAVNTPPGGSYIPTF

SEQ ID NO: 781288 - protein, 13 aa, Homo sapiens
  CDR3 for beta chain variable domain of TCR clone 390644 (TRBV4-1, TRBJ2-1)
CASSQEVQYEQFF

SEQ ID NO: 781289 - protein, 15 aa, Homo sapiens
  CDR3 for alpha chain variable domain of TCR clone 390645 (TRAV23/DV6, )
CAADIQNPDPAVYQL

SEQ ID NO: 781290 - protein, 14 aa, Homo sapiens
  CDR3 for beta chain variable domain of TCR clone 390645 (TRBV5-6, TRBJ1-6)
CASSFAGHNSPLHF

SEQ ID NO: 781291 - protein, 12 aa, Homo sapiens
  CDR3 for alpha chain variable domain of TCR clone 390646 (TRAV21, TRAJ33)
CAKMDSNYQLIW

SEQ ID NO: 781292 - protein, 15 aa, Homo sapiens
  CDR3 for beta chain variable domain of TCR clone 390646 (TRBV19, TRBJ2-1)
CASSINREPSHEQFF

SEQ ID NO: 781293 - protein, 15 aa, Homo sapiens
  CDR3 for alpha chain variable domain of TCR clone 390647 (TRAV13-2, TRAJ40)
CAENRSRQGTYKYIF

SEQ ID NO: 781294 - protein, 15 aa, Homo sapiens
  CDR3 for beta chain variable domain of TCR clone 390647 (TRBV19, TRBJ2-1)
CAGSMGWNSNNEQFF

SEQ ID NO: 781295 - protein, 14 aa, Homo sapiens
  CDR3 for alpha chain variable domain of TCR clone 390648 (TRAV26-1, TRAJ35)
CIVRVKALGMCCIA

SEQ ID NO: 781296 - protein, 16 aa, Homo sapiens
  CDR3 for beta chain variable domain of TCR clone 390648 (TRBV7-3, TRBJ2-2)
CASSLKRGTLSGELFF

SEQ ID NO: 781297 - protein, 14 aa, Homo sapiens
  CDR3 for alpha chain variable domain of TCR clone 390649 (TRAV35, TRAJ22)
CAGLRPGSARQLTF

SEQ ID NO: 781298 - protein, 14 aa, Homo sapiens
  CDR3 for beta chain variable domain of TCR clone 390649 (TRBV28, TRBJ1-5)
CASSGQALYQPQHF

SEQ ID NO: 781299 - protein, 13 aa, Homo sapiens
  CDR3 for alpha chain variable domain of TCR clone 390650 (TRAV17, TRAJ54)
CATSWGGSQKLVF

SEQ ID NO: 781300 - protein, 15 aa, Homo sapiens
  CDR3 for beta chain variable domain of TCR clone 390650 (TRBV4-3, TRBJ2-3)
FASSPSLLSTDTQYF

SEQ ID NO: 781301 - protein, 18 aa, Homo sapiens
  CDR3 for alpha chain variable domain of TCR clone 390651 (TRAV13-1, TRAJ52)
CAAKNPNAGGPIYGKLTF

SEQ ID NO: 781302 - protein, 15 aa, Homo sapiens
  CDR3 for beta chain variable domain of TCR clone 390651 (TRBV6-1, TRBJ2-3)
CASSERGGITDTQYF

SEQ ID NO: 781303 - protein, 14 aa, Homo sapiens
  CDR3 for alpha chain variable domain of TCR clone 390652 (TRAV26-1, TRAJ38)
CIADNAGNNRKLTC

SEQ ID NO: 781304 - protein, 13 aa, Homo sapiens
  CDR3 for beta chain variable domain of TCR clone 390652 (TRBV20-1, TRBJ1-1)
CSARGGGNTEAFF

SEQ ID NO: 781305 - protein, 17 aa, Homo sapiens
  CDR3 for alpha chain variable domain of TCR clone 390653 (TRAV3, TRAJ38)
CAVRDCLNAGNNRKLIW

SEQ ID NO: 781306 - protein, 14 aa, Homo sapiens
  CDR3 for beta chain variable domain of TCR clone 390653 (TRBV5-5, TRBJ1-5)
CASSGQGVDQPHHF

SEQ ID NO: 781307 - protein, 12 aa, Homo sapiens
  CDR3 for alpha chain variable domain of TCR clone 390654 (TRAV3, TRAJ43)
CAVRDPDNDMRF

SEQ ID NO: 781308 - protein, 15 aa, Homo sapiens
  CDR3 for beta chain variable domain of TCR clone 390654 (TRBV7-7, TRBJ1-5)
CASSLGTGFDQPQHF

SEQ ID NO: 781309 - protein, 12 aa, Homo sapiens
  CDR3 for alpha chain variable domain of TCR clone 390655 (TRAV3, TRAJ20)
CAVRDGDYKLSF

SEQ ID NO: 781310 - protein, 11 aa, Homo sapiens
  CDR3 for beta chain variable domain of TCR clone 390655 (TRBV11-2, TRBJ2-2)
CASSLPGEMFF

SEQ ID NO: 781311 - protein, 13 aa, Homo sapiens
  CDR3 for alpha chain variable domain of TCR clone 390656 (TRAV9-2, TRAJ53)
RALSGGSNYKLTF

SEQ ID NO: 781312 - protein, 16 aa, Homo sapiens
  CDR3 for beta chain variable domain of TCR clone 390656 (TRBV20-1, TRBJ2-1)
CSALTWTSGSYNEQFF

SEQ ID NO: 781313 - protein, 16 aa, Homo sapiens
  CDR3 for alpha chain variable domain of TCR clone 390657 (TRAV12-3, TRAJ53)
CAMSPGRGGSNYKLTF

SEQ ID NO: 781314 - protein, 15 aa, Homo sapiens
  CDR3 for beta chain variable domain of TCR clone 390657 (TRBV18, TRBJ2-7)
CASSPSSTGNYEQYF

SEQ ID NO: 781315 - protein, 12 aa, Homo sapiens
  CDR3 for alpha chain variable domain of TCR clone 390658 (TRAV1-2, TRAJ36)
CALGRGANNLFF

SEQ ID NO: 781316 - protein, 17 aa, Homo sapiens
  CDR3 for beta chain variable domain of TCR clone 390658 (TRBV13, TRBJ2-3)
CASSLSRVAGGRNTQYF

SEQ ID NO: 781317 - protein, 13 aa, Homo sapiens
  CDR3 for alpha chain variable domain of TCR clone 390659 (TRAV13-1, TRAJ5)
CAAEHTGRRALTF

SEQ ID NO: 781318 - protein, 14 aa, Homo sapiens
  CDR3 for beta chain variable domain of TCR clone 390659 (TRBV7-2, TRBJ2-1)
CASSLGVGYNEQFF

SEQ ID NO: 781319 - protein, 16 aa, Homo sapiens
  CDR3 for alpha chain variable domain of TCR clone 390660 (TRAV12-2, TRAJ6)
CAAPLAGSGGSSIPTF

SEQ ID NO: 781320 - protein, 10 aa, Homo sapiens
  CDR3 for beta chain variable domain of TCR clone 390660 (TRBV28, TRBJ1-2)
CASSSDRTVF

SEQ ID NO: 781321 - protein, 15 aa, Homo sapiens
  CDR3 for alpha chain variable domain of TCR clone 390661 (TRAV21, TRAJ53)
CATLNSGGSNYKLTF

SEQ ID NO: 781322 - protein, 14 aa, Homo sapiens
  CDR3 for beta chain variable domain of TCR clone 390661 (TRBV27, TRBJ2-2)
CASRPGVTTGELFF

SEQ ID NO: 781323 - protein, 12 aa, Homo sapiens
  CDR3 for alpha chain variable domain of TCR clone 390662 (TRAV30, TRAJ39)
CGRGNAGNILTF

SEQ ID NO: 781324 - protein, 12 aa, Homo sapiens
  CDR3 for beta chain variable domain of TCR clone 390662 (TRBV12-4, TRBJ2-1)
CASRQTENEQFF

SEQ ID NO: 781325 - protein, 15 aa, Homo sapiens
  CDR3 for alpha chain variable domain of TCR clone 390663 (TRAV12-2, TRAJ9)
CAVNNERTGGFNTIF

SEQ ID NO: 781326 - protein, 14 aa, Homo sapiens
  CDR3 for beta chain variable domain of TCR clone 390663 (TRBV4-1, TRBJ1-4)
CASSQERKNEKLFF

SEQ ID NO: 781327 - protein, 13 aa, Homo sapiens
  CDR3 for alpha chain variable domain of TCR clone 390664 (TRAV27, TRAJ6)
CAGGTRGSYIPTF

SEQ ID NO: 781328 - protein, 14 aa, Homo sapiens
  CDR3 for beta chain variable domain of TCR clone 390664 (TRBV7-9, TRBJ2-3)
CASSLEDGTDTQYF

SEQ ID NO: 781329 - protein, 12 aa, Homo sapiens
  CDR3 for alpha chain variable domain of TCR clone 390665 (TRAV26-1, TRAJ26)
CIVYNYGQNFVF

SEQ ID NO: 781330 - protein, 19 aa, Homo sapiens
  CDR3 for beta chain variable domain of TCR clone 390665 (TRBV25-1, TRBJ2-2)
CAILVYRVDRGRKTGELFF

SEQ ID NO: 781331 - protein, 11 aa, Homo sapiens
  CDR3 for alpha chain variable domain of TCR clone 390666 (TRAV21, TRAJ41)
CAVRSGYALNF

SEQ ID NO: 781332 - protein, 13 aa, Homo sapiens
  CDR3 for beta chain variable domain of TCR clone 390666 (TRBV7-9, TRBJ1-2)
CASSLKHNYGYTF

SEQ ID NO: 781333 - protein, 13 aa, Homo sapiens
  CDR3 for alpha chain variable domain of TCR clone 390667 (TRAV8-3, TRAJ36)
CAVGATGANNLFF

SEQ ID NO: 781334 - protein, 15 aa, Homo sapiens
  CDR3 for beta chain variable domain of TCR clone 390667 (TRBV7-2, TRBJ2-3)
CASSLTGTSTDTQYF

SEQ ID NO: 781335 - protein, 14 aa, Homo sapiens
  CDR3 for alpha chain variable domain of TCR clone 390668 (TRAV8-3, TRAJ4)
CAVGASGGYNKLIF

SEQ ID NO: 781336 - protein, 16 aa, Homo sapiens
  CDR3 for beta chain variable domain of TCR clone 390668 (TRBV2, TRBJ2-1)
CASSVGGSLSYNEQCF

SEQ ID NO: 781337 - protein, 14 aa, Homo sapiens
  CDR3 for alpha chain variable domain of TCR clone 390669 (TRAV12-2, TRAJ13)
CAVKKTGGYQKVTF

SEQ ID NO: 781338 - protein, 14 aa, Homo sapiens
  CDR3 for beta chain variable domain of TCR clone 390669 (TRBV19, TRBJ2-1)
CASPTFFLSSEQFF

SEQ ID NO: 781339 - protein, 13 aa, Homo sapiens
  CDR3 for alpha chain variable domain of TCR clone 390670 (TRAV13-2, TRAJ13)
CAERPGGYQKVTF

SEQ ID NO: 781340 - protein, 16 aa, Homo sapiens
  CDR3 for beta chain variable domain of TCR clone 390670 (TRBV18, TRBJ2-5)
CAGSPPSSGGAKTQYF

SEQ ID NO: 781341 - protein, 16 aa, Homo sapiens
  CDR3 for alpha chain variable domain of TCR clone 390671 (TRAV23/DV6, TRAJ48)
CAASGVVKFENEKLTF

SEQ ID NO: 781342 - protein, 15 aa, Homo sapiens
  CDR3 for beta chain variable domain of TCR clone 390671 (TRBV7-9, TRBJ2-1)
CASSLGWGRANEQFF

SEQ ID NO: 781343 - protein, 15 aa, Homo sapiens
  CDR3 for alpha chain variable domain of TCR clone 390672 (TRAV20, TRAJ58)
CAVQDLETSGSRLNF

SEQ ID NO: 781344 - protein, 13 aa, Homo sapiens
  CDR3 for beta chain variable domain of TCR clone 390672 (TRBV20-1, TRBJ1-1)
CSARGGGNTEAFF

SEQ ID NO: 781345 - protein, 14 aa, Homo sapiens
  CDR3 for alpha chain variable domain of TCR clone 390673 (TRAV9-2, TRAJ39)
CALYIYHAGNMLTF

SEQ ID NO: 781346 - protein, 13 aa, Homo sapiens
  CDR3 for beta chain variable domain of TCR clone 390673 (TRBV10-3, TRBJ2-7)
CASKLAVNYEQYF

SEQ ID NO: 781347 - protein, 14 aa, Homo sapiens
  CDR3 for alpha chain variable domain of TCR clone 390674 (TRAV35, TRAJ54)
CAGYLIQGAQKLVF

SEQ ID NO: 781348 - protein, 16 aa, Homo sapiens
  CDR3 for beta chain variable domain of TCR clone 390674 (TRBV7-3, TRBJ2-2)
CASSLKRGTLSGELFF

SEQ ID NO: 781349 - protein, 11 aa, Homo sapiens
  CDR3 for alpha chain variable domain of TCR clone 390675 (TRAV2, TRAJ13)
CASGGYQKVTF

SEQ ID NO: 781350 - protein, 13 aa, Homo sapiens
  CDR3 for beta chain variable domain of TCR clone 390675 (TRBV6-1, TRBJ2-1)
CAGMDPTNNEQFF

SEQ ID NO: 781351 - protein, 16 aa, Homo sapiens
  CDR3 for alpha chain variable domain of TCR clone 390676 (TRAV8-3, TRAJ52)
CAVQPAGGTSYGKLTF

SEQ ID NO: 781352 - protein, 15 aa, Homo sapiens
  CDR3 for beta chain variable domain of TCR clone 390676 (TRBV11-2, TRBJ2-7)
CASSFAGGVATEQYF

SEQ ID NO: 781353 - protein, 14 aa, Homo sapiens
  CDR3 for alpha chain variable domain of TCR clone 390677 (TRAV13-1, TRAJ44)
CAGKATGTASKLTF

SEQ ID NO: 781354 - protein, 13 aa, Homo sapiens
  CDR3 for beta chain variable domain of TCR clone 390677 (TRBV5-5, TRBJ1-2)
CASSFWRGEDYTF

SEQ ID NO: 781355 - protein, 14 aa, Homo sapiens
  CDR3 for alpha chain variable domain of TCR clone 390678 (TRAV1-2, TRAJ8)
CAVREDTGFQKLGF

SEQ ID NO: 781356 - protein, 12 aa, Homo sapiens
  CDR3 for beta chain variable domain of TCR clone 390678 (TRBV28, TRBJ2-3)
CTSSLYRDTQYF

SEQ ID NO: 781357 - protein, 16 aa, Homo sapiens
  CDR3 for alpha chain variable domain of TCR clone 390679 (TRAV12-3, TRAJ53)
CAMSPGSGGSNYKLTF

SEQ ID NO: 781358 - protein, 12 aa, Homo sapiens
  CDR3 for beta chain variable domain of TCR clone 390679 (TRBV5-7, TRBJ1-1)
CASSLGRGKAFF

SEQ ID NO: 781359 - protein, 18 aa, Homo sapiens
  CDR3 for alpha chain variable domain of TCR clone 390680 (TRAV13-1, TRAJ52)
CAASKRSAGGTSYGKLTF

SEQ ID NO: 781360 - protein, 14 aa, Homo sapiens
  CDR3 for beta chain variable domain of TCR clone 390680 (TRBV5-1, TRBJ2-7)
CASSRGESLYEQYF

SEQ ID NO: 781361 - protein, 15 aa, Homo sapiens
  CDR3 for alpha chain variable domain of TCR clone 390681 (TRAV25, TRAJ23)
CALAPNYNQGGKLIF

SEQ ID NO: 781362 - protein, 15 aa, Homo sapiens
  CDR3 for beta chain variable domain of TCR clone 390681 (TRBV27, TRBJ2-1)
CASSNGGGSSNEQFF

SEQ ID NO: 781363 - protein, 14 aa, Homo sapiens
  CDR3 for alpha chain variable domain of TCR clone 390682 (TRAV17, TRAJ31)
CATDAEDNNARLMF

SEQ ID NO: 781364 - protein, 13 aa, Homo sapiens
  CDR3 for beta chain variable domain of TCR clone 390682 (TRBV7-3, TRBJ1-1)
CASSQDWGAEAFF

SEQ ID NO: 781365 - protein, 15 aa, Homo sapiens
  CDR3 for alpha chain variable domain of TCR clone 390683 (TRAV17, TRAJ54)
CATTRSEQGAQKLVF

SEQ ID NO: 781366 - protein, 16 aa, Homo sapiens
  CDR3 for beta chain variable domain of TCR clone 390683 (TRBV12-3, TRBJ2-3)
CASSLRLAEATDTQYF

SEQ ID NO: 781367 - protein, 12 aa, Homo sapiens
  CDR3 for alpha chain variable domain of TCR clone 390684 (TRAV8-3, TRAJ41)
CAVALSGYALNF

SEQ ID NO: 781368 - protein, 17 aa, Homo sapiens
  CDR3 for beta chain variable domain of TCR clone 390684 (TRBV7-3, TRBJ2-2)
CASSLCGTSGGTGELFF

SEQ ID NO: 781369 - protein, 13 aa, Homo sapiens
  CDR3 for alpha chain variable domain of TCR clone 390685 (TRAV3, TRAJ3)
CAVAYSSSSKIIF

SEQ ID NO: 781370 - protein, 16 aa, Homo sapiens
  CDR3 for beta chain variable domain of TCR clone 390685 (TRBV5-1, TRBJ2-3)
CASSLGLAVYTDTQYF

SEQ ID NO: 781371 - protein, 13 aa, Homo sapiens
  CDR3 for alpha chain variable domain of TCR clone 390686 (TRAV21, TRAJ27)
CAARSGNAGKSTF

SEQ ID NO: 781372 - protein, 13 aa, Homo sapiens
  CDR3 for beta chain variable domain of TCR clone 390686 (TRBV18, TRBJ2-7)
CASQSGGGYEQYF

SEQ ID NO: 781373 - protein, 11 aa, Homo sapiens
  CDR3 for alpha chain variable domain of TCR clone 390687 (TRAV3, TRAJ21)
CAVGNFNKFYF

SEQ ID NO: 781374 - protein, 16 aa, Homo sapiens
  CDR3 for beta chain variable domain of TCR clone 390687 (TRBV19, TRBJ2-1)
CASSKAGARSYNEQFF

SEQ ID NO: 781375 - protein, 13 aa, Homo sapiens
  CDR3 for alpha chain variable domain of TCR clone 390688 (TRAV21, TRAJ57)
CAVTQGGSEKLVF

SEQ ID NO: 781376 - protein, 18 aa, Homo sapiens
  CDR3 for beta chain variable domain of TCR clone 390688 (TRBV4-3, TRBJ2-6)
CASSRDIQGGPGANVLTF

SEQ ID NO: 781377 - protein, 12 aa, Homo sapiens
  CDR3 for alpha chain variable domain of TCR clone 390689 (TRAV3, TRAJ27)
CAVRDKAGKSTF

SEQ ID NO: 781378 - protein, 15 aa, Homo sapiens
  CDR3 for beta chain variable domain of TCR clone 390689 (TRBV19, TRBJ2-4)
CASRGPRRGENIQYF

SEQ ID NO: 781379 - protein, 14 aa, Homo sapiens
  CDR3 for alpha chain variable domain of TCR clone 390690 (TRAV27, TRAJ23)
CAGLSYNQGGKLIF

SEQ ID NO: 781380 - protein, 15 aa, Homo sapiens
  CDR3 for beta chain variable domain of TCR clone 390690 (TRBV20-1, TRBJ2-7)
CSARDRVSGMNEQYF

SEQ ID NO: 781381 - protein, 13 aa, Homo sapiens
  CDR3 for alpha chain variable domain of TCR clone 390691 (TRAV3, TRAJ3)
CAVADSSASKIIF

SEQ ID NO: 781382 - protein, 16 aa, Homo sapiens
  CDR3 for beta chain variable domain of TCR clone 390691 (TRBV5-1, TRBJ2-3)
CACSLGLAVYTDTQYF

SEQ ID NO: 781383 - protein, 15 aa, Homo sapiens
  CDR3 for alpha chain variable domain of TCR clone 390692 (TRAV2, TRAJ11)
CAVGGRNSGYRTLTF

SEQ ID NO: 781384 - protein, 12 aa, Homo sapiens
  CDR3 for beta chain variable domain of TCR clone 390692 (TRBV28, TRBJ2-7)
CASSFSSYEQYF

SEQ ID NO: 781385 - protein, 16 aa, Homo sapiens
  CDR3 for alpha chain variable domain of TCR clone 390693 (TRAV3, TRAJ6)
CAVRRTPSGGSYITTF

SEQ ID NO: 781386 - protein, 14 aa, Homo sapiens
  CDR3 for beta chain variable domain of TCR clone 390693 (TRBV3-1, TRBJ1-5)
CASSTGDSNQPQHF

SEQ ID NO: 781387 - protein, 13 aa, Homo sapiens
  CDR3 for alpha chain variable domain of TCR clone 390694 (TRAV5, TRAJ30)
CAEIANRDDQIIF

SEQ ID NO: 781388 - protein, 14 aa, Homo sapiens
  CDR3 for beta chain variable domain of TCR clone 390694 (TRBV4-1, TRBJ2-2)
CASSQAVNTGELFF

SEQ ID NO: 781389 - protein, 13 aa, Homo sapiens
  CDR3 for alpha chain variable domain of TCR clone 390695 (TRAV21, TRAJ15)
CAVANQAGTALIF

SEQ ID NO: 781390 - protein, 15 aa, Homo sapiens
  CDR3 for beta chain variable domain of TCR clone 390695 (TRBV27, TRBJ2-7)
CACSLGSSVSPEQYF

SEQ ID NO: 781391 - protein, 17 aa, Homo sapiens
  CDR3 for alpha chain variable domain of TCR clone 390696 (TRAV3, TRAJ28)
CAVREAYSGAGSCQLTF

SEQ ID NO: 781392 - protein, 18 aa, Homo sapiens
  CDR3 for beta chain variable domain of TCR clone 390696 (TRBV27, TRBJ2-1)
CASGNRAVGVGSKNEQFF

SEQ ID NO: 781393 - protein, 13 aa, Homo sapiens
  CDR3 for alpha chain variable domain of TCR clone 390697 (TRAV12-2, TRAJ39)
CAVNNNAGNMLTF

SEQ ID NO: 781394 - protein, 17 aa, Homo sapiens
  CDR3 for beta chain variable domain of TCR clone 390697 (TRBV7-8, TRBJ2-6)
CASSAGTGGAGANVLTF

SEQ ID NO: 781395 - protein, 14 aa, Homo sapiens
  CDR3 for alpha chain variable domain of TCR clone 390698 (TRAV12-2, TRAJ17)
CAVLFKAAGNKLTI

SEQ ID NO: 781396 - protein, 14 aa, Homo sapiens
  CDR3 for beta chain variable domain of TCR clone 390698 (TRBV4-1, TRBJ2-2)
CASSQAVNTGELFF

SEQ ID NO: 781397 - protein, 11 aa, Homo sapiens
  CDR3 for alpha chain variable domain of TCR clone 390699 (TRAV27, TRAJ45)
CAGAQEEVLTD

SEQ ID NO: 781398 - protein, 13 aa, Homo sapiens
  CDR3 for beta chain variable domain of TCR clone 390699 (TRBV7-7, TRBJ2-5)
CASSRSGQETQYL

SEQ ID NO: 781399 - protein, 17 aa, Homo sapiens
  CDR3 for alpha chain variable domain of TCR clone 390700 (TRAV3, TRAJ12)
CAVRDGGRMDSSYKLIF

SEQ ID NO: 781400 - protein, 16 aa, Homo sapiens
  CDR3 for beta chain variable domain of TCR clone 390700 (TRBV9, TRBJ2-2)
CASSAMGKGNTGELFY

SEQ ID NO: 781401 - protein, 23 aa, Homo sapiens
  CDR3 for alpha chain variable domain of TCR clone 390701 (TRAV23/DV6, TRAJ15)
PSLETQPPNSVQPSQPAGTALIF

SEQ ID NO: 781402 - protein, 14 aa, Homo sapiens
  CDR3 for beta chain variable domain of TCR clone 390701 (TRBV7-9, TRBJ1-2)
CASSRQGANYGYTF

SEQ ID NO: 781403 - protein, 14 aa, Homo sapiens
  CDR3 for alpha chain variable domain of TCR clone 390702 (TRAV26-1, TRAJ38)
CIADNAGNNRKLIW

SEQ ID NO: 781404 - protein, 15 aa, Homo sapiens
  CDR3 for beta chain variable domain of TCR clone 390702 (TRBV2, TRBJ2-1)
CASSEARSAYNEQFF

SEQ ID NO: 781405 - protein, 10 aa, Homo sapiens
  CDR3 for alpha chain variable domain of TCR clone 390703 (TRAV23/DV6, TRAJ57)
CAASPTLSQG

SEQ ID NO: 781406 - protein, 14 aa, Homo sapiens
  CDR3 for beta chain variable domain of TCR clone 390703 (TRBV19, TRBJ2-1)
CASSKDRGQDEQFF

SEQ ID NO: 781407 - protein, 12 aa, Homo sapiens
  CDR3 for alpha chain variable domain of TCR clone 390704 (TRAV25, TRAJ35)
CAGIGFGNVLHC

SEQ ID NO: 781408 - protein, 12 aa, Homo sapiens
  CDR3 for beta chain variable domain of TCR clone 390704 (TRBV6-3, TRBJ2-7)
CASSRQGYEQYL

SEQ ID NO: 781409 - protein, 14 aa, Homo sapiens
  CDR3 for alpha chain variable domain of TCR clone 390705 (TRAV8-4, TRAJ54)
CAVSEVLGAQKLVF

SEQ ID NO: 781410 - protein, 17 aa, Homo sapiens
  CDR3 for beta chain variable domain of TCR clone 390705 (TRBV4-1, TRBJ1-4)
CASSPDGPRGVEEKLFF

SEQ ID NO: 781411 - protein, 12 aa, Homo sapiens
  CDR3 for alpha chain variable domain of TCR clone 390706 (TRAV3, TRAJ20)
CAVRDHDYRLSF

SEQ ID NO: 781412 - protein, 13 aa, Homo sapiens
  CDR3 for beta chain variable domain of TCR clone 390706 (TRBV9, TRBJ2-7)
CASSVGQGGEQYF

SEQ ID NO: 781413 - protein, 21 aa, Homo sapiens
  CDR3 for alpha chain variable domain of TCR clone 390707 (TRAV8-4, TRAJ16)
CAVSPVGRWPEAALCKGDYVR

SEQ ID NO: 781414 - protein, 14 aa, Homo sapiens
  CDR3 for beta chain variable domain of TCR clone 390707 (TRBV23-1, TRBJ2-5)
CASSFLRSQETQYF

SEQ ID NO: 781415 - protein, 13 aa, Homo sapiens
  CDR3 for alpha chain variable domain of TCR clone 390708 (TRAV13-2, TRAJ5)
CAVMDTGRRAHTF

SEQ ID NO: 781416 - protein, 12 aa, Homo sapiens
  CDR3 for beta chain variable domain of TCR clone 390708 (TRBV28, TRBJ2-7)
CASSFSSYEQYF

SEQ ID NO: 781417 - protein, 14 aa, Homo sapiens
  CDR3 for alpha chain variable domain of TCR clone 390709 (TRAV2, TRAJ37)
CAVDFTSNTGKLIF

SEQ ID NO: 781418 - protein, 16 aa, Homo sapiens
  CDR3 for beta chain variable domain of TCR clone 390709 (TRBV10-3, TRBJ2-7)
CAISPRGQEQTYEQYF

SEQ ID NO: 781419 - protein, 15 aa, Homo sapiens
  CDR3 for alpha chain variable domain of TCR clone 390710 (TRAV29/DV5, TRAJ42)
CAAKTDGGSQGNLFF

SEQ ID NO: 781420 - protein, 15 aa, Homo sapiens
  CDR3 for beta chain variable domain of TCR clone 390710 (TRBV5-1, TRBJ2-2)
CASSSQGGNTGELFF

SEQ ID NO: 781421 - protein, 12 aa, Homo sapiens
  CDR3 for alpha chain variable domain of TCR clone 390711 (TRAV8-3, TRAJ26)
CAGDNYRQNFVF

SEQ ID NO: 781422 - protein, 17 aa, Homo sapiens
  CDR3 for beta chain variable domain of TCR clone 390711 (TRBV7-8, TRBJ2-6)
CASSAGTGGAGANVLTF

SEQ ID NO: 781423 - protein, 14 aa, Homo sapiens
  CDR3 for alpha chain variable domain of TCR clone 390712 (TRAV12-2, TRAJ44)
CAVNPAGTASKLTF

SEQ ID NO: 781424 - protein, 18 aa, Homo sapiens
  CDR3 for beta chain variable domain of TCR clone 390712 (TRBV4-3, TRBJ1-6)
CASSQETPASSYNSPLHF

SEQ ID NO: 781425 - protein, 14 aa, Homo sapiens
  CDR3 for alpha chain variable domain of TCR clone 390713 (TRAV26-1, TRAJ39)
CIVFTNNSGNMLTF

SEQ ID NO: 781426 - protein, 15 aa, Homo sapiens
  CDR3 for beta chain variable domain of TCR clone 390713 (TRBV19, TRBJ2-4)
CASSLTGLTKNIQYF

SEQ ID NO: 781427 - protein, 15 aa, Homo sapiens
  CDR3 for alpha chain variable domain of TCR clone 390714 (TRAV26-1, TRAJ24)
CIVPLTTDSWGKFQF

SEQ ID NO: 781428 - protein, 14 aa, Homo sapiens
  CDR3 for beta chain variable domain of TCR clone 390714 (TRBV10-3, TRBJ2-3)
CAISEKGLGHTQYF

SEQ ID NO: 781429 - protein, 14 aa, Homo sapiens
  CDR3 for alpha chain variable domain of TCR clone 390715 (TRAV1-2, TRAJ8)
CAVRGDTGFQKLVF

SEQ ID NO: 781430 - protein, 15 aa, Homo sapiens
  CDR3 for beta chain variable domain of TCR clone 390715 (TRBV7-2, TRBJ2-1)
CASSPLAGEYNEQFF

SEQ ID NO: 781431 - protein, 16 aa, Homo sapiens
  CDR3 for alpha chain variable domain of TCR clone 390716 (TRAV22, TRAJ45)
CAVERGKRGGADGLTF

SEQ ID NO: 781432 - protein, 15 aa, Homo sapiens
  CDR3 for beta chain variable domain of TCR clone 390716 (TRBV6-3, TRBJ2-7)
CASSSPGTVFYEQYF

SEQ ID NO: 781433 - protein, 12 aa, Homo sapiens
  CDR3 for alpha chain variable domain of TCR clone 390717 (TRAV8-1, TRAJ6)
CASSGGSYIPTF

SEQ ID NO: 781434 - protein, 12 aa, Homo sapiens
  CDR3 for beta chain variable domain of TCR clone 390717 (TRBV19, TRBJ1-1)
SASMNRYTEAFF

SEQ ID NO: 781435 - protein, 17 aa, Homo sapiens
  CDR3 for alpha chain variable domain of TCR clone 390718 (TRAV13-1, TRAJ31)
CAPKDRLMFGDGTQLVV

SEQ ID NO: 781436 - protein, 16 aa, Homo sapiens
  CDR3 for beta chain variable domain of TCR clone 390718 (TRBV28, TRBJ2-2)
CASSLEGGSNTGELFF

SEQ ID NO: 781437 - protein, 12 aa, Homo sapiens
  CDR3 for alpha chain variable domain of TCR clone 390719 (TRAV10, TRAJ43)
CVVVRVGNDMRF

SEQ ID NO: 781438 - protein, 15 aa, Homo sapiens
  CDR3 for beta chain variable domain of TCR clone 390719 (TRBV2, TRBJ2-7)
CSSSEGLARSYEQYF

SEQ ID NO: 781439 - protein, 14 aa, Homo sapiens
  CDR3 for alpha chain variable domain of TCR clone 390720 (TRAV8-4, TRAJ9)
CAVRINTGGFKTIF

SEQ ID NO: 781440 - protein, 15 aa, Homo sapiens
  CDR3 for beta chain variable domain of TCR clone 390720 (TRBV10-2, TRBJ2-6)
CASSEQRTGANDLTF

SEQ ID NO: 781441 - protein, 18 aa, Homo sapiens
  CDR3 for alpha chain variable domain of TCR clone 390721 (TRAV21, TRAJ45)
CCGGPQGGSGGGADGLTF

SEQ ID NO: 781442 - protein, 15 aa, Homo sapiens
  CDR3 for beta chain variable domain of TCR clone 390721 (TRBV5-1, TRBJ2-1)
CASSPPRAPYNEQFF

SEQ ID NO: 781443 - protein, 18 aa, Homo sapiens
  CDR3 for alpha chain variable domain of TCR clone 390722 (TRAV26-2, )
CILLDIQNPDPAVYQLRD

SEQ ID NO: 781444 - protein, 18 aa, Homo sapiens
  CDR3 for beta chain variable domain of TCR clone 390722 (TRBV23-1, TRBJ2-3)
CASSQFHTGGISTDTQYF

SEQ ID NO: 781445 - protein, 15 aa, Homo sapiens
  CDR3 for alpha chain variable domain of TCR clone 390723 (TRAV3, TRAJ4)
CCETFTFWWLNKLIF

SEQ ID NO: 781446 - protein, 12 aa, Homo sapiens
  CDR3 for beta chain variable domain of TCR clone 390723 (TRBV7-9, TRBJ2-7)
CASSQGVYEQYF

SEQ ID NO: 781447 - protein, 13 aa, Homo sapiens
  CDR3 for alpha chain variable domain of TCR clone 390724 (TRAV2, TRAJ40)
CAVDTSGTYKYIF

SEQ ID NO: 781448 - protein, 14 aa, Homo sapiens
  CDR3 for beta chain variable domain of TCR clone 390724 (TRBV19, TRBJ2-1)
CASPTVVLSGEQFF

SEQ ID NO: 781449 - protein, 16 aa, Homo sapiens
  CDR3 for alpha chain variable domain of TCR clone 390725 (TRAV16, TRAJ4)
CALCRMFSGGYNKLIF

SEQ ID NO: 781450 - protein, 16 aa, Homo sapiens
  CDR3 for beta chain variable domain of TCR clone 390725 (TRBV24-1, TRBJ2-3)
CATSGPGTGATDTQYF

SEQ ID NO: 781451 - protein, 12 aa, Homo sapiens
  CDR3 for alpha chain variable domain of TCR clone 390726 (TRAV13-2, TRAJ23)
CADRHRGGKLIF

SEQ ID NO: 781452 - protein, 19 aa, Homo sapiens
  CDR3 for beta chain variable domain of TCR clone 390726 (TRBV19, TRBJ2-5)
CASSIGQVTDFFLGETQYF

SEQ ID NO: 781453 - protein, 16 aa, Homo sapiens
  CDR3 for alpha chain variable domain of TCR clone 390727 (TRAV8-4, TRAJ52)
CAAANAGGTSFGKLTF

SEQ ID NO: 781454 - protein, 15 aa, Homo sapiens
  CDR3 for beta chain variable domain of TCR clone 390727 (TRBV6-3, TRBJ2-7)
CASSSPGTVFYEQYF

SEQ ID NO: 781455 - protein, 14 aa, Homo sapiens
  CDR3 for alpha chain variable domain of TCR clone 390728 (TRAV16, TRAJ44)
CALSTTGTAGKLTF

SEQ ID NO: 781456 - protein, 14 aa, Homo sapiens
  CDR3 for beta chain variable domain of TCR clone 390728 (TRBV20-1, TRBJ2-7)
CSAISREASYEQYF

SEQ ID NO: 781457 - protein, 18 aa, Homo sapiens
  CDR3 for alpha chain variable domain of TCR clone 390729 (TRAV13-1, TRAJ52)
CAAKNPNAGGTSYRKLTF

SEQ ID NO: 781458 - protein, 15 aa, Homo sapiens
  CDR3 for beta chain variable domain of TCR clone 390729 (TRBV11-2, TRBJ2-3)
CASSPGGGATDTQYF

SEQ ID NO: 781459 - protein, 16 aa, Homo sapiens
  CDR3 for alpha chain variable domain of TCR clone 390730 (TRAV4, TRAJ18)
CCVLLIGGSTLGRLYF

SEQ ID NO: 781460 - protein, 14 aa, Homo sapiens
  CDR3 for beta chain variable domain of TCR clone 390730 (TRBV7-2, TRBJ2-2)
CASRGQGAAGELFF

SEQ ID NO: 781461 - protein, 14 aa, Homo sapiens
  CDR3 for alpha chain variable domain of TCR clone 390731 (TRAV25, TRAJ6)
CAGRESGGSYIPTF

SEQ ID NO: 781462 - protein, 13 aa, Homo sapiens
  CDR3 for beta chain variable domain of TCR clone 390731 (TRBV12-4, TRBJ2-7)
CASSLAGVYEQYF

SEQ ID NO: 781463 - protein, 15 aa, Homo sapiens
  CDR3 for alpha chain variable domain of TCR clone 390732 (TRAV3, TRAJ10)
RAVRDGTGGGNKLTF

SEQ ID NO: 781464 - protein, 15 aa, Homo sapiens
  CDR3 for beta chain variable domain of TCR clone 390732 (TRBV4-3, TRBJ1-4)
SASSLVQREVEKLFF

SEQ ID NO: 781465 - protein, 14 aa, Homo sapiens
  CDR3 for alpha chain variable domain of TCR clone 390733 (TRAV8-3, TRAJ35)
CAVVPQGFGNVLHC

SEQ ID NO: 781466 - protein, 12 aa, Homo sapiens
  CDR3 for beta chain variable domain of TCR clone 390733 (TRBV5-4, TRBJ2-7)
CASSLEAYEQYF

SEQ ID NO: 781467 - protein, 13 aa, Homo sapiens
  CDR3 for alpha chain variable domain of TCR clone 390734 (TRAV24, TRAJ44)
CALLTGTASKLTF

SEQ ID NO: 781468 - protein, 12 aa, Homo sapiens
  CDR3 for beta chain variable domain of TCR clone 390734 (TRBV3-1, TRBJ2-1)
CASSQGSSGQFF

SEQ ID NO: 781469 - protein, 13 aa, Homo sapiens
  CDR3 for alpha chain variable domain of TCR clone 390735 (TRAV21, TRAJ15)
CAVANQAGTALIF

SEQ ID NO: 781470 - protein, 13 aa, Homo sapiens
  CDR3 for beta chain variable domain of TCR clone 390735 (TRBV7-3, TRBJ2-3)
CASSSWSTDTQYF

SEQ ID NO: 781471 - protein, 14 aa, Homo sapiens
  CDR3 for alpha chain variable domain of TCR clone 390736 (TRAV38-1, TRAJ45)
CSYYSGGGAYGLTF

SEQ ID NO: 781472 - protein, 20 aa, Homo sapiens
  CDR3 for beta chain variable domain of TCR clone 390736 (TRBV28, TRBJ2-1)
CASTPIGRSPGLAGGNEQFF

SEQ ID NO: 781473 - protein, 14 aa, Homo sapiens
  CDR3 for alpha chain variable domain of TCR clone 390737 (TRAV12-3, TRAJ41)
CAMSAGNSGYALNF

SEQ ID NO: 781474 - protein, 15 aa, Homo sapiens
  CDR3 for beta chain variable domain of TCR clone 390737 (TRBV12-4, TRBJ2-5)
CASSPPTGLQETQYF

SEQ ID NO: 781475 - protein, 14 aa, Homo sapiens
  CDR3 for alpha chain variable domain of TCR clone 390738 (TRAV8-4, TRAJ54)
CAVSEVLGAQKLVF

SEQ ID NO: 781476 - protein, 15 aa, Homo sapiens
  CDR3 for beta chain variable domain of TCR clone 390738 (TRBV7-2, TRBJ2-1)
CASSFSGGIYNEQFF

SEQ ID NO: 781477 - protein, 11 aa, Homo sapiens
  CDR3 for alpha chain variable domain of TCR clone 390739 (TRAV21, TRAJ4)
HVSGGYNKRIF

SEQ ID NO: 781478 - protein, 13 aa, Homo sapiens
  CDR3 for beta chain variable domain of TCR clone 390739 (TRBV7-3, TRBJ2-5)
CASSLTAGETQYF

SEQ ID NO: 781479 - protein, 12 aa, Homo sapiens
  CDR3 for alpha chain variable domain of TCR clone 390740 (TRAV13-1, TRAJ48)
CAARVGGEKLTF

SEQ ID NO: 781480 - protein, 15 aa, Homo sapiens
  CDR3 for beta chain variable domain of TCR clone 390740 (TRBV7-3, TRBJ2-1)
CASSPTGGGEVEQFF

SEQ ID NO: 781481 - protein, 16 aa, Homo sapiens
  CDR3 for alpha chain variable domain of TCR clone 390741 (TRAV3, TRAJ6)
CAVRDGMGGGRYKPTF

SEQ ID NO: 781482 - protein, 15 aa, Homo sapiens
  CDR3 for beta chain variable domain of TCR clone 390741 (TRBV5-1, TRBJ2-7)
CASSLGDFTTYEQYF

SEQ ID NO: 781483 - protein, 14 aa, Homo sapiens
  CDR3 for alpha chain variable domain of TCR clone 390742 (TRAV17, TRAJ23)
CATALGGQGGKLIF

SEQ ID NO: 781484 - protein, 13 aa, Homo sapiens
  CDR3 for beta chain variable domain of TCR clone 390742 (TRBV2, TRBJ2-7)
CASSVGGSGEQYF

SEQ ID NO: 781485 - protein, 16 aa, Homo sapiens
  CDR3 for alpha chain variable domain of TCR clone 390743 (TRAV29/DV5, TRAJ39)
CAASLLFNNAGNMLTF

SEQ ID NO: 781486 - protein, 12 aa, Homo sapiens
  CDR3 for beta chain variable domain of TCR clone 390743 (TRBV18, TRBJ2-5)
CASSPNQETQYF

SEQ ID NO: 781487 - protein, 14 aa, Homo sapiens
  CDR3 for alpha chain variable domain of TCR clone 390744 (TRAV4, TRAJ9)
CLLGSGTGGFKTIF

SEQ ID NO: 781488 - protein, 15 aa, Homo sapiens
  CDR3 for beta chain variable domain of TCR clone 390744 (TRBV7-2, TRBJ2-1)
CASSLASGRVNEQFF

SEQ ID NO: 781489 - protein, 11 aa, Homo sapiens
  CDR3 for alpha chain variable domain of TCR clone 390745 (TRAV13-2, TRAJ20)
CADSNDYKLSF

SEQ ID NO: 781490 - protein, 17 aa, Homo sapiens
  CDR3 for beta chain variable domain of TCR clone 390745 (TRBV4-1, TRBJ1-4)
CASSDTGGTNENCFLAV

SEQ ID NO: 781491 - protein, 15 aa, Homo sapiens
  CDR3 for alpha chain variable domain of TCR clone 390746 (TRAV26-1, TRAJ21)
CIVRVPNYNFNKFYF

SEQ ID NO: 781492 - protein, 16 aa, Homo sapiens
  CDR3 for beta chain variable domain of TCR clone 390746 (TRBV7-9, TRBJ2-3)
CASSLQGKPGTDTQYF

SEQ ID NO: 781493 - protein, 17 aa, Homo sapiens
  CDR3 for alpha chain variable domain of TCR clone 390747 (TRAV3, TRAJ12)
CAVRDGGRMDSSYKLIF

SEQ ID NO: 781494 - protein, 16 aa, Homo sapiens
  CDR3 for beta chain variable domain of TCR clone 390747 (TRBV9, TRBJ2-2)
CASSAMGKGNTGEMFF

SEQ ID NO: 781495 - protein, 10 aa, Homo sapiens
  CDR3 for alpha chain variable domain of TCR clone 390748 (TRAV21, TRAJ31)
CAVDNARLMF

SEQ ID NO: 781496 - protein, 16 aa, Homo sapiens
  CDR3 for beta chain variable domain of TCR clone 390748 (TRBV5-4, TRBJ2-1)
CASSLVGSGQDNEQFF

SEQ ID NO: 781497 - protein, 15 aa, Homo sapiens
  CDR3 for alpha chain variable domain of TCR clone 390749 (TRAV17, TRAJ57)
CATGPSQGGSEKRVF

SEQ ID NO: 781498 - protein, 16 aa, Homo sapiens
  CDR3 for beta chain variable domain of TCR clone 390749 (TRBV11-2, TRBJ2-7)
CASSPLAGGPRYEQYF

SEQ ID NO: 781499 - protein, 14 aa, Homo sapiens
  CDR3 for alpha chain variable domain of TCR clone 390750 (TRAV17, TRAJ56)
CATVPAGANSKLTF

SEQ ID NO: 781500 - protein, 13 aa, Homo sapiens
  CDR3 for beta chain variable domain of TCR clone 390750 (TRBV12-4, TRBJ2-2)
CASSITGYGELFF

SEQ ID NO: 781501 - protein, 13 aa, Homo sapiens
  CDR3 for alpha chain variable domain of TCR clone 390751 (TRAV16, TRAJ54)
CALMVQGAQKLVF

SEQ ID NO: 781502 - protein, 12 aa, Homo sapiens
  CDR3 for beta chain variable domain of TCR clone 390751 (TRBV18, TRBJ2-7)
CACSTAMGEQYF

SEQ ID NO: 781503 - protein, 13 aa, Homo sapiens
  CDR3 for alpha chain variable domain of TCR clone 390752 (TRAV23/DV6, TRAJ36)
CAASQTGANNIFF

SEQ ID NO: 781504 - protein, 13 aa, Homo sapiens
  CDR3 for beta chain variable domain of TCR clone 390752 (TRBV5-4, TRBJ1-5)
CASSLGGDQPQHF

SEQ ID NO: 781505 - protein, 14 aa, Homo sapiens
  CDR3 for alpha chain variable domain of TCR clone 390753 (TRAV12-1, TRAJ38)
CGELKAGNNRKLIW

SEQ ID NO: 781506 - protein, 13 aa, Homo sapiens
  CDR3 for beta chain variable domain of TCR clone 390753 (TRBV4-2, TRBJ1-1)
CASSQAGNTEDFF

SEQ ID NO: 781507 - protein, 11 aa, Homo sapiens
  CDR3 for alpha chain variable domain of TCR clone 390754 (TRAV1-1, TRAJ23)
CAMRQGGKLIF

SEQ ID NO: 781508 - protein, 12 aa, Homo sapiens
  CDR3 for beta chain variable domain of TCR clone 390754 (TRBV19, TRBJ1-5)
CASSIAQQPQHF

SEQ ID NO: 781509 - protein, 12 aa, Homo sapiens
  CDR3 for alpha chain variable domain of TCR clone 390755 (TRAV35, TRAJ28)
GVEGAGSYQLTF

SEQ ID NO: 781510 - protein, 15 aa, Homo sapiens
  CDR3 for beta chain variable domain of TCR clone 390755 (TRBV7-2, TRBJ2-1)
CASSLVAGRYNEQFF

SEQ ID NO: 781511 - protein, 15 aa, Homo sapiens
  CDR3 for alpha chain variable domain of TCR clone 390756 (TRAV17, TRAJ16)
CATAIRFSDGQKLLF

SEQ ID NO: 781512 - protein, 15 aa, Homo sapiens
  CDR3 for beta chain variable domain of TCR clone 390756 (TRBV20-1, TRBJ1-1)
CSASRGVTGNTEAFF

SEQ ID NO: 781513 - protein, 15 aa, Homo sapiens
  CDR3 for alpha chain variable domain of TCR clone 390757 (TRAV26-1, TRAJ29)
CIVRVEGSGNTPLVF

SEQ ID NO: 781514 - protein, 15 aa, Homo sapiens
  CDR3 for beta chain variable domain of TCR clone 390757 (TRBV5-1, TRBJ2-5)
CASSFKGGDQETQYF

SEQ ID NO: 781515 - protein, 15 aa, Homo sapiens
  CDR3 for alpha chain variable domain of TCR clone 390758 (TRAV29/DV5, TRAJ24)
CAASGATDSWGKFQF

SEQ ID NO: 781516 - protein, 10 aa, Homo sapiens
  CDR3 for beta chain variable domain of TCR clone 390758 (TRBV2, TRBJ1-1)
CQQGGTEAFF

SEQ ID NO: 781517 - protein, 11 aa, Homo sapiens
  CDR3 for alpha chain variable domain of TCR clone 390759 (TRAV3, TRAJ21)
CAVGNLNEFYF

SEQ ID NO: 781518 - protein, 16 aa, Homo sapiens
  CDR3 for beta chain variable domain of TCR clone 390759 (TRBV19, TRBJ2-1)
CASSKAGPSSYNEQFF

SEQ ID NO: 781519 - protein, 12 aa, Homo sapiens
  CDR3 for alpha chain variable domain of TCR clone 390760 (TRAV23/DV6, TRAJ58)
CAARLLRGETSG

SEQ ID NO: 781520 - protein, 13 aa, Homo sapiens
  CDR3 for beta chain variable domain of TCR clone 390760 (TRBV7-2, TRBJ2-7)
CASSSPSGSEQYF

SEQ ID NO: 781521 - protein, 14 aa, Homo sapiens
  CDR3 for alpha chain variable domain of TCR clone 390761 (TRAV1-2, TRAJ16)
CAVNRLSDGQKLLF

SEQ ID NO: 781522 - protein, 15 aa, Homo sapiens
  CDR3 for beta chain variable domain of TCR clone 390761 (TRBV4-2, TRBJ1-1)
CASSQQGAGDTEAFL

SEQ ID NO: 781523 - protein, 13 aa, Homo sapiens
  CDR3 for alpha chain variable domain of TCR clone 390762 (TRAV21, TRAJ20)
CAVGLRVDYKLSF

SEQ ID NO: 781524 - protein, 15 aa, Homo sapiens
  CDR3 for beta chain variable domain of TCR clone 390762 (TRBV13, TRBJ1-5)
CASSFGQGGVQPQHF

SEQ ID NO: 781525 - protein, 12 aa, Homo sapiens
  CDR3 for alpha chain variable domain of TCR clone 390763 (TRAV1-1, TRAJ33)
CAASDSNYQLIW

SEQ ID NO: 781526 - protein, 18 aa, Homo sapiens
  CDR3 for beta chain variable domain of TCR clone 390763 (TRBV20-1, TRBJ2-2)
CSARVETARPSGTGELFF

SEQ ID NO: 781527 - protein, 14 aa, Homo sapiens
  CDR3 for alpha chain variable domain of TCR clone 390764 (TRAV12-2, TRAJ44)
CAVNPAGTASKLTF

SEQ ID NO: 781528 - protein, 16 aa, Homo sapiens
  CDR3 for beta chain variable domain of TCR clone 390764 (TRBV2, TRBJ2-1)
CASSVGGALSYNEQFF

SEQ ID NO: 781529 - protein, 15 aa, Homo sapiens
  CDR3 for alpha chain variable domain of TCR clone 390765 (TRAV30, TRAJ32)
CGTEILGGATNKLIF

SEQ ID NO: 781530 - protein, 17 aa, Homo sapiens
  CDR3 for beta chain variable domain of TCR clone 390765 (TRBV5-4, TRBJ2-1)
CASSSAGGRGPYDEQFF

SEQ ID NO: 781531 - protein, 12 aa, Homo sapiens
  CDR3 for alpha chain variable domain of TCR clone 390766 (TRAV30, TRAJ43)
CGTEERGNDMRF

SEQ ID NO: 781532 - protein, 20 aa, Homo sapiens
  CDR3 for beta chain variable domain of TCR clone 390766 (TRBV11-2, TRBJ2-2)
LRTRPCISVPAALEAGSCFF

SEQ ID NO: 781533 - protein, 14 aa, Homo sapiens
  CDR3 for alpha chain variable domain of TCR clone 390767 (TRAV1-2, TRAJ16)
CSVNRFSDGQKLLF

SEQ ID NO: 781534 - protein, 15 aa, Homo sapiens
  CDR3 for beta chain variable domain of TCR clone 390767 (TRBV7-9, TRBJ2-3)
CASSHGDRVPDTQYF

SEQ ID NO: 781535 - protein, 15 aa, Homo sapiens
  CDR3 for alpha chain variable domain of TCR clone 390768 (TRAV3, TRAJ12)
CAVRDIRDSSYKLIF

SEQ ID NO: 781536 - protein, 12 aa, Homo sapiens
  CDR3 for beta chain variable domain of TCR clone 390768 (TRBV12-4, TRBJ2-7)
CASSLGGYEQYF

SEQ ID NO: 781537 - protein, 17 aa, Homo sapiens
  CDR3 for alpha chain variable domain of TCR clone 390769 (TRAV3, TRAJ6)
CAVRDGPRAGGSYIPTF

SEQ ID NO: 781538 - protein, 13 aa, Homo sapiens
  CDR3 for beta chain variable domain of TCR clone 390769 (TRBV7-2, TRBJ2-2)
CASSFAETGELFF

SEQ ID NO: 781539 - protein, 14 aa, Homo sapiens
  CDR3 for alpha chain variable domain of TCR clone 390770 (TRAV12-2, TRAJ17)
CAVLFKASGNKLTF

SEQ ID NO: 781540 - protein, 14 aa, Homo sapiens
  CDR3 for beta chain variable domain of TCR clone 390770 (TRBV15, TRBJ1-2)
CATSRDFDRVGYTF

SEQ ID NO: 781541 - protein, 12 aa, Homo sapiens
  CDR3 for alpha chain variable domain of TCR clone 390771 (TRAV35, TRAJ39)
LAPNNAGNMLTF

SEQ ID NO: 781542 - protein, 16 aa, Homo sapiens
  CDR3 for beta chain variable domain of TCR clone 390771 (TRBV2, TRBJ2-3)
CASSTSVAGVTDTQYF

SEQ ID NO: 781543 - protein, 13 aa, Homo sapiens
  CDR3 for alpha chain variable domain of TCR clone 390772 (TRAV23/DV6, TRAJ15)
CAALPAGRNCSDL

SEQ ID NO: 781544 - protein, 14 aa, Homo sapiens
  CDR3 for beta chain variable domain of TCR clone 390772 (TRBV7-9, TRBJ1-2)
CASSRQGATYGYTF

SEQ ID NO: 781545 - protein, 17 aa, Homo sapiens
  CDR3 for alpha chain variable domain of TCR clone 390773 (TRAV16, TRAJ37)
CAFWPKNGSSNTGKLIF

SEQ ID NO: 781546 - protein, 13 aa, Homo sapiens
  CDR3 for beta chain variable domain of TCR clone 390773 (TRBV20-1, TRBJ2-2)
CSASAAGTGELLF

SEQ ID NO: 781547 - protein, 15 aa, Homo sapiens
  CDR3 for alpha chain variable domain of TCR clone 390774 (TRAV17, TRAJ4)
CATVTWSGGYNKLIF

SEQ ID NO: 781548 - protein, 16 aa, Homo sapiens
  CDR3 for beta chain variable domain of TCR clone 390774 (TRBV13, TRBJ2-2)
CASSPRTGEHTGELFF

SEQ ID NO: 781549 - protein, 16 aa, Homo sapiens
  CDR3 for alpha chain variable domain of TCR clone 390775 (TRAV1-2, TRAJ10)
CAVRGVLTGGGKKLTF

SEQ ID NO: 781550 - protein, 12 aa, Homo sapiens
  CDR3 for beta chain variable domain of TCR clone 390775 (TRBV7-8, TRBJ2-7)
CTSSLGDREQYF

SEQ ID NO: 781551 - protein, 11 aa, Homo sapiens
  CDR3 for alpha chain variable domain of TCR clone 390776 (TRAV1-1, TRAJ23)
CAVRQGGKLIF

SEQ ID NO: 781552 - protein, 17 aa, Homo sapiens
  CDR3 for beta chain variable domain of TCR clone 390776 (TRBV15, TRBJ1-4)
CATSRYGTGDPNEKLFF

SEQ ID NO: 781553 - protein, 14 aa, Homo sapiens
  CDR3 for alpha chain variable domain of TCR clone 390777 (TRAV1-2, TRAJ8)
CAVREDTGFQQLVF

SEQ ID NO: 781554 - protein, 12 aa, Homo sapiens
  CDR3 for beta chain variable domain of TCR clone 390777 (TRBV2, TRBJ2-1)
CAYGPPGNEQFF

SEQ ID NO: 781555 - protein, 15 aa, Homo sapiens
  CDR3 for alpha chain variable domain of TCR clone 390778 (TRAV13-1, TRAJ44)
CAASRGGGTASKLTF

SEQ ID NO: 781556 - protein, 11 aa, Homo sapiens
  CDR3 for beta chain variable domain of TCR clone 390778 (TRBV19, TRBJ1-1)
CASSIGSEAFF

SEQ ID NO: 781557 - protein, 20 aa, Homo sapiens
  CDR3 for alpha chain variable domain of TCR clone 390779 (TRAV12-3, TRAJ41)
SLFIRDSQPSDSATPEALNF

SEQ ID NO: 781558 - protein, 13 aa, Homo sapiens
  CDR3 for beta chain variable domain of TCR clone 390779 (TRBV28, TRBJ2-7)
CASTPGLAGEQYF

SEQ ID NO: 781559 - protein, 13 aa, Homo sapiens
  CDR3 for alpha chain variable domain of TCR clone 390780 (TRAV3, TRAJ20)
CAVRSLHDYKLSF

SEQ ID NO: 781560 - protein, 13 aa, Homo sapiens
  CDR3 for beta chain variable domain of TCR clone 390780 (TRBV6-1, TRBJ2-1)
CAGMDPTNNEQFF

SEQ ID NO: 781561 - protein, 12 aa, Homo sapiens
  CDR3 for alpha chain variable domain of TCR clone 390781 (TRAV26-1, TRAJ48)
CIAVLGNEKLTF

SEQ ID NO: 781562 - protein, 17 aa, Homo sapiens
  CDR3 for beta chain variable domain of TCR clone 390781 (TRBV7-6, TRBJ2-1)
CASSFGLAGGTYNEQFF

SEQ ID NO: 781563 - protein, 14 aa, Homo sapiens
  CDR3 for alpha chain variable domain of TCR clone 390782 (TRAV12-2, TRAJ29)
CSVRRNSGNTPLVV

SEQ ID NO: 781564 - protein, 13 aa, Homo sapiens
  CDR3 for beta chain variable domain of TCR clone 390782 (TRBV12-4, TRBJ2-1)
CASSHYTDNEQFF

SEQ ID NO: 781565 - protein, 15 aa, Homo sapiens
  CDR3 for alpha chain variable domain of TCR clone 390783 (TRAV13-1, TRAJ57)
QVPPLSQGGSEKLVF

SEQ ID NO: 781566 - protein, 16 aa, Homo sapiens
  CDR3 for beta chain variable domain of TCR clone 390783 (TRBV7-6, TRBJ2-1)
CASSAPGPSSYNEQFC

SEQ ID NO: 781567 - protein, 16 aa, Homo sapiens
  CDR3 for alpha chain variable domain of TCR clone 390784 (TRAV1-2, TRAJ10)
CAVRGVLTGGGNKLTF

SEQ ID NO: 781568 - protein, 13 aa, Homo sapiens
  CDR3 for beta chain variable domain of TCR clone 390784 (TRBV20-1, TRBJ1-6)
CSAPLGVGSHLHF

SEQ ID NO: 781569 - protein, 14 aa, Homo sapiens
  CDR3 for alpha chain variable domain of TCR clone 390785 (TRAV8-1, TRAJ24)
CAVNAADSWGKLQF

SEQ ID NO: 781570 - protein, 12 aa, Homo sapiens
  CDR3 for beta chain variable domain of TCR clone 390785 (TRBV24-1, TRBJ1-1)
CATSDSDRGAFF

SEQ ID NO: 781571 - protein, 15 aa, Homo sapiens
  CDR3 for alpha chain variable domain of TCR clone 390786 (TRAV3, TRAJ22)
CAVRDRGGSARQQTF

SEQ ID NO: 781572 - protein, 13 aa, Homo sapiens
  CDR3 for beta chain variable domain of TCR clone 390786 (TRBV2, TRBJ1-5)
CATAGPGNQPQHF

SEQ ID NO: 781573 - protein, 14 aa, Homo sapiens
  CDR3 for alpha chain variable domain of TCR clone 390787 (TRAV16, TRAJ33)
CALSAMDSNYQLIW

SEQ ID NO: 781574 - protein, 12 aa, Homo sapiens
  CDR3 for beta chain variable domain of TCR clone 390787 (TRBV5-1, TRBJ1-2)
CASSQDTYVYTF

SEQ ID NO: 781575 - protein, 15 aa, Homo sapiens
  CDR3 for alpha chain variable domain of TCR clone 390788 (TRAV3, TRAJ5)
CAVRYLDTGRRALTF

SEQ ID NO: 781576 - protein, 13 aa, Homo sapiens
  CDR3 for beta chain variable domain of TCR clone 390788 (TRBV12-4, TRBJ2-7)
CASSPTETYEQYY

SEQ ID NO: 781577 - protein, 15 aa, Homo sapiens
  CDR3 for alpha chain variable domain of TCR clone 390789 (TRAV8-4, TRAJ3)
CAVTGENLVQQCFQD

SEQ ID NO: 781578 - protein, 16 aa, Homo sapiens
  CDR3 for beta chain variable domain of TCR clone 390789 (TRBV5-6, TRBJ2-7)
PAANEGGGRGSYEQYF

SEQ ID NO: 781579 - protein, 12 aa, Homo sapiens
  CDR3 for alpha chain variable domain of TCR clone 390790 (TRAV3, TRAJ20)
CAVRDPDYKLSF

SEQ ID NO: 781580 - protein, 15 aa, Homo sapiens
  CDR3 for beta chain variable domain of TCR clone 390790 (TRBV2, TRBJ2-2)
CASSRETVGTGKLFF

SEQ ID NO: 781581 - protein, 11 aa, Homo sapiens
  CDR3 for alpha chain variable domain of TCR clone 390791 (TRAV21, TRAJ34)
CAVTNTDNLIF

SEQ ID NO: 781582 - protein, 17 aa, Homo sapiens
  CDR3 for beta chain variable domain of TCR clone 390791 (TRBV20-1, TRBJ2-1)
CSARSPGGGPPTMSSSS

SEQ ID NO: 781583 - protein, 15 aa, Homo sapiens
  CDR3 for alpha chain variable domain of TCR clone 390792 (TRAV3, TRAJ22)
CAVRDRGGSARQLTF

SEQ ID NO: 781584 - protein, 15 aa, Homo sapiens
  CDR3 for beta chain variable domain of TCR clone 390792 (TRBV11-2, TRBJ2-1)
CQRPGFLLYHNEQFF

SEQ ID NO: 781585 - protein, 14 aa, Homo sapiens
  CDR3 for alpha chain variable domain of TCR clone 390793 (TRAV16, TRAJ54)
CALSLIQGAQKLVF

SEQ ID NO: 781586 - protein, 17 aa, Homo sapiens
  CDR3 for beta chain variable domain of TCR clone 390793 (TRBV4-1, TRBJ1-5)
CASSQQPPTVANQPQHF

SEQ ID NO: 781587 - protein, 14 aa, Homo sapiens
  CDR3 for alpha chain variable domain of TCR clone 390794 (TRAV35, TRAJ22)
CAGLRPGSARQLTF

SEQ ID NO: 781588 - protein, 15 aa, Homo sapiens
  CDR3 for beta chain variable domain of TCR clone 390794 (TRBV7-9, TRBJ2-1)
CASSLGWGRANEQFF

SEQ ID NO: 781589 - protein, 13 aa, Homo sapiens
  CDR3 for alpha chain variable domain of TCR clone 390795 (TRAV21, TRAJ27)
CAARPGNAGKSTF

SEQ ID NO: 781590 - protein, 13 aa, Homo sapiens
  CDR3 for beta chain variable domain of TCR clone 390795 (TRBV13, TRBJ2-1)
CASILGGGGEQFF

SEQ ID NO: 781591 - protein, 12 aa, Homo sapiens
  CDR3 for alpha chain variable domain of TCR clone 390796 (TRAV12-3, TRAJ54)
CGAERGAQKLVF

SEQ ID NO: 781592 - protein, 15 aa, Homo sapiens
  CDR3 for beta chain variable domain of TCR clone 390796 (TRBV27, TRBJ2-1)
CASSLAGGPFNEQFF

SEQ ID NO: 781593 - protein, 18 aa, Homo sapiens
  CDR3 for alpha chain variable domain of TCR clone 390797 (TRAV21, TRAJ52)
CAVRPSPAGGTSYGKLTF

SEQ ID NO: 781594 - protein, 15 aa, Homo sapiens
  CDR3 for beta chain variable domain of TCR clone 390797 (TRBV20-1, TRBJ2-7)
CNARKGLAESYEQYF

SEQ ID NO: 781595 - protein, 13 aa, Homo sapiens
  CDR3 for alpha chain variable domain of TCR clone 390798 (TRAV12-3, TRAJ54)
CAMFAPGAQKLVF

SEQ ID NO: 781596 - protein, 16 aa, Homo sapiens
  CDR3 for beta chain variable domain of TCR clone 390798 (TRBV7-6, TRBJ2-3)
CASSPRRGGLGETQYF

SEQ ID NO: 781597 - protein, 14 aa, Homo sapiens
  CDR3 for alpha chain variable domain of TCR clone 390799 (TRAV12-2, TRAJ40)
CAVKIPSGTYKYIF

SEQ ID NO: 781598 - protein, 15 aa, Homo sapiens
  CDR3 for beta chain variable domain of TCR clone 390799 (TRBV11-2, TRBJ2-2)
CASSPSGGGTGELFF

SEQ ID NO: 781599 - protein, 14 aa, Homo sapiens
  CDR3 for alpha chain variable domain of TCR clone 390800 (TRAV8-4, TRAJ15)
CAVILNQAGTALIF

SEQ ID NO: 781600 - protein, 12 aa, Homo sapiens
  CDR3 for beta chain variable domain of TCR clone 390800 (TRBV11-2, TRBJ2-2)
CASSLGGGELFF

SEQ ID NO: 781601 - protein, 15 aa, Homo sapiens
  CDR3 for alpha chain variable domain of TCR clone 390801 (TRAV13-2, TRAJ5)
CAASKADTGRRALTF

SEQ ID NO: 781602 - protein, 15 aa, Homo sapiens
  CDR3 for beta chain variable domain of TCR clone 390801 (TRBV19, TRBJ2-1)
CASTMGWNSNNEQFF

SEQ ID NO: 781603 - protein, 14 aa, Homo sapiens
  CDR3 for alpha chain variable domain of TCR clone 390802 (TRAV29/DV5, TRAJ36)
CAARRKTGANNLFF

SEQ ID NO: 781604 - protein, 19 aa, Homo sapiens
  CDR3 for beta chain variable domain of TCR clone 390802 (TRBV28, TRBJ2-1)
CASSFSIRGSGRTRYEQFF

SEQ ID NO: 781605 - protein, 12 aa, Homo sapiens
  CDR3 for alpha chain variable domain of TCR clone 390803 (TRAV12-3, TRAJ34)
CAMGYNTDKLIF

SEQ ID NO: 781606 - protein, 15 aa, Homo sapiens
  CDR3 for beta chain variable domain of TCR clone 390803 (TRBV6-3, TRBJ2-7)
CASSSPGTVFYEQYF

SEQ ID NO: 781607 - protein, 22 aa, Homo sapiens
  CDR3 for alpha chain variable domain of TCR clone 390804 (TRAV12-2, TRAJ32)
CSSETPSPVIQPPKSATNKLIF

SEQ ID NO: 781608 - protein, 14 aa, Homo sapiens
  CDR3 for beta chain variable domain of TCR clone 390804 (TRBV7-3, TRBJ2-1)
CASSLSGSYNQQFF

SEQ ID NO: 781609 - protein, 11 aa, Homo sapiens
  CDR3 for alpha chain variable domain of TCR clone 390805 (TRAV4, TRAJ31)
CLVGDNARLMF

SEQ ID NO: 781610 - protein, 16 aa, Homo sapiens
  CDR3 for beta chain variable domain of TCR clone 390805 (TRBV7-2, TRBJ2-5)
CASSSKWLSGQETEYF

SEQ ID NO: 781611 - protein, 13 aa, Homo sapiens
  CDR3 for alpha chain variable domain of TCR clone 390806 (TRAV2, TRAJ6)
CAGSSGGSYIPTF

SEQ ID NO: 781612 - protein, 16 aa, Homo sapiens
  CDR3 for beta chain variable domain of TCR clone 390806 (TRBV7-9, TRBJ1-2)
CASSLGFSSGEDGYTF

SEQ ID NO: 781613 - protein, 15 aa, Homo sapiens
  CDR3 for alpha chain variable domain of TCR clone 390807 (TRAV26-1, TRAJ48)
CIVRVGDFGNEKLTF

SEQ ID NO: 781614 - protein, 15 aa, Homo sapiens
  CDR3 for beta chain variable domain of TCR clone 390807 (TRBV20-1, TRBJ2-7)
CSARDRVSGMDEQYF

SEQ ID NO: 781615 - protein, 14 aa, Homo sapiens
  CDR3 for alpha chain variable domain of TCR clone 390808 (TRAV12-2, TRAJ17)
CAVLFKAAGNKLTF

SEQ ID NO: 781616 - protein, 14 aa, Homo sapiens
  CDR3 for beta chain variable domain of TCR clone 390808 (TRBV11-2, TRBJ2-7)
CASSRSGGAGEQYF

SEQ ID NO: 781617 - protein, 13 aa, Homo sapiens
  CDR3 for alpha chain variable domain of TCR clone 390809 (TRAV12-2, TRAJ24)
CAVSTDSWGKLQF

SEQ ID NO: 781618 - protein, 15 aa, Homo sapiens
  CDR3 for beta chain variable domain of TCR clone 390809 (TRBV7-2, TRBJ1-1)
CASSFAGDRDTEAFF

SEQ ID NO: 781619 - protein, 14 aa, Homo sapiens
  CDR3 for alpha chain variable domain of TCR clone 390810 (TRAV8-3, TRAJ33)
CAVGPLGANYQLIW

SEQ ID NO: 781620 - protein, 12 aa, Homo sapiens
  CDR3 for beta chain variable domain of TCR clone 390810 (TRBV19, TRBJ2-3)
CATTSSTDTQYF

SEQ ID NO: 781621 - protein, 14 aa, Homo sapiens
  CDR3 for alpha chain variable domain of TCR clone 390811 (TRAV26-1, TRAJ44)
CISPLPGTASNLTF

SEQ ID NO: 781622 - protein, 16 aa, Homo sapiens
  CDR3 for beta chain variable domain of TCR clone 390811 (TRBV19, TRBJ2-1)
CASSKAGPSSYNEQFF

SEQ ID NO: 781623 - protein, 12 aa, Homo sapiens
  CDR3 for alpha chain variable domain of TCR clone 390812 (TRAV13-2, TRAJ23)
CAERHRGGKRIF

SEQ ID NO: 781624 - protein, 15 aa, Homo sapiens
  CDR3 for beta chain variable domain of TCR clone 390812 (TRBV9, TRBJ1-6)
CASSVAGTGDSPLHF

SEQ ID NO: 781625 - protein, 15 aa, Homo sapiens
  CDR3 for alpha chain variable domain of TCR clone 390813 (TRAV17, TRAJ57)
CATGPSKGGSEKRVF

SEQ ID NO: 781626 - protein, 16 aa, Homo sapiens
  CDR3 for beta chain variable domain of TCR clone 390813 (TRBV12-4, TRBJ1-5)
CASSRPVGGSNQPQHF

SEQ ID NO: 781627 - protein, 12 aa, Homo sapiens
  CDR3 for alpha chain variable domain of TCR clone 390814 (TRAV12-2, TRAJ31)
WSVNTPDARLMF

SEQ ID NO: 781628 - protein, 12 aa, Homo sapiens
  CDR3 for beta chain variable domain of TCR clone 390814 (TRBV12-4, TRBJ2-7)
CASSLGGYEQYF

SEQ ID NO: 781629 - protein, 15 aa, Homo sapiens
  CDR3 for alpha chain variable domain of TCR clone 390815 (TRAV17, TRAJ54)
CATEKLGQGAQKLVF

SEQ ID NO: 781630 - protein, 16 aa, Homo sapiens
  CDR3 for beta chain variable domain of TCR clone 390815 (TRBV9, TRBJ1-2)
CASSVEEKVSPYGYAF

SEQ ID NO: 781631 - protein, 12 aa, Homo sapiens
  CDR3 for alpha chain variable domain of TCR clone 390816 (TRAV3, TRAJ20)
CAVRDGDYKLSF

SEQ ID NO: 781632 - protein, 14 aa, Homo sapiens
  CDR3 for beta chain variable domain of TCR clone 390816 (TRBV7-2, TRBJ2-2)
CASRGQGAAGELFF

SEQ ID NO: 781633 - protein, 14 aa, Homo sapiens
  CDR3 for alpha chain variable domain of TCR clone 390817 (TRAV8-4, TRAJ43)
CSVSDPRNNNDMRF

SEQ ID NO: 781634 - protein, 15 aa, Homo sapiens
  CDR3 for beta chain variable domain of TCR clone 390817 (TRBV4-2, TRBJ1-2)
CASSQRTGGRDGYTF

SEQ ID NO: 781635 - protein, 15 aa, Homo sapiens
  CDR3 for alpha chain variable domain of TCR clone 390818 (TRAV3, TRAJ4)
CSVRDGTGGYNKLIF

SEQ ID NO: 781636 - protein, 10 aa, Homo sapiens
  CDR3 for beta chain variable domain of TCR clone 390818 (TRBV6-3, TRBJ2-2)
GVSNTGELFF

SEQ ID NO: 781637 - protein, 16 aa, Homo sapiens
  CDR3 for alpha chain variable domain of TCR clone 390819 (TRAV30, TRAJ24)
CGTEIVDADSWGKFQF

SEQ ID NO: 781638 - protein, 14 aa, Homo sapiens
  CDR3 for beta chain variable domain of TCR clone 390819 (TRBV19, TRBJ2-1)
CASSDNQGANEQFF

SEQ ID NO: 781639 - protein, 14 aa, Homo sapiens
  CDR3 for alpha chain variable domain of TCR clone 390820 (TRAV1-1, TRAJ27)
CAVIYNTNAGKSTF

SEQ ID NO: 781640 - protein, 15 aa, Homo sapiens
  CDR3 for beta chain variable domain of TCR clone 390820 (TRBV7-2, TRBJ2-3)
CASSLEQGGTDTQYF

SEQ ID NO: 781641 - protein, 12 aa, Homo sapiens
  CDR3 for alpha chain variable domain of TCR clone 390821 (TRAV8-4, TRAJ43)
CAGSVNNNDMRF

SEQ ID NO: 781642 - protein, 13 aa, Homo sapiens
  CDR3 for beta chain variable domain of TCR clone 390821 (TRBV7-9, TRBJ1-2)
CASSLKQNYGYTF

SEQ ID NO: 781643 - protein, 11 aa, Homo sapiens
  CDR3 for alpha chain variable domain of TCR clone 390822 (TRAV3, TRAJ21)
CAVGNFNKFYF

SEQ ID NO: 781644 - protein, 16 aa, Homo sapiens
  CDR3 for beta chain variable domain of TCR clone 390822 (TRBV19, TRBJ2-1)
CAGSTAGPSSYNEQFF

SEQ ID NO: 781645 - protein, 15 aa, Homo sapiens
  CDR3 for alpha chain variable domain of TCR clone 390823 (TRAV3, TRAJ29)
CAVRPGNSGNTLLVF

SEQ ID NO: 781646 - protein, 16 aa, Homo sapiens
  CDR3 for beta chain variable domain of TCR clone 390823 (TRBV24-1, TRBJ2-2)
CATSDPGTANTGELFF

SEQ ID NO: 781647 - protein, 13 aa, Homo sapiens
  CDR3 for alpha chain variable domain of TCR clone 390824 (TRAV35, TRAJ57)
CAGSQGGSEKLVF

SEQ ID NO: 781648 - protein, 13 aa, Homo sapiens
  CDR3 for beta chain variable domain of TCR clone 390824 (TRBV11-3, TRBJ1-1)
CASTGSLNTEAVF

SEQ ID NO: 781649 - protein, 14 aa, Homo sapiens
  CDR3 for alpha chain variable domain of TCR clone 390825 (TRAV27, TRAJ45)
CAGAQEEVLTDFPL

SEQ ID NO: 781650 - protein, 17 aa, Homo sapiens
  CDR3 for beta chain variable domain of TCR clone 390825 (TRBV11-2, TRBJ2-1)
CASSLYPPGVEYNEQFF

SEQ ID NO: 781651 - protein, 14 aa, Homo sapiens
  CDR3 for alpha chain variable domain of TCR clone 390826 (TRAV1-2, TRAJ8)
CAVREDTGFQKLVF

SEQ ID NO: 781652 - protein, 15 aa, Homo sapiens
  CDR3 for beta chain variable domain of TCR clone 390826 (TRBV28, TRBJ2-6)
CASSLAGSGANVLTV

SEQ ID NO: 781653 - protein, 14 aa, Homo sapiens
  CDR3 for alpha chain variable domain of TCR clone 390827 (TRAV26-1, TRAJ21)
CIVRPPYNFNKFYF

SEQ ID NO: 781654 - protein, 14 aa, Homo sapiens
  CDR3 for beta chain variable domain of TCR clone 390827 (TRBV4-1, TRBJ2-2)
CASSQAVNTGELFF

SEQ ID NO: 781655 - protein, 16 aa, Homo sapiens
  CDR3 for alpha chain variable domain of TCR clone 390828 (TRAV3, TRAJ21)
CAVRDIERGNFNKFYF

SEQ ID NO: 781656 - protein, 13 aa, Homo sapiens
  CDR3 for beta chain variable domain of TCR clone 390828 (TRBV27, TRBJ2-7)
CASSLTTGYELYF

SEQ ID NO: 781657 - protein, 14 aa, Homo sapiens
  CDR3 for alpha chain variable domain of TCR clone 390829 (TRAV12-2, TRAJ40)
CAVKIPSGTYNYIF

SEQ ID NO: 781658 - protein, 11 aa, Homo sapiens
  CDR3 for beta chain variable domain of TCR clone 390829 (TRBV7-9, TRBJ1-6)
CASSSNSPLHF

SEQ ID NO: 781659 - protein, 17 aa, Homo sapiens
  CDR3 for alpha chain variable domain of TCR clone 390830 (TRAV3, TRAJ6)
CAVRDGARAGGSYIPTP

SEQ ID NO: 781660 - protein, 14 aa, Homo sapiens
  CDR3 for beta chain variable domain of TCR clone 390830 (TRBV7-2, TRBJ2-7)
CASSPKTSFYEQYF

SEQ ID NO: 781661 - protein, 14 aa, Homo sapiens
  CDR3 for alpha chain variable domain of TCR clone 390831 (TRAV12-2, TRAJ40)
CVVKIPSGTYKYIF

SEQ ID NO: 781662 - protein, 17 aa, Homo sapiens
  CDR3 for beta chain variable domain of TCR clone 390831 (TRBV11-2, TRBJ2-1)
CASSLYPPGVEYNEQFF

SEQ ID NO: 781663 - protein, 13 aa, Homo sapiens
  CDR3 for alpha chain variable domain of TCR clone 390832 (TRAV21, TRAJ20)
CAVGLRVDYKLSF

SEQ ID NO: 781664 - protein, 13 aa, Homo sapiens
  CDR3 for beta chain variable domain of TCR clone 390832 (TRBV6-1, TRBJ1-1)
CASSRQGNTEVFF

SEQ ID NO: 781665 - protein, 16 aa, Homo sapiens
  CDR3 for alpha chain variable domain of TCR clone 390833 (TRAV12-2, TRAJ32)
CAVNLGQGGATNKLTF

SEQ ID NO: 781666 - protein, 13 aa, Homo sapiens
  CDR3 for beta chain variable domain of TCR clone 390833 (TRBV9, TRBJ2-2)
CASSPRPAGELFF

SEQ ID NO: 781667 - protein, 13 aa, Homo sapiens
  CDR3 for alpha chain variable domain of TCR clone 390834 (TRAV12-3, TRAJ49)
CAMSRNTGNQIYF

SEQ ID NO: 781668 - protein, 16 aa, Homo sapiens
  CDR3 for beta chain variable domain of TCR clone 390834 (TRBV5-8, TRBJ2-2)
CASSLINPGGAGELFF

SEQ ID NO: 781669 - protein, 14 aa, Homo sapiens
  CDR3 for alpha chain variable domain of TCR clone 390835 (TRAV26-1, TRAJ39)
CIVSGSRAGNMLTF

SEQ ID NO: 781670 - protein, 15 aa, Homo sapiens
  CDR3 for beta chain variable domain of TCR clone 390835 (TRBV7-9, TRBJ1-5)
CASSQGPQPNQHQHF

SEQ ID NO: 781671 - protein, 14 aa, Homo sapiens
  CDR3 for alpha chain variable domain of TCR clone 390836 (TRAV26-2, TRAJ32)
CCVGYGGATNKLIF

SEQ ID NO: 781672 - protein, 14 aa, Homo sapiens
  CDR3 for beta chain variable domain of TCR clone 390836 (TRBV4-2, TRBJ2-1)
CASGLDRASNEQFF

SEQ ID NO: 781673 - protein, 20 aa, Homo sapiens
  CDR3 for alpha chain variable domain of TCR clone 390837 (TRAV26-1, TRAJ37)
CCVLLHRQINGSSNTGKLIF

SEQ ID NO: 781674 - protein, 13 aa, Homo sapiens
  CDR3 for beta chain variable domain of TCR clone 390837 (TRBV20-1, TRBJ2-7)
CIARTSGNYEQYF

SEQ ID NO: 781675 - protein, 12 aa, Homo sapiens
  CDR3 for alpha chain variable domain of TCR clone 390838 (TRAV9-2, TRAJ36)
CALKKGANNLFF

SEQ ID NO: 781676 - protein, 12 aa, Homo sapiens
  CDR3 for beta chain variable domain of TCR clone 390838 (TRBV11-2, TRBJ2-2)
CASSLGGGELFF

SEQ ID NO: 781677 - protein, 17 aa, Homo sapiens
  CDR3 for alpha chain variable domain of TCR clone 390839 (TRAV3, TRAJ6)
CAVRDGPRAGGSDIPTF

SEQ ID NO: 781678 - protein, 14 aa, Homo sapiens
  CDR3 for beta chain variable domain of TCR clone 390839 (TRBV7-2, TRBJ2-7)
FASSPKTSFYEQYF

SEQ ID NO: 781679 - protein, 16 aa, Homo sapiens
  CDR3 for alpha chain variable domain of TCR clone 390840 (TRAV4, TRAJ18)
CCVLLIGGSTLGLLYF

SEQ ID NO: 781680 - protein, 12 aa, Homo sapiens
  CDR3 for beta chain variable domain of TCR clone 390840 (TRBV6-3, TRBJ2-7)
CASSLTPYEQYF

SEQ ID NO: 781681 - protein, 14 aa, Homo sapiens
  CDR3 for alpha chain variable domain of TCR clone 390841 (TRAV38-1, TRAJ57)
CAFMNTGGSERLVF

SEQ ID NO: 781682 - protein, 12 aa, Homo sapiens
  CDR3 for beta chain variable domain of TCR clone 390841 (TRBV20-1, TRBJ1-5)
CSTSQGNQPQHF

SEQ ID NO: 781683 - protein, 13 aa, Homo sapiens
  CDR3 for alpha chain variable domain of TCR clone 390842 (TRAV36/DV7, TRAJ37)
CAVFSSNTGKLIF

SEQ ID NO: 781684 - protein, 15 aa, Homo sapiens
  CDR3 for beta chain variable domain of TCR clone 390842 (TRBV7-2, TRBJ1-2)
CASSPRAGWNYGYTF

SEQ ID NO: 781685 - protein, 17 aa, Homo sapiens
  CDR3 for alpha chain variable domain of TCR clone 390843 (TRAV23/DV6, TRAJ57)
CAASSTLSQGGSEKMVF

SEQ ID NO: 781686 - protein, 14 aa, Homo sapiens
  CDR3 for beta chain variable domain of TCR clone 390843 (TRBV13, TRBJ2-5)
CASSLGQGKETQYF

SEQ ID NO: 781687 - protein, 14 aa, Homo sapiens
  CDR3 for alpha chain variable domain of TCR clone 390844 (TRAV1-2, TRAJ8)
CAVREDTGFQKLVF

SEQ ID NO: 781688 - protein, 12 aa, Homo sapiens
  CDR3 for beta chain variable domain of TCR clone 390844 (TRBV11-2, TRBJ2-1)
CASSPGHNEQFF

SEQ ID NO: 781689 - protein, 11 aa, Homo sapiens
  CDR3 for alpha chain variable domain of TCR clone 390845 (TRAV12-3, TRAJ27)
CAMTNAGKSTF

SEQ ID NO: 781690 - protein, 17 aa, Homo sapiens
  CDR3 for beta chain variable domain of TCR clone 390845 (TRBV13, TRBJ2-3)
CASSLSRVAGGRNTQYF

SEQ ID NO: 781691 - protein, 12 aa, Homo sapiens
  CDR3 for alpha chain variable domain of TCR clone 390846 (TRAV36/DV7, TRAJ37)
CACYGNTGKLIF

SEQ ID NO: 781692 - protein, 13 aa, Homo sapiens
  CDR3 for beta chain variable domain of TCR clone 390846 (TRBV10-3, TRBJ2-7)
CASKLAVNYEHYF

SEQ ID NO: 781693 - protein, 12 aa, Homo sapiens
  CDR3 for alpha chain variable domain of TCR clone 390847 (TRAV1-2, TRAJ29)
CAVPSGNTPLVF

SEQ ID NO: 781694 - protein, 13 aa, Homo sapiens
  CDR3 for beta chain variable domain of TCR clone 390847 (TRBV5-4, TRBJ1-1)
CAISVDLGTEAFF

SEQ ID NO: 781695 - protein, 12 aa, Homo sapiens
  CDR3 for alpha chain variable domain of TCR clone 390848 (TRAV12-3, TRAJ17)
CAMTLTGNRLTF

SEQ ID NO: 781696 - protein, 18 aa, Homo sapiens
  CDR3 for beta chain variable domain of TCR clone 390848 (TRBV18, TRBJ2-2)
CASSPRLTAGGPTGELFF

SEQ ID NO: 781697 - protein, 13 aa, Homo sapiens
  CDR3 for alpha chain variable domain of TCR clone 390849 (TRAV12-2, TRAJ52)
CAVSGTSYGKLTF

SEQ ID NO: 781698 - protein, 12 aa, Homo sapiens
  CDR3 for beta chain variable domain of TCR clone 390849 (TRBV5-5, TRBJ2-5)
CASSYFGETQYF

SEQ ID NO: 781699 - protein, 14 aa, Homo sapiens
  CDR3 for alpha chain variable domain of TCR clone 390850 (TRAV16, TRAJ33)
CALSAMDSHYQLIW

SEQ ID NO: 781700 - protein, 17 aa, Homo sapiens
  CDR3 for beta chain variable domain of TCR clone 390850 (TRBV25-1, TRBJ2-7)
CASSDARVVFSSYEQYF

SEQ ID NO: 781701 - protein, 13 aa, Homo sapiens
  CDR3 for alpha chain variable domain of TCR clone 390851 (TRAV5, TRAJ11)
CAETTSGYSTLTF

SEQ ID NO: 781702 - protein, 13 aa, Homo sapiens
  CDR3 for beta chain variable domain of TCR clone 390851 (TRBV10-2, TRBJ2-7)
CASGASGGFEQYF

SEQ ID NO: 781703 - protein, 15 aa, Homo sapiens
  CDR3 for alpha chain variable domain of TCR clone 390852 (TRAV26-1, TRAJ21)
CIVRVPNHNFNKFYF

SEQ ID NO: 781704 - protein, 16 aa, Homo sapiens
  CDR3 for beta chain variable domain of TCR clone 390852 (TRBV7-9, TRBJ2-3)
CASSLQGNPGTDTQYF

SEQ ID NO: 781705 - protein, 13 aa, Homo sapiens
  CDR3 for alpha chain variable domain of TCR clone 390853 (TRAV27, TRAJ41)
CAGEGNSGYALNF

SEQ ID NO: 781706 - protein, 14 aa, Homo sapiens
  CDR3 for beta chain variable domain of TCR clone 390853 (TRBV25-1, TRBJ1-1)
CASTHLGGNTAAFF

SEQ ID NO: 781707 - protein, 14 aa, Homo sapiens
  CDR3 for alpha chain variable domain of TCR clone 390854 (TRAV1-2, TRAJ16)
CAVNRFSDGQQLLF

SEQ ID NO: 781708 - protein, 13 aa, Homo sapiens
  CDR3 for beta chain variable domain of TCR clone 390854 (TRBV12-4, TRBJ2-2)
CASSITGSGELFF

SEQ ID NO: 781709 - protein, 14 aa, Homo sapiens
  CDR3 for alpha chain variable domain of TCR clone 390855 (TRAV8-3, TRAJ4)
CAVGAAGGYNKLIF

SEQ ID NO: 781710 - protein, 16 aa, Homo sapiens
  CDR3 for beta chain variable domain of TCR clone 390855 (TRBV2, TRBJ2-1)
CASSANPRDWQAEQFF

SEQ ID NO: 781711 - protein, 15 aa, Homo sapiens
  CDR3 for alpha chain variable domain of TCR clone 390856 (TRAV3, TRAJ5)
CAVRDPDTGRRALTL

SEQ ID NO: 781712 - protein, 13 aa, Homo sapiens
  CDR3 for beta chain variable domain of TCR clone 390856 (TRBV12-4, TRBJ2-7)
CASSPTETYEQYF

SEQ ID NO: 781713 - protein, 16 aa, Homo sapiens
  CDR3 for alpha chain variable domain of TCR clone 390857 (TRAV30, TRAJ24)
CGTEIVDADSWGKFQF

SEQ ID NO: 781714 - protein, 12 aa, Homo sapiens
  CDR3 for beta chain variable domain of TCR clone 390857 (TRBV11-2, TRBJ2-2)
CANSLGGGELFF

SEQ ID NO: 781715 - protein, 17 aa, Homo sapiens
  CDR3 for alpha chain variable domain of TCR clone 390858 (TRAV12-2, TRAJ4)
CAVNVRPVSGGYNKLIF

SEQ ID NO: 781716 - protein, 14 aa, Homo sapiens
  CDR3 for beta chain variable domain of TCR clone 390858 (TRBV6-5, TRBJ1-2)
CASTRGGGSDGYTF

SEQ ID NO: 781717 - protein, 10 aa, Homo sapiens
  CDR3 for alpha chain variable domain of TCR clone 390859 (TRAV1-2, TRAJ34)
CAVDTDKLIF

SEQ ID NO: 781718 - protein, 18 aa, Homo sapiens
  CDR3 for beta chain variable domain of TCR clone 390859 (TRBV7-9, TRBJ2-7)
CASSLTTSGSRTWYEQYF

SEQ ID NO: 781719 - protein, 12 aa, Homo sapiens
  CDR3 for alpha chain variable domain of TCR clone 390860 (TRAV29/DV5, TRAJ34)
CAARHNTDKLIF

SEQ ID NO: 781720 - protein, 19 aa, Homo sapiens
  CDR3 for beta chain variable domain of TCR clone 390860 (TRBV19, TRBJ2-5)
CASSIGQVTDFFLGETQYF

SEQ ID NO: 781721 - protein, 15 aa, Homo sapiens
  CDR3 for alpha chain variable domain of TCR clone 390861 (TRAV3, TRAJ29)
CAVRAPLSGNTPLVF

SEQ ID NO: 781722 - protein, 14 aa, Homo sapiens
  CDR3 for beta chain variable domain of TCR clone 390861 (TRBV7-2, TRBJ2-1)
CASSLGVGYNEQFF

SEQ ID NO: 781723 - protein, 13 aa, Homo sapiens
  CDR3 for alpha chain variable domain of TCR clone 390862 (TRAV29/DV5, TRAJ29)
CAASAAGNTPLVF

SEQ ID NO: 781724 - protein, 14 aa, Homo sapiens
  CDR3 for beta chain variable domain of TCR clone 390862 (TRBV19, TRBJ2-3)
CASSAPRGTDTQCF

SEQ ID NO: 781725 - protein, 14 aa, Homo sapiens
  CDR3 for alpha chain variable domain of TCR clone 390863 (TRAV12-3, TRAJ10)
SHLPLTGGGNKLTF

SEQ ID NO: 781726 - protein, 15 aa, Homo sapiens
  CDR3 for beta chain variable domain of TCR clone 390863 (TRBV15, TRBJ2-2)
CATTKLAGGTGELFF

SEQ ID NO: 781727 - protein, 13 aa, Homo sapiens
  CDR3 for alpha chain variable domain of TCR clone 390864 (TRAV13-1, TRAJ5)
CAASDTGRRALTF

SEQ ID NO: 781728 - protein, 17 aa, Homo sapiens
  CDR3 for beta chain variable domain of TCR clone 390864 (TRBV20-1, TRBJ2-1)
CSASSSGLAGSYNEQFF

SEQ ID NO: 781729 - protein, 15 aa, Homo sapiens
  CDR3 for alpha chain variable domain of TCR clone 390865 (TRAV3, TRAJ3)
CAVRDMSSSASKIIS

SEQ ID NO: 781730 - protein, 14 aa, Homo sapiens
  CDR3 for beta chain variable domain of TCR clone 390865 (TRBV6-6, TRBJ2-7)
CASSIAGGVDEQYF

SEQ ID NO: 781731 - protein, 16 aa, Homo sapiens
  CDR3 for alpha chain variable domain of TCR clone 390866 (TRAV8-4, TRAJ9)
CAVTFNTGGFKNYLCS

SEQ ID NO: 781732 - protein, 15 aa, Homo sapiens
  CDR3 for beta chain variable domain of TCR clone 390866 (TRBV7-9, TRBJ2-2)
CASSPETGAGGELFF

SEQ ID NO: 781733 - protein, 22 aa, Homo sapiens
  CDR3 for alpha chain variable domain of TCR clone 390867 (TRAV13-1, TRAJ41)
CAASGPRRTQIPDIPNPDPAVY

SEQ ID NO: 781734 - protein, 16 aa, Homo sapiens
  CDR3 for beta chain variable domain of TCR clone 390867 (TRBV18, TRBJ2-3)
CASSPPAGGPRKYAVF

SEQ ID NO: 781735 - protein, 13 aa, Homo sapiens
  CDR3 for alpha chain variable domain of TCR clone 390868 (TRAV1-2, TRAJ9)
CAALNTGGFKAII

SEQ ID NO: 781736 - protein, 13 aa, Homo sapiens
  CDR3 for beta chain variable domain of TCR clone 390868 (TRBV19, TRBJ1-2)
CASSVPGQDGYTF

SEQ ID NO: 781737 - protein, 13 aa, Homo sapiens
  CDR3 for alpha chain variable domain of TCR clone 390869 (TRAV12-1, TRAJ26)
SATYLYYGQNFVF

SEQ ID NO: 781738 - protein, 15 aa, Homo sapiens
  CDR3 for beta chain variable domain of TCR clone 390869 (TRBV5-1, TRBJ2-6)
CASSLDPSGDNVLTF

SEQ ID NO: 781739 - protein, 15 aa, Homo sapiens
  CDR3 for alpha chain variable domain of TCR clone 390870 (TRAV3, TRAJ5)
CAVRDLDTGRRALTF

SEQ ID NO: 781740 - protein, 14 aa, Homo sapiens
  CDR3 for beta chain variable domain of TCR clone 390870 (TRBV28, TRBJ2-1)
CAIHRTGARTEQFF

SEQ ID NO: 781741 - protein, 15 aa, Homo sapiens
  CDR3 for alpha chain variable domain of TCR clone 390871 (TRAV27, TRAJ38)
CAARRNAGNNRKVIW

SEQ ID NO: 781742 - protein, 13 aa, Homo sapiens
  CDR3 for beta chain variable domain of TCR clone 390871 (TRBV20-1, TRBJ1-1)
CSARAGGNTEAFF

SEQ ID NO: 781743 - protein, 10 aa, Homo sapiens
  CDR3 for alpha chain variable domain of TCR clone 390872 (TRAV12-3, TRAJ49)
CAMSGNQFYF

SEQ ID NO: 781744 - protein, 17 aa, Homo sapiens
  CDR3 for beta chain variable domain of TCR clone 390872 (TRBV13, TRBJ2-3)
CASSLSRVAGGRNTQYF

SEQ ID NO: 781745 - protein, 13 aa, Homo sapiens
  CDR3 for alpha chain variable domain of TCR clone 390873 (TRAV27, TRAJ56)
CAGKPGANSKLTF

SEQ ID NO: 781746 - protein, 13 aa, Homo sapiens
  CDR3 for beta chain variable domain of TCR clone 390873 (TRBV12-4, TRBJ1-2)
CASSLRQGKGYTF

SEQ ID NO: 781747 - protein, 18 aa, Homo sapiens
  CDR3 for alpha chain variable domain of TCR clone 390874 (TRAV12-3, TRAJ52)
CAMSVGGAGGTSYVKLTF

SEQ ID NO: 781748 - protein, 16 aa, Homo sapiens
  CDR3 for beta chain variable domain of TCR clone 390874 (TRBV29-1, TRBJ2-7)
CSVEDAEDGTAYEQYF

SEQ ID NO: 781749 - protein, 13 aa, Homo sapiens
  CDR3 for alpha chain variable domain of TCR clone 390875 (TRAV21, TRAJ27)
CAALNTNAGKSTF

SEQ ID NO: 781750 - protein, 12 aa, Homo sapiens
  CDR3 for beta chain variable domain of TCR clone 390875 (TRBV12-4, TRBJ2-7)
CASSLGGYEQYF

SEQ ID NO: 781751 - protein, 13 aa, Homo sapiens
  CDR3 for alpha chain variable domain of TCR clone 390876 (TRAV8-3, TRAJ21)
GAVGAYKFNKFYF

SEQ ID NO: 781752 - protein, 11 aa, Homo sapiens
  CDR3 for beta chain variable domain of TCR clone 390876 (TRBV24-1, TRBJ1-1)
CQAKGWTEAFF

SEQ ID NO: 781753 - protein, 16 aa, Homo sapiens
  CDR3 for alpha chain variable domain of TCR clone 390877 (TRAV4, TRAJ5)
CLVGPDHGHGQASPYF

SEQ ID NO: 781754 - protein, 15 aa, Homo sapiens
  CDR3 for beta chain variable domain of TCR clone 390877 (TRBV27, TRBJ2-5)
CASSLIPSGGETQYF

SEQ ID NO: 781755 - protein, 14 aa, Homo sapiens
  CDR3 for alpha chain variable domain of TCR clone 390878 (TRAV4, TRAJ17)
CLVGDMAAGNKLTF

SEQ ID NO: 781756 - protein, 15 aa, Homo sapiens
  CDR3 for beta chain variable domain of TCR clone 390878 (TRBV7-8, TRBJ2-1)
CASSLAGGLYNEQFF

SEQ ID NO: 781757 - protein, 13 aa, Homo sapiens
  CDR3 for alpha chain variable domain of TCR clone 390879 (TRAV20, TRAJ48)
CAVQGVGNEKLTF

SEQ ID NO: 781758 - protein, 19 aa, Homo sapiens
  CDR3 for beta chain variable domain of TCR clone 390879 (TRBV2, TRBJ2-2)
CSSSQPGLAGGGNTGELFF

SEQ ID NO: 781759 - protein, 15 aa, Homo sapiens
  CDR3 for alpha chain variable domain of TCR clone 390880 (TRAV17, TRAJ57)
CATGPSQGGSEKLVF

SEQ ID NO: 781760 - protein, 13 aa, Homo sapiens
  CDR3 for beta chain variable domain of TCR clone 390880 (TRBV29-1, TRBJ2-1)
CGEGTSGYNEQFF

SEQ ID NO: 781761 - protein, 13 aa, Homo sapiens
  CDR3 for alpha chain variable domain of TCR clone 390881 (TRAV2, TRAJ15)
CAVASQAGTALIF

SEQ ID NO: 781762 - protein, 13 aa, Homo sapiens
  CDR3 for beta chain variable domain of TCR clone 390881 (TRBV5-7, TRBJ2-5)
CASSADYRETQYF

SEQ ID NO: 781763 - protein, 13 aa, Homo sapiens
  CDR3 for alpha chain variable domain of TCR clone 390882 (TRAV12-3, TRAJ4)
CNEQAGGYNKLIF

SEQ ID NO: 781764 - protein, 15 aa, Homo sapiens
  CDR3 for beta chain variable domain of TCR clone 390882 (TRBV5-1, TRBJ1-1)
CASSLPDLGGTEAFF

SEQ ID NO: 781765 - protein, 14 aa, Homo sapiens
  CDR3 for alpha chain variable domain of TCR clone 390883 (TRAV3, TRAJ9)
CAVRLNTGGFKTIF

SEQ ID NO: 781766 - protein, 12 aa, Homo sapiens
  CDR3 for beta chain variable domain of TCR clone 390883 (TRBV7-9, TRBJ2-7)
CASSLEGYEQYF

SEQ ID NO: 781767 - protein, 17 aa, Homo sapiens
  CDR3 for alpha chain variable domain of TCR clone 390884 (TRAV26-1, TRAJ53)
CIVRVDDSGGSNYKLTF

SEQ ID NO: 781768 - protein, 18 aa, Homo sapiens
  CDR3 for beta chain variable domain of TCR clone 390884 (TRBV7-9, TRBJ2-7)
CASSLTTSGSRTWYEQYF

SEQ ID NO: 781769 - protein, 12 aa, Homo sapiens
  CDR3 for alpha chain variable domain of TCR clone 390885 (TRAV2, TRAJ31)
CAVEDGNARLVF

SEQ ID NO: 781770 - protein, 18 aa, Homo sapiens
  CDR3 for beta chain variable domain of TCR clone 390885 (TRBV7-9, TRBJ2-3)
CASSLDLAGLATPDTQYF

SEQ ID NO: 781771 - protein, 15 aa, Homo sapiens
  CDR3 for alpha chain variable domain of TCR clone 390886 (TRAV23/DV6, TRAJ13)
CAAWPGGGGYQKVTF

SEQ ID NO: 781772 - protein, 17 aa, Homo sapiens
  CDR3 for beta chain variable domain of TCR clone 390886 (TRBV19, TRBJ2-7)
CASSISFYDSYPYEQYL

SEQ ID NO: 781773 - protein, 14 aa, Homo sapiens
  CDR3 for alpha chain variable domain of TCR clone 390887 (TRAV9-2, TRAJ39)
RALYIYNAGNMLTF

SEQ ID NO: 781774 - protein, 12 aa, Homo sapiens
  CDR3 for beta chain variable domain of TCR clone 390887 (TRBV11-2, TRBJ2-2)
CASSLGGGELFF

SEQ ID NO: 781775 - protein, 12 aa, Homo sapiens
  CDR3 for alpha chain variable domain of TCR clone 390888 (TRAV26-1, TRAJ43)
CIVRGNNNDKRF

SEQ ID NO: 781776 - protein, 13 aa, Homo sapiens
  CDR3 for beta chain variable domain of TCR clone 390888 (TRBV20-1, TRBJ2-3)
CSAIYPGADTQYF

SEQ ID NO: 781777 - protein, 16 aa, Homo sapiens
  CDR3 for alpha chain variable domain of TCR clone 390889 (TRAV8-4, TRAJ5)
CAVSPLTDTGRRALTF

SEQ ID NO: 781778 - protein, 14 aa, Homo sapiens
  CDR3 for beta chain variable domain of TCR clone 390889 (TRBV19, TRBJ1-6)
CASSTDGWNSLLHF

SEQ ID NO: 781779 - protein, 11 aa, Homo sapiens
  CDR3 for alpha chain variable domain of TCR clone 390890 (TRAV3, TRAJ21)
CAVGNFNKFYF

SEQ ID NO: 781780 - protein, 14 aa, Homo sapiens
  CDR3 for beta chain variable domain of TCR clone 390890 (TRBV6-6, TRBJ2-7)
CDSSDSGAGYEQYF

SEQ ID NO: 781781 - protein, 14 aa, Homo sapiens
  CDR3 for alpha chain variable domain of TCR clone 390891 (TRAV1-2, TRAJ16)
CAVNRFSDGQKLLF

SEQ ID NO: 781782 - protein, 15 aa, Homo sapiens
  CDR3 for beta chain variable domain of TCR clone 390891 (TRBV27, TRBJ1-1)
RASSPYADPYTEAFF

SEQ ID NO: 781783 - protein, 13 aa, Homo sapiens
  CDR3 for alpha chain variable domain of TCR clone 390892 (TRAV29/DV5, TRAJ31)
CAASRNNNARLMF

SEQ ID NO: 781784 - protein, 14 aa, Homo sapiens
  CDR3 for beta chain variable domain of TCR clone 390892 (TRBV7-9, TRBJ2-2)
CANSLVQDTGELFF

SEQ ID NO: 781785 - protein, 14 aa, Homo sapiens
  CDR3 for alpha chain variable domain of TCR clone 390893 (TRAV12-2, TRAJ17)
CAVNIKAAGNKLTF

SEQ ID NO: 781786 - protein, 18 aa, Homo sapiens
  CDR3 for beta chain variable domain of TCR clone 390893 (TRBV20-1, TRBJ2-3)
CSASGLAGGPGTTDTQYF

SEQ ID NO: 781787 - protein, 14 aa, Homo sapiens
  CDR3 for alpha chain variable domain of TCR clone 390894 (TRAV23/DV6, TRAJ40)
CAASLTSGTYKYIF

SEQ ID NO: 781788 - protein, 13 aa, Homo sapiens
  CDR3 for beta chain variable domain of TCR clone 390894 (TRBV5-5, TRBJ1-2)
CASSFWRGEDYTF

SEQ ID NO: 781789 - protein, 14 aa, Homo sapiens
  CDR3 for alpha chain variable domain of TCR clone 390895 (TRAV12-2, TRAJ40)
CAVKIPSGTYKYIF

SEQ ID NO: 781790 - protein, 15 aa, Homo sapiens
  CDR3 for beta chain variable domain of TCR clone 390895 (TRBV5-1, TRBJ2-7)
CASSFSTDSVYEQYF

SEQ ID NO: 781791 - protein, 15 aa, Homo sapiens
  CDR3 for alpha chain variable domain of TCR clone 390896 (TRAV17, TRAJ48)
CATDETNFGNEKLTF

SEQ ID NO: 781792 - protein, 14 aa, Homo sapiens
  CDR3 for beta chain variable domain of TCR clone 390896 (TRBV10-3, TRBJ1-3)
CASRGQGAGNTIYF

SEQ ID NO: 781793 - protein, 18 aa, Homo sapiens
  CDR3 for alpha chain variable domain of TCR clone 390897 (TRAV35, TRAJ28)
CAWHNYPLSGAGSYQLTF

SEQ ID NO: 781794 - protein, 13 aa, Homo sapiens
  CDR3 for beta chain variable domain of TCR clone 390897 (TRBV9, TRBJ1-1)
CASSVGGLTEAFF

SEQ ID NO: 781795 - protein, 12 aa, Homo sapiens
  CDR3 for alpha chain variable domain of TCR clone 390898 (TRAV12-1, TRAJ40)
CAVYSGTYKYIF

SEQ ID NO: 781796 - protein, 18 aa, Homo sapiens
  CDR3 for beta chain variable domain of TCR clone 390898 (TRBV11-3, TRBJ2-3)
CASSLGGASRGAPNTQYC

SEQ ID NO: 781797 - protein, 15 aa, Homo sapiens
  CDR3 for alpha chain variable domain of TCR clone 390899 (TRAV3, TRAJ6)
CAVRDRGGRKLHTYI

SEQ ID NO: 781798 - protein, 12 aa, Homo sapiens
  CDR3 for beta chain variable domain of TCR clone 390899 (TRBV12-4, TRBJ1-2)
CASIGTGHGYTF

SEQ ID NO: 781799 - protein, 12 aa, Homo sapiens
  CDR3 for alpha chain variable domain of TCR clone 390900 (TRAV21, TRAJ23)
CAVPNPGGKLIF

SEQ ID NO: 781800 - protein, 15 aa, Homo sapiens
  CDR3 for beta chain variable domain of TCR clone 390900 (TRBV27, TRBJ2-1)
CASSFGAGTGPEQFF

SEQ ID NO: 781801 - protein, 11 aa, Homo sapiens
  CDR3 for alpha chain variable domain of TCR clone 390901 (TRAV17, TRAJ9)
CATTGGFKTIF

SEQ ID NO: 781802 - protein, 15 aa, Homo sapiens
  CDR3 for beta chain variable domain of TCR clone 390901 (TRBV9, TRBJ1-6)
CASSVAGTGDSHLHF

SEQ ID NO: 781803 - protein, 12 aa, Homo sapiens
  CDR3 for alpha chain variable domain of TCR clone 390902 (TRAV8-4, TRAJ31)
CAGSDSNARLMF

SEQ ID NO: 781804 - protein, 15 aa, Homo sapiens
  CDR3 for beta chain variable domain of TCR clone 390902 (TRBV19, TRBJ2-7)
CASRFWGQGAGEQYF

SEQ ID NO: 781805 - protein, 14 aa, Homo sapiens
  CDR3 for alpha chain variable domain of TCR clone 390903 (TRAV1-2, TRAJ16)
CSVNRLSDGQKLLF

SEQ ID NO: 781806 - protein, 14 aa, Homo sapiens
  CDR3 for beta chain variable domain of TCR clone 390903 (TRBV7-3, TRBJ2-1)
CASSLAGGTNEQFF

SEQ ID NO: 781807 - protein, 16 aa, Homo sapiens
  CDR3 for alpha chain variable domain of TCR clone 390904 (TRAV3, TRAJ18)
CAVRDGRGSTLGRLYF

SEQ ID NO: 781808 - protein, 15 aa, Homo sapiens
  CDR3 for beta chain variable domain of TCR clone 390904 (TRBV7-9, TRBJ1-6)
CASSSPGRGNSPLHI

SEQ ID NO: 781809 - protein, 17 aa, Homo sapiens
  CDR3 for alpha chain variable domain of TCR clone 390905 (TRAV3, TRAJ13)
CAVRDMRRPGGYQKVTF

SEQ ID NO: 781810 - protein, 14 aa, Homo sapiens
  CDR3 for beta chain variable domain of TCR clone 390905 (TRBV12-5, TRBJ2-5)
CASGSRTHQETQYF

SEQ ID NO: 781811 - protein, 14 aa, Homo sapiens
  CDR3 for alpha chain variable domain of TCR clone 390906 (TRAV1-2, TRAJ16)
CAVNRFSDGPKLPF

SEQ ID NO: 781812 - protein, 13 aa, Homo sapiens
  CDR3 for beta chain variable domain of TCR clone 390906 (TRBV10-3, TRBJ2-7)
CASKLAVNYEQYF

SEQ ID NO: 781813 - protein, 12 aa, Homo sapiens
  CDR3 for alpha chain variable domain of TCR clone 390907 (TRAV12-3, TRAJ17)
CAMTLTGNKLTF

SEQ ID NO: 781814 - protein, 14 aa, Homo sapiens
  CDR3 for beta chain variable domain of TCR clone 390907 (TRBV4-1, TRBJ2-7)
CASSPVAGGGEQYF

SEQ ID NO: 781815 - protein, 15 aa, Homo sapiens
  CDR3 for alpha chain variable domain of TCR clone 390908 (TRAV26-2, TRAJ39)
CSLRGNNNAGNMLTF

SEQ ID NO: 781816 - protein, 17 aa, Homo sapiens
  CDR3 for beta chain variable domain of TCR clone 390908 (TRBV11-2, TRBJ2-1)
CASSLYPPGVEYNEQFF

SEQ ID NO: 781817 - protein, 12 aa, Homo sapiens
  CDR3 for alpha chain variable domain of TCR clone 390909 (TRAV20, TRAJ39)
CAVGNAGNILTF

SEQ ID NO: 781818 - protein, 17 aa, Homo sapiens
  CDR3 for beta chain variable domain of TCR clone 390909 (TRBV4-1, TRBJ2-3)
CASSQGYVSGGTDTQYF

SEQ ID NO: 781819 - protein, 18 aa, Homo sapiens
  CDR3 for alpha chain variable domain of TCR clone 390910 (TRAV8-4, TRAJ52)
CAVTRANAGGTSYGKLTF

SEQ ID NO: 781820 - protein, 20 aa, Homo sapiens
  CDR3 for beta chain variable domain of TCR clone 390910 (TRBV19, TRBJ2-1)
CASSRSRTVTSTRLNNEQFF

SEQ ID NO: 781821 - protein, 12 aa, Homo sapiens
  CDR3 for alpha chain variable domain of TCR clone 390911 (TRAV12-2, TRAJ7)
CAVMRGNNRLAF

SEQ ID NO: 781822 - protein, 12 aa, Homo sapiens
  CDR3 for beta chain variable domain of TCR clone 390911 (TRBV7-8, TRBJ2-7)
CASGLGDREQYF

SEQ ID NO: 781823 - protein, 16 aa, Homo sapiens
  CDR3 for alpha chain variable domain of TCR clone 390912 (TRAV8-3, TRAJ8)
CSVPRDGNTGFQKLVF

SEQ ID NO: 781824 - protein, 14 aa, Homo sapiens
  CDR3 for beta chain variable domain of TCR clone 390912 (TRBV4-1, TRBJ2-2)
CASSQAVNTGELFF

SEQ ID NO: 781825 - protein, 18 aa, Homo sapiens
  CDR3 for alpha chain variable domain of TCR clone 390913 (TRAV26-2, TRAJ54)
CILRDVEVGIQGAQKLVF

SEQ ID NO: 781826 - protein, 13 aa, Homo sapiens
  CDR3 for beta chain variable domain of TCR clone 390913 (TRBV13, TRBJ2-5)
CASSPEVGETQYF

SEQ ID NO: 781827 - protein, 17 aa, Homo sapiens
  CDR3 for alpha chain variable domain of TCR clone 390914 (TRAV36/DV7, TRAJ52)
CAVAQRASGTSYGKLTF

SEQ ID NO: 781828 - protein, 17 aa, Homo sapiens
  CDR3 for beta chain variable domain of TCR clone 390914 (TRBV28, TRBJ2-5)
CASSTPEGDALQETQYF

SEQ ID NO: 781829 - protein, 12 aa, Homo sapiens
  CDR3 for alpha chain variable domain of TCR clone 390915 (TRAV12-3, TRAJ40)
CAVSSGTYKYIF

SEQ ID NO: 781830 - protein, 14 aa, Homo sapiens
  CDR3 for beta chain variable domain of TCR clone 390915 (TRBV7-9, TRBJ2-7)
CQQPRGGLTYEQYF

SEQ ID NO: 781831 - protein, 12 aa, Homo sapiens
  CDR3 for alpha chain variable domain of TCR clone 390916 (TRAV12-2, TRAJ47)
CAVAEYGNKRVF

SEQ ID NO: 781832 - protein, 14 aa, Homo sapiens
  CDR3 for beta chain variable domain of TCR clone 390916 (TRBV20-1, TRBJ1-1)
CSAMGGTANTEAFF

SEQ ID NO: 781833 - protein, 14 aa, Homo sapiens
  CDR3 for alpha chain variable domain of TCR clone 390917 (TRAV3, TRAJ9)
CAVRGNTGGFKTIF

SEQ ID NO: 781834 - protein, 18 aa, Homo sapiens
  CDR3 for beta chain variable domain of TCR clone 390917 (TRBV7-9, TRBJ2-7)
CASSLTTSGSRTWYEQYF

SEQ ID NO: 781835 - protein, 10 aa, Homo sapiens
  CDR3 for alpha chain variable domain of TCR clone 390918 (TRAV21, TRAJ31)
CAVDNARLMF

SEQ ID NO: 781836 - protein, 13 aa, Homo sapiens
  CDR3 for beta chain variable domain of TCR clone 390918 (TRBV4-1, TRBJ1-1)
CASSQKMNTEAFF

SEQ ID NO: 781837 - protein, 14 aa, Homo sapiens
  CDR3 for alpha chain variable domain of TCR clone 390919 (TRAV16, TRAJ33)
CALSAMDSNYQLIW

SEQ ID NO: 781838 - protein, 16 aa, Homo sapiens
  CDR3 for beta chain variable domain of TCR clone 390919 (TRBV25-1, TRBJ2-7)
CASSELPGGGIYEQYF

SEQ ID NO: 781839 - protein, 17 aa, Homo sapiens
  CDR3 for alpha chain variable domain of TCR clone 390920 (TRAV3, TRAJ6)
CAVRDGPRAGGSYIPTF

SEQ ID NO: 781840 - protein, 13 aa, Homo sapiens
  CDR3 for beta chain variable domain of TCR clone 390920 (TRBV7-3, TRBJ1-1)
CQQLKGGNTEAFF

SEQ ID NO: 781841 - protein, 12 aa, Homo sapiens
  CDR3 for alpha chain variable domain of TCR clone 390921 (TRAV1-1, TRAJ39)
CAVPVVGNMLTF

SEQ ID NO: 781842 - protein, 15 aa, Homo sapiens
  CDR3 for beta chain variable domain of TCR clone 390921 (TRBV28, TRBJ2-5)
CASSPGQGSIETQYF

SEQ ID NO: 781843 - protein, 13 aa, Homo sapiens
  CDR3 for alpha chain variable domain of TCR clone 390922 (TRAV3, TRAJ41)
CAVSSNSGYALNF

SEQ ID NO: 781844 - protein, 14 aa, Homo sapiens
  CDR3 for beta chain variable domain of TCR clone 390922 (TRBV7-2, TRBJ2-7)
CASSPKTSFYEQFF

SEQ ID NO: 781845 - protein, 13 aa, Homo sapiens
  CDR3 for alpha chain variable domain of TCR clone 390923 (TRAV21, TRAJ27)
CAARPGNAGKSTF

SEQ ID NO: 781846 - protein, 13 aa, Homo sapiens
  CDR3 for beta chain variable domain of TCR clone 390923 (TRBV7-6, TRBJ2-1)
CWQLGGGADEQFF

SEQ ID NO: 781847 - protein, 18 aa, Homo sapiens
  CDR3 for alpha chain variable domain of TCR clone 390924 (TRAV21, TRAJ52)
CAVGPSPAGGTSYGKLTF

SEQ ID NO: 781848 - protein, 17 aa, Homo sapiens
  CDR3 for beta chain variable domain of TCR clone 390924 (TRBV13, TRBJ2-3)
CASSLPRVAGGRNTQYF

SEQ ID NO: 781849 - protein, 14 aa, Homo sapiens
  CDR3 for alpha chain variable domain of TCR clone 390925 (TRAV12-1, TRAJ12)
CVVISMDSSYKLIF

SEQ ID NO: 781850 - protein, 15 aa, Homo sapiens
  CDR3 for beta chain variable domain of TCR clone 390925 (TRBV5-4, TRBJ2-3)
CASSLDQRATDTQYF

SEQ ID NO: 781851 - protein, 14 aa, Homo sapiens
  CDR3 for alpha chain variable domain of TCR clone 390926 (TRAV6, TRAJ6)
CALPTSGGRYIPTF

SEQ ID NO: 781852 - protein, 17 aa, Homo sapiens
  CDR3 for beta chain variable domain of TCR clone 390926 (TRBV5-1, TRBJ2-5)
CASSPVALGQSQETQYF

SEQ ID NO: 781853 - protein, 16 aa, Homo sapiens
  CDR3 for alpha chain variable domain of TCR clone 390927 (TRAV4, TRAJ9)
CLVGDPNRPGGFKTIF

SEQ ID NO: 781854 - protein, 15 aa, Homo sapiens
  CDR3 for beta chain variable domain of TCR clone 390927 (TRBV28, TRBJ2-5)
CASSPPWSYQETQYF

SEQ ID NO: 781855 - protein, 14 aa, Homo sapiens
  CDR3 for alpha chain variable domain of TCR clone 390928 (TRAV35, TRAJ13)
CAGSPSGGYQKVTF

SEQ ID NO: 781856 - protein, 13 aa, Homo sapiens
  CDR3 for beta chain variable domain of TCR clone 390928 (TRBV12-4, TRBJ2-7)
CASSPTETYEQYF

SEQ ID NO: 781857 - protein, 15 aa, Homo sapiens
  CDR3 for alpha chain variable domain of TCR clone 390929 (TRAV12-1, TRAJ44)
CVVDEYTGTASKLTF

SEQ ID NO: 781858 - protein, 14 aa, Homo sapiens
  CDR3 for beta chain variable domain of TCR clone 390929 (TRBV5-1, TRBJ1-2)
CASSLEPVNYGYSF

SEQ ID NO: 781859 - protein, 15 aa, Homo sapiens
  CDR3 for alpha chain variable domain of TCR clone 390930 (TRAV23/DV6, TRAJ18)
CAARYRGSTLARLYF

SEQ ID NO: 781860 - protein, 13 aa, Homo sapiens
  CDR3 for beta chain variable domain of TCR clone 390930 (TRBV7-2, TRBJ2-7)
CASSSPSGSEQYF

SEQ ID NO: 781861 - protein, 14 aa, Homo sapiens
  CDR3 for alpha chain variable domain of TCR clone 390931 (TRAV20, TRAJ13)
CAVQVSGGYQKVTF

SEQ ID NO: 781862 - protein, 15 aa, Homo sapiens
  CDR3 for beta chain variable domain of TCR clone 390931 (TRBV20-1, TRBJ2-7)
CSARDRVSGMDEQYF

SEQ ID NO: 781863 - protein, 16 aa, Homo sapiens
  CDR3 for alpha chain variable domain of TCR clone 390932 (TRAV23/DV6, TRAJ48)
CAASGVVNFGNEKLTT

SEQ ID NO: 781864 - protein, 15 aa, Homo sapiens
  CDR3 for beta chain variable domain of TCR clone 390932 (TRBV20-1, TRBJ2-5)
CSAGLAGVSQETQYF

SEQ ID NO: 781865 - protein, 16 aa, Homo sapiens
  CDR3 for alpha chain variable domain of TCR clone 390933 (TRAV30, TRAJ24)
CGTEIVDADSWGKFQF

SEQ ID NO: 781866 - protein, 12 aa, Homo sapiens
  CDR3 for beta chain variable domain of TCR clone 390933 (TRBV11-2, TRBJ2-2)
CASSLPTGELFF

SEQ ID NO: 781867 - protein, 13 aa, Homo sapiens
  CDR3 for alpha chain variable domain of TCR clone 390934 (TRAV2, TRAJ16)
CAVEFGDGQKLLF

SEQ ID NO: 781868 - protein, 14 aa, Homo sapiens
  CDR3 for beta chain variable domain of TCR clone 390934 (TRBV6-3, TRBJ2-5)
CASSYSLREKTQNF

SEQ ID NO: 781869 - protein, 17 aa, Homo sapiens
  CDR3 for alpha chain variable domain of TCR clone 390935 (TRAV3, TRAJ7)
CAVRDMSPLEGTTDSLL

SEQ ID NO: 781870 - protein, 15 aa, Homo sapiens
  CDR3 for beta chain variable domain of TCR clone 390935 (TRBV9, TRBJ1-6)
CASSVAGTGDSPLHF

SEQ ID NO: 781871 - protein, 15 aa, Homo sapiens
  CDR3 for alpha chain variable domain of TCR clone 390936 (TRAV30, TRAJ32)
CGTEILGGATNKLIF

SEQ ID NO: 781872 - protein, 13 aa, Homo sapiens
  CDR3 for beta chain variable domain of TCR clone 390936 (TRBV6-3, TRBJ2-7)
CASSFSGGYKQYF

SEQ ID NO: 781873 - protein, 13 aa, Homo sapiens
  CDR3 for alpha chain variable domain of TCR clone 390937 (TRAV13-2, TRAJ48)
CAEMDFGNEKLTF

SEQ ID NO: 781874 - protein, 17 aa, Homo sapiens
  CDR3 for beta chain variable domain of TCR clone 390937 (TRBV7-9, TRBJ2-3)
CASSPTVAGDLTDTQYF

SEQ ID NO: 781875 - protein, 14 aa, Homo sapiens
  CDR3 for alpha chain variable domain of TCR clone 390938 (TRAV8-4, TRAJ17)
CAGSDQAAGNKLTF

SEQ ID NO: 781876 - protein, 15 aa, Homo sapiens
  CDR3 for beta chain variable domain of TCR clone 390938 (TRBV7-2, TRBJ1-2)
CASSLAPDRGLGYTF

SEQ ID NO: 781877 - protein, 13 aa, Homo sapiens
  CDR3 for alpha chain variable domain of TCR clone 390939 (TRAV13-1, TRAJ39)
CAASIWAGDMLAF

SEQ ID NO: 781878 - protein, 15 aa, Homo sapiens
  CDR3 for beta chain variable domain of TCR clone 390939 (TRBV7-9, TRBJ1-1)
CASSLLEQGGTEAFF

SEQ ID NO: 781879 - protein, 19 aa, Homo sapiens
  CDR3 for alpha chain variable domain of TCR clone 390940 (TRAV8-1, TRAJ5)
CAVKTEQPGRRAGEHSLLG

SEQ ID NO: 781880 - protein, 16 aa, Homo sapiens
  CDR3 for beta chain variable domain of TCR clone 390940 (TRBV12-5, TRBJ2-5)
CASGPRTSGNQETQYF

SEQ ID NO: 781881 - protein, 14 aa, Homo sapiens
  CDR3 for alpha chain variable domain of TCR clone 390941 (TRAV12-2, TRAJ40)
CAVKIPSGTCKYIF

SEQ ID NO: 781882 - protein, 14 aa, Homo sapiens
  CDR3 for beta chain variable domain of TCR clone 390941 (TRBV20-1, TRBJ1-1)
CSVQTRIGGTEAFF

SEQ ID NO: 781883 - protein, 15 aa, Homo sapiens
  CDR3 for alpha chain variable domain of TCR clone 390942 (TRAV25, TRAJ52)
CAGTSRGTSYGKLTF

SEQ ID NO: 781884 - protein, 16 aa, Homo sapiens
  CDR3 for beta chain variable domain of TCR clone 390942 (TRBV15, TRBJ1-2)
CATSRGPRTGGGGYTF

SEQ ID NO: 781885 - protein, 11 aa, Homo sapiens
  CDR3 for alpha chain variable domain of TCR clone 390943 (TRAV4, TRAJ21)
CLIYNFNKFYF

SEQ ID NO: 781886 - protein, 13 aa, Homo sapiens
  CDR3 for beta chain variable domain of TCR clone 390943 (TRBV23-1, TRBJ2-1)
PAVNRDQGGEQFF

SEQ ID NO: 781887 - protein, 15 aa, Homo sapiens
  CDR3 for alpha chain variable domain of TCR clone 390944 (TRAV23/DV6, TRAJ57)
CAASSTLSQGGSEKL

SEQ ID NO: 781888 - protein, 14 aa, Homo sapiens
  CDR3 for beta chain variable domain of TCR clone 390944 (TRBV25-1, TRBJ1-1)
RASTHLGGNTEAFF

SEQ ID NO: 781889 - protein, 16 aa, Homo sapiens
  CDR3 for alpha chain variable domain of TCR clone 390945 (TRAV17, TRAJ35)
CATAEGGIGFGNVLHC

SEQ ID NO: 781890 - protein, 17 aa, Homo sapiens
  CDR3 for beta chain variable domain of TCR clone 390945 (TRBV20-1, TRBJ2-1)
CSAPPRLAGTRYNEQFF

SEQ ID NO: 781891 - protein, 13 aa, Homo sapiens
  CDR3 for alpha chain variable domain of TCR clone 390946 (TRAV12-2, TRAJ20)
CAVNRFDYYKLSF

SEQ ID NO: 781892 - protein, 12 aa, Homo sapiens
  CDR3 for beta chain variable domain of TCR clone 390946 (TRBV19, TRBJ2-1)
CASSQISNEQFF

SEQ ID NO: 781893 - protein, 16 aa, Homo sapiens
  CDR3 for alpha chain variable domain of TCR clone 390947 (TRAV14/DV4, TRAJ54)
CAMREGRIQGAQKLGF

SEQ ID NO: 781894 - protein, 15 aa, Homo sapiens
  CDR3 for beta chain variable domain of TCR clone 390947 (TRBV3-1, TRBJ2-1)
CASSQQPSGGNEQFF

SEQ ID NO: 781895 - protein, 15 aa, Homo sapiens
  CDR3 for alpha chain variable domain of TCR clone 390948 (TRAV10, TRAJ38)
CVVRINAGNNRKLIW

SEQ ID NO: 781896 - protein, 15 aa, Homo sapiens
  CDR3 for beta chain variable domain of TCR clone 390948 (TRBV11-3, TRBJ2-7)
CASSPGPASSYEQYF

SEQ ID NO: 781897 - protein, 16 aa, Homo sapiens
  CDR3 for alpha chain variable domain of TCR clone 390949 (TRAV20, TRAJ22)
CAVQASSSGSARQLTF

SEQ ID NO: 781898 - protein, 12 aa, Homo sapiens
  CDR3 for beta chain variable domain of TCR clone 390949 (TRBV5-4, TRBJ2-7)
CASSWAGQGENF

SEQ ID NO: 781899 - protein, 16 aa, Homo sapiens
  CDR3 for alpha chain variable domain of TCR clone 390950 (TRAV16, TRAJ4)
CALSRMFSGGYNKLIF

SEQ ID NO: 781900 - protein, 13 aa, Homo sapiens
  CDR3 for beta chain variable domain of TCR clone 390950 (TRBV10-3, TRBJ1-2)
CAISERDSYGYTF

SEQ ID NO: 781901 - protein, 17 aa, Homo sapiens
  CDR3 for alpha chain variable domain of TCR clone 390951 (TRAV36/DV7, TRAJ52)
CAVAQRAGGTSYGKLTF

SEQ ID NO: 781902 - protein, 13 aa, Homo sapiens
  CDR3 for beta chain variable domain of TCR clone 390951 (TRBV7-2, TRBJ2-4)
CASSREHANIQYF

SEQ ID NO: 781903 - protein, 13 aa, Homo sapiens
  CDR3 for alpha chain variable domain of TCR clone 390952 (TRAV23/DV6, TRAJ20)
CAAGGFHDYKLSF

SEQ ID NO: 781904 - protein, 14 aa, Homo sapiens
  CDR3 for beta chain variable domain of TCR clone 390952 (TRBV7-2, TRBJ2-7)
CASSPKTSFYEQYF

SEQ ID NO: 781905 - protein, 11 aa, Homo sapiens
  CDR3 for alpha chain variable domain of TCR clone 390953 (TRAV2, TRAJ33)
CAVESNYQLIW

SEQ ID NO: 781906 - protein, 14 aa, Homo sapiens
  CDR3 for beta chain variable domain of TCR clone 390953 (TRBV7-9, TRBJ2-3)
CASSLEQGTNTQYF

SEQ ID NO: 781907 - protein, 13 aa, Homo sapiens
  CDR3 for alpha chain variable domain of TCR clone 390954 (TRAV23/DV6, TRAJ45)
CAARRGGADGLTC

SEQ ID NO: 781908 - protein, 14 aa, Homo sapiens
  CDR3 for beta chain variable domain of TCR clone 390954 (TRBV7-2, TRBJ2-3)
CASSLARGTDTQYF

SEQ ID NO: 781909 - protein, 13 aa, Homo sapiens
  CDR3 for alpha chain variable domain of TCR clone 390955 (TRAV13-2, TRAJ29)
CAENMAGNTPLVF

SEQ ID NO: 781910 - protein, 14 aa, Homo sapiens
  CDR3 for beta chain variable domain of TCR clone 390955 (TRBV4-1, TRBJ2-2)
CASSQAVNTGELFF

SEQ ID NO: 781911 - protein, 11 aa, Homo sapiens
  CDR3 for alpha chain variable domain of TCR clone 390956 (TRAV1-2, TRAJ20)
RAVANDYKLSL

SEQ ID NO: 781912 - protein, 18 aa, Homo sapiens
  CDR3 for beta chain variable domain of TCR clone 390956 (TRBV20-1, TRBJ2-6)
CSAETTPTHGSGANVLTF

SEQ ID NO: 781913 - protein, 16 aa, Homo sapiens
  CDR3 for alpha chain variable domain of TCR clone 390957 (TRAV26-1, TRAJ53)
CIVRVAMGGSNYKLTF

SEQ ID NO: 781914 - protein, 11 aa, Homo sapiens
  CDR3 for beta chain variable domain of TCR clone 390957 (TRBV7-9, TRBJ1-5)
CASSPGQPQHF

SEQ ID NO: 781915 - protein, 11 aa, Homo sapiens
  CDR3 for alpha chain variable domain of TCR clone 390958 (TRAV2, TRAJ33)
CAVDSNYQLIW

SEQ ID NO: 781916 - protein, 13 aa, Homo sapiens
  CDR3 for beta chain variable domain of TCR clone 390958 (TRBV2, TRBJ1-4)
CASSERAGEKLFF

SEQ ID NO: 781917 - protein, 12 aa, Homo sapiens
  CDR3 for alpha chain variable domain of TCR clone 390959 (TRAV17, TRAJ48)
CALHFGNEKLTF

SEQ ID NO: 781918 - protein, 13 aa, Homo sapiens
  CDR3 for beta chain variable domain of TCR clone 390959 (TRBV6-5, TRBJ2-5)
CASSSPGGETQYF

SEQ ID NO: 781919 - protein, 16 aa, Homo sapiens
  CDR3 for alpha chain variable domain of TCR clone 390960 (TRAV16, TRAJ4)
CALSRMFSGGYNKLIF

SEQ ID NO: 781920 - protein, 16 aa, Homo sapiens
  CDR3 for beta chain variable domain of TCR clone 390960 (TRBV24-1, TRBJ2-3)
CATSDPGTGETDTQYF

SEQ ID NO: 781921 - protein, 13 aa, Homo sapiens
  CDR3 for alpha chain variable domain of TCR clone 390961 (TRAV27, TRAJ17)
CAGAATAGNKLTF

SEQ ID NO: 781922 - protein, 15 aa, Homo sapiens
  CDR3 for beta chain variable domain of TCR clone 390961 (TRBV5-1, TRBJ2-3)
CASRNQAGSTATQYF

SEQ ID NO: 781923 - protein, 17 aa, Homo sapiens
  CDR3 for alpha chain variable domain of TCR clone 390962 (TRAV17, TRAJ7)
CATLGRLAFGKGNQVVG

SEQ ID NO: 781924 - protein, 13 aa, Homo sapiens
  CDR3 for beta chain variable domain of TCR clone 390962 (TRBV12-4, TRBJ2-7)
CASRLERVREQYF

SEQ ID NO: 781925 - protein, 14 aa, Homo sapiens
  CDR3 for alpha chain variable domain of TCR clone 390963 (TRAV3, TRAJ27)
CAVRDDTYAGKSTF

SEQ ID NO: 781926 - protein, 15 aa, Homo sapiens
  CDR3 for beta chain variable domain of TCR clone 390963 (TRBV7-7, TRBJ2-2)
CATSKLAKNTGELFF

SEQ ID NO: 781927 - protein, 15 aa, Homo sapiens
  CDR3 for alpha chain variable domain of TCR clone 390964 (TRAV21, TRAJ53)
CATLNSGGSNYKLTF

SEQ ID NO: 781928 - protein, 14 aa, Homo sapiens
  CDR3 for beta chain variable domain of TCR clone 390964 (TRBV12-4, TRBJ2-7)
CASSPAGLKYEQYF

SEQ ID NO: 781929 - protein, 16 aa, Homo sapiens
  CDR3 for alpha chain variable domain of TCR clone 390965 (TRAV12-2, TRAJ50)
CAVGTATRTSYDKVIF

SEQ ID NO: 781930 - protein, 12 aa, Homo sapiens
  CDR3 for beta chain variable domain of TCR clone 390965 (TRBV12-4, TRBJ1-5)
CASSLGRQPQHF

SEQ ID NO: 781931 - protein, 14 aa, Homo sapiens
  CDR3 for alpha chain variable domain of TCR clone 390966 (TRAV26-1, TRAJ38)
CIADNAGNNRKLIW

SEQ ID NO: 781932 - protein, 15 aa, Homo sapiens
  CDR3 for beta chain variable domain of TCR clone 390966 (TRBV20-1, TRBJ1-1)
CSARGGGTLKLSLDK

SEQ ID NO: 781933 - protein, 14 aa, Homo sapiens
  CDR3 for alpha chain variable domain of TCR clone 390967 (TRAV21, TRAJ28)
CAVGSGAGSYQLTF

SEQ ID NO: 781934 - protein, 14 aa, Homo sapiens
  CDR3 for beta chain variable domain of TCR clone 390967 (TRBV18, TRBJ1-4)
CASSPGPNGDKLFF

SEQ ID NO: 781935 - protein, 12 aa, Homo sapiens
  CDR3 for alpha chain variable domain of TCR clone 390968 (TRAV1-1, TRAJ8)
RAGGTGFQKLVF

SEQ ID NO: 781936 - protein, 13 aa, Homo sapiens
  CDR3 for beta chain variable domain of TCR clone 390968 (TRBV7-9, TRBJ1-2)
CASSLKQNYVYTF

SEQ ID NO: 781937 - protein, 20 aa, Homo sapiens
  CDR3 for alpha chain variable domain of TCR clone 390969 (TRAV25, TRAJ21)
TATQTTDVGTYPLSFNKFYF

SEQ ID NO: 781938 - protein, 17 aa, Homo sapiens
  CDR3 for beta chain variable domain of TCR clone 390969 (TRBV7-8, TRBJ2-6)
CASSAGTGGAGANVLTF

SEQ ID NO: 781939 - protein, 14 aa, Homo sapiens
  CDR3 for alpha chain variable domain of TCR clone 390970 (TRAV1-2, TRAJ15)
CAVRDRQAGTALIF

SEQ ID NO: 781940 - protein, 11 aa, Homo sapiens
  CDR3 for beta chain variable domain of TCR clone 390970 (TRBV29-1, TRBJ2-5)
CSEDRTGTQYF

SEQ ID NO: 781941 - protein, 14 aa, Homo sapiens
  CDR3 for alpha chain variable domain of TCR clone 390971 (TRAV17, TRAJ37)
CATDGSSNTGKLIF

SEQ ID NO: 781942 - protein, 18 aa, Homo sapiens
  CDR3 for beta chain variable domain of TCR clone 390971 (TRBV11-2, TRBJ2-3)
CASSLGGASRGAPNTQYF

SEQ ID NO: 781943 - protein, 13 aa, Homo sapiens
  CDR3 for alpha chain variable domain of TCR clone 390972 (TRAV12-2, TRAJ39)
CAVNNNAGNMLTF

SEQ ID NO: 781944 - protein, 14 aa, Homo sapiens
  CDR3 for beta chain variable domain of TCR clone 390972 (TRBV7-3, TRBJ2-1)
CASGPGGGGNEQFF

SEQ ID NO: 781945 - protein, 14 aa, Homo sapiens
  CDR3 for alpha chain variable domain of TCR clone 390973 (TRAV1-2, TRAJ16)
CAANRFSDGQKLLF

SEQ ID NO: 781946 - protein, 16 aa, Homo sapiens
  CDR3 for beta chain variable domain of TCR clone 390973 (TRBV7-3, TRBJ2-2)
CASSLKRGTLSGELFF

SEQ ID NO: 781947 - protein, 18 aa, Homo sapiens
  CDR3 for alpha chain variable domain of TCR clone 390974 (TRAV26-1, TRAJ52)
CIVRVEGAGGTSYGKLTF

SEQ ID NO: 781948 - protein, 13 aa, Homo sapiens
  CDR3 for beta chain variable domain of TCR clone 390974 (TRBV7-3, TRBJ1-2)
CASSSKRGYGYTF

SEQ ID NO: 781949 - protein, 14 aa, Homo sapiens
  CDR3 for alpha chain variable domain of TCR clone 390975 (TRAV12-2, TRAJ13)
CAVKKTGGYQKATF

SEQ ID NO: 781950 - protein, 11 aa, Homo sapiens
  CDR3 for beta chain variable domain of TCR clone 390975 (TRBV29-1, TRBJ2-5)
CSEDRTGTQYF

SEQ ID NO: 781951 - protein, 10 aa, Homo sapiens
  CDR3 for alpha chain variable domain of TCR clone 390976 (TRAV29/DV5, TRAJ54)
LIQVAQKLVF

SEQ ID NO: 781952 - protein, 18 aa, Homo sapiens
  CDR3 for beta chain variable domain of TCR clone 390976 (TRBV3-1, TRBJ1-2)
CASSQDVIGWNGDYGYTF

SEQ ID NO: 781953 - protein, 14 aa, Homo sapiens
  CDR3 for alpha chain variable domain of TCR clone 390977 (TRAV12-2, TRAJ24)
CAVTPAYSWGKLQF

SEQ ID NO: 781954 - protein, 12 aa, Homo sapiens
  CDR3 for beta chain variable domain of TCR clone 390977 (TRBV3-1, TRBJ2-1)
CASSQGSSGQLF

SEQ ID NO: 781955 - protein, 15 aa, Homo sapiens
  CDR3 for alpha chain variable domain of TCR clone 390978 (TRAV16, TRAJ58)
CALKRGNQWLYVDLW

SEQ ID NO: 781956 - protein, 13 aa, Homo sapiens
  CDR3 for beta chain variable domain of TCR clone 390978 (TRBV20-1, TRBJ2-2)
CSASAAGTGELFF

SEQ ID NO: 781957 - protein, 14 aa, Homo sapiens
  CDR3 for alpha chain variable domain of TCR clone 390979 (TRAV13-1, TRAJ5)
CAASPGSRRRALTF

SEQ ID NO: 781958 - protein, 17 aa, Homo sapiens
  CDR3 for beta chain variable domain of TCR clone 390979 (TRBV20-1, TRBJ2-1)
CSASSSGLAGYYNEQFF

SEQ ID NO: 781959 - protein, 18 aa, Homo sapiens
  CDR3 for alpha chain variable domain of TCR clone 390980 (TRAV26-1, TRAJ22)
CIVRVSLWFCKATDLLIW

SEQ ID NO: 781960 - protein, 13 aa, Homo sapiens
  CDR3 for beta chain variable domain of TCR clone 390980 (TRBV7-9, TRBJ1-2)
CASSLKQNYGYTF

SEQ ID NO: 781961 - protein, 16 aa, Homo sapiens
  CDR3 for alpha chain variable domain of TCR clone 390981 (TRAV30, TRAJ24)
CGTEIVDADSWGKFQF

SEQ ID NO: 781962 - protein, 17 aa, Homo sapiens
  CDR3 for beta chain variable domain of TCR clone 390981 (TRBV20-1, TRBJ2-1)
CSAGDRRRASSYNEQFF

SEQ ID NO: 781963 - protein, 11 aa, Homo sapiens
  CDR3 for alpha chain variable domain of TCR clone 390982 (TRAV23/DV6, TRAJ23)
ALGNQGGKLIF

SEQ ID NO: 781964 - protein, 12 aa, Homo sapiens
  CDR3 for beta chain variable domain of TCR clone 390982 (TRBV11-2, TRBJ2-5)
CASSLGQETQYF

SEQ ID NO: 781965 - protein, 14 aa, Homo sapiens
  CDR3 for alpha chain variable domain of TCR clone 390983 (TRAV30, TRAJ26)
CGTEIVSYGQNFVF

SEQ ID NO: 781966 - protein, 14 aa, Homo sapiens
  CDR3 for beta chain variable domain of TCR clone 390983 (TRBV20-1, TRBJ2-7)
CSAPELAGVGEQYF

SEQ ID NO: 781967 - protein, 13 aa, Homo sapiens
  CDR3 for alpha chain variable domain of TCR clone 390984 (TRAV21, TRAJ20)
CAVGLRVDYKLSF

SEQ ID NO: 781968 - protein, 15 aa, Homo sapiens
  CDR3 for beta chain variable domain of TCR clone 390984 (TRBV7-6, TRBJ2-1)
CASSLGGQSHNEQFF

SEQ ID NO: 781969 - protein, 17 aa, Homo sapiens
  CDR3 for alpha chain variable domain of TCR clone 390985 (TRAV35, TRAJ47)
GLLDCRIHTEYGNKLVF

SEQ ID NO: 781970 - protein, 11 aa, Homo sapiens
  CDR3 for beta chain variable domain of TCR clone 390985 (TRBV29-1, TRBJ1-1)
CSVEVGTRTFF

SEQ ID NO: 781971 - protein, 18 aa, Homo sapiens
  CDR3 for alpha chain variable domain of TCR clone 390986 (TRAV9-2, TRAJ52)
CALSRHNAGGTSYGKLTF

SEQ ID NO: 781972 - protein, 19 aa, Homo sapiens
  CDR3 for beta chain variable domain of TCR clone 390986 (TRBV4-1, TRBJ2-7)
CASSQEGGGITTSIYEQYF

SEQ ID NO: 781973 - protein, 11 aa, Homo sapiens
  CDR3 for alpha chain variable domain of TCR clone 390987 (TRAV21, TRAJ34)
CAHYNTDKLIF

SEQ ID NO: 781974 - protein, 16 aa, Homo sapiens
  CDR3 for beta chain variable domain of TCR clone 390987 (TRBV28, TRBJ2-7)
CASSLFFETGGPEQYF

SEQ ID NO: 781975 - protein, 12 aa, Homo sapiens
  CDR3 for alpha chain variable domain of TCR clone 390988 (TRAV27, TRAJ9)
CAGESGGFKTIF

SEQ ID NO: 781976 - protein, 15 aa, Homo sapiens
  CDR3 for beta chain variable domain of TCR clone 390988 (TRBV5-1, TRBJ2-1)
CASKGLAGVYNEQFF

SEQ ID NO: 781977 - protein, 11 aa, Homo sapiens
  CDR3 for alpha chain variable domain of TCR clone 390989 (TRAV1-1, TRAJ23)
CSVRQGGKLIF

SEQ ID NO: 781978 - protein, 20 aa, Homo sapiens
  CDR3 for beta chain variable domain of TCR clone 390989 (TRBV7-8, TRBJ2-2)
CASSHLFPGPTTHITGELFF

SEQ ID NO: 781979 - protein, 13 aa, Homo sapiens
  CDR3 for alpha chain variable domain of TCR clone 390990 (TRAV12-1, TRAJ40)
WLVPTSGTYKYIF

SEQ ID NO: 781980 - protein, 18 aa, Homo sapiens
  CDR3 for beta chain variable domain of TCR clone 390990 (TRBV7-6, TRBJ2-1)
CASSPRTSGMSSYNEQFF

SEQ ID NO: 781981 - protein, 13 aa, Homo sapiens
  CDR3 for alpha chain variable domain of TCR clone 390991 (TRAV13-1, TRAJ39)
CAASIGAGYMLTF

SEQ ID NO: 781982 - protein, 15 aa, Homo sapiens
  CDR3 for beta chain variable domain of TCR clone 390991 (TRBV7-9, TRBJ1-1)
CASSLLEQGGTEAFF

SEQ ID NO: 781983 - protein, 10 aa, Homo sapiens
  CDR3 for alpha chain variable domain of TCR clone 390992 (TRAV30, TRAJ24)
CGTEIVMLTA

SEQ ID NO: 781984 - protein, 14 aa, Homo sapiens
  CDR3 for beta chain variable domain of TCR clone 390992 (TRBV13, TRBJ2-1)
CASSPRPRYNEQFF

SEQ ID NO: 781985 - protein, 15 aa, Homo sapiens
  CDR3 for alpha chain variable domain of TCR clone 390993 (TRAV5, TRAJ33)
CAEAPAMDSNYQLIW

SEQ ID NO: 781986 - protein, 20 aa, Homo sapiens
  CDR3 for beta chain variable domain of TCR clone 390993 (TRBV7-8, TRBJ2-2)
CASSHLFPGPTIHITGELFF

SEQ ID NO: 781987 - protein, 18 aa, Homo sapiens
  CDR3 for alpha chain variable domain of TCR clone 390994 (TRAV26-1, TRAJ37)
CIVRVDMHGSSNTGKQIF

SEQ ID NO: 781988 - protein, 15 aa, Homo sapiens
  CDR3 for beta chain variable domain of TCR clone 390994 (TRBV20-1, TRBJ2-7)
CSARVLASPLYEQYF

SEQ ID NO: 781989 - protein, 14 aa, Homo sapiens
  CDR3 for alpha chain variable domain of TCR clone 390995 (TRAV21, TRAJ45)
CAVSSGGGADGLTF

SEQ ID NO: 781990 - protein, 17 aa, Homo sapiens
  CDR3 for beta chain variable domain of TCR clone 390995 (TRBV6-1, TRBJ2-4)
CASSEAVWTINIQYLAP

SEQ ID NO: 781991 - protein, 14 aa, Homo sapiens
  CDR3 for alpha chain variable domain of TCR clone 390996 (TRAV9-2, TRAJ39)
CALYIYNAGNTLTF

SEQ ID NO: 781992 - protein, 16 aa, Homo sapiens
  CDR3 for beta chain variable domain of TCR clone 390996 (TRBV7-3, TRBJ2-1)
CASSLEGYRSYNEQFF

SEQ ID NO: 781993 - protein, 15 aa, Homo sapiens
  CDR3 for alpha chain variable domain of TCR clone 390997 (TRAV17, TRAJ57)
GATGPSQVGSEKLVF

SEQ ID NO: 781994 - protein, 16 aa, Homo sapiens
  CDR3 for beta chain variable domain of TCR clone 390997 (TRBV12-4, TRBJ1-5)
CASSRPVGGSNQHQHF

SEQ ID NO: 781995 - protein, 14 aa, Homo sapiens
  CDR3 for alpha chain variable domain of TCR clone 390998 (TRAV13-1, TRAJ44)
CAATATGNASKLTF

SEQ ID NO: 781996 - protein, 17 aa, Homo sapiens
  CDR3 for beta chain variable domain of TCR clone 390998 (TRBV7-3, TRBJ2-3)
RASSLMKRMRGADTQYF

SEQ ID NO: 781997 - protein, 11 aa, Homo sapiens
  CDR3 for alpha chain variable domain of TCR clone 390999 (TRAV12-3, TRAJ27)
CAMANAGKSTV

SEQ ID NO: 781998 - protein, 14 aa, Homo sapiens
  CDR3 for beta chain variable domain of TCR clone 390999 (TRBV4-1, TRBJ2-2)
CASSQAVNTGELFF

SEQ ID NO: 781999 - protein, 10 aa, Homo sapiens
  CDR3 for alpha chain variable domain of TCR clone 391000 (TRAV23/DV6, TRAJ57)
CAASSTLSQG

SEQ ID NO: 782000 - protein, 14 aa, Homo sapiens
  CDR3 for beta chain variable domain of TCR clone 391000 (TRBV25-1, TRBJ1-1)
CASTHLGGNTQAFF

SEQ ID NO: 782001 - protein, 16 aa, Homo sapiens
  CDR3 for alpha chain variable domain of TCR clone 391001 (TRAV1-2, TRAJ10)
CAVRGVLTGGGNKLTF

SEQ ID NO: 782002 - protein, 16 aa, Homo sapiens
  CDR3 for beta chain variable domain of TCR clone 391001 (TRBV7-3, TRBJ1-2)
CASSLGAPVPNYGYTF

SEQ ID NO: 782003 - protein, 14 aa, Homo sapiens
  CDR3 for alpha chain variable domain of TCR clone 391002 (TRAV13-1, TRAJ12)
CAASYMDSSYKLIF

SEQ ID NO: 782004 - protein, 12 aa, Homo sapiens
  CDR3 for beta chain variable domain of TCR clone 391002 (TRBV11-2, TRBJ2-2)
CASSLGGGELFF

SEQ ID NO: 782005 - protein, 12 aa, Homo sapiens
  CDR3 for alpha chain variable domain of TCR clone 391003 (TRAV13-2, TRAJ23)
CAERHRGAKLIF

SEQ ID NO: 782006 - protein, 13 aa, Homo sapiens
  CDR3 for beta chain variable domain of TCR clone 391003 (TRBV20-1, TRBJ2-2)
CSALSGGAGELFF

SEQ ID NO: 782007 - protein, 16 aa, Homo sapiens
  CDR3 for alpha chain variable domain of TCR clone 391004 (TRAV12-3, TRAJ53)
CAMSPGSGGSIYKLTF

SEQ ID NO: 782008 - protein, 16 aa, Homo sapiens
  CDR3 for beta chain variable domain of TCR clone 391004 (TRBV4-2, TRBJ1-1)
CASSQAGFGMNTEAFF

SEQ ID NO: 782009 - protein, 14 aa, Homo sapiens
  CDR3 for alpha chain variable domain of TCR clone 391005 (TRAV23/DV6, TRAJ22)
CAASVSGSARQLTF

SEQ ID NO: 782010 - protein, 16 aa, Homo sapiens
  CDR3 for beta chain variable domain of TCR clone 391005 (TRBV18, TRBJ2-7)
CASSPRSQGISYEQYF

SEQ ID NO: 782011 - protein, 14 aa, Homo sapiens
  CDR3 for alpha chain variable domain of TCR clone 391006 (TRAV3, TRAJ37)
CAVKESGTTGKLIF

SEQ ID NO: 782012 - protein, 17 aa, Homo sapiens
  CDR3 for beta chain variable domain of TCR clone 391006 (TRBV20-1, TRBJ2-1)
CSARDPLAGVWDNEQFF

SEQ ID NO: 782013 - protein, 14 aa, Homo sapiens
  CDR3 for alpha chain variable domain of TCR clone 391007 (TRAV29/DV5, TRAJ49)
CAASLSNTGNQFYF

SEQ ID NO: 782014 - protein, 16 aa, Homo sapiens
  CDR3 for beta chain variable domain of TCR clone 391007 (TRBV6-1, TRBJ1-2)
CASSGAWQGRSHGYTF

SEQ ID NO: 782015 - protein, 14 aa, Homo sapiens
  CDR3 for alpha chain variable domain of TCR clone 391008 (TRAV12-3, TRAJ10)
SHLLLTGGGNKLTF

SEQ ID NO: 782016 - protein, 15 aa, Homo sapiens
  CDR3 for beta chain variable domain of TCR clone 391008 (TRBV27, TRBJ1-5)
CASSLGTGFDQPQHF

SEQ ID NO: 782017 - protein, 14 aa, Homo sapiens
  CDR3 for alpha chain variable domain of TCR clone 391009 (TRAV1-2, TRAJ16)
CAVNRFSDGQKLLF

SEQ ID NO: 782018 - protein, 22 aa, Homo sapiens
  CDR3 for beta chain variable domain of TCR clone 391009 (TRBV9, TRBJ1-6)
CASSVAGTGDSPPLWERDQAHC

SEQ ID NO: 782019 - protein, 12 aa, Homo sapiens
  CDR3 for alpha chain variable domain of TCR clone 391010 (TRAV12-3, TRAJ40)
CAMSSGTYKYIF

SEQ ID NO: 782020 - protein, 14 aa, Homo sapiens
  CDR3 for beta chain variable domain of TCR clone 391010 (TRBV28, TRBJ1-1)
CASSSEQGYTEAFF

SEQ ID NO: 782021 - protein, 12 aa, Homo sapiens
  CDR3 for alpha chain variable domain of TCR clone 391011 (TRAV29/DV5, TRAJ49)
CAASAIGNQCYF

SEQ ID NO: 782022 - protein, 17 aa, Homo sapiens
  CDR3 for beta chain variable domain of TCR clone 391011 (TRBV5-1, TRBJ2-2)
CASSRTSGRFSTGELFF

SEQ ID NO: 782023 - protein, 14 aa, Homo sapiens
  CDR3 for alpha chain variable domain of TCR clone 391012 (TRAV16, TRAJ54)
CSLSLIQGAQKLGS

SEQ ID NO: 782024 - protein, 15 aa, Homo sapiens
  CDR3 for beta chain variable domain of TCR clone 391012 (TRBV20-1, TRBJ2-7)
CSARDRVSGMDEQYF

SEQ ID NO: 782025 - protein, 12 aa, Homo sapiens
  CDR3 for alpha chain variable domain of TCR clone 391013 (TRAV13-2, TRAJ23)
CAERHRGGKLIF

SEQ ID NO: 782026 - protein, 13 aa, Homo sapiens
  CDR3 for beta chain variable domain of TCR clone 391013 (TRBV12-4, TRBJ1-2)
CASSVRQGKGYTF

SEQ ID NO: 782027 - protein, 13 aa, Homo sapiens
  CDR3 for alpha chain variable domain of TCR clone 391014 (TRAV13-1, TRAJ20)
CASRVSNDYKLSF

SEQ ID NO: 782028 - protein, 12 aa, Homo sapiens
  CDR3 for beta chain variable domain of TCR clone 391014 (TRBV20-1, TRBJ2-1)
CSARLGTDEQFF

SEQ ID NO: 782029 - protein, 14 aa, Homo sapiens
  CDR3 for alpha chain variable domain of TCR clone 391015 (TRAV38-1, TRAJ29)
CAFITPSGNTPLVF

SEQ ID NO: 782030 - protein, 14 aa, Homo sapiens
  CDR3 for beta chain variable domain of TCR clone 391015 (TRBV29-1, TRBJ2-2)
CSALGGVGAGELFF

SEQ ID NO: 782031 - protein, 14 aa, Homo sapiens
  CDR3 for alpha chain variable domain of TCR clone 391016 (TRAV26-1, TRAJ38)
CIADNAGNNRKLIW

SEQ ID NO: 782032 - protein, 13 aa, Homo sapiens
  CDR3 for beta chain variable domain of TCR clone 391016 (TRBV15, TRBJ1-6)
CATSGGLNSPRHF

SEQ ID NO: 782033 - protein, 15 aa, Homo sapiens
  CDR3 for alpha chain variable domain of TCR clone 391017 (TRAV12-1, TRAJ45)
CVVLSGGGGADGLTF

SEQ ID NO: 782034 - protein, 13 aa, Homo sapiens
  CDR3 for beta chain variable domain of TCR clone 391017 (TRBV7-9, TRBJ1-2)
CASSLKQNYGYTF

SEQ ID NO: 782035 - protein, 14 aa, Homo sapiens
  CDR3 for alpha chain variable domain of TCR clone 391018 (TRAV2, TRAJ9)
CAVEDRSGGFKTIF

SEQ ID NO: 782036 - protein, 13 aa, Homo sapiens
  CDR3 for beta chain variable domain of TCR clone 391018 (TRBV7-3, TRBJ1-1)
CASSQDWGAEAFI

SEQ ID NO: 782037 - protein, 14 aa, Homo sapiens
  CDR3 for alpha chain variable domain of TCR clone 391019 (TRAV17, TRAJ31)
CATVLRNNDARLMF

SEQ ID NO: 782038 - protein, 14 aa, Homo sapiens
  CDR3 for beta chain variable domain of TCR clone 391019 (TRBV12-4, TRBJ2-5)
CASRLWQKQETQYF

SEQ ID NO: 782039 - protein, 12 aa, Homo sapiens
  CDR3 for alpha chain variable domain of TCR clone 391020 (TRAV29/DV5, TRAJ34)
CAASGNTDKLIF

SEQ ID NO: 782040 - protein, 12 aa, Homo sapiens
  CDR3 for beta chain variable domain of TCR clone 391020 (TRBV12-4, TRBJ2-7)
CASSLGGYEQYF

SEQ ID NO: 782041 - protein, 16 aa, Homo sapiens
  CDR3 for alpha chain variable domain of TCR clone 391021 (TRAV12-3, TRAJ53)
CAMSPGSGGSNYKLTF

SEQ ID NO: 782042 - protein, 16 aa, Homo sapiens
  CDR3 for beta chain variable domain of TCR clone 391021 (TRBV4-2, TRBJ1-1)
SASSQAGFGMNTEAFF

SEQ ID NO: 782043 - protein, 14 aa, Homo sapiens
  CDR3 for alpha chain variable domain of TCR clone 391022 (TRAV8-1, TRAJ5)
CAVRTDTGSRALTF

SEQ ID NO: 782044 - protein, 14 aa, Homo sapiens
  CDR3 for beta chain variable domain of TCR clone 391022 (TRBV7-8, TRBJ2-3)
CASSFPDGQDTQYF

SEQ ID NO: 782045 - protein, 11 aa, Homo sapiens
  CDR3 for alpha chain variable domain of TCR clone 391023 (TRAV3, TRAJ21)
CAVGNFNKFYF

SEQ ID NO: 782046 - protein, 17 aa, Homo sapiens
  CDR3 for beta chain variable domain of TCR clone 391023 (TRBV7-3, TRBJ2-5)
CASSLGSGRSGSETQYC

SEQ ID NO: 782047 - protein, 11 aa, Homo sapiens
  CDR3 for alpha chain variable domain of TCR clone 391024 (TRAV1-1, TRAJ23)
CAVRQGGKLIF

SEQ ID NO: 782048 - protein, 20 aa, Homo sapiens
  CDR3 for beta chain variable domain of TCR clone 391024 (TRBV7-8, TRBJ2-2)
CASSHLFPGPTIHLTRELFF

SEQ ID NO: 782049 - protein, 14 aa, Homo sapiens
  CDR3 for alpha chain variable domain of TCR clone 391025 (TRAV1-2, TRAJ8)
CAVREDTGFQELVC

SEQ ID NO: 782050 - protein, 17 aa, Homo sapiens
  CDR3 for beta chain variable domain of TCR clone 391025 (TRBV11-2, TRBJ2-1)
CASSLYPPGVEYNEQFF

SEQ ID NO: 782051 - protein, 16 aa, Homo sapiens
  CDR3 for alpha chain variable domain of TCR clone 391026 (TRAV17, TRAJ53)
CATDALSGGSNYKLTF

SEQ ID NO: 782052 - protein, 16 aa, Homo sapiens
  CDR3 for beta chain variable domain of TCR clone 391026 (TRBV2, TRBJ2-1)
CASRSPAGGKYNEQFF

SEQ ID NO: 782053 - protein, 13 aa, Homo sapiens
  CDR3 for alpha chain variable domain of TCR clone 391027 (TRAV2, TRAJ40)
CAVVTSGTYKYIF

SEQ ID NO: 782054 - protein, 15 aa, Homo sapiens
  CDR3 for beta chain variable domain of TCR clone 391027 (TRBV28, TRBJ2-7)
CASSPGGRGFYELYF

SEQ ID NO: 782055 - protein, 13 aa, Homo sapiens
  CDR3 for alpha chain variable domain of TCR clone 391028 (TRAV12-3, TRAJ33)
CATSVNSNYQLIW

SEQ ID NO: 782056 - protein, 16 aa, Homo sapiens
  CDR3 for beta chain variable domain of TCR clone 391028 (TRBV7-3, TRBJ2-3)
CASSLSGYRPEDTQYF

SEQ ID NO: 782057 - protein, 12 aa, Homo sapiens
  CDR3 for alpha chain variable domain of TCR clone 391029 (TRAV16, TRAJ10)
CSRTGGGNKLTF

SEQ ID NO: 782058 - protein, 15 aa, Homo sapiens
  CDR3 for beta chain variable domain of TCR clone 391029 (TRBV7-3, TRBJ2-3)
CASSPLAVSTDTQYF

SEQ ID NO: 782059 - protein, 18 aa, Homo sapiens
  CDR3 for alpha chain variable domain of TCR clone 391030 (TRAV21, TRAJ52)
CAVRPSPAGGTSYGKLTF

SEQ ID NO: 782060 - protein, 12 aa, Homo sapiens
  CDR3 for beta chain variable domain of TCR clone 391030 (TRBV28, TRBJ2-6)
CAIQAGANVLTF

SEQ ID NO: 782061 - protein, 14 aa, Homo sapiens
  CDR3 for alpha chain variable domain of TCR clone 391031 (TRAV12-3, TRAJ10)
SHLPLTGGGNKLTF

SEQ ID NO: 782062 - protein, 13 aa, Homo sapiens
  CDR3 for beta chain variable domain of TCR clone 391031 (TRBV7-9, TRBJ1-5)
CASILRNDQPQHF

SEQ ID NO: 782063 - protein, 12 aa, Homo sapiens
  CDR3 for alpha chain variable domain of TCR clone 391032 (TRAV12-1, TRAJ40)
CVVSSGTYKYIF

SEQ ID NO: 782064 - protein, 18 aa, Homo sapiens
  CDR3 for beta chain variable domain of TCR clone 391032 (TRBV11-2, TRBJ2-3)
CASSLGGAARGAPNTQYF

SEQ ID NO: 782065 - protein, 12 aa, Homo sapiens
  CDR3 for alpha chain variable domain of TCR clone 391033 (TRAV1-1, TRAJ39)
CAVPVVGNLPTF

SEQ ID NO: 782066 - protein, 13 aa, Homo sapiens
  CDR3 for beta chain variable domain of TCR clone 391033 (TRBV10-3, TRBJ2-7)
CASKLAVNYEQYF

SEQ ID NO: 782067 - protein, 12 aa, Homo sapiens
  CDR3 for alpha chain variable domain of TCR clone 391034 (TRAV12-1, TRAJ20)
CVVNSNDYKLSF

SEQ ID NO: 782068 - protein, 17 aa, Homo sapiens
  CDR3 for beta chain variable domain of TCR clone 391034 (TRBV18, TRBJ2-1)
CASSPLAAGAGDNEQFF

SEQ ID NO: 782069 - protein, 14 aa, Homo sapiens
  CDR3 for alpha chain variable domain of TCR clone 391035 (TRAV16, TRAJ42)
CALLAGGSQGNLIF

SEQ ID NO: 782070 - protein, 15 aa, Homo sapiens
  CDR3 for beta chain variable domain of TCR clone 391035 (TRBV5-1, TRBJ2-7)
CASSLNGGPAREQYF

SEQ ID NO: 782071 - protein, 17 aa, Homo sapiens
  CDR3 for alpha chain variable domain of TCR clone 391036 (TRAV12-3, TRAJ52)
CNERGRGWCTSYGKLTF

SEQ ID NO: 782072 - protein, 14 aa, Homo sapiens
  CDR3 for beta chain variable domain of TCR clone 391036 (TRBV7-2, TRBJ2-7)
CASRPQGAAYEQYF

SEQ ID NO: 782073 - protein, 13 aa, Homo sapiens
  CDR3 for alpha chain variable domain of TCR clone 391037 (TRAV9-2, TRAJ49)
CALIQIGGNQCYF

SEQ ID NO: 782074 - protein, 15 aa, Homo sapiens
  CDR3 for beta chain variable domain of TCR clone 391037 (TRBV9, TRBJ1-6)
CASSVAGTGDSPLHF

SEQ ID NO: 782075 - protein, 16 aa, Homo sapiens
  CDR3 for alpha chain variable domain of TCR clone 391038 (TRAV3, TRAJ34)
CAVRARRTPTSSSLGL

SEQ ID NO: 782076 - protein, 15 aa, Homo sapiens
  CDR3 for beta chain variable domain of TCR clone 391038 (TRBV6-3, TRBJ2-7)
CASSSPGTVFYEQYF

SEQ ID NO: 782077 - protein, 19 aa, Homo sapiens
  CDR3 for alpha chain variable domain of TCR clone 391039 (TRAV1-2, TRAJ26)
CLLPLCCERPDNYGQNFVF

SEQ ID NO: 782078 - protein, 17 aa, Homo sapiens
  CDR3 for beta chain variable domain of TCR clone 391039 (TRBV13, TRBJ2-3)
CARSLSRVAGGRNTQYF

SEQ ID NO: 782079 - protein, 15 aa, Homo sapiens
  CDR3 for alpha chain variable domain of TCR clone 391040 (TRAV21, TRAJ53)
CATLNSGGSNYKLTF

SEQ ID NO: 782080 - protein, 14 aa, Homo sapiens
  CDR3 for beta chain variable domain of TCR clone 391040 (TRBV15, TRBJ1-2)
CATSRASVNYSYTF

SEQ ID NO: 782081 - protein, 16 aa, Homo sapiens
  CDR3 for alpha chain variable domain of TCR clone 391041 (TRAV30, TRAJ24)
CGTEIVDADSWGKFQF

SEQ ID NO: 782082 - protein, 15 aa, Homo sapiens
  CDR3 for beta chain variable domain of TCR clone 391041 (TRBV10-3, TRBJ2-5)
CAIRPGDVDLGTQYF

SEQ ID NO: 782083 - protein, 19 aa, Homo sapiens
  CDR3 for alpha chain variable domain of TCR clone 391042 (TRAV26-1, TRAJ52)
CIVRAHRNAGGTSYGKLTF

SEQ ID NO: 782084 - protein, 13 aa, Homo sapiens
  CDR3 for beta chain variable domain of TCR clone 391042 (TRBV20-1, TRBJ1-6)
CSAPLGVGSTLHF

SEQ ID NO: 782085 - protein, 10 aa, Homo sapiens
  CDR3 for alpha chain variable domain of TCR clone 391043 (TRAV12-1, TRAJ37)
ARGNTGKLIF

SEQ ID NO: 782086 - protein, 14 aa, Homo sapiens
  CDR3 for beta chain variable domain of TCR clone 391043 (TRBV20-1, TRBJ2-1)
CSAQIGGSANEQFF

SEQ ID NO: 782087 - protein, 15 aa, Homo sapiens
  CDR3 for alpha chain variable domain of TCR clone 391044 (TRAV13-1, TRAJ42)
CAASIAGGSQGNLIF

SEQ ID NO: 782088 - protein, 15 aa, Homo sapiens
  CDR3 for beta chain variable domain of TCR clone 391044 (TRBV4-1, TRBJ2-5)
CASSQWDLYQETQYF

SEQ ID NO: 782089 - protein, 13 aa, Homo sapiens
  CDR3 for alpha chain variable domain of TCR clone 391045 (TRAV16, TRAJ22)
SAMLAGPARQLTF

SEQ ID NO: 782090 - protein, 18 aa, Homo sapiens
  CDR3 for beta chain variable domain of TCR clone 391045 (TRBV7-2, TRBJ2-3)
CASSLETSRGRKADTQYF

SEQ ID NO: 782091 - protein, 13 aa, Homo sapiens
  CDR3 for alpha chain variable domain of TCR clone 391046 (TRAV1-1, TRAJ9)
CAAKNTGGFQTIF

SEQ ID NO: 782092 - protein, 14 aa, Homo sapiens
  CDR3 for beta chain variable domain of TCR clone 391046 (TRBV12-5, TRBJ2-5)
CASGSRTHQETQYF

SEQ ID NO: 782093 - protein, 14 aa, Homo sapiens
  CDR3 for alpha chain variable domain of TCR clone 391047 (TRAV12-2, TRAJ44)
CAVNPAGTASKLTF

SEQ ID NO: 782094 - protein, 16 aa, Homo sapiens
  CDR3 for beta chain variable domain of TCR clone 391047 (TRBV2, TRBJ2-1)
RASSVGGSLSYNEQFF

SEQ ID NO: 782095 - protein, 15 aa, Homo sapiens
  CDR3 for alpha chain variable domain of TCR clone 391048 (TRAV38-2/DV8, TRAJ48)
CAYRSGGFGNEKLTF

SEQ ID NO: 782096 - protein, 16 aa, Homo sapiens
  CDR3 for beta chain variable domain of TCR clone 391048 (TRBV7-7, TRBJ2-1)
CASSLASGTSYNEQFF

SEQ ID NO: 782097 - protein, 17 aa, Homo sapiens
  CDR3 for alpha chain variable domain of TCR clone 391049 (TRAV3, TRAJ6)
CAVSDGPRAGGSYIPKF

SEQ ID NO: 782098 - protein, 14 aa, Homo sapiens
  CDR3 for beta chain variable domain of TCR clone 391049 (TRBV7-2, TRBJ2-7)
CASSPKTSFYEQYF

SEQ ID NO: 782099 - protein, 17 aa, Homo sapiens
  CDR3 for alpha chain variable domain of TCR clone 391050 (TRAV26-2, TRAJ42)
CILRDVGYGGSQGNLIL

SEQ ID NO: 782100 - protein, 16 aa, Homo sapiens
  CDR3 for beta chain variable domain of TCR clone 391050 (TRBV12-4, TRBJ2-7)
CASSLIGGTGTYEQYF

SEQ ID NO: 782101 - protein, 11 aa, Homo sapiens
  CDR3 for alpha chain variable domain of TCR clone 391051 (TRAV12-2, TRAJ33)
CAVGSNYQLIW

SEQ ID NO: 782102 - protein, 12 aa, Homo sapiens
  CDR3 for beta chain variable domain of TCR clone 391051 (TRBV11-2, TRBJ2-1)
CASSPGNNEQFF

SEQ ID NO: 782103 - protein, 14 aa, Homo sapiens
  CDR3 for alpha chain variable domain of TCR clone 391052 (TRAV1-2, TRAJ16)
CAVSRFSDGQKLLF

SEQ ID NO: 782104 - protein, 12 aa, Homo sapiens
  CDR3 for beta chain variable domain of TCR clone 391052 (TRBV5-1, TRBJ2-7)
CASSSTTYEQYF

SEQ ID NO: 782105 - protein, 12 aa, Homo sapiens
  CDR3 for alpha chain variable domain of TCR clone 391053 (TRAV38-1, TRAJ32)
CAPLGATNKLIF

SEQ ID NO: 782106 - protein, 14 aa, Homo sapiens
  CDR3 for beta chain variable domain of TCR clone 391053 (TRBV29-1, TRBJ2-5)
CSVETSGSGETQCF

SEQ ID NO: 782107 - protein, 17 aa, Homo sapiens
  CDR3 for alpha chain variable domain of TCR clone 391054 (TRAV38-1, TRAJ56)
CAFMRILDTGANSKLTF

SEQ ID NO: 782108 - protein, 15 aa, Homo sapiens
  CDR3 for beta chain variable domain of TCR clone 391054 (TRBV19, TRBJ2-7)
CASSPAGSGEALRYF

SEQ ID NO: 782109 - protein, 12 aa, Homo sapiens
  CDR3 for alpha chain variable domain of TCR clone 391055 (TRAV13-1, TRAJ21)
CAAKEGFNKFYF

SEQ ID NO: 782110 - protein, 18 aa, Homo sapiens
  CDR3 for beta chain variable domain of TCR clone 391055 (TRBV20-1, TRBJ2-6)
CSAETTPPTGSGANGLTF

SEQ ID NO: 782111 - protein, 13 aa, Homo sapiens
  CDR3 for alpha chain variable domain of TCR clone 391056 (TRAV8-3, TRAJ36)
CAGGATGANNLFF

SEQ ID NO: 782112 - protein, 16 aa, Homo sapiens
  CDR3 for beta chain variable domain of TCR clone 391056 (TRBV20-1, TRBJ1-4)
CSAPGQGLLTNEKLFF

SEQ ID NO: 782113 - protein, 12 aa, Homo sapiens
  CDR3 for alpha chain variable domain of TCR clone 391057 (TRAV27, TRAJ35)
CAGADFGNVLHC

SEQ ID NO: 782114 - protein, 13 aa, Homo sapiens
  CDR3 for beta chain variable domain of TCR clone 391057 (TRBV2, TRBJ2-7)
CANGLAGDYEQYF

SEQ ID NO: 782115 - protein, 13 aa, Homo sapiens
  CDR3 for alpha chain variable domain of TCR clone 391058 (TRAV36/DV7, TRAJ54)
CAVDIQGAPKLVF

SEQ ID NO: 782116 - protein, 14 aa, Homo sapiens
  CDR3 for beta chain variable domain of TCR clone 391058 (TRBV19, TRBJ2-7)
CAINFRDTFTGMYF

SEQ ID NO: 782117 - protein, 15 aa, Homo sapiens
  CDR3 for alpha chain variable domain of TCR clone 391059 (TRAV8-4, TRAJ11)
RALSRALSGYSTLTF

SEQ ID NO: 782118 - protein, 13 aa, Homo sapiens
  CDR3 for beta chain variable domain of TCR clone 391059 (TRBV10-3, TRBJ2-7)
CASKLAVNYEQYF

SEQ ID NO: 782119 - protein, 14 aa, Homo sapiens
  CDR3 for alpha chain variable domain of TCR clone 391060 (TRAV29/DV5, TRAJ20)
CAASAPIEDYKLSF

SEQ ID NO: 782120 - protein, 17 aa, Homo sapiens
  CDR3 for beta chain variable domain of TCR clone 391060 (TRBV11-2, TRBJ2-1)
CASSLYPPGVEYNEQFF

SEQ ID NO: 782121 - protein, 20 aa, Homo sapiens
  CDR3 for alpha chain variable domain of TCR clone 391061 (TRAV12-1, TRAJ42)
SSVIQPPTSVTGGSQGNLIF

SEQ ID NO: 782122 - protein, 14 aa, Homo sapiens
  CDR3 for beta chain variable domain of TCR clone 391061 (TRBV25-1, TRBJ1-2)
CASSDTTGVVGYTF

SEQ ID NO: 782123 - protein, 16 aa, Homo sapiens
  CDR3 for alpha chain variable domain of TCR clone 391062 (TRAV8-3, TRAJ28)
CAVGATLGLGVTNSLS

SEQ ID NO: 782124 - protein, 14 aa, Homo sapiens
  CDR3 for beta chain variable domain of TCR clone 391062 (TRBV7-2, TRBJ2-1)
CASSLGVGDNEQFF

SEQ ID NO: 782125 - protein, 14 aa, Homo sapiens
  CDR3 for alpha chain variable domain of TCR clone 391063 (TRAV1-2, TRAJ16)
CAVNRFSDGQKLLF

SEQ ID NO: 782126 - protein, 15 aa, Homo sapiens
  CDR3 for beta chain variable domain of TCR clone 391063 (TRBV7-8, TRBJ1-2)
CASSLVRDGGLGYTF

SEQ ID NO: 782127 - protein, 12 aa, Homo sapiens
  CDR3 for alpha chain variable domain of TCR clone 391064 (TRAV16, TRAJ22)
CALEVSARQLTF

SEQ ID NO: 782128 - protein, 14 aa, Homo sapiens
  CDR3 for beta chain variable domain of TCR clone 391064 (TRBV11-2, TRBJ2-3)
CASSSIASTDTQYF

SEQ ID NO: 782129 - protein, 10 aa, Homo sapiens
  CDR3 for alpha chain variable domain of TCR clone 391065 (TRAV30, TRAJ48)
CGIGNEKLTL

SEQ ID NO: 782130 - protein, 15 aa, Homo sapiens
  CDR3 for beta chain variable domain of TCR clone 391065 (TRBV28, TRBJ2-5)
CASSPPWSYQETQYF

SEQ ID NO: 782131 - protein, 12 aa, Homo sapiens
  CDR3 for alpha chain variable domain of TCR clone 391066 (TRAV21, TRAJ6)
CAVKGGSYIPTF

SEQ ID NO: 782132 - protein, 13 aa, Homo sapiens
  CDR3 for beta chain variable domain of TCR clone 391066 (TRBV11-2, TRBJ1-1)
CASSFTETTEAFF

SEQ ID NO: 782133 - protein, 11 aa, Homo sapiens
  CDR3 for alpha chain variable domain of TCR clone 391067 (TRAV21, TRAJ11)
CAVHGYSTLTF

SEQ ID NO: 782134 - protein, 16 aa, Homo sapiens
  CDR3 for beta chain variable domain of TCR clone 391067 (TRBV12-5, TRBJ2-5)
CASGPRTSGNQETQYF

SEQ ID NO: 782135 - protein, 10 aa, Homo sapiens
  CDR3 for alpha chain variable domain of TCR clone 391068 (TRAV1-2, TRAJ20)
CARNDYKLSF

SEQ ID NO: 782136 - protein, 16 aa, Homo sapiens
  CDR3 for beta chain variable domain of TCR clone 391068 (TRBV20-1, TRBJ1-1)
CSARALTQGMNTEAFF

SEQ ID NO: 782137 - protein, 14 aa, Homo sapiens
  CDR3 for alpha chain variable domain of TCR clone 391069 (TRAV26-1, TRAJ38)
CIADNAGNNRKLIW

SEQ ID NO: 782138 - protein, 13 aa, Homo sapiens
  CDR3 for beta chain variable domain of TCR clone 391069 (TRBV18, TRBJ2-5)
CASSPAGKETQYF

SEQ ID NO: 782139 - protein, 12 aa, Homo sapiens
  CDR3 for alpha chain variable domain of TCR clone 391070 (TRAV12-3, TRAJ17)
CAMTLTGNKLTL

SEQ ID NO: 782140 - protein, 13 aa, Homo sapiens
  CDR3 for beta chain variable domain of TCR clone 391070 (TRBV20-1, TRBJ2-5)
CSARGDYQETQYF

SEQ ID NO: 782141 - protein, 14 aa, Homo sapiens
  CDR3 for alpha chain variable domain of TCR clone 391071 (TRAV3, TRAJ6)
CAVRYSRRKLHTYL

SEQ ID NO: 782142 - protein, 15 aa, Homo sapiens
  CDR3 for beta chain variable domain of TCR clone 391071 (TRBV18, TRBJ2-7)
CASSPLQGRTYEQYF

SEQ ID NO: 782143 - protein, 14 aa, Homo sapiens
  CDR3 for alpha chain variable domain of TCR clone 391072 (TRAV1-2, TRAJ16)
CAVNRFSDGEKLLF

SEQ ID NO: 782144 - protein, 13 aa, Homo sapiens
  CDR3 for beta chain variable domain of TCR clone 391072 (TRBV18, TRBJ2-5)
CASSPAGKETQYF

SEQ ID NO: 782145 - protein, 16 aa, Homo sapiens
  CDR3 for alpha chain variable domain of TCR clone 391073 (TRAV14/DV4, TRAJ34)
CAMRECRPHRQAHLWY

SEQ ID NO: 782146 - protein, 14 aa, Homo sapiens
  CDR3 for beta chain variable domain of TCR clone 391073 (TRBV19, TRBJ2-1)
CASPTFVLSGEQFF

SEQ ID NO: 782147 - protein, 13 aa, Homo sapiens
  CDR3 for alpha chain variable domain of TCR clone 391074 (TRAV2, TRAJ21)
CACSTSTNFTLDL

SEQ ID NO: 782148 - protein, 14 aa, Homo sapiens
  CDR3 for beta chain variable domain of TCR clone 391074 (TRBV15, TRBJ2-3)
CATRSGTSTDTQYF

SEQ ID NO: 782149 - protein, 12 aa, Homo sapiens
  CDR3 for alpha chain variable domain of TCR clone 391075 (TRAV30, TRAJ43)
CGTEERGNDMRF

SEQ ID NO: 782150 - protein, 13 aa, Homo sapiens
  CDR3 for beta chain variable domain of TCR clone 391075 (TRBV7-1, TRBJ2-7)
CASSFSQGYERYF

SEQ ID NO: 782151 - protein, 14 aa, Homo sapiens
  CDR3 for alpha chain variable domain of TCR clone 391076 (TRAV12-3, TRAJ10)
SHLPLTGGGNKLTF

SEQ ID NO: 782152 - protein, 16 aa, Homo sapiens
  CDR3 for beta chain variable domain of TCR clone 391076 (TRBV11-2, TRBJ1-2)
CASSPSGREANYGYTF

SEQ ID NO: 782153 - protein, 13 aa, Homo sapiens
  CDR3 for alpha chain variable domain of TCR clone 391077 (TRAV22, TRAJ29)
CAVGGSANTPLVF

SEQ ID NO: 782154 - protein, 13 aa, Homo sapiens
  CDR3 for beta chain variable domain of TCR clone 391077 (TRBV4-2, TRBJ1-1)
CASSQAGNTEAFF

SEQ ID NO: 782155 - protein, 12 aa, Homo sapiens
  CDR3 for alpha chain variable domain of TCR clone 391078 (TRAV36/DV7, TRAJ54)
CAVVRGAQKLVF

SEQ ID NO: 782156 - protein, 13 aa, Homo sapiens
  CDR3 for beta chain variable domain of TCR clone 391078 (TRBV7-9, TRBJ1-2)
CGSSLKQNYGYTF

SEQ ID NO: 782157 - protein, 11 aa, Homo sapiens
  CDR3 for alpha chain variable domain of TCR clone 391079 (TRAV17, TRAJ29)
CATWRRTHLLS

SEQ ID NO: 782158 - protein, 17 aa, Homo sapiens
  CDR3 for beta chain variable domain of TCR clone 391079 (TRBV4-1, TRBJ2-3)
CASSQVLQGGGTDTQYF

SEQ ID NO: 782159 - protein, 13 aa, Homo sapiens
  CDR3 for alpha chain variable domain of TCR clone 391080 (TRAV13-1, TRAJ53)
CAASRQWREQLQT

SEQ ID NO: 782160 - protein, 13 aa, Homo sapiens
  CDR3 for beta chain variable domain of TCR clone 391080 (TRBV5-1, TRBJ1-5)
CASSLGSNQPQHF

SEQ ID NO: 782161 - protein, 12 aa, Homo sapiens
  CDR3 for alpha chain variable domain of TCR clone 391081 (TRAV12-3, TRAJ17)
CAMTLTGNKLTF

SEQ ID NO: 782162 - protein, 13 aa, Homo sapiens
  CDR3 for beta chain variable domain of TCR clone 391081 (TRBV24-1, TRBJ2-3)
CATSTGGTDTQYF

SEQ ID NO: 782163 - protein, 16 aa, Homo sapiens
  CDR3 for alpha chain variable domain of TCR clone 391082 (TRAV20, TRAJ10)
CAVLRGLTVGGNKLTF

SEQ ID NO: 782164 - protein, 14 aa, Homo sapiens
  CDR3 for beta chain variable domain of TCR clone 391082 (TRBV19, TRBJ1-5)
CASRAPDSFLSQHF

SEQ ID NO: 782165 - protein, 13 aa, Homo sapiens
  CDR3 for alpha chain variable domain of TCR clone 391083 (TRAV22, TRAJ26)
CAVEHNYGQNFVF

SEQ ID NO: 782166 - protein, 16 aa, Homo sapiens
  CDR3 for beta chain variable domain of TCR clone 391083 (TRBV7-2, TRBJ2-6)
CASSERWASGANVLTF

SEQ ID NO: 782167 - protein, 15 aa, Homo sapiens
  CDR3 for alpha chain variable domain of TCR clone 391084 (TRAV13-1, TRAJ5)
FAASKADTGRRALTF

SEQ ID NO: 782168 - protein, 16 aa, Homo sapiens
  CDR3 for beta chain variable domain of TCR clone 391084 (TRBV7-2, TRBJ2-1)
CASSLGRTSGDNEQFS

SEQ ID NO: 782169 - protein, 14 aa, Homo sapiens
  CDR3 for alpha chain variable domain of TCR clone 391085 (TRAV3, TRAJ6)
CAVRDWGGSYIPTF

SEQ ID NO: 782170 - protein, 14 aa, Homo sapiens
  CDR3 for beta chain variable domain of TCR clone 391085 (TRBV7-3, TRBJ1-1)
CASSLKGGNTEAFF

SEQ ID NO: 782171 - protein, 14 aa, Homo sapiens
  CDR3 for alpha chain variable domain of TCR clone 391086 (TRAV16, TRAJ16)
CALSVLSDGQKLLF

SEQ ID NO: 782172 - protein, 14 aa, Homo sapiens
  CDR3 for beta chain variable domain of TCR clone 391086 (TRBV19, TRBJ2-5)
CASSSSGIQETQYF

SEQ ID NO: 782173 - protein, 12 aa, Homo sapiens
  CDR3 for alpha chain variable domain of TCR clone 391087 (TRAV21, TRAJ49)
CAVSWTGNQFYF

SEQ ID NO: 782174 - protein, 15 aa, Homo sapiens
  CDR3 for beta chain variable domain of TCR clone 391087 (TRBV19, TRBJ1-6)
CASSTQGAVGSPLHF

SEQ ID NO: 782175 - protein, 15 aa, Homo sapiens
  CDR3 for alpha chain variable domain of TCR clone 391088 (TRAV2, TRAJ9)
CAVEDRGTGGFKTTL

SEQ ID NO: 782176 - protein, 13 aa, Homo sapiens
  CDR3 for beta chain variable domain of TCR clone 391088 (TRBV20-1, TRBJ1-1)
CSARGGGNTEAFF

SEQ ID NO: 782177 - protein, 13 aa, Homo sapiens
  CDR3 for alpha chain variable domain of TCR clone 391089 (TRAV8-3, TRAJ28)
CAVGTVGSYQLTF

SEQ ID NO: 782178 - protein, 15 aa, Homo sapiens
  CDR3 for beta chain variable domain of TCR clone 391089 (TRBV7-9, TRBJ1-5)
CASSQGHQPNQTQHF

SEQ ID NO: 782179 - protein, 15 aa, Homo sapiens
  CDR3 for alpha chain variable domain of TCR clone 391090 (TRAV21, TRAJ52)
CAVRGGGTSYGKLTF

SEQ ID NO: 782180 - protein, 14 aa, Homo sapiens
  CDR3 for beta chain variable domain of TCR clone 391090 (TRBV20-1, TRBJ1-1)
CSAQTRIGGTEAFF

SEQ ID NO: 782181 - protein, 15 aa, Homo sapiens
  CDR3 for alpha chain variable domain of TCR clone 391091 (TRAV13-1, TRAJ44)
CAASRGGGPASKLTF

SEQ ID NO: 782182 - protein, 14 aa, Homo sapiens
  CDR3 for beta chain variable domain of TCR clone 391091 (TRBV7-2, TRBJ2-5)
CASSPRGSAETQYF

SEQ ID NO: 782183 - protein, 15 aa, Homo sapiens
  CDR3 for alpha chain variable domain of TCR clone 391092 (TRAV26-1, TRAJ29)
CIVRVEGSGNTPLVF

SEQ ID NO: 782184 - protein, 15 aa, Homo sapiens
  CDR3 for beta chain variable domain of TCR clone 391092 (TRBV20-1, TRBJ2-1)
CSASSAGSSYNEQFF

SEQ ID NO: 782185 - protein, 12 aa, Homo sapiens
  CDR3 for alpha chain variable domain of TCR clone 391093 (TRAV12-1, TRAJ48)
CVARRGNEKLTF

SEQ ID NO: 782186 - protein, 13 aa, Homo sapiens
  CDR3 for beta chain variable domain of TCR clone 391093 (TRBV12-4, TRBJ1-2)
CASSLRQGKGYTF

SEQ ID NO: 782187 - protein, 14 aa, Homo sapiens
  CDR3 for alpha chain variable domain of TCR clone 391094 (TRAV8-3, TRAJ44)
CAVGLTGTASKLTF

SEQ ID NO: 782188 - protein, 12 aa, Homo sapiens
  CDR3 for beta chain variable domain of TCR clone 391094 (TRBV7-3, TRBJ2-1)
CASSLGFNQQFF

SEQ ID NO: 782189 - protein, 16 aa, Homo sapiens
  CDR3 for alpha chain variable domain of TCR clone 391095 (TRAV12-3, TRAJ53)
CALSPGSGGSNYKLTF

SEQ ID NO: 782190 - protein, 15 aa, Homo sapiens
  CDR3 for beta chain variable domain of TCR clone 391095 (TRBV27, TRBJ2-1)
CASSNGGGSSNEQFF

SEQ ID NO: 782191 - protein, 14 aa, Homo sapiens
  CDR3 for alpha chain variable domain of TCR clone 391096 (TRAV26-1, TRAJ38)
CIADNAGNNRKLIW

SEQ ID NO: 782192 - protein, 13 aa, Homo sapiens
  CDR3 for beta chain variable domain of TCR clone 391096 (TRBV7-9, TRBJ1-2)
FASSLKQNYGYTF

SEQ ID NO: 782193 - protein, 14 aa, Homo sapiens
  CDR3 for alpha chain variable domain of TCR clone 391097 (TRAV1-2, TRAJ16)
CAVNRFSDGQKLLF

SEQ ID NO: 782194 - protein, 13 aa, Homo sapiens
  CDR3 for beta chain variable domain of TCR clone 391097 (TRBV15, TRBJ1-6)
CATSGGLNSPLHV

SEQ ID NO: 782195 - protein, 22 aa, Homo sapiens
  CDR3 for alpha chain variable domain of TCR clone 391098 (TRAV30, TRAJ24)
CGTEIVDAEPRLWSPQISRTLT

SEQ ID NO: 782196 - protein, 15 aa, Homo sapiens
  CDR3 for beta chain variable domain of TCR clone 391098 (TRBV7-9, TRBJ1-4)
CASGARTGGNEKLFF

SEQ ID NO: 782197 - protein, 16 aa, Homo sapiens
  CDR3 for alpha chain variable domain of TCR clone 391099 (TRAV13-1, TRAJ52)
CAAIMRGGTSYGKLTF

SEQ ID NO: 782198 - protein, 14 aa, Homo sapiens
  CDR3 for beta chain variable domain of TCR clone 391099 (TRBV12-4, TRBJ1-1)
CASSLGTGGTEAFF

SEQ ID NO: 782199 - protein, 11 aa, Homo sapiens
  CDR3 for alpha chain variable domain of TCR clone 391100 (TRAV1-1, TRAJ37)
CAVSPQGKLIF

SEQ ID NO: 782200 - protein, 13 aa, Homo sapiens
  CDR3 for beta chain variable domain of TCR clone 391100 (TRBV10-3, TRBJ2-7)
CASKLAVNYEQYF

SEQ ID NO: 782201 - protein, 14 aa, Homo sapiens
  CDR3 for alpha chain variable domain of TCR clone 391101 (TRAV1-2, TRAJ16)
CAVNRFSDGQKLLF

SEQ ID NO: 782202 - protein, 13 aa, Homo sapiens
  CDR3 for beta chain variable domain of TCR clone 391101 (TRBV20-1, TRBJ2-2)
CSASAAGTGELSF

SEQ ID NO: 782203 - protein, 14 aa, Homo sapiens
  CDR3 for alpha chain variable domain of TCR clone 391102 (TRAV12-1, TRAJ30)
CVVNIGGRDDKIIF

SEQ ID NO: 782204 - protein, 15 aa, Homo sapiens
  CDR3 for beta chain variable domain of TCR clone 391102 (TRBV19, TRBJ1-2)
CASSVGQVLNYGYTF

SEQ ID NO: 782205 - protein, 17 aa, Homo sapiens
  CDR3 for alpha chain variable domain of TCR clone 391103 (TRAV8-2, TRAJ17)
CVVSDRRFKASGNKLTF

SEQ ID NO: 782206 - protein, 18 aa, Homo sapiens
  CDR3 for beta chain variable domain of TCR clone 391103 (TRBV7-9, TRBJ2-7)
CASSLTTSGSRTWYEQYF

SEQ ID NO: 782207 - protein, 14 aa, Homo sapiens
  CDR3 for alpha chain variable domain of TCR clone 391104 (TRAV1-2, TRAJ8)
CAVREDTGFQKLVF

SEQ ID NO: 782208 - protein, 11 aa, Homo sapiens
  CDR3 for beta chain variable domain of TCR clone 391104 (TRBV7-9, TRBJ2-5)
CASSLVDTQYF

SEQ ID NO: 782209 - protein, 13 aa, Homo sapiens
  CDR3 for alpha chain variable domain of TCR clone 391105 (TRAV8-3, TRAJ28)
CAVGAVGSYQLTF

SEQ ID NO: 782210 - protein, 16 aa, Homo sapiens
  CDR3 for beta chain variable domain of TCR clone 391105 (TRBV7-2, TRBJ2-7)
CASRSQGAAYESTSGR

SEQ ID NO: 782211 - protein, 14 aa, Homo sapiens
  CDR3 for alpha chain variable domain of TCR clone 391106 (TRAV1-1, TRAJ11)
CDRIMNSGCSTLTF

SEQ ID NO: 782212 - protein, 11 aa, Homo sapiens
  CDR3 for beta chain variable domain of TCR clone 391106 (TRBV19, TRBJ1-1)
CASSIGSEAFF

SEQ ID NO: 782213 - protein, 15 aa, Homo sapiens
  CDR3 for alpha chain variable domain of TCR clone 391107 (TRAV8-3, TRAJ11)
FAVGLLNSGYSTPTF

SEQ ID NO: 782214 - protein, 23 aa, Homo sapiens
  CDR3 for beta chain variable domain of TCR clone 391107 (TRBV7-9, TRBJ1-2)
EAQLEKSRLLSDRFSSGEDGYTF

SEQ ID NO: 782215 - protein, 13 aa, Homo sapiens
  CDR3 for alpha chain variable domain of TCR clone 391108 (TRAV29/DV5, TRAJ31)
CAASRNNNPRLMF

SEQ ID NO: 782216 - protein, 12 aa, Homo sapiens
  CDR3 for beta chain variable domain of TCR clone 391108 (TRBV14, TRBJ2-5)
CASSQLKETQYF

SEQ ID NO: 782217 - protein, 14 aa, Homo sapiens
  CDR3 for alpha chain variable domain of TCR clone 391109 (TRAV1-2, TRAJ16)
CAVRGFSDGQKLPF

SEQ ID NO: 782218 - protein, 16 aa, Homo sapiens
  CDR3 for beta chain variable domain of TCR clone 391109 (TRBV20-1, TRBJ2-1)
CSARDHLAGGRGEQFF

SEQ ID NO: 782219 - protein, 15 aa, Homo sapiens
  CDR3 for alpha chain variable domain of TCR clone 391110 (TRAV8-1, TRAJ6)
CAVNTPSGGSYIPTF

SEQ ID NO: 782220 - protein, 14 aa, Homo sapiens
  CDR3 for beta chain variable domain of TCR clone 391110 (TRBV12-4, TRBJ2-1)
CASSLGQGASEQFF

SEQ ID NO: 782221 - protein, 17 aa, Homo sapiens
  CDR3 for alpha chain variable domain of TCR clone 391111 (TRAV3, TRAJ38)
CAVRGCLNAGNNRKLIW

SEQ ID NO: 782222 - protein, 16 aa, Homo sapiens
  CDR3 for beta chain variable domain of TCR clone 391111 (TRBV20-1, TRBJ1-4)
CSATGQGLLTNEKLFF

SEQ ID NO: 782223 - protein, 12 aa, Homo sapiens
  CDR3 for alpha chain variable domain of TCR clone 391112 (TRAV25, TRAJ29)
CAGPRGNTPLVF

SEQ ID NO: 782224 - protein, 13 aa, Homo sapiens
  CDR3 for beta chain variable domain of TCR clone 391112 (TRBV12-5, TRBJ2-3)
CASGDRQSDTQYF

SEQ ID NO: 782225 - protein, 13 aa, Homo sapiens
  CDR3 for alpha chain variable domain of TCR clone 391113 (TRAV2, TRAJ40)
CAVATSGTYKYIF

SEQ ID NO: 782226 - protein, 15 aa, Homo sapiens
  CDR3 for beta chain variable domain of TCR clone 391113 (TRBV11-3, TRBJ2-3)
CSSLKDGREGDTQYF

SEQ ID NO: 782227 - protein, 12 aa, Homo sapiens
  CDR3 for alpha chain variable domain of TCR clone 391114 (TRAV13-2, TRAJ8)
CAPWLGFQKLVF

SEQ ID NO: 782228 - protein, 16 aa, Homo sapiens
  CDR3 for beta chain variable domain of TCR clone 391114 (TRBV5-4, TRBJ2-3)
CASQQPGAGGADTQYF

SEQ ID NO: 782229 - protein, 14 aa, Homo sapiens
  CDR3 for alpha chain variable domain of TCR clone 391115 (TRAV12-2, TRAJ13)
CAVKKTGGYQKVTF

SEQ ID NO: 782230 - protein, 13 aa, Homo sapiens
  CDR3 for beta chain variable domain of TCR clone 391115 (TRBV20-1, TRBJ1-1)
CSARLGQGTEGFF

SEQ ID NO: 782231 - protein, 14 aa, Homo sapiens
  CDR3 for alpha chain variable domain of TCR clone 391116 (TRAV35, TRAJ33)
CAGSSQDSNYQLIW

SEQ ID NO: 782232 - protein, 15 aa, Homo sapiens
  CDR3 for beta chain variable domain of TCR clone 391116 (TRBV20-1, TRBJ2-7)
CSAESGTSGAYEQSL

SEQ ID NO: 782233 - protein, 15 aa, Homo sapiens
  CDR3 for alpha chain variable domain of TCR clone 391117 (TRAV17, TRAJ57)
CATGPSQVGSEKLVF

SEQ ID NO: 782234 - protein, 14 aa, Homo sapiens
  CDR3 for beta chain variable domain of TCR clone 391117 (TRBV12-5, TRBJ2-5)
CASGSRTQQETQYF

SEQ ID NO: 782235 - protein, 11 aa, Homo sapiens
  CDR3 for alpha chain variable domain of TCR clone 391118 (TRAV23/DV6, TRAJ48)
CAPLWGEKLTF

SEQ ID NO: 782236 - protein, 13 aa, Homo sapiens
  CDR3 for beta chain variable domain of TCR clone 391118 (TRBV12-4, TRBJ2-5)
CASSPGTEETQYF

SEQ ID NO: 782237 - protein, 14 aa, Homo sapiens
  CDR3 for alpha chain variable domain of TCR clone 391119 (TRAV12-2, TRAJ5)
CAVNRSTGRRALTF

SEQ ID NO: 782238 - protein, 14 aa, Homo sapiens
  CDR3 for beta chain variable domain of TCR clone 391119 (TRBV20-1, TRBJ2-2)
CSAPDTANTGELFF

SEQ ID NO: 782239 - protein, 14 aa, Homo sapiens
  CDR3 for alpha chain variable domain of TCR clone 391120 (TRAV38-1, TRAJ40)
CALRPTSGTYKYIF

SEQ ID NO: 782240 - protein, 15 aa, Homo sapiens
  CDR3 for beta chain variable domain of TCR clone 391120 (TRBV27, IGHJ2)
CASSAQQDLNEKLFF

SEQ ID NO: 782241 - protein, 11 aa, Homo sapiens
  CDR3 for alpha chain variable domain of TCR clone 391121 (TRAV1-2, TRAJ31)
CAVNNNARLMF

SEQ ID NO: 782242 - protein, 12 aa, Homo sapiens
  CDR3 for beta chain variable domain of TCR clone 391121 (TRBV5-1, TRBJ1-1)
CASSLTGAEAFF

SEQ ID NO: 782243 - protein, 13 aa, Homo sapiens
  CDR3 for alpha chain variable domain of TCR clone 391122 (TRAV12-2, TRAJ10)
CAVPTGGGNKLTF

SEQ ID NO: 782244 - protein, 11 aa, Homo sapiens
  CDR3 for beta chain variable domain of TCR clone 391122 (TRBV6-1, TRBJ2-1)
CASISSNAQFF

SEQ ID NO: 782245 - protein, 14 aa, Homo sapiens
  CDR3 for alpha chain variable domain of TCR clone 391123 (TRAV12-3, TRAJ42)
CAMNYGGSQGNLIF

SEQ ID NO: 782246 - protein, 15 aa, Homo sapiens
  CDR3 for beta chain variable domain of TCR clone 391123 (TRBV20-1, TRBJ2-1)
CSARGIGGTYNEQFF

SEQ ID NO: 782247 - protein, 14 aa, Homo sapiens
  CDR3 for alpha chain variable domain of TCR clone 391124 (TRAV23/DV6, TRAJ26)
CAASLYNYGQNFVF

SEQ ID NO: 782248 - protein, 12 aa, Homo sapiens
  CDR3 for beta chain variable domain of TCR clone 391124 (TRBV11-2, TRBJ2-1)
CASSPGNNEQFF

SEQ ID NO: 782249 - protein, 12 aa, Homo sapiens
  CDR3 for alpha chain variable domain of TCR clone 391125 (TRAV16, TRAJ10)
CSRTGGGNKLTF

SEQ ID NO: 782250 - protein, 15 aa, Homo sapiens
  CDR3 for beta chain variable domain of TCR clone 391125 (TRBV11-3, TRBJ2-3)
CASLKDVREGDTQYF

SEQ ID NO: 782251 - protein, 14 aa, Homo sapiens
  CDR3 for alpha chain variable domain of TCR clone 391126 (TRAV8-6, TRAJ29)
CAVSGWAGNTPLVF

SEQ ID NO: 782252 - protein, 19 aa, Homo sapiens
  CDR3 for beta chain variable domain of TCR clone 391126 (TRBV25-1, TRBJ2-2)
CAILVYRVDRGRKTGELFF

SEQ ID NO: 782253 - protein, 14 aa, Homo sapiens
  CDR3 for alpha chain variable domain of TCR clone 391127 (TRAV12-1, TRAJ17)
CVVNPKAAGNKLTF

SEQ ID NO: 782254 - protein, 18 aa, Homo sapiens
  CDR3 for beta chain variable domain of TCR clone 391127 (TRBV20-1, TRBJ2-6)
CSAETTPTHGSGANVLTF

SEQ ID NO: 782255 - protein, 12 aa, Homo sapiens
  CDR3 for alpha chain variable domain of TCR clone 391128 (TRAV13-1, TRAJ21)
CAAKEGFNKFYF

SEQ ID NO: 782256 - protein, 17 aa, Homo sapiens
  CDR3 for beta chain variable domain of TCR clone 391128 (TRBV20-1, TRBJ2-2)
CSASGSGQGGVTGELFF

SEQ ID NO: 782257 - protein, 13 aa, Homo sapiens
  CDR3 for alpha chain variable domain of TCR clone 391129 (TRAV8-2, TRAJ43)
CVVSDQGDNEMRF

SEQ ID NO: 782258 - protein, 12 aa, Homo sapiens
  CDR3 for beta chain variable domain of TCR clone 391129 (TRBV7-9, TRBJ2-7)
CASRTGFDEQYF

SEQ ID NO: 782259 - protein, 14 aa, Homo sapiens
  CDR3 for alpha chain variable domain of TCR clone 391130 (TRAV12-1, TRAJ8)
CVVNSNTGFQKLVL

SEQ ID NO: 782260 - protein, 16 aa, Homo sapiens
  CDR3 for beta chain variable domain of TCR clone 391130 (TRBV20-1, TRBJ2-2)
CSARDDRVGLTGELFF

SEQ ID NO: 782261 - protein, 14 aa, Homo sapiens
  CDR3 for alpha chain variable domain of TCR clone 391131 (TRAV26-1, TRAJ39)
CIVRGPRAGNMHTF

SEQ ID NO: 782262 - protein, 15 aa, Homo sapiens
  CDR3 for beta chain variable domain of TCR clone 391131 (TRBV7-9, TRBJ1-5)
CASSQGHQPNQPQHF

SEQ ID NO: 782263 - protein, 15 aa, Homo sapiens
  CDR3 for alpha chain variable domain of TCR clone 391132 (TRAV4, TRAJ39)
CLVGPNNNASNMLTF

SEQ ID NO: 782264 - protein, 16 aa, Homo sapiens
  CDR3 for beta chain variable domain of TCR clone 391132 (TRBV13, TRBJ2-2)
CASSPRTGEHTGELFF

SEQ ID NO: 782265 - protein, 16 aa, Homo sapiens
  CDR3 for alpha chain variable domain of TCR clone 391133 (TRAV38-1, TRAJ37)
CAFRGDGSSNTGTLIF

SEQ ID NO: 782266 - protein, 13 aa, Homo sapiens
  CDR3 for beta chain variable domain of TCR clone 391133 (TRBV12-4, TRBJ2-5)
CASSLLRRETQYF

SEQ ID NO: 782267 - protein, 15 aa, Homo sapiens
  CDR3 for alpha chain variable domain of TCR clone 391134 (TRAV8-3, TRAJ45)
GASSYSGGGADGLSF

SEQ ID NO: 782268 - protein, 13 aa, Homo sapiens
  CDR3 for beta chain variable domain of TCR clone 391134 (TRBV10-3, TRBJ2-7)
CASKLAVNYEQYF

SEQ ID NO: 782269 - protein, 16 aa, Homo sapiens
  CDR3 for alpha chain variable domain of TCR clone 391135 (TRAV14/DV4, TRAJ20)
CAMREGRSRDDYKLSF

SEQ ID NO: 782270 - protein, 13 aa, Homo sapiens
  CDR3 for beta chain variable domain of TCR clone 391135 (TRBV10-3, TRBJ1-2)
CAINADLNYGYTF

SEQ ID NO: 782271 - protein, 21 aa, Homo sapiens
  CDR3 for alpha chain variable domain of TCR clone 391136 (TRAV17, TRAJ9)
CATDYTGASKLSLEQEQDYLL

SEQ ID NO: 782272 - protein, 14 aa, Homo sapiens
  CDR3 for beta chain variable domain of TCR clone 391136 (TRBV19, TRBJ2-5)
CASSMTGQQETQYF

SEQ ID NO: 782273 - protein, 15 aa, Homo sapiens
  CDR3 for alpha chain variable domain of TCR clone 391137 (TRAV12-1, TRAJ42)
CVVTRGGGSPGNLIF

SEQ ID NO: 782274 - protein, 14 aa, Homo sapiens
  CDR3 for beta chain variable domain of TCR clone 391137 (TRBV11-2, TRBJ2-3)
CASSLGGGANTQYF

SEQ ID NO: 782275 - protein, 16 aa, Homo sapiens
  CDR3 for alpha chain variable domain of TCR clone 391138 (TRAV3, TRAJ37)
CAVRGKGSGNTGKLIF

SEQ ID NO: 782276 - protein, 14 aa, Homo sapiens
  CDR3 for beta chain variable domain of TCR clone 391138 (TRBV2, TRBJ2-1)
CASSEALIYNEQFF

SEQ ID NO: 782277 - protein, 10 aa, Homo sapiens
  CDR3 for alpha chain variable domain of TCR clone 391139 (TRAV23/DV6, TRAJ31)
CARGGARLML

SEQ ID NO: 782278 - protein, 14 aa, Homo sapiens
  CDR3 for beta chain variable domain of TCR clone 391139 (TRBV7-8, TRBJ1-2)
CASSQDSLSYGYAF

SEQ ID NO: 782279 - protein, 13 aa, Homo sapiens
  CDR3 for alpha chain variable domain of TCR clone 391140 (TRAV30, TRAJ24)
CGTVTDSWGKLQF

SEQ ID NO: 782280 - protein, 11 aa, Homo sapiens
  CDR3 for beta chain variable domain of TCR clone 391140 (TRBV7-8, TRBJ2-7)
CASSLSLEQYF

SEQ ID NO: 782281 - protein, 13 aa, Homo sapiens
  CDR3 for alpha chain variable domain of TCR clone 391141 (TRAV2, TRAJ26)
CAVVGNYGQNFVF

SEQ ID NO: 782282 - protein, 14 aa, Homo sapiens
  CDR3 for beta chain variable domain of TCR clone 391141 (TRBV6-5, TRBJ2-2)
CASTEGHETGELFF

SEQ ID NO: 782283 - protein, 13 aa, Homo sapiens
  CDR3 for alpha chain variable domain of TCR clone 391142 (TRAV27, TRAJ6)
CAGGTRGSYILTF

SEQ ID NO: 782284 - protein, 14 aa, Homo sapiens
  CDR3 for beta chain variable domain of TCR clone 391142 (TRBV20-1, TRBJ2-4)
CSASGRVGENIQYF

SEQ ID NO: 782285 - protein, 14 aa, Homo sapiens
  CDR3 for alpha chain variable domain of TCR clone 391143 (TRAV3, TRAJ17)
CAVRDAAAGNKLTF

SEQ ID NO: 782286 - protein, 15 aa, Homo sapiens
  CDR3 for beta chain variable domain of TCR clone 391143 (TRBV20-1, TRBJ2-7)
CSAESGTSGAYEQYF

SEQ ID NO: 782287 - protein, 15 aa, Homo sapiens
  CDR3 for alpha chain variable domain of TCR clone 391144 (TRAV35, TRAJ58)
CAGRRKETSGSRLTF

SEQ ID NO: 782288 - protein, 11 aa, Homo sapiens
  CDR3 for beta chain variable domain of TCR clone 391144 (TRBV11-2, TRBJ1-1)
CASSINTEAFF

SEQ ID NO: 782289 - protein, 14 aa, Homo sapiens
  CDR3 for alpha chain variable domain of TCR clone 391145 (TRAV1-2, TRAJ15)
CAVRDRQAGTALIF

SEQ ID NO: 782290 - protein, 12 aa, Homo sapiens
  CDR3 for beta chain variable domain of TCR clone 391145 (TRBV11-2, TRBJ2-1)
CASSPGNNEQFF

SEQ ID NO: 782291 - protein, 12 aa, Homo sapiens
  CDR3 for alpha chain variable domain of TCR clone 391146 (TRAV3, TRAJ43)
CAVRGPDNDMRF

SEQ ID NO: 782292 - protein, 14 aa, Homo sapiens
  CDR3 for beta chain variable domain of TCR clone 391146 (TRBV6-1, TRBJ1-3)
CASVQGGGGNTIYF

SEQ ID NO: 782293 - protein, 17 aa, Homo sapiens
  CDR3 for alpha chain variable domain of TCR clone 391147 (TRAV3, TRAJ6)
CAVSRRTDTVGSYIPTF

SEQ ID NO: 782294 - protein, 18 aa, Homo sapiens
  CDR3 for beta chain variable domain of TCR clone 391147 (TRBV7-2, TRBJ2-3)
CASSLETSRGRKAETQYF

SEQ ID NO: 782295 - protein, 13 aa, Homo sapiens
  CDR3 for alpha chain variable domain of TCR clone 391148 (TRAV20, TRAJ15)
CATINQAGTALIF

SEQ ID NO: 782296 - protein, 13 aa, Homo sapiens
  CDR3 for beta chain variable domain of TCR clone 391148 (TRBV12-4, TRBJ2-1)
CASRQPANNEQFF

SEQ ID NO: 782297 - protein, 15 aa, Homo sapiens
  CDR3 for alpha chain variable domain of TCR clone 391149 (TRAV17, TRAJ57)
CATGPSQGGSEQLVF

SEQ ID NO: 782298 - protein, 14 aa, Homo sapiens
  CDR3 for beta chain variable domain of TCR clone 391149 (TRBV12-5, TRBJ2-5)
CASGSRTQQETQYF

SEQ ID NO: 782299 - protein, 17 aa, Homo sapiens
  CDR3 for alpha chain variable domain of TCR clone 391150 (TRAV4, TRAJ28)
CLVGDRALGLGVTNSLS

SEQ ID NO: 782300 - protein, 14 aa, Homo sapiens
  CDR3 for beta chain variable domain of TCR clone 391150 (TRBV20-1, TRBJ2-1)
CSAQIGGSANEQFF

SEQ ID NO: 782301 - protein, 13 aa, Homo sapiens
  CDR3 for alpha chain variable domain of TCR clone 391151 (TRAV8-3, TRAJ20)
CAVGRPNDYKLSF

SEQ ID NO: 782302 - protein, 14 aa, Homo sapiens
  CDR3 for beta chain variable domain of TCR clone 391151 (TRBV12-5, TRBJ2-5)
CASGTRTHQETQYF

SEQ ID NO: 782303 - protein, 12 aa, Homo sapiens
  CDR3 for alpha chain variable domain of TCR clone 391152 (TRAV13-1, TRAJ21)
GAAKEGFNKFYF

SEQ ID NO: 782304 - protein, 15 aa, Homo sapiens
  CDR3 for beta chain variable domain of TCR clone 391152 (TRBV25-1, TRBJ1-4)
CASSPGDSTNEKLFF

SEQ ID NO: 782305 - protein, 11 aa, Homo sapiens
  CDR3 for alpha chain variable domain of TCR clone 391153 (TRAV2, TRAJ21)
CAVFNFNKFYF

SEQ ID NO: 782306 - protein, 22 aa, Homo sapiens
  CDR3 for beta chain variable domain of TCR clone 391153 (TRBV6-1, TRBJ1-3)
CASVQGGGWKHHIFWRGKLAHC

SEQ ID NO: 782307 - protein, 14 aa, Homo sapiens
  CDR3 for alpha chain variable domain of TCR clone 391154 (TRAV12-3, TRAJ10)
SHLPLTGGGNKITF

SEQ ID NO: 782308 - protein, 17 aa, Homo sapiens
  CDR3 for beta chain variable domain of TCR clone 391154 (TRBV20-1, TRBJ2-1)
CSASSSGLAGSYNEQFF

SEQ ID NO: 782309 - protein, 17 aa, Homo sapiens
  CDR3 for alpha chain variable domain of TCR clone 391155 (TRAV23/DV6, TRAJ12)
CAAIDLGAMYSSYKLIF

SEQ ID NO: 782310 - protein, 12 aa, Homo sapiens
  CDR3 for beta chain variable domain of TCR clone 391155 (TRBV10-3, TRBJ2-2)
CAIRENTGELFF

SEQ ID NO: 782311 - protein, 13 aa, Homo sapiens
  CDR3 for alpha chain variable domain of TCR clone 391156 (TRAV13-1, TRAJ21)
CAASIYNFNKFYF

SEQ ID NO: 782312 - protein, 12 aa, Homo sapiens
  CDR3 for beta chain variable domain of TCR clone 391156 (TRBV11-2, TRBJ2-5)
CVSSLVGETQYF

SEQ ID NO: 782313 - protein, 10 aa, Homo sapiens
  CDR3 for alpha chain variable domain of TCR clone 391157 (TRAV23/DV6, TRAJ57)
CAASYTLSQG

SEQ ID NO: 782314 - protein, 13 aa, Homo sapiens
  CDR3 for beta chain variable domain of TCR clone 391157 (TRBV5-1, TRBJ1-2)
CASSSTGVYGYTF

SEQ ID NO: 782315 - protein, 16 aa, Homo sapiens
  CDR3 for alpha chain variable domain of TCR clone 391158 (TRAV30, TRAJ24)
CGTEIVDADSWGKFQF

SEQ ID NO: 782316 - protein, 14 aa, Homo sapiens
  CDR3 for beta chain variable domain of TCR clone 391158 (TRBV7-2, TRBJ2-7)
CASSPKTSLYEQYF

SEQ ID NO: 782317 - protein, 15 aa, Homo sapiens
  CDR3 for alpha chain variable domain of TCR clone 391159 (TRAV21, TRAJ53)
CATLNSGGSNYKLTF

SEQ ID NO: 782318 - protein, 13 aa, Homo sapiens
  CDR3 for beta chain variable domain of TCR clone 391159 (TRBV12-5, TRBJ2-5)
ASGSRTHQETQYF

SEQ ID NO: 782319 - protein, 12 aa, Homo sapiens
  CDR3 for alpha chain variable domain of TCR clone 391160 (TRAV3, TRAJ17)
CAVRSCRQQANF

SEQ ID NO: 782320 - protein, 15 aa, Homo sapiens
  CDR3 for beta chain variable domain of TCR clone 391160 (TRBV2, TRBJ2-4)
CASSGTNRAKNIQYF

SEQ ID NO: 782321 - protein, 13 aa, Homo sapiens
  CDR3 for alpha chain variable domain of TCR clone 391161 (TRAV13-1, TRAJ37)
CAARTGNTGKLIF

SEQ ID NO: 782322 - protein, 14 aa, Homo sapiens
  CDR3 for beta chain variable domain of TCR clone 391161 (TRBV12-4, TRBJ2-3)
CASSLGQGTDTQYF

SEQ ID NO: 782323 - protein, 14 aa, Homo sapiens
  CDR3 for alpha chain variable domain of TCR clone 391162 (TRAV17, TRAJ57)
CAADPQGGSEKLFF

SEQ ID NO: 782324 - protein, 14 aa, Homo sapiens
  CDR3 for beta chain variable domain of TCR clone 391162 (TRBV2, TRBJ1-1)
CASRSGTMNTEAFF

SEQ ID NO: 782325 - protein, 14 aa, Homo sapiens
  CDR3 for alpha chain variable domain of TCR clone 391163 (TRAV29/DV5, TRAJ45)
CAASFIGGAGGLTF

SEQ ID NO: 782326 - protein, 11 aa, Homo sapiens
  CDR3 for beta chain variable domain of TCR clone 391163 (TRBV11-2, TRBJ2-2)
CASSLPGELFF

SEQ ID NO: 782327 - protein, 15 aa, Homo sapiens
  CDR3 for alpha chain variable domain of TCR clone 391164 (TRAV8-2, TRAJ40)
CVVLGTTSGTYKYIF

SEQ ID NO: 782328 - protein, 12 aa, Homo sapiens
  CDR3 for beta chain variable domain of TCR clone 391164 (TRBV14, TRBJ1-1)
CASSQLKGLAFF

SEQ ID NO: 782329 - protein, 12 aa, Homo sapiens
  CDR3 for alpha chain variable domain of TCR clone 391165 (TRAV21, TRAJ31)
CAVWGNNARLMF

SEQ ID NO: 782330 - protein, 16 aa, Homo sapiens
  CDR3 for beta chain variable domain of TCR clone 391165 (TRBV27, TRBJ2-5)
CVSSYGPGGQKETQYF

SEQ ID NO: 782331 - protein, 18 aa, Homo sapiens
  CDR3 for alpha chain variable domain of TCR clone 391166 (TRAV12-3, TRAJ52)
CAMSRTNAGGTSYGKLTF

SEQ ID NO: 782332 - protein, 17 aa, Homo sapiens
  CDR3 for beta chain variable domain of TCR clone 391166 (TRBV7-3, TRBJ2-3)
CASSLMKRVRGTDTQYF

SEQ ID NO: 782333 - protein, 12 aa, Homo sapiens
  CDR3 for alpha chain variable domain of TCR clone 391167 (TRAV12-3, TRAJ17)
FAMTLTGNKLTF

SEQ ID NO: 782334 - protein, 11 aa, Homo sapiens
  CDR3 for beta chain variable domain of TCR clone 391167 (TRBV11-2, TRBJ1-1)
CASSINTGAFF

SEQ ID NO: 782335 - protein, 19 aa, Homo sapiens
  CDR3 for alpha chain variable domain of TCR clone 391168 (TRAV21, TRAJ52)
CAVKWPLGAGGTSYGKLTF

SEQ ID NO: 782336 - protein, 13 aa, Homo sapiens
  CDR3 for beta chain variable domain of TCR clone 391168 (TRBV13, TRBJ2-5)
CASSLGGEETQYF

SEQ ID NO: 782337 - protein, 14 aa, Homo sapiens
  CDR3 for alpha chain variable domain of TCR clone 391169 (TRAV12-2, TRAJ6)
CAVNVSRKIHTYIW

SEQ ID NO: 782338 - protein, 12 aa, Homo sapiens
  CDR3 for beta chain variable domain of TCR clone 391169 (TRBV29-1, TRBJ2-3)
CSVTGGADTQYF

SEQ ID NO: 782339 - protein, 15 aa, Homo sapiens
  CDR3 for alpha chain variable domain of TCR clone 391170 (TRAV3, TRAJ5)
CAVRDLDTGRRALTL

SEQ ID NO: 782340 - protein, 12 aa, Homo sapiens
  CDR3 for beta chain variable domain of TCR clone 391170 (TRBV11-2, TRBJ2-1)
CASSPGNNEQFF

SEQ ID NO: 782341 - protein, 16 aa, Homo sapiens
  CDR3 for alpha chain variable domain of TCR clone 391171 (TRAV1-1, TRAJ45)
CAVRAYSGGGADRLTF

SEQ ID NO: 782342 - protein, 13 aa, Homo sapiens
  CDR3 for beta chain variable domain of TCR clone 391171 (TRBV20-1, TRBJ1-2)
CSARGTADYGYTF

SEQ ID NO: 782343 - protein, 13 aa, Homo sapiens
  CDR3 for alpha chain variable domain of TCR clone 391172 (TRAV26-1, TRAJ47)
CILKGEYGNKLVF

SEQ ID NO: 782344 - protein, 17 aa, Homo sapiens
  CDR3 for beta chain variable domain of TCR clone 391172 (TRBV11-2, TRBJ2-1)
CASSLYPPGVEYNEQFF

SEQ ID NO: 782345 - protein, 15 aa, Homo sapiens
  CDR3 for alpha chain variable domain of TCR clone 391173 (TRAV38-1, TRAJ37)
CAFIHGSGNTGKLIF

SEQ ID NO: 782346 - protein, 15 aa, Homo sapiens
  CDR3 for beta chain variable domain of TCR clone 391173 (TRBV4-1, TRBJ1-4)
CASSDTGGTNEKLFF

SEQ ID NO: 782347 - protein, 20 aa, Homo sapiens
  CDR3 for alpha chain variable domain of TCR clone 391174 (TRAV1-2, TRAJ8)
CAVREDTGFQKLLLELAPDF

SEQ ID NO: 782348 - protein, 14 aa, Homo sapiens
  CDR3 for beta chain variable domain of TCR clone 391174 (TRBV19, TRBJ2-2)
CASSTLHRSGELFF

SEQ ID NO: 782349 - protein, 15 aa, Homo sapiens
  CDR3 for alpha chain variable domain of TCR clone 391175 (TRAV12-3, TRAJ6)
CAMSATTGGSYIPTF

SEQ ID NO: 782350 - protein, 16 aa, Homo sapiens
  CDR3 for beta chain variable domain of TCR clone 391175 (TRBV20-1, TRBJ1-2)
CSASMGQGGANYGYTV

SEQ ID NO: 782351 - protein, 17 aa, Homo sapiens
  CDR3 for alpha chain variable domain of TCR clone 391176 (TRAV13-1, TRAJ53)
CAASWKSSGGSNYKLTF

SEQ ID NO: 782352 - protein, 19 aa, Homo sapiens
  CDR3 for beta chain variable domain of TCR clone 391176 (TRBV7-9, TRBJ2-1)
WASSHNRGALLRSYNEQSF

SEQ ID NO: 782353 - protein, 14 aa, Homo sapiens
  CDR3 for alpha chain variable domain of TCR clone 391177 (TRAV12-3, TRAJ56)
CAMSVTAANSKLTF

SEQ ID NO: 782354 - protein, 17 aa, Homo sapiens
  CDR3 for beta chain variable domain of TCR clone 391177 (TRBV20-1, TRBJ2-3)
CSASLLGRGGSADTQYF

SEQ ID NO: 782355 - protein, 23 aa, Homo sapiens
  CDR3 for alpha chain variable domain of TCR clone 391178 (TRAV26-1, TRAJ38)
CIADNAGNNHIQNPDPAVYSLRD

SEQ ID NO: 782356 - protein, 13 aa, Homo sapiens
  CDR3 for beta chain variable domain of TCR clone 391178 (TRBV20-1, TRBJ1-1)
CSARGGGNTEAFF

SEQ ID NO: 782357 - protein, 16 aa, Homo sapiens
  CDR3 for alpha chain variable domain of TCR clone 391179 (TRAV4, TRAJ22)
CLVGDLYSGSARQLTF

SEQ ID NO: 782358 - protein, 15 aa, Homo sapiens
  CDR3 for beta chain variable domain of TCR clone 391179 (TRBV7-2, TRBJ2-1)
CASSSGLAGGNEQFF

SEQ ID NO: 782359 - protein, 14 aa, Homo sapiens
  CDR3 for alpha chain variable domain of TCR clone 391180 (TRAV13-1, TRAJ35)
CAASKGVFGSVLHC

SEQ ID NO: 782360 - protein, 13 aa, Homo sapiens
  CDR3 for beta chain variable domain of TCR clone 391180 (TRBV7-3, TRBJ1-1)
CASSQDWGAEAFF

SEQ ID NO: 782361 - protein, 14 aa, Homo sapiens
  CDR3 for alpha chain variable domain of TCR clone 391181 (TRAV17, TRAJ57)
CATDPQGGSEKLVF

SEQ ID NO: 782362 - protein, 13 aa, Homo sapiens
  CDR3 for beta chain variable domain of TCR clone 391181 (TRBV19, TRBJ2-7)
CASIPRQSYEQYF

SEQ ID NO: 782363 - protein, 13 aa, Homo sapiens
  CDR3 for alpha chain variable domain of TCR clone 391182 (TRAV21, TRAJ27)
CAARPGNAGKSTF

SEQ ID NO: 782364 - protein, 14 aa, Homo sapiens
  CDR3 for beta chain variable domain of TCR clone 391182 (TRBV6-1, TRBJ1-6)
CASSGTAYNSPLHF

SEQ ID NO: 782365 - protein, 12 aa, Homo sapiens
  CDR3 for alpha chain variable domain of TCR clone 391183 (TRAV12-2, TRAJ49)
CAVLNTGNQFYF

SEQ ID NO: 782366 - protein, 14 aa, Homo sapiens
  CDR3 for beta chain variable domain of TCR clone 391183 (TRBV5-4, TRBJ2-3)
CASSLGQGADTKYF

SEQ ID NO: 782367 - protein, 13 aa, Homo sapiens
  CDR3 for alpha chain variable domain of TCR clone 391184 (TRAV17, TRAJ11)
CATRSSGYSTLTF

SEQ ID NO: 782368 - protein, 12 aa, Homo sapiens
  CDR3 for beta chain variable domain of TCR clone 391184 (TRBV7-9, TRBJ2-7)
CASSIKREEQYF

SEQ ID NO: 782369 - protein, 14 aa, Homo sapiens
  CDR3 for alpha chain variable domain of TCR clone 391185 (TRAV17, TRAJ57)
CATDPQGGSEKLVF

SEQ ID NO: 782370 - protein, 15 aa, Homo sapiens
  CDR3 for beta chain variable domain of TCR clone 391185 (TRBV11-3, TRBJ2-2)
CASSYFSTGTGELFF

SEQ ID NO: 782371 - protein, 16 aa, Homo sapiens
  CDR3 for alpha chain variable domain of TCR clone 391186 (TRAV30, TRAJ24)
CGTEIVDADSWGKFQF

SEQ ID NO: 782372 - protein, 12 aa, Homo sapiens
  CDR3 for beta chain variable domain of TCR clone 391186 (TRBV11-2, TRBJ2-2)
CDSSLPTGELFF

SEQ ID NO: 782373 - protein, 16 aa, Homo sapiens
  CDR3 for alpha chain variable domain of TCR clone 391187 (TRAV30, TRAJ24)
CGTEIVDADSWGKFQF

SEQ ID NO: 782374 - protein, 13 aa, Homo sapiens
  CDR3 for beta chain variable domain of TCR clone 391187 (TRBV20-1, TRBJ1-1)
QCTNTDWGTEAFF

SEQ ID NO: 782375 - protein, 12 aa, Homo sapiens
  CDR3 for alpha chain variable domain of TCR clone 391188 (TRAV12-3, TRAJ17)
CAMTLTGNKLTF

SEQ ID NO: 782376 - protein, 15 aa, Homo sapiens
  CDR3 for beta chain variable domain of TCR clone 391188 (TRBV20-1, TRBJ2-7)
CSAESGTSGAYEQYV

SEQ ID NO: 782377 - protein, 16 aa, Homo sapiens
  CDR3 for alpha chain variable domain of TCR clone 391189 (TRAV3, TRAJ10)
CAVRDRRAGGGNKLTF

SEQ ID NO: 782378 - protein, 16 aa, Homo sapiens
  CDR3 for beta chain variable domain of TCR clone 391189 (TRBV12-4, TRBJ1-5)
CASSRPVGGSNQPQHF

SEQ ID NO: 782379 - protein, 14 aa, Homo sapiens
  CDR3 for alpha chain variable domain of TCR clone 391190 (TRAV26-1, TRAJ21)
CIVRVGHNFNKFYF

SEQ ID NO: 782380 - protein, 15 aa, Homo sapiens
  CDR3 for beta chain variable domain of TCR clone 391190 (TRBV4-3, TRBJ2-1)
CASSQGRAGSNEQFF

SEQ ID NO: 782381 - protein, 12 aa, Homo sapiens
  CDR3 for alpha chain variable domain of TCR clone 391191 (TRAV13-1, TRAJ53)
AASGGSNYKLTF

SEQ ID NO: 782382 - protein, 14 aa, Homo sapiens
  CDR3 for beta chain variable domain of TCR clone 391191 (TRBV28, TRBJ2-1)
CSSIIAGGRSEQFF

SEQ ID NO: 782383 - protein, 13 aa, Homo sapiens
  CDR3 for alpha chain variable domain of TCR clone 391192 (TRAV27, TRAJ16)
CAGASSDGQKLLF

SEQ ID NO: 782384 - protein, 14 aa, Homo sapiens
  CDR3 for beta chain variable domain of TCR clone 391192 (TRBV7-8, TRBJ2-3)
CASSLEAGTDTQYF

SEQ ID NO: 782385 - protein, 12 aa, Homo sapiens
  CDR3 for alpha chain variable domain of TCR clone 391193 (TRAV12-3, TRAJ17)
CAMTLTGNKLTF

SEQ ID NO: 782386 - protein, 15 aa, Homo sapiens
  CDR3 for beta chain variable domain of TCR clone 391193 (TRBV5-1, TRBJ1-5)
CASSLSGNSNQPQHF

SEQ ID NO: 782387 - protein, 22 aa, Homo sapiens
  CDR3 for alpha chain variable domain of TCR clone 391194 (TRAV1-1, TRAJ17)
CLLLLRCESPRGIKAAGNKLTF

SEQ ID NO: 782388 - protein, 17 aa, Homo sapiens
  CDR3 for beta chain variable domain of TCR clone 391194 (TRBV6-1, TRBJ1-1)
CASLARGVGGFNTEAFF

SEQ ID NO: 782389 - protein, 14 aa, Homo sapiens
  CDR3 for alpha chain variable domain of TCR clone 391195 (TRAV2, TRAJ21)
CAVEDLNNFNKFYF

SEQ ID NO: 782390 - protein, 11 aa, Homo sapiens
  CDR3 for beta chain variable domain of TCR clone 391195 (TRBV10-3, TRBJ2-1)
SAISDRGLQFF

SEQ ID NO: 782391 - protein, 14 aa, Homo sapiens
  CDR3 for alpha chain variable domain of TCR clone 391196 (TRAV1-2, TRAJ16)
CAVDRFSDGQKLLF

SEQ ID NO: 782392 - protein, 14 aa, Homo sapiens
  CDR3 for beta chain variable domain of TCR clone 391196 (TRBV4-1, TRBJ2-2)
CASSQAVNTGELFF

SEQ ID NO: 782393 - protein, 13 aa, Homo sapiens
  CDR3 for alpha chain variable domain of TCR clone 391197 (TRAV30, TRAJ16)
CGTFGGDGQKLLF

SEQ ID NO: 782394 - protein, 16 aa, Homo sapiens
  CDR3 for beta chain variable domain of TCR clone 391197 (TRBV29-1, TRBJ2-7)
CSVEDAEDGTAYEQYF

SEQ ID NO: 782395 - protein, 16 aa, Homo sapiens
  CDR3 for alpha chain variable domain of TCR clone 391198 (TRAV1-2, TRAJ10)
CAVRGVLTGGGNKLTF

SEQ ID NO: 782396 - protein, 19 aa, Homo sapiens
  CDR3 for beta chain variable domain of TCR clone 391198 (TRBV20-1, TRBJ2-1)
CSARGETSGNSPQIDEQFF

SEQ ID NO: 782397 - protein, 12 aa, Homo sapiens
  CDR3 for alpha chain variable domain of TCR clone 391199 (TRAV13-1, TRAJ53)
AASGGSNYKLTF

SEQ ID NO: 782398 - protein, 15 aa, Homo sapiens
  CDR3 for beta chain variable domain of TCR clone 391199 (TRBV5-1, TRBJ2-1)
GASSPPRAPYNEQLF

SEQ ID NO: 782399 - protein, 14 aa, Homo sapiens
  CDR3 for alpha chain variable domain of TCR clone 391200 (TRAV20, TRAJ26)
CAVHAAIYGQNFVF

SEQ ID NO: 782400 - protein, 14 aa, Homo sapiens
  CDR3 for beta chain variable domain of TCR clone 391200 (TRBV27, TRBJ2-2)
CASSLGDTTGELFF

SEQ ID NO: 782401 - protein, 16 aa, Homo sapiens
  CDR3 for alpha chain variable domain of TCR clone 391201 (TRAV12-2, TRAJ43)
CAGDDMSFGAGTRLTV

SEQ ID NO: 782402 - protein, 16 aa, Homo sapiens
  CDR3 for beta chain variable domain of TCR clone 391201 (TRBV2, TRBJ2-4)
CASSEAPGGEQNIQYF

SEQ ID NO: 782403 - protein, 21 aa, Homo sapiens
  CDR3 for alpha chain variable domain of TCR clone 391202 (TRAV27, TRAJ38)
CAARRNAGNNHIQNPDPAVYQ

SEQ ID NO: 782404 - protein, 12 aa, Homo sapiens
  CDR3 for beta chain variable domain of TCR clone 391202 (TRBV29-1, TRBJ2-3)
CSVTGGADTQYF

SEQ ID NO: 782405 - protein, 14 aa, Homo sapiens
  CDR3 for alpha chain variable domain of TCR clone 391203 (TRAV36/DV7, TRAJ13)
WGSGENGGYQKVTF

SEQ ID NO: 782406 - protein, 15 aa, Homo sapiens
  CDR3 for beta chain variable domain of TCR clone 391203 (TRBV19, TRBJ2-1)
CASSTGTSSYNGQFF

SEQ ID NO: 782407 - protein, 14 aa, Homo sapiens
  CDR3 for alpha chain variable domain of TCR clone 391204 (TRAV1-2, TRAJ16)
CAVNRFSDGQKLLF

SEQ ID NO: 782408 - protein, 17 aa, Homo sapiens
  CDR3 for beta chain variable domain of TCR clone 391204 (TRBV18, TRBJ2-3)
CASSAAGTSGSTDTQYF

SEQ ID NO: 782409 - protein, 17 aa, Homo sapiens
  CDR3 for alpha chain variable domain of TCR clone 391205 (TRAV8-3, TRAJ8)
CAVGPNEHRLSETCLWN

SEQ ID NO: 782410 - protein, 13 aa, Homo sapiens
  CDR3 for beta chain variable domain of TCR clone 391205 (TRBV10-2, TRBJ2-3)
CASSESGDHTQYF

SEQ ID NO: 782411 - protein, 14 aa, Homo sapiens
  CDR3 for alpha chain variable domain of TCR clone 391206 (TRAV35, TRAJ28)
CAGRRGGWSYQLTF

SEQ ID NO: 782412 - protein, 13 aa, Homo sapiens
  CDR3 for beta chain variable domain of TCR clone 391206 (TRBV9, TRBJ2-1)
CASSPSGGSEQFF

SEQ ID NO: 782413 - protein, 14 aa, Homo sapiens
  CDR3 for alpha chain variable domain of TCR clone 391207 (TRAV2, TRAJ9)
CAVEDRSGGFKTIF

SEQ ID NO: 782414 - protein, 16 aa, Homo sapiens
  CDR3 for beta chain variable domain of TCR clone 391207 (TRBV28, TRBJ1-5)
CASSLTGQGWKQPQHF

SEQ ID NO: 782415 - protein, 12 aa, Homo sapiens
  CDR3 for alpha chain variable domain of TCR clone 391208 (TRAV24, TRAJ47)
CAFGEYGNKLVF

SEQ ID NO: 782416 - protein, 18 aa, Homo sapiens
  CDR3 for beta chain variable domain of TCR clone 391208 (TRBV7-6, TRBJ2-1)
CASSPRSSGMSSYNEQFF

SEQ ID NO: 782417 - protein, 13 aa, Homo sapiens
  CDR3 for alpha chain variable domain of TCR clone 391209 (TRAV16, TRAJ58)
CALSIPSGPRLTF

SEQ ID NO: 782418 - protein, 16 aa, Homo sapiens
  CDR3 for beta chain variable domain of TCR clone 391209 (TRBV29-1, TRBJ2-6)
CSVEDITYSGANVLTF

SEQ ID NO: 782419 - protein, 16 aa, Homo sapiens
  CDR3 for alpha chain variable domain of TCR clone 391210 (TRAV26-1, TRAJ32)
CIVWTNYGGATNKLIF

SEQ ID NO: 782420 - protein, 14 aa, Homo sapiens
  CDR3 for beta chain variable domain of TCR clone 391210 (TRBV27, TRBJ1-1)
CASSLLSGLSEAFF

SEQ ID NO: 782421 - protein, 13 aa, Homo sapiens
  CDR3 for alpha chain variable domain of TCR clone 391211 (TRAV3, TRAJ3)
CAVRDREKQCFQD

SEQ ID NO: 782422 - protein, 13 aa, Homo sapiens
  CDR3 for beta chain variable domain of TCR clone 391211 (TRBV10-3, TRBJ2-7)
CASKLAVNYEQYF

SEQ ID NO: 782423 - protein, 12 aa, Homo sapiens
  CDR3 for alpha chain variable domain of TCR clone 391212 (TRAV17, TRAJ57)
CATDGGSEKLVF

SEQ ID NO: 782424 - protein, 12 aa, Homo sapiens
  CDR3 for beta chain variable domain of TCR clone 391212 (TRBV7-3, TRBJ2-5)
CASSSPGGTQYF

SEQ ID NO: 782425 - protein, 18 aa, Homo sapiens
  CDR3 for alpha chain variable domain of TCR clone 391213 (TRAV13-1, TRAJ52)
CAAKNPNAGSTSYGKLTF

SEQ ID NO: 782426 - protein, 14 aa, Homo sapiens
  CDR3 for beta chain variable domain of TCR clone 391213 (TRBV6-1, TRBJ1-3)
CASVQGGGGNTIYF

SEQ ID NO: 782427 - protein, 14 aa, Homo sapiens
  CDR3 for alpha chain variable domain of TCR clone 391214 (TRAV17, TRAJ6)
CATDASAGSYIPTF

SEQ ID NO: 782428 - protein, 19 aa, Homo sapiens
  CDR3 for beta chain variable domain of TCR clone 391214 (TRBV4-3, TRBJ2-7)
CASSQEFIGWQVTPYEQYF

SEQ ID NO: 782429 - protein, 22 aa, Homo sapiens
  CDR3 for alpha chain variable domain of TCR clone 391215 (TRAV21, TRAJ35)
CAVMPIGFGNVRHCGSVTQLIV

SEQ ID NO: 782430 - protein, 12 aa, Homo sapiens
  CDR3 for beta chain variable domain of TCR clone 391215 (TRBV7-9, TRBJ2-7)
CASSIKREEQYF

SEQ ID NO: 782431 - protein, 11 aa, Homo sapiens
  CDR3 for alpha chain variable domain of TCR clone 391216 (TRAV3, TRAJ21)
CAVGNFNKFYF

SEQ ID NO: 782432 - protein, 14 aa, Homo sapiens
  CDR3 for beta chain variable domain of TCR clone 391216 (TRBV25-1, TRBJ1-1)
CASTHLGGNTEAFL

SEQ ID NO: 782433 - protein, 14 aa, Homo sapiens
  CDR3 for alpha chain variable domain of TCR clone 391217 (TRAV16, TRAJ33)
CALSAMDSNYQLIW

SEQ ID NO: 782434 - protein, 12 aa, Homo sapiens
  CDR3 for beta chain variable domain of TCR clone 391217 (TRBV5-1, TRBJ1-2)
CASSQDTYAYTF

SEQ ID NO: 782435 - protein, 15 aa, Homo sapiens
  CDR3 for alpha chain variable domain of TCR clone 391218 (TRAV8-3, TRAJ41)
CAVGSNSNSGYTLNF

SEQ ID NO: 782436 - protein, 17 aa, Homo sapiens
  CDR3 for beta chain variable domain of TCR clone 391218 (TRBV25-1, TRBJ2-1)
CASSAYGQGRGVYEQFF

SEQ ID NO: 782437 - protein, 17 aa, Homo sapiens
  CDR3 for alpha chain variable domain of TCR clone 391219 (TRAV26-2, TRAJ52)
CILSSSSGGASSGKLTF

SEQ ID NO: 782438 - protein, 11 aa, Homo sapiens
  CDR3 for beta chain variable domain of TCR clone 391219 (TRBV19, TRBJ1-1)
CATLRNTEAFF

SEQ ID NO: 782439 - protein, 12 aa, Homo sapiens
  CDR3 for alpha chain variable domain of TCR clone 391220 (TRAV26-2, TRAJ48)
CTFNFGNEKLTF

SEQ ID NO: 782440 - protein, 16 aa, Homo sapiens
  CDR3 for beta chain variable domain of TCR clone 391220 (TRBV10-3, TRBJ2-1)
CAISEFKREGRNEQFF

SEQ ID NO: 782441 - protein, 14 aa, Homo sapiens
  CDR3 for alpha chain variable domain of TCR clone 391221 (TRAV12-2, TRAJ17)
CAVLFKAAGTKLTF

SEQ ID NO: 782442 - protein, 17 aa, Homo sapiens
  CDR3 for beta chain variable domain of TCR clone 391221 (TRBV20-1, TRBJ2-2)
CSASGAGQGGLTGELFF

SEQ ID NO: 782443 - protein, 16 aa, Homo sapiens
  CDR3 for alpha chain variable domain of TCR clone 391222 (TRAV23/DV6, TRAJ9)
CAASIGGNTGGFKTIF

SEQ ID NO: 782444 - protein, 18 aa, Homo sapiens
  CDR3 for beta chain variable domain of TCR clone 391222 (TRBV7-2, TRBJ2-3)
CASSLALVTGRLTDTQYF

SEQ ID NO: 782445 - protein, 14 aa, Homo sapiens
  CDR3 for alpha chain variable domain of TCR clone 391223 (TRAV8-3, TRAJ28)
CAVVPGAGSYQLTF

SEQ ID NO: 782446 - protein, 15 aa, Homo sapiens
  CDR3 for beta chain variable domain of TCR clone 391223 (TRBV7-9, TRBJ1-5)
CASSQGHQPNQPQHF

SEQ ID NO: 782447 - protein, 13 aa, Homo sapiens
  CDR3 for alpha chain variable domain of TCR clone 391224 (TRAV12-2, TRAJ39)
CAVNNNAGNMLTF

SEQ ID NO: 782448 - protein, 16 aa, Homo sapiens
  CDR3 for beta chain variable domain of TCR clone 391224 (TRBV28, TRBJ2-5)
CASSFSPAGGWETQYF

SEQ ID NO: 782449 - protein, 15 aa, Homo sapiens
  CDR3 for alpha chain variable domain of TCR clone 391225 (TRAV26-1, TRAJ56)
CIVRVATEANSKLTF

SEQ ID NO: 782450 - protein, 15 aa, Homo sapiens
  CDR3 for beta chain variable domain of TCR clone 391225 (TRBV27, TRBJ2-7)
CAISPQREGQREQYF

SEQ ID NO: 782451 - protein, 14 aa, Homo sapiens
  CDR3 for alpha chain variable domain of TCR clone 391226 (TRAV2, TRAJ29)
CAVTPHSGNTPLVF

SEQ ID NO: 782452 - protein, 13 aa, Homo sapiens
  CDR3 for beta chain variable domain of TCR clone 391226 (TRBV11-2, TRBJ2-1)
CASSLGLAGGRFF

SEQ ID NO: 782453 - protein, 11 aa, Homo sapiens
  CDR3 for alpha chain variable domain of TCR clone 391227 (TRAV12-3, TRAJ43)
CAMSVSNDMRF

SEQ ID NO: 782454 - protein, 14 aa, Homo sapiens
  CDR3 for beta chain variable domain of TCR clone 391227 (TRBV7-9, TRBJ2-5)
CASSLDTAQETQYF

SEQ ID NO: 782455 - protein, 12 aa, Homo sapiens
  CDR3 for alpha chain variable domain of TCR clone 391228 (TRAV17, TRAJ49)
CATGTTGNQFYF

SEQ ID NO: 782456 - protein, 18 aa, Homo sapiens
  CDR3 for beta chain variable domain of TCR clone 391228 (TRBV11-2, TRBJ2-6)
CASSLNPFLGTGANVLTF

SEQ ID NO: 782457 - protein, 12 aa, Homo sapiens
  CDR3 for alpha chain variable domain of TCR clone 391229 (TRAV13-1, TRAJ27)
CAAHTNAGRSTF

SEQ ID NO: 782458 - protein, 14 aa, Homo sapiens
  CDR3 for beta chain variable domain of TCR clone 391229 (TRBV19, TRBJ2-2)
CASSGQGVAGELFF

SEQ ID NO: 782459 - protein, 12 aa, Homo sapiens
  CDR3 for alpha chain variable domain of TCR clone 391230 (TRAV13-1, TRAJ21)
CAAKEGFNKFYF

SEQ ID NO: 782460 - protein, 14 aa, Homo sapiens
  CDR3 for beta chain variable domain of TCR clone 391230 (TRBV18, TRBJ2-7)
CASSPRGAAYEQYF

SEQ ID NO: 782461 - protein, 14 aa, Homo sapiens
  CDR3 for alpha chain variable domain of TCR clone 391231 (TRAV12-2, TRAJ13)
CAVKKTGGYQKVTF

SEQ ID NO: 782462 - protein, 12 aa, Homo sapiens
  CDR3 for beta chain variable domain of TCR clone 391231 (TRBV29-1, TRBJ1-1)
GSESDGNTEAFF

SEQ ID NO: 782463 - protein, 15 aa, Homo sapiens
  CDR3 for alpha chain variable domain of TCR clone 391232 (TRAV2, TRAJ24)
CAVVRLKNSWGKLQF

SEQ ID NO: 782464 - protein, 16 aa, Homo sapiens
  CDR3 for beta chain variable domain of TCR clone 391232 (TRBV7-7, TRBJ2-3)
YASSPGTSGSTDTQYF

SEQ ID NO: 782465 - protein, 15 aa, Homo sapiens
  CDR3 for alpha chain variable domain of TCR clone 391233 (TRAV8-4, TRAJ40)
CAVSSITSGTYKYIF

SEQ ID NO: 782466 - protein, 13 aa, Homo sapiens
  CDR3 for beta chain variable domain of TCR clone 391233 (TRBV2, TRBJ2-1)
CASSRGTDNEQFF

SEQ ID NO: 782467 - protein, 17 aa, Homo sapiens
  CDR3 for alpha chain variable domain of TCR clone 391234 (TRAV3, TRAJ42)
CAVRDRDYGGSQGNLIF

SEQ ID NO: 782468 - protein, 15 aa, Homo sapiens
  CDR3 for beta chain variable domain of TCR clone 391234 (TRBV27, TRBJ2-3)
CASSLGLAATDTQYF

SEQ ID NO: 782469 - protein, 16 aa, Homo sapiens
  CDR3 for alpha chain variable domain of TCR clone 391235 (TRAV3, TRAJ4)
CAVRPSPSGGYNKLIF

SEQ ID NO: 782470 - protein, 11 aa, Homo sapiens
  CDR3 for beta chain variable domain of TCR clone 391235 (TRBV12-4, TRBJ2-3)
CASTATDTQYF

SEQ ID NO: 782471 - protein, 13 aa, Homo sapiens
  CDR3 for alpha chain variable domain of TCR clone 391236 (TRAV2, TRAJ15)
CAVASQAGNALIF

SEQ ID NO: 782472 - protein, 17 aa, Homo sapiens
  CDR3 for beta chain variable domain of TCR clone 391236 (TRBV20-1, TRBJ2-2)
CSASGSGQGGLTGELFF

SEQ ID NO: 782473 - protein, 12 aa, Homo sapiens
  CDR3 for alpha chain variable domain of TCR clone 391237 (TRAV12-1, TRAJ40)
CVVYSGTYKYIF

SEQ ID NO: 782474 - protein, 14 aa, Homo sapiens
  CDR3 for beta chain variable domain of TCR clone 391237 (TRBV7-9, TRBJ2-5)
CASSLDTSQETQYF

SEQ ID NO: 782475 - protein, 15 aa, Homo sapiens
  CDR3 for alpha chain variable domain of TCR clone 391238 (TRAV8-2, TRAJ16)
CVVSDGFSDGQKLLF

SEQ ID NO: 782476 - protein, 15 aa, Homo sapiens
  CDR3 for beta chain variable domain of TCR clone 391238 (TRBV28, TRBJ1-5)
CASSLSGYSNQPQHF

SEQ ID NO: 782477 - protein, 15 aa, Homo sapiens
  CDR3 for alpha chain variable domain of TCR clone 391239 (TRAV21, TRAJ24)
CAARSSTDSWGKLQF

SEQ ID NO: 782478 - protein, 12 aa, Homo sapiens
  CDR3 for beta chain variable domain of TCR clone 391239 (TRBV11-2, TRBJ2-5)
CQSSTGEETQYF

SEQ ID NO: 782479 - protein, 11 aa, Homo sapiens
  CDR3 for alpha chain variable domain of TCR clone 391240 (TRAV3, TRAJ21)
CAVGNFNKFYF

SEQ ID NO: 782480 - protein, 15 aa, Homo sapiens
  CDR3 for beta chain variable domain of TCR clone 391240 (TRBV7-3, TRBJ2-1)
CASSLDGNSYNEQFF

SEQ ID NO: 782481 - protein, 14 aa, Homo sapiens
  CDR3 for alpha chain variable domain of TCR clone 391241 (TRAV27, TRAJ23)
CAGLSYNQGGKLIF

SEQ ID NO: 782482 - protein, 15 aa, Homo sapiens
  CDR3 for beta chain variable domain of TCR clone 391241 (TRBV19, TRBJ2-2)
CASSLNRGVTGKLFF

SEQ ID NO: 782483 - protein, 14 aa, Homo sapiens
  CDR3 for alpha chain variable domain of TCR clone 391242 (TRAV2, TRAJ9)
CAVEDRSGGFRTIF

SEQ ID NO: 782484 - protein, 16 aa, Homo sapiens
  CDR3 for beta chain variable domain of TCR clone 391242 (TRBV7-3, TRBJ2-2)
CASSLKRGTLSGELFF

SEQ ID NO: 782485 - protein, 14 aa, Homo sapiens
  CDR3 for alpha chain variable domain of TCR clone 391243 (TRAV13-1, TRAJ40)
CAAIMTSGTYKYIF

SEQ ID NO: 782486 - protein, 15 aa, Homo sapiens
  CDR3 for beta chain variable domain of TCR clone 391243 (TRBV7-3, TRBJ2-1)
CASSPTGGGEVEQFF

SEQ ID NO: 782487 - protein, 14 aa, Homo sapiens
  CDR3 for alpha chain variable domain of TCR clone 391244 (TRAV2, TRAJ9)
CAVEDRSGGFKTIF

SEQ ID NO: 782488 - protein, 15 aa, Homo sapiens
  CDR3 for beta chain variable domain of TCR clone 391244 (TRBV5-7, TRBJ1-5)
CASSYGKLWEQPQHF

SEQ ID NO: 782489 - protein, 15 aa, Homo sapiens
  CDR3 for alpha chain variable domain of TCR clone 391245 (TRAV12-1, TRAJ45)
CVVLSGGGGAEGLTF

SEQ ID NO: 782490 - protein, 14 aa, Homo sapiens
  CDR3 for beta chain variable domain of TCR clone 391245 (TRBV11-2, TRBJ2-5)
CASSRTGGIETQYF

SEQ ID NO: 782491 - protein, 14 aa, Homo sapiens
  CDR3 for alpha chain variable domain of TCR clone 391246 (TRAV12-2, TRAJ24)
CAVTPADSWGKLQF

SEQ ID NO: 782492 - protein, 16 aa, Homo sapiens
  CDR3 for beta chain variable domain of TCR clone 391246 (TRBV10-3, TRBJ1-6)
CAIREVAGQASSPRHF

SEQ ID NO: 782493 - protein, 12 aa, Homo sapiens
  CDR3 for alpha chain variable domain of TCR clone 391247 (TRAV12-3, TRAJ17)
CAMTLTGNKLTL

SEQ ID NO: 782494 - protein, 11 aa, Homo sapiens
  CDR3 for beta chain variable domain of TCR clone 391247 (TRBV12-4, TRBJ2-2)
CASSSAGELFF

SEQ ID NO: 782495 - protein, 11 aa, Homo sapiens
  CDR3 for alpha chain variable domain of TCR clone 391248 (TRAV27, TRAJ47)
SIVEYGNKLVF

SEQ ID NO: 782496 - protein, 17 aa, Homo sapiens
  CDR3 for beta chain variable domain of TCR clone 391248 (TRBV2, TRBJ2-1)
CQQGTSGGPRTYNEQFF

SEQ ID NO: 782497 - protein, 17 aa, Homo sapiens
  CDR3 for alpha chain variable domain of TCR clone 391249 (TRAV3, TRAJ6)
CAVRDGPRAGGSYIPTF

SEQ ID NO: 782498 - protein, 15 aa, Homo sapiens
  CDR3 for beta chain variable domain of TCR clone 391249 (TRBV5-1, TRBJ2-3)
CASSLETASTDTQYF

SEQ ID NO: 782499 - protein, 11 aa, Homo sapiens
  CDR3 for alpha chain variable domain of TCR clone 391250 (TRAV23/DV6, TRAJ58)
CAARILRGETS

SEQ ID NO: 782500 - protein, 14 aa, Homo sapiens
  CDR3 for beta chain variable domain of TCR clone 391250 (TRBV2, TRBJ2-7)
CASSLTSGGYEQYF

SEQ ID NO: 782501 - protein, 21 aa, Homo sapiens
  CDR3 for alpha chain variable domain of TCR clone 391251 (TRAV1-2, TRAJ18)
CAVRGEAQPWGGYTLEEELSL

SEQ ID NO: 782502 - protein, 14 aa, Homo sapiens
  CDR3 for beta chain variable domain of TCR clone 391251 (TRBV7-2, TRBJ2-7)
CASSFKGQDHEQYF

SEQ ID NO: 782503 - protein, 11 aa, Homo sapiens
  CDR3 for alpha chain variable domain of TCR clone 391252 (TRAV12-2, TRAJ23)
CAVDQGGKLIF

SEQ ID NO: 782504 - protein, 12 aa, Homo sapiens
  CDR3 for beta chain variable domain of TCR clone 391252 (TRBV11-2, TRBJ2-2)
CASSLGGGELFF

SEQ ID NO: 782505 - protein, 14 aa, Homo sapiens
  CDR3 for alpha chain variable domain of TCR clone 391253 (TRAV19, TRAJ6)
CALSATGGSYIPTF

SEQ ID NO: 782506 - protein, 17 aa, Homo sapiens
  CDR3 for beta chain variable domain of TCR clone 391253 (TRBV3-1, TRBJ2-2)
CASSQFRDKVDTGELFF

SEQ ID NO: 782507 - protein, 16 aa, Homo sapiens
  CDR3 for alpha chain variable domain of TCR clone 391254 (TRAV12-3, TRAJ53)
CAMSPGSGGSNYKLTF

SEQ ID NO: 782508 - protein, 15 aa, Homo sapiens
  CDR3 for beta chain variable domain of TCR clone 391254 (TRBV12-4, TRBJ2-5)
CASSLGGQGRETQYF

SEQ ID NO: 782509 - protein, 11 aa, Homo sapiens
  CDR3 for alpha chain variable domain of TCR clone 391255 (TRAV35, TRAJ30)
CAGPGDDKIFF

SEQ ID NO: 782510 - protein, 14 aa, Homo sapiens
  CDR3 for beta chain variable domain of TCR clone 391255 (TRBV7-6, TRBJ1-6)
CASSQAGGGSPLHF

SEQ ID NO: 782511 - protein, 15 aa, Homo sapiens
  CDR3 for alpha chain variable domain of TCR clone 391256 (TRAV3, TRAJ27)
CAVRAGGHQCRQINL

SEQ ID NO: 782512 - protein, 13 aa, Homo sapiens
  CDR3 for beta chain variable domain of TCR clone 391256 (TRBV12-4, TRBJ1-1)
CASSPGTGFEAFF

SEQ ID NO: 782513 - protein, 14 aa, Homo sapiens
  CDR3 for alpha chain variable domain of TCR clone 391257 (TRAV14/DV4, TRAJ47)
CAMREGRGGNKLVF

SEQ ID NO: 782514 - protein, 18 aa, Homo sapiens
  CDR3 for beta chain variable domain of TCR clone 391257 (TRBV4-3, TRBJ2-3)
CASSQSPPAGSSTDTQYF

SEQ ID NO: 782515 - protein, 14 aa, Homo sapiens
  CDR3 for alpha chain variable domain of TCR clone 391258 (TRAV21, TRAJ35)
CAVMPIGFGNVLHC

SEQ ID NO: 782516 - protein, 12 aa, Homo sapiens
  CDR3 for beta chain variable domain of TCR clone 391258 (TRBV7-9, TRBJ2-7)
CASSFGSYEQYF

SEQ ID NO: 782517 - protein, 14 aa, Homo sapiens
  CDR3 for alpha chain variable domain of TCR clone 391259 (TRAV10, TRAJ29)
CVVSANSGNTPLVF

SEQ ID NO: 782518 - protein, 14 aa, Homo sapiens
  CDR3 for beta chain variable domain of TCR clone 391259 (TRBV7-2, TRBJ2-7)
CASSPKTSFYEQYF

SEQ ID NO: 782519 - protein, 14 aa, Homo sapiens
  CDR3 for alpha chain variable domain of TCR clone 391260 (TRAV8-6, TRAJ10)
CAVTSTGGGNKLTF

SEQ ID NO: 782520 - protein, 12 aa, Homo sapiens
  CDR3 for beta chain variable domain of TCR clone 391260 (TRBV11-2, TRBJ2-2)
CASSLGGGELFF

SEQ ID NO: 782521 - protein, 12 aa, Homo sapiens
  CDR3 for alpha chain variable domain of TCR clone 391261 (TRAV1-1, TRAJ8)
CAGGTGFQKLVF

SEQ ID NO: 782522 - protein, 13 aa, Homo sapiens
  CDR3 for beta chain variable domain of TCR clone 391261 (TRBV12-4, TRBJ2-5)
CASSPGTEETQDF

SEQ ID NO: 782523 - protein, 14 aa, Homo sapiens
  CDR3 for alpha chain variable domain of TCR clone 391262 (TRAV10, TRAJ34)
WVVSRGGDTDKLIF

SEQ ID NO: 782524 - protein, 17 aa, Homo sapiens
  CDR3 for beta chain variable domain of TCR clone 391262 (TRBV6-3, TRBJ2-3)
CASRRPLGGGSTDTQYF

SEQ ID NO: 782525 - protein, 10 aa, Homo sapiens
  CDR3 for alpha chain variable domain of TCR clone 391263 (TRAV27, TRAJ43)
CRRGNNDMRF

SEQ ID NO: 782526 - protein, 16 aa, Homo sapiens
  CDR3 for beta chain variable domain of TCR clone 391263 (TRBV13, TRBJ2-2)
CASSPRTGEHTGELFF

SEQ ID NO: 782527 - protein, 13 aa, Homo sapiens
  CDR3 for alpha chain variable domain of TCR clone 391264 (TRAV27, TRAJ11)
CAGGGSGYSTLTF

SEQ ID NO: 782528 - protein, 16 aa, Homo sapiens
  CDR3 for beta chain variable domain of TCR clone 391264 (TRBV7-3, TRBJ2-3)
CASSLSGYRPEDTQYF

SEQ ID NO: 782529 - protein, 14 aa, Homo sapiens
  CDR3 for alpha chain variable domain of TCR clone 391265 (TRAV12-1, TRAJ12)
CVVTRIDSSYKLIF

SEQ ID NO: 782530 - protein, 13 aa, Homo sapiens
  CDR3 for beta chain variable domain of TCR clone 391265 (TRBV20-1, TRBJ1-1)
CSARGGGNTEAIF

SEQ ID NO: 782531 - protein, 16 aa, Homo sapiens
  CDR3 for alpha chain variable domain of TCR clone 391266 (TRAV23/DV6, TRAJ9)
CAASIGGNTGGFKTIF

SEQ ID NO: 782532 - protein, 17 aa, Homo sapiens
  CDR3 for beta chain variable domain of TCR clone 391266 (TRBV13, TRBJ2-3)
CASSLTRVAGGRNTQYF

SEQ ID NO: 782533 - protein, 12 aa, Homo sapiens
  CDR3 for alpha chain variable domain of TCR clone 391267 (TRAV8-6, TRAJ43)
CAVSHNNNDIRF

SEQ ID NO: 782534 - protein, 14 aa, Homo sapiens
  CDR3 for beta chain variable domain of TCR clone 391267 (TRBV7-2, TRBJ2-7)
CASRSQGAAYEQYF

SEQ ID NO: 782535 - protein, 11 aa, Homo sapiens
  CDR3 for alpha chain variable domain of TCR clone 391268 (TRAV1-2, TRAJ20)
FAVSNDYKLSF

SEQ ID NO: 782536 - protein, 16 aa, Homo sapiens
  CDR3 for beta chain variable domain of TCR clone 391268 (TRBV12-5, TRBJ2-5)
CASGPRTSGTQETQYF

SEQ ID NO: 782537 - protein, 13 aa, Homo sapiens
  CDR3 for alpha chain variable domain of TCR clone 391269 (TRAV16, TRAJ58)
CALRWASGSRLTF

SEQ ID NO: 782538 - protein, 13 aa, Homo sapiens
  CDR3 for beta chain variable domain of TCR clone 391269 (TRBV12-4, TRBJ2-7)
CASSFVPTAEQYF

SEQ ID NO: 782539 - protein, 13 aa, Homo sapiens
  CDR3 for alpha chain variable domain of TCR clone 391270 (TRAV20, TRAJ31)
CAVQAWNNARLMF

SEQ ID NO: 782540 - protein, 13 aa, Homo sapiens
  CDR3 for beta chain variable domain of TCR clone 391270 (TRBV11-3, TRBJ2-7)
CASSLDKLYEQYF

SEQ ID NO: 782541 - protein, 13 aa, Homo sapiens
  CDR3 for alpha chain variable domain of TCR clone 391271 (TRAV35, TRAJ42)
CAGFPGSQGNLIF

SEQ ID NO: 782542 - protein, 14 aa, Homo sapiens
  CDR3 for beta chain variable domain of TCR clone 391271 (TRBV29-1, TRBJ2-2)
CSVLVETNTGELFF

SEQ ID NO: 782543 - protein, 11 aa, Homo sapiens
  CDR3 for alpha chain variable domain of TCR clone 391272 (TRAV17, TRAJ43)
CATDNNNDMRF

SEQ ID NO: 782544 - protein, 15 aa, Homo sapiens
  CDR3 for beta chain variable domain of TCR clone 391272 (TRBV20-1, TRBJ1-2)
CSAIRTGAFNYGYIF

SEQ ID NO: 782545 - protein, 17 aa, Homo sapiens
  CDR3 for alpha chain variable domain of TCR clone 391273 (TRAV3, TRAJ6)
CAVRDGPRAGGSYIPTF

SEQ ID NO: 782546 - protein, 14 aa, Homo sapiens
  CDR3 for beta chain variable domain of TCR clone 391273 (TRBV5-4, TRBJ2-1)
CASSLDQGLNEQFF

SEQ ID NO: 782547 - protein, 13 aa, Homo sapiens
  CDR3 for alpha chain variable domain of TCR clone 391274 (TRAV3, TRAJ30)
CAVGDRGDDKIIF

SEQ ID NO: 782548 - protein, 14 aa, Homo sapiens
  CDR3 for beta chain variable domain of TCR clone 391274 (TRBV5-1, TRBJ1-1)
CASSRTTGDTEAFF

SEQ ID NO: 782549 - protein, 14 aa, Homo sapiens
  CDR3 for alpha chain variable domain of TCR clone 391275 (TRAV35, TRAJ22)
CAGLRPGSARQLTF

SEQ ID NO: 782550 - protein, 13 aa, Homo sapiens
  CDR3 for beta chain variable domain of TCR clone 391275 (TRBV20-1, TRBJ1-1)
CSTRGGGNTEAFF

SEQ ID NO: 782551 - protein, 13 aa, Homo sapiens
  CDR3 for alpha chain variable domain of TCR clone 391276 (TRAV30, TRAJ6)
CGFIEGGSYIHTF

SEQ ID NO: 782552 - protein, 13 aa, Homo sapiens
  CDR3 for beta chain variable domain of TCR clone 391276 (TRBV5-4, TRBJ2-5)
CASSPVSQETQYF

SEQ ID NO: 782553 - protein, 13 aa, Homo sapiens
  CDR3 for alpha chain variable domain of TCR clone 391277 (TRAV13-2, TRAJ53)
CAENMGSNYKLTF

SEQ ID NO: 782554 - protein, 15 aa, Homo sapiens
  CDR3 for beta chain variable domain of TCR clone 391277 (TRBV5-5, TRBJ1-5)
CASSSTPGSNQPQHF

SEQ ID NO: 782555 - protein, 14 aa, Homo sapiens
  CDR3 for alpha chain variable domain of TCR clone 391278 (TRAV12-2, TRAJ40)
CAVKIPSGTYKYIF

SEQ ID NO: 782556 - protein, 17 aa, Homo sapiens
  CDR3 for beta chain variable domain of TCR clone 391278 (TRBV13, TRBJ2-3)
CASSLSRVAGGSNTQYF

SEQ ID NO: 782557 - protein, 12 aa, Homo sapiens
  CDR3 for alpha chain variable domain of TCR clone 391279 (TRAV12-1, TRAJ40)
CVFYSGTYKYFF

SEQ ID NO: 782558 - protein, 18 aa, Homo sapiens
  CDR3 for beta chain variable domain of TCR clone 391279 (TRBV12-4, TRBJ2-2)
CASSLVAGTRGRTGELFF

SEQ ID NO: 782559 - protein, 13 aa, Homo sapiens
  CDR3 for alpha chain variable domain of TCR clone 391280 (TRAV13-2, TRAJ48)
CAEMDFGNEKLTF

SEQ ID NO: 782560 - protein, 15 aa, Homo sapiens
  CDR3 for beta chain variable domain of TCR clone 391280 (TRBV7-3, TRBJ2-1)
CASSQRGGALIGQFF

SEQ ID NO: 782561 - protein, 13 aa, Homo sapiens
  CDR3 for alpha chain variable domain of TCR clone 391281 (TRAV35, TRAJ44)
CAGRDGTASKLTF

SEQ ID NO: 782562 - protein, 15 aa, Homo sapiens
  CDR3 for beta chain variable domain of TCR clone 391281 (TRBV7-8, TRBJ2-1)
CASSLADSLYNEQFF

SEQ ID NO: 782563 - protein, 16 aa, Homo sapiens
  CDR3 for alpha chain variable domain of TCR clone 391282 (TRAV30, TRAJ24)
CGIEIVDADSWGKFHF

SEQ ID NO: 782564 - protein, 14 aa, Homo sapiens
  CDR3 for beta chain variable domain of TCR clone 391282 (TRBV12-5, TRBJ2-5)
CASGSRTHQETQYF

SEQ ID NO: 782565 - protein, 11 aa, Homo sapiens
  CDR3 for alpha chain variable domain of TCR clone 391283 (TRAV29/DV5, TRAJ31)
CAPSYRDRLMF

SEQ ID NO: 782566 - protein, 19 aa, Homo sapiens
  CDR3 for beta chain variable domain of TCR clone 391283 (TRBV19, TRBJ2-5)
CASSIGQVTDFFLGETQYF

SEQ ID NO: 782567 - protein, 17 aa, Homo sapiens
  CDR3 for alpha chain variable domain of TCR clone 391284 (TRAV8-6, TRAJ58)
CAVSSWVGETSGSRLTF

SEQ ID NO: 782568 - protein, 14 aa, Homo sapiens
  CDR3 for beta chain variable domain of TCR clone 391284 (TRBV20-1, TRBJ2-1)
CSAQIGGYANEQFF

SEQ ID NO: 782569 - protein, 12 aa, Homo sapiens
  CDR3 for alpha chain variable domain of TCR clone 391285 (TRAV36/DV7, TRAJ26)
CAVDNYGQNFVF

SEQ ID NO: 782570 - protein, 16 aa, Homo sapiens
  CDR3 for beta chain variable domain of TCR clone 391285 (TRBV7-3, TRBJ2-2)
CASSLTGTGTTGDLFF

SEQ ID NO: 782571 - protein, 11 aa, Homo sapiens
  CDR3 for alpha chain variable domain of TCR clone 391286 (TRAV2, TRAJ13)
CASGGYQKVTF

SEQ ID NO: 782572 - protein, 16 aa, Homo sapiens
  CDR3 for beta chain variable domain of TCR clone 391286 (TRBV6-1, TRBJ2-5)
CASSDTLDRGAENQYF

SEQ ID NO: 782573 - protein, 15 aa, Homo sapiens
  CDR3 for alpha chain variable domain of TCR clone 391287 (TRAV8-6, TRAJ42)
CAVTPYGGSQGDLIF

SEQ ID NO: 782574 - protein, 14 aa, Homo sapiens
  CDR3 for beta chain variable domain of TCR clone 391287 (TRBV4-1, TRBJ2-2)
CASSQAVNTGELFF

SEQ ID NO: 782575 - protein, 11 aa, Homo sapiens
  CDR3 for alpha chain variable domain of TCR clone 391288 (TRAV1-2, TRAJ20)
CAVANDYKLSF

SEQ ID NO: 782576 - protein, 18 aa, Homo sapiens
  CDR3 for beta chain variable domain of TCR clone 391288 (TRBV20-1, TRBJ2-6)
CSAETPPTHGSGANVLTF

SEQ ID NO: 782577 - protein, 12 aa, Homo sapiens
  CDR3 for alpha chain variable domain of TCR clone 391289 (TRAV12-1, TRAJ34)
CGDRFNTDKLIF

SEQ ID NO: 782578 - protein, 13 aa, Homo sapiens
  CDR3 for beta chain variable domain of TCR clone 391289 (TRBV28, TRBJ2-7)
CASKAGGVYEQYF

SEQ ID NO: 782579 - protein, 12 aa, Homo sapiens
  CDR3 for alpha chain variable domain of TCR clone 391290 (TRAV2, TRAJ26)
CAGSPGRLWSEF

SEQ ID NO: 782580 - protein, 17 aa, Homo sapiens
  CDR3 for beta chain variable domain of TCR clone 391290 (TRBV13, TRBJ2-3)
CASSLSRVAGGRNTQYF

SEQ ID NO: 782581 - protein, 12 aa, Homo sapiens
  CDR3 for alpha chain variable domain of TCR clone 391291 (TRAV13-1, TRAJ9)
CASHTGGFKTIF

SEQ ID NO: 782582 - protein, 14 aa, Homo sapiens
  CDR3 for beta chain variable domain of TCR clone 391291 (TRBV7-6, TRBJ2-3)
CASSLGTVTDTQYF

SEQ ID NO: 782583 - protein, 15 aa, Homo sapiens
  CDR3 for alpha chain variable domain of TCR clone 391292 (TRAV14/DV4, TRAJ12)
CAMREERDSSYKLIF

SEQ ID NO: 782584 - protein, 16 aa, Homo sapiens
  CDR3 for beta chain variable domain of TCR clone 391292 (TRBV11-2, TRBJ1-2)
CASSLDRGGNKYGYTF

SEQ ID NO: 782585 - protein, 19 aa, Homo sapiens
  CDR3 for alpha chain variable domain of TCR clone 391293 (TRAV25, TRAJ20)
TATQTTDVGILPHDYKLSF

SEQ ID NO: 782586 - protein, 17 aa, Homo sapiens
  CDR3 for beta chain variable domain of TCR clone 391293 (TRBV4-3, TRBJ2-1)
CASSQFSSGRAPGEQFF

SEQ ID NO: 782587 - protein, 15 aa, Homo sapiens
  CDR3 for alpha chain variable domain of TCR clone 391294 (TRAV17, TRAJ57)
CATGPSQGGSEKLVF

SEQ ID NO: 782588 - protein, 15 aa, Homo sapiens
  CDR3 for beta chain variable domain of TCR clone 391294 (TRBV25-1, TRBJ1-4)
CASSTGDSTNEKLFF

SEQ ID NO: 782589 - protein, 11 aa, Homo sapiens
  CDR3 for alpha chain variable domain of TCR clone 391295 (TRAV16, TRAJ20)
CALSEGFKAAL

SEQ ID NO: 782590 - protein, 13 aa, Homo sapiens
  CDR3 for beta chain variable domain of TCR clone 391295 (TRBV7-3, TRBJ2-1)
FASSLDSYNEQFF

SEQ ID NO: 782591 - protein, 13 aa, Homo sapiens
  CDR3 for alpha chain variable domain of TCR clone 391296 (TRAV36/DV7, TRAJ49)
CAVEANTGNQFYF

SEQ ID NO: 782592 - protein, 12 aa, Homo sapiens
  CDR3 for beta chain variable domain of TCR clone 391296 (TRBV5-1, TRBJ2-7)
CASSLDSYEQYF

SEQ ID NO: 782593 - protein, 14 aa, Homo sapiens
  CDR3 for alpha chain variable domain of TCR clone 391297 (TRAV22, TRAJ6)
CAGVGPGGSYIPTF

SEQ ID NO: 782594 - protein, 14 aa, Homo sapiens
  CDR3 for beta chain variable domain of TCR clone 391297 (TRBV19, TRBJ2-1)
CASSPGLAPNEQFF

SEQ ID NO: 782595 - protein, 13 aa, Homo sapiens
  CDR3 for alpha chain variable domain of TCR clone 391298 (TRAV26-1, TRAJ34)
CIVRPWITEKLIF

SEQ ID NO: 782596 - protein, 13 aa, Homo sapiens
  CDR3 for beta chain variable domain of TCR clone 391298 (TRBV5-1, TRBJ2-1)
CASSLGSYNEQFF

SEQ ID NO: 782597 - protein, 13 aa, Homo sapiens
  CDR3 for alpha chain variable domain of TCR clone 391299 (TRAV1-2, TRAJ9)
CAALNTGGFKTIL

SEQ ID NO: 782598 - protein, 13 aa, Homo sapiens
  CDR3 for beta chain variable domain of TCR clone 391299 (TRBV15, TRBJ1-6)
CATSGGLNSPLHF

SEQ ID NO: 782599 - protein, 13 aa, Homo sapiens
  CDR3 for alpha chain variable domain of TCR clone 391300 (TRAV1-2, TRAJ20)
CAVRDGNDYKLSF

SEQ ID NO: 782600 - protein, 14 aa, Homo sapiens
  CDR3 for beta chain variable domain of TCR clone 391300 (TRBV7-2, TRBJ2-3)
CQQLRGGWRDTQYF

SEQ ID NO: 782601 - protein, 14 aa, Homo sapiens
  CDR3 for alpha chain variable domain of TCR clone 391301 (TRAV13-2, TRAJ43)
CAEIPTYNNNDSRF

SEQ ID NO: 782602 - protein, 15 aa, Homo sapiens
  CDR3 for beta chain variable domain of TCR clone 391301 (TRBV7-9, TRBJ2-2)
CASGPLDTFPGELFF

SEQ ID NO: 782603 - protein, 16 aa, Homo sapiens
  CDR3 for alpha chain variable domain of TCR clone 391302 (TRAV2, TRAJ4)
CAVEDWFSGGYNKLIF

SEQ ID NO: 782604 - protein, 18 aa, Homo sapiens
  CDR3 for beta chain variable domain of TCR clone 391302 (TRBV7-9, TRBJ2-7)
CASSLTTSGSRTWYEQYF

SEQ ID NO: 782605 - protein, 18 aa, Homo sapiens
  CDR3 for alpha chain variable domain of TCR clone 391303 (TRAV35, TRAJ52)
CAGLLRYPGGTSYGQLTF

SEQ ID NO: 782606 - protein, 13 aa, Homo sapiens
  CDR3 for beta chain variable domain of TCR clone 391303 (TRBV2, TRBJ2-5)
CASGTPYQETQYF

SEQ ID NO: 782607 - protein, 12 aa, Homo sapiens
  CDR3 for alpha chain variable domain of TCR clone 391304 (TRAV12-3, TRAJ20)
CAMVRGDYQLSF

SEQ ID NO: 782608 - protein, 14 aa, Homo sapiens
  CDR3 for beta chain variable domain of TCR clone 391304 (TRBV20-1, TRBJ2-7)
CSAISREASYEQYF

SEQ ID NO: 782609 - protein, 11 aa, Homo sapiens
  CDR3 for alpha chain variable domain of TCR clone 391305 (TRAV2, TRAJ33)
CAVESNYQLTW

SEQ ID NO: 782610 - protein, 15 aa, Homo sapiens
  CDR3 for beta chain variable domain of TCR clone 391305 (TRBV19, TRBJ1-1)
CASTSGQIQNTEACF

SEQ ID NO: 782611 - protein, 13 aa, Homo sapiens
  CDR3 for alpha chain variable domain of TCR clone 391306 (TRAV12-3, TRAJ46)
CAVKKSSGDKLTF

SEQ ID NO: 782612 - protein, 13 aa, Homo sapiens
  CDR3 for beta chain variable domain of TCR clone 391306 (TRBV6-1, TRBJ2-1)
CASSHDSNNEQFF

SEQ ID NO: 782613 - protein, 15 aa, Homo sapiens
  CDR3 for alpha chain variable domain of TCR clone 391307 (TRAV26-1, TRAJ29)
CIVKVEGSGNTPIVF

SEQ ID NO: 782614 - protein, 14 aa, Homo sapiens
  CDR3 for beta chain variable domain of TCR clone 391307 (TRBV18, TRBJ2-5)
CASSPGVSQETQYF

SEQ ID NO: 782615 - protein, 14 aa, Homo sapiens
  CDR3 for alpha chain variable domain of TCR clone 391308 (TRAV4, TRAJ30)
CHVGDMNRDDKIIF

SEQ ID NO: 782616 - protein, 15 aa, Homo sapiens
  CDR3 for beta chain variable domain of TCR clone 391308 (TRBV7-2, TRBJ2-7)
CASSLSSGRTYEQYF

SEQ ID NO: 782617 - protein, 12 aa, Homo sapiens
  CDR3 for alpha chain variable domain of TCR clone 391309 (TRAV3, TRAJ27)
CAVREGAGKSTF

SEQ ID NO: 782618 - protein, 13 aa, Homo sapiens
  CDR3 for beta chain variable domain of TCR clone 391309 (TRBV10-3, TRBJ1-2)
CAINADLNYGYTF

SEQ ID NO: 782619 - protein, 14 aa, Homo sapiens
  CDR3 for alpha chain variable domain of TCR clone 391310 (TRAV8-1, TRAJ4)
CAVKCSGGYNKLIF

SEQ ID NO: 782620 - protein, 22 aa, Homo sapiens
  CDR3 for beta chain variable domain of TCR clone 391310 (TRBV7-3, TRBJ2-5)
CASARDRVILRPRDPVLRARHA

SEQ ID NO: 782621 - protein, 16 aa, Homo sapiens
  CDR3 for alpha chain variable domain of TCR clone 391311 (TRAV3, TRAJ37)
CAVRPHGSGNTGELIF

SEQ ID NO: 782622 - protein, 14 aa, Homo sapiens
  CDR3 for beta chain variable domain of TCR clone 391311 (TRBV5-5, TRBJ2-7)
CASSLGQGTYEQYF

SEQ ID NO: 782623 - protein, 13 aa, Homo sapiens
  CDR3 for alpha chain variable domain of TCR clone 391312 (TRAV1-2, TRAJ36)
CAVDQTGADNLFF

SEQ ID NO: 782624 - protein, 14 aa, Homo sapiens
  CDR3 for beta chain variable domain of TCR clone 391312 (TRBV20-1, TRBJ2-5)
CSAREMTKQETQYF

SEQ ID NO: 782625 - protein, 13 aa, Homo sapiens
  CDR3 for alpha chain variable domain of TCR clone 391313 (TRAV36/DV7, TRAJ34)
CAGRPYNTDKLIF

SEQ ID NO: 782626 - protein, 15 aa, Homo sapiens
  CDR3 for beta chain variable domain of TCR clone 391313 (TRBV27, TRBJ1-6)
CTSSFDRGLGSPLHF

SEQ ID NO: 782627 - protein, 16 aa, Homo sapiens
  CDR3 for alpha chain variable domain of TCR clone 391314 (TRAV16, TRAJ52)
CALSAAVGTSYGKLTF

SEQ ID NO: 782628 - protein, 17 aa, Homo sapiens
  CDR3 for beta chain variable domain of TCR clone 391314 (TRBV11-2, TRBJ2-1)
CASSLYPPGVEYNEQFF

SEQ ID NO: 782629 - protein, 11 aa, Homo sapiens
  CDR3 for alpha chain variable domain of TCR clone 391315 (TRAV1-2, TRAJ31)
CAVNNNARPMF

SEQ ID NO: 782630 - protein, 18 aa, Homo sapiens
  CDR3 for beta chain variable domain of TCR clone 391315 (TRBV25-1, TRBJ1-2)
CASSGLQNGQGLIFGYTF

SEQ ID NO: 782631 - protein, 16 aa, Homo sapiens
  CDR3 for alpha chain variable domain of TCR clone 391316 (TRAV30, TRAJ24)
CGTEIVDADSCGKFQF

SEQ ID NO: 782632 - protein, 12 aa, Homo sapiens
  CDR3 for beta chain variable domain of TCR clone 391316 (TRBV11-2, TRBJ2-1)
CASSPGNNEQFF

SEQ ID NO: 782633 - protein, 17 aa, Homo sapiens
  CDR3 for alpha chain variable domain of TCR clone 391317 (TRAV3, TRAJ42)
CAVRDRDYGGSQGNLIF

SEQ ID NO: 782634 - protein, 16 aa, Homo sapiens
  CDR3 for beta chain variable domain of TCR clone 391317 (TRBV7-3, TRBJ2-2)
CASSVKRGTLSGELFF

SEQ ID NO: 782635 - protein, 14 aa, Homo sapiens
  CDR3 for alpha chain variable domain of TCR clone 391318 (TRAV4, TRAJ26)
CLVGPHNYGQNFVF

SEQ ID NO: 782636 - protein, 17 aa, Homo sapiens
  CDR3 for beta chain variable domain of TCR clone 391318 (TRBV24-1, TRBJ2-1)
CATSDVSTSGTYNEQIF

SEQ ID NO: 782637 - protein, 13 aa, Homo sapiens
  CDR3 for alpha chain variable domain of TCR clone 391319 (TRAV38-2/DV8, TRAJ53)
CASGGGSNYKLTF

SEQ ID NO: 782638 - protein, 15 aa, Homo sapiens
  CDR3 for beta chain variable domain of TCR clone 391319 (TRBV28, TRBJ1-5)
CQQIQGAVQNQPQHF

SEQ ID NO: 782639 - protein, 16 aa, Homo sapiens
  CDR3 for alpha chain variable domain of TCR clone 391320 (TRAV16, TRAJ52)
CALSAAGDTSYGKLTF

SEQ ID NO: 782640 - protein, 17 aa, Homo sapiens
  CDR3 for beta chain variable domain of TCR clone 391320 (TRBV11-2, TRBJ2-1)
CASSLYPPGVEYNEQFF

SEQ ID NO: 782641 - protein, 14 aa, Homo sapiens
  CDR3 for alpha chain variable domain of TCR clone 391321 (TRAV1-2, TRAJ16)
CAVNRFSDGKKLLF

SEQ ID NO: 782642 - protein, 16 aa, Homo sapiens
  CDR3 for beta chain variable domain of TCR clone 391321 (TRBV27, TRBJ2-2)
CASSFRGLVRAGELFF

SEQ ID NO: 782643 - protein, 13 aa, Homo sapiens
  CDR3 for alpha chain variable domain of TCR clone 391322 (TRAV12-3, TRAJ21)
CAPGPHNFNEFYF

SEQ ID NO: 782644 - protein, 13 aa, Homo sapiens
  CDR3 for beta chain variable domain of TCR clone 391322 (TRBV4-2, TRBJ1-1)
CASSQAGNTEAFF

SEQ ID NO: 782645 - protein, 13 aa, Homo sapiens
  CDR3 for alpha chain variable domain of TCR clone 391323 (TRAV20, TRAJ20)
CAVRWVRDYKLSF

SEQ ID NO: 782646 - protein, 15 aa, Homo sapiens
  CDR3 for beta chain variable domain of TCR clone 391323 (TRBV7-8, TRBJ2-3)
CASSPRTGSTDTQYF

SEQ ID NO: 782647 - protein, 13 aa, Homo sapiens
  CDR3 for alpha chain variable domain of TCR clone 391324 (TRAV16, TRAJ10)
CVLLTGGGNKLTF

SEQ ID NO: 782648 - protein, 12 aa, Homo sapiens
  CDR3 for beta chain variable domain of TCR clone 391324 (TRBV28, TRBJ2-7)
CASTGNHYEQYF

SEQ ID NO: 782649 - protein, 16 aa, Homo sapiens
  CDR3 for alpha chain variable domain of TCR clone 391325 (TRAV30, TRAJ24)
CGTEIVDADSWGKFQF

SEQ ID NO: 782650 - protein, 16 aa, Homo sapiens
  CDR3 for beta chain variable domain of TCR clone 391325 (TRBV20-1, TRBJ1-1)
CSARALTQGMNTEAFY

SEQ ID NO: 782651 - protein, 11 aa, Homo sapiens
  CDR3 for alpha chain variable domain of TCR clone 391326 (TRAV1-2, TRAJ31)
CAVNNNARLVI

SEQ ID NO: 782652 - protein, 15 aa, Homo sapiens
  CDR3 for beta chain variable domain of TCR clone 391326 (TRBV28, TRBJ2-1)
CASSIIAGGRSEQFF

SEQ ID NO: 782653 - protein, 12 aa, Homo sapiens
  CDR3 for alpha chain variable domain of TCR clone 391327 (TRAV17, TRAJ12)
CATSRSSYKLIF

SEQ ID NO: 782654 - protein, 16 aa, Homo sapiens
  CDR3 for beta chain variable domain of TCR clone 391327 (TRBV28, TRBJ2-7)
CASSLFFETGGPEQYF

SEQ ID NO: 782655 - protein, 14 aa, Homo sapiens
  CDR3 for alpha chain variable domain of TCR clone 391328 (TRAV21, TRAJ23)
CAIMIYNQGGKLIF

SEQ ID NO: 782656 - protein, 18 aa, Homo sapiens
  CDR3 for beta chain variable domain of TCR clone 391328 (TRBV20-1, TRBJ2-6)
CSAETTPTHGSGANDLTC

SEQ ID NO: 782657 - protein, 11 aa, Homo sapiens
  CDR3 for alpha chain variable domain of TCR clone 391329 (TRAV12-2, TRAJ23)
CARGRGGKLIF

SEQ ID NO: 782658 - protein, 14 aa, Homo sapiens
  CDR3 for beta chain variable domain of TCR clone 391329 (TRBV7-6, TRBJ2-3)
CASSLGTVTDTQYF

SEQ ID NO: 782659 - protein, 15 aa, Homo sapiens
  CDR3 for alpha chain variable domain of TCR clone 391330 (TRAV17, TRAJ48)
CATDETNFGNEKLTF

SEQ ID NO: 782660 - protein, 14 aa, Homo sapiens
  CDR3 for beta chain variable domain of TCR clone 391330 (TRBV10-3, TRBJ1-3)
CAIRGQRAGNTIYS

SEQ ID NO: 782661 - protein, 12 aa, Homo sapiens
  CDR3 for alpha chain variable domain of TCR clone 391331 (TRAV29/DV5, TRAJ43)
CAAPYNNNDMRF

SEQ ID NO: 782662 - protein, 15 aa, Homo sapiens
  CDR3 for beta chain variable domain of TCR clone 391331 (TRBV18, TRBJ1-6)
CASSRIQGRNSALHF

SEQ ID NO: 782663 - protein, 14 aa, Homo sapiens
  CDR3 for alpha chain variable domain of TCR clone 391332 (TRAV1-2, TRAJ16)
CAVNRFPDGQKLLF

SEQ ID NO: 782664 - protein, 13 aa, Homo sapiens
  CDR3 for beta chain variable domain of TCR clone 391332 (TRBV7-3, TRBJ1-1)
CASSQDCGAEAFF

SEQ ID NO: 782665 - protein, 14 aa, Homo sapiens
  CDR3 for alpha chain variable domain of TCR clone 391333 (TRAV23/DV6, TRAJ17)
CAARGRAAGNKLTV

SEQ ID NO: 782666 - protein, 12 aa, Homo sapiens
  CDR3 for beta chain variable domain of TCR clone 391333 (TRBV7-9, TRBJ2-3)
CASSSITDTQYF

SEQ ID NO: 782667 - protein, 13 aa, Homo sapiens
  CDR3 for alpha chain variable domain of TCR clone 391334 (TRAV36/DV7, TRAJ34)
CAVGEVNTDKLIF

SEQ ID NO: 782668 - protein, 12 aa, Homo sapiens
  CDR3 for beta chain variable domain of TCR clone 391334 (TRBV7-8, TRBJ2-7)
CASSLGDREQYF

SEQ ID NO: 782669 - protein, 15 aa, Homo sapiens
  CDR3 for alpha chain variable domain of TCR clone 391335 (TRAV8-4, TRAJ3)
CAVTGKNLVQQCFQD

SEQ ID NO: 782670 - protein, 16 aa, Homo sapiens
  CDR3 for beta chain variable domain of TCR clone 391335 (TRBV4-2, TRBJ1-1)
CASSQAGFGMNTEAFF

SEQ ID NO: 782671 - protein, 12 aa, Homo sapiens
  CDR3 for alpha chain variable domain of TCR clone 391336 (TRAV21, TRAJ49)
CAVTNTGNQFYF

SEQ ID NO: 782672 - protein, 17 aa, Homo sapiens
  CDR3 for beta chain variable domain of TCR clone 391336 (TRBV13, TRBJ2-3)
CASSRSRVAGGRNTQYF

SEQ ID NO: 782673 - protein, 11 aa, Homo sapiens
  CDR3 for alpha chain variable domain of TCR clone 391337 (TRAV12-2, TRAJ39)
CAVNNMLTFGG

SEQ ID NO: 782674 - protein, 16 aa, Homo sapiens
  CDR3 for beta chain variable domain of TCR clone 391337 (TRBV9, TRBJ2-7)
CASSAGSDRSPYEQYF

SEQ ID NO: 782675 - protein, 18 aa, Homo sapiens
  CDR3 for alpha chain variable domain of TCR clone 391338 (TRAV12-3, TRAJ52)
CAMSRTNAGGTSYGKLTF

SEQ ID NO: 782676 - protein, 14 aa, Homo sapiens
  CDR3 for beta chain variable domain of TCR clone 391338 (TRBV27, TRBJ2-1)
CASSATGGYNEQFF

SEQ ID NO: 782677 - protein, 14 aa, Homo sapiens
  CDR3 for alpha chain variable domain of TCR clone 391339 (TRAV1-2, TRAJ16)
CAVNRFSDGQKLLF

SEQ ID NO: 782678 - protein, 13 aa, Homo sapiens
  CDR3 for beta chain variable domain of TCR clone 391339 (TRBV4-1, TRBJ2-1)
CVSSQAGGDEQFF

SEQ ID NO: 782679 - protein, 14 aa, Homo sapiens
  CDR3 for alpha chain variable domain of TCR clone 391340 (TRAV21, TRAJ52)
CGRAGGTSYGRLTF

SEQ ID NO: 782680 - protein, 14 aa, Homo sapiens
  CDR3 for beta chain variable domain of TCR clone 391340 (TRBV19, TRBJ1-2)
CASSVLGYNYRYTF

SEQ ID NO: 782681 - protein, 22 aa, Homo sapiens
  CDR3 for alpha chain variable domain of TCR clone 391341 (TRAV13-2, TRAJ13)
QLLNLETQLSTFVPEGYQKVTF

SEQ ID NO: 782682 - protein, 17 aa, Homo sapiens
  CDR3 for beta chain variable domain of TCR clone 391341 (TRBV5-5, TRBJ1-2)
CASSLGSLDGQSEGYTF

SEQ ID NO: 782683 - protein, 10 aa, Homo sapiens
  CDR3 for alpha chain variable domain of TCR clone 391342 (TRAV13-1, TRAJ7)
LIGGNNRLAF

SEQ ID NO: 782684 - protein, 15 aa, Homo sapiens
  CDR3 for beta chain variable domain of TCR clone 391342 (TRBV7-9, TRBJ1-1)
CASSLLEQGGTAAFF

SEQ ID NO: 782685 - protein, 13 aa, Homo sapiens
  CDR3 for alpha chain variable domain of TCR clone 391343 (TRAV1-1, TRAJ9)
CAAKNTVGFKTIF

SEQ ID NO: 782686 - protein, 14 aa, Homo sapiens
  CDR3 for beta chain variable domain of TCR clone 391343 (TRBV12-4, TRBJ1-1)
CASSLGTGGSEAFF

SEQ ID NO: 782687 - protein, 13 aa, Homo sapiens
  CDR3 for alpha chain variable domain of TCR clone 391344 (TRAV2, TRAJ40)
CAVVTSGIYKYIF

SEQ ID NO: 782688 - protein, 14 aa, Homo sapiens
  CDR3 for beta chain variable domain of TCR clone 391344 (TRBV19, TRBJ2-1)
CASPTFVLSGGQFF

SEQ ID NO: 782689 - protein, 12 aa, Homo sapiens
  CDR3 for alpha chain variable domain of TCR clone 391345 (TRAV8-3, TRAJ26)
CAGDNYGQNFVF

SEQ ID NO: 782690 - protein, 16 aa, Homo sapiens
  CDR3 for beta chain variable domain of TCR clone 391345 (TRBV5-4, TRBJ2-3)
CASQQPGAGGADQQYF

SEQ ID NO: 782691 - protein, 16 aa, Homo sapiens
  CDR3 for alpha chain variable domain of TCR clone 391346 (TRAV21, TRAJ52)
CAVTNAGGTSYGKLTF

SEQ ID NO: 782692 - protein, 15 aa, Homo sapiens
  CDR3 for beta chain variable domain of TCR clone 391346 (TRBV12-4, TRBJ2-2)
CASSFKSANTGELFF

SEQ ID NO: 782693 - protein, 15 aa, Homo sapiens
  CDR3 for alpha chain variable domain of TCR clone 391347 (TRAV21, TRAJ24)
CAARSSTDSWGKLQF

SEQ ID NO: 782694 - protein, 14 aa, Homo sapiens
  CDR3 for beta chain variable domain of TCR clone 391347 (TRBV20-1, TRBJ2-1)
CSAQIGGSANEQFF

SEQ ID NO: 782695 - protein, 10 aa, Homo sapiens
  CDR3 for alpha chain variable domain of TCR clone 391348 (TRAV12-2, TRAJ49)
CAVRRNQFYF

SEQ ID NO: 782696 - protein, 13 aa, Homo sapiens
  CDR3 for beta chain variable domain of TCR clone 391348 (TRBV19, TRBJ1-5)
CSSIMRGYQPQHF

SEQ ID NO: 782697 - protein, 14 aa, Homo sapiens
  CDR3 for alpha chain variable domain of TCR clone 391349 (TRAV16, TRAJ33)
CALSAMDSNYQLIW

SEQ ID NO: 782698 - protein, 15 aa, Homo sapiens
  CDR3 for beta chain variable domain of TCR clone 391349 (TRBV4-1, TRBJ1-4)
CASSDTGGTNEKLFF

SEQ ID NO: 782699 - protein, 11 aa, Homo sapiens
  CDR3 for alpha chain variable domain of TCR clone 391350 (TRAV2, TRAJ10)
CFTGGGNKLTF

SEQ ID NO: 782700 - protein, 14 aa, Homo sapiens
  CDR3 for beta chain variable domain of TCR clone 391350 (TRBV7-2, TRBJ2-2)
CASRGQGAAGELFF

SEQ ID NO: 782701 - protein, 11 aa, Homo sapiens
  CDR3 for alpha chain variable domain of TCR clone 391351 (TRAV21, TRAJ49)
CAVKDGNQFYF

SEQ ID NO: 782702 - protein, 15 aa, Homo sapiens
  CDR3 for beta chain variable domain of TCR clone 391351 (TRBV2, TRBJ1-1)
CASSERSGRNTEAFF

SEQ ID NO: 782703 - protein, 11 aa, Homo sapiens
  CDR3 for alpha chain variable domain of TCR clone 391352 (TRAV3, TRAJ21)
CAVGNLNKFYF

SEQ ID NO: 782704 - protein, 16 aa, Homo sapiens
  CDR3 for beta chain variable domain of TCR clone 391352 (TRBV19, TRBJ2-1)
CASSKAGPSSYNEQFI

SEQ ID NO: 782705 - protein, 13 aa, Homo sapiens
  CDR3 for alpha chain variable domain of TCR clone 391353 (TRAV21, TRAJ27)
CAARPGNAGKSNF

SEQ ID NO: 782706 - protein, 14 aa, Homo sapiens
  CDR3 for beta chain variable domain of TCR clone 391353 (TRBV20-1, TRBJ2-3)
CRAYSGGRTDTQYF

SEQ ID NO: 782707 - protein, 13 aa, Homo sapiens
  CDR3 for alpha chain variable domain of TCR clone 391354 (TRAV20, TRAJ21)
CAVEGYNFNKFYF

SEQ ID NO: 782708 - protein, 14 aa, Homo sapiens
  CDR3 for beta chain variable domain of TCR clone 391354 (TRBV3-1, TRBJ2-5)
CASSQGPDQESQYF

SEQ ID NO: 782709 - protein, 12 aa, Homo sapiens
  CDR3 for alpha chain variable domain of TCR clone 391355 (TRAV27, TRAJ35)
CAGADFGNVLHC

SEQ ID NO: 782710 - protein, 13 aa, Homo sapiens
  CDR3 for beta chain variable domain of TCR clone 391355 (TRBV7-9, TRBJ2-3)
CASSPGSTDTQYF

SEQ ID NO: 782711 - protein, 13 aa, Homo sapiens
  CDR3 for alpha chain variable domain of TCR clone 391356 (TRAV29/DV5, TRAJ31)
CAASRNNNARLMF

SEQ ID NO: 782712 - protein, 14 aa, Homo sapiens
  CDR3 for beta chain variable domain of TCR clone 391356 (TRBV19, TRBJ2-1)
CASPTSVLSGEQFF

SEQ ID NO: 782713 - protein, 15 aa, Homo sapiens
  CDR3 for alpha chain variable domain of TCR clone 391357 (TRAV4, TRAJ28)
CLPSYSGAGSYQLTF

SEQ ID NO: 782714 - protein, 14 aa, Homo sapiens
  CDR3 for beta chain variable domain of TCR clone 391357 (TRBV7-9, TRBJ2-5)
CASSLDTAQETQYF

SEQ ID NO: 782715 - protein, 12 aa, Homo sapiens
  CDR3 for alpha chain variable domain of TCR clone 391358 (TRAV2, TRAJ26)
CAGSPGRLWSEF

SEQ ID NO: 782716 - protein, 15 aa, Homo sapiens
  CDR3 for beta chain variable domain of TCR clone 391358 (TRBV7-9, TRBJ2-2)
CASRPADRDTGELFF

SEQ ID NO: 782717 - protein, 17 aa, Homo sapiens
  CDR3 for alpha chain variable domain of TCR clone 391359 (TRAV2, TRAJ22)
ILQVREADAVEQRQLTF

SEQ ID NO: 782718 - protein, 16 aa, Homo sapiens
  CDR3 for beta chain variable domain of TCR clone 391359 (TRBV2, TRBJ2-5)
CASSETQGVGEETQYF

SEQ ID NO: 782719 - protein, 15 aa, Homo sapiens
  CDR3 for alpha chain variable domain of TCR clone 391360 (TRAV12-1, TRAJ4)
CVVNGFSGGYNKLSF

SEQ ID NO: 782720 - protein, 18 aa, Homo sapiens
  CDR3 for beta chain variable domain of TCR clone 391360 (TRBV6-5, TRBJ2-1)
CASSYSSRRAGVYNEQFF

SEQ ID NO: 782721 - protein, 13 aa, Homo sapiens
  CDR3 for alpha chain variable domain of TCR clone 391361 (TRAV26-2, TRAJ43)
CILRAVNNNDMRF

SEQ ID NO: 782722 - protein, 15 aa, Homo sapiens
  CDR3 for beta chain variable domain of TCR clone 391361 (TRBV7-2, TRBJ2-1)
CASSLVGSSYNEQFF

SEQ ID NO: 782723 - protein, 16 aa, Homo sapiens
  CDR3 for alpha chain variable domain of TCR clone 391362 (TRAV3, TRAJ37)
CAVRGRGSGNTGQLIF

SEQ ID NO: 782724 - protein, 13 aa, Homo sapiens
  CDR3 for beta chain variable domain of TCR clone 391362 (TRBV14, TRBJ2-7)
CASSQDRRGEQYF

SEQ ID NO: 782725 - protein, 18 aa, Homo sapiens
  CDR3 for alpha chain variable domain of TCR clone 391363 (TRAV26-2, TRAJ54)
CILRDVEVGIQGAQNLVF

SEQ ID NO: 782726 - protein, 16 aa, Homo sapiens
  CDR3 for beta chain variable domain of TCR clone 391363 (TRBV6-1, TRBJ2-5)
CASSETLDRGAETQYF

SEQ ID NO: 782727 - protein, 16 aa, Homo sapiens
  CDR3 for alpha chain variable domain of TCR clone 391364 (TRAV3, TRAJ10)
CAVRDMRAGGGNKLTC

SEQ ID NO: 782728 - protein, 17 aa, Homo sapiens
  CDR3 for beta chain variable domain of TCR clone 391364 (TRBV20-1, TRBJ2-2)
CSASGSGQGGLTGELFF

SEQ ID NO: 782729 - protein, 12 aa, Homo sapiens
  CDR3 for alpha chain variable domain of TCR clone 391365 (TRAV12-3, TRAJ17)
CAITLTGNKLTF

SEQ ID NO: 782730 - protein, 17 aa, Homo sapiens
  CDR3 for beta chain variable domain of TCR clone 391365 (TRBV11-2, TRBJ2-1)
CASSLYPPGVEYNEQFF

SEQ ID NO: 782731 - protein, 11 aa, Homo sapiens
  CDR3 for alpha chain variable domain of TCR clone 391366 (TRAV36/DV7, TRAJ45)
SGGGGADGLTF

SEQ ID NO: 782732 - protein, 14 aa, Homo sapiens
  CDR3 for beta chain variable domain of TCR clone 391366 (TRBV7-2, TRBJ2-2)
CASSLEANTGELFF

SEQ ID NO: 782733 - protein, 13 aa, Homo sapiens
  CDR3 for alpha chain variable domain of TCR clone 391367 (TRAV30, TRAJ49)
CGTEPNTGNQFYF

SEQ ID NO: 782734 - protein, 14 aa, Homo sapiens
  CDR3 for beta chain variable domain of TCR clone 391367 (TRBV29-1, TRBJ2-1)
CSVEFRGIPSEQFF

SEQ ID NO: 782735 - protein, 14 aa, Homo sapiens
  CDR3 for alpha chain variable domain of TCR clone 391368 (TRAV29/DV5, TRAJ11)
CAAISNSGYSTLTL

SEQ ID NO: 782736 - protein, 15 aa, Homo sapiens
  CDR3 for beta chain variable domain of TCR clone 391368 (TRBV28, TRBJ2-1)
CASSLSGQGFDEQFF

SEQ ID NO: 782737 - protein, 14 aa, Homo sapiens
  CDR3 for alpha chain variable domain of TCR clone 391369 (TRAV8-1, TRAJ4)
CAVKFSGGYNKLIF

SEQ ID NO: 782738 - protein, 22 aa, Homo sapiens
  CDR3 for beta chain variable domain of TCR clone 391369 (TRBV7-3, TRBJ2-5)
CVSARDRVILRPRDPVLRARHA

SEQ ID NO: 782739 - protein, 14 aa, Homo sapiens
  CDR3 for alpha chain variable domain of TCR clone 391370 (TRAV26-1, TRAJ53)
CIAPPDGSNYKLTF

SEQ ID NO: 782740 - protein, 14 aa, Homo sapiens
  CDR3 for beta chain variable domain of TCR clone 391370 (TRBV19, TRBJ2-1)
CASPTFVLSGEQFF

SEQ ID NO: 782741 - protein, 16 aa, Homo sapiens
  CDR3 for alpha chain variable domain of TCR clone 391371 (TRAV16, TRAJ52)
CALSAAGGTSYGKLSF

SEQ ID NO: 782742 - protein, 12 aa, Homo sapiens
  CDR3 for beta chain variable domain of TCR clone 391371 (TRBV12-4, TRBJ1-3)
CASSFSGNTIYF

SEQ ID NO: 782743 - protein, 17 aa, Homo sapiens
  CDR3 for alpha chain variable domain of TCR clone 391372 (TRAV4, TRAJ18)
CLVVAAGRGSTLGRLYF

SEQ ID NO: 782744 - protein, 17 aa, Homo sapiens
  CDR3 for beta chain variable domain of TCR clone 391372 (TRBV28, TRBJ2-2)
CASSLATGMGDAGELYF

SEQ ID NO: 782745 - protein, 10 aa, Homo sapiens
  CDR3 for alpha chain variable domain of TCR clone 391373 (TRAV30, TRAJ48)
CGIGNEKLTF

SEQ ID NO: 782746 - protein, 15 aa, Homo sapiens
  CDR3 for beta chain variable domain of TCR clone 391373 (TRBV20-1, TRBJ1-1)
CSAFYAGTENTEAFF

SEQ ID NO: 782747 - protein, 14 aa, Homo sapiens
  CDR3 for alpha chain variable domain of TCR clone 391374 (TRAV2, TRAJ23)
CAVIIYNQGGKLIF

SEQ ID NO: 782748 - protein, 13 aa, Homo sapiens
  CDR3 for beta chain variable domain of TCR clone 391374 (TRBV20-1, TRBJ2-3)
CSATSGGAGKQYF

SEQ ID NO: 782749 - protein, 14 aa, Homo sapiens
  CDR3 for alpha chain variable domain of TCR clone 391375 (TRAV1-2, TRAJ16)
CAVNRYPDGQKLLF

SEQ ID NO: 782750 - protein, 14 aa, Homo sapiens
  CDR3 for beta chain variable domain of TCR clone 391375 (TRBV7-8, TRBJ2-3)
CASSLEAGTDTQYF

SEQ ID NO: 782751 - protein, 14 aa, Homo sapiens
  CDR3 for alpha chain variable domain of TCR clone 391376 (TRAV12-1, TRAJ24)
CVVRSTDSWGKFKF

SEQ ID NO: 782752 - protein, 13 aa, Homo sapiens
  CDR3 for beta chain variable domain of TCR clone 391376 (TRBV20-1, TRBJ1-1)
CSAGTVGNTEAFF

SEQ ID NO: 782753 - protein, 15 aa, Homo sapiens
  CDR3 for alpha chain variable domain of TCR clone 391377 (TRAV38-1, TRAJ57)
CAFMDSQGGSEKLVF

SEQ ID NO: 782754 - protein, 16 aa, Homo sapiens
  CDR3 for beta chain variable domain of TCR clone 391377 (TRBV10-3, TRBJ2-1)
CGIRGGGRGDYNEQFF

SEQ ID NO: 782755 - protein, 16 aa, Homo sapiens
  CDR3 for alpha chain variable domain of TCR clone 391378 (TRAV26-1, TRAJ58)
IASSESGETSGSRLTF

SEQ ID NO: 782756 - protein, 15 aa, Homo sapiens
  CDR3 for beta chain variable domain of TCR clone 391378 (TRBV6-1, TRBJ2-6)
CASSSRPSGANVLTF

SEQ ID NO: 782757 - protein, 13 aa, Homo sapiens
  CDR3 for alpha chain variable domain of TCR clone 391379 (TRAV3, TRAJ21)
CAVREPDFNKFYF

SEQ ID NO: 782758 - protein, 14 aa, Homo sapiens
  CDR3 for beta chain variable domain of TCR clone 391379 (TRBV4-1, TRBJ2-2)
CASGQAVNTGELFF

SEQ ID NO: 782759 - protein, 11 aa, Homo sapiens
  CDR3 for alpha chain variable domain of TCR clone 391380 (TRAV1-1, TRAJ23)
CAVRQGGKLIF

SEQ ID NO: 782760 - protein, 19 aa, Homo sapiens
  CDR3 for beta chain variable domain of TCR clone 391380 (TRBV7-8, TRBJ2-2)
CQSHLFPGPTIHITGELFF

SEQ ID NO: 782761 - protein, 11 aa, Homo sapiens
  CDR3 for alpha chain variable domain of TCR clone 391381 (TRAV12-2, TRAJ29)
CAVTLRSPLVF

SEQ ID NO: 782762 - protein, 16 aa, Homo sapiens
  CDR3 for beta chain variable domain of TCR clone 391381 (TRBV5-1, TRBJ2-2)
CASSLGGTGSTGELVF

SEQ ID NO: 782763 - protein, 15 aa, Homo sapiens
  CDR3 for alpha chain variable domain of TCR clone 391382 (TRAV17, TRAJ57)
CATGPSQCGSKKLVF

SEQ ID NO: 782764 - protein, 16 aa, Homo sapiens
  CDR3 for beta chain variable domain of TCR clone 391382 (TRBV12-4, TRBJ1-5)
CASSRPVGGSNQPQHF

SEQ ID NO: 782765 - protein, 13 aa, Homo sapiens
  CDR3 for alpha chain variable domain of TCR clone 391383 (TRAV20, TRAJ20)
CAVRDFNDYKLSY

SEQ ID NO: 782766 - protein, 12 aa, Homo sapiens
  CDR3 for beta chain variable domain of TCR clone 391383 (TRBV9, TRBJ2-1)
CASSITYNEQFF

SEQ ID NO: 782767 - protein, 16 aa, Homo sapiens
  CDR3 for alpha chain variable domain of TCR clone 391384 (TRAV26-1, TRAJ45)
CIVEQYSGGGADGLTF

SEQ ID NO: 782768 - protein, 15 aa, Homo sapiens
  CDR3 for beta chain variable domain of TCR clone 391384 (TRBV15, TRBJ2-7)
CHQQRPIQQAYEQYF

SEQ ID NO: 782769 - protein, 13 aa, Homo sapiens
  CDR3 for alpha chain variable domain of TCR clone 391385 (TRAV27, TRAJ40)
CAGARIGTYKYIF

SEQ ID NO: 782770 - protein, 16 aa, Homo sapiens
  CDR3 for beta chain variable domain of TCR clone 391385 (TRBV15, TRBJ2-6)
CATSVNGGFLANVLTF

SEQ ID NO: 782771 - protein, 14 aa, Homo sapiens
  CDR3 for alpha chain variable domain of TCR clone 391386 (TRAV17, TRAJ54)
CATDANQGAQKLVF

SEQ ID NO: 782772 - protein, 13 aa, Homo sapiens
  CDR3 for beta chain variable domain of TCR clone 391386 (TRBV19, TRBJ2-7)
CASSIRSSYEQYF

SEQ ID NO: 782773 - protein, 17 aa, Homo sapiens
  CDR3 for alpha chain variable domain of TCR clone 391387 (TRAV8-6, TRAJ58)
CAVSSWVGETSGSRLTV

SEQ ID NO: 782774 - protein, 17 aa, Homo sapiens
  CDR3 for beta chain variable domain of TCR clone 391387 (TRBV4-3, TRBJ1-2)
CASSSRLQAGGSVGYTF

SEQ ID NO: 782775 - protein, 14 aa, Homo sapiens
  CDR3 for alpha chain variable domain of TCR clone 391388 (TRAV12-1, TRAJ8)
CAVNSNTGFQKLVF

SEQ ID NO: 782776 - protein, 17 aa, Homo sapiens
  CDR3 for beta chain variable domain of TCR clone 391388 (TRBV7-8, TRBJ2-6)
CASSAGTGGAGANVLTF

SEQ ID NO: 782777 - protein, 14 aa, Homo sapiens
  CDR3 for alpha chain variable domain of TCR clone 391389 (TRAV12-2, TRAJ53)
CAVKGGGSNYKLTF

SEQ ID NO: 782778 - protein, 15 aa, Homo sapiens
  CDR3 for beta chain variable domain of TCR clone 391389 (TRBV11-2, TRBJ2-2)
CASSSDRVNVGELFF

SEQ ID NO: 782779 - protein, 13 aa, Homo sapiens
  CDR3 for alpha chain variable domain of TCR clone 391390 (TRAV21, TRAJ58)
CAVKESSGSRLTF

SEQ ID NO: 782780 - protein, 12 aa, Homo sapiens
  CDR3 for beta chain variable domain of TCR clone 391390 (TRBV7-3, TRBJ2-1)
CASSFINTEQFF

SEQ ID NO: 782781 - protein, 13 aa, Homo sapiens
  CDR3 for alpha chain variable domain of TCR clone 391391 (TRAV21, TRAJ57)
CAVTQGGSEKLVF

SEQ ID NO: 782782 - protein, 13 aa, Homo sapiens
  CDR3 for beta chain variable domain of TCR clone 391391 (TRBV5-5, TRBJ1-2)
CASSFWRGEDYTF

SEQ ID NO: 782783 - protein, 12 aa, Homo sapiens
  CDR3 for alpha chain variable domain of TCR clone 391392 (TRAV21, TRAJ13)
PGPYGGYQKVTF

SEQ ID NO: 782784 - protein, 15 aa, Homo sapiens
  CDR3 for beta chain variable domain of TCR clone 391392 (TRBV7-9, TRBJ1-6)
CASSSPGRGNSPLHF

SEQ ID NO: 782785 - protein, 14 aa, Homo sapiens
  CDR3 for alpha chain variable domain of TCR clone 391393 (TRAV12-2, TRAJ29)
CAVRRNSGNTPLVF

SEQ ID NO: 782786 - protein, 13 aa, Homo sapiens
  CDR3 for beta chain variable domain of TCR clone 391393 (TRBV12-4, TRBJ2-1)
CASSHCTDNEQFF

SEQ ID NO: 782787 - protein, 11 aa, Homo sapiens
  CDR3 for alpha chain variable domain of TCR clone 391394 (TRAV16, TRAJ33)
CAPHRHYQLIW

SEQ ID NO: 782788 - protein, 15 aa, Homo sapiens
  CDR3 for beta chain variable domain of TCR clone 391394 (TRBV4-1, TRBJ2-7)
CASSQQGQGFDEQYF

SEQ ID NO: 782789 - protein, 15 aa, Homo sapiens
  CDR3 for alpha chain variable domain of TCR clone 391395 (TRAV12-1, TRAJ44)
CVVFVNTGTASKLTF

SEQ ID NO: 782790 - protein, 13 aa, Homo sapiens
  CDR3 for beta chain variable domain of TCR clone 391395 (TRBV5-1, TRBJ2-1)
CASSLGSYNEQFF

SEQ ID NO: 782791 - protein, 13 aa, Homo sapiens
  CDR3 for alpha chain variable domain of TCR clone 391396 (TRAV12-2, TRAJ10)
CAVPTGGGNKLTF

SEQ ID NO: 782792 - protein, 15 aa, Homo sapiens
  CDR3 for beta chain variable domain of TCR clone 391396 (TRBV19, TRBJ2-7)
CASSPAGSGEALRYF

SEQ ID NO: 782793 - protein, 12 aa, Homo sapiens
  CDR3 for alpha chain variable domain of TCR clone 391397 (TRAV12-1, TRAJ34)
CVVAGATDKLIF

SEQ ID NO: 782794 - protein, 17 aa, Homo sapiens
  CDR3 for beta chain variable domain of TCR clone 391397 (TRBV24-1, TRBJ2-1)
CATSDVSTSGTYNEQFF

SEQ ID NO: 782795 - protein, 14 aa, Homo sapiens
  CDR3 for alpha chain variable domain of TCR clone 391398 (TRAV1-2, TRAJ16)
CAVNRVSDGQKLLF

SEQ ID NO: 782796 - protein, 17 aa, Homo sapiens
  CDR3 for beta chain variable domain of TCR clone 391398 (TRBV11-2, TRBJ2-1)
CASSLYPPGVEYNEQFF

SEQ ID NO: 782797 - protein, 15 aa, Homo sapiens
  CDR3 for alpha chain variable domain of TCR clone 391399 (TRAV13-1, TRAJ57)
CAASNTQGGSEKLVL

SEQ ID NO: 782798 - protein, 16 aa, Homo sapiens
  CDR3 for beta chain variable domain of TCR clone 391399 (TRBV19, TRBJ2-1)
CASSKAGPSSHNEQFF

SEQ ID NO: 782799 - protein, 14 aa, Homo sapiens
  CDR3 for alpha chain variable domain of TCR clone 391400 (TRAV20, TRAJ41)
CCAGELKFRYALNF

SEQ ID NO: 782800 - protein, 14 aa, Homo sapiens
  CDR3 for beta chain variable domain of TCR clone 391400 (TRBV25-1, TRBJ1-1)
CASTHLGGNTEAFF

SEQ ID NO: 782801 - protein, 15 aa, Homo sapiens
  CDR3 for alpha chain variable domain of TCR clone 391401 (TRAV12-2, TRAJ32)
CAVNPYGGATNKLIF

SEQ ID NO: 782802 - protein, 14 aa, Homo sapiens
  CDR3 for beta chain variable domain of TCR clone 391401 (TRBV27, TRBJ2-1)
CASSFGREANEQFF

SEQ ID NO: 782803 - protein, 15 aa, Homo sapiens
  CDR3 for alpha chain variable domain of TCR clone 391402 (TRAV21, TRAJ53)
GATLNSGGSNYKLTF

SEQ ID NO: 782804 - protein, 16 aa, Homo sapiens
  CDR3 for beta chain variable domain of TCR clone 391402 (TRBV20-1, TRBJ1-4)
CSAPGQGLLTNEKLFF

SEQ ID NO: 782805 - protein, 16 aa, Homo sapiens
  CDR3 for alpha chain variable domain of TCR clone 391403 (TRAV30, TRAJ24)
CGTEIVDADSWGKFQF

SEQ ID NO: 782806 - protein, 13 aa, Homo sapiens
  CDR3 for beta chain variable domain of TCR clone 391403 (TRBV7-3, TRBJ1-1)
CASSQDWGAEAFV

SEQ ID NO: 782807 - protein, 13 aa, Homo sapiens
  CDR3 for alpha chain variable domain of TCR clone 391404 (TRAV27, TRAJ8)
CAGGPTGFQKLVF

SEQ ID NO: 782808 - protein, 16 aa, Homo sapiens
  CDR3 for beta chain variable domain of TCR clone 391404 (TRBV11-2, TRBJ1-1)
CASSLRQGGEHSKAFF

SEQ ID NO: 782809 - protein, 14 aa, Homo sapiens
  CDR3 for alpha chain variable domain of TCR clone 391405 (TRAV12-3, TRAJ10)
SHLPLTGGGNKLTF

SEQ ID NO: 782810 - protein, 15 aa, Homo sapiens
  CDR3 for beta chain variable domain of TCR clone 391405 (TRBV13, TRBJ2-1)
CASSLLSGLNNVQFF

SEQ ID NO: 782811 - protein, 16 aa, Homo sapiens
  CDR3 for alpha chain variable domain of TCR clone 391406 (TRAV30, TRAJ24)
CGTEIVDADSWGTSSL

SEQ ID NO: 782812 - protein, 18 aa, Homo sapiens
  CDR3 for beta chain variable domain of TCR clone 391406 (TRBV11-2, TRBJ2-3)
CASSLGGASRGAPNTQYF

SEQ ID NO: 782813 - protein, 14 aa, Homo sapiens
  CDR3 for alpha chain variable domain of TCR clone 391407 (TRAV26-1, TRAJ22)
CIVRVYGSARQLTF

SEQ ID NO: 782814 - protein, 14 aa, Homo sapiens
  CDR3 for beta chain variable domain of TCR clone 391407 (TRBV19, TRBJ2-1)
CASKDPASYNEQFF

SEQ ID NO: 782815 - protein, 12 aa, Homo sapiens
  CDR3 for alpha chain variable domain of TCR clone 391408 (TRAV12-1, TRAJ40)
CVVYSGTYKYIF

SEQ ID NO: 782816 - protein, 17 aa, Homo sapiens
  CDR3 for beta chain variable domain of TCR clone 391408 (TRBV7-9, TRBJ1-6)
CAAAPRDVEIHPSTLGT

SEQ ID NO: 782817 - protein, 16 aa, Homo sapiens
  CDR3 for alpha chain variable domain of TCR clone 391409 (TRAV3, TRAJ5)
CAVRNLMDTGRRALTF

SEQ ID NO: 782818 - protein, 16 aa, Homo sapiens
  CDR3 for beta chain variable domain of TCR clone 391409 (TRBV4-2, TRBJ2-7)
CASSQEGLAGSYEQYF

SEQ ID NO: 782819 - protein, 15 aa, Homo sapiens
  CDR3 for alpha chain variable domain of TCR clone 391410 (TRAV4, TRAJ42)
CLVGGYGGGQGNLIF

SEQ ID NO: 782820 - protein, 16 aa, Homo sapiens
  CDR3 for beta chain variable domain of TCR clone 391410 (TRBV27, TRBJ1-1)
CASSTRTGGVGTEAFF

SEQ ID NO: 782821 - protein, 17 aa, Homo sapiens
  CDR3 for alpha chain variable domain of TCR clone 391411 (TRAV3, TRAJ6)
CAVRDGPRAGGSYIPTF

SEQ ID NO: 782822 - protein, 14 aa, Homo sapiens
  CDR3 for beta chain variable domain of TCR clone 391411 (TRBV20-1, TRBJ2-7)
CSARRGNGIYEQYF

SEQ ID NO: 782823 - protein, 13 aa, Homo sapiens
  CDR3 for alpha chain variable domain of TCR clone 391412 (TRAV12-2, TRAJ5)
CREQVTGRRALTF

SEQ ID NO: 782824 - protein, 18 aa, Homo sapiens
  CDR3 for beta chain variable domain of TCR clone 391412 (TRBV7-2, TRBJ2-3)
CASSLETSRGRKADTQYF

SEQ ID NO: 782825 - protein, 15 aa, Homo sapiens
  CDR3 for alpha chain variable domain of TCR clone 391413 (TRAV12-3, TRAJ42)
CAMSGHGGSQGNPIF

SEQ ID NO: 782826 - protein, 13 aa, Homo sapiens
  CDR3 for beta chain variable domain of TCR clone 391413 (TRBV24-1, TRBJ2-1)
CATSAGPYNEQFF

SEQ ID NO: 782827 - protein, 16 aa, Homo sapiens
  CDR3 for alpha chain variable domain of TCR clone 391414 (TRAV3, TRAJ10)
CAVRDMRAGGGNKITF

SEQ ID NO: 782828 - protein, 15 aa, Homo sapiens
  CDR3 for beta chain variable domain of TCR clone 391414 (TRBV11-2, TRBJ1-6)
CASTGFGTAVSPLHF

SEQ ID NO: 782829 - protein, 12 aa, Homo sapiens
  CDR3 for alpha chain variable domain of TCR clone 391415 (TRAV12-3, TRAJ54)
WGADRGAQKLVF

SEQ ID NO: 782830 - protein, 15 aa, Homo sapiens
  CDR3 for beta chain variable domain of TCR clone 391415 (TRBV27, TRBJ2-1)
CASSLAGGPFNEQFF

SEQ ID NO: 782831 - protein, 13 aa, Homo sapiens
  CDR3 for alpha chain variable domain of TCR clone 391416 (TRAV20, TRAJ20)
CAVQAESGYKLSL

SEQ ID NO: 782832 - protein, 16 aa, Homo sapiens
  CDR3 for beta chain variable domain of TCR clone 391416 (TRBV11-2, TRBJ2-7)
CASSLAPTGVNYEQYF

SEQ ID NO: 782833 - protein, 15 aa, Homo sapiens
  CDR3 for alpha chain variable domain of TCR clone 391417 (TRAV25, TRAJ52)
CAGRPGGTSNGKLTF

SEQ ID NO: 782834 - protein, 14 aa, Homo sapiens
  CDR3 for beta chain variable domain of TCR clone 391417 (TRBV9, TRBJ2-7)
CASSVGVGSYEQYF

SEQ ID NO: 782835 - protein, 14 aa, Homo sapiens
  CDR3 for alpha chain variable domain of TCR clone 391418 (TRAV1-2, TRAJ15)
CAVRDRQAGTALIF

SEQ ID NO: 782836 - protein, 20 aa, Homo sapiens
  CDR3 for beta chain variable domain of TCR clone 391418 (TRBV7-8, TRBJ2-2)
CASSHLFPGPTIHITGELFF

SEQ ID NO: 782837 - protein, 15 aa, Homo sapiens
  CDR3 for alpha chain variable domain of TCR clone 391419 (TRAV21, TRAJ24)
CAARSSTDSWGKLQF

SEQ ID NO: 782838 - protein, 13 aa, Homo sapiens
  CDR3 for beta chain variable domain of TCR clone 391419 (TRBV11-2, TRBJ2-5)
CASSSTGEVTQYF

SEQ ID NO: 782839 - protein, 17 aa, Homo sapiens
  CDR3 for alpha chain variable domain of TCR clone 391420 (TRAV4, TRAJ13)
CLVGVQGSSGGYQKVTF

SEQ ID NO: 782840 - protein, 18 aa, Homo sapiens
  CDR3 for beta chain variable domain of TCR clone 391420 (TRBV15, TRBJ2-3)
WATSRDGARSWDTDTQYF

SEQ ID NO: 782841 - protein, 15 aa, Homo sapiens
  CDR3 for alpha chain variable domain of TCR clone 391421 (TRAV8-3, TRAJ11)
CAVGLLNSGYSNLTF

SEQ ID NO: 782842 - protein, 16 aa, Homo sapiens
  CDR3 for beta chain variable domain of TCR clone 391421 (TRBV7-9, TRBJ1-2)
CASSLGFSAGEDGYTF

SEQ ID NO: 782843 - protein, 14 aa, Homo sapiens
  CDR3 for alpha chain variable domain of TCR clone 391422 (TRAV12-2, TRAJ17)
CAVNIKAAGNKLTF

SEQ ID NO: 782844 - protein, 13 aa, Homo sapiens
  CDR3 for beta chain variable domain of TCR clone 391422 (TRBV4-1, TRBJ2-2)
CASSKENTGELFF

SEQ ID NO: 782845 - protein, 12 aa, Homo sapiens
  CDR3 for alpha chain variable domain of TCR clone 391423 (TRAV13-1, TRAJ40)
CAASWATYKYIF

SEQ ID NO: 782846 - protein, 15 aa, Homo sapiens
  CDR3 for beta chain variable domain of TCR clone 391423 (TRBV7-8, TRBJ2-1)
CASCSRLAAYNEQFF

SEQ ID NO: 782847 - protein, 11 aa, Homo sapiens
  CDR3 for alpha chain variable domain of TCR clone 391424 (TRAV26-1, TRAJ37)
CIVRVGRKLIF

SEQ ID NO: 782848 - protein, 17 aa, Homo sapiens
  CDR3 for beta chain variable domain of TCR clone 391424 (TRBV20-1, TRBJ2-1)
CSASSSGLAGSYNEQFF

SEQ ID NO: 782849 - protein, 13 aa, Homo sapiens
  CDR3 for alpha chain variable domain of TCR clone 391425 (TRAV12-1, TRAJ34)
CVVTGYNIDKLIF

SEQ ID NO: 782850 - protein, 13 aa, Homo sapiens
  CDR3 for beta chain variable domain of TCR clone 391425 (TRBV28, TRBJ2-7)
CASKAGGVYEQYF

SEQ ID NO: 782851 - protein, 13 aa, Homo sapiens
  CDR3 for alpha chain variable domain of TCR clone 391426 (TRAV3, TRAJ21)
CAVREPAFNKFYF

SEQ ID NO: 782852 - protein, 12 aa, Homo sapiens
  CDR3 for beta chain variable domain of TCR clone 391426 (TRBV5-1, TRBJ2-4)
LAGEWTKNMQYF

SEQ ID NO: 782853 - protein, 12 aa, Homo sapiens
  CDR3 for alpha chain variable domain of TCR clone 391427 (TRAV1-2, TRAJ42)
CVAGGSQGNLIF

SEQ ID NO: 782854 - protein, 15 aa, Homo sapiens
  CDR3 for beta chain variable domain of TCR clone 391427 (TRBV27, TRBJ2-1)
CASSNGGGSSNEQFF

SEQ ID NO: 782855 - protein, 13 aa, Homo sapiens
  CDR3 for alpha chain variable domain of TCR clone 391428 (TRAV3, TRAJ27)
CAVRPLGAGKSTF

SEQ ID NO: 782856 - protein, 15 aa, Homo sapiens
  CDR3 for beta chain variable domain of TCR clone 391428 (TRBV27, TRBJ1-6)
CASSFDRGLGSPLHF

SEQ ID NO: 782857 - protein, 14 aa, Homo sapiens
  CDR3 for alpha chain variable domain of TCR clone 391429 (TRAV1-2, TRAJ16)
CAVNRFSDGQKLLF

SEQ ID NO: 782858 - protein, 13 aa, Homo sapiens
  CDR3 for beta chain variable domain of TCR clone 391429 (TRBV15, TRBJ1-6)
CATSGGLNSTLHF

SEQ ID NO: 782859 - protein, 16 aa, Homo sapiens
  CDR3 for alpha chain variable domain of TCR clone 391430 (TRAV4, TRAJ18)
CCVLLIGGSTLGRLYF

SEQ ID NO: 782860 - protein, 14 aa, Homo sapiens
  CDR3 for beta chain variable domain of TCR clone 391430 (TRBV5-1, TRBJ2-7)
CASSLVLSSYEQYF

SEQ ID NO: 782861 - protein, 16 aa, Homo sapiens
  CDR3 for alpha chain variable domain of TCR clone 391431 (TRAV12-2, TRAJ52)
CRLANAGGTSYGKLTF

SEQ ID NO: 782862 - protein, 13 aa, Homo sapiens
  CDR3 for beta chain variable domain of TCR clone 391431 (TRBV10-3, TRBJ2-7)
CASKLAVNYEQHF

SEQ ID NO: 782863 - protein, 12 aa, Homo sapiens
  CDR3 for alpha chain variable domain of TCR clone 391432 (TRAV2, TRAJ3)
CSVRSSASKIIF

SEQ ID NO: 782864 - protein, 15 aa, Homo sapiens
  CDR3 for beta chain variable domain of TCR clone 391432 (TRBV5-1, TRBJ2-5)
CASSFKGGDQETQYF

SEQ ID NO: 782865 - protein, 14 aa, Homo sapiens
  CDR3 for alpha chain variable domain of TCR clone 391433 (TRAV12-2, TRAJ24)
CAVTPADSRGKLQF

SEQ ID NO: 782866 - protein, 14 aa, Homo sapiens
  CDR3 for beta chain variable domain of TCR clone 391433 (TRBV11-2, TRBJ1-2)
CASSLGTANYGYTF

SEQ ID NO: 782867 - protein, 19 aa, Homo sapiens
  CDR3 for alpha chain variable domain of TCR clone 391434 (TRAV13-1, TRAJ52)
CAASPYQNAGGTSYGKLTF

SEQ ID NO: 782868 - protein, 14 aa, Homo sapiens
  CDR3 for beta chain variable domain of TCR clone 391434 (TRBV20-1, TRBJ1-3)
CSASPTGAGNTIYF

SEQ ID NO: 782869 - protein, 17 aa, Homo sapiens
  CDR3 for alpha chain variable domain of TCR clone 391435 (TRAV8-1, TRAJ43)
CAETNDMRFGAGTRLTV

SEQ ID NO: 782870 - protein, 17 aa, Homo sapiens
  CDR3 for beta chain variable domain of TCR clone 391435 (TRBV5-4, TRBJ2-1)
CASSSAGGRGPYNEQFF

SEQ ID NO: 782871 - protein, 15 aa, Homo sapiens
  CDR3 for alpha chain variable domain of TCR clone 391436 (TRAV10, TRAJ29)
CVVSEPGIQETHLLS

SEQ ID NO: 782872 - protein, 12 aa, Homo sapiens
  CDR3 for beta chain variable domain of TCR clone 391436 (TRBV14, TRBJ2-7)
CASSLNQRGQYF

SEQ ID NO: 782873 - protein, 15 aa, Homo sapiens
  CDR3 for alpha chain variable domain of TCR clone 391437 (TRAV8-6, TRAJ23)
CAVRVIYNQGGKLIF

SEQ ID NO: 782874 - protein, 13 aa, Homo sapiens
  CDR3 for beta chain variable domain of TCR clone 391437 (TRBV11-2, TRBJ2-2)
CASSLQNTGELFF

SEQ ID NO: 782875 - protein, 15 aa, Homo sapiens
  CDR3 for alpha chain variable domain of TCR clone 391438 (TRAV26-2, TRAJ44)
CIVRANTGTASKLTF

SEQ ID NO: 782876 - protein, 16 aa, Homo sapiens
  CDR3 for beta chain variable domain of TCR clone 391438 (TRBV7-7, TRBJ2-1)
CASSLASGTSYNEQFF

SEQ ID NO: 782877 - protein, 11 aa, Homo sapiens
  CDR3 for alpha chain variable domain of TCR clone 391439 (TRAV13-2, TRAJ31)
CAENMDAILMF

SEQ ID NO: 782878 - protein, 15 aa, Homo sapiens
  CDR3 for beta chain variable domain of TCR clone 391439 (TRBV7-8, TRBJ1-2)
CASSLVRDGGLGYTF

SEQ ID NO: 782879 - protein, 13 aa, Homo sapiens
  CDR3 for alpha chain variable domain of TCR clone 391440 (TRAV27, TRAJ6)
CAGGTRGSYIPTF

SEQ ID NO: 782880 - protein, 17 aa, Homo sapiens
  CDR3 for beta chain variable domain of TCR clone 391440 (TRBV28, TRBJ2-5)
CASSTPEGDALQETQYF

SEQ ID NO: 782881 - protein, 11 aa, Homo sapiens
  CDR3 for alpha chain variable domain of TCR clone 391441 (TRAV26-1, TRAJ37)
CIVRVGRKLIF

SEQ ID NO: 782882 - protein, 15 aa, Homo sapiens
  CDR3 for beta chain variable domain of TCR clone 391441 (TRBV5-1, TRBJ2-7)
CASSLMTSGSNEQYF

SEQ ID NO: 782883 - protein, 16 aa, Homo sapiens
  CDR3 for alpha chain variable domain of TCR clone 391442 (TRAV14/DV4, TRAJ53)
CAMREGGGGSNYKLTF

SEQ ID NO: 782884 - protein, 16 aa, Homo sapiens
  CDR3 for beta chain variable domain of TCR clone 391442 (TRBV6-4, TRBJ1-2)
CASSEAVGDPNYGYTF

SEQ ID NO: 782885 - protein, 16 aa, Homo sapiens
  CDR3 for alpha chain variable domain of TCR clone 391443 (TRAV30, TRAJ24)
CGTEIVDADSWGKFQF

SEQ ID NO: 782886 - protein, 16 aa, Homo sapiens
  CDR3 for beta chain variable domain of TCR clone 391443 (TRBV11-2, TRBJ2-7)
CARSPTTGGVSYEQYF

SEQ ID NO: 782887 - protein, 11 aa, Homo sapiens
  CDR3 for alpha chain variable domain of TCR clone 391444 (TRAV2, TRAJ33)
CAVDSNYQLIW

SEQ ID NO: 782888 - protein, 13 aa, Homo sapiens
  CDR3 for beta chain variable domain of TCR clone 391444 (TRBV19, TRBJ2-7)
CASQSYGAGEQYF

SEQ ID NO: 782889 - protein, 12 aa, Homo sapiens
  CDR3 for alpha chain variable domain of TCR clone 391445 (TRAV17, TRAJ57)
CVTDGGSEKLVF

SEQ ID NO: 782890 - protein, 13 aa, Homo sapiens
  CDR3 for beta chain variable domain of TCR clone 391445 (TRBV7-9, TRBJ2-7)
CASSFAGAYEQYF

SEQ ID NO: 782891 - protein, 14 aa, Homo sapiens
  CDR3 for alpha chain variable domain of TCR clone 391446 (TRAV20, TRAJ42)
CAVQAGGSQGNRIF

SEQ ID NO: 782892 - protein, 14 aa, Homo sapiens
  CDR3 for beta chain variable domain of TCR clone 391446 (TRBV28, TRBJ1-2)
CASRIQGANYGDTF

SEQ ID NO: 782893 - protein, 15 aa, Homo sapiens
  CDR3 for alpha chain variable domain of TCR clone 391447 (TRAV2, TRAJ9)
CAVEDRGTGGFKTIF

SEQ ID NO: 782894 - protein, 18 aa, Homo sapiens
  CDR3 for beta chain variable domain of TCR clone 391447 (TRBV3-1, TRBJ2-1)
CASSQDLPGRPLFDEQFF

SEQ ID NO: 782895 - protein, 13 aa, Homo sapiens
  CDR3 for alpha chain variable domain of TCR clone 391448 (TRAV12-1, TRAJ31)
SVVVPNNNARLMF

SEQ ID NO: 782896 - protein, 15 aa, Homo sapiens
  CDR3 for beta chain variable domain of TCR clone 391448 (TRBV19, TRBJ1-2)
CASNLGGETPYGYTF

SEQ ID NO: 782897 - protein, 11 aa, Homo sapiens
  CDR3 for alpha chain variable domain of TCR clone 391449 (TRAV27, TRAJ45)
CAGAQEEVLTT

SEQ ID NO: 782898 - protein, 17 aa, Homo sapiens
  CDR3 for beta chain variable domain of TCR clone 391449 (TRBV11-2, TRBJ2-1)
CASSLYPPGVEYNEQFF

SEQ ID NO: 782899 - protein, 11 aa, Homo sapiens
  CDR3 for alpha chain variable domain of TCR clone 391450 (TRAV8-3, TRAJ15)
CAGGPGTALIF

SEQ ID NO: 782900 - protein, 18 aa, Homo sapiens
  CDR3 for beta chain variable domain of TCR clone 391450 (TRBV18, TRBJ2-3)
CASSYTSGAAGGTDTQYF

SEQ ID NO: 782901 - protein, 12 aa, Homo sapiens
  CDR3 for alpha chain variable domain of TCR clone 391451 (TRAV1-1, TRAJ39)
CAVPVVGNMLTF

SEQ ID NO: 782902 - protein, 20 aa, Homo sapiens
  CDR3 for beta chain variable domain of TCR clone 391451 (TRBV19, TRBJ2-1)
CASSISRTVTSTRLNNEQFF

SEQ ID NO: 782903 - protein, 13 aa, Homo sapiens
  CDR3 for alpha chain variable domain of TCR clone 391452 (TRAV25, TRAJ10)
CAGRTGGGSKLTF

SEQ ID NO: 782904 - protein, 15 aa, Homo sapiens
  CDR3 for beta chain variable domain of TCR clone 391452 (TRBV19, TRBJ2-1)
CASSSPGVPLDEQFF

SEQ ID NO: 782905 - protein, 14 aa, Homo sapiens
  CDR3 for alpha chain variable domain of TCR clone 391453 (TRAV1-2, TRAJ16)
CAVNRFSDCQKLLF

SEQ ID NO: 782906 - protein, 15 aa, Homo sapiens
  CDR3 for beta chain variable domain of TCR clone 391453 (TRBV10-3, TRBJ2-3)
CAISLTSGGTDTQYF

SEQ ID NO: 782907 - protein, 16 aa, Homo sapiens
  CDR3 for alpha chain variable domain of TCR clone 391454 (TRAV12-2, TRAJ28)
CAVITDSGAGSYQLTF

SEQ ID NO: 782908 - protein, 14 aa, Homo sapiens
  CDR3 for beta chain variable domain of TCR clone 391454 (TRBV25-1, TRBJ1-1)
CASTHLWGNTEAFF

SEQ ID NO: 782909 - protein, 15 aa, Homo sapiens
  CDR3 for alpha chain variable domain of TCR clone 391455 (TRAV21, TRAJ22)
CAVRLFFWFCKATDL

SEQ ID NO: 782910 - protein, 13 aa, Homo sapiens
  CDR3 for beta chain variable domain of TCR clone 391455 (TRBV24-1, TRBJ2-2)
CATSDWSTGELFF

SEQ ID NO: 782911 - protein, 16 aa, Homo sapiens
  CDR3 for alpha chain variable domain of TCR clone 391456 (TRAV12-2, TRAJ32)
CAVNLGQGGATNKLIF

SEQ ID NO: 782912 - protein, 13 aa, Homo sapiens
  CDR3 for beta chain variable domain of TCR clone 391456 (TRBV9, TRBJ2-2)
CASSPRPAGELIF

SEQ ID NO: 782913 - protein, 15 aa, Homo sapiens
  CDR3 for alpha chain variable domain of TCR clone 391457 (TRAV12-3, TRAJ6)
CAMSATSGGSYIPTF

SEQ ID NO: 782914 - protein, 14 aa, Homo sapiens
  CDR3 for beta chain variable domain of TCR clone 391457 (TRBV7-2, TRBJ2-7)
CASSPKTSLYEQYF

SEQ ID NO: 782915 - protein, 15 aa, Homo sapiens
  CDR3 for alpha chain variable domain of TCR clone 391458 (TRAV26-2, TRAJ57)
CILRDIRGGSEKLVC

SEQ ID NO: 782916 - protein, 15 aa, Homo sapiens
  CDR3 for beta chain variable domain of TCR clone 391458 (TRBV2, TRBJ2-1)
CASDIGLAGEGEQFF

SEQ ID NO: 782917 - protein, 14 aa, Homo sapiens
  CDR3 for alpha chain variable domain of TCR clone 391459 (TRAV3, TRAJ21)
CAVRDKYNFDKFYF

SEQ ID NO: 782918 - protein, 12 aa, Homo sapiens
  CDR3 for beta chain variable domain of TCR clone 391459 (TRBV7-9, TRBJ2-7)
CASSFGSYEQYF

SEQ ID NO: 782919 - protein, 12 aa, Homo sapiens
  CDR3 for alpha chain variable domain of TCR clone 391460 (TRAV26-1, TRAJ53)
CIEGGSNYKLTL

SEQ ID NO: 782920 - protein, 15 aa, Homo sapiens
  CDR3 for beta chain variable domain of TCR clone 391460 (TRBV5-1, TRBJ2-2)
CASSLLQGRPGELFF

SEQ ID NO: 782921 - protein, 14 aa, Homo sapiens
  CDR3 for alpha chain variable domain of TCR clone 391461 (TRAV1-2, TRAJ8)
CAVREDTGFQKLVF

SEQ ID NO: 782922 - protein, 15 aa, Homo sapiens
  CDR3 for beta chain variable domain of TCR clone 391461 (TRBV28, TRBJ1-4)
CASSVSGSGLEKLFF

SEQ ID NO: 782923 - protein, 18 aa, Homo sapiens
  CDR3 for alpha chain variable domain of TCR clone 391462 (TRAV12-3, TRAJ52)
CSMSRTNAGGTSSGKLTF

SEQ ID NO: 782924 - protein, 17 aa, Homo sapiens
  CDR3 for beta chain variable domain of TCR clone 391462 (TRBV7-3, TRBJ2-3)
CASSIMKRMRGADTQYF

SEQ ID NO: 782925 - protein, 18 aa, Homo sapiens
  CDR3 for alpha chain variable domain of TCR clone 391463 (TRAV21, TRAJ52)
CAVRPSPAGGTSYGKLTF

SEQ ID NO: 782926 - protein, 16 aa, Homo sapiens
  CDR3 for beta chain variable domain of TCR clone 391463 (TRBV7-3, TRBJ2-1)
CASSLEGYRSYNEQFC

SEQ ID NO: 782927 - protein, 13 aa, Homo sapiens
  CDR3 for alpha chain variable domain of TCR clone 391464 (TRAV13-1, TRAJ10)
CAALEGGGNKLTF

SEQ ID NO: 782928 - protein, 12 aa, Homo sapiens
  CDR3 for beta chain variable domain of TCR clone 391464 (TRBV12-5, TRBJ2-5)
CASGQGVETQYF

SEQ ID NO: 782929 - protein, 14 aa, Homo sapiens
  CDR3 for alpha chain variable domain of TCR clone 391465 (TRAV12-3, TRAJ10)
SHLPLTGGGNKLTF

SEQ ID NO: 782930 - protein, 15 aa, Homo sapiens
  CDR3 for beta chain variable domain of TCR clone 391465 (TRBV12-4, TRBJ2-2)
CASSFKSANTGELFF

SEQ ID NO: 782931 - protein, 13 aa, Homo sapiens
  CDR3 for alpha chain variable domain of TCR clone 391466 (TRAV20, TRAJ29)
CAVQAVGNTPLFF

SEQ ID NO: 782932 - protein, 15 aa, Homo sapiens
  CDR3 for beta chain variable domain of TCR clone 391466 (TRBV10-2, TRBJ2-5)
CASRGSGGPQEAQYF

SEQ ID NO: 782933 - protein, 14 aa, Homo sapiens
  CDR3 for alpha chain variable domain of TCR clone 391467 (TRAV3, TRAJ21)
CAVESQANFNKFYF

SEQ ID NO: 782934 - protein, 16 aa, Homo sapiens
  CDR3 for beta chain variable domain of TCR clone 391467 (TRBV7-9, TRBJ1-2)
CASSPGGGAINYGYTF

SEQ ID NO: 782935 - protein, 12 aa, Homo sapiens
  CDR3 for alpha chain variable domain of TCR clone 391468 (TRAV25, TRAJ11)
CAGYSGYGTLTF

SEQ ID NO: 782936 - protein, 13 aa, Homo sapiens
  CDR3 for beta chain variable domain of TCR clone 391468 (TRBV7-9, TRBJ1-2)
CASSLKQNYGYTF

SEQ ID NO: 782937 - protein, 12 aa, Homo sapiens
  CDR3 for alpha chain variable domain of TCR clone 391469 (TRAV16, TRAJ9)
CALSSGGFKTIF

SEQ ID NO: 782938 - protein, 14 aa, Homo sapiens
  CDR3 for beta chain variable domain of TCR clone 391469 (TRBV7-9, TRBJ2-1)
CASSLAGPYKEQFF

SEQ ID NO: 782939 - protein, 18 aa, Homo sapiens
  CDR3 for alpha chain variable domain of TCR clone 391470 (TRAV13-1, TRAJ52)
CAASKRSTDGTSYVKLTF

SEQ ID NO: 782940 - protein, 13 aa, Homo sapiens
  CDR3 for beta chain variable domain of TCR clone 391470 (TRBV12-4, TRBJ1-2)
CASSLRQGKGYAF

SEQ ID NO: 782941 - protein, 16 aa, Homo sapiens
  CDR3 for alpha chain variable domain of TCR clone 391471 (TRAV20, TRAJ28)
CAVRDPSGAGSYQLTF

SEQ ID NO: 782942 - protein, 18 aa, Homo sapiens
  CDR3 for beta chain variable domain of TCR clone 391471 (TRBV4-1, TRBJ2-3)
CASSHQLAGGRSTDTQYF

SEQ ID NO: 782943 - protein, 13 aa, Homo sapiens
  CDR3 for alpha chain variable domain of TCR clone 391472 (TRAV17, TRAJ5)
CALRGTGRRALTF

SEQ ID NO: 782944 - protein, 14 aa, Homo sapiens
  CDR3 for beta chain variable domain of TCR clone 391472 (TRBV19, TRBJ1-5)
CASRAPDSFLSQHF

SEQ ID NO: 782945 - protein, 15 aa, Homo sapiens
  CDR3 for alpha chain variable domain of TCR clone 391473 (TRAV26-1, TRAJ37)
CIVRLGSGNTGKLIF

SEQ ID NO: 782946 - protein, 18 aa, Homo sapiens
  CDR3 for beta chain variable domain of TCR clone 391473 (TRBV11-2, TRBJ2-3)
CASSLGGASRGAPNTQYF

SEQ ID NO: 782947 - protein, 13 aa, Homo sapiens
  CDR3 for alpha chain variable domain of TCR clone 391474 (TRAV12-3, TRAJ53)
CAIRGGSNYKLTF

SEQ ID NO: 782948 - protein, 15 aa, Homo sapiens
  CDR3 for beta chain variable domain of TCR clone 391474 (TRBV2, TRBJ2-1)
CATPARLVMIGEQFF

SEQ ID NO: 782949 - protein, 11 aa, Homo sapiens
  CDR3 for alpha chain variable domain of TCR clone 391475 (TRAV1-2, TRAJ20)
CAVANDYKLSF

SEQ ID NO: 782950 - protein, 13 aa, Homo sapiens
  CDR3 for beta chain variable domain of TCR clone 391475 (TRBV7-9, TRBJ2-7)
CASSFAGAYEQYF

SEQ ID NO: 782951 - protein, 10 aa, Homo sapiens
  CDR3 for alpha chain variable domain of TCR clone 391476 (TRAV1-2, TRAJ23)
CAGQGGKLIF

SEQ ID NO: 782952 - protein, 16 aa, Homo sapiens
  CDR3 for beta chain variable domain of TCR clone 391476 (TRBV11-2, TRBJ1-1)
WASSLRQGGEHSKAFF

SEQ ID NO: 782953 - protein, 13 aa, Homo sapiens
  CDR3 for alpha chain variable domain of TCR clone 391477 (TRAV9-2, TRAJ9)
CALSDRGGLKTIF

SEQ ID NO: 782954 - protein, 14 aa, Homo sapiens
  CDR3 for beta chain variable domain of TCR clone 391477 (TRBV20-1, TRBJ2-2)
CSAPDTANTGELFF

SEQ ID NO: 782955 - protein, 14 aa, Homo sapiens
  CDR3 for alpha chain variable domain of TCR clone 391478 (TRAV26-1, TRAJ49)
CIVRPSNTGNQFYF

SEQ ID NO: 782956 - protein, 15 aa, Homo sapiens
  CDR3 for beta chain variable domain of TCR clone 391478 (TRBV19, TRBJ1-1)
CASMGFRDVHTEAFF

SEQ ID NO: 782957 - protein, 15 aa, Homo sapiens
  CDR3 for alpha chain variable domain of TCR clone 391479 (TRAV12-3, TRAJ47)
CAMSALVEYGNKLVF

SEQ ID NO: 782958 - protein, 11 aa, Homo sapiens
  CDR3 for beta chain variable domain of TCR clone 391479 (TRBV7-9, TRBJ2-5)
CASSLGETQYF

SEQ ID NO: 782959 - protein, 20 aa, Homo sapiens
  CDR3 for alpha chain variable domain of TCR clone 391480 (TRAV13-1, TRAJ17)
CAASIHGGCRQQANLWRRNQ

SEQ ID NO: 782960 - protein, 14 aa, Homo sapiens
  CDR3 for beta chain variable domain of TCR clone 391480 (TRBV20-1, TRBJ2-4)
CSARDRGQGGIQYF

SEQ ID NO: 782961 - protein, 12 aa, Homo sapiens
  CDR3 for alpha chain variable domain of TCR clone 391481 (TRAV38-2/DV8, TRAJ48)
CAPLSGNEKLTF

SEQ ID NO: 782962 - protein, 15 aa, Homo sapiens
  CDR3 for beta chain variable domain of TCR clone 391481 (TRBV6-1, TRBJ2-1)
CASSELRGQYNEQFF

SEQ ID NO: 782963 - protein, 15 aa, Homo sapiens
  CDR3 for alpha chain variable domain of TCR clone 391482 (TRAV8-3, TRAJ23)
CAVGDRYNQGGKPIF

SEQ ID NO: 782964 - protein, 22 aa, Homo sapiens
  CDR3 for beta chain variable domain of TCR clone 391482 (TRBV29-1, TRBJ2-5)
TVSNMSPEDSSIYLCSAGTQYF

SEQ ID NO: 782965 - protein, 17 aa, Homo sapiens
  CDR3 for alpha chain variable domain of TCR clone 391483 (TRAV36/DV7, TRAJ52)
CAVAQRAGGTSYGELTF

SEQ ID NO: 782966 - protein, 13 aa, Homo sapiens
  CDR3 for beta chain variable domain of TCR clone 391483 (TRBV7-2, TRBJ2-2)
CASSLAVTGELFF

SEQ ID NO: 782967 - protein, 12 aa, Homo sapiens
  CDR3 for alpha chain variable domain of TCR clone 391484 (TRAV13-1, TRAJ9)
CASHAGGFKTIF

SEQ ID NO: 782968 - protein, 18 aa, Homo sapiens
  CDR3 for beta chain variable domain of TCR clone 391484 (TRBV11-2, TRBJ2-3)
CASSLGGASRGAPNTQYF

SEQ ID NO: 782969 - protein, 11 aa, Homo sapiens
  CDR3 for alpha chain variable domain of TCR clone 391485 (TRAV12-1, TRAJ37)
CVVYNTGKLIF

SEQ ID NO: 782970 - protein, 15 aa, Homo sapiens
  CDR3 for beta chain variable domain of TCR clone 391485 (TRBV7-9, TRBJ1-4)
CASSARTGGNEKLFF

SEQ ID NO: 782971 - protein, 12 aa, Homo sapiens
  CDR3 for alpha chain variable domain of TCR clone 391486 (TRAV12-3, TRAJ20)
CAMVRGDYKLSF

SEQ ID NO: 782972 - protein, 12 aa, Homo sapiens
  CDR3 for beta chain variable domain of TCR clone 391486 (TRBV29-1, TRBJ1-1)
CSESDGNTEEFF

SEQ ID NO: 782973 - protein, 14 aa, Homo sapiens
  CDR3 for alpha chain variable domain of TCR clone 391487 (TRAV16, TRAJ50)
CSKYKETSYDKVIF

SEQ ID NO: 782974 - protein, 17 aa, Homo sapiens
  CDR3 for beta chain variable domain of TCR clone 391487 (TRBV27, TRBJ2-3)
CASSFFPPNTSTDTQYF

SEQ ID NO: 782975 - protein, 14 aa, Homo sapiens
  CDR3 for alpha chain variable domain of TCR clone 391488 (TRAV12-1, TRAJ37)
CVVNRSGNTGKLIF

SEQ ID NO: 782976 - protein, 16 aa, Homo sapiens
  CDR3 for beta chain variable domain of TCR clone 391488 (TRBV12-5, TRBJ2-5)
CASGPRTSGNQETQYF

SEQ ID NO: 782977 - protein, 12 aa, Homo sapiens
  CDR3 for alpha chain variable domain of TCR clone 391489 (TRAV8-3, TRAJ26)
CAGDNYGQNFVF

SEQ ID NO: 782978 - protein, 12 aa, Homo sapiens
  CDR3 for beta chain variable domain of TCR clone 391489 (TRBV7-8, TRBJ2-7)
CDSEGGPHGQYF

SEQ ID NO: 782979 - protein, 12 aa, Homo sapiens
  CDR3 for alpha chain variable domain of TCR clone 391490 (TRAV16, TRAJ56)
CAPTGANSKLTF

SEQ ID NO: 782980 - protein, 16 aa, Homo sapiens
  CDR3 for beta chain variable domain of TCR clone 391490 (TRBV27, TRBJ2-6)
CQQFDRVRFWANVLTF

SEQ ID NO: 782981 - protein, 14 aa, Homo sapiens
  CDR3 for alpha chain variable domain of TCR clone 391491 (TRAV8-3, TRAJ47)
CAVGHMEYGNKLVF

SEQ ID NO: 782982 - protein, 16 aa, Homo sapiens
  CDR3 for beta chain variable domain of TCR clone 391491 (TRBV7-3, TRBJ2-1)
CASSLEGYRSYNEQFF

SEQ ID NO: 782983 - protein, 17 aa, Homo sapiens
  CDR3 for alpha chain variable domain of TCR clone 391492 (TRAV26-1, TRAJ37)
CIVRVITASSNTGKLIF

SEQ ID NO: 782984 - protein, 14 aa, Homo sapiens
  CDR3 for beta chain variable domain of TCR clone 391492 (TRBV19, TRBJ2-1)
CASPTFVLGGEQFF

SEQ ID NO: 782985 - protein, 14 aa, Homo sapiens
  CDR3 for alpha chain variable domain of TCR clone 391493 (TRAV35, TRAJ13)
CAGRSPGGYQKVTF

SEQ ID NO: 782986 - protein, 14 aa, Homo sapiens
  CDR3 for beta chain variable domain of TCR clone 391493 (TRBV19, TRBJ2-2)
CASSVVGLSGELFF

SEQ ID NO: 782987 - protein, 11 aa, Homo sapiens
  CDR3 for alpha chain variable domain of TCR clone 391494 (TRAV3, TRAJ17)
PRGAAGNKLTF

SEQ ID NO: 782988 - protein, 16 aa, Homo sapiens
  CDR3 for beta chain variable domain of TCR clone 391494 (TRBV7-6, TRBJ2-1)
CASSAPGPSSYNGHFF

SEQ ID NO: 782989 - protein, 17 aa, Homo sapiens
  CDR3 for alpha chain variable domain of TCR clone 391495 (TRAV17, TRAJ54)
LLLCYGRGVQGAQKLVF

SEQ ID NO: 782990 - protein, 14 aa, Homo sapiens
  CDR3 for beta chain variable domain of TCR clone 391495 (TRBV4-1, TRBJ2-5)
CASSRSGSGETQYF

SEQ ID NO: 782991 - protein, 16 aa, Homo sapiens
  CDR3 for alpha chain variable domain of TCR clone 391496 (TRAV3, TRAJ10)
CAVRDMNAGGGNKLTF

SEQ ID NO: 782992 - protein, 16 aa, Homo sapiens
  CDR3 for beta chain variable domain of TCR clone 391496 (TRBV5-1, TRBJ2-5)
CASSLSLAGAQETQYF

SEQ ID NO: 782993 - protein, 15 aa, Homo sapiens
  CDR3 for alpha chain variable domain of TCR clone 391497 (TRAV8-3, TRAJ45)
CASSYSGGGADGLTF

SEQ ID NO: 782994 - protein, 16 aa, Homo sapiens
  CDR3 for beta chain variable domain of TCR clone 391497 (TRBV7-9, TRBJ2-2)
YASSGFGGANTGELFF

SEQ ID NO: 782995 - protein, 14 aa, Homo sapiens
  CDR3 for alpha chain variable domain of TCR clone 391498 (TRAV8-6, TRAJ57)
FAVSSKGGSEKLVF

SEQ ID NO: 782996 - protein, 13 aa, Homo sapiens
  CDR3 for beta chain variable domain of TCR clone 391498 (TRBV15, TRBJ1-2)
CATSMTANYGYTF

SEQ ID NO: 782997 - protein, 13 aa, Homo sapiens
  CDR3 for alpha chain variable domain of TCR clone 391499 (TRAV22, TRAJ29)
CAVGGSGNTPLVF

SEQ ID NO: 782998 - protein, 15 aa, Homo sapiens
  CDR3 for beta chain variable domain of TCR clone 391499 (TRBV12-4, TRBJ1-2)
CASSLAHRDGQAYTF

SEQ ID NO: 782999 - protein, 13 aa, Homo sapiens
  CDR3 for alpha chain variable domain of TCR clone 391500 (TRAV8-3, TRAJ43)
CAVGIYNNNDMRF

SEQ ID NO: 783000 - protein, 16 aa, Homo sapiens
  CDR3 for beta chain variable domain of TCR clone 391500 (TRBV7-2, TRBJ2-5)
CASSLVRWTKQETQYL

SEQ ID NO: 783001 - protein, 14 aa, Homo sapiens
  CDR3 for alpha chain variable domain of TCR clone 391501 (TRAV12-2, TRAJ33)
CAVKRARSNYQLIW

SEQ ID NO: 783002 - protein, 22 aa, Homo sapiens
  CDR3 for beta chain variable domain of TCR clone 391501 (TRBV29-1, TRBJ2-5)
TVSNMSPEDSSIYLCSAGTQYF

SEQ ID NO: 783003 - protein, 15 aa, Homo sapiens
  CDR3 for alpha chain variable domain of TCR clone 391502 (TRAV17, TRAJ45)
CATAELGGGADGRTF

SEQ ID NO: 783004 - protein, 14 aa, Homo sapiens
  CDR3 for beta chain variable domain of TCR clone 391502 (TRBV3-1, TRBJ2-5)
CASSQAVRQETQYF

SEQ ID NO: 783005 - protein, 13 aa, Homo sapiens
  CDR3 for alpha chain variable domain of TCR clone 391503 (TRAV8-3, TRAJ28)
CAVGAVGSYQLTF

SEQ ID NO: 783006 - protein, 14 aa, Homo sapiens
  CDR3 for beta chain variable domain of TCR clone 391503 (TRBV7-9, TRBJ2-7)
CASSSRLVLHEQYF

SEQ ID NO: 783007 - protein, 14 aa, Homo sapiens
  CDR3 for alpha chain variable domain of TCR clone 391504 (TRAV14/DV4, TRAJ15)
CAMRRDQAGTALIF

SEQ ID NO: 783008 - protein, 16 aa, Homo sapiens
  CDR3 for beta chain variable domain of TCR clone 391504 (TRBV15, TRBJ2-3)
CATNRDLGIVTDTQYF

SEQ ID NO: 783009 - protein, 11 aa, Homo sapiens
  CDR3 for alpha chain variable domain of TCR clone 391505 (TRAV21, TRAJ26)
CCVNYGQNFVF

SEQ ID NO: 783010 - protein, 18 aa, Homo sapiens
  CDR3 for beta chain variable domain of TCR clone 391505 (TRBV7-2, TRBJ2-2)
CASSLESGPRMNTGELFF

SEQ ID NO: 783011 - protein, 14 aa, Homo sapiens
  CDR3 for alpha chain variable domain of TCR clone 391506 (TRAV8-1, TRAJ39)
CAVNASNASNMLTF

SEQ ID NO: 783012 - protein, 13 aa, Homo sapiens
  CDR3 for beta chain variable domain of TCR clone 391506 (TRBV5-5, TRBJ1-2)
CASSFWRGEDYTF

SEQ ID NO: 783013 - protein, 15 aa, Homo sapiens
  CDR3 for alpha chain variable domain of TCR clone 391507 (TRAV13-1, TRAJ32)
CAASNGWWCYKQAHL

SEQ ID NO: 783014 - protein, 14 aa, Homo sapiens
  CDR3 for beta chain variable domain of TCR clone 391507 (TRBV20-1, TRBJ2-5)
CSAKGLAGIQTQYF

SEQ ID NO: 783015 - protein, 15 aa, Homo sapiens
  CDR3 for alpha chain variable domain of TCR clone 391508 (TRAV12-1, TRAJ44)
CVVDTPHGTASKLTF

SEQ ID NO: 783016 - protein, 13 aa, Homo sapiens
  CDR3 for beta chain variable domain of TCR clone 391508 (TRBV27, TRBJ2-1)
CASSSGSYNEQFF

SEQ ID NO: 783017 - protein, 14 aa, Homo sapiens
  CDR3 for alpha chain variable domain of TCR clone 391509 (TRAV35, TRAJ33)
CAGSSQDSNYQLIW

SEQ ID NO: 783018 - protein, 13 aa, Homo sapiens
  CDR3 for beta chain variable domain of TCR clone 391509 (TRBV7-2, TRBJ1-1)
CASSLARPAEAFF

SEQ ID NO: 783019 - protein, 12 aa, Homo sapiens
  CDR3 for alpha chain variable domain of TCR clone 391510 (TRAV12-3, TRAJ17)
CAMTLPGNKLTF

SEQ ID NO: 783020 - protein, 14 aa, Homo sapiens
  CDR3 for beta chain variable domain of TCR clone 391510 (TRBV12-4, TRBJ1-1)
CASSLGTGGTEAFF

SEQ ID NO: 783021 - protein, 15 aa, Homo sapiens
  CDR3 for alpha chain variable domain of TCR clone 391511 (TRAV26-1, TRAJ12)
IASSELMDSSYKLIF

SEQ ID NO: 783022 - protein, 11 aa, Homo sapiens
  CDR3 for beta chain variable domain of TCR clone 391511 (TRBV7-9, TRBJ2-3)
CASSPPETQHF

SEQ ID NO: 783023 - protein, 13 aa, Homo sapiens
  CDR3 for alpha chain variable domain of TCR clone 391512 (TRAV13-1, TRAJ44)
CSKATGTASKLTF

SEQ ID NO: 783024 - protein, 22 aa, Homo sapiens
  CDR3 for beta chain variable domain of TCR clone 391512 (TRBV19, TRBJ2-1)
CASSVRDRVTGTSGRIYNEQFF

SEQ ID NO: 783025 - protein, 11 aa, Homo sapiens
  CDR3 for alpha chain variable domain of TCR clone 391513 (TRAV17, TRAJ49)
CATDAGNQFYF

SEQ ID NO: 783026 - protein, 13 aa, Homo sapiens
  CDR3 for beta chain variable domain of TCR clone 391513 (TRBV7-2, TRBJ2-2)
CASSLAVTGELFF

SEQ ID NO: 783027 - protein, 11 aa, Homo sapiens
  CDR3 for alpha chain variable domain of TCR clone 391514 (TRAV12-3, TRAJ43)
CAMSVTNDMRF

SEQ ID NO: 783028 - protein, 16 aa, Homo sapiens
  CDR3 for beta chain variable domain of TCR clone 391514 (TRBV20-1, TRBJ2-1)
CSARDSLGAVYNEQFF

SEQ ID NO: 783029 - protein, 13 aa, Homo sapiens
  CDR3 for alpha chain variable domain of TCR clone 391515 (TRAV13-1, TRAJ12)
CSKYMGSSYKLIF

SEQ ID NO: 783030 - protein, 20 aa, Homo sapiens
  CDR3 for beta chain variable domain of TCR clone 391515 (TRBV28, TRBJ2-1)
CASTPIGRSPGLAGGNEQFF

SEQ ID NO: 783031 - protein, 14 aa, Homo sapiens
  CDR3 for alpha chain variable domain of TCR clone 391516 (TRAV12-2, TRAJ13)
CAVKKTGGYQKVTF

SEQ ID NO: 783032 - protein, 16 aa, Homo sapiens
  CDR3 for beta chain variable domain of TCR clone 391516 (TRBV2, TRBJ2-1)
CARRKTSGGSYNEQFF

SEQ ID NO: 783033 - protein, 13 aa, Homo sapiens
  CDR3 for alpha chain variable domain of TCR clone 391517 (TRAV16, TRAJ27)
CALRRTNAGKSTF

SEQ ID NO: 783034 - protein, 12 aa, Homo sapiens
  CDR3 for beta chain variable domain of TCR clone 391517 (TRBV11-2, TRBJ2-1)
CASSPGNNEQFF

SEQ ID NO: 783035 - protein, 14 aa, Homo sapiens
  CDR3 for alpha chain variable domain of TCR clone 391518 (TRAV20, TRAJ22)
CAVQVSGSASQLTF

SEQ ID NO: 783036 - protein, 16 aa, Homo sapiens
  CDR3 for beta chain variable domain of TCR clone 391518 (TRBV12-4, TRBJ1-4)
CASSLKGIGHGEKLFF

SEQ ID NO: 783037 - protein, 14 aa, Homo sapiens
  CDR3 for alpha chain variable domain of TCR clone 391519 (TRAV17, TRAJ56)
CATVPAGANSKLTF

SEQ ID NO: 783038 - protein, 16 aa, Homo sapiens
  CDR3 for beta chain variable domain of TCR clone 391519 (TRBV11-2, TRBJ1-1)
CASSLRQGGEHSKAFF

SEQ ID NO: 783039 - protein, 14 aa, Homo sapiens
  CDR3 for alpha chain variable domain of TCR clone 391520 (TRAV1-2, TRAJ8)
CAVRGDTGFQKLVF

SEQ ID NO: 783040 - protein, 16 aa, Homo sapiens
  CDR3 for beta chain variable domain of TCR clone 391520 (TRBV7-9, TRBJ2-1)
CASSDVAGGSYNEQFF

SEQ ID NO: 783041 - protein, 12 aa, Homo sapiens
  CDR3 for alpha chain variable domain of TCR clone 391521 (TRAV1-2, TRAJ26)
CAVRYYGQTFVF

SEQ ID NO: 783042 - protein, 15 aa, Homo sapiens
  CDR3 for beta chain variable domain of TCR clone 391521 (TRBV28, TRBJ2-1)
CASSIIAGGRSEQFF

SEQ ID NO: 783043 - protein, 14 aa, Homo sapiens
  CDR3 for alpha chain variable domain of TCR clone 391522 (TRAV12-1, TRAJ6)
CVVPTSGGSYIPTF

SEQ ID NO: 783044 - protein, 14 aa, Homo sapiens
  CDR3 for beta chain variable domain of TCR clone 391522 (TRBV7-2, TRBJ1-1)
CASSFLTGTTEAFF

SEQ ID NO: 783045 - protein, 14 aa, Homo sapiens
  CDR3 for alpha chain variable domain of TCR clone 391523 (TRAV25, TRAJ23)
CAGQGDNQGGKLIF

SEQ ID NO: 783046 - protein, 12 aa, Homo sapiens
  CDR3 for beta chain variable domain of TCR clone 391523 (TRBV7-9, TRBJ1-1)
CASSSVRGEAFF

SEQ ID NO: 783047 - protein, 13 aa, Homo sapiens
  CDR3 for alpha chain variable domain of TCR clone 391524 (TRAV13-2, TRAJ40)
CAETLSGTYKYIF

SEQ ID NO: 783048 - protein, 16 aa, Homo sapiens
  CDR3 for beta chain variable domain of TCR clone 391524 (TRBV20-1, TRBJ2-1)
CSARDFSGRIGDEQFC

SEQ ID NO: 783049 - protein, 14 aa, Homo sapiens
  CDR3 for alpha chain variable domain of TCR clone 391525 (TRAV12-2, TRAJ4)
CADDLSGGYNKLIF

SEQ ID NO: 783050 - protein, 13 aa, Homo sapiens
  CDR3 for beta chain variable domain of TCR clone 391525 (TRBV7-9, TRBJ1-2)
CASSLKQNYGYTF

SEQ ID NO: 783051 - protein, 18 aa, Homo sapiens
  CDR3 for alpha chain variable domain of TCR clone 391526 (TRAV13-1, TRAJ52)
CAAKNPNAGGTSYGKLKF

SEQ ID NO: 783052 - protein, 15 aa, Homo sapiens
  CDR3 for beta chain variable domain of TCR clone 391526 (TRBV5-1, TRBJ1-2)
CASSPGDRGSYGYTF

SEQ ID NO: 783053 - protein, 15 aa, Homo sapiens
  CDR3 for alpha chain variable domain of TCR clone 391527 (TRAV12-3, TRAJ27)
CAMRAYNTHAGKSTF

SEQ ID NO: 783054 - protein, 13 aa, Homo sapiens
  CDR3 for beta chain variable domain of TCR clone 391527 (TRBV11-2, TRBJ2-5)
CASSRGPSETQYF

SEQ ID NO: 783055 - protein, 11 aa, Homo sapiens
  CDR3 for alpha chain variable domain of TCR clone 391528 (TRAV12-1, TRAJ21)
CVVNNFSKFYF

SEQ ID NO: 783056 - protein, 14 aa, Homo sapiens
  CDR3 for beta chain variable domain of TCR clone 391528 (TRBV5-4, TRBJ1-1)
CASSLDSRRDEAFF

SEQ ID NO: 783057 - protein, 13 aa, Homo sapiens
  CDR3 for alpha chain variable domain of TCR clone 391529 (TRAV1-2, TRAJ9)
CAALHTGGFKTIF

SEQ ID NO: 783058 - protein, 14 aa, Homo sapiens
  CDR3 for beta chain variable domain of TCR clone 391529 (TRBV13, TRBJ2-3)
CASSSGSPTDTQYF

SEQ ID NO: 783059 - protein, 16 aa, Homo sapiens
  CDR3 for alpha chain variable domain of TCR clone 391530 (TRAV3, TRAJ37)
CAVRGKGSGNTVKLIF

SEQ ID NO: 783060 - protein, 21 aa, Homo sapiens
  CDR3 for beta chain variable domain of TCR clone 391530 (TRBV15, TRBJ2-1)
AWGTQPCTCVPPAEVDTARFF

SEQ ID NO: 783061 - protein, 14 aa, Homo sapiens
  CDR3 for alpha chain variable domain of TCR clone 391531 (TRAV20, TRAJ42)
CAVQAGGSQGNLIF

SEQ ID NO: 783062 - protein, 13 aa, Homo sapiens
  CDR3 for beta chain variable domain of TCR clone 391531 (TRBV28, TRBJ1-2)
CAINADLNYGYTF

SEQ ID NO: 783063 - protein, 14 aa, Homo sapiens
  CDR3 for alpha chain variable domain of TCR clone 391532 (TRAV8-1, TRAJ23)
CAVGTYNQGGKLIF

SEQ ID NO: 783064 - protein, 13 aa, Homo sapiens
  CDR3 for beta chain variable domain of TCR clone 391532 (TRBV10-3, TRBJ2-7)
CASKLAVNYEQYF

SEQ ID NO: 783065 - protein, 16 aa, Homo sapiens
  CDR3 for alpha chain variable domain of TCR clone 391533 (TRAV30, TRAJ24)
CGSVIMDADSWGNFQF

SEQ ID NO: 783066 - protein, 14 aa, Homo sapiens
  CDR3 for beta chain variable domain of TCR clone 391533 (TRBV12-5, TRBJ2-5)
CASGSRTHQETQYF

SEQ ID NO: 783067 - protein, 14 aa, Homo sapiens
  CDR3 for alpha chain variable domain of TCR clone 391534 (TRAV12-2, TRAJ45)
CAVNIGGGAGGLTF

SEQ ID NO: 783068 - protein, 17 aa, Homo sapiens
  CDR3 for beta chain variable domain of TCR clone 391534 (TRBV20-1, TRBJ2-2)
CSASGSGQGGLTGELFF

SEQ ID NO: 783069 - protein, 14 aa, Homo sapiens
  CDR3 for alpha chain variable domain of TCR clone 391535 (TRAV35, TRAJ38)
CAGSNAGNNRKLTW

SEQ ID NO: 783070 - protein, 12 aa, Homo sapiens
  CDR3 for beta chain variable domain of TCR clone 391535 (TRBV19, TRBJ2-7)
CASTDRGYEQYF

SEQ ID NO: 783071 - protein, 16 aa, Homo sapiens
  CDR3 for alpha chain variable domain of TCR clone 391536 (TRAV3, TRAJ10)
CAVRDVNAGGGNKLTF

SEQ ID NO: 783072 - protein, 16 aa, Homo sapiens
  CDR3 for beta chain variable domain of TCR clone 391536 (TRBV7-9, TRBJ2-3)
CASSPWREVGTDTQYF

SEQ ID NO: 783073 - protein, 15 aa, Homo sapiens
  CDR3 for alpha chain variable domain of TCR clone 391537 (TRAV3, TRAJ47)
CAVRDIGGYGNKLVF

SEQ ID NO: 783074 - protein, 16 aa, Homo sapiens
  CDR3 for beta chain variable domain of TCR clone 391537 (TRBV15, TRBJ2-3)
CATSRDLGIVTDTQYF

SEQ ID NO: 783075 - protein, 12 aa, Homo sapiens
  CDR3 for alpha chain variable domain of TCR clone 391538 (TRAV29/DV5, TRAJ49)
CAATDTGNQIYF

SEQ ID NO: 783076 - protein, 13 aa, Homo sapiens
  CDR3 for beta chain variable domain of TCR clone 391538 (TRBV7-3, TRBJ1-1)
CASSQDWGAEAFF

SEQ ID NO: 783077 - protein, 13 aa, Homo sapiens
  CDR3 for alpha chain variable domain of TCR clone 391539 (TRAV13-2, TRAJ48)
FAEMDSGNEKLTF

SEQ ID NO: 783078 - protein, 15 aa, Homo sapiens
  CDR3 for beta chain variable domain of TCR clone 391539 (TRBV7-9, TRBJ1-6)
CASSSPGRGNSPLHF

SEQ ID NO: 783079 - protein, 18 aa, Homo sapiens
  CDR3 for alpha chain variable domain of TCR clone 391540 (TRAV3, TRAJ38)
CAVRDCLNAGNNHIQNPD

SEQ ID NO: 783080 - protein, 13 aa, Homo sapiens
  CDR3 for beta chain variable domain of TCR clone 391540 (TRBV12-4, TRBJ1-2)
CASSLRQGKGYTF

SEQ ID NO: 783081 - protein, 14 aa, Homo sapiens
  CDR3 for alpha chain variable domain of TCR clone 391541 (TRAV1-2, TRAJ8)
CAVREDTGFQKLVF

SEQ ID NO: 783082 - protein, 21 aa, Homo sapiens
  CDR3 for beta chain variable domain of TCR clone 391541 (TRBV24-1, TRBJ2-5)
ESAIPNQTALYFCATRETQYF

SEQ ID NO: 783083 - protein, 14 aa, Homo sapiens
  CDR3 for alpha chain variable domain of TCR clone 391542 (TRAV35, TRAJ54)
CAGYLIQGAQKLVF

SEQ ID NO: 783084 - protein, 14 aa, Homo sapiens
  CDR3 for beta chain variable domain of TCR clone 391542 (TRBV7-2, TRBJ2-5)
CASSVGWAEETQYL

SEQ ID NO: 783085 - protein, 16 aa, Homo sapiens
  CDR3 for alpha chain variable domain of TCR clone 391543 (TRAV30, TRAJ24)
CGTEIVDADSWGKFQF

SEQ ID NO: 783086 - protein, 18 aa, Homo sapiens
  CDR3 for beta chain variable domain of TCR clone 391543 (TRBV12-5, TRBJ2-5)
FASGTDTSRDPVLRARHA

SEQ ID NO: 783087 - protein, 14 aa, Homo sapiens
  CDR3 for alpha chain variable domain of TCR clone 391544 (TRAV12-1, TRAJ12)
CVVTRMDSSYKFIF

SEQ ID NO: 783088 - protein, 14 aa, Homo sapiens
  CDR3 for beta chain variable domain of TCR clone 391544 (TRBV4-1, TRBJ2-7)
CASSPVAGGDEQYF

SEQ ID NO: 783089 - protein, 13 aa, Homo sapiens
  CDR3 for alpha chain variable domain of TCR clone 391545 (TRAV12-1, TRAJ3)
CVVNPRGASTIIF

SEQ ID NO: 783090 - protein, 13 aa, Homo sapiens
  CDR3 for beta chain variable domain of TCR clone 391545 (TRBV28, TRBJ1-5)
CASSDRGNQPQHF

SEQ ID NO: 783091 - protein, 12 aa, Homo sapiens
  CDR3 for alpha chain variable domain of TCR clone 391546 (TRAV29/DV5, TRAJ15)
CASNQAGTALIF

SEQ ID NO: 783092 - protein, 15 aa, Homo sapiens
  CDR3 for beta chain variable domain of TCR clone 391546 (TRBV11-2, TRBJ2-2)
CASSSDRLNAGELFF

SEQ ID NO: 783093 - protein, 12 aa, Homo sapiens
  CDR3 for alpha chain variable domain of TCR clone 391547 (TRAV13-1, TRAJ53)
AASGGSNYKLTF

SEQ ID NO: 783094 - protein, 16 aa, Homo sapiens
  CDR3 for beta chain variable domain of TCR clone 391547 (TRBV7-3, TRBJ2-2)
CASSLKRGTLSGELFF

SEQ ID NO: 783095 - protein, 18 aa, Homo sapiens
  CDR3 for alpha chain variable domain of TCR clone 391548 (TRAV13-1, TRAJ52)
CAASKRSAGGPSYGKLTF

SEQ ID NO: 783096 - protein, 13 aa, Homo sapiens
  CDR3 for beta chain variable domain of TCR clone 391548 (TRBV10-3, TRBJ2-7)
CASKLAVNYEQYF

SEQ ID NO: 783097 - protein, 15 aa, Homo sapiens
  CDR3 for alpha chain variable domain of TCR clone 391549 (TRAV8-1, TRAJ6)
CAVNANPGGSYIPTF

SEQ ID NO: 783098 - protein, 20 aa, Homo sapiens
  CDR3 for beta chain variable domain of TCR clone 391549 (TRBV7-8, TRBJ2-2)
CASSHLFPGPTIHITGELFF

SEQ ID NO: 783099 - protein, 11 aa, Homo sapiens
  CDR3 for alpha chain variable domain of TCR clone 391550 (TRAV13-1, TRAJ20)
CSPHGLYKLSF

SEQ ID NO: 783100 - protein, 19 aa, Homo sapiens
  CDR3 for beta chain variable domain of TCR clone 391550 (TRBV28, TRBJ2-5)
CASTGAGGRRDLVLRARHA

SEQ ID NO: 783101 - protein, 14 aa, Homo sapiens
  CDR3 for alpha chain variable domain of TCR clone 391551 (TRAV12-3, TRAJ9)
CAMSVETGGFKTIF

SEQ ID NO: 783102 - protein, 15 aa, Homo sapiens
  CDR3 for beta chain variable domain of TCR clone 391551 (TRBV9, TRBJ1-6)
CASSVAGTGDSPLHF

SEQ ID NO: 783103 - protein, 12 aa, Homo sapiens
  CDR3 for alpha chain variable domain of TCR clone 391552 (TRAV21, TRAJ24)
CAVMDSWGKLQF

SEQ ID NO: 783104 - protein, 14 aa, Homo sapiens
  CDR3 for beta chain variable domain of TCR clone 391552 (TRBV25-1, TRBJ1-1)
CASTHLGGNTEAFF

SEQ ID NO: 783105 - protein, 14 aa, Homo sapiens
  CDR3 for alpha chain variable domain of TCR clone 391553 (TRAV8-3, TRAJ4)
CAVGAAGGYNKLIF

SEQ ID NO: 783106 - protein, 13 aa, Homo sapiens
  CDR3 for beta chain variable domain of TCR clone 391553 (TRBV7-8, TRBJ2-1)
CASSLERLGEQFF

SEQ ID NO: 783107 - protein, 14 aa, Homo sapiens
  CDR3 for alpha chain variable domain of TCR clone 391554 (TRAV12-3, TRAJ42)
CAMNYGGSQGNLIF

SEQ ID NO: 783108 - protein, 15 aa, Homo sapiens
  CDR3 for beta chain variable domain of TCR clone 391554 (TRBV28, TRBJ2-5)
CASSADTGRGETQYF

SEQ ID NO: 783109 - protein, 14 aa, Homo sapiens
  CDR3 for alpha chain variable domain of TCR clone 391555 (TRAV17, TRAJ12)
CDILPMDSSYKLIF

SEQ ID NO: 783110 - protein, 15 aa, Homo sapiens
  CDR3 for beta chain variable domain of TCR clone 391555 (TRBV5-1, TRBJ1-1)
CASSLGEGENTEAFF

SEQ ID NO: 783111 - protein, 15 aa, Homo sapiens
  CDR3 for alpha chain variable domain of TCR clone 391556 (TRAV26-1, TRAJ28)
CIVRVAGAGTYQLTF

SEQ ID NO: 783112 - protein, 19 aa, Homo sapiens
  CDR3 for beta chain variable domain of TCR clone 391556 (TRBV7-3, TRBJ2-7)
CASSLTGVAGGWPSYEQYF

SEQ ID NO: 783113 - protein, 12 aa, Homo sapiens
  CDR3 for alpha chain variable domain of TCR clone 391557 (TRAV16, TRAJ10)
CSRTGGGNILTF

SEQ ID NO: 783114 - protein, 19 aa, Homo sapiens
  CDR3 for beta chain variable domain of TCR clone 391557 (TRBV25-1, TRBJ2-2)
CAILVYRVDRGRKTGELFF

SEQ ID NO: 783115 - protein, 13 aa, Homo sapiens
  CDR3 for alpha chain variable domain of TCR clone 391558 (TRAV1-2, TRAJ20)
CAVRDGNDYKISF

SEQ ID NO: 783116 - protein, 15 aa, Homo sapiens
  CDR3 for beta chain variable domain of TCR clone 391558 (TRBV5-1, TRBJ2-1)
CASSPPRAPYNEQFF

SEQ ID NO: 783117 - protein, 11 aa, Homo sapiens
  CDR3 for alpha chain variable domain of TCR clone 391559 (TRAV1-2, TRAJ40)
CAVQGTYKYIF

SEQ ID NO: 783118 - protein, 15 aa, Homo sapiens
  CDR3 for beta chain variable domain of TCR clone 391559 (TRBV5-1, TRBJ2-1)
CASSPPRAPYNEQFF

SEQ ID NO: 783119 - protein, 12 aa, Homo sapiens
  CDR3 for alpha chain variable domain of TCR clone 391560 (TRAV35, TRAJ39)
LAPNNAVNMLTF

SEQ ID NO: 783120 - protein, 13 aa, Homo sapiens
  CDR3 for beta chain variable domain of TCR clone 391560 (TRBV19, TRBJ1-3)
CASRLSLGNTIYF

SEQ ID NO: 783121 - protein, 17 aa, Homo sapiens
  CDR3 for alpha chain variable domain of TCR clone 391561 (TRAV3, TRAJ6)
CAVRDGPRAGGSYIPTF

SEQ ID NO: 783122 - protein, 13 aa, Homo sapiens
  CDR3 for beta chain variable domain of TCR clone 391561 (TRBV11-1, TRBJ2-1)
CASRTLGVGEQFF

SEQ ID NO: 783123 - protein, 18 aa, Homo sapiens
  CDR3 for alpha chain variable domain of TCR clone 391562 (TRAV8-3, TRAJ52)
CAVGPRYAGGTSYGKLTF

SEQ ID NO: 783124 - protein, 15 aa, Homo sapiens
  CDR3 for beta chain variable domain of TCR clone 391562 (TRBV7-9, TRBJ1-6)
CASSSPGRGNSPLHF

SEQ ID NO: 783125 - protein, 14 aa, Homo sapiens
  CDR3 for alpha chain variable domain of TCR clone 391563 (TRAV1-2, TRAJ8)
CAVREDTGFQKLVF

SEQ ID NO: 783126 - protein, 20 aa, Homo sapiens
  CDR3 for beta chain variable domain of TCR clone 391563 (TRBV7-8, TRBJ2-2)
CASSHLFPGPTSHITGELFF

SEQ ID NO: 783127 - protein, 13 aa, Homo sapiens
  CDR3 for alpha chain variable domain of TCR clone 391564 (TRAV17, TRAJ34)
CATDLYNTDKLIF

SEQ ID NO: 783128 - protein, 15 aa, Homo sapiens
  CDR3 for beta chain variable domain of TCR clone 391564 (TRBV20-1, TRBJ2-3)
CSATGTSGFTDAQYF

SEQ ID NO: 783129 - protein, 16 aa, Homo sapiens
  CDR3 for alpha chain variable domain of TCR clone 391565 (TRAV21, TRAJ52)
CAVTNAGGTSYEKLTF

SEQ ID NO: 783130 - protein, 11 aa, Homo sapiens
  CDR3 for beta chain variable domain of TCR clone 391565 (TRBV2, TRBJ1-1)
CASREGTEAFF

SEQ ID NO: 783131 - protein, 16 aa, Homo sapiens
  CDR3 for alpha chain variable domain of TCR clone 391566 (TRAV38-1, TRAJ32)
CAFIKGGGGATNKLIF

SEQ ID NO: 783132 - protein, 13 aa, Homo sapiens
  CDR3 for beta chain variable domain of TCR clone 391566 (TRBV20-1, TRBJ2-5)
CSAREAFQGTQYF

SEQ ID NO: 783133 - protein, 11 aa, Homo sapiens
  CDR3 for alpha chain variable domain of TCR clone 391567 (TRAV21, TRAJ27)
CAVSMQANQPL

SEQ ID NO: 783134 - protein, 17 aa, Homo sapiens
  CDR3 for beta chain variable domain of TCR clone 391567 (TRBV11-2, TRBJ2-1)
CASSLYPPGVEYNEQFF

SEQ ID NO: 783135 - protein, 15 aa, Homo sapiens
  CDR3 for alpha chain variable domain of TCR clone 391568 (TRAV12-2, TRAJ53)
CAVNGGGGSTYKLTF

SEQ ID NO: 783136 - protein, 17 aa, Homo sapiens
  CDR3 for beta chain variable domain of TCR clone 391568 (TRBV7-3, TRBJ2-3)
RASSLMKRMRGADTQYF

SEQ ID NO: 783137 - protein, 15 aa, Homo sapiens
  CDR3 for alpha chain variable domain of TCR clone 391569 (TRAV12-2, TRAJ53)
CAGNGGGGSNYKLKF

SEQ ID NO: 783138 - protein, 14 aa, Homo sapiens
  CDR3 for beta chain variable domain of TCR clone 391569 (TRBV7-6, TRBJ2-3)
CASSLGTVTDTQYF

SEQ ID NO: 783139 - protein, 14 aa, Homo sapiens
  CDR3 for alpha chain variable domain of TCR clone 391570 (TRAV23/DV6, TRAJ6)
CAAIPSGGSYIPTS

SEQ ID NO: 783140 - protein, 17 aa, Homo sapiens
  CDR3 for beta chain variable domain of TCR clone 391570 (TRBV7-2, TRBJ2-3)
CASSLGGRAAWRDTQYF

SEQ ID NO: 783141 - protein, 13 aa, Homo sapiens
  CDR3 for alpha chain variable domain of TCR clone 391571 (TRAV39, TRAJ58)
CAGEETSGSRLTF

SEQ ID NO: 783142 - protein, 16 aa, Homo sapiens
  CDR3 for beta chain variable domain of TCR clone 391571 (TRBV7-2, TRBJ1-2)
CASSSNQDRRGHGYTF

SEQ ID NO: 783143 - protein, 11 aa, Homo sapiens
  CDR3 for alpha chain variable domain of TCR clone 391572 (TRAV8-3, TRAJ37)
PLPSNTGKLIF

SEQ ID NO: 783144 - protein, 18 aa, Homo sapiens
  CDR3 for beta chain variable domain of TCR clone 391572 (TRBV10-1, TRBJ2-5)
CASSESQGQRPSPSGQAR

SEQ ID NO: 783145 - protein, 13 aa, Homo sapiens
  CDR3 for alpha chain variable domain of TCR clone 391573 (TRAV13-2, TRAJ13)
CSERPGGYQKVTF

SEQ ID NO: 783146 - protein, 18 aa, Homo sapiens
  CDR3 for beta chain variable domain of TCR clone 391573 (TRBV7-6, TRBJ2-1)
CASSPRTSGMSSYNEQFF

SEQ ID NO: 783147 - protein, 13 aa, Homo sapiens
  CDR3 for alpha chain variable domain of TCR clone 391574 (TRAV12-3, TRAJ33)
CAMSVNSNYQLIW

SEQ ID NO: 783148 - protein, 13 aa, Homo sapiens
  CDR3 for beta chain variable domain of TCR clone 391574 (TRBV7-2, TRBJ2-2)
CASSLAVTGELCF

SEQ ID NO: 783149 - protein, 17 aa, Homo sapiens
  CDR3 for alpha chain variable domain of TCR clone 391575 (TRAV2, TRAJ36)
CTVEDRGNWGKQPLLWD

SEQ ID NO: 783150 - protein, 14 aa, Homo sapiens
  CDR3 for beta chain variable domain of TCR clone 391575 (TRBV7-9, TRBJ2-5)
CASSLDTAQETQYF

SEQ ID NO: 783151 - protein, 15 aa, Homo sapiens
  CDR3 for alpha chain variable domain of TCR clone 391576 (TRAV26-1, TRAJ29)
CIVRFEGSGNTPLVF

SEQ ID NO: 783152 - protein, 15 aa, Homo sapiens
  CDR3 for beta chain variable domain of TCR clone 391576 (TRBV28, TRBJ2-5)
CASSPGQGSIETQYF

SEQ ID NO: 783153 - protein, 11 aa, Homo sapiens
  CDR3 for alpha chain variable domain of TCR clone 391577 (TRAV23/DV6, TRAJ48)
CAPRWGEKLTF

SEQ ID NO: 783154 - protein, 14 aa, Homo sapiens
  CDR3 for beta chain variable domain of TCR clone 391577 (TRBV29-1, TRBJ1-3)
CSVADRVVGNTIDF

SEQ ID NO: 783155 - protein, 13 aa, Homo sapiens
  CDR3 for alpha chain variable domain of TCR clone 391578 (TRAV27, TRAJ15)
CAGAGQAGTALIF

SEQ ID NO: 783156 - protein, 13 aa, Homo sapiens
  CDR3 for beta chain variable domain of TCR clone 391578 (TRBV20-1, TRBJ1-1)
CSARGGGNTEAFF

SEQ ID NO: 783157 - protein, 12 aa, Homo sapiens
  CDR3 for alpha chain variable domain of TCR clone 391579 (TRAV1-1, TRAJ8)
CAVGTGFQKLVF

SEQ ID NO: 783158 - protein, 13 aa, Homo sapiens
  CDR3 for beta chain variable domain of TCR clone 391579 (TRBV7-3, TRBJ1-1)
CASSQDWGAEAFF

SEQ ID NO: 783159 - protein, 19 aa, Homo sapiens
  CDR3 for alpha chain variable domain of TCR clone 391580 (TRAV38-1, TRAJ53)
CAFMKHGLESGGSNYKLTF

SEQ ID NO: 783160 - protein, 14 aa, Homo sapiens
  CDR3 for beta chain variable domain of TCR clone 391580 (TRBV7-9, TRBJ2-2)
CASSLVQDTGELFF

SEQ ID NO: 783161 - protein, 14 aa, Homo sapiens
  CDR3 for alpha chain variable domain of TCR clone 391581 (TRAV21, TRAJ23)
CAIMIYNQVGKRIF

SEQ ID NO: 783162 - protein, 18 aa, Homo sapiens
  CDR3 for beta chain variable domain of TCR clone 391581 (TRBV20-1, TRBJ2-6)
CSAETTPTHGSGANVLTF

SEQ ID NO: 783163 - protein, 18 aa, Homo sapiens
  CDR3 for alpha chain variable domain of TCR clone 391582 (TRAV13-1, TRAJ52)
CAASKRSAGGTSYGKLTF

SEQ ID NO: 783164 - protein, 13 aa, Homo sapiens
  CDR3 for beta chain variable domain of TCR clone 391582 (TRBV20-1, TRBJ1-1)
CSARGGGNTEAFF

SEQ ID NO: 783165 - protein, 13 aa, Homo sapiens
  CDR3 for alpha chain variable domain of TCR clone 391583 (TRAV21, TRAJ49)
CAVRQSTGNQFYF

SEQ ID NO: 783166 - protein, 16 aa, Homo sapiens
  CDR3 for beta chain variable domain of TCR clone 391583 (TRBV20-1, TRBJ2-6)
CSASSQGYDGANVLTF

SEQ ID NO: 783167 - protein, 15 aa, Homo sapiens
  CDR3 for alpha chain variable domain of TCR clone 391584 (TRAV27, TRAJ38)
CAARRNAGNNRKLIC

SEQ ID NO: 783168 - protein, 15 aa, Homo sapiens
  CDR3 for beta chain variable domain of TCR clone 391584 (TRBV10-3, TRBJ2-1)
CAISDVQDRAYEQFF

SEQ ID NO: 783169 - protein, 19 aa, Homo sapiens
  CDR3 for alpha chain variable domain of TCR clone 391585 (TRAV1-2, TRAJ26)
CLLPLCCERPDNRGQNFVF

SEQ ID NO: 783170 - protein, 17 aa, Homo sapiens
  CDR3 for beta chain variable domain of TCR clone 391585 (TRBV28, TRBJ2-5)
CASSRQGGLAGAETQYF

SEQ ID NO: 783171 - protein, 15 aa, Homo sapiens
  CDR3 for alpha chain variable domain of TCR clone 391586 (TRAV26-1, TRAJ29)
CIVRVEGSGNTPLVF

SEQ ID NO: 783172 - protein, 13 aa, Homo sapiens
  CDR3 for beta chain variable domain of TCR clone 391586 (TRBV12-4, TRBJ2-2)
CASSITGSGELFF

SEQ ID NO: 783173 - protein, 14 aa, Homo sapiens
  CDR3 for alpha chain variable domain of TCR clone 391587 (TRAV12-2, TRAJ40)
CAVKSPSGTYKYIF

SEQ ID NO: 783174 - protein, 17 aa, Homo sapiens
  CDR3 for beta chain variable domain of TCR clone 391587 (TRBV13, TRBJ2-3)
CASSLSRVAGGRNTQYF

SEQ ID NO: 783175 - protein, 16 aa, Homo sapiens
  CDR3 for alpha chain variable domain of TCR clone 391588 (TRAV4, TRAJ22)
CLGGDLYSGSARQLTF

SEQ ID NO: 783176 - protein, 16 aa, Homo sapiens
  CDR3 for beta chain variable domain of TCR clone 391588 (TRBV6-1, TRBJ2-5)
CASSETLDRGAETQYF

SEQ ID NO: 783177 - protein, 18 aa, Homo sapiens
  CDR3 for alpha chain variable domain of TCR clone 391589 (TRAV21, TRAJ52)
CAVSPSPAGGTSYGKLTF

SEQ ID NO: 783178 - protein, 15 aa, Homo sapiens
  CDR3 for beta chain variable domain of TCR clone 391589 (TRBV7-9, TRBJ2-7)
CASSLALAEAYEQYF

SEQ ID NO: 783179 - protein, 15 aa, Homo sapiens
  CDR3 for alpha chain variable domain of TCR clone 391590 (TRAV21, TRAJ52)
CAVRGGGTSYGKLTF

SEQ ID NO: 783180 - protein, 15 aa, Homo sapiens
  CDR3 for beta chain variable domain of TCR clone 391590 (TRBV18, TRBJ1-5)
CASAPSDRSNQPQHF

SEQ ID NO: 783181 - protein, 13 aa, Homo sapiens
  CDR3 for alpha chain variable domain of TCR clone 391591 (TRAV1-2, TRAJ9)
CAASNTGGFKTIF

SEQ ID NO: 783182 - protein, 15 aa, Homo sapiens
  CDR3 for beta chain variable domain of TCR clone 391591 (TRBV6-3, TRBJ2-7)
CASSSPGTAFYEQYF

SEQ ID NO: 783183 - protein, 15 aa, Homo sapiens
  CDR3 for alpha chain variable domain of TCR clone 391592 (TRAV17, TRAJ57)
CATGPSQGGSEKLVF

SEQ ID NO: 783184 - protein, 14 aa, Homo sapiens
  CDR3 for beta chain variable domain of TCR clone 391592 (TRBV11-2, TRBJ1-2)
CASSLYMGNYGYTF

SEQ ID NO: 783185 - protein, 13 aa, Homo sapiens
  CDR3 for alpha chain variable domain of TCR clone 391593 (TRAV21, TRAJ20)
CAVGVFADYKLSF

SEQ ID NO: 783186 - protein, 14 aa, Homo sapiens
  CDR3 for beta chain variable domain of TCR clone 391593 (TRBV12-4, TRBJ1-1)
CASSLNDMNTEAFF

SEQ ID NO: 783187 - protein, 15 aa, Homo sapiens
  CDR3 for alpha chain variable domain of TCR clone 391594 (TRAV8-4, TRAJ53)
CAVSDGGGSNYKLTF

SEQ ID NO: 783188 - protein, 15 aa, Homo sapiens
  CDR3 for beta chain variable domain of TCR clone 391594 (TRBV19, TRBJ2-5)
CASHELAGAQETQYF

SEQ ID NO: 783189 - protein, 14 aa, Homo sapiens
  CDR3 for alpha chain variable domain of TCR clone 391595 (TRAV13-2, TRAJ22)
CADGTLGSARQLTF

SEQ ID NO: 783190 - protein, 16 aa, Homo sapiens
  CDR3 for beta chain variable domain of TCR clone 391595 (TRBV19, TRBJ2-1)
CASSSKGTRTYNEQFF

SEQ ID NO: 783191 - protein, 11 aa, Homo sapiens
  CDR3 for alpha chain variable domain of TCR clone 391596 (TRAV12-3, TRAJ27)
CAMANAGKSTF

SEQ ID NO: 783192 - protein, 14 aa, Homo sapiens
  CDR3 for beta chain variable domain of TCR clone 391596 (TRBV7-2, TRBJ2-7)
CASSVGTRTYEQYF

SEQ ID NO: 783193 - protein, 15 aa, Homo sapiens
  CDR3 for alpha chain variable domain of TCR clone 391597 (TRAV12-3, TRAJ6)
CAISATTGGSYIPTF

SEQ ID NO: 783194 - protein, 16 aa, Homo sapiens
  CDR3 for beta chain variable domain of TCR clone 391597 (TRBV20-1, TRBJ1-2)
CSASMVQGVANYGYAF

SEQ ID NO: 783195 - protein, 14 aa, Homo sapiens
  CDR3 for alpha chain variable domain of TCR clone 391598 (TRAV8-2, TRAJ11)
CVVGEKSGYSTLTF

SEQ ID NO: 783196 - protein, 16 aa, Homo sapiens
  CDR3 for beta chain variable domain of TCR clone 391598 (TRBV28, TRBJ2-1)
CASSSPEYHRDNEQFF

SEQ ID NO: 783197 - protein, 19 aa, Homo sapiens
  CDR3 for alpha chain variable domain of TCR clone 391599 (TRAV35, TRAJ45)
CAGQPYSEYSGGGADGLTF

SEQ ID NO: 783198 - protein, 11 aa, Homo sapiens
  CDR3 for beta chain variable domain of TCR clone 391599 (TRBV7-9, TRBJ2-5)
CASSLSATQCF

SEQ ID NO: 783199 - protein, 15 aa, Homo sapiens
  CDR3 for alpha chain variable domain of TCR clone 391600 (TRAV3, TRAJ22)
CAVRDRGGSARPLTF

SEQ ID NO: 783200 - protein, 16 aa, Homo sapiens
  CDR3 for beta chain variable domain of TCR clone 391600 (TRBV4-2, TRBJ2-4)
CASSQELRRAKNIQYF

SEQ ID NO: 783201 - protein, 13 aa, Homo sapiens
  CDR3 for alpha chain variable domain of TCR clone 391601 (TRAV8-3, TRAJ20)
CGVGRPNDYKLSF

SEQ ID NO: 783202 - protein, 14 aa, Homo sapiens
  CDR3 for beta chain variable domain of TCR clone 391601 (TRBV12-5, TRBJ2-5)
CASGSRTHQETQYF

SEQ ID NO: 783203 - protein, 16 aa, Homo sapiens
  CDR3 for alpha chain variable domain of TCR clone 391602 (TRAV8-3, TRAJ13)
CAVGAYPSGGYQKVTF

SEQ ID NO: 783204 - protein, 14 aa, Homo sapiens
  CDR3 for beta chain variable domain of TCR clone 391602 (TRBV18, TRBJ2-7)
CASSPGGGAYEQYF

SEQ ID NO: 783205 - protein, 12 aa, Homo sapiens
  CDR3 for alpha chain variable domain of TCR clone 391603 (TRAV12-3, TRAJ17)
CAMTLTGNKLTF

SEQ ID NO: 783206 - protein, 15 aa, Homo sapiens
  CDR3 for beta chain variable domain of TCR clone 391603 (TRBV20-1, TRBJ2-7)
YSARDRVSGMDEQYL

SEQ ID NO: 783207 - protein, 15 aa, Homo sapiens
  CDR3 for alpha chain variable domain of TCR clone 391604 (TRAV35, TRAJ58)
CAGRRQETSGARLTF

SEQ ID NO: 783208 - protein, 16 aa, Homo sapiens
  CDR3 for beta chain variable domain of TCR clone 391604 (TRBV2, TRBJ2-1)
CASSVGGSLSYNEQFF

SEQ ID NO: 783209 - protein, 17 aa, Homo sapiens
  CDR3 for alpha chain variable domain of TCR clone 391605 (TRAV3, TRAJ6)
CAVRDGPRAGGSYIPTS

SEQ ID NO: 783210 - protein, 17 aa, Homo sapiens
  CDR3 for beta chain variable domain of TCR clone 391605 (TRBV15, TRBJ1-5)
CATSRAPPGTRNQPQHF

SEQ ID NO: 783211 - protein, 13 aa, Homo sapiens
  CDR3 for alpha chain variable domain of TCR clone 391606 (TRAV17, TRAJ34)
FATDLYNTDKPIF

SEQ ID NO: 783212 - protein, 12 aa, Homo sapiens
  CDR3 for beta chain variable domain of TCR clone 391606 (TRBV11-2, TRBJ2-2)
CASSLGGGDLFF

SEQ ID NO: 783213 - protein, 12 aa, Homo sapiens
  CDR3 for alpha chain variable domain of TCR clone 391607 (TRAV38-2/DV8, TRAJ48)
CAILSGNEKLTF

SEQ ID NO: 783214 - protein, 14 aa, Homo sapiens
  CDR3 for beta chain variable domain of TCR clone 391607 (TRBV11-2, TRBJ2-3)
CASSRLARTDTQYF

SEQ ID NO: 783215 - protein, 14 aa, Homo sapiens
  CDR3 for alpha chain variable domain of TCR clone 391608 (TRAV1-2, TRAJ16)
CAVNRFSAGQKLLF

SEQ ID NO: 783216 - protein, 14 aa, Homo sapiens
  CDR3 for beta chain variable domain of TCR clone 391608 (TRBV7-2, TRBJ2-7)
CASRSQGAAYEQYF

SEQ ID NO: 783217 - protein, 14 aa, Homo sapiens
  CDR3 for alpha chain variable domain of TCR clone 391609 (TRAV8-4, TRAJ9)
CPVRINTGGFKTIF

SEQ ID NO: 783218 - protein, 15 aa, Homo sapiens
  CDR3 for beta chain variable domain of TCR clone 391609 (TRBV10-2, TRBJ2-6)
CASSEQGTGANVLSF

SEQ ID NO: 783219 - protein, 13 aa, Homo sapiens
  CDR3 for alpha chain variable domain of TCR clone 391610 (TRAV13-2, TRAJ49)
CAENTNTGNQFYF

SEQ ID NO: 783220 - protein, 16 aa, Homo sapiens
  CDR3 for beta chain variable domain of TCR clone 391610 (TRBV2, TRBJ2-1)
CASSVGGSLSYNEQFF

SEQ ID NO: 783221 - protein, 16 aa, Homo sapiens
  CDR3 for alpha chain variable domain of TCR clone 391611 (TRAV1-2, TRAJ10)
CAVRAVLTGGGNKLTF

SEQ ID NO: 783222 - protein, 12 aa, Homo sapiens
  CDR3 for beta chain variable domain of TCR clone 391611 (TRBV7-8, TRBJ2-7)
CASSLGDREQYF

SEQ ID NO: 783223 - protein, 16 aa, Homo sapiens
  CDR3 for alpha chain variable domain of TCR clone 391612 (TRAV30, TRAJ24)
CGTAIVDADSWGKFQF

SEQ ID NO: 783224 - protein, 14 aa, Homo sapiens
  CDR3 for beta chain variable domain of TCR clone 391612 (TRBV12-5, TRBJ2-5)
CASGSRPHQETQYF

SEQ ID NO: 783225 - protein, 15 aa, Homo sapiens
  CDR3 for alpha chain variable domain of TCR clone 391613 (TRAV12-3, TRAJ6)
CAMSATTGGSYIPTF

SEQ ID NO: 783226 - protein, 18 aa, Homo sapiens
  CDR3 for beta chain variable domain of TCR clone 391613 (TRBV20-1, TRBJ2-3)
CSASGLAGGPGTTDTQYF

SEQ ID NO: 783227 - protein, 12 aa, Homo sapiens
  CDR3 for alpha chain variable domain of TCR clone 391614 (TRAV9-2, TRAJ36)
CALKKGANNLFF

SEQ ID NO: 783228 - protein, 11 aa, Homo sapiens
  CDR3 for beta chain variable domain of TCR clone 391614 (TRBV11-2, TRBJ2-2)
CASSLPGELFF

SEQ ID NO: 783229 - protein, 16 aa, Homo sapiens
  CDR3 for alpha chain variable domain of TCR clone 391615 (TRAV12-3, TRAJ53)
CAMSTGSGGSNYKLTV

SEQ ID NO: 783230 - protein, 11 aa, Homo sapiens
  CDR3 for beta chain variable domain of TCR clone 391615 (TRBV29-1, TRBJ2-5)
CSEDRTGTQYF

SEQ ID NO: 783231 - protein, 19 aa, Homo sapiens
  CDR3 for alpha chain variable domain of TCR clone 391616 (TRAV26-1, TRAJ28)
CIVRVAHAYSGAGSYQLTF

SEQ ID NO: 783232 - protein, 14 aa, Homo sapiens
  CDR3 for beta chain variable domain of TCR clone 391616 (TRBV7-2, TRBJ1-1)
CASSLGGAGTEALF

SEQ ID NO: 783233 - protein, 13 aa, Homo sapiens
  CDR3 for alpha chain variable domain of TCR clone 391617 (TRAV30, TRAJ24)
CGTLTDSWGKLQF

SEQ ID NO: 783234 - protein, 15 aa, Homo sapiens
  CDR3 for beta chain variable domain of TCR clone 391617 (TRBV3-1, TRBJ2-5)
CASSANLGGPETQYF

SEQ ID NO: 783235 - protein, 12 aa, Homo sapiens
  CDR3 for alpha chain variable domain of TCR clone 391618 (TRAV13-1, TRAJ53)
AASGGINYKLTF

SEQ ID NO: 783236 - protein, 12 aa, Homo sapiens
  CDR3 for beta chain variable domain of TCR clone 391618 (TRBV18, TRBJ1-4)
CASSPSREKLFF

SEQ ID NO: 783237 - protein, 14 aa, Homo sapiens
  CDR3 for alpha chain variable domain of TCR clone 391619 (TRAV12-1, TRAJ30)
CVVNIGGSDDKIIF

SEQ ID NO: 783238 - protein, 13 aa, Homo sapiens
  CDR3 for beta chain variable domain of TCR clone 391619 (TRBV12-5, TRBJ2-1)
CASGLGRGNEQFF

SEQ ID NO: 783239 - protein, 16 aa, Homo sapiens
  CDR3 for alpha chain variable domain of TCR clone 391620 (TRAV30, TRAJ24)
CGTEIVDAESWGKFQF

SEQ ID NO: 783240 - protein, 12 aa, Homo sapiens
  CDR3 for beta chain variable domain of TCR clone 391620 (TRBV12-4, TRBJ2-7)
CASSLGGYEQYF

SEQ ID NO: 783241 - protein, 15 aa, Homo sapiens
  CDR3 for alpha chain variable domain of TCR clone 391621 (TRAV27, TRAJ50)
CAGVGRGTSYDKVIF

SEQ ID NO: 783242 - protein, 13 aa, Homo sapiens
  CDR3 for beta chain variable domain of TCR clone 391621 (TRBV7-2, TRBJ1-1)
CQSFYDLNTEAFF

SEQ ID NO: 783243 - protein, 14 aa, Homo sapiens
  CDR3 for alpha chain variable domain of TCR clone 391622 (TRAV12-2, TRAJ45)
CAVNIGGGADGLTF

SEQ ID NO: 783244 - protein, 13 aa, Homo sapiens
  CDR3 for beta chain variable domain of TCR clone 391622 (TRBV7-3, TRBJ1-1)
CASSLDWGAEAFF

SEQ ID NO: 783245 - protein, 12 aa, Homo sapiens
  CDR3 for alpha chain variable domain of TCR clone 391623 (TRAV12-3, TRAJ40)
CAMSEGTYKYIF

SEQ ID NO: 783246 - protein, 15 aa, Homo sapiens
  CDR3 for beta chain variable domain of TCR clone 391623 (TRBV7-3, TRBJ2-2)
CASSETGQGTGELFF

SEQ ID NO: 783247 - protein, 15 aa, Homo sapiens
  CDR3 for alpha chain variable domain of TCR clone 391624 (TRAV17, TRAJ22)
CATAPISGSARQLTF

SEQ ID NO: 783248 - protein, 14 aa, Homo sapiens
  CDR3 for beta chain variable domain of TCR clone 391624 (TRBV11-2, TRBJ2-7)
CASSSTGEGYEQYF

SEQ ID NO: 783249 - protein, 12 aa, Homo sapiens
  CDR3 for alpha chain variable domain of TCR clone 391625 (TRAV8-3, TRAJ34)
CAVLTNTDKRIF

SEQ ID NO: 783250 - protein, 15 aa, Homo sapiens
  CDR3 for beta chain variable domain of TCR clone 391625 (TRBV7-2, TRBJ2-7)
CASSLGIGNDYEQYF

SEQ ID NO: 783251 - protein, 13 aa, Homo sapiens
  CDR3 for alpha chain variable domain of TCR clone 391626 (TRAV1-2, TRAJ11)
CAVRREGYSTLTF

SEQ ID NO: 783252 - protein, 16 aa, Homo sapiens
  CDR3 for beta chain variable domain of TCR clone 391626 (TRBV20-1, TRBJ1-2)
CSASMGQGVANYGYTF

SEQ ID NO: 783253 - protein, 15 aa, Homo sapiens
  CDR3 for alpha chain variable domain of TCR clone 391627 (TRAV3, TRAJ22)
CAVRDRGGSARQLTL

SEQ ID NO: 783254 - protein, 17 aa, Homo sapiens
  CDR3 for beta chain variable domain of TCR clone 391627 (TRBV28, TRBJ2-5)
CASSTPEGDALQETQYF

SEQ ID NO: 783255 - protein, 12 aa, Homo sapiens
  CDR3 for alpha chain variable domain of TCR clone 391628 (TRAV13-1, TRAJ52)
HAGGTSYGKLTF

SEQ ID NO: 783256 - protein, 16 aa, Homo sapiens
  CDR3 for beta chain variable domain of TCR clone 391628 (TRBV5-1, TRBJ2-1)
CASSLSSLRESNEQFF

SEQ ID NO: 783257 - protein, 15 aa, Homo sapiens
  CDR3 for alpha chain variable domain of TCR clone 391629 (TRAV2, TRAJ9)
CAVEYRGTGGFKTIF

SEQ ID NO: 783258 - protein, 14 aa, Homo sapiens
  CDR3 for beta chain variable domain of TCR clone 391629 (TRBV4-1, TRBJ2-2)
CASSQAVNTGELFF

SEQ ID NO: 783259 - protein, 12 aa, Homo sapiens
  CDR3 for alpha chain variable domain of TCR clone 391630 (TRAV21, TRAJ49)
CAVNDGGNQFYF

SEQ ID NO: 783260 - protein, 14 aa, Homo sapiens
  CDR3 for beta chain variable domain of TCR clone 391630 (TRBV12-5, TRBJ2-5)
CASGSRTHQDTQYF

SEQ ID NO: 783261 - protein, 14 aa, Homo sapiens
  CDR3 for alpha chain variable domain of TCR clone 391631 (TRAV12-1, TRAJ23)
CVVNIPNQGGKLIF

SEQ ID NO: 783262 - protein, 11 aa, Homo sapiens
  CDR3 for beta chain variable domain of TCR clone 391631 (TRBV11-2, TRBJ2-2)
CASSLPWELFF

SEQ ID NO: 783263 - protein, 13 aa, Homo sapiens
  CDR3 for alpha chain variable domain of TCR clone 391632 (TRAV12-1, TRAJ33)
CGDAPDSNYQLIG

SEQ ID NO: 783264 - protein, 13 aa, Homo sapiens
  CDR3 for beta chain variable domain of TCR clone 391632 (TRBV7-2, TRBJ2-5)
CASSQTSVENQYF

SEQ ID NO: 783265 - protein, 13 aa, Homo sapiens
  CDR3 for alpha chain variable domain of TCR clone 391633 (TRAV12-2, TRAJ20)
CAVYPSNDYKLSF

SEQ ID NO: 783266 - protein, 15 aa, Homo sapiens
  CDR3 for beta chain variable domain of TCR clone 391633 (TRBV27, TRBJ2-5)
CASSSYPRGGETQFF

SEQ ID NO: 783267 - protein, 13 aa, Homo sapiens
  CDR3 for alpha chain variable domain of TCR clone 391634 (TRAV13-1, TRAJ5)
CAASDTGRRALTF

SEQ ID NO: 783268 - protein, 16 aa, Homo sapiens
  CDR3 for beta chain variable domain of TCR clone 391634 (TRBV2, TRBJ2-1)
CASRSPAGGKYNEQFF

SEQ ID NO: 783269 - protein, 11 aa, Homo sapiens
  CDR3 for alpha chain variable domain of TCR clone 391635 (TRAV3, TRAJ17)
CAVRARRRGAK

SEQ ID NO: 783270 - protein, 14 aa, Homo sapiens
  CDR3 for beta chain variable domain of TCR clone 391635 (TRBV4-1, TRBJ2-2)
CASSQAVNTGELFF

SEQ ID NO: 783271 - protein, 12 aa, Homo sapiens
  CDR3 for alpha chain variable domain of TCR clone 391636 (TRAV16, TRAJ10)
CSRTGGGNKLTF

SEQ ID NO: 783272 - protein, 13 aa, Homo sapiens
  CDR3 for beta chain variable domain of TCR clone 391636 (TRBV15, TRBJ2-7)
CATRTTGHYEQYF

SEQ ID NO: 783273 - protein, 10 aa, Homo sapiens
  CDR3 for alpha chain variable domain of TCR clone 391637 (TRAV30, TRAJ34)
CGTNPDKLIF

SEQ ID NO: 783274 - protein, 18 aa, Homo sapiens
  CDR3 for beta chain variable domain of TCR clone 391637 (TRBV11-2, TRBJ2-3)
CASSLGGASRGAPNTQYF

SEQ ID NO: 783275 - protein, 11 aa, Homo sapiens
  CDR3 for alpha chain variable domain of TCR clone 391638 (TRAV12-2, TRAJ39)
CAVNNMLTFGG

SEQ ID NO: 783276 - protein, 15 aa, Homo sapiens
  CDR3 for beta chain variable domain of TCR clone 391638 (TRBV3-1, TRBJ2-5)
CASSANLGGPETQYF

SEQ ID NO: 783277 - protein, 14 aa, Homo sapiens
  CDR3 for alpha chain variable domain of TCR clone 391639 (TRAV29/DV5, TRAJ44)
CAAFLVGTASKLTF

SEQ ID NO: 783278 - protein, 15 aa, Homo sapiens
  CDR3 for beta chain variable domain of TCR clone 391639 (TRBV7-3, TRBJ2-2)
CASRETGQGTGELFF

SEQ ID NO: 783279 - protein, 13 aa, Homo sapiens
  CDR3 for alpha chain variable domain of TCR clone 391640 (TRAV13-2, TRAJ8)
CPFMNTGFQKLVF

SEQ ID NO: 783280 - protein, 17 aa, Homo sapiens
  CDR3 for beta chain variable domain of TCR clone 391640 (TRBV28, TRBJ2-1)
CASSSARQALTYNEQFF

SEQ ID NO: 783281 - protein, 10 aa, Homo sapiens
  CDR3 for alpha chain variable domain of TCR clone 391641 (TRAV21, TRAJ31)
CAVDNARLMF

SEQ ID NO: 783282 - protein, 12 aa, Homo sapiens
  CDR3 for beta chain variable domain of TCR clone 391641 (TRBV29-1, TRBJ2-3)
CSVTGGADTQYF

SEQ ID NO: 783283 - protein, 14 aa, Homo sapiens
  CDR3 for alpha chain variable domain of TCR clone 391642 (TRAV35, TRAJ22)
CAGLRPGSARQLTF

SEQ ID NO: 783284 - protein, 13 aa, Homo sapiens
  CDR3 for beta chain variable domain of TCR clone 391642 (TRBV18, TRBJ1-1)
CASSGGRNTEAFF

SEQ ID NO: 783285 - protein, 14 aa, Homo sapiens
  CDR3 for alpha chain variable domain of TCR clone 391643 (TRAV12-2, TRAJ33)
CAAKRARSNYQLIW

SEQ ID NO: 783286 - protein, 12 aa, Homo sapiens
  CDR3 for beta chain variable domain of TCR clone 391643 (TRBV24-1, TRBJ2-3)
CATSDSTDTQYF

SEQ ID NO: 783287 - protein, 23 aa, Homo sapiens
  CDR3 for alpha chain variable domain of TCR clone 391644 (TRAV1-2, TRAJ30)
CAVRPTGTEITRSSLEKGHDFIF

SEQ ID NO: 783288 - protein, 13 aa, Homo sapiens
  CDR3 for beta chain variable domain of TCR clone 391644 (TRBV4-1, TRBJ2-7)
CASSQGQAYEQYF

SEQ ID NO: 783289 - protein, 14 aa, Homo sapiens
  CDR3 for alpha chain variable domain of TCR clone 391645 (TRAV12-3, TRAJ10)
SHLPLTGGGNKLTF

SEQ ID NO: 783290 - protein, 15 aa, Homo sapiens
  CDR3 for beta chain variable domain of TCR clone 391645 (TRBV4-1, TRBJ2-3)
CASGRGQGIPDTQYF

SEQ ID NO: 783291 - protein, 14 aa, Homo sapiens
  CDR3 for alpha chain variable domain of TCR clone 391646 (TRAV12-2, TRAJ44)
CAVNPAGTASKLTF

SEQ ID NO: 783292 - protein, 15 aa, Homo sapiens
  CDR3 for beta chain variable domain of TCR clone 391646 (TRBV5-1, TRBJ2-1)
CASSPPRAHYNEQFF

SEQ ID NO: 783293 - protein, 14 aa, Homo sapiens
  CDR3 for alpha chain variable domain of TCR clone 391647 (TRAV12-2, TRAJ9)
CAVNLNTGGFKTIF

SEQ ID NO: 783294 - protein, 17 aa, Homo sapiens
  CDR3 for beta chain variable domain of TCR clone 391647 (TRBV20-1, TRBJ2-2)
CSASRQVGQGYTGEMFF

SEQ ID NO: 783295 - protein, 14 aa, Homo sapiens
  CDR3 for alpha chain variable domain of TCR clone 391648 (TRAV13-1, TRAJ32)
CAARGRGATNKLIF

SEQ ID NO: 783296 - protein, 14 aa, Homo sapiens
  CDR3 for beta chain variable domain of TCR clone 391648 (TRBV2, TRBJ2-1)
CASSEARQGVSEFF

SEQ ID NO: 783297 - protein, 13 aa, Homo sapiens
  CDR3 for alpha chain variable domain of TCR clone 391649 (TRAV12-1, TRAJ21)
CGVIGDNSNKFYF

SEQ ID NO: 783298 - protein, 14 aa, Homo sapiens
  CDR3 for beta chain variable domain of TCR clone 391649 (TRBV7-3, TRBJ2-2)
CASSLYPLTGELFF

SEQ ID NO: 783299 - protein, 14 aa, Homo sapiens
  CDR3 for alpha chain variable domain of TCR clone 391650 (TRAV12-2, TRAJ45)
CALPERGGADGLTF

SEQ ID NO: 783300 - protein, 13 aa, Homo sapiens
  CDR3 for beta chain variable domain of TCR clone 391650 (TRBV7-3, TRBJ1-1)
CASSQDWGAEAFF

SEQ ID NO: 783301 - protein, 14 aa, Homo sapiens
  CDR3 for alpha chain variable domain of TCR clone 391651 (TRAV26-1, TRAJ44)
CIARTTGTASKLTF

SEQ ID NO: 783302 - protein, 13 aa, Homo sapiens
  CDR3 for beta chain variable domain of TCR clone 391651 (TRBV11-2, TRBJ2-5)
CASSFSSQETQYF

SEQ ID NO: 783303 - protein, 14 aa, Homo sapiens
  CDR3 for alpha chain variable domain of TCR clone 391652 (TRAV16, TRAJ15)
CALSGPQAGTALIF

SEQ ID NO: 783304 - protein, 13 aa, Homo sapiens
  CDR3 for beta chain variable domain of TCR clone 391652 (TRBV7-9, TRBJ1-2)
CASSLKQNYGYTF

SEQ ID NO: 783305 - protein, 23 aa, Homo sapiens
  CDR3 for alpha chain variable domain of TCR clone 391653 (TRAV12-1, TRAJ26)
CVVNSWVTMVRIFSLVPEPDCPC

SEQ ID NO: 783306 - protein, 13 aa, Homo sapiens
  CDR3 for beta chain variable domain of TCR clone 391653 (TRBV10-3, TRBJ2-7)
CASKLAVNYEQYF

SEQ ID NO: 783307 - protein, 14 aa, Homo sapiens
  CDR3 for alpha chain variable domain of TCR clone 391654 (TRAV29/DV5, TRAJ36)
CAARRTTGANNLFF

SEQ ID NO: 783308 - protein, 14 aa, Homo sapiens
  CDR3 for beta chain variable domain of TCR clone 391654 (TRBV7-2, TRBJ2-7)
CASSPKTSFYEQYF

SEQ ID NO: 783309 - protein, 14 aa, Homo sapiens
  CDR3 for alpha chain variable domain of TCR clone 391655 (TRAV27, TRAJ37)
CAGQRPSNTGKLIF

SEQ ID NO: 783310 - protein, 14 aa, Homo sapiens
  CDR3 for beta chain variable domain of TCR clone 391655 (TRBV7-3, TRBJ1-1)
CASSLKGGNTEAFF

SEQ ID NO: 783311 - protein, 15 aa, Homo sapiens
  CDR3 for alpha chain variable domain of TCR clone 391656 (TRAV27, TRAJ37)
CAGIHGSSNTGKLLF

SEQ ID NO: 783312 - protein, 13 aa, Homo sapiens
  CDR3 for beta chain variable domain of TCR clone 391656 (TRBV19, TRBJ2-1)
CASSIRSSWEQFF

SEQ ID NO: 783313 - protein, 14 aa, Homo sapiens
  CDR3 for alpha chain variable domain of TCR clone 391657 (TRAV2, TRAJ9)
CAVEDRSGGLKTIF

SEQ ID NO: 783314 - protein, 15 aa, Homo sapiens
  CDR3 for beta chain variable domain of TCR clone 391657 (TRBV19, TRBJ2-1)
CASSSPGVPLDEQFF

SEQ ID NO: 783315 - protein, 15 aa, Homo sapiens
  CDR3 for alpha chain variable domain of TCR clone 391658 (TRAV27, TRAJ38)
CAARRNAGNNRKLIW

SEQ ID NO: 783316 - protein, 16 aa, Homo sapiens
  CDR3 for beta chain variable domain of TCR clone 391658 (TRBV4-3, TRBJ2-7)
CASSPRTSGRSYEQYF

SEQ ID NO: 783317 - protein, 13 aa, Homo sapiens
  CDR3 for alpha chain variable domain of TCR clone 391659 (TRAV13-1, TRAJ43)
CAASKNNNNNMRF

SEQ ID NO: 783318 - protein, 13 aa, Homo sapiens
  CDR3 for beta chain variable domain of TCR clone 391659 (TRBV4-2, TRBJ1-1)
CASSQAGNTEAFF

SEQ ID NO: 783319 - protein, 12 aa, Homo sapiens
  CDR3 for alpha chain variable domain of TCR clone 391660 (TRAV17, TRAJ12)
CATLRSSYKLIF

SEQ ID NO: 783320 - protein, 13 aa, Homo sapiens
  CDR3 for beta chain variable domain of TCR clone 391660 (TRBV7-3, TRBJ1-1)
CASSQDWGAEAFF

SEQ ID NO: 783321 - protein, 15 aa, Homo sapiens
  CDR3 for alpha chain variable domain of TCR clone 391661 (TRAV3, TRAJ5)
CAVRDLDTGRRALTF

SEQ ID NO: 783322 - protein, 16 aa, Homo sapiens
  CDR3 for beta chain variable domain of TCR clone 391661 (TRBV7-9, TRBJ2-2)
CASSLATGVGTGELFF

SEQ ID NO: 783323 - protein, 19 aa, Homo sapiens
  CDR3 for alpha chain variable domain of TCR clone 391662 (TRAV16, )
CALSGDIRNPDPAVYQLRD

SEQ ID NO: 783324 - protein, 16 aa, Homo sapiens
  CDR3 for beta chain variable domain of TCR clone 391662 (TRBV12-5, TRBJ2-5)
CASGPRTSGNQETQYF

SEQ ID NO: 783325 - protein, 15 aa, Homo sapiens
  CDR3 for alpha chain variable domain of TCR clone 391663 (TRAV3, TRAJ45)
CAVRTPWVGADGLTF

SEQ ID NO: 783326 - protein, 16 aa, Homo sapiens
  CDR3 for beta chain variable domain of TCR clone 391663 (TRBV6-1, TRBJ2-2)
CASSFGQGANTGELFF

SEQ ID NO: 783327 - protein, 13 aa, Homo sapiens
  CDR3 for alpha chain variable domain of TCR clone 391664 (TRAV17, TRAJ21)
CATDGGNFNKFYF

SEQ ID NO: 783328 - protein, 13 aa, Homo sapiens
  CDR3 for beta chain variable domain of TCR clone 391664 (TRBV7-9, TRBJ1-2)
CASSLKQNYGYTF

SEQ ID NO: 783329 - protein, 19 aa, Homo sapiens
  CDR3 for alpha chain variable domain of TCR clone 391665 (TRAV2, TRAJ20)
ILQVREADAAVYRDCKLSF

SEQ ID NO: 783330 - protein, 13 aa, Homo sapiens
  CDR3 for beta chain variable domain of TCR clone 391665 (TRBV28, TRBJ2-2)
CASIRESTGELFF

SEQ ID NO: 783331 - protein, 16 aa, Homo sapiens
  CDR3 for alpha chain variable domain of TCR clone 391666 (TRAV17, TRAJ53)
CATDALSGGSIYKLTF

SEQ ID NO: 783332 - protein, 12 aa, Homo sapiens
  CDR3 for beta chain variable domain of TCR clone 391666 (TRBV5-1, TRBJ2-7)
CASSFRGYEQYF

SEQ ID NO: 783333 - protein, 16 aa, Homo sapiens
  CDR3 for alpha chain variable domain of TCR clone 391667 (TRAV16, TRAJ42)
SALSGYYGGSQGNLIF

SEQ ID NO: 783334 - protein, 14 aa, Homo sapiens
  CDR3 for beta chain variable domain of TCR clone 391667 (TRBV3-1, TRBJ2-5)
CASSQAVRQETQYF

SEQ ID NO: 783335 - protein, 14 aa, Homo sapiens
  CDR3 for alpha chain variable domain of TCR clone 391668 (TRAV8-4, TRAJ9)
CAVRINTGGFKTIF

SEQ ID NO: 783336 - protein, 15 aa, Homo sapiens
  CDR3 for beta chain variable domain of TCR clone 391668 (TRBV6-6, TRBJ2-5)
CASSPGGGLEETQYF

SEQ ID NO: 783337 - protein, 14 aa, Homo sapiens
  CDR3 for alpha chain variable domain of TCR clone 391669 (TRAV21, TRAJ45)
CAVSSGGGADGLTF

SEQ ID NO: 783338 - protein, 13 aa, Homo sapiens
  CDR3 for beta chain variable domain of TCR clone 391669 (TRBV20-1, TRBJ2-2)
CSASAAGTGELFF

SEQ ID NO: 783339 - protein, 16 aa, Homo sapiens
  CDR3 for alpha chain variable domain of TCR clone 391670 (TRAV27, TRAJ48)
TAAQPGDTALYLPLTF

SEQ ID NO: 783340 - protein, 13 aa, Homo sapiens
  CDR3 for beta chain variable domain of TCR clone 391670 (TRBV7-2, TRBJ2-5)
CASSQTSVETQYF

SEQ ID NO: 783341 - protein, 11 aa, Homo sapiens
  CDR3 for alpha chain variable domain of TCR clone 391671 (TRAV13-1, TRAJ40)
CAVSGTYKYTF

SEQ ID NO: 783342 - protein, 13 aa, Homo sapiens
  CDR3 for beta chain variable domain of TCR clone 391671 (TRBV19, TRBJ1-5)
CARSIGGNQPQHF

SEQ ID NO: 783343 - protein, 13 aa, Homo sapiens
  CDR3 for alpha chain variable domain of TCR clone 391672 (TRAV12-1, TRAJ7)
CVVNMRGNNRLAF

SEQ ID NO: 783344 - protein, 15 aa, Homo sapiens
  CDR3 for beta chain variable domain of TCR clone 391672 (TRBV27, TRBJ2-3)
CASSLGLAATDMQYL

SEQ ID NO: 783345 - protein, 13 aa, Homo sapiens
  CDR3 for alpha chain variable domain of TCR clone 391673 (TRAV27, TRAJ53)
CAGRGGSNYKLTF

SEQ ID NO: 783346 - protein, 13 aa, Homo sapiens
  CDR3 for beta chain variable domain of TCR clone 391673 (TRBV29-1, TRBJ1-1)
CSVESGFGTEAFF

SEQ ID NO: 783347 - protein, 17 aa, Homo sapiens
  CDR3 for alpha chain variable domain of TCR clone 391674 (TRAV13-1, TRAJ52)
CAASSGAGGTSYGKLTF

SEQ ID NO: 783348 - protein, 14 aa, Homo sapiens
  CDR3 for beta chain variable domain of TCR clone 391674 (TRBV12-4, TRBJ2-3)
CASTIAGWGDTHYF

SEQ ID NO: 783349 - protein, 14 aa, Homo sapiens
  CDR3 for alpha chain variable domain of TCR clone 391675 (TRAV3, TRAJ33)
CAVRDMDSNYQLIW

SEQ ID NO: 783350 - protein, 17 aa, Homo sapiens
  CDR3 for beta chain variable domain of TCR clone 391675 (TRBV7-3, TRBJ1-2)
CASSFPRVMMANYGYTF

SEQ ID NO: 783351 - protein, 14 aa, Homo sapiens
  CDR3 for alpha chain variable domain of TCR clone 391676 (TRAV12-3, TRAJ22)
CAMSLFGSARQLTF

SEQ ID NO: 783352 - protein, 13 aa, Homo sapiens
  CDR3 for beta chain variable domain of TCR clone 391676 (TRBV10-3, TRBJ2-7)
CASKLAVNYEQYF

SEQ ID NO: 783353 - protein, 14 aa, Homo sapiens
  CDR3 for alpha chain variable domain of TCR clone 391677 (TRAV1-2, TRAJ16)
CAVNRFSDGQKLLF

SEQ ID NO: 783354 - protein, 17 aa, Homo sapiens
  CDR3 for beta chain variable domain of TCR clone 391677 (TRBV5-1, TRBJ2-2)
CASSEKPNFANTGELFF

SEQ ID NO: 783355 - protein, 12 aa, Homo sapiens
  CDR3 for alpha chain variable domain of TCR clone 391678 (TRAV13-2, TRAJ23)
CAERHRGGKLIF

SEQ ID NO: 783356 - protein, 15 aa, Homo sapiens
  CDR3 for beta chain variable domain of TCR clone 391678 (TRBV9, TRBJ1-6)
CASSVDGTGDSPLHF

SEQ ID NO: 783357 - protein, 14 aa, Homo sapiens
  CDR3 for alpha chain variable domain of TCR clone 391679 (TRAV14/DV4, TRAJ15)
CAMRRDQAGTAVIF

SEQ ID NO: 783358 - protein, 16 aa, Homo sapiens
  CDR3 for beta chain variable domain of TCR clone 391679 (TRBV15, TRBJ2-3)
CATSRDLGIVTDTQYF

SEQ ID NO: 783359 - protein, 12 aa, Homo sapiens
  CDR3 for alpha chain variable domain of TCR clone 391680 (TRAV2, TRAJ5)
CALDTGRRALTF

SEQ ID NO: 783360 - protein, 15 aa, Homo sapiens
  CDR3 for beta chain variable domain of TCR clone 391680 (TRBV10-3, TRBJ2-1)
CASSDVQGRAYEQFF

SEQ ID NO: 783361 - protein, 12 aa, Homo sapiens
  CDR3 for alpha chain variable domain of TCR clone 391681 (TRAV8-4, TRAJ43)
CAVRVNNNDMRF

SEQ ID NO: 783362 - protein, 15 aa, Homo sapiens
  CDR3 for beta chain variable domain of TCR clone 391681 (TRBV20-1, TRBJ2-7)
CSARDPVKGEGEQYF

SEQ ID NO: 783363 - protein, 14 aa, Homo sapiens
  CDR3 for alpha chain variable domain of TCR clone 391682 (TRAV1-2, TRAJ16)
CAFNRFSDGQKLLF

SEQ ID NO: 783364 - protein, 11 aa, Homo sapiens
  CDR3 for beta chain variable domain of TCR clone 391682 (TRBV29-1, TRBJ2-5)
CSEDRTGTQYF

SEQ ID NO: 783365 - protein, 14 aa, Homo sapiens
  CDR3 for alpha chain variable domain of TCR clone 391683 (TRAV16, TRAJ4)
CALHFSGGYNKLIF

SEQ ID NO: 783366 - protein, 11 aa, Homo sapiens
  CDR3 for beta chain variable domain of TCR clone 391683 (TRBV29-1, TRBJ1-1)
CSVEVGTRTFF

SEQ ID NO: 783367 - protein, 14 aa, Homo sapiens
  CDR3 for alpha chain variable domain of TCR clone 391684 (TRAV12-3, TRAJ10)
SHLPLTGGGNKITF

SEQ ID NO: 783368 - protein, 12 aa, Homo sapiens
  CDR3 for beta chain variable domain of TCR clone 391684 (TRBV7-8, TRBJ2-7)
CASSLGDREQYF

SEQ ID NO: 783369 - protein, 13 aa, Homo sapiens
  CDR3 for alpha chain variable domain of TCR clone 391685 (TRAV2, TRAJ40)
CAVVTSGTYKYIF

SEQ ID NO: 783370 - protein, 13 aa, Homo sapiens
  CDR3 for beta chain variable domain of TCR clone 391685 (TRBV7-9, TRBJ2-5)
CASLLSGRETQYF

SEQ ID NO: 783371 - protein, 17 aa, Homo sapiens
  CDR3 for alpha chain variable domain of TCR clone 391686 (TRAV17, TRAJ7)
CATLGRLAFGKGNQWVV

SEQ ID NO: 783372 - protein, 13 aa, Homo sapiens
  CDR3 for beta chain variable domain of TCR clone 391686 (TRBV12-4, TRBJ2-7)
CASSLERVREQYF

SEQ ID NO: 783373 - protein, 13 aa, Homo sapiens
  CDR3 for alpha chain variable domain of TCR clone 391687 (TRAV13-1, TRAJ12)
CAASPDSSYKLIF

SEQ ID NO: 783374 - protein, 15 aa, Homo sapiens
  CDR3 for beta chain variable domain of TCR clone 391687 (TRBV20-1, TRBJ2-7)
CSARDRVSGMDEQYF

SEQ ID NO: 783375 - protein, 17 aa, Homo sapiens
  CDR3 for alpha chain variable domain of TCR clone 391688 (TRAV3, TRAJ9)
CAVRARNTGGFKNYLWS

SEQ ID NO: 783376 - protein, 15 aa, Homo sapiens
  CDR3 for beta chain variable domain of TCR clone 391688 (TRBV19, TRBJ2-1)
CASSTGTSSYNEQFF

SEQ ID NO: 783377 - protein, 16 aa, Homo sapiens
  CDR3 for alpha chain variable domain of TCR clone 391689 (TRAV30, TRAJ24)
CGTEIVDADSWGKFQF

SEQ ID NO: 783378 - protein, 17 aa, Homo sapiens
  CDR3 for beta chain variable domain of TCR clone 391689 (TRBV20-1, TRBJ2-1)
CSASSSGLAGSYTEQFF

SEQ ID NO: 783379 - protein, 14 aa, Homo sapiens
  CDR3 for alpha chain variable domain of TCR clone 391690 (TRAV1-2, TRAJ8)
CDVREYTGFQKLVF

SEQ ID NO: 783380 - protein, 14 aa, Homo sapiens
  CDR3 for beta chain variable domain of TCR clone 391690 (TRBV7-9, TRBJ1-1)
CASTPLQSYTEAFF

SEQ ID NO: 783381 - protein, 13 aa, Homo sapiens
  CDR3 for alpha chain variable domain of TCR clone 391691 (TRAV16, TRAJ52)
CAYPGTSYGKLTF

SEQ ID NO: 783382 - protein, 11 aa, Homo sapiens
  CDR3 for beta chain variable domain of TCR clone 391691 (TRBV7-9, TRBJ2-3)
CASSGPDTQYF

SEQ ID NO: 783383 - protein, 17 aa, Homo sapiens
  CDR3 for alpha chain variable domain of TCR clone 391692 (TRAV8-4, TRAJ45)
CAVSEGGSGGGADGRTF

SEQ ID NO: 783384 - protein, 13 aa, Homo sapiens
  CDR3 for beta chain variable domain of TCR clone 391692 (TRBV20-1, TRBJ1-1)
CSASKRGLTEAFF

SEQ ID NO: 783385 - protein, 15 aa, Homo sapiens
  CDR3 for alpha chain variable domain of TCR clone 391693 (TRAV8-4, TRAJ10)
CAVSDQMGGGNKLTF

SEQ ID NO: 783386 - protein, 16 aa, Homo sapiens
  CDR3 for beta chain variable domain of TCR clone 391693 (TRBV20-1, TRBJ2-1)
CSARAVTPPPYNEQFF

SEQ ID NO: 783387 - protein, 19 aa, Homo sapiens
  CDR3 for alpha chain variable domain of TCR clone 391694 (TRAV13-1, TRAJ52)
CSASPYQNAGGTSYGKLTF

SEQ ID NO: 783388 - protein, 14 aa, Homo sapiens
  CDR3 for beta chain variable domain of TCR clone 391694 (TRBV19, TRBJ2-7)
CASTVQDRPYEQYF

SEQ ID NO: 783389 - protein, 15 aa, Homo sapiens
  CDR3 for alpha chain variable domain of TCR clone 391695 (TRAV26-1, TRAJ44)
CIVRANTGTASKLTF

SEQ ID NO: 783390 - protein, 16 aa, Homo sapiens
  CDR3 for beta chain variable domain of TCR clone 391695 (TRBV24-1, TRBJ2-3)
CATSDPGTGATDTQYF

SEQ ID NO: 783391 - protein, 12 aa, Homo sapiens
  CDR3 for alpha chain variable domain of TCR clone 391696 (TRAV12-2, TRAJ10)
WGVTGGGNKLTF

SEQ ID NO: 783392 - protein, 14 aa, Homo sapiens
  CDR3 for beta chain variable domain of TCR clone 391696 (TRBV2, TRBJ1-5)
CASSGTGFNQPQHF

SEQ ID NO: 783393 - protein, 12 aa, Homo sapiens
  CDR3 for alpha chain variable domain of TCR clone 391697 (TRAV12-3, TRAJ17)
CAMTLTGNKLTF

SEQ ID NO: 783394 - protein, 15 aa, Homo sapiens
  CDR3 for beta chain variable domain of TCR clone 391697 (TRBV11-2, TRBJ2-2)
CASSSDRVDAGELFF

SEQ ID NO: 783395 - protein, 13 aa, Homo sapiens
  CDR3 for alpha chain variable domain of TCR clone 391698 (TRAV1-2, TRAJ9)
CAALNTGGFKTIF

SEQ ID NO: 783396 - protein, 17 aa, Homo sapiens
  CDR3 for beta chain variable domain of TCR clone 391698 (TRBV20-1, TRBJ2-1)
CSARDPLAGVWDNEQFF

SEQ ID NO: 783397 - protein, 15 aa, Homo sapiens
  CDR3 for alpha chain variable domain of TCR clone 391699 (TRAV13-1, TRAJ50)
CAAKGSATSYDKVIF

SEQ ID NO: 783398 - protein, 13 aa, Homo sapiens
  CDR3 for beta chain variable domain of TCR clone 391699 (TRBV20-1, TRBJ2-3)
CSARAGGRDTQYF

SEQ ID NO: 783399 - protein, 12 aa, Homo sapiens
  CDR3 for alpha chain variable domain of TCR clone 391700 (TRAV27, TRAJ41)
CAEGNSGYALNF

SEQ ID NO: 783400 - protein, 14 aa, Homo sapiens
  CDR3 for beta chain variable domain of TCR clone 391700 (TRBV7-2, TRBJ1-1)
CASSFLTGTTEAFF

SEQ ID NO: 783401 - protein, 15 aa, Homo sapiens
  CDR3 for alpha chain variable domain of TCR clone 391701 (TRAV26-1, TRAJ21)
CIVRVPNYNFNKFYF

SEQ ID NO: 783402 - protein, 16 aa, Homo sapiens
  CDR3 for beta chain variable domain of TCR clone 391701 (TRBV7-9, TRBJ2-3)
CASSLQGNPGTDTQDF

SEQ ID NO: 783403 - protein, 13 aa, Homo sapiens
  CDR3 for alpha chain variable domain of TCR clone 391702 (TRAV27, TRAJ23)
CAGVLPKGGKLIF

SEQ ID NO: 783404 - protein, 14 aa, Homo sapiens
  CDR3 for beta chain variable domain of TCR clone 391702 (TRBV5-8, TRBJ2-3)
CASSLSHSTDTQYF

SEQ ID NO: 783405 - protein, 14 aa, Homo sapiens
  CDR3 for alpha chain variable domain of TCR clone 391703 (TRAV12-1, TRAJ17)
CVVNFKAAGNKLTF

SEQ ID NO: 783406 - protein, 16 aa, Homo sapiens
  CDR3 for beta chain variable domain of TCR clone 391703 (TRBV20-1, TRBJ2-7)
CSASASGLAGSYEQYF

SEQ ID NO: 783407 - protein, 16 aa, Homo sapiens
  CDR3 for alpha chain variable domain of TCR clone 391704 (TRAV13-1, TRAJ17)
CAASKGVKAAGNKLTF

SEQ ID NO: 783408 - protein, 15 aa, Homo sapiens
  CDR3 for beta chain variable domain of TCR clone 391704 (TRBV20-1, TRBJ1-5)
CSASEGGYSNQPRHF

SEQ ID NO: 783409 - protein, 13 aa, Homo sapiens
  CDR3 for alpha chain variable domain of TCR clone 391705 (TRAV2, TRAJ40)
CAVVTSGTYKYIF

SEQ ID NO: 783410 - protein, 15 aa, Homo sapiens
  CDR3 for beta chain variable domain of TCR clone 391705 (TRBV4-1, TRBJ1-3)
CASSQDLRVGNTIYF

SEQ ID NO: 783411 - protein, 17 aa, Homo sapiens
  CDR3 for alpha chain variable domain of TCR clone 391706 (TRAV4, TRAJ13)
CLVGVQGSSGGYQKLTF

SEQ ID NO: 783412 - protein, 18 aa, Homo sapiens
  CDR3 for beta chain variable domain of TCR clone 391706 (TRBV15, TRBJ2-3)
CATSRDGARNWDTDTQYF

SEQ ID NO: 783413 - protein, 12 aa, Homo sapiens
  CDR3 for alpha chain variable domain of TCR clone 391707 (TRAV21, TRAJ11)
CAATSGYSTLTF

SEQ ID NO: 783414 - protein, 14 aa, Homo sapiens
  CDR3 for beta chain variable domain of TCR clone 391707 (TRBV20-1, TRBJ2-7)
YSAPELAGVGKQYF

SEQ ID NO: 783415 - protein, 17 aa, Homo sapiens
  CDR3 for alpha chain variable domain of TCR clone 391708 (TRAV3, TRAJ42)
CAARDRDYGGSQVNLIF

SEQ ID NO: 783416 - protein, 15 aa, Homo sapiens
  CDR3 for beta chain variable domain of TCR clone 391708 (TRBV6-6, TRBJ2-7)
CASSYSYGGSYEQYF

SEQ ID NO: 783417 - protein, 14 aa, Homo sapiens
  CDR3 for alpha chain variable domain of TCR clone 391709 (TRAV12-2, TRAJ17)
CAVLFKAAGNKLTF

SEQ ID NO: 783418 - protein, 19 aa, Homo sapiens
  CDR3 for beta chain variable domain of TCR clone 391709 (TRBV6-3, TRBJ1-2)
CASSYSKGRTGPPNYGYTF

SEQ ID NO: 783419 - protein, 15 aa, Homo sapiens
  CDR3 for alpha chain variable domain of TCR clone 391710 (TRAV17, TRAJ4)
CATGTWSGGYNNLIF

SEQ ID NO: 783420 - protein, 13 aa, Homo sapiens
  CDR3 for beta chain variable domain of TCR clone 391710 (TRBV6-6, TRBJ2-7)
CASSPKHLAEQYF

SEQ ID NO: 783421 - protein, 13 aa, Homo sapiens
  CDR3 for alpha chain variable domain of TCR clone 391711 (TRAV3, TRAJ4)
CAVRDGGYNKLIF

SEQ ID NO: 783422 - protein, 14 aa, Homo sapiens
  CDR3 for beta chain variable domain of TCR clone 391711 (TRBV12-4, TRBJ1-2)
CASSSAAAGSSYTF

SEQ ID NO: 783423 - protein, 15 aa, Homo sapiens
  CDR3 for alpha chain variable domain of TCR clone 391712 (TRAV21, TRAJ53)
CATLNSGGSNYKLTF

SEQ ID NO: 783424 - protein, 11 aa, Homo sapiens
  CDR3 for beta chain variable domain of TCR clone 391712 (TRBV7-9, TRBJ2-3)
CASSPTDTQYF

SEQ ID NO: 783425 - protein, 12 aa, Homo sapiens
  CDR3 for alpha chain variable domain of TCR clone 391713 (TRAV13-2, TRAJ8)
CAPWRGFQKLVF

SEQ ID NO: 783426 - protein, 15 aa, Homo sapiens
  CDR3 for beta chain variable domain of TCR clone 391713 (TRBV29-1, TRBJ2-1)
CSGRDRKSSYNEQFF

SEQ ID NO: 783427 - protein, 14 aa, Homo sapiens
  CDR3 for alpha chain variable domain of TCR clone 391714 (TRAV14/DV4, TRAJ20)
CAMRESLNDYKLSF

SEQ ID NO: 783428 - protein, 13 aa, Homo sapiens
  CDR3 for beta chain variable domain of TCR clone 391714 (TRBV12-4, TRBJ1-2)
CASSFIWLHLRFG

SEQ ID NO: 783429 - protein, 18 aa, Homo sapiens
  CDR3 for alpha chain variable domain of TCR clone 391715 (TRAV21, TRAJ52)
CAVRPSPAGGTSYGKLTF

SEQ ID NO: 783430 - protein, 13 aa, Homo sapiens
  CDR3 for beta chain variable domain of TCR clone 391715 (TRBV7-9, TRBJ2-5)
CASLPSGRETQYF

SEQ ID NO: 783431 - protein, 14 aa, Homo sapiens
  CDR3 for alpha chain variable domain of TCR clone 391716 (TRAV1-2, TRAJ16)
CAVNRFSDGQKLLL

SEQ ID NO: 783432 - protein, 13 aa, Homo sapiens
  CDR3 for beta chain variable domain of TCR clone 391716 (TRBV28, TRBJ1-1)
CASSKQGWTEAFF

SEQ ID NO: 783433 - protein, 15 aa, Homo sapiens
  CDR3 for alpha chain variable domain of TCR clone 391717 (TRAV20, TRAJ53)
CAVQASGGSNYKLTF

SEQ ID NO: 783434 - protein, 15 aa, Homo sapiens
  CDR3 for beta chain variable domain of TCR clone 391717 (TRBV18, TRBJ2-7)
CASSPTFMDSYEQYF

SEQ ID NO: 783435 - protein, 16 aa, Homo sapiens
  CDR3 for alpha chain variable domain of TCR clone 391718 (TRAV27, TRAJ13)
CAGAKSDSGGYQKVTF

SEQ ID NO: 783436 - protein, 13 aa, Homo sapiens
  CDR3 for beta chain variable domain of TCR clone 391718 (TRBV11-2, TRBJ2-1)
CASSLDLVNEQFF

SEQ ID NO: 783437 - protein, 14 aa, Homo sapiens
  CDR3 for alpha chain variable domain of TCR clone 391719 (TRAV1-2, TRAJ8)
CAVREDTGFQKLVF

SEQ ID NO: 783438 - protein, 13 aa, Homo sapiens
  CDR3 for beta chain variable domain of TCR clone 391719 (TRBV20-1, TRBJ1-1)
CSARVGGNTEAFL

SEQ ID NO: 783439 - protein, 13 aa, Homo sapiens
  CDR3 for alpha chain variable domain of TCR clone 391720 (TRAV38-2/DV8, TRAJ34)
CAYRTWNTDKLIF

SEQ ID NO: 783440 - protein, 11 aa, Homo sapiens
  CDR3 for beta chain variable domain of TCR clone 391720 (TRBV28, TRBJ2-4)
CASGERSIQYF

SEQ ID NO: 783441 - protein, 14 aa, Homo sapiens
  CDR3 for alpha chain variable domain of TCR clone 391721 (TRAV35, TRAJ33)
CAGSSQDSNYQLIW

SEQ ID NO: 783442 - protein, 15 aa, Homo sapiens
  CDR3 for beta chain variable domain of TCR clone 391721 (TRBV20-1, TRBJ2-7)
CSAQSGTSGAYEQYF

SEQ ID NO: 783443 - protein, 16 aa, Homo sapiens
  CDR3 for alpha chain variable domain of TCR clone 391722 (TRAV12-3, TRAJ53)
CAMSPGSGGSTYKLTF

SEQ ID NO: 783444 - protein, 15 aa, Homo sapiens
  CDR3 for beta chain variable domain of TCR clone 391722 (TRBV27, TRBJ2-1)
CASSNGGGSSNEQFF

SEQ ID NO: 783445 - protein, 16 aa, Homo sapiens
  CDR3 for alpha chain variable domain of TCR clone 391723 (TRAV30, TRAJ24)
CGTAIVDADSWGKFQF

SEQ ID NO: 783446 - protein, 15 aa, Homo sapiens
  CDR3 for beta chain variable domain of TCR clone 391723 (TRBV20-1, TRBJ2-7)
CSARDRVSVMDEQYF

SEQ ID NO: 783447 - protein, 14 aa, Homo sapiens
  CDR3 for alpha chain variable domain of TCR clone 391724 (TRAV1-2, TRAJ8)
CAVREDTGFKKLVF

SEQ ID NO: 783448 - protein, 16 aa, Homo sapiens
  CDR3 for beta chain variable domain of TCR clone 391724 (TRBV4-3, TRBJ2-1)
CASSPALDRGVNEQFF

SEQ ID NO: 783449 - protein, 14 aa, Homo sapiens
  CDR3 for alpha chain variable domain of TCR clone 391725 (TRAV30, TRAJ26)
CGTEFVSYGQNFVF

SEQ ID NO: 783450 - protein, 13 aa, Homo sapiens
  CDR3 for beta chain variable domain of TCR clone 391725 (TRBV19, TRBJ1-3)
CVSRLSLGNTIYF

SEQ ID NO: 783451 - protein, 18 aa, Homo sapiens
  CDR3 for alpha chain variable domain of TCR clone 391726 (TRAV21, TRAJ52)
CAVRPSPAGGTSYGKLTF

SEQ ID NO: 783452 - protein, 18 aa, Homo sapiens
  CDR3 for beta chain variable domain of TCR clone 391726 (TRBV13, TRBJ2-3)
CASSLGGDSRGAPNTQYF

SEQ ID NO: 783453 - protein, 15 aa, Homo sapiens
  CDR3 for alpha chain variable domain of TCR clone 391727 (TRAV3, TRAJ5)
CAVRALYTGRRALTF

SEQ ID NO: 783454 - protein, 16 aa, Homo sapiens
  CDR3 for beta chain variable domain of TCR clone 391727 (TRBV20-1, TRBJ1-4)
CSAPGQGLLTNEKLFF

SEQ ID NO: 783455 - protein, 13 aa, Homo sapiens
  CDR3 for alpha chain variable domain of TCR clone 391728 (TRAV9-2, TRAJ53)
WALRGGSNYKLTF

SEQ ID NO: 783456 - protein, 17 aa, Homo sapiens
  CDR3 for beta chain variable domain of TCR clone 391728 (TRBV11-2, TRBJ2-1)
CASSLYPPGVEYNEQFF

SEQ ID NO: 783457 - protein, 15 aa, Homo sapiens
  CDR3 for alpha chain variable domain of TCR clone 391729 (TRAV1-2, TRAJ28)
CAVQYSGAGSYQLTF

SEQ ID NO: 783458 - protein, 16 aa, Homo sapiens
  CDR3 for beta chain variable domain of TCR clone 391729 (TRBV28, TRBJ2-5)
CASSFSPAGGWETQYF

SEQ ID NO: 783459 - protein, 12 aa, Homo sapiens
  CDR3 for alpha chain variable domain of TCR clone 391730 (TRAV13-1, TRAJ21)
CAAKEGFNKFYF

SEQ ID NO: 783460 - protein, 11 aa, Homo sapiens
  CDR3 for beta chain variable domain of TCR clone 391730 (TRBV11-2, TRBJ2-2)
CSNLGGGELFF

SEQ ID NO: 783461 - protein, 10 aa, Homo sapiens
  CDR3 for alpha chain variable domain of TCR clone 391731 (TRAV13-1, TRAJ27)
CAPLARQINL

SEQ ID NO: 783462 - protein, 13 aa, Homo sapiens
  CDR3 for beta chain variable domain of TCR clone 391731 (TRBV28, TRBJ1-1)
CASSKQGWTEAFV

SEQ ID NO: 783463 - protein, 16 aa, Homo sapiens
  CDR3 for alpha chain variable domain of TCR clone 391732 (TRAV8-2, TRAJ45)
CVVSEGTGGGADGVTF

SEQ ID NO: 783464 - protein, 15 aa, Homo sapiens
  CDR3 for beta chain variable domain of TCR clone 391732 (TRBV7-9, TRBJ2-5)
CASSLVAGGLETQYF

SEQ ID NO: 783465 - protein, 14 aa, Homo sapiens
  CDR3 for alpha chain variable domain of TCR clone 391733 (TRAV12-3, TRAJ42)
CAMYYGGSQGNLIF

SEQ ID NO: 783466 - protein, 15 aa, Homo sapiens
  CDR3 for beta chain variable domain of TCR clone 391733 (TRBV5-7, TRBJ1-5)
CASSYGKVWDQPQHF

SEQ ID NO: 783467 - protein, 14 aa, Homo sapiens
  CDR3 for alpha chain variable domain of TCR clone 391734 (TRAV13-1, TRAJ39)
CAAPPNNAGNMLTF

SEQ ID NO: 783468 - protein, 14 aa, Homo sapiens
  CDR3 for beta chain variable domain of TCR clone 391734 (TRBV12-4, TRBJ1-1)
SASNSGDLNTEAFF

SEQ ID NO: 783469 - protein, 15 aa, Homo sapiens
  CDR3 for alpha chain variable domain of TCR clone 391735 (TRAV8-3, TRAJ45)
CASSYSGGGADGLTF

SEQ ID NO: 783470 - protein, 13 aa, Homo sapiens
  CDR3 for beta chain variable domain of TCR clone 391735 (TRBV12-4, TRBJ2-5)
CASSPGTVETQYF

SEQ ID NO: 783471 - protein, 15 aa, Homo sapiens
  CDR3 for alpha chain variable domain of TCR clone 391736 (TRAV35, TRAJ23)
CAWQRGYNQGGKLIF

SEQ ID NO: 783472 - protein, 16 aa, Homo sapiens
  CDR3 for beta chain variable domain of TCR clone 391736 (TRBV27, TRBJ2-1)
CASSSRLAGNYNEQFF

SEQ ID NO: 783473 - protein, 13 aa, Homo sapiens
  CDR3 for alpha chain variable domain of TCR clone 391737 (TRAV26-2, TRAJ43)
CILRAVNNNEMRF

SEQ ID NO: 783474 - protein, 15 aa, Homo sapiens
  CDR3 for beta chain variable domain of TCR clone 391737 (TRBV7-2, TRBJ2-1)
CASTHGTGIYNEQLF

SEQ ID NO: 783475 - protein, 15 aa, Homo sapiens
  CDR3 for alpha chain variable domain of TCR clone 391738 (TRAV25, TRAJ52)
CAGRPGGTSYGKLTF

SEQ ID NO: 783476 - protein, 12 aa, Homo sapiens
  CDR3 for beta chain variable domain of TCR clone 391738 (TRBV7-8, TRBJ2-1)
CASSALAGRVFF

SEQ ID NO: 783477 - protein, 17 aa, Homo sapiens
  CDR3 for alpha chain variable domain of TCR clone 391739 (TRAV3, TRAJ6)
CAVRDGPRAGGSYIPTF

SEQ ID NO: 783478 - protein, 13 aa, Homo sapiens
  CDR3 for beta chain variable domain of TCR clone 391739 (TRBV11-3, TRBJ2-7)
CASSLDKLYEQYF

SEQ ID NO: 783479 - protein, 14 aa, Homo sapiens
  CDR3 for alpha chain variable domain of TCR clone 391740 (TRAV1-2, TRAJ16)
FAVNRFSDGQKLLF

SEQ ID NO: 783480 - protein, 15 aa, Homo sapiens
  CDR3 for beta chain variable domain of TCR clone 391740 (TRBV9, TRBJ1-6)
CASSVAGTGDSPLRF

SEQ ID NO: 783481 - protein, 12 aa, Homo sapiens
  CDR3 for alpha chain variable domain of TCR clone 391741 (TRAV12-3, TRAJ17)
CAMTLTGNKLTF

SEQ ID NO: 783482 - protein, 16 aa, Homo sapiens
  CDR3 for beta chain variable domain of TCR clone 391741 (TRBV5-1, TRBJ2-3)
CASSLGLAVYTDTQYF

SEQ ID NO: 783483 - protein, 13 aa, Homo sapiens
  CDR3 for alpha chain variable domain of TCR clone 391742 (TRAV1-2, TRAJ9)
CAALNTGGFKTIF

SEQ ID NO: 783484 - protein, 14 aa, Homo sapiens
  CDR3 for beta chain variable domain of TCR clone 391742 (TRBV13, TRBJ2-3)
RASSSGSPTDTQYF

SEQ ID NO: 783485 - protein, 16 aa, Homo sapiens
  CDR3 for alpha chain variable domain of TCR clone 391743 (TRAV20, TRAJ22)
CAVQASSSGSARQLTF

SEQ ID NO: 783486 - protein, 13 aa, Homo sapiens
  CDR3 for beta chain variable domain of TCR clone 391743 (TRBV7-2, TRBJ1-6)
CASSVVGSSPLHF

SEQ ID NO: 783487 - protein, 17 aa, Homo sapiens
  CDR3 for alpha chain variable domain of TCR clone 391744 (TRAV13-1, TRAJ52)
CAAGRNAGGTSYGKLTF

SEQ ID NO: 783488 - protein, 14 aa, Homo sapiens
  CDR3 for beta chain variable domain of TCR clone 391744 (TRBV6-1, TRBJ1-5)
CASSAGAGSQPQHF

SEQ ID NO: 783489 - protein, 14 aa, Homo sapiens
  CDR3 for alpha chain variable domain of TCR clone 391745 (TRAV1-2, TRAJ16)
CAVNRLSDGQKLLF

SEQ ID NO: 783490 - protein, 13 aa, Homo sapiens
  CDR3 for beta chain variable domain of TCR clone 391745 (TRBV19, TRBJ1-3)
CASRLSLGNTIYF

SEQ ID NO: 783491 - protein, 14 aa, Homo sapiens
  CDR3 for alpha chain variable domain of TCR clone 391746 (TRAV21, TRAJ35)
CAVMPIGFGNVMHC

SEQ ID NO: 783492 - protein, 15 aa, Homo sapiens
  CDR3 for beta chain variable domain of TCR clone 391746 (TRBV11-3, TRBJ2-3)
CASSAGTVVTNTQYF

SEQ ID NO: 783493 - protein, 13 aa, Homo sapiens
  CDR3 for alpha chain variable domain of TCR clone 391747 (TRAV8-4, TRAJ10)
CAAFTGGGNKLPF

SEQ ID NO: 783494 - protein, 13 aa, Homo sapiens
  CDR3 for beta chain variable domain of TCR clone 391747 (TRBV7-9, TRBJ1-2)
CASSLKQNYGYTF

SEQ ID NO: 783495 - protein, 14 aa, Homo sapiens
  CDR3 for alpha chain variable domain of TCR clone 391748 (TRAV26-1, TRAJ48)
CIVRVGFGNEKLTV

SEQ ID NO: 783496 - protein, 13 aa, Homo sapiens
  CDR3 for beta chain variable domain of TCR clone 391748 (TRBV11-3, TRBJ2-3)
CASSHDTKDTQYF

SEQ ID NO: 783497 - protein, 14 aa, Homo sapiens
  CDR3 for alpha chain variable domain of TCR clone 391749 (TRAV13-1, TRAJ35)
CAASKGGFGNVLHC

SEQ ID NO: 783498 - protein, 11 aa, Homo sapiens
  CDR3 for beta chain variable domain of TCR clone 391749 (TRBV10-3, TRBJ2-7)
CAISEGLEQYF

SEQ ID NO: 783499 - protein, 11 aa, Homo sapiens
  CDR3 for alpha chain variable domain of TCR clone 391750 (TRAV13-1, TRAJ27)
CAAYNAGKSTF

SEQ ID NO: 783500 - protein, 12 aa, Homo sapiens
  CDR3 for beta chain variable domain of TCR clone 391750 (TRBV29-1, TRBJ2-7)
CSVEGDSYEQYF

SEQ ID NO: 783501 - protein, 15 aa, Homo sapiens
  CDR3 for alpha chain variable domain of TCR clone 391751 (TRAV13-1, TRAJ17)
CAASIERAAGNKLTF

SEQ ID NO: 783502 - protein, 17 aa, Homo sapiens
  CDR3 for beta chain variable domain of TCR clone 391751 (TRBV13, TRBJ2-3)
RASSLSRVAGGRNTQYF

SEQ ID NO: 783503 - protein, 16 aa, Homo sapiens
  CDR3 for alpha chain variable domain of TCR clone 391752 (TRAV12-3, TRAJ45)
CAMGWGSGRGADGLTF

SEQ ID NO: 783504 - protein, 18 aa, Homo sapiens
  CDR3 for beta chain variable domain of TCR clone 391752 (TRBV12-4, TRBJ2-2)
CASSLVAGTRGRTGELFF

SEQ ID NO: 783505 - protein, 13 aa, Homo sapiens
  CDR3 for alpha chain variable domain of TCR clone 391753 (TRAV12-3, TRAJ13)
CAMRSGGYQKVTF

SEQ ID NO: 783506 - protein, 14 aa, Homo sapiens
  CDR3 for beta chain variable domain of TCR clone 391753 (TRBV10-2, TRBJ1-5)
CASSSTGRNQPQHF

SEQ ID NO: 783507 - protein, 18 aa, Homo sapiens
  CDR3 for alpha chain variable domain of TCR clone 391754 (TRAV21, TRAJ52)
CAVRPSPAGGTSYGKLTF

SEQ ID NO: 783508 - protein, 13 aa, Homo sapiens
  CDR3 for beta chain variable domain of TCR clone 391754 (TRBV3-1, TRBJ2-5)
CASSPVLSETQYF

SEQ ID NO: 783509 - protein, 17 aa, Homo sapiens
  CDR3 for alpha chain variable domain of TCR clone 391755 (TRAV3, TRAJ6)
CAVRDGPRAGGSYIPTY

SEQ ID NO: 783510 - protein, 17 aa, Homo sapiens
  CDR3 for beta chain variable domain of TCR clone 391755 (TRBV20-1, TRBJ2-1)
CSAPPRLAGTRYNEQFF

SEQ ID NO: 783511 - protein, 11 aa, Homo sapiens
  CDR3 for alpha chain variable domain of TCR clone 391756 (TRAV3, TRAJ21)
CAVGNFNKFYF

SEQ ID NO: 783512 - protein, 13 aa, Homo sapiens
  CDR3 for beta chain variable domain of TCR clone 391756 (TRBV20-1, TRBJ2-5)
CSAREAFQETQYF

SEQ ID NO: 783513 - protein, 14 aa, Homo sapiens
  CDR3 for alpha chain variable domain of TCR clone 391757 (TRAV12-1, TRAJ17)
FVVNYKAAGNKLTF

SEQ ID NO: 783514 - protein, 17 aa, Homo sapiens
  CDR3 for beta chain variable domain of TCR clone 391757 (TRBV20-1, TRBJ2-1)
CSASSSGLAGSYNEQSF

SEQ ID NO: 783515 - protein, 12 aa, Homo sapiens
  CDR3 for alpha chain variable domain of TCR clone 391758 (TRAV25, TRAJ38)
CAGTGNNRKLTW

SEQ ID NO: 783516 - protein, 13 aa, Homo sapiens
  CDR3 for beta chain variable domain of TCR clone 391758 (TRBV4-1, TRBJ2-2)
CASSQENTGELFF

SEQ ID NO: 783517 - protein, 14 aa, Homo sapiens
  CDR3 for alpha chain variable domain of TCR clone 391759 (TRAV8-3, TRAJ40)
CAVGVISGTYKYIF

SEQ ID NO: 783518 - protein, 14 aa, Homo sapiens
  CDR3 for beta chain variable domain of TCR clone 391759 (TRBV7-2, TRBJ2-7)
CASRSQGAAYEQYF

SEQ ID NO: 783519 - protein, 19 aa, Homo sapiens
  CDR3 for alpha chain variable domain of TCR clone 391760 (TRAV17, TRAJ40)
TASLSAYPSSHSSASKYIF

SEQ ID NO: 783520 - protein, 17 aa, Homo sapiens
  CDR3 for beta chain variable domain of TCR clone 391760 (TRBV11-2, TRBJ2-4)
CASSFLALGGAGDIQYF

SEQ ID NO: 783521 - protein, 18 aa, Homo sapiens
  CDR3 for alpha chain variable domain of TCR clone 391761 (TRAV21, TRAJ52)
CAVRPSPAGGTSYGKLTF

SEQ ID NO: 783522 - protein, 17 aa, Homo sapiens
  CDR3 for beta chain variable domain of TCR clone 391761 (TRBV9, TRBJ2-1)
CASSVEPTGMARDEQFF

SEQ ID NO: 783523 - protein, 14 aa, Homo sapiens
  CDR3 for alpha chain variable domain of TCR clone 391762 (TRAV38-1, TRAJ40)
CALRPTSGTYKYIF

SEQ ID NO: 783524 - protein, 17 aa, Homo sapiens
  CDR3 for beta chain variable domain of TCR clone 391762 (TRBV19, TRBJ2-6)
CASSTGQVFSGANVLTF

SEQ ID NO: 783525 - protein, 16 aa, Homo sapiens
  CDR3 for alpha chain variable domain of TCR clone 391763 (TRAV30, TRAJ24)
CGTEMVDADSWGKFQF

SEQ ID NO: 783526 - protein, 14 aa, Homo sapiens
  CDR3 for beta chain variable domain of TCR clone 391763 (TRBV7-6, TRBJ2-3)
CASSLGTVTDTQYF

SEQ ID NO: 783527 - protein, 16 aa, Homo sapiens
  CDR3 for alpha chain variable domain of TCR clone 391764 (TRAV3, TRAJ34)
CAARARGTPTSSSLGL

SEQ ID NO: 783528 - protein, 15 aa, Homo sapiens
  CDR3 for beta chain variable domain of TCR clone 391764 (TRBV6-3, TRBJ2-7)
CASSSPGTVFYEQYF

SEQ ID NO: 783529 - protein, 15 aa, Homo sapiens
  CDR3 for alpha chain variable domain of TCR clone 391765 (TRAV3, TRAJ5)
CAVRDLDTGRRALTF

SEQ ID NO: 783530 - protein, 14 aa, Homo sapiens
  CDR3 for beta chain variable domain of TCR clone 391765 (TRBV25-1, TRBJ1-1)
CASTHLGGSTEAFF

SEQ ID NO: 783531 - protein, 15 aa, Homo sapiens
  CDR3 for alpha chain variable domain of TCR clone 391766 (TRAV8-3, TRAJ45)
CASSYSGGGADGLTF

SEQ ID NO: 783532 - protein, 14 aa, Homo sapiens
  CDR3 for beta chain variable domain of TCR clone 391766 (TRBV13, TRBJ2-5)
CASYRRLAEETQYF

SEQ ID NO: 783533 - protein, 12 aa, Homo sapiens
  CDR3 for alpha chain variable domain of TCR clone 391767 (TRAV20, TRAJ33)
CAVRGSNYQLIW

SEQ ID NO: 783534 - protein, 13 aa, Homo sapiens
  CDR3 for beta chain variable domain of TCR clone 391767 (TRBV7-3, TRBJ2-2)
CASSLNVLGELFF

SEQ ID NO: 783535 - protein, 18 aa, Homo sapiens
  CDR3 for alpha chain variable domain of TCR clone 391768 (TRAV21, TRAJ52)
CAVRPSPAGGTSYGKLSF

SEQ ID NO: 783536 - protein, 17 aa, Homo sapiens
  CDR3 for beta chain variable domain of TCR clone 391768 (TRBV13, TRBJ2-3)
CASSLSRVAGGRKTQYF

SEQ ID NO: 783537 - protein, 14 aa, Homo sapiens
  CDR3 for alpha chain variable domain of TCR clone 391769 (TRAV26-1, TRAJ38)
CIADNAGNNRKLIW

SEQ ID NO: 783538 - protein, 13 aa, Homo sapiens
  CDR3 for beta chain variable domain of TCR clone 391769 (TRBV4-1, TRBJ2-2)
CASSQENTGELFF

SEQ ID NO: 783539 - protein, 11 aa, Homo sapiens
  CDR3 for alpha chain variable domain of TCR clone 391770 (TRAV4, TRAJ23)
CLVAPGGKLFF

SEQ ID NO: 783540 - protein, 13 aa, Homo sapiens
  CDR3 for beta chain variable domain of TCR clone 391770 (TRBV7-9, TRBJ1-2)
CASSLKQNYGYTF

SEQ ID NO: 783541 - protein, 13 aa, Homo sapiens
  CDR3 for alpha chain variable domain of TCR clone 391771 (TRAV21, TRAJ44)
CAAHTGTASKLTF

SEQ ID NO: 783542 - protein, 18 aa, Homo sapiens
  CDR3 for beta chain variable domain of TCR clone 391771 (TRBV25-1, TRBJ1-2)
CASSGLQNGQGLIYGYTF

SEQ ID NO: 783543 - protein, 16 aa, Homo sapiens
  CDR3 for alpha chain variable domain of TCR clone 391772 (TRAV3, TRAJ37)
CAVRGEGSGNTGKLIF

SEQ ID NO: 783544 - protein, 13 aa, Homo sapiens
  CDR3 for beta chain variable domain of TCR clone 391772 (TRBV14, TRBJ2-7)
CASSQDRRYEQYS

SEQ ID NO: 783545 - protein, 14 aa, Homo sapiens
  CDR3 for alpha chain variable domain of TCR clone 391773 (TRAV13-1, TRAJ10)
CAAKEPGGGNKLTF

SEQ ID NO: 783546 - protein, 16 aa, Homo sapiens
  CDR3 for beta chain variable domain of TCR clone 391773 (TRBV4-2, TRBJ1-1)
CASSQAGFGMNTEAFF

SEQ ID NO: 783547 - protein, 16 aa, Homo sapiens
  CDR3 for alpha chain variable domain of TCR clone 391774 (TRAV16, TRAJ57)
CAPYLITHGGSEKLVF

SEQ ID NO: 783548 - protein, 17 aa, Homo sapiens
  CDR3 for beta chain variable domain of TCR clone 391774 (TRBV24-1, TRBJ2-4)
CATSDAEAWGVRNIQYF

SEQ ID NO: 783549 - protein, 14 aa, Homo sapiens
  CDR3 for alpha chain variable domain of TCR clone 391775 (TRAV1-2, TRAJ8)
CAVREDTGFQKLVF

SEQ ID NO: 783550 - protein, 15 aa, Homo sapiens
  CDR3 for beta chain variable domain of TCR clone 391775 (TRBV7-3, TRBJ2-7)
CASSQGGGGDLEQYF

SEQ ID NO: 783551 - protein, 12 aa, Homo sapiens
  CDR3 for alpha chain variable domain of TCR clone 391776 (TRAV12-2, TRAJ10)
WGVTGGGNELTF

SEQ ID NO: 783552 - protein, 14 aa, Homo sapiens
  CDR3 for beta chain variable domain of TCR clone 391776 (TRBV19, TRBJ2-3)
CASSAPRGTDTQYF

SEQ ID NO: 783553 - protein, 15 aa, Homo sapiens
  CDR3 for alpha chain variable domain of TCR clone 391777 (TRAV25, TRAJ43)
CAVFMRFGAGTSLTV

SEQ ID NO: 783554 - protein, 13 aa, Homo sapiens
  CDR3 for beta chain variable domain of TCR clone 391777 (TRBV7-9, TRBJ1-2)
CASSLKQNYGYTF

SEQ ID NO: 783555 - protein, 13 aa, Homo sapiens
  CDR3 for alpha chain variable domain of TCR clone 391778 (TRAV8-3, TRAJ28)
CAVGAVGSYQPTF

SEQ ID NO: 783556 - protein, 15 aa, Homo sapiens
  CDR3 for beta chain variable domain of TCR clone 391778 (TRBV7-9, TRBJ1-5)
CASSQGHQPNQHQHF

SEQ ID NO: 783557 - protein, 16 aa, Homo sapiens
  CDR3 for alpha chain variable domain of TCR clone 391779 (TRAV30, TRAJ24)
CGTEIVDADRWGKFQF

SEQ ID NO: 783558 - protein, 14 aa, Homo sapiens
  CDR3 for beta chain variable domain of TCR clone 391779 (TRBV12-5, TRBJ2-5)
CASGSRTHQEAQYF

SEQ ID NO: 783559 - protein, 16 aa, Homo sapiens
  CDR3 for alpha chain variable domain of TCR clone 391780 (TRAV3, TRAJ37)
CAVRPHGSGNTGKLIF

SEQ ID NO: 783560 - protein, 14 aa, Homo sapiens
  CDR3 for beta chain variable domain of TCR clone 391780 (TRBV25-1, TRBJ1-1)
CASSHLGGNTEAFF

SEQ ID NO: 783561 - protein, 13 aa, Homo sapiens
  CDR3 for alpha chain variable domain of TCR clone 391781 (TRAV12-3, TRAJ40)
CAMSDSGTYKYIF

SEQ ID NO: 783562 - protein, 13 aa, Homo sapiens
  CDR3 for beta chain variable domain of TCR clone 391781 (TRBV29-1, TRBJ1-1)
CSVGDSRNTEAFF

SEQ ID NO: 783563 - protein, 19 aa, Homo sapiens
  CDR3 for alpha chain variable domain of TCR clone 391782 (TRAV25, TRAJ20)
TATRTTDVGILPHDYKLSF

SEQ ID NO: 783564 - protein, 15 aa, Homo sapiens
  CDR3 for beta chain variable domain of TCR clone 391782 (TRBV3-1, TRBJ2-7)
CASSQVRQGAYEQYF

SEQ ID NO: 783565 - protein, 13 aa, Homo sapiens
  CDR3 for alpha chain variable domain of TCR clone 391783 (TRAV16, TRAJ11)
CALMNSGYSTLTF

SEQ ID NO: 783566 - protein, 16 aa, Homo sapiens
  CDR3 for beta chain variable domain of TCR clone 391783 (TRBV4-2, TRBJ2-5)
CASSQELVGSQETQYF

SEQ ID NO: 783567 - protein, 13 aa, Homo sapiens
  CDR3 for alpha chain variable domain of TCR clone 391784 (TRAV8-6, TRAJ49)
CAVITTTGNQFYF

SEQ ID NO: 783568 - protein, 17 aa, Homo sapiens
  CDR3 for beta chain variable domain of TCR clone 391784 (TRBV11-2, TRBJ2-1)
CASSLYPPGVEYNEQFF

SEQ ID NO: 783569 - protein, 16 aa, Homo sapiens
  CDR3 for alpha chain variable domain of TCR clone 391785 (TRAV14/DV4, TRAJ20)
CAMREGRSRDDYKLSF

SEQ ID NO: 783570 - protein, 17 aa, Homo sapiens
  CDR3 for beta chain variable domain of TCR clone 391785 (TRBV15, TRBJ1-1)
CATSRVGGAEGDTEAFF

SEQ ID NO: 783571 - protein, 11 aa, Homo sapiens
  CDR3 for alpha chain variable domain of TCR clone 391786 (TRAV8-3, TRAJ16)
CAVVPCQKLLF

SEQ ID NO: 783572 - protein, 12 aa, Homo sapiens
  CDR3 for beta chain variable domain of TCR clone 391786 (TRBV3-1, TRBJ1-1)
CASSQDPTEAFC

SEQ ID NO: 783573 - protein, 13 aa, Homo sapiens
  CDR3 for alpha chain variable domain of TCR clone 391787 (TRAV2, TRAJ40)
CAVVTSGTYKNIF

SEQ ID NO: 783574 - protein, 15 aa, Homo sapiens
  CDR3 for beta chain variable domain of TCR clone 391787 (TRBV11-3, TRBJ2-3)
CASLKDGREGDTQYF

SEQ ID NO: 783575 - protein, 11 aa, Homo sapiens
  CDR3 for alpha chain variable domain of TCR clone 391788 (TRAV13-1, TRAJ15)
CAATPGAALIF

SEQ ID NO: 783576 - protein, 15 aa, Homo sapiens
  CDR3 for beta chain variable domain of TCR clone 391788 (TRBV28, TRBJ2-5)
CASSPPWSYQETQYF

SEQ ID NO: 783577 - protein, 14 aa, Homo sapiens
  CDR3 for alpha chain variable domain of TCR clone 391789 (TRAV12-2, TRAJ17)
CAVLFKAAGNKLTF

SEQ ID NO: 783578 - protein, 14 aa, Homo sapiens
  CDR3 for beta chain variable domain of TCR clone 391789 (TRBV4-1, TRBJ2-2)
CAGSQAVNTGELFF

SEQ ID NO: 783579 - protein, 12 aa, Homo sapiens
  CDR3 for alpha chain variable domain of TCR clone 391790 (TRAV30, TRAJ39)
CGRGNAGNMLTF

SEQ ID NO: 783580 - protein, 15 aa, Homo sapiens
  CDR3 for beta chain variable domain of TCR clone 391790 (TRBV20-1, TRBJ2-7)
CSARVPAAYFYEQYF

SEQ ID NO: 783581 - protein, 12 aa, Homo sapiens
  CDR3 for alpha chain variable domain of TCR clone 391791 (TRAV12-1, TRAJ40)
CVVYSGTYKYIF

SEQ ID NO: 783582 - protein, 16 aa, Homo sapiens
  CDR3 for beta chain variable domain of TCR clone 391791 (TRBV6-6, TRBJ2-3)
GASSYSHAGSTDTQYF

SEQ ID NO: 783583 - protein, 14 aa, Homo sapiens
  CDR3 for alpha chain variable domain of TCR clone 391792 (TRAV1-2, TRAJ16)
CAVNRFSDGQKLLF

SEQ ID NO: 783584 - protein, 17 aa, Homo sapiens
  CDR3 for beta chain variable domain of TCR clone 391792 (TRBV7-8, TRBJ2-6)
CASSAGTGGAGANVLTV

SEQ ID NO: 783585 - protein, 13 aa, Homo sapiens
  CDR3 for alpha chain variable domain of TCR clone 391793 (TRAV26-1, TRAJ48)
CIVRVVGDETLTF

SEQ ID NO: 783586 - protein, 14 aa, Homo sapiens
  CDR3 for beta chain variable domain of TCR clone 391793 (TRBV12-5, TRBJ2-5)
CASGSRTHQETQYF

SEQ ID NO: 783587 - protein, 13 aa, Homo sapiens
  CDR3 for alpha chain variable domain of TCR clone 391794 (TRAV3, TRAJ27)
CAVRPRGAGKSTF

SEQ ID NO: 783588 - protein, 13 aa, Homo sapiens
  CDR3 for beta chain variable domain of TCR clone 391794 (TRBV7-9, TRBJ2-3)
CASSPRSTDTQYF

SEQ ID NO: 783589 - protein, 13 aa, Homo sapiens
  CDR3 for alpha chain variable domain of TCR clone 391795 (TRAV36/DV7, TRAJ54)
CAVLIQGAQKLVF

SEQ ID NO: 783590 - protein, 12 aa, Homo sapiens
  CDR3 for beta chain variable domain of TCR clone 391795 (TRBV23-1, TRBJ2-1)
MPSGRGGNEQFF

SEQ ID NO: 783591 - protein, 13 aa, Homo sapiens
  CDR3 for alpha chain variable domain of TCR clone 391796 (TRAV23/DV6, TRAJ22)
CAPYSGSAMHLTF

SEQ ID NO: 783592 - protein, 15 aa, Homo sapiens
  CDR3 for beta chain variable domain of TCR clone 391796 (TRBV11-2, TRBJ1-6)
CASSLDPWAVSPLHF

SEQ ID NO: 783593 - protein, 15 aa, Homo sapiens
  CDR3 for alpha chain variable domain of TCR clone 391797 (TRAV8-3, TRAJ40)
CAAPSLGSGTYRYIF

SEQ ID NO: 783594 - protein, 12 aa, Homo sapiens
  CDR3 for beta chain variable domain of TCR clone 391797 (TRBV7-3, TRBJ2-1)
CASSFINNEQFF

SEQ ID NO: 783595 - protein, 15 aa, Homo sapiens
  CDR3 for alpha chain variable domain of TCR clone 391798 (TRAV2, TRAJ9)
CAVEDRGTGGFKTIF

SEQ ID NO: 783596 - protein, 11 aa, Homo sapiens
  CDR3 for beta chain variable domain of TCR clone 391798 (TRBV20-1, TRBJ2-1)
CSLSSGSEQFF

SEQ ID NO: 783597 - protein, 16 aa, Homo sapiens
  CDR3 for alpha chain variable domain of TCR clone 391799 (TRAV23/DV6, TRAJ9)
CAASIGGNTGGFKTVF

SEQ ID NO: 783598 - protein, 18 aa, Homo sapiens
  CDR3 for beta chain variable domain of TCR clone 391799 (TRBV7-9, TRBJ2-7)
CASSLTTSGSRTWYEQYF

SEQ ID NO: 783599 - protein, 16 aa, Homo sapiens
  CDR3 for alpha chain variable domain of TCR clone 391800 (TRAV30, TRAJ57)
CGTGWAPQGGSAKLVF

SEQ ID NO: 783600 - protein, 14 aa, Homo sapiens
  CDR3 for beta chain variable domain of TCR clone 391800 (TRBV18, TRBJ1-1)
CASSPGFQGVEAFF

SEQ ID NO: 783601 - protein, 15 aa, Homo sapiens
  CDR3 for alpha chain variable domain of TCR clone 391801 (TRAV8-2, TRAJ16)
CVVSDGFSDGQKLLF

SEQ ID NO: 783602 - protein, 14 aa, Homo sapiens
  CDR3 for beta chain variable domain of TCR clone 391801 (TRBV7-3, TRBJ1-1)
CASSLGTGYTGAFF

SEQ ID NO: 783603 - protein, 13 aa, Homo sapiens
  CDR3 for alpha chain variable domain of TCR clone 391802 (TRAV8-6, TRAJ16)
CAVSLPDGQKLLF

SEQ ID NO: 783604 - protein, 16 aa, Homo sapiens
  CDR3 for beta chain variable domain of TCR clone 391802 (TRBV5-7, TRBJ2-3)
CASSSLGGAITDKQYF

SEQ ID NO: 783605 - protein, 17 aa, Homo sapiens
  CDR3 for alpha chain variable domain of TCR clone 391803 (TRAV3, TRAJ38)
CAVRDCLNAGNNRKLIW

SEQ ID NO: 783606 - protein, 14 aa, Homo sapiens
  CDR3 for beta chain variable domain of TCR clone 391803 (TRBV4-1, TRBJ1-1)
CASSRSGQSFEAFF

SEQ ID NO: 783607 - protein, 12 aa, Homo sapiens
  CDR3 for alpha chain variable domain of TCR clone 391804 (TRAV12-1, TRAJ40)
CVFYSGTYKYIF

SEQ ID NO: 783608 - protein, 12 aa, Homo sapiens
  CDR3 for beta chain variable domain of TCR clone 391804 (TRBV7-3, TRBJ2-1)
CASSFINNEQFV

SEQ ID NO: 783609 - protein, 15 aa, Homo sapiens
  CDR3 for alpha chain variable domain of TCR clone 391805 (TRAV26-1, TRAJ15)
CIVRAANQAGTALIF

SEQ ID NO: 783610 - protein, 14 aa, Homo sapiens
  CDR3 for beta chain variable domain of TCR clone 391805 (TRBV12-5, TRBJ2-5)
CASGSRTHQETQYF

SEQ ID NO: 783611 - protein, 15 aa, Homo sapiens
  CDR3 for alpha chain variable domain of TCR clone 391806 (TRAV2, TRAJ11)
CAVGGRNSGYSTLAF

SEQ ID NO: 783612 - protein, 12 aa, Homo sapiens
  CDR3 for beta chain variable domain of TCR clone 391806 (TRBV5-4, TRBJ2-7)
CASSLEAYEQYF

SEQ ID NO: 783613 - protein, 11 aa, Homo sapiens
  CDR3 for alpha chain variable domain of TCR clone 391807 (TRAV13-1, TRAJ39)
CASHAGNMLTF

SEQ ID NO: 783614 - protein, 14 aa, Homo sapiens
  CDR3 for beta chain variable domain of TCR clone 391807 (TRBV11-2, TRBJ1-5)
CASSLDTGRQPQHF

SEQ ID NO: 783615 - protein, 14 aa, Homo sapiens
  CDR3 for alpha chain variable domain of TCR clone 391808 (TRAV12-2, TRAJ52)
CAVPGGTRYGKLTL

SEQ ID NO: 783616 - protein, 12 aa, Homo sapiens
  CDR3 for beta chain variable domain of TCR clone 391808 (TRBV18, TRBJ2-1)
CASSPGTSEGFF

SEQ ID NO: 783617 - protein, 15 aa, Homo sapiens
  CDR3 for alpha chain variable domain of TCR clone 391809 (TRAV35, TRAJ40)
CAGQLWDSGTYKYIF

SEQ ID NO: 783618 - protein, 14 aa, Homo sapiens
  CDR3 for beta chain variable domain of TCR clone 391809 (TRBV11-2, TRBJ2-5)
CASSRTGGIETQYF

SEQ ID NO: 783619 - protein, 17 aa, Homo sapiens
  CDR3 for alpha chain variable domain of TCR clone 391810 (TRAV3, TRAJ6)
CAVRDGPRAGGSYIPTF

SEQ ID NO: 783620 - protein, 17 aa, Homo sapiens
  CDR3 for beta chain variable domain of TCR clone 391810 (TRBV25-1, TRBJ1-1)
CASSEYSRTGSNTEAFF

SEQ ID NO: 783621 - protein, 14 aa, Homo sapiens
  CDR3 for alpha chain variable domain of TCR clone 391811 (TRAV16, TRAJ33)
CALSAMDSNYQLIW

SEQ ID NO: 783622 - protein, 16 aa, Homo sapiens
  CDR3 for beta chain variable domain of TCR clone 391811 (TRBV6-4, TRBJ1-2)
CASSEAVGDPNYGYTF

SEQ ID NO: 783623 - protein, 14 aa, Homo sapiens
  CDR3 for alpha chain variable domain of TCR clone 391812 (TRAV1-2, TRAJ8)
CAVREDTGFQKLVF

SEQ ID NO: 783624 - protein, 14 aa, Homo sapiens
  CDR3 for beta chain variable domain of TCR clone 391812 (TRBV5-4, TRBJ1-1)
CASSLDSGRDEAFF

SEQ ID NO: 783625 - protein, 16 aa, Homo sapiens
  CDR3 for alpha chain variable domain of TCR clone 391813 (TRAV30, TRAJ24)
CGTEIVDADSWGKFQF

SEQ ID NO: 783626 - protein, 14 aa, Homo sapiens
  CDR3 for beta chain variable domain of TCR clone 391813 (TRBV12-5, TRBJ2-5)
CASGSRTHQENPYF

SEQ ID NO: 783627 - protein, 13 aa, Homo sapiens
  CDR3 for alpha chain variable domain of TCR clone 391814 (TRAV26-1, TRAJ54)
CIVRVKGAQKLYL

SEQ ID NO: 783628 - protein, 15 aa, Homo sapiens
  CDR3 for beta chain variable domain of TCR clone 391814 (TRBV20-1, TRBJ2-1)
CSAQPGGGPYNEQFF

SEQ ID NO: 783629 - protein, 14 aa, Homo sapiens
  CDR3 for alpha chain variable domain of TCR clone 391815 (TRAV12-2, TRAJ45)
CAVNKGGGADGLTF

SEQ ID NO: 783630 - protein, 15 aa, Homo sapiens
  CDR3 for beta chain variable domain of TCR clone 391815 (TRBV9, TRBJ1-6)
CASGVAGTGDSPLHF

SEQ ID NO: 783631 - protein, 14 aa, Homo sapiens
  CDR3 for alpha chain variable domain of TCR clone 391816 (TRAV12-2, TRAJ45)
CAVNIGGGADGFTF

SEQ ID NO: 783632 - protein, 17 aa, Homo sapiens
  CDR3 for beta chain variable domain of TCR clone 391816 (TRBV20-1, TRBJ2-2)
CSASGSGQGGLTGELFF

SEQ ID NO: 783633 - protein, 14 aa, Homo sapiens
  CDR3 for alpha chain variable domain of TCR clone 391817 (TRAV38-1, TRAJ40)
CALRPTSGTYKYIF

SEQ ID NO: 783634 - protein, 14 aa, Homo sapiens
  CDR3 for beta chain variable domain of TCR clone 391817 (TRBV19, TRBJ2-7)
CASSMGQGAIEQYF

SEQ ID NO: 783635 - protein, 14 aa, Homo sapiens
  CDR3 for alpha chain variable domain of TCR clone 391818 (TRAV13-1, TRAJ40)
CAASTTSGTYKYIF

SEQ ID NO: 783636 - protein, 15 aa, Homo sapiens
  CDR3 for beta chain variable domain of TCR clone 391818 (TRBV7-3, TRBJ2-1)
CASSPTGGGEVEQFF

SEQ ID NO: 783637 - protein, 14 aa, Homo sapiens
  CDR3 for alpha chain variable domain of TCR clone 391819 (TRAV9-2, TRAJ39)
CALYTYNAGNMLTF

SEQ ID NO: 783638 - protein, 15 aa, Homo sapiens
  CDR3 for beta chain variable domain of TCR clone 391819 (TRBV20-1, TRBJ2-7)
CSARDRVSGMDEQYF

SEQ ID NO: 783639 - protein, 14 aa, Homo sapiens
  CDR3 for alpha chain variable domain of TCR clone 391820 (TRAV20, TRAJ32)
CCGRHGGATNKLIF

SEQ ID NO: 783640 - protein, 16 aa, Homo sapiens
  CDR3 for beta chain variable domain of TCR clone 391820 (TRBV19, TRBJ2-2)
CASRSPGTGATGELFF

SEQ ID NO: 783641 - protein, 16 aa, Homo sapiens
  CDR3 for alpha chain variable domain of TCR clone 391821 (TRAV27, TRAJ13)
CAGAKSDSGGYQKVTF

SEQ ID NO: 783642 - protein, 13 aa, Homo sapiens
  CDR3 for beta chain variable domain of TCR clone 391821 (TRBV2, TRBJ1-1)
CASRWTVNTEAFF

SEQ ID NO: 783643 - protein, 16 aa, Homo sapiens
  CDR3 for alpha chain variable domain of TCR clone 391822 (TRAV26-1, TRAJ50)
CIVRVEAGTSYDKVIF

SEQ ID NO: 783644 - protein, 13 aa, Homo sapiens
  CDR3 for beta chain variable domain of TCR clone 391822 (TRBV25-1, TRBJ1-2)
CASSEKMGRGYTF

SEQ ID NO: 783645 - protein, 17 aa, Homo sapiens
  CDR3 for alpha chain variable domain of TCR clone 391823 (TRAV3, TRAJ12)
CAVRDGGRMDSSYKLIF

SEQ ID NO: 783646 - protein, 15 aa, Homo sapiens
  CDR3 for beta chain variable domain of TCR clone 391823 (TRBV7-9, TRBJ2-2)
CASGPLDTFPGELFF

SEQ ID NO: 783647 - protein, 16 aa, Homo sapiens
  CDR3 for alpha chain variable domain of TCR clone 391824 (TRAV38-1, TRAJ32)
CAFMKGGGGATNKLIC

SEQ ID NO: 783648 - protein, 13 aa, Homo sapiens
  CDR3 for beta chain variable domain of TCR clone 391824 (TRBV20-1, TRBJ2-5)
CSAREAFQETQYF

SEQ ID NO: 783649 - protein, 14 aa, Homo sapiens
  CDR3 for alpha chain variable domain of TCR clone 391825 (TRAV12-2, TRAJ13)
CAVKKTGGYQKVTF

SEQ ID NO: 783650 - protein, 14 aa, Homo sapiens
  CDR3 for beta chain variable domain of TCR clone 391825 (TRBV12-5, TRBJ2-5)
CASGSLTHQETQYF

SEQ ID NO: 783651 - protein, 14 aa, Homo sapiens
  CDR3 for alpha chain variable domain of TCR clone 391826 (TRAV12-3, TRAJ13)
CAMRNSGCYQKVTC

SEQ ID NO: 783652 - protein, 14 aa, Homo sapiens
  CDR3 for beta chain variable domain of TCR clone 391826 (TRBV4-1, TRBJ1-6)
CASSPGSDSSPLHF

SEQ ID NO: 783653 - protein, 14 aa, Homo sapiens
  CDR3 for alpha chain variable domain of TCR clone 391827 (TRAV2, TRAJ29)
CAVEPLSGNTPLVF

SEQ ID NO: 783654 - protein, 14 aa, Homo sapiens
  CDR3 for beta chain variable domain of TCR clone 391827 (TRBV7-9, TRBJ1-2)
CASSRQGANYGYTF

SEQ ID NO: 783655 - protein, 13 aa, Homo sapiens
  CDR3 for alpha chain variable domain of TCR clone 391828 (TRAV3, TRAJ21)
CAVREPNFNKFYF

SEQ ID NO: 783656 - protein, 20 aa, Homo sapiens
  CDR3 for beta chain variable domain of TCR clone 391828 (TRBV7-8, TRBJ2-2)
CASSHLFPGPTIHITGELFF

SEQ ID NO: 783657 - protein, 11 aa, Homo sapiens
  CDR3 for alpha chain variable domain of TCR clone 391829 (TRAV21, TRAJ41)
CAVRSGYAVNF

SEQ ID NO: 783658 - protein, 13 aa, Homo sapiens
  CDR3 for beta chain variable domain of TCR clone 391829 (TRBV7-9, TRBJ1-2)
CASSLKQNYGYTF

SEQ ID NO: 783659 - protein, 15 aa, Homo sapiens
  CDR3 for alpha chain variable domain of TCR clone 391830 (TRAV12-3, TRAJ49)
CAMAATPNTGNQFYF

SEQ ID NO: 783660 - protein, 14 aa, Homo sapiens
  CDR3 for beta chain variable domain of TCR clone 391830 (TRBV7-8, TRBJ2-3)
CASSLEAGTDTQYF

SEQ ID NO: 783661 - protein, 14 aa, Homo sapiens
  CDR3 for alpha chain variable domain of TCR clone 391831 (TRAV1-2, TRAJ16)
WAVNRLSDGQKLLF

SEQ ID NO: 783662 - protein, 16 aa, Homo sapiens
  CDR3 for beta chain variable domain of TCR clone 391831 (TRBV20-1, TRBJ1-4)
CSAPGQGLLTNEKLFF

SEQ ID NO: 783663 - protein, 14 aa, Homo sapiens
  CDR3 for alpha chain variable domain of TCR clone 391832 (TRAV12-2, TRAJ36)
CAVKISTGANNLFF

SEQ ID NO: 783664 - protein, 14 aa, Homo sapiens
  CDR3 for beta chain variable domain of TCR clone 391832 (TRBV25-1, TRBJ1-2)
CANSDTTGVVGYTF

SEQ ID NO: 783665 - protein, 12 aa, Homo sapiens
  CDR3 for alpha chain variable domain of TCR clone 391833 (TRAV30, TRAJ43)
CGSEERGNDMRF

SEQ ID NO: 783666 - protein, 14 aa, Homo sapiens
  CDR3 for beta chain variable domain of TCR clone 391833 (TRBV12-5, TRBJ2-5)
CASGSRTHQETQYF

SEQ ID NO: 783667 - protein, 13 aa, Homo sapiens
  CDR3 for alpha chain variable domain of TCR clone 391834 (TRAV8-6, TRAJ33)
CAVSEGSNYQLIW

SEQ ID NO: 783668 - protein, 14 aa, Homo sapiens
  CDR3 for beta chain variable domain of TCR clone 391834 (TRBV12-5, TRBJ2-5)
CASGSRTHQETQYF

SEQ ID NO: 783669 - protein, 14 aa, Homo sapiens
  CDR3 for alpha chain variable domain of TCR clone 391835 (TRAV26-1, TRAJ54)
CIVSGFHGAQKLVF

SEQ ID NO: 783670 - protein, 16 aa, Homo sapiens
  CDR3 for beta chain variable domain of TCR clone 391835 (TRBV15, TRBJ2-6)
CATSVNGGFLANVLTF

SEQ ID NO: 783671 - protein, 16 aa, Homo sapiens
  CDR3 for alpha chain variable domain of TCR clone 391836 (TRAV3, TRAJ37)
CAVRPHGSGNTGKLIF

SEQ ID NO: 783672 - protein, 16 aa, Homo sapiens
  CDR3 for beta chain variable domain of TCR clone 391836 (TRBV9, TRBJ1-2)
CVSSVEEKVSPYGYTF

SEQ ID NO: 783673 - protein, 16 aa, Homo sapiens
  CDR3 for alpha chain variable domain of TCR clone 391837 (TRAV30, TRAJ24)
CGTEIVDADSWGKFQF

SEQ ID NO: 783674 - protein, 14 aa, Homo sapiens
  CDR3 for beta chain variable domain of TCR clone 391837 (TRBV12-5, TRBJ2-5)
CASGSRTQQETQSF

SEQ ID NO: 783675 - protein, 14 aa, Homo sapiens
  CDR3 for alpha chain variable domain of TCR clone 391838 (TRAV3, TRAJ40)
CAVRDRRGTYKYIF

SEQ ID NO: 783676 - protein, 17 aa, Homo sapiens
  CDR3 for beta chain variable domain of TCR clone 391838 (TRBV4-1, TRBJ2-7)
CASSRDPVGVRGGEQYF

SEQ ID NO: 783677 - protein, 14 aa, Homo sapiens
  CDR3 for alpha chain variable domain of TCR clone 391839 (TRAV27, TRAJ17)
CRSTIRAAGNKLTF

SEQ ID NO: 783678 - protein, 16 aa, Homo sapiens
  CDR3 for beta chain variable domain of TCR clone 391839 (TRBV5-7, TRBJ2-5)
CASTLAPAGGRETHYF

SEQ ID NO: 783679 - protein, 14 aa, Homo sapiens
  CDR3 for alpha chain variable domain of TCR clone 391840 (TRAV13-1, TRAJ48)
CAASRSFGNEKLTF

SEQ ID NO: 783680 - protein, 18 aa, Homo sapiens
  CDR3 for beta chain variable domain of TCR clone 391840 (TRBV12-4, TRBJ2-2)
CASSLVAGTRGRTGELFF

SEQ ID NO: 783681 - protein, 15 aa, Homo sapiens
  CDR3 for alpha chain variable domain of TCR clone 391841 (TRAV21, TRAJ53)
CATLNSGGSKYKLTF

SEQ ID NO: 783682 - protein, 16 aa, Homo sapiens
  CDR3 for beta chain variable domain of TCR clone 391841 (TRBV13, TRBJ2-2)
CASSPRTGEHTGELFF

SEQ ID NO: 783683 - protein, 14 aa, Homo sapiens
  CDR3 for alpha chain variable domain of TCR clone 391842 (TRAV26-1, TRAJ21)
CIVIVVYNFNKFYF

SEQ ID NO: 783684 - protein, 17 aa, Homo sapiens
  CDR3 for beta chain variable domain of TCR clone 391842 (TRBV11-2, TRBJ2-1)
CASSLYPPGVEYNEQFF

SEQ ID NO: 783685 - protein, 13 aa, Homo sapiens
  CDR3 for alpha chain variable domain of TCR clone 391843 (TRAV12-1, TRAJ38)
CVVPAGNNRKLIW

SEQ ID NO: 783686 - protein, 13 aa, Homo sapiens
  CDR3 for beta chain variable domain of TCR clone 391843 (TRBV6-4, TRBJ1-5)
CASSADLNQPQHF

SEQ ID NO: 783687 - protein, 11 aa, Homo sapiens
  CDR3 for alpha chain variable domain of TCR clone 391844 (TRAV21, TRAJ11)
CAVNGYSTLTF

SEQ ID NO: 783688 - protein, 16 aa, Homo sapiens
  CDR3 for beta chain variable domain of TCR clone 391844 (TRBV28, TRBJ2-6)
CASSNRRGSGANVLTF

SEQ ID NO: 783689 - protein, 13 aa, Homo sapiens
  CDR3 for alpha chain variable domain of TCR clone 391845 (TRAV17, TRAJ9)
CATDYTGGLKTIF

SEQ ID NO: 783690 - protein, 16 aa, Homo sapiens
  CDR3 for beta chain variable domain of TCR clone 391845 (TRBV7-7, TRBJ2-1)
CASSLASATSYNEQFF

SEQ ID NO: 783691 - protein, 14 aa, Homo sapiens
  CDR3 for alpha chain variable domain of TCR clone 391846 (TRAV23/DV6, TRAJ22)
CAASVSGSARQLTF

SEQ ID NO: 783692 - protein, 14 aa, Homo sapiens
  CDR3 for beta chain variable domain of TCR clone 391846 (TRBV2, TRBJ2-5)
CASSEVLAQETQYF

SEQ ID NO: 783693 - protein, 14 aa, Homo sapiens
  CDR3 for alpha chain variable domain of TCR clone 391847 (TRAV12-3, TRAJ10)
SHLPLTVGGNKLTF

SEQ ID NO: 783694 - protein, 16 aa, Homo sapiens
  CDR3 for beta chain variable domain of TCR clone 391847 (TRBV6-1, TRBJ1-3)
CASVQGGVETPYILER

SEQ ID NO: 783695 - protein, 14 aa, Homo sapiens
  CDR3 for alpha chain variable domain of TCR clone 391848 (TRAV8-2, TRAJ4)
CVVSPSGGYNKLIF

SEQ ID NO: 783696 - protein, 13 aa, Homo sapiens
  CDR3 for beta chain variable domain of TCR clone 391848 (TRBV15, TRBJ1-6)
CATSGGLNSPLHF

SEQ ID NO: 783697 - protein, 19 aa, Homo sapiens
  CDR3 for alpha chain variable domain of TCR clone 391849 (TRAV2, TRAJ20)
ILQVREADAAVYRDCKLNF

SEQ ID NO: 783698 - protein, 13 aa, Homo sapiens
  CDR3 for beta chain variable domain of TCR clone 391849 (TRBV15, TRBJ1-6)
CATSGGLNSPLHF

SEQ ID NO: 783699 - protein, 16 aa, Homo sapiens
  CDR3 for alpha chain variable domain of TCR clone 391850 (TRAV3, TRAJ37)
CAVRGKGSGNTGKLIL

SEQ ID NO: 783700 - protein, 15 aa, Homo sapiens
  CDR3 for beta chain variable domain of TCR clone 391850 (TRBV7-9, TRBJ1-6)
CASSSPGRGNSPLHF

SEQ ID NO: 783701 - protein, 11 aa, Homo sapiens
  CDR3 for alpha chain variable domain of TCR clone 391851 (TRAV2, TRAJ13)
CASGGYRKVTF

SEQ ID NO: 783702 - protein, 15 aa, Homo sapiens
  CDR3 for beta chain variable domain of TCR clone 391851 (TRBV18, TRBJ2-1)
CASSPPSASYNEQFF

SEQ ID NO: 783703 - protein, 15 aa, Homo sapiens
  CDR3 for alpha chain variable domain of TCR clone 391852 (TRAV8-3, TRAJ45)
CASSYSGGGADGLTF

SEQ ID NO: 783704 - protein, 18 aa, Homo sapiens
  CDR3 for beta chain variable domain of TCR clone 391852 (TRBV18, TRBJ1-3)
CASSSRGGAGPSGNTIYF

SEQ ID NO: 783705 - protein, 17 aa, Homo sapiens
  CDR3 for alpha chain variable domain of TCR clone 391853 (TRAV3, TRAJ6)
CAVRDGPRAGGSYIPTF

SEQ ID NO: 783706 - protein, 16 aa, Homo sapiens
  CDR3 for beta chain variable domain of TCR clone 391853 (TRBV20-1, TRBJ2-1)
CSARDFSGRIGDEQFF

SEQ ID NO: 783707 - protein, 14 aa, Homo sapiens
  CDR3 for alpha chain variable domain of TCR clone 391854 (TRAV8-3, TRAJ23)
CAVIIYNQGGKLIF

SEQ ID NO: 783708 - protein, 15 aa, Homo sapiens
  CDR3 for beta chain variable domain of TCR clone 391854 (TRBV4-1, TRBJ1-2)
CASSQGQGAAYGYTF

SEQ ID NO: 783709 - protein, 16 aa, Homo sapiens
  CDR3 for alpha chain variable domain of TCR clone 391855 (TRAV3, TRAJ4)
CALRPSPSGGYNKLIF

SEQ ID NO: 783710 - protein, 12 aa, Homo sapiens
  CDR3 for beta chain variable domain of TCR clone 391855 (TRBV7-9, TRBJ2-7)
CASSQGVYEQYF

SEQ ID NO: 783711 - protein, 13 aa, Homo sapiens
  CDR3 for alpha chain variable domain of TCR clone 391856 (TRAV2, TRAJ34)
CAVEGWNTDKLIF

SEQ ID NO: 783712 - protein, 16 aa, Homo sapiens
  CDR3 for beta chain variable domain of TCR clone 391856 (TRBV12-5, TRBJ2-5)
CASGPRTSGNQETQYF

SEQ ID NO: 783713 - protein, 15 aa, Homo sapiens
  CDR3 for alpha chain variable domain of TCR clone 391857 (TRAV12-3, TRAJ27)
CAMRAYNTNAGKSTF

SEQ ID NO: 783714 - protein, 16 aa, Homo sapiens
  CDR3 for beta chain variable domain of TCR clone 391857 (TRBV19, TRBJ2-2)
CASRSPGTGATGELFF

SEQ ID NO: 783715 - protein, 14 aa, Homo sapiens
  CDR3 for alpha chain variable domain of TCR clone 391858 (TRAV8-4, TRAJ54)
CAVNSIQGAQKLVF

SEQ ID NO: 783716 - protein, 13 aa, Homo sapiens
  CDR3 for beta chain variable domain of TCR clone 391858 (TRBV13, TRBJ2-1)
CASILGGRGEQFF

SEQ ID NO: 783717 - protein, 17 aa, Homo sapiens
  CDR3 for alpha chain variable domain of TCR clone 391859 (TRAV26-1, TRAJ53)
CIVRVDDSGGSNYKLTF

SEQ ID NO: 783718 - protein, 14 aa, Homo sapiens
  CDR3 for beta chain variable domain of TCR clone 391859 (TRBV11-2, TRBJ1-4)
CASSLGGLGEKLFF

SEQ ID NO: 783719 - protein, 13 aa, Homo sapiens
  CDR3 for alpha chain variable domain of TCR clone 391860 (TRAV8-1, TRAJ8)
CAVNRTGFQKLVC

SEQ ID NO: 783720 - protein, 15 aa, Homo sapiens
  CDR3 for beta chain variable domain of TCR clone 391860 (TRBV12-5, TRBJ2-5)
CASGSGLAGRETQYF

SEQ ID NO: 783721 - protein, 17 aa, Homo sapiens
  CDR3 for alpha chain variable domain of TCR clone 391861 (TRAV3, TRAJ42)
CAVRDRDYGGSQGNLIF

SEQ ID NO: 783722 - protein, 14 aa, Homo sapiens
  CDR3 for beta chain variable domain of TCR clone 391861 (TRBV19, TRBJ2-2)
CTSSGQGIAGELFC

SEQ ID NO: 783723 - protein, 14 aa, Homo sapiens
  CDR3 for alpha chain variable domain of TCR clone 391862 (TRAV26-1, TRAJ45)
CIEVTGGGADGLTF

SEQ ID NO: 783724 - protein, 13 aa, Homo sapiens
  CDR3 for beta chain variable domain of TCR clone 391862 (TRBV7-6, TRBJ1-2)
CGSSLVADYGYTF

SEQ ID NO: 783725 - protein, 16 aa, Homo sapiens
  CDR3 for alpha chain variable domain of TCR clone 391863 (TRAV30, TRAJ24)
CGTEIVDADSWGKFQF

SEQ ID NO: 783726 - protein, 13 aa, Homo sapiens
  CDR3 for beta chain variable domain of TCR clone 391863 (TRBV18, TRBJ1-2)
CASSASAMEGYTF

SEQ ID NO: 783727 - protein, 13 aa, Homo sapiens
  CDR3 for alpha chain variable domain of TCR clone 391864 (TRAV8-3, TRAJ44)
CAVVPGTASKLTF

SEQ ID NO: 783728 - protein, 15 aa, Homo sapiens
  CDR3 for beta chain variable domain of TCR clone 391864 (TRBV11-3, TRBJ1-3)
RASSLFGPSGNTIYF

SEQ ID NO: 783729 - protein, 14 aa, Homo sapiens
  CDR3 for alpha chain variable domain of TCR clone 391865 (TRAV12-3, TRAJ57)
CAMSAWGGSEKLVF

SEQ ID NO: 783730 - protein, 19 aa, Homo sapiens
  CDR3 for beta chain variable domain of TCR clone 391865 (TRBV25-1, TRBJ2-2)
CAILVYRVDRGRKTGELFF

SEQ ID NO: 783731 - protein, 13 aa, Homo sapiens
  CDR3 for alpha chain variable domain of TCR clone 391866 (TRAV17, TRAJ9)
CATALTGGFKTIF

SEQ ID NO: 783732 - protein, 16 aa, Homo sapiens
  CDR3 for beta chain variable domain of TCR clone 391866 (TRBV15, TRBJ2-1)
CATSRNLAGGYNEQFF

SEQ ID NO: 783733 - protein, 16 aa, Homo sapiens
  CDR3 for alpha chain variable domain of TCR clone 391867 (TRAV3, TRAJ18)
CAVRDGRGSTLGRRYF

SEQ ID NO: 783734 - protein, 16 aa, Homo sapiens
  CDR3 for beta chain variable domain of TCR clone 391867 (TRBV12-4, TRBJ2-1)
CASSAVGQGNGDEQFF

SEQ ID NO: 783735 - protein, 17 aa, Homo sapiens
  CDR3 for alpha chain variable domain of TCR clone 391868 (TRAV3, TRAJ12)
CAVRDGGRMDSSYQLIF

SEQ ID NO: 783736 - protein, 13 aa, Homo sapiens
  CDR3 for beta chain variable domain of TCR clone 391868 (TRBV3-1, TRBJ2-2)
CASLARGSGELFF

SEQ ID NO: 783737 - protein, 13 aa, Homo sapiens
  CDR3 for alpha chain variable domain of TCR clone 391869 (TRAV2, TRAJ21)
CAVEDLNFKKFYF

SEQ ID NO: 783738 - protein, 15 aa, Homo sapiens
  CDR3 for beta chain variable domain of TCR clone 391869 (TRBV28, TRBJ2-5)
CASSPGQGSIEAQYF

SEQ ID NO: 783739 - protein, 12 aa, Homo sapiens
  CDR3 for alpha chain variable domain of TCR clone 391870 (TRAV3, TRAJ26)
CAVRDYGQNFVF

SEQ ID NO: 783740 - protein, 15 aa, Homo sapiens
  CDR3 for beta chain variable domain of TCR clone 391870 (TRBV20-1, TRBJ2-7)
CSARDRVSGMYEQYF

SEQ ID NO: 783741 - protein, 17 aa, Homo sapiens
  CDR3 for alpha chain variable domain of TCR clone 391871 (TRAV38-1, TRAJ28)
CAFMKSYSGAGSYQLTF

SEQ ID NO: 783742 - protein, 14 aa, Homo sapiens
  CDR3 for beta chain variable domain of TCR clone 391871 (TRBV7-2, TRBJ2-5)
CASSIRLTQETQYF

SEQ ID NO: 783743 - protein, 13 aa, Homo sapiens
  CDR3 for alpha chain variable domain of TCR clone 391872 (TRAV17, TRAJ40)
CAGALGGTYKYIF

SEQ ID NO: 783744 - protein, 14 aa, Homo sapiens
  CDR3 for beta chain variable domain of TCR clone 391872 (TRBV25-1, TRBJ1-1)
CASTHLGGNTEAFF

SEQ ID NO: 783745 - protein, 13 aa, Homo sapiens
  CDR3 for alpha chain variable domain of TCR clone 391873 (TRAV22, TRAJ12)
CAGRMDSSYKLIF

SEQ ID NO: 783746 - protein, 14 aa, Homo sapiens
  CDR3 for beta chain variable domain of TCR clone 391873 (TRBV6-1, TRBJ1-3)
CASVQGGGGNTIYF

SEQ ID NO: 783747 - protein, 15 aa, Homo sapiens
  CDR3 for alpha chain variable domain of TCR clone 391874 (TRAV1-2, TRAJ15)
CAVDVRGSAGTALIF

SEQ ID NO: 783748 - protein, 13 aa, Homo sapiens
  CDR3 for beta chain variable domain of TCR clone 391874 (TRBV20-1, TRBJ1-1)
CSAFDRENTEAFF

SEQ ID NO: 783749 - protein, 15 aa, Homo sapiens
  CDR3 for alpha chain variable domain of TCR clone 391875 (TRAV3, TRAJ20)
CAVRDSRSNDYKLSF

SEQ ID NO: 783750 - protein, 14 aa, Homo sapiens
  CDR3 for beta chain variable domain of TCR clone 391875 (TRBV20-1, TRBJ2-7)
CSASRGNGIYEQYF

SEQ ID NO: 783751 - protein, 18 aa, Homo sapiens
  CDR3 for alpha chain variable domain of TCR clone 391876 (TRAV13-1, TRAJ52)
CAAKNPNAGGTSYGKLTF

SEQ ID NO: 783752 - protein, 13 aa, Homo sapiens
  CDR3 for beta chain variable domain of TCR clone 391876 (TRBV24-1, TRBJ1-4)
CATNNGRSEKLFF

SEQ ID NO: 783753 - protein, 12 aa, Homo sapiens
  CDR3 for alpha chain variable domain of TCR clone 391877 (TRAV12-3, TRAJ20)
CAMVRGDYRLSF

SEQ ID NO: 783754 - protein, 14 aa, Homo sapiens
  CDR3 for beta chain variable domain of TCR clone 391877 (TRBV5-5, TRBJ1-5)
RASSGQGVDQPQHF

SEQ ID NO: 783755 - protein, 19 aa, Homo sapiens
  CDR3 for alpha chain variable domain of TCR clone 391878 (TRAV26-1, TRAJ28)
CIVRVAHAYSGAGSYQPTF

SEQ ID NO: 783756 - protein, 12 aa, Homo sapiens
  CDR3 for beta chain variable domain of TCR clone 391878 (TRBV27, TRBJ2-2)
CASKLFTGELFF

SEQ ID NO: 783757 - protein, 16 aa, Homo sapiens
  CDR3 for alpha chain variable domain of TCR clone 391879 (TRAV30, TRAJ24)
CGTEIVDADSWGKFQV

SEQ ID NO: 783758 - protein, 11 aa, Homo sapiens
  CDR3 for beta chain variable domain of TCR clone 391879 (TRBV12-4, TRBJ2-3)
CASTATDTQYF

SEQ ID NO: 783759 - protein, 16 aa, Homo sapiens
  CDR3 for alpha chain variable domain of TCR clone 391880 (TRAV4, TRAJ22)
CLLGDLYSGSARQLTF

SEQ ID NO: 783760 - protein, 16 aa, Homo sapiens
  CDR3 for beta chain variable domain of TCR clone 391880 (TRBV7-9, TRBJ2-1)
CASSDVAGGSYNEQFF

SEQ ID NO: 783761 - protein, 16 aa, Homo sapiens
  CDR3 for alpha chain variable domain of TCR clone 391881 (TRAV16, TRAJ4)
CALSRMFSGGYNKLIF

SEQ ID NO: 783762 - protein, 19 aa, Homo sapiens
  CDR3 for beta chain variable domain of TCR clone 391881 (TRBV28, TRBJ2-7)
CASSYSGTSRLGWVYEQYC

SEQ ID NO: 783763 - protein, 13 aa, Homo sapiens
  CDR3 for alpha chain variable domain of TCR clone 391882 (TRAV2, TRAJ40)
CTLVTSGTYKYIF

SEQ ID NO: 783764 - protein, 16 aa, Homo sapiens
  CDR3 for beta chain variable domain of TCR clone 391882 (TRBV19, TRBJ2-2)
CASRSPGTGATGELFF

SEQ ID NO: 783765 - protein, 14 aa, Homo sapiens
  CDR3 for alpha chain variable domain of TCR clone 391883 (TRAV23/DV6, TRAJ4)
CAANLSGGYNKLIV

SEQ ID NO: 783766 - protein, 17 aa, Homo sapiens
  CDR3 for beta chain variable domain of TCR clone 391883 (TRBV4-1, TRBJ1-3)
CASSPQRGIRFGNTIYF

SEQ ID NO: 783767 - protein, 14 aa, Homo sapiens
  CDR3 for alpha chain variable domain of TCR clone 391884 (TRAV8-1, TRAJ47)
CAVNAVGYGNKLVF

SEQ ID NO: 783768 - protein, 15 aa, Homo sapiens
  CDR3 for beta chain variable domain of TCR clone 391884 (TRBV3-1, TRBJ2-2)
CAISTTTGPTGELFF

SEQ ID NO: 783769 - protein, 12 aa, Homo sapiens
  CDR3 for alpha chain variable domain of TCR clone 391885 (TRAV21, TRAJ31)
CVLAGNNARLMF

SEQ ID NO: 783770 - protein, 14 aa, Homo sapiens
  CDR3 for beta chain variable domain of TCR clone 391885 (TRBV7-8, TRBJ2-7)
CASSPRDRVYEQYF

SEQ ID NO: 783771 - protein, 14 aa, Homo sapiens
  CDR3 for alpha chain variable domain of TCR clone 391886 (TRAV12-3, TRAJ20)
CAMSARRGDYKLSF

SEQ ID NO: 783772 - protein, 13 aa, Homo sapiens
  CDR3 for beta chain variable domain of TCR clone 391886 (TRBV7-2, TRBJ2-2)
CASSLAVTGELFF

SEQ ID NO: 783773 - protein, 13 aa, Homo sapiens
  CDR3 for alpha chain variable domain of TCR clone 391887 (TRAV12-3, TRAJ40)
CARSDSGTYKYIF

SEQ ID NO: 783774 - protein, 14 aa, Homo sapiens
  CDR3 for beta chain variable domain of TCR clone 391887 (TRBV7-2, TRBJ1-5)
CASSTQGAGQPQHF

SEQ ID NO: 783775 - protein, 23 aa, Homo sapiens
  CDR3 for alpha chain variable domain of TCR clone 391888 (TRAV8-3, )
CAVVTTRIPDIQNPDPAVYQLRD

SEQ ID NO: 783776 - protein, 17 aa, Homo sapiens
  CDR3 for beta chain variable domain of TCR clone 391888 (TRBV11-2, TRBJ2-1)
CASSLYPPGVEYNEQFF

SEQ ID NO: 783777 - protein, 13 aa, Homo sapiens
  CDR3 for alpha chain variable domain of TCR clone 391889 (TRAV13-1, TRAJ36)
CAASNSGANNLFF

SEQ ID NO: 783778 - protein, 16 aa, Homo sapiens
  CDR3 for beta chain variable domain of TCR clone 391889 (TRBV5-1, TRBJ1-1)
CASSSGGNSLNTEAFF

SEQ ID NO: 783779 - protein, 13 aa, Homo sapiens
  CDR3 for alpha chain variable domain of TCR clone 391890 (TRAV23/DV6, TRAJ9)
CAASTTGGFKTIF

SEQ ID NO: 783780 - protein, 16 aa, Homo sapiens
  CDR3 for beta chain variable domain of TCR clone 391890 (TRBV20-1, TRBJ1-2)
CSASMGQGVANYGYTF

SEQ ID NO: 783781 - protein, 14 aa, Homo sapiens
  CDR3 for alpha chain variable domain of TCR clone 391891 (TRAV12-3, TRAJ42)
CAMNYGGSQGNIIL

SEQ ID NO: 783782 - protein, 15 aa, Homo sapiens
  CDR3 for beta chain variable domain of TCR clone 391891 (TRBV5-7, TRBJ1-5)
CASSYGKLWDQPQHF

SEQ ID NO: 783783 - protein, 13 aa, Homo sapiens
  CDR3 for alpha chain variable domain of TCR clone 391892 (TRAV8-6, TRAJ49)
CAVITNTGNQFYF

SEQ ID NO: 783784 - protein, 18 aa, Homo sapiens
  CDR3 for beta chain variable domain of TCR clone 391892 (TRBV7-9, TRBJ1-1)
CASSPRVGTRILRAEAFF

SEQ ID NO: 783785 - protein, 14 aa, Homo sapiens
  CDR3 for alpha chain variable domain of TCR clone 391893 (TRAV13-1, TRAJ32)
CAARGSGATIKLIF

SEQ ID NO: 783786 - protein, 15 aa, Homo sapiens
  CDR3 for beta chain variable domain of TCR clone 391893 (TRBV5-5, TRBJ1-1)
CASSLVGKDNTEAFF

SEQ ID NO: 783787 - protein, 15 aa, Homo sapiens
  CDR3 for alpha chain variable domain of TCR clone 391894 (TRAV21, TRAJ53)
CAVRQSGGSNYKLTF

SEQ ID NO: 783788 - protein, 14 aa, Homo sapiens
  CDR3 for beta chain variable domain of TCR clone 391894 (TRBV18, TRBJ2-5)
CASSPGVSQETQYC

SEQ ID NO: 783789 - protein, 15 aa, Homo sapiens
  CDR3 for alpha chain variable domain of TCR clone 391895 (TRAV12-3, TRAJ6)
CAMSATTGGSYIPPF

SEQ ID NO: 783790 - protein, 15 aa, Homo sapiens
  CDR3 for beta chain variable domain of TCR clone 391895 (TRBV7-6, TRBJ1-5)
CASSQSSGINQPQHF

SEQ ID NO: 783791 - protein, 13 aa, Homo sapiens
  CDR3 for alpha chain variable domain of TCR clone 391896 (TRAV3, TRAJ41)
CAVSSNSGYALNF

SEQ ID NO: 783792 - protein, 14 aa, Homo sapiens
  CDR3 for beta chain variable domain of TCR clone 391896 (TRBV18, TRBJ2-5)
CASSPGVSQETQYF

SEQ ID NO: 783793 - protein, 14 aa, Homo sapiens
  CDR3 for alpha chain variable domain of TCR clone 391897 (TRAV3, TRAJ9)
CAVRLNTGGFKTSF

SEQ ID NO: 783794 - protein, 16 aa, Homo sapiens
  CDR3 for beta chain variable domain of TCR clone 391897 (TRBV12-5, TRBJ2-5)
CASGPRTSGNQETQYF

SEQ ID NO: 783795 - protein, 14 aa, Homo sapiens
  CDR3 for alpha chain variable domain of TCR clone 391898 (TRAV12-3, TRAJ13)
CAMRNSGGYQKVTF

SEQ ID NO: 783796 - protein, 12 aa, Homo sapiens
  CDR3 for beta chain variable domain of TCR clone 391898 (TRBV24-1, TRBJ2-2)
CATSDPGLTGLQ

SEQ ID NO: 783797 - protein, 12 aa, Homo sapiens
  CDR3 for alpha chain variable domain of TCR clone 391899 (TRAV13-1, TRAJ21)
CAAKEGFNKFYF

SEQ ID NO: 783798 - protein, 18 aa, Homo sapiens
  CDR3 for beta chain variable domain of TCR clone 391899 (TRBV20-1, TRBJ2-6)
CSAETTPTHGSGANVLTV

SEQ ID NO: 783799 - protein, 10 aa, Homo sapiens
  CDR3 for alpha chain variable domain of TCR clone 391900 (TRAV23/DV6, TRAJ57)
CAASSTLSQG

SEQ ID NO: 783800 - protein, 15 aa, Homo sapiens
  CDR3 for beta chain variable domain of TCR clone 391900 (TRBV19, TRBJ1-6)
CASSTQGAVGSPLHF

SEQ ID NO: 783801 - protein, 13 aa, Homo sapiens
  CDR3 for alpha chain variable domain of TCR clone 391901 (TRAV3, TRAJ21)
CAMREPDFNKFYF

SEQ ID NO: 783802 - protein, 13 aa, Homo sapiens
  CDR3 for beta chain variable domain of TCR clone 391901 (TRBV9, TRBJ2-1)
CASNPSGGNEQFF

SEQ ID NO: 783803 - protein, 14 aa, Homo sapiens
  CDR3 for alpha chain variable domain of TCR clone 391902 (TRAV17, TRAJ5)
CATVALTGRREITF

SEQ ID NO: 783804 - protein, 14 aa, Homo sapiens
  CDR3 for beta chain variable domain of TCR clone 391902 (TRBV28, TRBJ2-7)
CASSPYGMAYEQYF

SEQ ID NO: 783805 - protein, 16 aa, Homo sapiens
  CDR3 for alpha chain variable domain of TCR clone 391903 (TRAV23/DV6, TRAJ21)
CAASSGGGTTSTNFTL

SEQ ID NO: 783806 - protein, 11 aa, Homo sapiens
  CDR3 for beta chain variable domain of TCR clone 391903 (TRBV7-8, TRBJ2-7)
CASSLSLEQYV

SEQ ID NO: 783807 - protein, 13 aa, Homo sapiens
  CDR3 for alpha chain variable domain of TCR clone 391904 (TRAV25, TRAJ10)
CAGRTGGGNKLTF

SEQ ID NO: 783808 - protein, 12 aa, Homo sapiens
  CDR3 for beta chain variable domain of TCR clone 391904 (TRBV7-8, TRBJ2-7)
CASSLGDREQFF

SEQ ID NO: 783809 - protein, 16 aa, Homo sapiens
  CDR3 for alpha chain variable domain of TCR clone 391905 (TRAV1-2, TRAJ16)
CAVNRFSDARSCSLQG

SEQ ID NO: 783810 - protein, 16 aa, Homo sapiens
  CDR3 for beta chain variable domain of TCR clone 391905 (TRBV12-5, TRBJ2-5)
CASGPRTSGNQETQYF

SEQ ID NO: 783811 - protein, 13 aa, Homo sapiens
  CDR3 for alpha chain variable domain of TCR clone 391906 (TRAV12-1, TRAJ3)
CVVNPRGASKIIF

SEQ ID NO: 783812 - protein, 15 aa, Homo sapiens
  CDR3 for beta chain variable domain of TCR clone 391906 (TRBV28, TRBJ1-5)
CTSVPAVTGAISQHF

SEQ ID NO: 783813 - protein, 14 aa, Homo sapiens
  CDR3 for alpha chain variable domain of TCR clone 391907 (TRAV16, TRAJ17)
CALSGRAAGNKLTF

SEQ ID NO: 783814 - protein, 12 aa, Homo sapiens
  CDR3 for beta chain variable domain of TCR clone 391907 (TRBV19, TRBJ1-5)
CASSIAQQPQHF

SEQ ID NO: 783815 - protein, 14 aa, Homo sapiens
  CDR3 for alpha chain variable domain of TCR clone 391908 (TRAV8-4, TRAJ8)
CAVSEDTGFQKLVF

SEQ ID NO: 783816 - protein, 12 aa, Homo sapiens
  CDR3 for beta chain variable domain of TCR clone 391908 (TRBV14, TRBJ1-1)
CAGRRYETEAFF

SEQ ID NO: 783817 - protein, 15 aa, Homo sapiens
  CDR3 for alpha chain variable domain of TCR clone 391909 (TRAV26-1, TRAJ22)
CIVRVSFWFCKATYL

SEQ ID NO: 783818 - protein, 13 aa, Homo sapiens
  CDR3 for beta chain variable domain of TCR clone 391909 (TRBV10-3, TRBJ2-7)
CASKLAVNYEQYF

SEQ ID NO: 783819 - protein, 12 aa, Homo sapiens
  CDR3 for alpha chain variable domain of TCR clone 391910 (TRAV38-1, TRAJ32)
CAPLGATNNLIF

SEQ ID NO: 783820 - protein, 14 aa, Homo sapiens
  CDR3 for beta chain variable domain of TCR clone 391910 (TRBV29-1, TRBJ2-5)
CSVETSGSGETQYF

SEQ ID NO: 783821 - protein, 15 aa, Homo sapiens
  CDR3 for alpha chain variable domain of TCR clone 391911 (TRAV8-2, TRAJ27)
CVVSDRGTNAGKSTF

SEQ ID NO: 783822 - protein, 17 aa, Homo sapiens
  CDR3 for beta chain variable domain of TCR clone 391911 (TRBV27, TRBJ2-2)
CASSLWGRNRDAGELFF

SEQ ID NO: 783823 - protein, 13 aa, Homo sapiens
  CDR3 for alpha chain variable domain of TCR clone 391912 (TRAV13-1, TRAJ40)
CAAISLGTYKYIF

SEQ ID NO: 783824 - protein, 13 aa, Homo sapiens
  CDR3 for beta chain variable domain of TCR clone 391912 (TRBV10-3, TRBJ2-7)
CAIRAGGPHEQYF

SEQ ID NO: 783825 - protein, 15 aa, Homo sapiens
  CDR3 for alpha chain variable domain of TCR clone 391913 (TRAV26-1, TRAJ29)
CIVRVEGSGNTPLVF

SEQ ID NO: 783826 - protein, 15 aa, Homo sapiens
  CDR3 for beta chain variable domain of TCR clone 391913 (TRBV11-2, TRBJ1-3)
CASSAHSSSGNTIYF

SEQ ID NO: 783827 - protein, 12 aa, Homo sapiens
  CDR3 for alpha chain variable domain of TCR clone 391914 (TRAV12-2, TRAJ21)
CAVRYNFNKFYF

SEQ ID NO: 783828 - protein, 15 aa, Homo sapiens
  CDR3 for beta chain variable domain of TCR clone 391914 (TRBV4-1, TRBJ2-7)
CASSQNTGRLYEQYF

SEQ ID NO: 783829 - protein, 15 aa, Homo sapiens
  CDR3 for alpha chain variable domain of TCR clone 391915 (TRAV3, TRAJ43)
VLLGCERGRNNDMRF

SEQ ID NO: 783830 - protein, 12 aa, Homo sapiens
  CDR3 for beta chain variable domain of TCR clone 391915 (TRBV5-1, TRBJ2-7)
CASSLDSYEQYF

SEQ ID NO: 783831 - protein, 11 aa, Homo sapiens
  CDR3 for alpha chain variable domain of TCR clone 391916 (TRAV12-3, TRAJ41)
CAMNAREALNF

SEQ ID NO: 783832 - protein, 13 aa, Homo sapiens
  CDR3 for beta chain variable domain of TCR clone 391916 (TRBV4-1, TRBJ2-2)
CASSQENTGELFF

SEQ ID NO: 783833 - protein, 14 aa, Homo sapiens
  CDR3 for alpha chain variable domain of TCR clone 391917 (TRAV12-1, TRAJ22)
CVVTTSGSARQLTF

SEQ ID NO: 783834 - protein, 14 aa, Homo sapiens
  CDR3 for beta chain variable domain of TCR clone 391917 (TRBV20-1, TRBJ1-1)
CSAQTRIGGTEAFF

SEQ ID NO: 783835 - protein, 16 aa, Homo sapiens
  CDR3 for alpha chain variable domain of TCR clone 391918 (TRAV4, TRAJ9)
CLVGDPNRPGGFKTIS

SEQ ID NO: 783836 - protein, 13 aa, Homo sapiens
  CDR3 for beta chain variable domain of TCR clone 391918 (TRBV5-5, TRBJ1-2)
CASSFWRGEDYTF

SEQ ID NO: 783837 - protein, 14 aa, Homo sapiens
  CDR3 for alpha chain variable domain of TCR clone 391919 (TRAV1-2, TRAJ16)
CAVNRFSDGQKLLF

SEQ ID NO: 783838 - protein, 12 aa, Homo sapiens
  CDR3 for beta chain variable domain of TCR clone 391919 (TRBV12-4, TRBJ2-1)
CASTYVLNEQFF

SEQ ID NO: 783839 - protein, 14 aa, Homo sapiens
  CDR3 for alpha chain variable domain of TCR clone 391920 (TRAV20, TRAJ9)
CAVLLSGGGFKTIF

SEQ ID NO: 783840 - protein, 15 aa, Homo sapiens
  CDR3 for beta chain variable domain of TCR clone 391920 (TRBV18, TRBJ1-2)
CASSPQGQGSSGYTF

SEQ ID NO: 783841 - protein, 15 aa, Homo sapiens
  CDR3 for alpha chain variable domain of TCR clone 391921 (TRAV8-3, TRAJ15)
CAVGAPNQAGTALIF

SEQ ID NO: 783842 - protein, 16 aa, Homo sapiens
  CDR3 for beta chain variable domain of TCR clone 391921 (TRBV7-9, TRBJ1-3)
CASSQTSGLRMGTIYF

SEQ ID NO: 783843 - protein, 16 aa, Homo sapiens
  CDR3 for alpha chain variable domain of TCR clone 391922 (TRAV3, TRAJ3)
CAVRDRAKSSASKIIF

SEQ ID NO: 783844 - protein, 15 aa, Homo sapiens
  CDR3 for beta chain variable domain of TCR clone 391922 (TRBV5-1, TRBJ2-1)
CASSPPRAPYNEQFF

SEQ ID NO: 783845 - protein, 13 aa, Homo sapiens
  CDR3 for alpha chain variable domain of TCR clone 391923 (TRAV3, TRAJ3)
CAVADRSASKIIF

SEQ ID NO: 783846 - protein, 16 aa, Homo sapiens
  CDR3 for beta chain variable domain of TCR clone 391923 (TRBV5-1, TRBJ2-3)
CASSLGLAVYTDTQYF

SEQ ID NO: 783847 - protein, 14 aa, Homo sapiens
  CDR3 for alpha chain variable domain of TCR clone 391924 (TRAV17, TRAJ57)
CATDPQGRSEKLVF

SEQ ID NO: 783848 - protein, 17 aa, Homo sapiens
  CDR3 for beta chain variable domain of TCR clone 391924 (TRBV5-1, TRBJ2-2)
CASSLAGLSGGTGELFF

SEQ ID NO: 783849 - protein, 15 aa, Homo sapiens
  CDR3 for alpha chain variable domain of TCR clone 391925 (TRAV12-3, TRAJ52)
CNGVAGGTSYGKLTF

SEQ ID NO: 783850 - protein, 13 aa, Homo sapiens
  CDR3 for beta chain variable domain of TCR clone 391925 (TRBV20-1, TRBJ2-5)
CSARGDYQETQYF

SEQ ID NO: 783851 - protein, 13 aa, Homo sapiens
  CDR3 for alpha chain variable domain of TCR clone 391926 (TRAV2, TRAJ40)
CTVVTSGTYTYIF

SEQ ID NO: 783852 - protein, 14 aa, Homo sapiens
  CDR3 for beta chain variable domain of TCR clone 391926 (TRBV19, TRBJ2-1)
CASPTFVLSGEQFF

SEQ ID NO: 783853 - protein, 17 aa, Homo sapiens
  CDR3 for alpha chain variable domain of TCR clone 391927 (TRAV3, TRAJ6)
GAVRDGPRAGGSYIPTF

SEQ ID NO: 783854 - protein, 18 aa, Homo sapiens
  CDR3 for beta chain variable domain of TCR clone 391927 (TRBV25-1, TRBJ1-2)
CASSGLQNGQGLIFGYTF

SEQ ID NO: 783855 - protein, 14 aa, Homo sapiens
  CDR3 for alpha chain variable domain of TCR clone 391928 (TRAV12-1, TRAJ44)
CGRLTYGTASKLTF

SEQ ID NO: 783856 - protein, 13 aa, Homo sapiens
  CDR3 for beta chain variable domain of TCR clone 391928 (TRBV20-1, TRBJ2-5)
CSARGDYQETQYF

SEQ ID NO: 783857 - protein, 15 aa, Homo sapiens
  CDR3 for alpha chain variable domain of TCR clone 391929 (TRAV14/DV4, TRAJ49)
CAMREGRDTGNQFSF

SEQ ID NO: 783858 - protein, 17 aa, Homo sapiens
  CDR3 for beta chain variable domain of TCR clone 391929 (TRBV12-4, TRBJ1-5)
CASSLRGDRGPNQPQHF

SEQ ID NO: 783859 - protein, 12 aa, Homo sapiens
  CDR3 for alpha chain variable domain of TCR clone 391930 (TRAV13-1, TRAJ49)
CAASPMGNQFYF

SEQ ID NO: 783860 - protein, 13 aa, Homo sapiens
  CDR3 for beta chain variable domain of TCR clone 391930 (TRBV20-1, TRBJ2-2)
CIASAAGTRELFF

SEQ ID NO: 783861 - protein, 14 aa, Homo sapiens
  CDR3 for alpha chain variable domain of TCR clone 391931 (TRAV21, TRAJ6)
CAVKWLVGSYIPTF

SEQ ID NO: 783862 - protein, 14 aa, Homo sapiens
  CDR3 for beta chain variable domain of TCR clone 391931 (TRBV7-2, TRBJ2-7)
CASSPKTSFYEQYF

SEQ ID NO: 783863 - protein, 19 aa, Homo sapiens
  CDR3 for alpha chain variable domain of TCR clone 391932 (TRAV26-1, TRAJ28)
CIVRVAHAYSGAGRYQLTF

SEQ ID NO: 783864 - protein, 13 aa, Homo sapiens
  CDR3 for beta chain variable domain of TCR clone 391932 (TRBV7-9, TRBJ1-2)
CASSLKQNYGYTF

SEQ ID NO: 783865 - protein, 14 aa, Homo sapiens
  CDR3 for alpha chain variable domain of TCR clone 391933 (TRAV16, TRAJ17)
CALSGRAAGNKLTF

SEQ ID NO: 783866 - protein, 15 aa, Homo sapiens
  CDR3 for beta chain variable domain of TCR clone 391933 (TRBV3-1, TRBJ1-2)
CSSSPTRLPEGGYAF

SEQ ID NO: 783867 - protein, 10 aa, Homo sapiens
  CDR3 for alpha chain variable domain of TCR clone 391934 (TRAV12-1, TRAJ43)
CVVHNNDMRF

SEQ ID NO: 783868 - protein, 14 aa, Homo sapiens
  CDR3 for beta chain variable domain of TCR clone 391934 (TRBV20-1, TRBJ2-1)
CSAQIGGSANEQFF

SEQ ID NO: 783869 - protein, 13 aa, Homo sapiens
  CDR3 for alpha chain variable domain of TCR clone 391935 (TRAV21, TRAJ56)
CAVRIGANSKLTF

SEQ ID NO: 783870 - protein, 12 aa, Homo sapiens
  CDR3 for beta chain variable domain of TCR clone 391935 (TRBV12-4, TRBJ2-3)
CASSSTTDTQYF

SEQ ID NO: 783871 - protein, 16 aa, Homo sapiens
  CDR3 for alpha chain variable domain of TCR clone 391936 (TRAV30, TRAJ24)
CGPEIVDADSWGKLQF

SEQ ID NO: 783872 - protein, 13 aa, Homo sapiens
  CDR3 for beta chain variable domain of TCR clone 391936 (TRBV24-1, TRBJ2-1)
CATSAGPYNEQFF

SEQ ID NO: 783873 - protein, 14 aa, Homo sapiens
  CDR3 for alpha chain variable domain of TCR clone 391937 (TRAV14/DV4, TRAJ20)
CAMRESLNDYKLSF

SEQ ID NO: 783874 - protein, 12 aa, Homo sapiens
  CDR3 for beta chain variable domain of TCR clone 391937 (TRBV14, TRBJ2-7)
CASSLYKGEQYF

SEQ ID NO: 783875 - protein, 15 aa, Homo sapiens
  CDR3 for alpha chain variable domain of TCR clone 391938 (TRAV12-2, TRAJ53)
CAVNGGGGSNYKQTF

SEQ ID NO: 783876 - protein, 14 aa, Homo sapiens
  CDR3 for beta chain variable domain of TCR clone 391938 (TRBV18, TRBJ2-7)
CASSPRGGAYEQYF

SEQ ID NO: 783877 - protein, 15 aa, Homo sapiens
  CDR3 for alpha chain variable domain of TCR clone 391939 (TRAV12-2, TRAJ45)
CAALLGGGGADGLTF

SEQ ID NO: 783878 - protein, 14 aa, Homo sapiens
  CDR3 for beta chain variable domain of TCR clone 391939 (TRBV7-2, TRBJ2-7)
CASSVGTRTYEQYF

SEQ ID NO: 783879 - protein, 17 aa, Homo sapiens
  CDR3 for alpha chain variable domain of TCR clone 391940 (TRAV8-3, TRAJ42)
CAVGNPEERRSQGNLIF

SEQ ID NO: 783880 - protein, 14 aa, Homo sapiens
  CDR3 for beta chain variable domain of TCR clone 391940 (TRBV19, TRBJ2-1)
CASPTFVLSGEQFF

SEQ ID NO: 783881 - protein, 13 aa, Homo sapiens
  CDR3 for alpha chain variable domain of TCR clone 391941 (TRAV21, TRAJ27)
CSARPGNAGKSTF

SEQ ID NO: 783882 - protein, 14 aa, Homo sapiens
  CDR3 for beta chain variable domain of TCR clone 391941 (TRBV25-1, TRBJ1-1)
CASTHLGGNTEAFF

SEQ ID NO: 783883 - protein, 15 aa, Homo sapiens
  CDR3 for alpha chain variable domain of TCR clone 391942 (TRAV26-1, TRAJ29)
CIVRVEGSGDTPLVF

SEQ ID NO: 783884 - protein, 14 aa, Homo sapiens
  CDR3 for beta chain variable domain of TCR clone 391942 (TRBV18, TRBJ2-5)
CASSPGVSPETQYF

SEQ ID NO: 783885 - protein, 14 aa, Homo sapiens
  CDR3 for alpha chain variable domain of TCR clone 391943 (TRAV13-1, TRAJ44)
CAAKATGTASKLTF

SEQ ID NO: 783886 - protein, 14 aa, Homo sapiens
  CDR3 for beta chain variable domain of TCR clone 391943 (TRBV19, TRBJ2-2)
CASSTLHKSGELFF

SEQ ID NO: 783887 - protein, 11 aa, Homo sapiens
  CDR3 for alpha chain variable domain of TCR clone 391944 (TRAV21, TRAJ41)
CAVRAGYALNF

SEQ ID NO: 783888 - protein, 13 aa, Homo sapiens
  CDR3 for beta chain variable domain of TCR clone 391944 (TRBV7-9, TRBJ1-2)
CASSLKQNYGYTF

SEQ ID NO: 783889 - protein, 12 aa, Homo sapiens
  CDR3 for alpha chain variable domain of TCR clone 391945 (TRAV17, TRAJ53)
CATEGSNYKLTF

SEQ ID NO: 783890 - protein, 18 aa, Homo sapiens
  CDR3 for beta chain variable domain of TCR clone 391945 (TRBV12-4, TRBJ2-2)
CASSLVAGTRGRTGELFF

SEQ ID NO: 783891 - protein, 12 aa, Homo sapiens
  CDR3 for alpha chain variable domain of TCR clone 391946 (TRAV9-2, TRAJ9)
CALATGGFKTIF

SEQ ID NO: 783892 - protein, 13 aa, Homo sapiens
  CDR3 for beta chain variable domain of TCR clone 391946 (TRBV7-9, TRBJ1-2)
CASSLKQNYGYTF

SEQ ID NO: 783893 - protein, 14 aa, Homo sapiens
  CDR3 for alpha chain variable domain of TCR clone 391947 (TRAV1-2, TRAJ16)
CAVNRFSDGQKLRC

SEQ ID NO: 783894 - protein, 15 aa, Homo sapiens
  CDR3 for beta chain variable domain of TCR clone 391947 (TRBV9, TRBJ1-6)
CASSVAGTGDSPLHF

SEQ ID NO: 783895 - protein, 15 aa, Homo sapiens
  CDR3 for alpha chain variable domain of TCR clone 391948 (TRAV2, TRAJ28)
CAVPYSGAGSYQLTF

SEQ ID NO: 783896 - protein, 16 aa, Homo sapiens
  CDR3 for beta chain variable domain of TCR clone 391948 (TRBV5-4, TRBJ2-3)
CASQQPGAGGADTQYF

SEQ ID NO: 783897 - protein, 15 aa, Homo sapiens
  CDR3 for alpha chain variable domain of TCR clone 391949 (TRAV2, TRAJ15)
CAVEDRQQAGTALIF

SEQ ID NO: 783898 - protein, 15 aa, Homo sapiens
  CDR3 for beta chain variable domain of TCR clone 391949 (TRBV3-1, TRBJ1-2)
CASSHPGTPGYGYTF

SEQ ID NO: 783899 - protein, 13 aa, Homo sapiens
  CDR3 for alpha chain variable domain of TCR clone 391950 (TRAV21, TRAJ27)
CAARPGNAGKSTF

SEQ ID NO: 783900 - protein, 15 aa, Homo sapiens
  CDR3 for beta chain variable domain of TCR clone 391950 (TRBV4-1, TRBJ1-2)
CASSQGQGAAYGYTF

SEQ ID NO: 783901 - protein, 14 aa, Homo sapiens
  CDR3 for alpha chain variable domain of TCR clone 391951 (TRAV17, TRAJ6)
CATNPAGGSYIPTF

SEQ ID NO: 783902 - protein, 16 aa, Homo sapiens
  CDR3 for beta chain variable domain of TCR clone 391951 (TRBV12-4, TRBJ1-5)
CASSRPVGGSNQPQHF

SEQ ID NO: 783903 - protein, 10 aa, Homo sapiens
  CDR3 for alpha chain variable domain of TCR clone 391952 (TRAV1-2, TRAJ20)
CALNDYKLSF

SEQ ID NO: 783904 - protein, 16 aa, Homo sapiens
  CDR3 for beta chain variable domain of TCR clone 391952 (TRBV20-1, TRBJ1-1)
CSARAVTQGMNTEAFF

SEQ ID NO: 783905 - protein, 16 aa, Homo sapiens
  CDR3 for alpha chain variable domain of TCR clone 391953 (TRAV16, TRAJ52)
CALSAAGGTSYGKLTF

SEQ ID NO: 783906 - protein, 14 aa, Homo sapiens
  CDR3 for beta chain variable domain of TCR clone 391953 (TRBV28, TRBJ1-2)
CASRIQGANYGYTF

SEQ ID NO: 783907 - protein, 12 aa, Homo sapiens
  CDR3 for alpha chain variable domain of TCR clone 391954 (TRAV1-2, TRAJ33)
CAALDSNYQLIW

SEQ ID NO: 783908 - protein, 12 aa, Homo sapiens
  CDR3 for beta chain variable domain of TCR clone 391954 (TRBV4-1, TRBJ2-3)
CASSQGTDTQYF

SEQ ID NO: 783909 - protein, 11 aa, Homo sapiens
  CDR3 for alpha chain variable domain of TCR clone 391955 (TRAV2, TRAJ13)
CASGGYQKVTF

SEQ ID NO: 783910 - protein, 12 aa, Homo sapiens
  CDR3 for beta chain variable domain of TCR clone 391955 (TRBV14, TRBJ2-7)
CASNSLKGEQYF

SEQ ID NO: 783911 - protein, 15 aa, Homo sapiens
  CDR3 for alpha chain variable domain of TCR clone 391956 (TRAV12-3, TRAJ23)
CAMSATGNQGGKLIF

SEQ ID NO: 783912 - protein, 22 aa, Homo sapiens
  CDR3 for beta chain variable domain of TCR clone 391956 (TRBV7-3, TRBJ2-2)
GGTQPCISVPAAQEDTPGSCFF

SEQ ID NO: 783913 - protein, 10 aa, Homo sapiens
  CDR3 for alpha chain variable domain of TCR clone 391957 (TRAV2, TRAJ34)
CAVVNDKRIF

SEQ ID NO: 783914 - protein, 15 aa, Homo sapiens
  CDR3 for beta chain variable domain of TCR clone 391957 (TRBV3-1, TRBJ2-2)
CASSQDWTRAGELFF

SEQ ID NO: 783915 - protein, 14 aa, Homo sapiens
  CDR3 for alpha chain variable domain of TCR clone 391958 (TRAV12-2, TRAJ40)
CAVEIPSGTSKYIF

SEQ ID NO: 783916 - protein, 14 aa, Homo sapiens
  CDR3 for beta chain variable domain of TCR clone 391958 (TRBV20-1, TRBJ1-1)
CSAQTRIGGTEAFF

SEQ ID NO: 783917 - protein, 13 aa, Homo sapiens
  CDR3 for alpha chain variable domain of TCR clone 391959 (TRAV2, TRAJ22)
CAVDSGSARQLTF

SEQ ID NO: 783918 - protein, 16 aa, Homo sapiens
  CDR3 for beta chain variable domain of TCR clone 391959 (TRBV15, TRBJ2-1)
CATSRERLAGAYEQFF

SEQ ID NO: 783919 - protein, 15 aa, Homo sapiens
  CDR3 for alpha chain variable domain of TCR clone 391960 (TRAV14/DV4, TRAJ10)
CAMRELTGGGNKLTF

SEQ ID NO: 783920 - protein, 14 aa, Homo sapiens
  CDR3 for beta chain variable domain of TCR clone 391960 (TRBV7-2, TRBJ2-7)
CASRSQGAAYEQYF

SEQ ID NO: 783921 - protein, 13 aa, Homo sapiens
  CDR3 for alpha chain variable domain of TCR clone 391961 (TRAV20, TRAJ34)
CAVSSYNTDKLIF

SEQ ID NO: 783922 - protein, 15 aa, Homo sapiens
  CDR3 for beta chain variable domain of TCR clone 391961 (TRBV20-1, TRBJ1-2)
CSAAGEGVRIYGYTF

SEQ ID NO: 783923 - protein, 12 aa, Homo sapiens
  CDR3 for alpha chain variable domain of TCR clone 391962 (TRAV12-2, TRAJ6)
CAVKVGSYIPTF

SEQ ID NO: 783924 - protein, 14 aa, Homo sapiens
  CDR3 for beta chain variable domain of TCR clone 391962 (TRBV12-5, TRBJ2-5)
CASGSRTHQETQYF

SEQ ID NO: 783925 - protein, 12 aa, Homo sapiens
  CDR3 for alpha chain variable domain of TCR clone 391963 (TRAV12-3, TRAJ20)
CAMVRGDYKLSF

SEQ ID NO: 783926 - protein, 13 aa, Homo sapiens
  CDR3 for beta chain variable domain of TCR clone 391963 (TRBV12-4, TRBJ1-2)
CASSSGLTVISTF

SEQ ID NO: 783927 - protein, 13 aa, Homo sapiens
  CDR3 for alpha chain variable domain of TCR clone 391964 (TRAV13-2, TRAJ48)
CAEMDFGNEKLTF

SEQ ID NO: 783928 - protein, 14 aa, Homo sapiens
  CDR3 for beta chain variable domain of TCR clone 391964 (TRBV5-1, TRBJ1-1)
CASSSTGEDTEAFF

SEQ ID NO: 783929 - protein, 13 aa, Homo sapiens
  CDR3 for alpha chain variable domain of TCR clone 391965 (TRAV20, TRAJ31)
CAVQAIGGARLMF

SEQ ID NO: 783930 - protein, 15 aa, Homo sapiens
  CDR3 for beta chain variable domain of TCR clone 391965 (TRBV7-9, TRBJ1-5)
CASSQGHQPNQPQHF

SEQ ID NO: 783931 - protein, 19 aa, Homo sapiens
  CDR3 for alpha chain variable domain of TCR clone 391966 (TRAV1-2, TRAJ26)
CLLPLCCERPDNYCQNFVF

SEQ ID NO: 783932 - protein, 15 aa, Homo sapiens
  CDR3 for beta chain variable domain of TCR clone 391966 (TRBV9, TRBJ1-6)
CASSVAGTGDSPLHF

SEQ ID NO: 783933 - protein, 10 aa, Homo sapiens
  CDR3 for alpha chain variable domain of TCR clone 391967 (TRAV20, TRAJ22)
CAAPARQLTF

SEQ ID NO: 783934 - protein, 10 aa, Homo sapiens
  CDR3 for beta chain variable domain of TCR clone 391967 (TRBV2, TRBJ2-5)
CASSAATQYF

SEQ ID NO: 783935 - protein, 14 aa, Homo sapiens
  CDR3 for alpha chain variable domain of TCR clone 391968 (TRAV1-2, TRAJ16)
CAVNRFSDGPKLLF

SEQ ID NO: 783936 - protein, 17 aa, Homo sapiens
  CDR3 for beta chain variable domain of TCR clone 391968 (TRBV5-1, TRBJ2-2)
CASSLAGLSGGTGELFF

SEQ ID NO: 783937 - protein, 16 aa, Homo sapiens
  CDR3 for alpha chain variable domain of TCR clone 391969 (TRAV3, TRAJ4)
CAVRPSPSDGYNKLIF

SEQ ID NO: 783938 - protein, 12 aa, Homo sapiens
  CDR3 for beta chain variable domain of TCR clone 391969 (TRBV7-9, TRBJ2-7)
CASSQGVYDQYF

SEQ ID NO: 783939 - protein, 14 aa, Homo sapiens
  CDR3 for alpha chain variable domain of TCR clone 391970 (TRAV1-2, TRAJ8)
CAVREDTGFQKLVF

SEQ ID NO: 783940 - protein, 15 aa, Homo sapiens
  CDR3 for beta chain variable domain of TCR clone 391970 (TRBV5-7, TRBJ1-5)
CAGSYGKLWDQPQHF

SEQ ID NO: 783941 - protein, 11 aa, Homo sapiens
  CDR3 for alpha chain variable domain of TCR clone 391971 (TRAV3, TRAJ21)
CSVGNFNKFYF

SEQ ID NO: 783942 - protein, 16 aa, Homo sapiens
  CDR3 for beta chain variable domain of TCR clone 391971 (TRBV19, TRBJ2-1)
CASSKAGPSSYNEQFI

SEQ ID NO: 783943 - protein, 11 aa, Homo sapiens
  CDR3 for alpha chain variable domain of TCR clone 391972 (TRAV1-2, TRAJ20)
CAVANDYKLSF

SEQ ID NO: 783944 - protein, 18 aa, Homo sapiens
  CDR3 for beta chain variable domain of TCR clone 391972 (TRBV20-1, TRBJ2-6)
CSAGTTPTHGAGANVLTF

SEQ ID NO: 783945 - protein, 16 aa, Homo sapiens
  CDR3 for alpha chain variable domain of TCR clone 391973 (TRAV30, TRAJ24)
CGTEIVDADSWGKFRF

SEQ ID NO: 783946 - protein, 11 aa, Homo sapiens
  CDR3 for beta chain variable domain of TCR clone 391973 (TRBV29-1, TRBJ2-5)
CSVASGETQYF

SEQ ID NO: 783947 - protein, 13 aa, Homo sapiens
  CDR3 for alpha chain variable domain of TCR clone 391974 (TRAV21, TRAJ20)
CAVGLRVDYKLSF

SEQ ID NO: 783948 - protein, 19 aa, Homo sapiens
  CDR3 for beta chain variable domain of TCR clone 391974 (TRBV4-1, TRBJ2-5)
CASSQEGSGTSKRGETQYF

SEQ ID NO: 783949 - protein, 13 aa, Homo sapiens
  CDR3 for alpha chain variable domain of TCR clone 391975 (TRAV12-2, TRAJ20)
CAVYPSNDYKLSF

SEQ ID NO: 783950 - protein, 13 aa, Homo sapiens
  CDR3 for beta chain variable domain of TCR clone 391975 (TRBV12-4, TRBJ2-7)
CASSPTETYEQYF

SEQ ID NO: 783951 - protein, 15 aa, Homo sapiens
  CDR3 for alpha chain variable domain of TCR clone 391976 (TRAV3, TRAJ3)
CAVRDRDSSASKIIF

SEQ ID NO: 783952 - protein, 18 aa, Homo sapiens
  CDR3 for beta chain variable domain of TCR clone 391976 (TRBV25-1, TRBJ1-2)
CASSGLQIGQGLIFGYTF

SEQ ID NO: 783953 - protein, 13 aa, Homo sapiens
  CDR3 for alpha chain variable domain of TCR clone 391977 (TRAV38-1, TRAJ42)
CARWGVSQGNLIF

SEQ ID NO: 783954 - protein, 17 aa, Homo sapiens
  CDR3 for beta chain variable domain of TCR clone 391977 (TRBV20-1, TRBJ2-1)
CSASDPLAGVWDNEQFF

SEQ ID NO: 783955 - protein, 15 aa, Homo sapiens
  CDR3 for alpha chain variable domain of TCR clone 391978 (TRAV12-2, TRAJ53)
CAVNGGGGSNYKLTF

SEQ ID NO: 783956 - protein, 17 aa, Homo sapiens
  CDR3 for beta chain variable domain of TCR clone 391978 (TRBV28, TRBJ2-1)
CASSLSVAGGPVDEQFF

SEQ ID NO: 783957 - protein, 15 aa, Homo sapiens
  CDR3 for alpha chain variable domain of TCR clone 391979 (TRAV1-2, TRAJ10)
CAVRGFTGGGNKLTF

SEQ ID NO: 783958 - protein, 14 aa, Homo sapiens
  CDR3 for beta chain variable domain of TCR clone 391979 (TRBV19, TRBJ2-1)
CASPTFVLSGEQFF

SEQ ID NO: 783959 - protein, 15 aa, Homo sapiens
  CDR3 for alpha chain variable domain of TCR clone 391980 (TRAV38-1, TRAJ37)
CDLIFGSGNTGKLIF

SEQ ID NO: 783960 - protein, 16 aa, Homo sapiens
  CDR3 for beta chain variable domain of TCR clone 391980 (TRBV12-4, TRBJ1-5)
CASRQPVEGSNQPQHF

SEQ ID NO: 783961 - protein, 13 aa, Homo sapiens
  CDR3 for alpha chain variable domain of TCR clone 391981 (TRAV21, TRAJ26)
CAVIGNYGQNFVF

SEQ ID NO: 783962 - protein, 15 aa, Homo sapiens
  CDR3 for beta chain variable domain of TCR clone 391981 (TRBV7-9, TRBJ1-5)
CASSQGHQPNQTQHF

SEQ ID NO: 783963 - protein, 14 aa, Homo sapiens
  CDR3 for alpha chain variable domain of TCR clone 391982 (TRAV1-2, TRAJ16)
CAVNRISDGQKLLF

SEQ ID NO: 783964 - protein, 13 aa, Homo sapiens
  CDR3 for beta chain variable domain of TCR clone 391982 (TRBV15, TRBJ1-6)
CATSGGLNSPLHF

SEQ ID NO: 783965 - protein, 10 aa, Homo sapiens
  CDR3 for alpha chain variable domain of TCR clone 391983 (TRAV26-1, TRAJ22)
CIAVSRQLTF

SEQ ID NO: 783966 - protein, 12 aa, Homo sapiens
  CDR3 for beta chain variable domain of TCR clone 391983 (TRBV12-4, TRBJ1-1)
CASSFGRAEAFF

SEQ ID NO: 783967 - protein, 17 aa, Homo sapiens
  CDR3 for alpha chain variable domain of TCR clone 391984 (TRAV3, TRAJ6)
CAVRDGPREGGSYIPTL

SEQ ID NO: 783968 - protein, 18 aa, Homo sapiens
  CDR3 for beta chain variable domain of TCR clone 391984 (TRBV7-9, TRBJ2-7)
CASSLTTSGSRTWYEQYF

SEQ ID NO: 783969 - protein, 12 aa, Homo sapiens
  CDR3 for alpha chain variable domain of TCR clone 391985 (TRAV12-3, TRAJ17)
CAMTLAGNKLTF

SEQ ID NO: 783970 - protein, 15 aa, Homo sapiens
  CDR3 for beta chain variable domain of TCR clone 391985 (TRBV12-4, TRBJ2-5)
CASSPPTGLQETQYF

SEQ ID NO: 783971 - protein, 16 aa, Homo sapiens
  CDR3 for alpha chain variable domain of TCR clone 391986 (TRAV8-3, TRAJ13)
CAVGAYPSGGYQKVTF

SEQ ID NO: 783972 - protein, 15 aa, Homo sapiens
  CDR3 for beta chain variable domain of TCR clone 391986 (TRBV19, TRBJ1-5)
CASSILWADNQPQHL

SEQ ID NO: 783973 - protein, 16 aa, Homo sapiens
  CDR3 for alpha chain variable domain of TCR clone 391987 (TRAV3, TRAJ37)
CAVRPHGSGNTGKLIL

SEQ ID NO: 783974 - protein, 14 aa, Homo sapiens
  CDR3 for beta chain variable domain of TCR clone 391987 (TRBV2, TRBJ2-1)
CASSVRAYYNEQFF

SEQ ID NO: 783975 - protein, 13 aa, Homo sapiens
  CDR3 for alpha chain variable domain of TCR clone 391988 (TRAV12-1, TRAJ22)
CVVPSGSARQLTF

SEQ ID NO: 783976 - protein, 14 aa, Homo sapiens
  CDR3 for beta chain variable domain of TCR clone 391988 (TRBV4-1, TRBJ2-2)
CASSQAVNTGELFF

SEQ ID NO: 783977 - protein, 12 aa, Homo sapiens
  CDR3 for alpha chain variable domain of TCR clone 391989 (TRAV13-2, TRAJ23)
CAERHRGGKLIF

SEQ ID NO: 783978 - protein, 12 aa, Homo sapiens
  CDR3 for beta chain variable domain of TCR clone 391989 (TRBV19, TRBJ2-1)
CASSRQGAEQFF

SEQ ID NO: 783979 - protein, 13 aa, Homo sapiens
  CDR3 for alpha chain variable domain of TCR clone 391990 (TRAV12-1, TRAJ16)
CVVNGPDGQKLLF

SEQ ID NO: 783980 - protein, 16 aa, Homo sapiens
  CDR3 for beta chain variable domain of TCR clone 391990 (TRBV6-1, TRBJ2-5)
CASSETLDRGAETQYF

SEQ ID NO: 783981 - protein, 15 aa, Homo sapiens
  CDR3 for alpha chain variable domain of TCR clone 391991 (TRAV8-6, TRAJ37)
CAVIFSSGNTGKLIC

SEQ ID NO: 783982 - protein, 15 aa, Homo sapiens
  CDR3 for beta chain variable domain of TCR clone 391991 (TRBV25-1, TRBJ2-4)
CASSETESAKNIQYF

SEQ ID NO: 783983 - protein, 12 aa, Homo sapiens
  CDR3 for alpha chain variable domain of TCR clone 391992 (TRAV12-3, TRAJ17)
CAMTLTGNKITF

SEQ ID NO: 783984 - protein, 13 aa, Homo sapiens
  CDR3 for beta chain variable domain of TCR clone 391992 (TRBV24-1, TRBJ2-2)
CATTATRTGELFF

SEQ ID NO: 783985 - protein, 13 aa, Homo sapiens
  CDR3 for alpha chain variable domain of TCR clone 391993 (TRAV6, TRAJ9)
CALDRTGGFKTIF

SEQ ID NO: 783986 - protein, 15 aa, Homo sapiens
  CDR3 for beta chain variable domain of TCR clone 391993 (TRBV27, TRBJ2-1)
CAISNGGGSSNEQFF

SEQ ID NO: 783987 - protein, 12 aa, Homo sapiens
  CDR3 for alpha chain variable domain of TCR clone 391994 (TRAV13-2, TRAJ23)
CAERHRGGKLIF

SEQ ID NO: 783988 - protein, 14 aa, Homo sapiens
  CDR3 for beta chain variable domain of TCR clone 391994 (TRBV7-8, TRBJ2-3)
CASSFPDGQDKQYF

SEQ ID NO: 783989 - protein, 12 aa, Homo sapiens
  CDR3 for alpha chain variable domain of TCR clone 391995 (TRAV12-2, TRAJ21)
CAPSDNFNKFYF

SEQ ID NO: 783990 - protein, 12 aa, Homo sapiens
  CDR3 for beta chain variable domain of TCR clone 391995 (TRBV11-2, TRBJ2-2)
CASSLGGGELFF

SEQ ID NO: 783991 - protein, 14 aa, Homo sapiens
  CDR3 for alpha chain variable domain of TCR clone 391996 (TRAV12-2, TRAJ17)
CAVNIKAAGNKLTF

SEQ ID NO: 783992 - protein, 15 aa, Homo sapiens
  CDR3 for beta chain variable domain of TCR clone 391996 (TRBV12-4, TRBJ1-2)
CAIFRGAGRENGYTF

SEQ ID NO: 783993 - protein, 14 aa, Homo sapiens
  CDR3 for alpha chain variable domain of TCR clone 391997 (TRAV12-2, TRAJ40)
CAVKIPSGTYKYHF

SEQ ID NO: 783994 - protein, 14 aa, Homo sapiens
  CDR3 for beta chain variable domain of TCR clone 391997 (TRBV20-1, TRBJ1-1)
CSAQTRIGGTEAFF

SEQ ID NO: 783995 - protein, 16 aa, Homo sapiens
  CDR3 for alpha chain variable domain of TCR clone 391998 (TRAV30, TRAJ24)
CGTEIVVADSWGKFPF

SEQ ID NO: 783996 - protein, 14 aa, Homo sapiens
  CDR3 for beta chain variable domain of TCR clone 391998 (TRBV12-5, TRBJ2-5)
CASGSRTHQETQYF

SEQ ID NO: 783997 - protein, 14 aa, Homo sapiens
  CDR3 for alpha chain variable domain of TCR clone 391999 (TRAV1-2, TRAJ8)
CAVREDTGFQKLVF

SEQ ID NO: 783998 - protein, 15 aa, Homo sapiens
  CDR3 for beta chain variable domain of TCR clone 391999 (TRBV5-5, TRBJ1-1)
CASSLVGKDNSEAFF

SEQ ID NO: 783999 - protein, 13 aa, Homo sapiens
  CDR3 for alpha chain variable domain of TCR clone 392000 (TRAV8-3, TRAJ44)
CAVGPGTASKLTF

SEQ ID NO: 784000 - protein, 12 aa, Homo sapiens
  CDR3 for beta chain variable domain of TCR clone 392000 (TRBV7-8, TRBJ2-7)
CASSLGDREQYF

SEQ ID NO: 784001 - protein, 15 aa, Homo sapiens
  CDR3 for alpha chain variable domain of TCR clone 392001 (TRAV20, TRAJ43)
CAVRAGESSNNDMRF

SEQ ID NO: 784002 - protein, 14 aa, Homo sapiens
  CDR3 for beta chain variable domain of TCR clone 392001 (TRBV27, TRBJ2-1)
CASRHLGRGKEQFF

SEQ ID NO: 784003 - protein, 13 aa, Homo sapiens
  CDR3 for alpha chain variable domain of TCR clone 392002 (TRAV3, TRAJ21)
CAVREPDFNKFYV

SEQ ID NO: 784004 - protein, 16 aa, Homo sapiens
  CDR3 for beta chain variable domain of TCR clone 392002 (TRBV27, TRBJ2-2)
CASSFRGLVRTGELFF

SEQ ID NO: 784005 - protein, 16 aa, Homo sapiens
  CDR3 for alpha chain variable domain of TCR clone 392003 (TRAV13-1, TRAJ10)
CAASSHFTGGGNKLAF

SEQ ID NO: 784006 - protein, 15 aa, Homo sapiens
  CDR3 for beta chain variable domain of TCR clone 392003 (TRBV7-9, TRBJ1-6)
CASSSPGRGNSPLHF

SEQ ID NO: 784007 - protein, 14 aa, Homo sapiens
  CDR3 for alpha chain variable domain of TCR clone 392004 (TRAV1-1, TRAJ27)
CAAIYNTNAGKSTF

SEQ ID NO: 784008 - protein, 17 aa, Homo sapiens
  CDR3 for beta chain variable domain of TCR clone 392004 (TRBV11-2, TRBJ2-1)
CASSLYPPGVEYNEQFF

SEQ ID NO: 784009 - protein, 14 aa, Homo sapiens
  CDR3 for alpha chain variable domain of TCR clone 392005 (TRAV8-2, TRAJ4)
CVVSPSGGYTKLIF

SEQ ID NO: 784010 - protein, 15 aa, Homo sapiens
  CDR3 for beta chain variable domain of TCR clone 392005 (TRBV6-6, TRBJ2-7)
CASSYSYGGSYEQYF

SEQ ID NO: 784011 - protein, 15 aa, Homo sapiens
  CDR3 for alpha chain variable domain of TCR clone 392006 (TRAV26-2, TRAJ28)
CILLESGAGSYQLTF

SEQ ID NO: 784012 - protein, 11 aa, Homo sapiens
  CDR3 for beta chain variable domain of TCR clone 392006 (TRBV25-1, TRBJ2-7)
CASSTSYEQYF

SEQ ID NO: 784013 - protein, 13 aa, Homo sapiens
  CDR3 for alpha chain variable domain of TCR clone 392007 (TRAV3, TRAJ30)
CAVRDRGDDKIIF

SEQ ID NO: 784014 - protein, 12 aa, Homo sapiens
  CDR3 for beta chain variable domain of TCR clone 392007 (TRBV7-9, TRBJ2-7)
CASSFGSYEQYF

SEQ ID NO: 784015 - protein, 16 aa, Homo sapiens
  CDR3 for alpha chain variable domain of TCR clone 392008 (TRAV20, TRAJ10)
CAVLRGLTGGGNKLTF

SEQ ID NO: 784016 - protein, 14 aa, Homo sapiens
  CDR3 for beta chain variable domain of TCR clone 392008 (TRBV19, TRBJ1-5)
CASRAPDSFRTQHF

SEQ ID NO: 784017 - protein, 10 aa, Homo sapiens
  CDR3 for alpha chain variable domain of TCR clone 392009 (TRAV8-4, TRAJ43)
CAVSVDDMRF

SEQ ID NO: 784018 - protein, 13 aa, Homo sapiens
  CDR3 for beta chain variable domain of TCR clone 392009 (TRBV12-4, TRBJ2-5)
CASSPGTEETQYF

SEQ ID NO: 784019 - protein, 22 aa, Homo sapiens
  CDR3 for alpha chain variable domain of TCR clone 392010 (TRAV26-1, TRAJ42)
CVVRPIIEEAKEISSLEKALNS

SEQ ID NO: 784020 - protein, 16 aa, Homo sapiens
  CDR3 for beta chain variable domain of TCR clone 392010 (TRBV7-3, TRBJ2-2)
CASSLKRGTLSGELFF

SEQ ID NO: 784021 - protein, 14 aa, Homo sapiens
  CDR3 for alpha chain variable domain of TCR clone 392011 (TRAV8-6, TRAJ49)
CAVSDPGTGNQFYF

SEQ ID NO: 784022 - protein, 13 aa, Homo sapiens
  CDR3 for beta chain variable domain of TCR clone 392011 (TRBV7-9, TRBJ1-2)
CASSLKQNYGYAF

SEQ ID NO: 784023 - protein, 14 aa, Homo sapiens
  CDR3 for alpha chain variable domain of TCR clone 392012 (TRAV16, TRAJ33)
CALSAMDSNYQLIL

SEQ ID NO: 784024 - protein, 16 aa, Homo sapiens
  CDR3 for beta chain variable domain of TCR clone 392012 (TRBV12-4, TRBJ2-3)
CASSFPSNTNTDTQCF

SEQ ID NO: 784025 - protein, 15 aa, Homo sapiens
  CDR3 for alpha chain variable domain of TCR clone 392013 (TRAV13-1, TRAJ50)
CAAKGSETSYDKVIF

SEQ ID NO: 784026 - protein, 18 aa, Homo sapiens
  CDR3 for beta chain variable domain of TCR clone 392013 (TRBV10-3, TRBJ2-1)
CSSVPSVSLRGGVDEQFF

SEQ ID NO: 784027 - protein, 14 aa, Homo sapiens
  CDR3 for alpha chain variable domain of TCR clone 392014 (TRAV1-2, TRAJ8)
CAVREDTGFQRLVF

SEQ ID NO: 784028 - protein, 13 aa, Homo sapiens
  CDR3 for beta chain variable domain of TCR clone 392014 (TRBV7-6, TRBJ1-2)
CASSLVADYGYSF

SEQ ID NO: 784029 - protein, 13 aa, Homo sapiens
  CDR3 for alpha chain variable domain of TCR clone 392015 (TRAV38-2/DV8, TRAJ34)
CAYRTWNTDKLIF

SEQ ID NO: 784030 - protein, 15 aa, Homo sapiens
  CDR3 for beta chain variable domain of TCR clone 392015 (TRBV7-2, TRBJ2-1)
CASTHGTGIYNEQFF

SEQ ID NO: 784031 - protein, 15 aa, Homo sapiens
  CDR3 for alpha chain variable domain of TCR clone 392016 (TRAV13-2, TRAJ40)
CAGNRSRQGTYKYIF

SEQ ID NO: 784032 - protein, 15 aa, Homo sapiens
  CDR3 for beta chain variable domain of TCR clone 392016 (TRBV19, TRBJ2-1)
CASSMGWNSNNEQFF

SEQ ID NO: 784033 - protein, 14 aa, Homo sapiens
  CDR3 for alpha chain variable domain of TCR clone 392017 (TRAV13-1, TRAJ5)
CAASPDTGRRALTF

SEQ ID NO: 784034 - protein, 15 aa, Homo sapiens
  CDR3 for beta chain variable domain of TCR clone 392017 (TRBV7-2, TRBJ2-7)
CASSLTGQGTYDQYF

SEQ ID NO: 784035 - protein, 13 aa, Homo sapiens
  CDR3 for alpha chain variable domain of TCR clone 392018 (TRAV27, TRAJ6)
CAGGTRGSYIPTF

SEQ ID NO: 784036 - protein, 16 aa, Homo sapiens
  CDR3 for beta chain variable domain of TCR clone 392018 (TRBV15, TRBJ1-2)
CATSRGPRTGGGGYTF

SEQ ID NO: 784037 - protein, 15 aa, Homo sapiens
  CDR3 for alpha chain variable domain of TCR clone 392019 (TRAV12-1, TRAJ9)
CVVSFGDTGGIKTIF

SEQ ID NO: 784038 - protein, 13 aa, Homo sapiens
  CDR3 for beta chain variable domain of TCR clone 392019 (TRBV2, TRBJ1-4)
CASSERAGEKLFF

SEQ ID NO: 784039 - protein, 14 aa, Homo sapiens
  CDR3 for alpha chain variable domain of TCR clone 392020 (TRAV17, TRAJ57)
CATEPQGGSEKLVF

SEQ ID NO: 784040 - protein, 13 aa, Homo sapiens
  CDR3 for beta chain variable domain of TCR clone 392020 (TRBV10-3, TRBJ2-7)
CASKLAVNYEQYF

SEQ ID NO: 784041 - protein, 15 aa, Homo sapiens
  CDR3 for alpha chain variable domain of TCR clone 392021 (TRAV8-4, TRAJ42)
CAVGDDRGSQGNLIF

SEQ ID NO: 784042 - protein, 17 aa, Homo sapiens
  CDR3 for beta chain variable domain of TCR clone 392021 (TRBV11-2, TRBJ2-1)
CASSLYPPGVEYNEQFF

SEQ ID NO: 784043 - protein, 15 aa, Homo sapiens
  CDR3 for alpha chain variable domain of TCR clone 392022 (TRAV12-1, TRAJ44)
CVADLPTRTASKLTF

SEQ ID NO: 784044 - protein, 13 aa, Homo sapiens
  CDR3 for beta chain variable domain of TCR clone 392022 (TRBV6-5, TRBJ2-5)
CASSPQGGETQYF

SEQ ID NO: 784045 - protein, 14 aa, Homo sapiens
  CDR3 for alpha chain variable domain of TCR clone 392023 (TRAV23/DV6, TRAJ39)
CAASIGNAGNMLPF

SEQ ID NO: 784046 - protein, 12 aa, Homo sapiens
  CDR3 for beta chain variable domain of TCR clone 392023 (TRBV20-1, TRBJ2-5)
CSVGTGSETQYF

SEQ ID NO: 784047 - protein, 15 aa, Homo sapiens
  CDR3 for alpha chain variable domain of TCR clone 392024 (TRAV12-1, TRAJ9)
WVVSFGDTGGFKTIF

SEQ ID NO: 784048 - protein, 12 aa, Homo sapiens
  CDR3 for beta chain variable domain of TCR clone 392024 (TRBV12-4, TRBJ2-7)
CASSLGGYEQYF

SEQ ID NO: 784049 - protein, 18 aa, Homo sapiens
  CDR3 for alpha chain variable domain of TCR clone 392025 (TRAV12-1, TRAJ52)
CVVKLINAGGTSYGKLTF

SEQ ID NO: 784050 - protein, 16 aa, Homo sapiens
  CDR3 for beta chain variable domain of TCR clone 392025 (TRBV7-3, TRBJ2-2)
CASSLKRGTLSGELFF

SEQ ID NO: 784051 - protein, 13 aa, Homo sapiens
  CDR3 for alpha chain variable domain of TCR clone 392026 (TRAV12-1, TRAJ20)
CVVNRETDYKLSF

SEQ ID NO: 784052 - protein, 15 aa, Homo sapiens
  CDR3 for beta chain variable domain of TCR clone 392026 (TRBV14, TRBJ2-1)
CASSRGLAGGTEQFF

SEQ ID NO: 784053 - protein, 18 aa, Homo sapiens
  CDR3 for alpha chain variable domain of TCR clone 392027 (TRAV3, TRAJ17)
CAVRARRGGRSCRQQANF

SEQ ID NO: 784054 - protein, 12 aa, Homo sapiens
  CDR3 for beta chain variable domain of TCR clone 392027 (TRBV7-3, TRBJ1-2)
CASSKKGVTVTF

SEQ ID NO: 784055 - protein, 13 aa, Homo sapiens
  CDR3 for alpha chain variable domain of TCR clone 392028 (TRAV8-3, TRAJ6)
CAARRGGSYIPTF

SEQ ID NO: 784056 - protein, 15 aa, Homo sapiens
  CDR3 for beta chain variable domain of TCR clone 392028 (TRBV4-1, TRBJ2-3)
CASSNLAGGRDTQYC

SEQ ID NO: 784057 - protein, 12 aa, Homo sapiens
  CDR3 for alpha chain variable domain of TCR clone 392029 (TRAV2, TRAJ33)
GAFMDNNYQLIW

SEQ ID NO: 784058 - protein, 16 aa, Homo sapiens
  CDR3 for beta chain variable domain of TCR clone 392029 (TRBV2, TRBJ2-7)
CASSEPWTGPSYEQYF

SEQ ID NO: 784059 - protein, 15 aa, Homo sapiens
  CDR3 for alpha chain variable domain of TCR clone 392030 (TRAV20, TRAJ43)
CAVQAGKSSNNDIRF

SEQ ID NO: 784060 - protein, 13 aa, Homo sapiens
  CDR3 for beta chain variable domain of TCR clone 392030 (TRBV27, TRBJ2-1)
CQQTLGGGKEQFF

SEQ ID NO: 784061 - protein, 16 aa, Homo sapiens
  CDR3 for alpha chain variable domain of TCR clone 392031 (TRAV3, TRAJ37)
CAVRPHGSGNTGKIIF

SEQ ID NO: 784062 - protein, 11 aa, Homo sapiens
  CDR3 for beta chain variable domain of TCR clone 392031 (TRBV10-3, TRBJ2-7)
CAISEGLEQYF

SEQ ID NO: 784063 - protein, 13 aa, Homo sapiens
  CDR3 for alpha chain variable domain of TCR clone 392032 (TRAV17, TRAJ11)
CATRSSGYSTLTF

SEQ ID NO: 784064 - protein, 15 aa, Homo sapiens
  CDR3 for beta chain variable domain of TCR clone 392032 (TRBV6-1, TRBJ2-3)
CASSERGGITDTQYF

SEQ ID NO: 784065 - protein, 14 aa, Homo sapiens
  CDR3 for alpha chain variable domain of TCR clone 392033 (TRAV1-2, TRAJ8)
CAVRENTGFQNLVF

SEQ ID NO: 784066 - protein, 15 aa, Homo sapiens
  CDR3 for beta chain variable domain of TCR clone 392033 (TRBV15, TRBJ1-1)
CATSLQGGRNTEAFF

SEQ ID NO: 784067 - protein, 17 aa, Homo sapiens
  CDR3 for alpha chain variable domain of TCR clone 392034 (TRAV3, TRAJ6)
CAVRDGPRAGGSYITTF

SEQ ID NO: 784068 - protein, 18 aa, Homo sapiens
  CDR3 for beta chain variable domain of TCR clone 392034 (TRBV7-3, TRBJ2-3)
CASSSTGTYPGSTDTQYF

SEQ ID NO: 784069 - protein, 13 aa, Homo sapiens
  CDR3 for alpha chain variable domain of TCR clone 392035 (TRAV12-2, TRAJ37)
CAGGSGNTGKLIF

SEQ ID NO: 784070 - protein, 14 aa, Homo sapiens
  CDR3 for beta chain variable domain of TCR clone 392035 (TRBV6-1, TRBJ2-6)
CASQQRAGANVLTF

SEQ ID NO: 784071 - protein, 14 aa, Homo sapiens
  CDR3 for alpha chain variable domain of TCR clone 392036 (TRAV30, TRAJ26)
CGTEIVSYGQNFAF

SEQ ID NO: 784072 - protein, 13 aa, Homo sapiens
  CDR3 for beta chain variable domain of TCR clone 392036 (TRBV19, TRBJ1-3)
CASRLYLGNTIYF

SEQ ID NO: 784073 - protein, 13 aa, Homo sapiens
  CDR3 for alpha chain variable domain of TCR clone 392037 (TRAV23/DV6, TRAJ15)
CAAIPAGRNCLDL

SEQ ID NO: 784074 - protein, 14 aa, Homo sapiens
  CDR3 for beta chain variable domain of TCR clone 392037 (TRBV7-9, TRBJ1-2)
CASSRQGANYGYTF

SEQ ID NO: 784075 - protein, 12 aa, Homo sapiens
  CDR3 for alpha chain variable domain of TCR clone 392038 (TRAV13-2, TRAJ23)
CAERHRGGKLIF

SEQ ID NO: 784076 - protein, 13 aa, Homo sapiens
  CDR3 for beta chain variable domain of TCR clone 392038 (TRBV11-2, TRBJ1-2)
CASSLDSPSGYTF

SEQ ID NO: 784077 - protein, 15 aa, Homo sapiens
  CDR3 for alpha chain variable domain of TCR clone 392039 (TRAV3, TRAJ4)
CAQNMFAGGYNKLIF

SEQ ID NO: 784078 - protein, 16 aa, Homo sapiens
  CDR3 for beta chain variable domain of TCR clone 392039 (TRBV3-1, TRBJ1-6)
CASSQEFQGSYSPLHF

SEQ ID NO: 784079 - protein, 20 aa, Homo sapiens
  CDR3 for alpha chain variable domain of TCR clone 392040 (TRAV2, TRAJ9)
CAVGAGGFKLSLEQERDYLL

SEQ ID NO: 784080 - protein, 16 aa, Homo sapiens
  CDR3 for beta chain variable domain of TCR clone 392040 (TRBV13, TRBJ2-2)
CASSPRTGEHTGELFF

SEQ ID NO: 784081 - protein, 20 aa, Homo sapiens
  CDR3 for alpha chain variable domain of TCR clone 392041 (TRAV21, TRAJ13)
CAVPRSFWGLPERYLWNCNK

SEQ ID NO: 784082 - protein, 16 aa, Homo sapiens
  CDR3 for beta chain variable domain of TCR clone 392041 (TRBV4-1, TRBJ1-5)
CASSQGGHTTNQPQHF

SEQ ID NO: 784083 - protein, 11 aa, Homo sapiens
  CDR3 for alpha chain variable domain of TCR clone 392042 (TRAV1-1, TRAJ30)
YAQNRDDKIIF

SEQ ID NO: 784084 - protein, 14 aa, Homo sapiens
  CDR3 for beta chain variable domain of TCR clone 392042 (TRBV7-8, TRBJ2-7)
CASSPGLADYEQYF

SEQ ID NO: 784085 - protein, 14 aa, Homo sapiens
  CDR3 for alpha chain variable domain of TCR clone 392043 (TRAV12-2, TRAJ13)
CAVKKTGGYQKVTF

SEQ ID NO: 784086 - protein, 13 aa, Homo sapiens
  CDR3 for beta chain variable domain of TCR clone 392043 (TRBV20-1, TRBJ1-1)
CSARLGQGTEDFF

SEQ ID NO: 784087 - protein, 17 aa, Homo sapiens
  CDR3 for alpha chain variable domain of TCR clone 392044 (TRAV3, TRAJ6)
CAVRDGPRAGGSYIPTF

SEQ ID NO: 784088 - protein, 16 aa, Homo sapiens
  CDR3 for beta chain variable domain of TCR clone 392044 (TRBV7-8, TRBJ2-3)
CASSTEGQRETDTHYF

SEQ ID NO: 784089 - protein, 14 aa, Homo sapiens
  CDR3 for alpha chain variable domain of TCR clone 392045 (TRAV23/DV6, TRAJ45)
CAASWGGGADGLTF

SEQ ID NO: 784090 - protein, 15 aa, Homo sapiens
  CDR3 for beta chain variable domain of TCR clone 392045 (TRBV4-2, TRBJ1-2)
CASSRNTGAGYGYSF

SEQ ID NO: 784091 - protein, 13 aa, Homo sapiens
  CDR3 for alpha chain variable domain of TCR clone 392046 (TRAV21, TRAJ27)
CAARPGNAGKSTL

SEQ ID NO: 784092 - protein, 14 aa, Homo sapiens
  CDR3 for beta chain variable domain of TCR clone 392046 (TRBV7-6, TRBJ2-3)
CASILGTVTDTQYF

SEQ ID NO: 784093 - protein, 17 aa, Homo sapiens
  CDR3 for alpha chain variable domain of TCR clone 392047 (TRAV26-2, TRAJ45)
CILRQGRSGGGADGLTF

SEQ ID NO: 784094 - protein, 15 aa, Homo sapiens
  CDR3 for beta chain variable domain of TCR clone 392047 (TRBV7-6, TRBJ2-5)
CASSKPTGPQETQYF

SEQ ID NO: 784095 - protein, 12 aa, Homo sapiens
  CDR3 for alpha chain variable domain of TCR clone 392048 (TRAV13-1, TRAJ15)
CAASQAGTSLIF

SEQ ID NO: 784096 - protein, 18 aa, Homo sapiens
  CDR3 for beta chain variable domain of TCR clone 392048 (TRBV7-9, TRBJ2-3)
CASSLPINGQISTDTQYF

SEQ ID NO: 784097 - protein, 11 aa, Homo sapiens
  CDR3 for alpha chain variable domain of TCR clone 392049 (TRAV12-2, TRAJ21)
CAVEGFNKFYF

SEQ ID NO: 784098 - protein, 15 aa, Homo sapiens
  CDR3 for beta chain variable domain of TCR clone 392049 (TRBV20-1, TRBJ1-5)
CSASRRSDLGQPQHF

SEQ ID NO: 784099 - protein, 16 aa, Homo sapiens
  CDR3 for alpha chain variable domain of TCR clone 392050 (TRAV16, TRAJ57)
CAPYLITQGGSEKLVF

SEQ ID NO: 784100 - protein, 16 aa, Homo sapiens
  CDR3 for beta chain variable domain of TCR clone 392050 (TRBV15, TRBJ2-1)
CATSRERLAGAYEQFF

SEQ ID NO: 784101 - protein, 14 aa, Homo sapiens
  CDR3 for alpha chain variable domain of TCR clone 392051 (TRAV29/DV5, TRAJ36)
CAARRKTGANNLFF

SEQ ID NO: 784102 - protein, 13 aa, Homo sapiens
  CDR3 for beta chain variable domain of TCR clone 392051 (TRBV13, TRBJ2-7)
CASSLERGWKKYF

SEQ ID NO: 784103 - protein, 13 aa, Homo sapiens
  CDR3 for alpha chain variable domain of TCR clone 392052 (TRAV1-2, TRAJ9)
CAALNTGGFKTIF

SEQ ID NO: 784104 - protein, 14 aa, Homo sapiens
  CDR3 for beta chain variable domain of TCR clone 392052 (TRBV19, TRBJ2-7)
CASTVQGRPYEQYF

SEQ ID NO: 784105 - protein, 14 aa, Homo sapiens
  CDR3 for alpha chain variable domain of TCR clone 392053 (TRAV1-2, TRAJ16)
CAVNRFSDGQKLLF

SEQ ID NO: 784106 - protein, 16 aa, Homo sapiens
  CDR3 for beta chain variable domain of TCR clone 392053 (TRBV28, TRBJ1-5)
CASSLTGQGWNQPQHF

SEQ ID NO: 784107 - protein, 14 aa, Homo sapiens
  CDR3 for alpha chain variable domain of TCR clone 392054 (TRAV35, TRAJ33)
CAGSSQDSNYQLIW

SEQ ID NO: 784108 - protein, 13 aa, Homo sapiens
  CDR3 for beta chain variable domain of TCR clone 392054 (TRBV7-8, TRBJ2-1)
CQQLFGGRNEQFF

SEQ ID NO: 784109 - protein, 15 aa, Homo sapiens
  CDR3 for alpha chain variable domain of TCR clone 392055 (TRAV25, TRAJ53)
CPTSNSGGSNYKLTF

SEQ ID NO: 784110 - protein, 14 aa, Homo sapiens
  CDR3 for beta chain variable domain of TCR clone 392055 (TRBV11-2, TRBJ2-3)
CASSRLARTDTQDF

SEQ ID NO: 784111 - protein, 11 aa, Homo sapiens
  CDR3 for alpha chain variable domain of TCR clone 392056 (TRAV21, TRAJ11)
CAVNGYSTLTF

SEQ ID NO: 784112 - protein, 17 aa, Homo sapiens
  CDR3 for beta chain variable domain of TCR clone 392056 (TRBV7-9, TRBJ2-1)
CASSLESPGRAGGEQFF

SEQ ID NO: 784113 - protein, 19 aa, Homo sapiens
  CDR3 for alpha chain variable domain of TCR clone 392057 (TRAV2, TRAJ20)
ILQVREADAAVYRDCKLSF

SEQ ID NO: 784114 - protein, 17 aa, Homo sapiens
  CDR3 for beta chain variable domain of TCR clone 392057 (TRBV11-2, TRBJ2-1)
CDSSLYPPGVEYNEQFF

SEQ ID NO: 784115 - protein, 11 aa, Homo sapiens
  CDR3 for alpha chain variable domain of TCR clone 392058 (TRAV1-2, TRAJ20)
CAVTNDYKLSF

SEQ ID NO: 784116 - protein, 15 aa, Homo sapiens
  CDR3 for beta chain variable domain of TCR clone 392058 (TRBV9, TRBJ1-6)
CASSVAGTGDSPLHF

SEQ ID NO: 784117 - protein, 13 aa, Homo sapiens
  CDR3 for alpha chain variable domain of TCR clone 392059 (TRAV12-3, TRAJ48)
CAMSLVGNEKLTF

SEQ ID NO: 784118 - protein, 11 aa, Homo sapiens
  CDR3 for beta chain variable domain of TCR clone 392059 (TRBV7-2, TRBJ2-7)
CASSAGLWQYF

SEQ ID NO: 784119 - protein, 14 aa, Homo sapiens
  CDR3 for alpha chain variable domain of TCR clone 392060 (TRAV3, TRAJ7)
CAVREEEREKQTRV

SEQ ID NO: 784120 - protein, 12 aa, Homo sapiens
  CDR3 for beta chain variable domain of TCR clone 392060 (TRBV24-1, TRBJ1-4)
CATSDPNEKLFF

SEQ ID NO: 784121 - protein, 14 aa, Homo sapiens
  CDR3 for alpha chain variable domain of TCR clone 392061 (TRAV13-2, TRAJ17)
CAENSKAAGNKLTS

SEQ ID NO: 784122 - protein, 15 aa, Homo sapiens
  CDR3 for beta chain variable domain of TCR clone 392061 (TRBV27, TRBJ2-1)
CASSNGGGSSNEQFF

SEQ ID NO: 784123 - protein, 12 aa, Homo sapiens
  CDR3 for alpha chain variable domain of TCR clone 392062 (TRAV17, TRAJ30)
CATDARDDKIIF

SEQ ID NO: 784124 - protein, 16 aa, Homo sapiens
  CDR3 for beta chain variable domain of TCR clone 392062 (TRBV5-7, TRBJ2-7)
CASSPTSGRELDEQYV

SEQ ID NO: 784125 - protein, 15 aa, Homo sapiens
  CDR3 for alpha chain variable domain of TCR clone 392063 (TRAV3, TRAJ20)
CAVRDIKLSDYKLSF

SEQ ID NO: 784126 - protein, 15 aa, Homo sapiens
  CDR3 for beta chain variable domain of TCR clone 392063 (TRBV11-2, TRBJ2-2)
CASSSDRVNAGELFF

SEQ ID NO: 784127 - protein, 23 aa, Homo sapiens
  CDR3 for alpha chain variable domain of TCR clone 392064 (TRAV1-1, TRAJ29)
LLQELQMKDSASYFLGGTTPLVF

SEQ ID NO: 784128 - protein, 13 aa, Homo sapiens
  CDR3 for beta chain variable domain of TCR clone 392064 (TRBV25-1, TRBJ2-7)
CASSEDGDYEQYF

SEQ ID NO: 784129 - protein, 12 aa, Homo sapiens
  CDR3 for alpha chain variable domain of TCR clone 392065 (TRAV3, TRAJ43)
CAVRDPNNDMRF

SEQ ID NO: 784130 - protein, 14 aa, Homo sapiens
  CDR3 for beta chain variable domain of TCR clone 392065 (TRBV19, TRBJ2-5)
CASSMTGQQETQDF

SEQ ID NO: 784131 - protein, 15 aa, Homo sapiens
  CDR3 for alpha chain variable domain of TCR clone 392066 (TRAV12-3, TRAJ6)
CALSATTGGSYIPTF

SEQ ID NO: 784132 - protein, 16 aa, Homo sapiens
  CDR3 for beta chain variable domain of TCR clone 392066 (TRBV20-1, TRBJ1-2)
CSAPMGQGVANYGYTF

SEQ ID NO: 784133 - protein, 12 aa, Homo sapiens
  CDR3 for alpha chain variable domain of TCR clone 392067 (TRAV12-3, TRAJ17)
CAMTLTGNKLTL

SEQ ID NO: 784134 - protein, 20 aa, Homo sapiens
  CDR3 for beta chain variable domain of TCR clone 392067 (TRBV19, TRBJ2-1)
CASSISRTVTSTRLNNEQFF

SEQ ID NO: 784135 - protein, 15 aa, Homo sapiens
  CDR3 for alpha chain variable domain of TCR clone 392068 (TRAV29/DV5, TRAJ24)
CAPSGATDSWGKFQF

SEQ ID NO: 784136 - protein, 12 aa, Homo sapiens
  CDR3 for beta chain variable domain of TCR clone 392068 (TRBV11-2, TRBJ2-2)
CASSLPTGELFF

SEQ ID NO: 784137 - protein, 12 aa, Homo sapiens
  CDR3 for alpha chain variable domain of TCR clone 392069 (TRAV25, TRAJ20)
CAGRSNDYKLSF

SEQ ID NO: 784138 - protein, 15 aa, Homo sapiens
  CDR3 for beta chain variable domain of TCR clone 392069 (TRBV7-6, TRBJ2-7)
CASSVRRDTFGEQYF

SEQ ID NO: 784139 - protein, 13 aa, Homo sapiens
  CDR3 for alpha chain variable domain of TCR clone 392070 (TRAV3, TRAJ8)
CSVSFTGFQKLVF

SEQ ID NO: 784140 - protein, 12 aa, Homo sapiens
  CDR3 for beta chain variable domain of TCR clone 392070 (TRBV2, TRBJ1-2)
CASSGQTYGYTF

SEQ ID NO: 784141 - protein, 14 aa, Homo sapiens
  CDR3 for alpha chain variable domain of TCR clone 392071 (TRAV12-1, TRAJ28)
CVAISGAGSYQLTF

SEQ ID NO: 784142 - protein, 16 aa, Homo sapiens
  CDR3 for beta chain variable domain of TCR clone 392071 (TRBV2, TRBJ2-3)
CASSTSVEGVTDTQYF

SEQ ID NO: 784143 - protein, 11 aa, Homo sapiens
  CDR3 for alpha chain variable domain of TCR clone 392072 (TRAV1-2, TRAJ20)
CAVSNDYKLSF

SEQ ID NO: 784144 - protein, 16 aa, Homo sapiens
  CDR3 for beta chain variable domain of TCR clone 392072 (TRBV29-1, TRBJ2-6)
YSVEDITYSGANVLTF

SEQ ID NO: 784145 - protein, 12 aa, Homo sapiens
  CDR3 for alpha chain variable domain of TCR clone 392073 (TRAV12-2, TRAJ7)
CAVMRVNNRLAF

SEQ ID NO: 784146 - protein, 17 aa, Homo sapiens
  CDR3 for beta chain variable domain of TCR clone 392073 (TRBV7-9, TRBJ2-3)
CASSPTVAGDLTDTQYF

SEQ ID NO: 784147 - protein, 15 aa, Homo sapiens
  CDR3 for alpha chain variable domain of TCR clone 392074 (TRAV17, TRAJ57)
CATGPCQGGSEKLVF

SEQ ID NO: 784148 - protein, 14 aa, Homo sapiens
  CDR3 for beta chain variable domain of TCR clone 392074 (TRBV12-5, TRBJ2-5)
CASGSRTHQETQYF

SEQ ID NO: 784149 - protein, 17 aa, Homo sapiens
  CDR3 for alpha chain variable domain of TCR clone 392075 (TRAV36/DV7, TRAJ52)
CAVAQRAGGTSYGKLTF

SEQ ID NO: 784150 - protein, 16 aa, Homo sapiens
  CDR3 for beta chain variable domain of TCR clone 392075 (TRBV27, TRBJ2-2)
CASSLSGFWVTGELFF

SEQ ID NO: 784151 - protein, 14 aa, Homo sapiens
  CDR3 for alpha chain variable domain of TCR clone 392076 (TRAV12-3, TRAJ29)
CAMILLSGNTPLVF

SEQ ID NO: 784152 - protein, 14 aa, Homo sapiens
  CDR3 for beta chain variable domain of TCR clone 392076 (TRBV5-4, TRBJ2-2)
CASRLDGGTGELFF

SEQ ID NO: 784153 - protein, 15 aa, Homo sapiens
  CDR3 for alpha chain variable domain of TCR clone 392077 (TRAV26-1, TRAJ44)
FIVRANTGTASKLTF

SEQ ID NO: 784154 - protein, 16 aa, Homo sapiens
  CDR3 for beta chain variable domain of TCR clone 392077 (TRBV7-7, TRBJ2-1)
CASSLASGTSYNGQFF

SEQ ID NO: 784155 - protein, 12 aa, Homo sapiens
  CDR3 for alpha chain variable domain of TCR clone 392078 (TRAV27, TRAJ41)
CAGRNSGYELNF

SEQ ID NO: 784156 - protein, 15 aa, Homo sapiens
  CDR3 for beta chain variable domain of TCR clone 392078 (TRBV20-1, TRBJ1-5)
CSATSDRGLGQPQHF

SEQ ID NO: 784157 - protein, 14 aa, Homo sapiens
  CDR3 for alpha chain variable domain of TCR clone 392079 (TRAV16, TRAJ32)
CALKSGGATNKLIF

SEQ ID NO: 784158 - protein, 13 aa, Homo sapiens
  CDR3 for beta chain variable domain of TCR clone 392079 (TRBV27, TRBJ1-6)
CASSLVLVSPLHF

SEQ ID NO: 784159 - protein, 15 aa, Homo sapiens
  CDR3 for alpha chain variable domain of TCR clone 392080 (TRAV17, TRAJ35)
CATAFVIGFGNVLHC

SEQ ID NO: 784160 - protein, 13 aa, Homo sapiens
  CDR3 for beta chain variable domain of TCR clone 392080 (TRBV29-1, TRBJ2-2)
CSTTGVNTGELFF

SEQ ID NO: 784161 - protein, 15 aa, Homo sapiens
  CDR3 for alpha chain variable domain of TCR clone 392081 (TRAV17, TRAJ10)
CATVLLTGEGNKLTF

SEQ ID NO: 784162 - protein, 16 aa, Homo sapiens
  CDR3 for beta chain variable domain of TCR clone 392081 (TRBV7-9, TRBJ2-3)
CASSPWREVGTDTQYF

SEQ ID NO: 784163 - protein, 11 aa, Homo sapiens
  CDR3 for alpha chain variable domain of TCR clone 392082 (TRAV3, TRAJ21)
CAVGNFNKFYF

SEQ ID NO: 784164 - protein, 13 aa, Homo sapiens
  CDR3 for beta chain variable domain of TCR clone 392082 (TRBV10-2, TRBJ1-1)
CASNDQMNTEAFF

SEQ ID NO: 784165 - protein, 13 aa, Homo sapiens
  CDR3 for alpha chain variable domain of TCR clone 392083 (TRAV27, TRAJ56)
CAGKPGANSKLTF

SEQ ID NO: 784166 - protein, 18 aa, Homo sapiens
  CDR3 for beta chain variable domain of TCR clone 392083 (TRBV11-2, TRBJ2-1)
CASSLGGASRGAPNTQYF

SEQ ID NO: 784167 - protein, 13 aa, Homo sapiens
  CDR3 for alpha chain variable domain of TCR clone 392084 (TRAV13-1, TRAJ21)
CAASRYNFNKFYF

SEQ ID NO: 784168 - protein, 18 aa, Homo sapiens
  CDR3 for beta chain variable domain of TCR clone 392084 (TRBV4-1, TRBJ1-5)
CASSQDPRGQGLNQPQHF

SEQ ID NO: 784169 - protein, 14 aa, Homo sapiens
  CDR3 for alpha chain variable domain of TCR clone 392085 (TRAV2, TRAJ9)
CAVEDRSGGFKTIF

SEQ ID NO: 784170 - protein, 14 aa, Homo sapiens
  CDR3 for beta chain variable domain of TCR clone 392085 (TRBV7-3, TRBJ2-1)
CASSLAGGKNEQFF

SEQ ID NO: 784171 - protein, 12 aa, Homo sapiens
  CDR3 for alpha chain variable domain of TCR clone 392086 (TRAV8-3, TRAJ26)
CAGDNYGQNFVF

SEQ ID NO: 784172 - protein, 13 aa, Homo sapiens
  CDR3 for beta chain variable domain of TCR clone 392086 (TRBV12-4, TRBJ2-7)
CASSFVRGYEQYF

SEQ ID NO: 784173 - protein, 12 aa, Homo sapiens
  CDR3 for alpha chain variable domain of TCR clone 392087 (TRAV23/DV6, TRAJ30)
CAASKGDDKIIF

SEQ ID NO: 784174 - protein, 13 aa, Homo sapiens
  CDR3 for beta chain variable domain of TCR clone 392087 (TRBV19, TRBJ1-2)
CAISVPGQDGYTF

SEQ ID NO: 784175 - protein, 14 aa, Homo sapiens
  CDR3 for alpha chain variable domain of TCR clone 392088 (TRAV1-2, TRAJ27)
CAVGSGTNAGKSTF

SEQ ID NO: 784176 - protein, 15 aa, Homo sapiens
  CDR3 for beta chain variable domain of TCR clone 392088 (TRBV18, TRBJ2-7)
CASSPLQGRTYEQYF

SEQ ID NO: 784177 - protein, 15 aa, Homo sapiens
  CDR3 for alpha chain variable domain of TCR clone 392089 (TRAV26-2, TRAJ39)
CRLRGNNNAGNMLTF

SEQ ID NO: 784178 - protein, 13 aa, Homo sapiens
  CDR3 for beta chain variable domain of TCR clone 392089 (TRBV18, TRBJ1-1)
CASSPETKPEAFF

SEQ ID NO: 784179 - protein, 11 aa, Homo sapiens
  CDR3 for alpha chain variable domain of TCR clone 392090 (TRAV5, TRAJ24)
PRTDSWGKLQF

SEQ ID NO: 784180 - protein, 18 aa, Homo sapiens
  CDR3 for beta chain variable domain of TCR clone 392090 (TRBV13, TRBJ2-4)
CAIIDQKHSVLRRRDPAL

SEQ ID NO: 784181 - protein, 17 aa, Homo sapiens
  CDR3 for alpha chain variable domain of TCR clone 392091 (TRAV36/DV7, TRAJ52)
CAVAQRAGGTSYGKLTF

SEQ ID NO: 784182 - protein, 15 aa, Homo sapiens
  CDR3 for beta chain variable domain of TCR clone 392091 (TRBV19, TRBJ2-4)
CASRGPRRGENIQYF

SEQ ID NO: 784183 - protein, 13 aa, Homo sapiens
  CDR3 for alpha chain variable domain of TCR clone 392092 (TRAV12-2, TRAJ9)
CAVRWAGGFKTIF

SEQ ID NO: 784184 - protein, 15 aa, Homo sapiens
  CDR3 for beta chain variable domain of TCR clone 392092 (TRBV5-1, TRBJ1-4)
CASSLTADSDEKLFF

SEQ ID NO: 784185 - protein, 14 aa, Homo sapiens
  CDR3 for alpha chain variable domain of TCR clone 392093 (TRAV13-1, TRAJ35)
CAARKGGFGNVLHF

SEQ ID NO: 784186 - protein, 13 aa, Homo sapiens
  CDR3 for beta chain variable domain of TCR clone 392093 (TRBV7-3, TRBJ1-1)
CASSQDWGAEAFF

SEQ ID NO: 784187 - protein, 10 aa, Homo sapiens
  CDR3 for alpha chain variable domain of TCR clone 392094 (TRAV13-1, TRAJ30)
CAARDDKIIF

SEQ ID NO: 784188 - protein, 15 aa, Homo sapiens
  CDR3 for beta chain variable domain of TCR clone 392094 (TRBV3-1, TRBJ2-5)
CASSANLGGPETQYF

SEQ ID NO: 784189 - protein, 15 aa, Homo sapiens
  CDR3 for alpha chain variable domain of TCR clone 392095 (TRAV21, TRAJ24)
CAARSSTASWGKLQF

SEQ ID NO: 784190 - protein, 13 aa, Homo sapiens
  CDR3 for beta chain variable domain of TCR clone 392095 (TRBV10-3, TRBJ2-7)
CASKLAVNYEQYF

SEQ ID NO: 784191 - protein, 15 aa, Homo sapiens
  CDR3 for alpha chain variable domain of TCR clone 392096 (TRAV8-3, TRAJ45)
CASSYSGGGADGLTF

SEQ ID NO: 784192 - protein, 13 aa, Homo sapiens
  CDR3 for beta chain variable domain of TCR clone 392096 (TRBV14, TRBJ1-2)
CASSEDRRYGYTF

SEQ ID NO: 784193 - protein, 13 aa, Homo sapiens
  CDR3 for alpha chain variable domain of TCR clone 392097 (TRAV29/DV5, TRAJ31)
CAASRNNNARLMF

SEQ ID NO: 784194 - protein, 16 aa, Homo sapiens
  CDR3 for beta chain variable domain of TCR clone 392097 (TRBV19, TRBJ2-2)
CASRSPGTGATGELFV

SEQ ID NO: 784195 - protein, 12 aa, Homo sapiens
  CDR3 for alpha chain variable domain of TCR clone 392098 (TRAV17, TRAJ20)
CATQSNDYKLSF

SEQ ID NO: 784196 - protein, 13 aa, Homo sapiens
  CDR3 for beta chain variable domain of TCR clone 392098 (TRBV10-3, TRBJ1-1)
CAIIPKGGTEAFF

SEQ ID NO: 784197 - protein, 16 aa, Homo sapiens
  CDR3 for alpha chain variable domain of TCR clone 392099 (TRAV27, TRAJ34)
CAGGGLGDYNNDKLIF

SEQ ID NO: 784198 - protein, 15 aa, Homo sapiens
  CDR3 for beta chain variable domain of TCR clone 392099 (TRBV9, TRBJ1-4)
CASSVGGSTNEKLFF

SEQ ID NO: 784199 - protein, 16 aa, Homo sapiens
  CDR3 for alpha chain variable domain of TCR clone 392100 (TRAV8-4, TRAJ5)
CAVSPLTDTGRRALTF

SEQ ID NO: 784200 - protein, 14 aa, Homo sapiens
  CDR3 for beta chain variable domain of TCR clone 392100 (TRBV19, TRBJ1-6)
CASSTEGWNSPLHF

SEQ ID NO: 784201 - protein, 17 aa, Homo sapiens
  CDR3 for alpha chain variable domain of TCR clone 392101 (TRAV26-1, TRAJ37)
CIVRVITVSSNTGKLIF

SEQ ID NO: 784202 - protein, 16 aa, Homo sapiens
  CDR3 for beta chain variable domain of TCR clone 392101 (TRBV4-2, TRBJ1-5)
CASSQGQGASNQPQHF

SEQ ID NO: 784203 - protein, 19 aa, Homo sapiens
  CDR3 for alpha chain variable domain of TCR clone 392102 (TRAV38-1, TRAJ53)
CAFMKHGLERGGSNHKLTF

SEQ ID NO: 784204 - protein, 13 aa, Homo sapiens
  CDR3 for beta chain variable domain of TCR clone 392102 (TRBV19, TRBJ2-7)
CASSPRQSYEQYF

SEQ ID NO: 784205 - protein, 15 aa, Homo sapiens
  CDR3 for alpha chain variable domain of TCR clone 392103 (TRAV35, TRAJ23)
CAGPLGYNQGGKLIF

SEQ ID NO: 784206 - protein, 14 aa, Homo sapiens
  CDR3 for beta chain variable domain of TCR clone 392103 (TRBV7-9, TRBJ1-1)
CASTPLQSYTEAFF

SEQ ID NO: 784207 - protein, 17 aa, Homo sapiens
  CDR3 for alpha chain variable domain of TCR clone 392104 (TRAV3, TRAJ42)
CAVRDRDYGGIQGNLIF

SEQ ID NO: 784208 - protein, 13 aa, Homo sapiens
  CDR3 for beta chain variable domain of TCR clone 392104 (TRBV10-3, TRBJ2-7)
CASKLAVNYEQYF

SEQ ID NO: 784209 - protein, 11 aa, Homo sapiens
  CDR3 for alpha chain variable domain of TCR clone 392105 (TRAV2, TRAJ23)
CAVDTRGKRIF

SEQ ID NO: 784210 - protein, 14 aa, Homo sapiens
  CDR3 for beta chain variable domain of TCR clone 392105 (TRBV2, TRBJ2-3)
CASSEGQNTDTQYF

SEQ ID NO: 784211 - protein, 13 aa, Homo sapiens
  CDR3 for alpha chain variable domain of TCR clone 392106 (TRAV3, TRAJ27)
CAVRPLGAGKSTF

SEQ ID NO: 784212 - protein, 12 aa, Homo sapiens
  CDR3 for beta chain variable domain of TCR clone 392106 (TRBV7-9, TRBJ2-7)
CASSIKREEQYF

SEQ ID NO: 784213 - protein, 15 aa, Homo sapiens
  CDR3 for alpha chain variable domain of TCR clone 392107 (TRAV8-3, TRAJ45)
CALSYSGGGADGLTF

SEQ ID NO: 784214 - protein, 13 aa, Homo sapiens
  CDR3 for beta chain variable domain of TCR clone 392107 (TRBV10-3, TRBJ2-7)
CASQLAVNYEQYF

SEQ ID NO: 784215 - protein, 16 aa, Homo sapiens
  CDR3 for alpha chain variable domain of TCR clone 392108 (TRAV30, TRAJ24)
CGTEIVDADSWGKFQF

SEQ ID NO: 784216 - protein, 13 aa, Homo sapiens
  CDR3 for beta chain variable domain of TCR clone 392108 (TRBV6-5, TRBJ2-5)
CASSPQGGETQYF

SEQ ID NO: 784217 - protein, 14 aa, Homo sapiens
  CDR3 for alpha chain variable domain of TCR clone 392109 (TRAV13-1, TRAJ44)
FAAKATGTASKLTF

SEQ ID NO: 784218 - protein, 13 aa, Homo sapiens
  CDR3 for beta chain variable domain of TCR clone 392109 (TRBV5-5, TRBJ1-2)
CGSSFWRGEDHTF

SEQ ID NO: 784219 - protein, 10 aa, Homo sapiens
  CDR3 for alpha chain variable domain of TCR clone 392110 (TRAV36/DV7, TRAJ49)
CALTSNQFYC

SEQ ID NO: 784220 - protein, 14 aa, Homo sapiens
  CDR3 for beta chain variable domain of TCR clone 392110 (TRBV4-2, TRBJ2-5)
CASSQDRGRETQYF

SEQ ID NO: 784221 - protein, 13 aa, Homo sapiens
  CDR3 for alpha chain variable domain of TCR clone 392111 (TRAV21, TRAJ27)
CAARPGHAGKSTF

SEQ ID NO: 784222 - protein, 15 aa, Homo sapiens
  CDR3 for beta chain variable domain of TCR clone 392111 (TRBV11-3, TRBJ2-7)
CASSPEPASSYEQYF

SEQ ID NO: 784223 - protein, 11 aa, Homo sapiens
  CDR3 for alpha chain variable domain of TCR clone 392112 (TRAV2, TRAJ37)
CAVDNTGKLIF

SEQ ID NO: 784224 - protein, 15 aa, Homo sapiens
  CDR3 for beta chain variable domain of TCR clone 392112 (TRBV20-1, TRBJ2-7)
CSARDRVSGMDEQYF

SEQ ID NO: 784225 - protein, 13 aa, Homo sapiens
  CDR3 for alpha chain variable domain of TCR clone 392113 (TRAV8-3, TRAJ28)
CAVGAVGSYQLTF

SEQ ID NO: 784226 - protein, 14 aa, Homo sapiens
  CDR3 for beta chain variable domain of TCR clone 392113 (TRBV7-9, TRBJ1-5)
CQQPRSPANQPQHF

SEQ ID NO: 784227 - protein, 15 aa, Homo sapiens
  CDR3 for alpha chain variable domain of TCR clone 392114 (TRAV3, TRAJ22)
CAVRDRGGSARQLIF

SEQ ID NO: 784228 - protein, 15 aa, Homo sapiens
  CDR3 for beta chain variable domain of TCR clone 392114 (TRBV27, TRBJ2-1)
CASSNGGGSSNEQFF

SEQ ID NO: 784229 - protein, 15 aa, Homo sapiens
  CDR3 for alpha chain variable domain of TCR clone 392115 (TRAV17, TRAJ10)
CATVLLTGGGNKLTF

SEQ ID NO: 784230 - protein, 16 aa, Homo sapiens
  CDR3 for beta chain variable domain of TCR clone 392115 (TRBV7-9, TRBJ2-3)
CASGPWREVGTDTQYF

SEQ ID NO: 784231 - protein, 14 aa, Homo sapiens
  CDR3 for alpha chain variable domain of TCR clone 392116 (TRAV1-2, TRAJ16)
CAVNRFSDGQKMLF

SEQ ID NO: 784232 - protein, 14 aa, Homo sapiens
  CDR3 for beta chain variable domain of TCR clone 392116 (TRBV6-1, TRBJ1-3)
CASVQGGGGNTIYF

SEQ ID NO: 784233 - protein, 16 aa, Homo sapiens
  CDR3 for alpha chain variable domain of TCR clone 392117 (TRAV4, TRAJ22)
CLVGDLYYGSARQLTF

SEQ ID NO: 784234 - protein, 14 aa, Homo sapiens
  CDR3 for beta chain variable domain of TCR clone 392117 (TRBV7-2, TRBJ2-7)
CASRSQGAAYEQYF

SEQ ID NO: 784235 - protein, 13 aa, Homo sapiens
  CDR3 for alpha chain variable domain of TCR clone 392118 (TRAV13-1, TRAJ23)
CAASTILGGKLIF

SEQ ID NO: 784236 - protein, 12 aa, Homo sapiens
  CDR3 for beta chain variable domain of TCR clone 392118 (TRBV11-2, TRBJ2-2)
CASSLPTGELFF

SEQ ID NO: 784237 - protein, 14 aa, Homo sapiens
  CDR3 for alpha chain variable domain of TCR clone 392119 (TRAV2, TRAJ9)
CAVEDRSGGFKTIF

SEQ ID NO: 784238 - protein, 14 aa, Homo sapiens
  CDR3 for beta chain variable domain of TCR clone 392119 (TRBV2, TRBJ2-7)
CASSLTSGGYEQYF

SEQ ID NO: 784239 - protein, 12 aa, Homo sapiens
  CDR3 for alpha chain variable domain of TCR clone 392120 (TRAV1-1, TRAJ30)
CAVRGRDDKIIF

SEQ ID NO: 784240 - protein, 15 aa, Homo sapiens
  CDR3 for beta chain variable domain of TCR clone 392120 (TRBV9, TRBJ1-6)
CASSVAGTGDSPLHF

SEQ ID NO: 784241 - protein, 15 aa, Homo sapiens
  CDR3 for alpha chain variable domain of TCR clone 392121 (TRAV21, TRAJ40)
CAVRPQTSGTYKYIF

SEQ ID NO: 784242 - protein, 13 aa, Homo sapiens
  CDR3 for beta chain variable domain of TCR clone 392121 (TRBV7-2, TRBJ2-2)
CASSSARAGELFL

SEQ ID NO: 784243 - protein, 13 aa, Homo sapiens
  CDR3 for alpha chain variable domain of TCR clone 392122 (TRAV35, TRAJ42)
CAGFPGSQGNLIF

SEQ ID NO: 784244 - protein, 12 aa, Homo sapiens
  CDR3 for beta chain variable domain of TCR clone 392122 (TRBV7-8, TRBJ1-1)
CASSSLGGEAFF

SEQ ID NO: 784245 - protein, 14 aa, Homo sapiens
  CDR3 for alpha chain variable domain of TCR clone 392123 (TRAV12-2, TRAJ13)
CAVTKTWGYQKVTF

SEQ ID NO: 784246 - protein, 15 aa, Homo sapiens
  CDR3 for beta chain variable domain of TCR clone 392123 (TRBV27, TRBJ2-1)
CASSNGGGSSNEQFF

SEQ ID NO: 784247 - protein, 12 aa, Homo sapiens
  CDR3 for alpha chain variable domain of TCR clone 392124 (TRAV1-2, TRAJ29)
CAVPSGNTPLVL

SEQ ID NO: 784248 - protein, 13 aa, Homo sapiens
  CDR3 for beta chain variable domain of TCR clone 392124 (TRBV12-4, TRBJ2-7)
CASSPTETYEQYF

SEQ ID NO: 784249 - protein, 14 aa, Homo sapiens
  CDR3 for alpha chain variable domain of TCR clone 392125 (TRAV20, TRAJ47)
CAVTFGEYGNKLVF

SEQ ID NO: 784250 - protein, 16 aa, Homo sapiens
  CDR3 for beta chain variable domain of TCR clone 392125 (TRBV18, TRBJ1-2)
CASSPPERVTIYGYTF

SEQ ID NO: 784251 - protein, 20 aa, Homo sapiens
  CDR3 for alpha chain variable domain of TCR clone 392126 (TRAV1-1, TRAJ39)
CLLLLRFESSAYNAGNMLTF

SEQ ID NO: 784252 - protein, 13 aa, Homo sapiens
  CDR3 for beta chain variable domain of TCR clone 392126 (TRBV12-4, TRBJ1-5)
CASSPDRAQPQHF

SEQ ID NO: 784253 - protein, 13 aa, Homo sapiens
  CDR3 for alpha chain variable domain of TCR clone 392127 (TRAV20, TRAJ21)
CAVEGYNFNKFYY

SEQ ID NO: 784254 - protein, 14 aa, Homo sapiens
  CDR3 for beta chain variable domain of TCR clone 392127 (TRBV3-1, TRBJ2-5)
CASSQGPDQETQYF

SEQ ID NO: 784255 - protein, 14 aa, Homo sapiens
  CDR3 for alpha chain variable domain of TCR clone 392128 (TRAV9-2, TRAJ38)
CALSNAGNNRKLIW

SEQ ID NO: 784256 - protein, 15 aa, Homo sapiens
  CDR3 for beta chain variable domain of TCR clone 392128 (TRBV9, TRBJ2-1)
CASSLAGSFYNEQFF

SEQ ID NO: 784257 - protein, 16 aa, Homo sapiens
  CDR3 for alpha chain variable domain of TCR clone 392129 (TRAV3, TRAJ10)
CAVRDMREGGGNKLTF

SEQ ID NO: 784258 - protein, 13 aa, Homo sapiens
  CDR3 for beta chain variable domain of TCR clone 392129 (TRBV6-1, TRBJ1-1)
CASSRQGNAEAFF

SEQ ID NO: 784259 - protein, 15 aa, Homo sapiens
  CDR3 for alpha chain variable domain of TCR clone 392130 (TRAV8-4, TRAJ7)
CAVSGGNYGHNRLAF

SEQ ID NO: 784260 - protein, 11 aa, Homo sapiens
  CDR3 for beta chain variable domain of TCR clone 392130 (TRBV20-1, TRBJ2-1)
CSLSSGSEQFF

SEQ ID NO: 784261 - protein, 16 aa, Homo sapiens
  CDR3 for alpha chain variable domain of TCR clone 392131 (TRAV30, TRAJ24)
CGTEIVDADSWGKFQF

SEQ ID NO: 784262 - protein, 15 aa, Homo sapiens
  CDR3 for beta chain variable domain of TCR clone 392131 (TRBV20-1, TRBJ2-6)
CSARDRGPGANGLTF

SEQ ID NO: 784263 - protein, 11 aa, Homo sapiens
  CDR3 for alpha chain variable domain of TCR clone 392132 (TRAV2, TRAJ27)
CAVSNAGKSTF

SEQ ID NO: 784264 - protein, 12 aa, Homo sapiens
  CDR3 for beta chain variable domain of TCR clone 392132 (TRBV7-9, TRBJ2-7)
CASSLEGYEQYF

SEQ ID NO: 784265 - protein, 12 aa, Homo sapiens
  CDR3 for alpha chain variable domain of TCR clone 392133 (TRAV35, TRAJ43)
CAGAYNNNDMRF

SEQ ID NO: 784266 - protein, 14 aa, Homo sapiens
  CDR3 for beta chain variable domain of TCR clone 392133 (TRBV2, TRBJ2-2)
CASSWQVATGELFF

SEQ ID NO: 784267 - protein, 11 aa, Homo sapiens
  CDR3 for alpha chain variable domain of TCR clone 392134 (TRAV3, TRAJ21)
CAVGNFNKFYF

SEQ ID NO: 784268 - protein, 14 aa, Homo sapiens
  CDR3 for beta chain variable domain of TCR clone 392134 (TRBV23-1, TRBJ2-7)
CASSPTVTSSTSGR

SEQ ID NO: 784269 - protein, 14 aa, Homo sapiens
  CDR3 for alpha chain variable domain of TCR clone 392135 (TRAV27, TRAJ40)
CAGSLLRGTHKYIF

SEQ ID NO: 784270 - protein, 15 aa, Homo sapiens
  CDR3 for beta chain variable domain of TCR clone 392135 (TRBV6-3, TRBJ1-4)
CASSSPGQENEKLFF

SEQ ID NO: 784271 - protein, 15 aa, Homo sapiens
  CDR3 for alpha chain variable domain of TCR clone 392136 (TRAV17, TRAJ56)
CATDANTRANSKLTF

SEQ ID NO: 784272 - protein, 16 aa, Homo sapiens
  CDR3 for beta chain variable domain of TCR clone 392136 (TRBV7-3, TRBJ2-2)
CASSLKRGTLSGELFF

SEQ ID NO: 784273 - protein, 10 aa, Homo sapiens
  CDR3 for alpha chain variable domain of TCR clone 392137 (TRAV26-1, TRAJ48)
SNLGNEKLTF

SEQ ID NO: 784274 - protein, 14 aa, Homo sapiens
  CDR3 for beta chain variable domain of TCR clone 392137 (TRBV13, TRBJ2-7)
CASSLKGASYEQYF

SEQ ID NO: 784275 - protein, 12 aa, Homo sapiens
  CDR3 for alpha chain variable domain of TCR clone 392138 (TRAV12-1, TRAJ34)
CVVAGATDKPIF

SEQ ID NO: 784276 - protein, 16 aa, Homo sapiens
  CDR3 for beta chain variable domain of TCR clone 392138 (TRBV7-2, TRBJ1-2)
CASSSNQDRRGNGYTF

SEQ ID NO: 784277 - protein, 14 aa, Homo sapiens
  CDR3 for alpha chain variable domain of TCR clone 392139 (TRAV26-1, TRAJ22)
CIVYPPGSARQLPF

SEQ ID NO: 784278 - protein, 15 aa, Homo sapiens
  CDR3 for beta chain variable domain of TCR clone 392139 (TRBV19, TRBJ1-1)
CASSRGGALNTEAFF

SEQ ID NO: 784279 - protein, 13 aa, Homo sapiens
  CDR3 for alpha chain variable domain of TCR clone 392140 (TRAV23/DV6, TRAJ27)
CAASKPMQANQPL

SEQ ID NO: 784280 - protein, 14 aa, Homo sapiens
  CDR3 for beta chain variable domain of TCR clone 392140 (TRBV19, TRBJ2-1)
CASPTFVLSGEQFF

SEQ ID NO: 784281 - protein, 14 aa, Homo sapiens
  CDR3 for alpha chain variable domain of TCR clone 392141 (TRAV12-3, TRAJ42)
CAMNYGGSQGNLIF

SEQ ID NO: 784282 - protein, 15 aa, Homo sapiens
  CDR3 for beta chain variable domain of TCR clone 392141 (TRBV7-9, TRBJ1-4)
CASSARTGGNDKLFF

SEQ ID NO: 784283 - protein, 14 aa, Homo sapiens
  CDR3 for alpha chain variable domain of TCR clone 392142 (TRAV12-2, TRAJ17)
CAVLFKAAGNKLTF

SEQ ID NO: 784284 - protein, 14 aa, Homo sapiens
  CDR3 for beta chain variable domain of TCR clone 392142 (TRBV19, TRBJ1-1)
CASSKVTGVTEAFF

SEQ ID NO: 784285 - protein, 16 aa, Homo sapiens
  CDR3 for alpha chain variable domain of TCR clone 392143 (TRAV30, TRAJ24)
CGTEIVDADSWGKFQF

SEQ ID NO: 784286 - protein, 14 aa, Homo sapiens
  CDR3 for beta chain variable domain of TCR clone 392143 (TRBV4-1, TRBJ2-5)
CASSQYRDQETQYF

SEQ ID NO: 784287 - protein, 14 aa, Homo sapiens
  CDR3 for alpha chain variable domain of TCR clone 392144 (TRAV3, TRAJ5)
CAVRSATGRRALTF

SEQ ID NO: 784288 - protein, 14 aa, Homo sapiens
  CDR3 for beta chain variable domain of TCR clone 392144 (TRBV7-2, TRBJ2-3)
CASSFVMPTDTQYF

SEQ ID NO: 784289 - protein, 14 aa, Homo sapiens
  CDR3 for alpha chain variable domain of TCR clone 392145 (TRAV14/DV4, TRAJ15)
CAMRRDQAGTALIL

SEQ ID NO: 784290 - protein, 16 aa, Homo sapiens
  CDR3 for beta chain variable domain of TCR clone 392145 (TRBV15, TRBJ2-3)
CATSRDLGIVADTQYF

SEQ ID NO: 784291 - protein, 14 aa, Homo sapiens
  CDR3 for alpha chain variable domain of TCR clone 392146 (TRAV4, TRAJ23)
CLVGSYNQGGKLIF

SEQ ID NO: 784292 - protein, 18 aa, Homo sapiens
  CDR3 for beta chain variable domain of TCR clone 392146 (TRBV6-5, TRBJ2-6)
CASRTPGQGKTGANVLTC

SEQ ID NO: 784293 - protein, 11 aa, Homo sapiens
  CDR3 for alpha chain variable domain of TCR clone 392147 (TRAV27, TRAJ47)
SIVEYGNKLVF

SEQ ID NO: 784294 - protein, 15 aa, Homo sapiens
  CDR3 for beta chain variable domain of TCR clone 392147 (TRBV6-3, TRBJ2-7)
CASSSPGTVLYEQYF

SEQ ID NO: 784295 - protein, 13 aa, Homo sapiens
  CDR3 for alpha chain variable domain of TCR clone 392148 (TRAV1-2, TRAJ9)
CAALNTGGFKTIF

SEQ ID NO: 784296 - protein, 13 aa, Homo sapiens
  CDR3 for beta chain variable domain of TCR clone 392148 (TRBV19, TRBJ2-1)
CATSRGVYNEQFF

SEQ ID NO: 784297 - protein, 22 aa, Homo sapiens
  CDR3 for alpha chain variable domain of TCR clone 392149 (TRAV27, TRAJ38)
CAARRNAGNNHIQNPDPAVYQL

SEQ ID NO: 784298 - protein, 13 aa, Homo sapiens
  CDR3 for beta chain variable domain of TCR clone 392149 (TRBV18, TRBJ2-7)
CASQSGGGYEQYF

SEQ ID NO: 784299 - protein, 13 aa, Homo sapiens
  CDR3 for alpha chain variable domain of TCR clone 392150 (TRAV12-2, TRAJ23)
CAVMGNQGGKLIF

SEQ ID NO: 784300 - protein, 15 aa, Homo sapiens
  CDR3 for beta chain variable domain of TCR clone 392150 (TRBV20-1, TRBJ2-7)
CSARDRVSGMDEQYF

SEQ ID NO: 784301 - protein, 14 aa, Homo sapiens
  CDR3 for alpha chain variable domain of TCR clone 392151 (TRAV12-2, TRAJ13)
CAVKKTGGYQKVTF

SEQ ID NO: 784302 - protein, 13 aa, Homo sapiens
  CDR3 for beta chain variable domain of TCR clone 392151 (TRBV12-4, TRBJ1-2)
CASSLDSNYGYTF

SEQ ID NO: 784303 - protein, 15 aa, Homo sapiens
  CDR3 for alpha chain variable domain of TCR clone 392152 (TRAV3, TRAJ4)
CAVRDPSGGYNKLIF

SEQ ID NO: 784304 - protein, 13 aa, Homo sapiens
  CDR3 for beta chain variable domain of TCR clone 392152 (TRBV10-3, TRBJ2-7)
CASKLAVNYEQYF

SEQ ID NO: 784305 - protein, 18 aa, Homo sapiens
  CDR3 for alpha chain variable domain of TCR clone 392153 (TRAV17, TRAJ45)
CATSLDLYSGGGADGLTF

SEQ ID NO: 784306 - protein, 15 aa, Homo sapiens
  CDR3 for beta chain variable domain of TCR clone 392153 (TRBV28, TRBJ2-5)
CASSPPWSYQETQYF

SEQ ID NO: 784307 - protein, 14 aa, Homo sapiens
  CDR3 for alpha chain variable domain of TCR clone 392154 (TRAV12-2, TRAJ49)
CAVTLGLYGNQFYF

SEQ ID NO: 784308 - protein, 16 aa, Homo sapiens
  CDR3 for beta chain variable domain of TCR clone 392154 (TRBV12-5, TRBJ2-5)
CASGPRTSGNQETQYF

SEQ ID NO: 784309 - protein, 16 aa, Homo sapiens
  CDR3 for alpha chain variable domain of TCR clone 392155 (TRAV35, TRAJ28)
CAGQTYSGAGSYQLTF

SEQ ID NO: 784310 - protein, 13 aa, Homo sapiens
  CDR3 for beta chain variable domain of TCR clone 392155 (TRBV19, TRBJ1-2)
CASSQGQVYGYTF

SEQ ID NO: 784311 - protein, 12 aa, Homo sapiens
  CDR3 for alpha chain variable domain of TCR clone 392156 (TRAV13-1, TRAJ49)
CAASPMANQFYF

SEQ ID NO: 784312 - protein, 17 aa, Homo sapiens
  CDR3 for beta chain variable domain of TCR clone 392156 (TRBV11-2, TRBJ2-1)
CASSLYPPVVEYNEQFF

SEQ ID NO: 784313 - protein, 14 aa, Homo sapiens
  CDR3 for alpha chain variable domain of TCR clone 392157 (TRAV12-2, TRAJ12)
CAVINRDSSYTLIF

SEQ ID NO: 784314 - protein, 15 aa, Homo sapiens
  CDR3 for beta chain variable domain of TCR clone 392157 (TRBV28, TRBJ2-1)
CASSLDTSSYNEQFF

SEQ ID NO: 784315 - protein, 17 aa, Homo sapiens
  CDR3 for alpha chain variable domain of TCR clone 392158 (TRAV13-1, TRAJ52)
CAAGRNAGGTSYGKLTF

SEQ ID NO: 784316 - protein, 13 aa, Homo sapiens
  CDR3 for beta chain variable domain of TCR clone 392158 (TRBV7-2, TRBJ1-1)
CAGNLKGAKVAFF

SEQ ID NO: 784317 - protein, 18 aa, Homo sapiens
  CDR3 for alpha chain variable domain of TCR clone 392159 (TRAV21, TRAJ52)
CAVRPSPAGGTGYGKLTF

SEQ ID NO: 784318 - protein, 14 aa, Homo sapiens
  CDR3 for beta chain variable domain of TCR clone 392159 (TRBV4-1, TRBJ2-2)
CASSQAVNTGELFF

SEQ ID NO: 784319 - protein, 13 aa, Homo sapiens
  CDR3 for alpha chain variable domain of TCR clone 392160 (TRAV1-2, TRAJ9)
CAALNTGGFKTIF

SEQ ID NO: 784320 - protein, 15 aa, Homo sapiens
  CDR3 for beta chain variable domain of TCR clone 392160 (TRBV7-2, TRBJ2-1)
CASTHGTGIYNEQFF

SEQ ID NO: 784321 - protein, 16 aa, Homo sapiens
  CDR3 for alpha chain variable domain of TCR clone 392161 (TRAV12-2, TRAJ52)
CRLANAGGTSYGKLTF

SEQ ID NO: 784322 - protein, 14 aa, Homo sapiens
  CDR3 for beta chain variable domain of TCR clone 392161 (TRBV7-7, TRBJ2-7)
CASSLGRGVGEQYF

SEQ ID NO: 784323 - protein, 14 aa, Homo sapiens
  CDR3 for alpha chain variable domain of TCR clone 392162 (TRAV29/DV5, TRAJ40)
CAAAVASGTDKYIF

SEQ ID NO: 784324 - protein, 13 aa, Homo sapiens
  CDR3 for beta chain variable domain of TCR clone 392162 (TRBV7-9, TRBJ2-7)
CASSFAGAYEQYF

SEQ ID NO: 784325 - protein, 12 aa, Homo sapiens
  CDR3 for alpha chain variable domain of TCR clone 392163 (TRAV8-4, TRAJ37)
CAVRSNTSKLIF

SEQ ID NO: 784326 - protein, 16 aa, Homo sapiens
  CDR3 for beta chain variable domain of TCR clone 392163 (TRBV7-2, TRBJ2-3)
CASSLVGDASTDTQYF

SEQ ID NO: 784327 - protein, 23 aa, Homo sapiens
  CDR3 for alpha chain variable domain of TCR clone 392164 (TRAV30, TRAJ43)
CTLRPPSSVTQEPTSAALRGMRF

SEQ ID NO: 784328 - protein, 13 aa, Homo sapiens
  CDR3 for beta chain variable domain of TCR clone 392164 (TRBV12-4, TRBJ2-2)
CASSITGSGELFF

SEQ ID NO: 784329 - protein, 12 aa, Homo sapiens
  CDR3 for alpha chain variable domain of TCR clone 392165 (TRAV2, TRAJ9)
CAVGAGGFKTIF

SEQ ID NO: 784330 - protein, 14 aa, Homo sapiens
  CDR3 for beta chain variable domain of TCR clone 392165 (TRBV27, TRBJ2-2)
CASRPGVNTGELFF

SEQ ID NO: 784331 - protein, 10 aa, Homo sapiens
  CDR3 for alpha chain variable domain of TCR clone 392166 (TRAV23/DV6, TRAJ45)
TGGGADGLTL

SEQ ID NO: 784332 - protein, 15 aa, Homo sapiens
  CDR3 for beta chain variable domain of TCR clone 392166 (TRBV27, TRBJ2-1)
CASSNGGGSSNEQFF

SEQ ID NO: 784333 - protein, 12 aa, Homo sapiens
  CDR3 for alpha chain variable domain of TCR clone 392167 (TRAV12-3, TRAJ17)
CAMTLTGNKLTL

SEQ ID NO: 784334 - protein, 12 aa, Homo sapiens
  CDR3 for beta chain variable domain of TCR clone 392167 (TRBV11-2, TRBJ2-7)
CASSLPTYEQYF

SEQ ID NO: 784335 - protein, 13 aa, Homo sapiens
  CDR3 for alpha chain variable domain of TCR clone 392168 (TRAV2, TRAJ15)
CAVASQAGTALIF

SEQ ID NO: 784336 - protein, 17 aa, Homo sapiens
  CDR3 for beta chain variable domain of TCR clone 392168 (TRBV4-1, TRBJ2-3)
CASSQDPAGGPLDTQYF

SEQ ID NO: 784337 - protein, 13 aa, Homo sapiens
  CDR3 for alpha chain variable domain of TCR clone 392169 (TRAV1-2, TRAJ17)
CAVGKAAGNKPTF

SEQ ID NO: 784338 - protein, 14 aa, Homo sapiens
  CDR3 for beta chain variable domain of TCR clone 392169 (TRBV7-9, TRBJ2-1)
CQQRDRGRLNEQFF

SEQ ID NO: 784339 - protein, 12 aa, Homo sapiens
  CDR3 for alpha chain variable domain of TCR clone 392170 (TRAV13-1, TRAJ48)
CAANFGNEKLTF

SEQ ID NO: 784340 - protein, 11 aa, Homo sapiens
  CDR3 for beta chain variable domain of TCR clone 392170 (TRBV20-1, TRBJ1-5)
CSAQGDQHQHF

SEQ ID NO: 784341 - protein, 12 aa, Homo sapiens
  CDR3 for alpha chain variable domain of TCR clone 392171 (TRAV12-3, TRAJ17)
CAMTLTGNKLTF

SEQ ID NO: 784342 - protein, 14 aa, Homo sapiens
  CDR3 for beta chain variable domain of TCR clone 392171 (TRBV28, TRBJ2-5)
CASRGSSFWETQYF

SEQ ID NO: 784343 - protein, 13 aa, Homo sapiens
  CDR3 for alpha chain variable domain of TCR clone 392172 (TRAV2, TRAJ40)
CAVVTSGTYKYIF

SEQ ID NO: 784344 - protein, 17 aa, Homo sapiens
  CDR3 for beta chain variable domain of TCR clone 392172 (TRBV7-6, TRBJ2-1)
CASSAYGQGRGVYEQFF

SEQ ID NO: 784345 - protein, 13 aa, Homo sapiens
  CDR3 for alpha chain variable domain of TCR clone 392173 (TRAV8-3, TRAJ44)
CAVVPGTASKLTF

SEQ ID NO: 784346 - protein, 13 aa, Homo sapiens
  CDR3 for beta chain variable domain of TCR clone 392173 (TRBV19, TRBJ2-7)
CASSKQGGYEQYF

SEQ ID NO: 784347 - protein, 13 aa, Homo sapiens
  CDR3 for alpha chain variable domain of TCR clone 392174 (TRAV20, TRAJ20)
CAVQALNDYKLSF

SEQ ID NO: 784348 - protein, 14 aa, Homo sapiens
  CDR3 for beta chain variable domain of TCR clone 392174 (TRBV5-8, TRBJ2-3)
CASSLGQGTDTQYF

SEQ ID NO: 784349 - protein, 14 aa, Homo sapiens
  CDR3 for alpha chain variable domain of TCR clone 392175 (TRAV29/DV5, TRAJ30)
CAARLMNRDDKIIF

SEQ ID NO: 784350 - protein, 15 aa, Homo sapiens
  CDR3 for beta chain variable domain of TCR clone 392175 (TRBV4-1, TRBJ1-4)
CASSDTGGTNEKLFF

SEQ ID NO: 784351 - protein, 18 aa, Homo sapiens
  CDR3 for alpha chain variable domain of TCR clone 392176 (TRAV17, TRAJ45)
CATSLDLYSGGGADGLTF

SEQ ID NO: 784352 - protein, 15 aa, Homo sapiens
  CDR3 for beta chain variable domain of TCR clone 392176 (TRBV11-2, TRBJ2-1)
CASSKNRGLIYEQIF

SEQ ID NO: 784353 - protein, 14 aa, Homo sapiens
  CDR3 for alpha chain variable domain of TCR clone 392177 (TRAV1-2, TRAJ8)
CAVREDTGFQKLVF

SEQ ID NO: 784354 - protein, 15 aa, Homo sapiens
  CDR3 for beta chain variable domain of TCR clone 392177 (TRBV6-3, TRBJ2-7)
CASSSPGTVFYEQCV

SEQ ID NO: 784355 - protein, 16 aa, Homo sapiens
  CDR3 for alpha chain variable domain of TCR clone 392178 (TRAV4, TRAJ22)
CLVGDLYSGSASQLTS

SEQ ID NO: 784356 - protein, 16 aa, Homo sapiens
  CDR3 for beta chain variable domain of TCR clone 392178 (TRBV7-9, TRBJ2-1)
CASSDVAGGSYNEQFF

SEQ ID NO: 784357 - protein, 14 aa, Homo sapiens
  CDR3 for alpha chain variable domain of TCR clone 392179 (TRAV12-2, TRAJ13)
CAVKKTGGYQKVTF

SEQ ID NO: 784358 - protein, 17 aa, Homo sapiens
  CDR3 for beta chain variable domain of TCR clone 392179 (TRBV13, TRBJ2-3)
CASSLSRVAGGRNKQYF

SEQ ID NO: 784359 - protein, 11 aa, Homo sapiens
  CDR3 for alpha chain variable domain of TCR clone 392180 (TRAV12-3, TRAJ27)
CALANAGKSTF

SEQ ID NO: 784360 - protein, 15 aa, Homo sapiens
  CDR3 for beta chain variable domain of TCR clone 392180 (TRBV20-1, TRBJ2-7)
CSARDRVSGMDEQYF

SEQ ID NO: 784361 - protein, 12 aa, Homo sapiens
  CDR3 for alpha chain variable domain of TCR clone 392181 (TRAV1-1, TRAJ9)
CAVDTGGFKTIF

SEQ ID NO: 784362 - protein, 14 aa, Homo sapiens
  CDR3 for beta chain variable domain of TCR clone 392181 (TRBV6-6, TRBJ1-4)
CASRTDREYEKLFF

SEQ ID NO: 784363 - protein, 13 aa, Homo sapiens
  CDR3 for alpha chain variable domain of TCR clone 392182 (TRAV2, TRAJ15)
CAVASQAGTALIF

SEQ ID NO: 784364 - protein, 17 aa, Homo sapiens
  CDR3 for beta chain variable domain of TCR clone 392182 (TRBV20-1, TRBJ2-3)
CSASLLGRGGSADTQYF

SEQ ID NO: 784365 - protein, 13 aa, Homo sapiens
  CDR3 for alpha chain variable domain of TCR clone 392183 (TRAV36/DV7, TRAJ37)
CAVFSSNTGKLIF

SEQ ID NO: 784366 - protein, 15 aa, Homo sapiens
  CDR3 for beta chain variable domain of TCR clone 392183 (TRBV19, TRBJ2-7)
CASSPAGSGEALRYF

SEQ ID NO: 784367 - protein, 14 aa, Homo sapiens
  CDR3 for alpha chain variable domain of TCR clone 392184 (TRAV12-3, TRAJ10)
SHLPLTGGGNKLTF

SEQ ID NO: 784368 - protein, 15 aa, Homo sapiens
  CDR3 for beta chain variable domain of TCR clone 392184 (TRBV7-3, TRBJ2-2)
CASSLTGQGTGELFF

SEQ ID NO: 784369 - protein, 10 aa, Homo sapiens
  CDR3 for alpha chain variable domain of TCR clone 392185 (TRAV1-2, TRAJ23)
CAGQGGKLIF

SEQ ID NO: 784370 - protein, 16 aa, Homo sapiens
  CDR3 for beta chain variable domain of TCR clone 392185 (TRBV5-5, TRBJ1-2)
CASSPTWGRGLYGYTF

SEQ ID NO: 784371 - protein, 13 aa, Homo sapiens
  CDR3 for alpha chain variable domain of TCR clone 392186 (TRAV12-2, TRAJ37)
CAGGSGNTGNLIF

SEQ ID NO: 784372 - protein, 14 aa, Homo sapiens
  CDR3 for beta chain variable domain of TCR clone 392186 (TRBV6-1, TRBJ2-6)
CASQQGAGANVLTF

SEQ ID NO: 784373 - protein, 13 aa, Homo sapiens
  CDR3 for alpha chain variable domain of TCR clone 392187 (TRAV3, TRAJ4)
CAVRDGGYSKLIF

SEQ ID NO: 784374 - protein, 14 aa, Homo sapiens
  CDR3 for beta chain variable domain of TCR clone 392187 (TRBV12-4, TRBJ1-2)
CASSSAAAGSSYTF

SEQ ID NO: 784375 - protein, 14 aa, Homo sapiens
  CDR3 for alpha chain variable domain of TCR clone 392188 (TRAV12-2, TRAJ40)
CAVKIPAGTYNYIF

SEQ ID NO: 784376 - protein, 14 aa, Homo sapiens
  CDR3 for beta chain variable domain of TCR clone 392188 (TRBV20-1, TRBJ1-1)
CSAQTRIGGTEAFF

SEQ ID NO: 784377 - protein, 15 aa, Homo sapiens
  CDR3 for alpha chain variable domain of TCR clone 392189 (TRAV8-2, TRAJ40)
CVVLGTTSGTYKYIF

SEQ ID NO: 784378 - protein, 15 aa, Homo sapiens
  CDR3 for beta chain variable domain of TCR clone 392189 (TRBV7-3, TRBJ2-1)
CQQLEGYRSYNEQFF

SEQ ID NO: 784379 - protein, 12 aa, Homo sapiens
  CDR3 for alpha chain variable domain of TCR clone 392190 (TRAV16, TRAJ10)
CSRTGGGNKLTF

SEQ ID NO: 784380 - protein, 16 aa, Homo sapiens
  CDR3 for beta chain variable domain of TCR clone 392190 (TRBV7-9, TRBJ2-3)
CASSPWREVGTDTQYF

SEQ ID NO: 784381 - protein, 14 aa, Homo sapiens
  CDR3 for alpha chain variable domain of TCR clone 392191 (TRAV12-1, TRAJ17)
CVVNYKAAGNKLTF

SEQ ID NO: 784382 - protein, 14 aa, Homo sapiens
  CDR3 for beta chain variable domain of TCR clone 392191 (TRBV11-2, TRBJ1-5)
CASNLDRGRQPQHF

SEQ ID NO: 784383 - protein, 16 aa, Homo sapiens
  CDR3 for alpha chain variable domain of TCR clone 392192 (TRAV4, TRAJ22)
CLVGDLYSGSARQLTF

SEQ ID NO: 784384 - protein, 13 aa, Homo sapiens
  CDR3 for beta chain variable domain of TCR clone 392192 (TRBV7-6, TRBJ2-7)
CASSVDHTHEQYF

SEQ ID NO: 784385 - protein, 16 aa, Homo sapiens
  CDR3 for alpha chain variable domain of TCR clone 392193 (TRAV27, TRAJ45)
CPPRGRRGGGADGLTF

SEQ ID NO: 784386 - protein, 16 aa, Homo sapiens
  CDR3 for beta chain variable domain of TCR clone 392193 (TRBV7-2, TRBJ1-3)
CASSRLEASAGNTIYF

SEQ ID NO: 784387 - protein, 14 aa, Homo sapiens
  CDR3 for alpha chain variable domain of TCR clone 392194 (TRAV12-3, TRAJ6)
CAMSATGGSYIPTF

SEQ ID NO: 784388 - protein, 14 aa, Homo sapiens
  CDR3 for beta chain variable domain of TCR clone 392194 (TRBV19, TRBJ2-1)
CASPTFVLSGEQFF

SEQ ID NO: 784389 - protein, 14 aa, Homo sapiens
  CDR3 for alpha chain variable domain of TCR clone 392195 (TRAV13-1, TRAJ3)
CAASKSSSASKIIF

SEQ ID NO: 784390 - protein, 16 aa, Homo sapiens
  CDR3 for beta chain variable domain of TCR clone 392195 (TRBV15, TRBJ2-3)
CATSRDLGIVTDTQYV

SEQ ID NO: 784391 - protein, 14 aa, Homo sapiens
  CDR3 for alpha chain variable domain of TCR clone 392196 (TRAV16, TRAJ33)
CALSAMDSNYQLIW

SEQ ID NO: 784392 - protein, 12 aa, Homo sapiens
  CDR3 for beta chain variable domain of TCR clone 392196 (TRBV28, TRBJ2-6)
CAIQAGANVLTF

SEQ ID NO: 784393 - protein, 14 aa, Homo sapiens
  CDR3 for alpha chain variable domain of TCR clone 392197 (TRAV1-2, TRAJ16)
SAVNRFSDGQKLLF

SEQ ID NO: 784394 - protein, 14 aa, Homo sapiens
  CDR3 for beta chain variable domain of TCR clone 392197 (TRBV6-1, TRBJ1-3)
CASVQGGGGNTIYF

SEQ ID NO: 784395 - protein, 14 aa, Homo sapiens
  CDR3 for alpha chain variable domain of TCR clone 392198 (TRAV1-2, TRAJ8)
CAVGEDTGFQKLVF

SEQ ID NO: 784396 - protein, 17 aa, Homo sapiens
  CDR3 for beta chain variable domain of TCR clone 392198 (TRBV13, TRBJ2-3)
CASSLSRVAGGRNTQYF

SEQ ID NO: 784397 - protein, 15 aa, Homo sapiens
  CDR3 for alpha chain variable domain of TCR clone 392199 (TRAV27, TRAJ56)
CAGRDGTGANSKLTF

SEQ ID NO: 784398 - protein, 14 aa, Homo sapiens
  CDR3 for beta chain variable domain of TCR clone 392199 (TRBV11-1, TRBJ2-7)
CASSLEREWGEQYF

SEQ ID NO: 784399 - protein, 14 aa, Homo sapiens
  CDR3 for alpha chain variable domain of TCR clone 392200 (TRAV12-2, TRAJ40)
CAVKIPSGTDRYIF

SEQ ID NO: 784400 - protein, 13 aa, Homo sapiens
  CDR3 for beta chain variable domain of TCR clone 392200 (TRBV7-9, TRBJ1-2)
CASSLKQNYGYTF

SEQ ID NO: 784401 - protein, 13 aa, Homo sapiens
  CDR3 for alpha chain variable domain of TCR clone 392201 (TRAV4, TRAJ22)
CLGGSGSSRQLTF

SEQ ID NO: 784402 - protein, 15 aa, Homo sapiens
  CDR3 for beta chain variable domain of TCR clone 392201 (TRBV7-9, TRBJ1-6)
CASSSPGRGNSPLHF

SEQ ID NO: 784403 - protein, 17 aa, Homo sapiens
  CDR3 for alpha chain variable domain of TCR clone 392202 (TRAV13-1, TRAJ28)
CAASPPYSGAGSYQLTF

SEQ ID NO: 784404 - protein, 13 aa, Homo sapiens
  CDR3 for beta chain variable domain of TCR clone 392202 (TRBV3-1, TRBJ1-1)
CASSQRWSTEAFF

SEQ ID NO: 784405 - protein, 16 aa, Homo sapiens
  CDR3 for alpha chain variable domain of TCR clone 392203 (TRAV12-3, TRAJ53)
CAMSPGGGGSNYKLTF

SEQ ID NO: 784406 - protein, 14 aa, Homo sapiens
  CDR3 for beta chain variable domain of TCR clone 392203 (TRBV7-2, TRBJ1-1)
CTSSFLTGTTEAFF

SEQ ID NO: 784407 - protein, 12 aa, Homo sapiens
  CDR3 for alpha chain variable domain of TCR clone 392204 (TRAV35, TRAJ39)
LAPNNAGNMLTF

SEQ ID NO: 784408 - protein, 16 aa, Homo sapiens
  CDR3 for beta chain variable domain of TCR clone 392204 (TRBV2, TRBJ2-3)
CASSASVEGVTGTQYF

SEQ ID NO: 784409 - protein, 14 aa, Homo sapiens
  CDR3 for alpha chain variable domain of TCR clone 392205 (TRAV1-2, TRAJ16)
CAVNRFSDGQKLLF

SEQ ID NO: 784410 - protein, 13 aa, Homo sapiens
  CDR3 for beta chain variable domain of TCR clone 392205 (TRBV6-5, TRBJ1-1)
QTSVYFCALRTFF

SEQ ID NO: 784411 - protein, 10 aa, Homo sapiens
  CDR3 for alpha chain variable domain of TCR clone 392206 (TRAV23/DV6, TRAJ57)
CAASSTLSQG

SEQ ID NO: 784412 - protein, 15 aa, Homo sapiens
  CDR3 for beta chain variable domain of TCR clone 392206 (TRBV3-1, TRBJ2-5)
CASSRGQASWKTQYF

SEQ ID NO: 784413 - protein, 15 aa, Homo sapiens
  CDR3 for alpha chain variable domain of TCR clone 392207 (TRAV21, TRAJ53)
CATLNSGGSNYKLTF

SEQ ID NO: 784414 - protein, 14 aa, Homo sapiens
  CDR3 for beta chain variable domain of TCR clone 392207 (TRBV7-2, TRBJ2-7)
CASRSQGEAYEQYF

SEQ ID NO: 784415 - protein, 17 aa, Homo sapiens
  CDR3 for alpha chain variable domain of TCR clone 392208 (TRAV23/DV6, TRAJ57)
CAASSTLSQGGSEKLVF

SEQ ID NO: 784416 - protein, 14 aa, Homo sapiens
  CDR3 for beta chain variable domain of TCR clone 392208 (TRBV7-8, TRBJ2-7)
CASSPGLADYEQYF

SEQ ID NO: 784417 - protein, 17 aa, Homo sapiens
  CDR3 for alpha chain variable domain of TCR clone 392209 (TRAV4, )
CLVDIQNPDPAVYQLRD

SEQ ID NO: 784418 - protein, 11 aa, Homo sapiens
  CDR3 for beta chain variable domain of TCR clone 392209 (TRBV11-2, TRBJ1-1)
CASSINTEAFF

SEQ ID NO: 784419 - protein, 16 aa, Homo sapiens
  CDR3 for alpha chain variable domain of TCR clone 392210 (TRAV3, TRAJ37)
CAVRPHGSGNTGKLIL

SEQ ID NO: 784420 - protein, 13 aa, Homo sapiens
  CDR3 for beta chain variable domain of TCR clone 392210 (TRBV2, TRBJ1-5)
CASGTGGYQPQHF

SEQ ID NO: 784421 - protein, 11 aa, Homo sapiens
  CDR3 for alpha chain variable domain of TCR clone 392211 (TRAV12-3, TRAJ27)
CAMANAGKSTF

SEQ ID NO: 784422 - protein, 12 aa, Homo sapiens
  CDR3 for beta chain variable domain of TCR clone 392211 (TRBV12-4, TRBJ2-7)
CARSLGGYEQYF

SEQ ID NO: 784423 - protein, 11 aa, Homo sapiens
  CDR3 for alpha chain variable domain of TCR clone 392212 (TRAV12-3, TRAJ27)
CAMANAGKSTF

SEQ ID NO: 784424 - protein, 12 aa, Homo sapiens
  CDR3 for beta chain variable domain of TCR clone 392212 (TRBV24-1, TRBJ1-1)
CATSDSDRGAFF

SEQ ID NO: 784425 - protein, 14 aa, Homo sapiens
  CDR3 for alpha chain variable domain of TCR clone 392213 (TRAV2, TRAJ37)
CAVDFTSNTGKLIF

SEQ ID NO: 784426 - protein, 16 aa, Homo sapiens
  CDR3 for beta chain variable domain of TCR clone 392213 (TRBV19, TRBJ2-3)
CASSPGAASRTDTQYF

SEQ ID NO: 784427 - protein, 15 aa, Homo sapiens
  CDR3 for alpha chain variable domain of TCR clone 392214 (TRAV8-3, TRAJ11)
CAVGRLNSGYSTLTF

SEQ ID NO: 784428 - protein, 14 aa, Homo sapiens
  CDR3 for beta chain variable domain of TCR clone 392214 (TRBV4-1, TRBJ2-5)
CASSRSGSGETQYF

SEQ ID NO: 784429 - protein, 15 aa, Homo sapiens
  CDR3 for alpha chain variable domain of TCR clone 392215 (TRAV12-3, TRAJ49)
CAMGVTPNTGNQFYF

SEQ ID NO: 784430 - protein, 18 aa, Homo sapiens
  CDR3 for beta chain variable domain of TCR clone 392215 (TRBV4-1, TRBJ1-5)
CASSQDPRGQGLNQPQHF

SEQ ID NO: 784431 - protein, 13 aa, Homo sapiens
  CDR3 for alpha chain variable domain of TCR clone 392216 (TRAV3, TRAJ27)
CAVRPLGAGKSTF

SEQ ID NO: 784432 - protein, 15 aa, Homo sapiens
  CDR3 for beta chain variable domain of TCR clone 392216 (TRBV9, TRBJ1-6)
CANSVAGTGDSPLHF

SEQ ID NO: 784433 - protein, 16 aa, Homo sapiens
  CDR3 for alpha chain variable domain of TCR clone 392217 (TRAV12-3, TRAJ58)
CAMTDTEETSGSRLTF

SEQ ID NO: 784434 - protein, 16 aa, Homo sapiens
  CDR3 for beta chain variable domain of TCR clone 392217 (TRBV7-2, TRBJ2-5)
CASSSKWLSGQETQYF

SEQ ID NO: 784435 - protein, 15 aa, Homo sapiens
  CDR3 for alpha chain variable domain of TCR clone 392218 (TRAV26-1, TRAJ44)
CIVRIGTGTASKLTF

SEQ ID NO: 784436 - protein, 14 aa, Homo sapiens
  CDR3 for beta chain variable domain of TCR clone 392218 (TRBV7-6, TRBJ2-3)
CASSLGTVTDTQYF

SEQ ID NO: 784437 - protein, 15 aa, Homo sapiens
  CDR3 for alpha chain variable domain of TCR clone 392219 (TRAV21, TRAJ53)
CATLNSGGSNYKLTF

SEQ ID NO: 784438 - protein, 13 aa, Homo sapiens
  CDR3 for beta chain variable domain of TCR clone 392219 (TRBV2, TRBJ2-1)
CASTRDRNNEQFF

SEQ ID NO: 784439 - protein, 14 aa, Homo sapiens
  CDR3 for alpha chain variable domain of TCR clone 392220 (TRAV12-2, TRAJ13)
CAVKKTGGYQKVTF

SEQ ID NO: 784440 - protein, 13 aa, Homo sapiens
  CDR3 for beta chain variable domain of TCR clone 392220 (TRBV24-1, TRBJ2-2)
CATAEPNTGELFF

SEQ ID NO: 784441 - protein, 14 aa, Homo sapiens
  CDR3 for alpha chain variable domain of TCR clone 392221 (TRAV12-2, TRAJ24)
CAVTPADSWGKLQF

SEQ ID NO: 784442 - protein, 16 aa, Homo sapiens
  CDR3 for beta chain variable domain of TCR clone 392221 (TRBV5-4, TRBJ2-3)
CASQQPGAGGADTQYF

SEQ ID NO: 784443 - protein, 15 aa, Homo sapiens
  CDR3 for alpha chain variable domain of TCR clone 392222 (TRAV26-1, TRAJ28)
CIVRVAGAGSYQLTF

SEQ ID NO: 784444 - protein, 19 aa, Homo sapiens
  CDR3 for beta chain variable domain of TCR clone 392222 (TRBV7-3, TRBJ2-7)
CGSSLTGVAGGWPSYEQYF

SEQ ID NO: 784445 - protein, 12 aa, Homo sapiens
  CDR3 for alpha chain variable domain of TCR clone 392223 (TRAV12-1, TRAJ40)
CVVPSGTYKYIF

SEQ ID NO: 784446 - protein, 15 aa, Homo sapiens
  CDR3 for beta chain variable domain of TCR clone 392223 (TRBV12-4, TRBJ2-1)
CAGSPLRGRNSEQFF

SEQ ID NO: 784447 - protein, 16 aa, Homo sapiens
  CDR3 for alpha chain variable domain of TCR clone 392224 (TRAV2, TRAJ13)
CADRILGVTRKLPLEL

SEQ ID NO: 784448 - protein, 14 aa, Homo sapiens
  CDR3 for beta chain variable domain of TCR clone 392224 (TRBV19, TRBJ2-1)
CASEVTGARNEQFF

SEQ ID NO: 784449 - protein, 15 aa, Homo sapiens
  CDR3 for alpha chain variable domain of TCR clone 392225 (TRAV8-4, TRAJ3)
CAVSALYSSASKIIF

SEQ ID NO: 784450 - protein, 16 aa, Homo sapiens
  CDR3 for beta chain variable domain of TCR clone 392225 (TRBV11-2, TRBJ2-1)
CASSVTADFSYNEQFF

SEQ ID NO: 784451 - protein, 14 aa, Homo sapiens
  CDR3 for alpha chain variable domain of TCR clone 392226 (TRAV9-2, TRAJ39)
CALYIYNAGNMLTF

SEQ ID NO: 784452 - protein, 15 aa, Homo sapiens
  CDR3 for beta chain variable domain of TCR clone 392226 (TRBV19, TRBJ2-1)
CASIKGRGPYNEQFF

SEQ ID NO: 784453 - protein, 13 aa, Homo sapiens
  CDR3 for alpha chain variable domain of TCR clone 392227 (TRAV23/DV6, TRAJ22)
CAPYSGSARQLTF

SEQ ID NO: 784454 - protein, 15 aa, Homo sapiens
  CDR3 for beta chain variable domain of TCR clone 392227 (TRBV20-1, TRBJ2-7)
CSARVPAAYFYGQYF

SEQ ID NO: 784455 - protein, 15 aa, Homo sapiens
  CDR3 for alpha chain variable domain of TCR clone 392228 (TRAV3, TRAJ22)
CAVRDRGGSARQLTF

SEQ ID NO: 784456 - protein, 18 aa, Homo sapiens
  CDR3 for beta chain variable domain of TCR clone 392228 (TRBV7-9, TRBJ2-7)
CASSLTTSGSRTWYEQYF

SEQ ID NO: 784457 - protein, 14 aa, Homo sapiens
  CDR3 for alpha chain variable domain of TCR clone 392229 (TRAV12-2, TRAJ17)
CAALFKAAGNKLPF

SEQ ID NO: 784458 - protein, 13 aa, Homo sapiens
  CDR3 for beta chain variable domain of TCR clone 392229 (TRBV12-4, TRBJ2-5)
CASSPGTEETQYF

SEQ ID NO: 784459 - protein, 13 aa, Homo sapiens
  CDR3 for alpha chain variable domain of TCR clone 392230 (TRAV8-3, TRAJ28)
CAVGAVGSYQLTF

SEQ ID NO: 784460 - protein, 15 aa, Homo sapiens
  CDR3 for beta chain variable domain of TCR clone 392230 (TRBV7-9, TRBJ1-5)
CASSQGHQPNQPQHL

SEQ ID NO: 784461 - protein, 14 aa, Homo sapiens
  CDR3 for alpha chain variable domain of TCR clone 392231 (TRAV1-2, TRAJ8)
CAVSEDTGFQKLVF

SEQ ID NO: 784462 - protein, 16 aa, Homo sapiens
  CDR3 for beta chain variable domain of TCR clone 392231 (TRBV4-1, TRBJ2-3)
CASSQSTSGAEDTQYF

SEQ ID NO: 784463 - protein, 17 aa, Homo sapiens
  CDR3 for alpha chain variable domain of TCR clone 392232 (TRAV17, TRAJ24)
CATANSMTTDSWGKLQF

SEQ ID NO: 784464 - protein, 18 aa, Homo sapiens
  CDR3 for beta chain variable domain of TCR clone 392232 (TRBV20-1, TRBJ2-6)
CSAETTPTHGSGANVLTF

SEQ ID NO: 784465 - protein, 14 aa, Homo sapiens
  CDR3 for alpha chain variable domain of TCR clone 392233 (TRAV12-3, TRAJ10)
SHLPLTGGGNKLSF

SEQ ID NO: 784466 - protein, 16 aa, Homo sapiens
  CDR3 for beta chain variable domain of TCR clone 392233 (TRBV10-3, TRBJ2-1)
CAISGVGDGGGGEQFF

SEQ ID NO: 784467 - protein, 16 aa, Homo sapiens
  CDR3 for alpha chain variable domain of TCR clone 392234 (TRAV27, TRAJ53)
CVAPEGSGGSNYKLTF

SEQ ID NO: 784468 - protein, 14 aa, Homo sapiens
  CDR3 for beta chain variable domain of TCR clone 392234 (TRBV4-3, TRBJ1-5)
CASSQGGQGWPQHF

SEQ ID NO: 784469 - protein, 13 aa, Homo sapiens
  CDR3 for alpha chain variable domain of TCR clone 392235 (TRAV20, TRAJ20)
CAVRDFNDYKLSF

SEQ ID NO: 784470 - protein, 18 aa, Homo sapiens
  CDR3 for beta chain variable domain of TCR clone 392235 (TRBV7-2, TRBJ2-3)
CASSLKREGSGITDTQYF

SEQ ID NO: 784471 - protein, 15 aa, Homo sapiens
  CDR3 for alpha chain variable domain of TCR clone 392236 (TRAV8-3, TRAJ11)
CAVGLLNSGYSTLNF

SEQ ID NO: 784472 - protein, 14 aa, Homo sapiens
  CDR3 for beta chain variable domain of TCR clone 392236 (TRBV4-1, TRBJ2-5)
CASSRSGSGETQYF

SEQ ID NO: 784473 - protein, 13 aa, Homo sapiens
  CDR3 for alpha chain variable domain of TCR clone 392237 (TRAV23/DV6, TRAJ47)
CAASMTRGNKLFF

SEQ ID NO: 784474 - protein, 14 aa, Homo sapiens
  CDR3 for beta chain variable domain of TCR clone 392237 (TRBV7-3, TRBJ1-1)
CASSLKGGNTEAFF

SEQ ID NO: 784475 - protein, 14 aa, Homo sapiens
  CDR3 for alpha chain variable domain of TCR clone 392238 (TRAV12-1, TRAJ42)
CVVIYGGSQGNLIF

SEQ ID NO: 784476 - protein, 15 aa, Homo sapiens
  CDR3 for beta chain variable domain of TCR clone 392238 (TRBV7-2, TRBJ2-1)
CASSSRTSREDEQFF

SEQ ID NO: 784477 - protein, 15 aa, Homo sapiens
  CDR3 for alpha chain variable domain of TCR clone 392239 (TRAV12-3, TRAJ13)
CAMSARSGGYQKVTF

SEQ ID NO: 784478 - protein, 18 aa, Homo sapiens
  CDR3 for beta chain variable domain of TCR clone 392239 (TRBV3-1, TRBJ2-7)
CASSQEGGGRSWPYEQYF

SEQ ID NO: 784479 - protein, 14 aa, Homo sapiens
  CDR3 for alpha chain variable domain of TCR clone 392240 (TRAV13-1, TRAJ32)
CAARGSGATNKLIF

SEQ ID NO: 784480 - protein, 14 aa, Homo sapiens
  CDR3 for beta chain variable domain of TCR clone 392240 (TRBV7-9, TRBJ2-1)
CASSPRDSLYEQFF

SEQ ID NO: 784481 - protein, 18 aa, Homo sapiens
  CDR3 for alpha chain variable domain of TCR clone 392241 (TRAV29/DV5, TRAJ53)
CSVLLCSKRGGSNYKLTF

SEQ ID NO: 784482 - protein, 17 aa, Homo sapiens
  CDR3 for beta chain variable domain of TCR clone 392241 (TRBV7-8, TRBJ2-6)
CASSAGTGGAGANILTF

SEQ ID NO: 784483 - protein, 14 aa, Homo sapiens
  CDR3 for alpha chain variable domain of TCR clone 392242 (TRAV26-1, TRAJ38)
CIADNAGNNRKLIW

SEQ ID NO: 784484 - protein, 15 aa, Homo sapiens
  CDR3 for beta chain variable domain of TCR clone 392242 (TRBV9, TRBJ2-1)
CASSLAGSSYNEEFF

SEQ ID NO: 784485 - protein, 12 aa, Homo sapiens
  CDR3 for alpha chain variable domain of TCR clone 392243 (TRAV16, TRAJ17)
CAPSAAGNKLTF

SEQ ID NO: 784486 - protein, 15 aa, Homo sapiens
  CDR3 for beta chain variable domain of TCR clone 392243 (TRBV5-1, TRBJ2-5)
CASSFKGGDQETQYF

SEQ ID NO: 784487 - protein, 19 aa, Homo sapiens
  CDR3 for alpha chain variable domain of TCR clone 392244 (TRAV26-1, TRAJ52)
CIVRAHRNAGGTSYGKLTV

SEQ ID NO: 784488 - protein, 15 aa, Homo sapiens
  CDR3 for beta chain variable domain of TCR clone 392244 (TRBV29-1, TRBJ2-1)
CSGRDRKSSYNEQFF

SEQ ID NO: 784489 - protein, 15 aa, Homo sapiens
  CDR3 for alpha chain variable domain of TCR clone 392245 (TRAV34, TRAJ38)
CGADFTPGNNRKMIW

SEQ ID NO: 784490 - protein, 16 aa, Homo sapiens
  CDR3 for beta chain variable domain of TCR clone 392245 (TRBV6-1, TRBJ2-3)
CASSEVIGQGTDTQYF

SEQ ID NO: 784491 - protein, 11 aa, Homo sapiens
  CDR3 for alpha chain variable domain of TCR clone 392246 (TRAV21, TRAJ9)
CAVPGGFKTIF

SEQ ID NO: 784492 - protein, 20 aa, Homo sapiens
  CDR3 for beta chain variable domain of TCR clone 392246 (TRBV7-9, TRBJ2-5)
RGTRPCISGPLQGEQETQYF

SEQ ID NO: 784493 - protein, 14 aa, Homo sapiens
  CDR3 for alpha chain variable domain of TCR clone 392247 (TRAV1-1, TRAJ28)
CAAPSGAGSYQLTF

SEQ ID NO: 784494 - protein, 12 aa, Homo sapiens
  CDR3 for beta chain variable domain of TCR clone 392247 (TRBV11-2, TRBJ2-2)
CASSLPTGELFF

SEQ ID NO: 784495 - protein, 14 aa, Homo sapiens
  CDR3 for alpha chain variable domain of TCR clone 392248 (TRAV13-1, TRAJ40)
CAARSTSGTYKHIF

SEQ ID NO: 784496 - protein, 15 aa, Homo sapiens
  CDR3 for beta chain variable domain of TCR clone 392248 (TRBV18, TRBJ1-5)
CASSETGGNNQPQHF

SEQ ID NO: 784497 - protein, 14 aa, Homo sapiens
  CDR3 for alpha chain variable domain of TCR clone 392249 (TRAV12-3, TRAJ9)
CAISPSTGGFKTIF

SEQ ID NO: 784498 - protein, 12 aa, Homo sapiens
  CDR3 for beta chain variable domain of TCR clone 392249 (TRBV19, TRBJ1-5)
CASSIAQQPQHF

SEQ ID NO: 784499 - protein, 15 aa, Homo sapiens
  CDR3 for alpha chain variable domain of TCR clone 392250 (TRAV3, TRAJ9)
RAVRDSNTGGFKTIF

SEQ ID NO: 784500 - protein, 16 aa, Homo sapiens
  CDR3 for beta chain variable domain of TCR clone 392250 (TRBV15, TRBJ2-5)
CATSPTTGQGMETQYF

SEQ ID NO: 784501 - protein, 11 aa, Homo sapiens
  CDR3 for alpha chain variable domain of TCR clone 392251 (TRAV3, TRAJ17)
PRGAAGNKLTF

SEQ ID NO: 784502 - protein, 14 aa, Homo sapiens
  CDR3 for beta chain variable domain of TCR clone 392251 (TRBV11-2, TRBJ2-5)
CASRPLAGRETQYF

SEQ ID NO: 784503 - protein, 16 aa, Homo sapiens
  CDR3 for alpha chain variable domain of TCR clone 392252 (TRAV1-2, TRAJ16)
CAVNRFQMAGSCSLQG

SEQ ID NO: 784504 - protein, 15 aa, Homo sapiens
  CDR3 for beta chain variable domain of TCR clone 392252 (TRBV7-9, TRBJ1-6)
CASSSPGRGNSPLHF

SEQ ID NO: 784505 - protein, 13 aa, Homo sapiens
  CDR3 for alpha chain variable domain of TCR clone 392253 (TRAV13-2, TRAJ48)
CAEMDFGNENLTF

SEQ ID NO: 784506 - protein, 12 aa, Homo sapiens
  CDR3 for beta chain variable domain of TCR clone 392253 (TRBV5-1, TRBJ1-2)
CASSQDTYGYTF

SEQ ID NO: 784507 - protein, 13 aa, Homo sapiens
  CDR3 for alpha chain variable domain of TCR clone 392254 (TRAV2, TRAJ20)
CAVEDPSEYKLSF

SEQ ID NO: 784508 - protein, 14 aa, Homo sapiens
  CDR3 for beta chain variable domain of TCR clone 392254 (TRBV19, TRBJ2-1)
CASPTFVLSGEQFF

SEQ ID NO: 784509 - protein, 14 aa, Homo sapiens
  CDR3 for alpha chain variable domain of TCR clone 392255 (TRAV1-2, TRAJ8)
CAVREDTGFQKLVF

SEQ ID NO: 784510 - protein, 20 aa, Homo sapiens
  CDR3 for beta chain variable domain of TCR clone 392255 (TRBV4-2, TRBJ2-7)
CASSQASGGNLRAVLRAGHQ

SEQ ID NO: 784511 - protein, 11 aa, Homo sapiens
  CDR3 for alpha chain variable domain of TCR clone 392256 (TRAV16, TRAJ29)
WAPSGNTPLVF

SEQ ID NO: 784512 - protein, 15 aa, Homo sapiens
  CDR3 for beta chain variable domain of TCR clone 392256 (TRBV5-7, TRBJ2-1)
CASSPYFEGSYEQFF

SEQ ID NO: 784513 - protein, 12 aa, Homo sapiens
  CDR3 for alpha chain variable domain of TCR clone 392257 (TRAV8-2, TRAJ5)
CVVSDIGRELTF

SEQ ID NO: 784514 - protein, 14 aa, Homo sapiens
  CDR3 for beta chain variable domain of TCR clone 392257 (TRBV19, TRBJ2-7)
CASNFRDTFTGMYF

SEQ ID NO: 784515 - protein, 14 aa, Homo sapiens
  CDR3 for alpha chain variable domain of TCR clone 392258 (TRAV12-3, TRAJ10)
SQLPLTGGGNKLTF

SEQ ID NO: 784516 - protein, 11 aa, Homo sapiens
  CDR3 for beta chain variable domain of TCR clone 392258 (TRBV20-1, TRBJ2-5)
CSAGRAETQYF

SEQ ID NO: 784517 - protein, 16 aa, Homo sapiens
  CDR3 for alpha chain variable domain of TCR clone 392259 (TRAV1-2, TRAJ10)
CAVRGVLTGGGNKLTF

SEQ ID NO: 784518 - protein, 18 aa, Homo sapiens
  CDR3 for beta chain variable domain of TCR clone 392259 (TRBV28, TRBJ1-5)
CASSPLQGARYSNQPQHF

SEQ ID NO: 784519 - protein, 15 aa, Homo sapiens
  CDR3 for alpha chain variable domain of TCR clone 392260 (TRAV8-2, TRAJ16)
CVVSDGFSDGQMLPF

SEQ ID NO: 784520 - protein, 14 aa, Homo sapiens
  CDR3 for beta chain variable domain of TCR clone 392260 (TRBV7-3, TRBJ1-1)
CASSLGTGYTEAFF

SEQ ID NO: 784521 - protein, 15 aa, Homo sapiens
  CDR3 for alpha chain variable domain of TCR clone 392261 (TRAV2, TRAJ9)
CAVEDRGTGGFKTIF

SEQ ID NO: 784522 - protein, 17 aa, Homo sapiens
  CDR3 for beta chain variable domain of TCR clone 392261 (TRBV24-1, TRBJ2-3)
TSVPPVIPGQGRHTQYF

SEQ ID NO: 784523 - protein, 23 aa, Homo sapiens
  CDR3 for alpha chain variable domain of TCR clone 392262 (TRAV26-1, TRAJ38)
CIADNAGNNHIQNPDPAVYQLRD

SEQ ID NO: 784524 - protein, 17 aa, Homo sapiens
  CDR3 for beta chain variable domain of TCR clone 392262 (TRBV7-9, TRBJ2-3)
CASSLEEAGAYPDTQYF

SEQ ID NO: 784525 - protein, 17 aa, Homo sapiens
  CDR3 for alpha chain variable domain of TCR clone 392263 (TRAV35, TRAJ47)
GLLDCRTHTEYGNKLVF

SEQ ID NO: 784526 - protein, 11 aa, Homo sapiens
  CDR3 for beta chain variable domain of TCR clone 392263 (TRBV29-1, TRBJ1-1)
CSVEVGTRAFF

SEQ ID NO: 784527 - protein, 17 aa, Homo sapiens
  CDR3 for alpha chain variable domain of TCR clone 392264 (TRAV8-6, TRAJ58)
CAVSSWVGETSGSRLTF

SEQ ID NO: 784528 - protein, 15 aa, Homo sapiens
  CDR3 for beta chain variable domain of TCR clone 392264 (TRBV6-5, TRBJ2-1)
CASSYDAGAGNGQFF

SEQ ID NO: 784529 - protein, 15 aa, Homo sapiens
  CDR3 for alpha chain variable domain of TCR clone 392265 (TRAV17, TRAJ56)
CATDANTGANSKLTC

SEQ ID NO: 784530 - protein, 14 aa, Homo sapiens
  CDR3 for beta chain variable domain of TCR clone 392265 (TRBV19, TRBJ1-5)
CASSLGTGGQPQHF

SEQ ID NO: 784531 - protein, 14 aa, Homo sapiens
  CDR3 for alpha chain variable domain of TCR clone 392266 (TRAV21, TRAJ38)
CAVMGAGNNRTLIW

SEQ ID NO: 784532 - protein, 13 aa, Homo sapiens
  CDR3 for beta chain variable domain of TCR clone 392266 (TRBV7-3, TRBJ2-5)
CASSIGFFETQYF

SEQ ID NO: 784533 - protein, 12 aa, Homo sapiens
  CDR3 for alpha chain variable domain of TCR clone 392267 (TRAV21, TRAJ49)
CAENDGGNQFYF

SEQ ID NO: 784534 - protein, 14 aa, Homo sapiens
  CDR3 for beta chain variable domain of TCR clone 392267 (TRBV12-5, TRBJ2-5)
CASGSRTHQETQYF

SEQ ID NO: 784535 - protein, 13 aa, Homo sapiens
  CDR3 for alpha chain variable domain of TCR clone 392268 (TRAV8-3, TRAJ28)
CAVGAGWSYQLTF

SEQ ID NO: 784536 - protein, 14 aa, Homo sapiens
  CDR3 for beta chain variable domain of TCR clone 392268 (TRBV7-2, TRBJ2-7)
CASRSQGAAYEQYF

SEQ ID NO: 784537 - protein, 18 aa, Homo sapiens
  CDR3 for alpha chain variable domain of TCR clone 392269 (TRAV26-1, TRAJ22)
CIVRVALISSGSARQLTF

SEQ ID NO: 784538 - protein, 14 aa, Homo sapiens
  CDR3 for beta chain variable domain of TCR clone 392269 (TRBV6-6, TRBJ1-3)
CASSRQGSGNTIYF

SEQ ID NO: 784539 - protein, 13 aa, Homo sapiens
  CDR3 for alpha chain variable domain of TCR clone 392270 (TRAV13-2, TRAJ15)
CAESNQAGTALIF

SEQ ID NO: 784540 - protein, 11 aa, Homo sapiens
  CDR3 for beta chain variable domain of TCR clone 392270 (TRBV29-1, TRBJ2-5)
CSEDRTGTQYF

SEQ ID NO: 784541 - protein, 14 aa, Homo sapiens
  CDR3 for alpha chain variable domain of TCR clone 392271 (TRAV1-2, TRAJ8)
CAVREDTGFQKLVF

SEQ ID NO: 784542 - protein, 15 aa, Homo sapiens
  CDR3 for beta chain variable domain of TCR clone 392271 (TRBV12-4, TRBJ2-5)
CASSSPTGLQETQYF

SEQ ID NO: 784543 - protein, 13 aa, Homo sapiens
  CDR3 for alpha chain variable domain of TCR clone 392272 (TRAV20, TRAJ37)
CAGCSSNTGNLIF

SEQ ID NO: 784544 - protein, 17 aa, Homo sapiens
  CDR3 for beta chain variable domain of TCR clone 392272 (TRBV28, TRBJ2-5)
CASSRQGGLAGAETQYF

SEQ ID NO: 784545 - protein, 14 aa, Homo sapiens
  CDR3 for alpha chain variable domain of TCR clone 392273 (TRAV30, TRAJ26)
CGTEIVSYGQNVVF

SEQ ID NO: 784546 - protein, 13 aa, Homo sapiens
  CDR3 for beta chain variable domain of TCR clone 392273 (TRBV19, TRBJ1-3)
CASRLSLGNTIYF

SEQ ID NO: 784547 - protein, 13 aa, Homo sapiens
  CDR3 for alpha chain variable domain of TCR clone 392274 (TRAV2, TRAJ16)
CAVEFGDGQKLIF

SEQ ID NO: 784548 - protein, 14 aa, Homo sapiens
  CDR3 for beta chain variable domain of TCR clone 392274 (TRBV6-3, TRBJ2-5)
CASSYSLREKTQYF

SEQ ID NO: 784549 - protein, 12 aa, Homo sapiens
  CDR3 for alpha chain variable domain of TCR clone 392275 (TRAV26-1, TRAJ26)
CIVFIYGQNFVF

SEQ ID NO: 784550 - protein, 15 aa, Homo sapiens
  CDR3 for beta chain variable domain of TCR clone 392275 (TRBV19, TRBJ1-2)
CASSVGQVLNYGYTF

SEQ ID NO: 784551 - protein, 13 aa, Homo sapiens
  CDR3 for alpha chain variable domain of TCR clone 392276 (TRAV1-2, TRAJ31)
FAVRGYNNARLMF

SEQ ID NO: 784552 - protein, 15 aa, Homo sapiens
  CDR3 for beta chain variable domain of TCR clone 392276 (TRBV5-7, TRBJ2-7)
CASSLGPGRGHEQYF

SEQ ID NO: 784553 - protein, 14 aa, Homo sapiens
  CDR3 for alpha chain variable domain of TCR clone 392277 (TRAV12-2, TRAJ40)
CAVKIPSGTYKYIF

SEQ ID NO: 784554 - protein, 17 aa, Homo sapiens
  CDR3 for beta chain variable domain of TCR clone 392277 (TRBV7-8, TRBJ2-6)
RASSAGTWGAGANVLTF

SEQ ID NO: 784555 - protein, 15 aa, Homo sapiens
  CDR3 for alpha chain variable domain of TCR clone 392278 (TRAV8-4, TRAJ37)
CAVRRGSGNTGKLIF

SEQ ID NO: 784556 - protein, 15 aa, Homo sapiens
  CDR3 for beta chain variable domain of TCR clone 392278 (TRBV5-1, TRBJ2-7)
CASSLDLTSSYEQYF

SEQ ID NO: 784557 - protein, 21 aa, Homo sapiens
  CDR3 for alpha chain variable domain of TCR clone 392279 (TRAV1-1, TRAJ6)
CLLLLRCERLERTGGSYIPTF

SEQ ID NO: 784558 - protein, 14 aa, Homo sapiens
  CDR3 for beta chain variable domain of TCR clone 392279 (TRBV19, TRBJ2-5)
CASSMTGQQETQYF

SEQ ID NO: 784559 - protein, 14 aa, Homo sapiens
  CDR3 for alpha chain variable domain of TCR clone 392280 (TRAV3, TRAJ8)
CAVREDTGFQKLVF

SEQ ID NO: 784560 - protein, 15 aa, Homo sapiens
  CDR3 for beta chain variable domain of TCR clone 392280 (TRBV6-3, TRBJ2-7)
CASSSPGTVFYEQYF

SEQ ID NO: 784561 - protein, 15 aa, Homo sapiens
  CDR3 for alpha chain variable domain of TCR clone 392281 (TRAV17, TRAJ35)
CATAFVICFGNVLHS

SEQ ID NO: 784562 - protein, 16 aa, Homo sapiens
  CDR3 for beta chain variable domain of TCR clone 392281 (TRBV11-2, TRBJ2-7)
CASSPLAGGPRYEQYF

SEQ ID NO: 784563 - protein, 11 aa, Homo sapiens
  CDR3 for alpha chain variable domain of TCR clone 392282 (TRAV21, TRAJ34)
CAVTNTDKLIF

SEQ ID NO: 784564 - protein, 14 aa, Homo sapiens
  CDR3 for beta chain variable domain of TCR clone 392282 (TRBV27, TRBJ2-2)
CASSLGDTTGELFF

SEQ ID NO: 784565 - protein, 12 aa, Homo sapiens
  CDR3 for alpha chain variable domain of TCR clone 392283 (TRAV21, TRAJ33)
CAKMDSNYQVIW

SEQ ID NO: 784566 - protein, 14 aa, Homo sapiens
  CDR3 for beta chain variable domain of TCR clone 392283 (TRBV7-3, TRBJ1-1)
CASSLKGGNTEAFF

SEQ ID NO: 784567 - protein, 11 aa, Homo sapiens
  CDR3 for alpha chain variable domain of TCR clone 392284 (TRAV12-1, TRAJ43)
CVEYYNNDMRF

SEQ ID NO: 784568 - protein, 15 aa, Homo sapiens
  CDR3 for beta chain variable domain of TCR clone 392284 (TRBV18, TRBJ2-5)
CASSPRASEAETQYF

SEQ ID NO: 784569 - protein, 10 aa, Homo sapiens
  CDR3 for alpha chain variable domain of TCR clone 392285 (TRAV1-2, TRAJ20)
CAVTDYKLSF

SEQ ID NO: 784570 - protein, 13 aa, Homo sapiens
  CDR3 for beta chain variable domain of TCR clone 392285 (TRBV7-7, TRBJ2-3)
CASSLSRADTQYF

SEQ ID NO: 784571 - protein, 13 aa, Homo sapiens
  CDR3 for alpha chain variable domain of TCR clone 392286 (TRAV17, TRAJ7)
WSTDNYGNNRLAF

SEQ ID NO: 784572 - protein, 13 aa, Homo sapiens
  CDR3 for beta chain variable domain of TCR clone 392286 (TRBV27, TRBJ2-1)
CASSSGSYNEQFF

SEQ ID NO: 784573 - protein, 17 aa, Homo sapiens
  CDR3 for alpha chain variable domain of TCR clone 392287 (TRAV13-1, TRAJ28)
CAASPPYAGAGSYQLTF

SEQ ID NO: 784574 - protein, 12 aa, Homo sapiens
  CDR3 for beta chain variable domain of TCR clone 392287 (TRBV11-2, TRBJ2-2)
CASSLPTGELFF

SEQ ID NO: 784575 - protein, 16 aa, Homo sapiens
  CDR3 for alpha chain variable domain of TCR clone 392288 (TRAV30, TRAJ24)
CGTEIVDADSWGKFQF

SEQ ID NO: 784576 - protein, 16 aa, Homo sapiens
  CDR3 for beta chain variable domain of TCR clone 392288 (TRBV6-3, TRBJ1-1)
CTSTDLGTVPNTEAFF

SEQ ID NO: 784577 - protein, 11 aa, Homo sapiens
  CDR3 for alpha chain variable domain of TCR clone 392289 (TRAV12-1, TRAJ43)
CVEYDNNDMRF

SEQ ID NO: 784578 - protein, 16 aa, Homo sapiens
  CDR3 for beta chain variable domain of TCR clone 392289 (TRBV2, TRBJ2-1)
CASSVGGSLSYNEQFF

SEQ ID NO: 784579 - protein, 19 aa, Homo sapiens
  CDR3 for alpha chain variable domain of TCR clone 392290 (TRAV2, TRAJ20)
ILQVREADAAVYRDCKLSF

SEQ ID NO: 784580 - protein, 15 aa, Homo sapiens
  CDR3 for beta chain variable domain of TCR clone 392290 (TRBV7-2, TRBJ2-1)
CASSSGLAGGNERFF

SEQ ID NO: 784581 - protein, 14 aa, Homo sapiens
  CDR3 for alpha chain variable domain of TCR clone 392291 (TRAV1-2, TRAJ16)
CAVNRFSDGQKRLF

SEQ ID NO: 784582 - protein, 13 aa, Homo sapiens
  CDR3 for beta chain variable domain of TCR clone 392291 (TRBV10-3, TRBJ1-2)
CAISERDSYGYTF

SEQ ID NO: 784583 - protein, 14 aa, Homo sapiens
  CDR3 for alpha chain variable domain of TCR clone 392292 (TRAV10, TRAJ34)
CVVSRGGGTDKLIF

SEQ ID NO: 784584 - protein, 17 aa, Homo sapiens
  CDR3 for beta chain variable domain of TCR clone 392292 (TRBV6-3, TRBJ2-3)
CASRRPLGGGSTDTQYF

SEQ ID NO: 784585 - protein, 17 aa, Homo sapiens
  CDR3 for alpha chain variable domain of TCR clone 392293 (TRAV3, TRAJ42)
CALRDRDYGGSQGNLIF

SEQ ID NO: 784586 - protein, 15 aa, Homo sapiens
  CDR3 for beta chain variable domain of TCR clone 392293 (TRBV7-2, TRBJ2-7)
CASSWGQGAIYEQYF

SEQ ID NO: 784587 - protein, 15 aa, Homo sapiens
  CDR3 for alpha chain variable domain of TCR clone 392294 (TRAV12-3, TRAJ17)
CAMSPPLAAGNKLTF

SEQ ID NO: 784588 - protein, 14 aa, Homo sapiens
  CDR3 for beta chain variable domain of TCR clone 392294 (TRBV6-5, TRBJ1-3)
CASSYRSSGNTIYF

SEQ ID NO: 784589 - protein, 18 aa, Homo sapiens
  CDR3 for alpha chain variable domain of TCR clone 392295 (TRAV26-2, TRAJ45)
CILRVEKYSGGGADGLTF

SEQ ID NO: 784590 - protein, 11 aa, Homo sapiens
  CDR3 for beta chain variable domain of TCR clone 392295 (TRBV29-1, TRBJ2-5)
CSEDRTGTQYF

SEQ ID NO: 784591 - protein, 13 aa, Homo sapiens
  CDR3 for alpha chain variable domain of TCR clone 392296 (TRAV12-2, TRAJ50)
CAVIVTSYDKVIF

SEQ ID NO: 784592 - protein, 13 aa, Homo sapiens
  CDR3 for beta chain variable domain of TCR clone 392296 (TRBV19, TRBJ1-2)
CASSVPGQDGYTF

SEQ ID NO: 784593 - protein, 12 aa, Homo sapiens
  CDR3 for alpha chain variable domain of TCR clone 392297 (TRAV8-6, TRAJ33)
CAVTDSNYQLIW

SEQ ID NO: 784594 - protein, 15 aa, Homo sapiens
  CDR3 for beta chain variable domain of TCR clone 392297 (TRBV4-3, TRBJ1-2)
CASSRGQERNYGYTF

SEQ ID NO: 784595 - protein, 14 aa, Homo sapiens
  CDR3 for alpha chain variable domain of TCR clone 392298 (TRAV13-2, TRAJ52)
CAETGGTSYGKLTF

SEQ ID NO: 784596 - protein, 15 aa, Homo sapiens
  CDR3 for beta chain variable domain of TCR clone 392298 (TRBV19, TRBJ1-2)
CASSVGQVLNYGYTF

SEQ ID NO: 784597 - protein, 10 aa, Homo sapiens
  CDR3 for alpha chain variable domain of TCR clone 392299 (TRAV8-4, TRAJ43)
CAVSAVDMRF

SEQ ID NO: 784598 - protein, 16 aa, Homo sapiens
  CDR3 for beta chain variable domain of TCR clone 392299 (TRBV12-5, TRBJ2-5)
CASGPRTSGDQETQYF

SEQ ID NO: 784599 - protein, 11 aa, Homo sapiens
  CDR3 for alpha chain variable domain of TCR clone 392300 (TRAV12-2, TRAJ33)
CAVGSNYQLIW

SEQ ID NO: 784600 - protein, 14 aa, Homo sapiens
  CDR3 for beta chain variable domain of TCR clone 392300 (TRBV6-1, TRBJ2-2)
CASVEHIESGELFF

SEQ ID NO: 784601 - protein, 14 aa, Homo sapiens
  CDR3 for alpha chain variable domain of TCR clone 392301 (TRAV38-1, TRAJ11)
CAFMKHEGYSTLTF

SEQ ID NO: 784602 - protein, 13 aa, Homo sapiens
  CDR3 for beta chain variable domain of TCR clone 392301 (TRBV3-1, TRBJ2-5)
CASSPVLSETQYF

SEQ ID NO: 784603 - protein, 14 aa, Homo sapiens
  CDR3 for alpha chain variable domain of TCR clone 392302 (TRAV1-2, TRAJ16)
CAVNRFSDGQKLLF

SEQ ID NO: 784604 - protein, 12 aa, Homo sapiens
  CDR3 for beta chain variable domain of TCR clone 392302 (TRBV6-5, TRBJ2-5)
CASSEGAETQYF

SEQ ID NO: 784605 - protein, 10 aa, Homo sapiens
  CDR3 for alpha chain variable domain of TCR clone 392303 (TRAV1-2, TRAJ31)
CVSEDARLMF

SEQ ID NO: 784606 - protein, 16 aa, Homo sapiens
  CDR3 for beta chain variable domain of TCR clone 392303 (TRBV27, TRBJ2-1)
CASSSRLAGNYNEQFF

SEQ ID NO: 784607 - protein, 15 aa, Homo sapiens
  CDR3 for alpha chain variable domain of TCR clone 392304 (TRAV3, TRAJ9)
CAVRARNTGGFKTIF

SEQ ID NO: 784608 - protein, 15 aa, Homo sapiens
  CDR3 for beta chain variable domain of TCR clone 392304 (TRBV7-2, TRBJ2-3)
CASSLAGAFIDTQYF

SEQ ID NO: 784609 - protein, 19 aa, Homo sapiens
  CDR3 for alpha chain variable domain of TCR clone 392305 (TRAV2, TRAJ20)
ILQVREADAAVFRDCKLSF

SEQ ID NO: 784610 - protein, 15 aa, Homo sapiens
  CDR3 for beta chain variable domain of TCR clone 392305 (TRBV20-1, TRBJ2-5)
CSAGGTGGLQETQYF

SEQ ID NO: 784611 - protein, 16 aa, Homo sapiens
  CDR3 for alpha chain variable domain of TCR clone 392306 (TRAV30, TRAJ24)
CGTEIVDGDSWGKFQF

SEQ ID NO: 784612 - protein, 13 aa, Homo sapiens
  CDR3 for beta chain variable domain of TCR clone 392306 (TRBV20-1, TRBJ1-1)
CSARGGGNTEAFF

SEQ ID NO: 784613 - protein, 14 aa, Homo sapiens
  CDR3 for alpha chain variable domain of TCR clone 392307 (TRAV8-3, TRAJ9)
CAVVYNTGGFKTIF

SEQ ID NO: 784614 - protein, 14 aa, Homo sapiens
  CDR3 for beta chain variable domain of TCR clone 392307 (TRBV7-3, TRBJ2-2)
CVSSSGGYTGELFF

SEQ ID NO: 784615 - protein, 14 aa, Homo sapiens
  CDR3 for alpha chain variable domain of TCR clone 392308 (TRAV1-2, TRAJ16)
CAVNRFSDGQKLLF

SEQ ID NO: 784616 - protein, 15 aa, Homo sapiens
  CDR3 for beta chain variable domain of TCR clone 392308 (TRBV12-4, TRBJ2-5)
CASSPPTGLKETQYF

SEQ ID NO: 784617 - protein, 13 aa, Homo sapiens
  CDR3 for alpha chain variable domain of TCR clone 392309 (TRAV2, TRAJ40)
CAVVTSGTYKYTF

SEQ ID NO: 784618 - protein, 14 aa, Homo sapiens
  CDR3 for beta chain variable domain of TCR clone 392309 (TRBV19, TRBJ2-1)
CASPTCVLSGEQFF

SEQ ID NO: 784619 - protein, 17 aa, Homo sapiens
  CDR3 for alpha chain variable domain of TCR clone 392310 (TRAV14/DV4, TRAJ28)
CAMRGTSSGAGSYQLTF

SEQ ID NO: 784620 - protein, 12 aa, Homo sapiens
  CDR3 for beta chain variable domain of TCR clone 392310 (TRBV28, TRBJ2-5)
CASSFAGETQYF

SEQ ID NO: 784621 - protein, 15 aa, Homo sapiens
  CDR3 for alpha chain variable domain of TCR clone 392311 (TRAV3, TRAJ22)
CAVRDRGRSARQLTF

SEQ ID NO: 784622 - protein, 16 aa, Homo sapiens
  CDR3 for beta chain variable domain of TCR clone 392311 (TRBV5-4, TRBJ2-3)
CASQQPGAGGADTQYF

SEQ ID NO: 784623 - protein, 17 aa, Homo sapiens
  CDR3 for alpha chain variable domain of TCR clone 392312 (TRAV13-2, TRAJ54)
FVQRICGAHEGAQKLVF

SEQ ID NO: 784624 - protein, 15 aa, Homo sapiens
  CDR3 for beta chain variable domain of TCR clone 392312 (TRBV27, TRBJ2-7)
CASSPQREGQREQYF

SEQ ID NO: 784625 - protein, 11 aa, Homo sapiens
  CDR3 for alpha chain variable domain of TCR clone 392313 (TRAV13-1, TRAJ27)
CAAYNAGKSTF

SEQ ID NO: 784626 - protein, 13 aa, Homo sapiens
  CDR3 for beta chain variable domain of TCR clone 392313 (TRBV18, TRBJ1-1)
CASSPETKPEAFF

SEQ ID NO: 784627 - protein, 14 aa, Homo sapiens
  CDR3 for alpha chain variable domain of TCR clone 392314 (TRAV9-2, TRAJ39)
CALYIYNAGNMLTF

SEQ ID NO: 784628 - protein, 15 aa, Homo sapiens
  CDR3 for beta chain variable domain of TCR clone 392314 (TRBV6-5, TRBJ2-3)
CASSYSGSSTDTQYF

SEQ ID NO: 784629 - protein, 16 aa, Homo sapiens
  CDR3 for alpha chain variable domain of TCR clone 392315 (TRAV26-1, TRAJ46)
CIVRVGKEKQRRQPDF

SEQ ID NO: 784630 - protein, 16 aa, Homo sapiens
  CDR3 for beta chain variable domain of TCR clone 392315 (TRBV27, TRBJ2-2)
CASSFRGLVRTGELFF

SEQ ID NO: 784631 - protein, 14 aa, Homo sapiens
  CDR3 for alpha chain variable domain of TCR clone 392316 (TRAV12-1, TRAJ26)
CVGKGSNYGQNFVF

SEQ ID NO: 784632 - protein, 17 aa, Homo sapiens
  CDR3 for beta chain variable domain of TCR clone 392316 (TRBV11-2, TRBJ2-6)
CASSQRDIVSGANVLTF

SEQ ID NO: 784633 - protein, 13 aa, Homo sapiens
  CDR3 for alpha chain variable domain of TCR clone 392317 (TRAV13-1, TRAJ17)
CAADGAAGNKLPF

SEQ ID NO: 784634 - protein, 14 aa, Homo sapiens
  CDR3 for beta chain variable domain of TCR clone 392317 (TRBV11-2, TRBJ1-3)
CASSLTQGRNTIYF

SEQ ID NO: 784635 - protein, 13 aa, Homo sapiens
  CDR3 for alpha chain variable domain of TCR clone 392318 (TRAV8-1, TRAJ30)
CAVIMNRDDKVIF

SEQ ID NO: 784636 - protein, 13 aa, Homo sapiens
  CDR3 for beta chain variable domain of TCR clone 392318 (TRBV7-2, TRBJ2-2)
CASSLAVTGELFF

SEQ ID NO: 784637 - protein, 14 aa, Homo sapiens
  CDR3 for alpha chain variable domain of TCR clone 392319 (TRAV12-2, TRAJ53)
CAVKGGCSNYKLTF

SEQ ID NO: 784638 - protein, 14 aa, Homo sapiens
  CDR3 for beta chain variable domain of TCR clone 392319 (TRBV7-7, TRBJ2-2)
CATRQDSDTGELFF

SEQ ID NO: 784639 - protein, 17 aa, Homo sapiens
  CDR3 for alpha chain variable domain of TCR clone 392320 (TRAV13-1, TRAJ52)
CAASSGAGGTSYGKLTY

SEQ ID NO: 784640 - protein, 15 aa, Homo sapiens
  CDR3 for beta chain variable domain of TCR clone 392320 (TRBV2, TRBJ2-1)
CASSERAGSYNEQFF

SEQ ID NO: 784641 - protein, 15 aa, Homo sapiens
  CDR3 for alpha chain variable domain of TCR clone 392321 (TRAV12-3, TRAJ22)
CAMRSSSGSARQLTF

SEQ ID NO: 784642 - protein, 15 aa, Homo sapiens
  CDR3 for beta chain variable domain of TCR clone 392321 (TRBV20-1, TRBJ1-1)
CSASRGVTGNTEAFF

SEQ ID NO: 784643 - protein, 15 aa, Homo sapiens
  CDR3 for alpha chain variable domain of TCR clone 392322 (TRAV2, TRAJ11)
CAVGGRNSGYSTLTF

SEQ ID NO: 784644 - protein, 14 aa, Homo sapiens
  CDR3 for beta chain variable domain of TCR clone 392322 (TRBV4-1, TRBJ2-2)
CASRQAVNTGELFF

SEQ ID NO: 784645 - protein, 12 aa, Homo sapiens
  CDR3 for alpha chain variable domain of TCR clone 392323 (TRAV8-1, TRAJ26)
CAVNNYGQNFVF

SEQ ID NO: 784646 - protein, 11 aa, Homo sapiens
  CDR3 for beta chain variable domain of TCR clone 392323 (TRBV29-1, TRBJ2-5)
YSEDRTGTQYF

SEQ ID NO: 784647 - protein, 17 aa, Homo sapiens
  CDR3 for alpha chain variable domain of TCR clone 392324 (TRAV26-1, TRAJ53)
CIVRVDDSGGSNYKLTF

SEQ ID NO: 784648 - protein, 10 aa, Homo sapiens
  CDR3 for beta chain variable domain of TCR clone 392324 (TRBV24-1, TRBJ2-2)
CATSEADLER

SEQ ID NO: 784649 - protein, 13 aa, Homo sapiens
  CDR3 for alpha chain variable domain of TCR clone 392325 (TRAV3, TRAJ27)
CAVRPLGDGKSTF

SEQ ID NO: 784650 - protein, 13 aa, Homo sapiens
  CDR3 for beta chain variable domain of TCR clone 392325 (TRBV7-9, TRBJ2-3)
CASSPGSTDTQYF

SEQ ID NO: 784651 - protein, 14 aa, Homo sapiens
  CDR3 for alpha chain variable domain of TCR clone 392326 (TRAV13-2, TRAJ17)
CAENSKAAGNKLTF

SEQ ID NO: 784652 - protein, 11 aa, Homo sapiens
  CDR3 for beta chain variable domain of TCR clone 392326 (TRBV29-1, TRBJ2-5)
CSEDRTGTQYF

SEQ ID NO: 784653 - protein, 14 aa, Homo sapiens
  CDR3 for alpha chain variable domain of TCR clone 392327 (TRAV12-2, TRAJ6)
CAVIASGGSYIPTC

SEQ ID NO: 784654 - protein, 12 aa, Homo sapiens
  CDR3 for beta chain variable domain of TCR clone 392327 (TRBV5-1, TRBJ1-2)
CASSQDTYGYTF

SEQ ID NO: 784655 - protein, 13 aa, Homo sapiens
  CDR3 for alpha chain variable domain of TCR clone 392328 (TRAV17, TRAJ26)
CATVDNYGQNFVF

SEQ ID NO: 784656 - protein, 11 aa, Homo sapiens
  CDR3 for beta chain variable domain of TCR clone 392328 (TRBV11-3, TRBJ2-1)
CASSLGNEQFF

SEQ ID NO: 784657 - protein, 16 aa, Homo sapiens
  CDR3 for alpha chain variable domain of TCR clone 392329 (TRAV17, TRAJ52)
CATSNAGGASYGKLTF

SEQ ID NO: 784658 - protein, 13 aa, Homo sapiens
  CDR3 for beta chain variable domain of TCR clone 392329 (TRBV27, TRBJ1-6)
CASSLVLVSPLHF

SEQ ID NO: 784659 - protein, 10 aa, Homo sapiens
  CDR3 for alpha chain variable domain of TCR clone 392330 (TRAV1-2, TRAJ20)
CALNDYKLSF

SEQ ID NO: 784660 - protein, 16 aa, Homo sapiens
  CDR3 for beta chain variable domain of TCR clone 392330 (TRBV20-1, TRBJ1-1)
RSARARTQGMNTEAFF

SEQ ID NO: 784661 - protein, 15 aa, Homo sapiens
  CDR3 for alpha chain variable domain of TCR clone 392331 (TRAV16, TRAJ16)
CALQGGGSDGQKLLF

SEQ ID NO: 784662 - protein, 14 aa, Homo sapiens
  CDR3 for beta chain variable domain of TCR clone 392331 (TRBV19, TRBJ2-1)
CASPTFVLSGEQFF

SEQ ID NO: 784663 - protein, 16 aa, Homo sapiens
  CDR3 for alpha chain variable domain of TCR clone 392332 (TRAV8-3, TRAJ8)
CAVPRDGNTGFQKLVF

SEQ ID NO: 784664 - protein, 15 aa, Homo sapiens
  CDR3 for beta chain variable domain of TCR clone 392332 (TRBV7-6, TRBJ1-5)
CASSQSSGINQPQHF

SEQ ID NO: 784665 - protein, 12 aa, Homo sapiens
  CDR3 for alpha chain variable domain of TCR clone 392333 (TRAV21, TRAJ23)
CAVMLQVGKLIF

SEQ ID NO: 784666 - protein, 14 aa, Homo sapiens
  CDR3 for beta chain variable domain of TCR clone 392333 (TRBV20-1, TRBJ1-1)
CSAQTRIGGTEAFF

SEQ ID NO: 784667 - protein, 11 aa, Homo sapiens
  CDR3 for alpha chain variable domain of TCR clone 392334 (TRAV3, TRAJ21)
CAVGNFNKFYF

SEQ ID NO: 784668 - protein, 13 aa, Homo sapiens
  CDR3 for beta chain variable domain of TCR clone 392334 (TRBV2, TRBJ2-7)
CASSDSLEGEQYF

SEQ ID NO: 784669 - protein, 13 aa, Homo sapiens
  CDR3 for alpha chain variable domain of TCR clone 392335 (TRAV23/DV6, TRAJ15)
CAALPAGRNCSDL

SEQ ID NO: 784670 - protein, 14 aa, Homo sapiens
  CDR3 for beta chain variable domain of TCR clone 392335 (TRBV7-9, TRBJ1-2)
CASSRQGANYGYSF

SEQ ID NO: 784671 - protein, 13 aa, Homo sapiens
  CDR3 for alpha chain variable domain of TCR clone 392336 (TRAV12-2, TRAJ18)
CAVRGSTLGRLYF

SEQ ID NO: 784672 - protein, 14 aa, Homo sapiens
  CDR3 for beta chain variable domain of TCR clone 392336 (TRBV5-1, TRBJ2-7)
CASSRGESLYEQYF

SEQ ID NO: 784673 - protein, 15 aa, Homo sapiens
  CDR3 for alpha chain variable domain of TCR clone 392337 (TRAV8-3, TRAJ40)
CAAPSLGSGTYKYIF

SEQ ID NO: 784674 - protein, 16 aa, Homo sapiens
  CDR3 for beta chain variable domain of TCR clone 392337 (TRBV7-3, TRBJ2-3)
CACSLSGYRPEDTKYF

SEQ ID NO: 784675 - protein, 11 aa, Homo sapiens
  CDR3 for alpha chain variable domain of TCR clone 392338 (TRAV12-2, TRAJ31)
CAVTRWARLMF

SEQ ID NO: 784676 - protein, 13 aa, Homo sapiens
  CDR3 for beta chain variable domain of TCR clone 392338 (TRBV28, TRBJ2-7)
CASNNSGNYEQYF

SEQ ID NO: 784677 - protein, 11 aa, Homo sapiens
  CDR3 for alpha chain variable domain of TCR clone 392339 (TRAV13-1, TRAJ39)
CASHAGNMLTF

SEQ ID NO: 784678 - protein, 20 aa, Homo sapiens
  CDR3 for beta chain variable domain of TCR clone 392339 (TRBV28, TRBJ2-1)
CASTPIGRSPGLAGGNEQFF

SEQ ID NO: 784679 - protein, 18 aa, Homo sapiens
  CDR3 for alpha chain variable domain of TCR clone 392340 (TRAV13-1, TRAJ52)
CAASKRSAGGTSYGKLTF

SEQ ID NO: 784680 - protein, 14 aa, Homo sapiens
  CDR3 for beta chain variable domain of TCR clone 392340 (TRBV7-9, TRBJ1-4)
CAITEGEANEKLFF

SEQ ID NO: 784681 - protein, 16 aa, Homo sapiens
  CDR3 for alpha chain variable domain of TCR clone 392341 (TRAV20, TRAJ26)
CAVQHRRDNYGQNFDF

SEQ ID NO: 784682 - protein, 15 aa, Homo sapiens
  CDR3 for beta chain variable domain of TCR clone 392341 (TRBV7-2, TRBJ2-7)
CASSWGQGAIYEQYF

SEQ ID NO: 784683 - protein, 14 aa, Homo sapiens
  CDR3 for alpha chain variable domain of TCR clone 392342 (TRAV1-2, TRAJ16)
CAVNLFSDGQKLLF

SEQ ID NO: 784684 - protein, 15 aa, Homo sapiens
  CDR3 for beta chain variable domain of TCR clone 392342 (TRBV5-1, TRBJ2-1)
CASSPPRAPYNEQFF

SEQ ID NO: 784685 - protein, 12 aa, Homo sapiens
  CDR3 for alpha chain variable domain of TCR clone 392343 (TRAV20, TRAJ23)
CAVQARGGKLIF

SEQ ID NO: 784686 - protein, 14 aa, Homo sapiens
  CDR3 for beta chain variable domain of TCR clone 392343 (TRBV5-4, TRBJ2-1)
CASSLSGSYNEQFF

SEQ ID NO: 784687 - protein, 14 aa, Homo sapiens
  CDR3 for alpha chain variable domain of TCR clone 392344 (TRAV38-2/DV8, TRAJ42)
CAYPEGGSQGNLIF

SEQ ID NO: 784688 - protein, 14 aa, Homo sapiens
  CDR3 for beta chain variable domain of TCR clone 392344 (TRBV11-2, TRBJ1-2)
CASSLGTANYGYTF

SEQ ID NO: 784689 - protein, 17 aa, Homo sapiens
  CDR3 for alpha chain variable domain of TCR clone 392345 (TRAV3, TRAJ42)
WAVRDRDYGGSQGNLIF

SEQ ID NO: 784690 - protein, 15 aa, Homo sapiens
  CDR3 for beta chain variable domain of TCR clone 392345 (TRBV6-6, TRBJ2-7)
CASSYSYGGSYEQYF

SEQ ID NO: 784691 - protein, 18 aa, Homo sapiens
  CDR3 for alpha chain variable domain of TCR clone 392346 (TRAV21, TRAJ52)
CAVRPSPAGGTSYGKLTF

SEQ ID NO: 784692 - protein, 15 aa, Homo sapiens
  CDR3 for beta chain variable domain of TCR clone 392346 (TRBV19, TRBJ1-1)
CASTSGQIQNTEASF

SEQ ID NO: 784693 - protein, 15 aa, Homo sapiens
  CDR3 for alpha chain variable domain of TCR clone 392347 (TRAV13-1, TRAJ57)
VAASNTQGGSEKLVF

SEQ ID NO: 784694 - protein, 16 aa, Homo sapiens
  CDR3 for beta chain variable domain of TCR clone 392347 (TRBV19, TRBJ2-1)
CASSKAGPSSYNEQFF

SEQ ID NO: 784695 - protein, 13 aa, Homo sapiens
  CDR3 for alpha chain variable domain of TCR clone 392348 (TRAV17, TRAJ9)
CATDYTGGFKTMF

SEQ ID NO: 784696 - protein, 14 aa, Homo sapiens
  CDR3 for beta chain variable domain of TCR clone 392348 (TRBV19, TRBJ2-5)
CASSMTGQQETQYF

SEQ ID NO: 784697 - protein, 15 aa, Homo sapiens
  CDR3 for alpha chain variable domain of TCR clone 392349 (TRAV2, TRAJ9)
CAVAALNNGGFKTIF

SEQ ID NO: 784698 - protein, 14 aa, Homo sapiens
  CDR3 for beta chain variable domain of TCR clone 392349 (TRBV7-8, TRBJ2-5)
CASSATGGQETQYF

SEQ ID NO: 784699 - protein, 16 aa, Homo sapiens
  CDR3 for alpha chain variable domain of TCR clone 392350 (TRAV13-2, TRAJ28)
CAEKRYSGAGSYQLTF

SEQ ID NO: 784700 - protein, 16 aa, Homo sapiens
  CDR3 for beta chain variable domain of TCR clone 392350 (TRBV19, TRBJ2-1)
CASSKAGPSSYNEQFF

SEQ ID NO: 784701 - protein, 14 aa, Homo sapiens
  CDR3 for alpha chain variable domain of TCR clone 392351 (TRAV8-1, TRAJ5)
CAVRTDTGRRALTF

SEQ ID NO: 784702 - protein, 14 aa, Homo sapiens
  CDR3 for beta chain variable domain of TCR clone 392351 (TRBV7-8, TRBJ2-3)
CASSLPDGQDTQYF

SEQ ID NO: 784703 - protein, 13 aa, Homo sapiens
  CDR3 for alpha chain variable domain of TCR clone 392352 (TRAV13-1, TRAJ6)
CARGSGGSYIPTF

SEQ ID NO: 784704 - protein, 11 aa, Homo sapiens
  CDR3 for beta chain variable domain of TCR clone 392352 (TRBV6-3, TRBJ2-3)
CATGQADTQYF

SEQ ID NO: 784705 - protein, 13 aa, Homo sapiens
  CDR3 for alpha chain variable domain of TCR clone 392353 (TRAV12-1, TRAJ13)
CVVTSGGYQKVTF

SEQ ID NO: 784706 - protein, 14 aa, Homo sapiens
  CDR3 for beta chain variable domain of TCR clone 392353 (TRBV27, TRBJ2-7)
CASSWAGRSYEQYF

SEQ ID NO: 784707 - protein, 14 aa, Homo sapiens
  CDR3 for alpha chain variable domain of TCR clone 392354 (TRAV8-1, TRAJ49)
CASSIANTGNQFYF

SEQ ID NO: 784708 - protein, 13 aa, Homo sapiens
  CDR3 for beta chain variable domain of TCR clone 392354 (TRBV11-2, TRBJ2-5)
CASSFSIQETQYF

SEQ ID NO: 784709 - protein, 15 aa, Homo sapiens
  CDR3 for alpha chain variable domain of TCR clone 392355 (TRAV26-1, TRAJ47)
CIVRVGWGYGNKLVF

SEQ ID NO: 784710 - protein, 14 aa, Homo sapiens
  CDR3 for beta chain variable domain of TCR clone 392355 (TRBV7-2, TRBJ2-7)
CASSPKTSFYEQYF

SEQ ID NO: 784711 - protein, 14 aa, Homo sapiens
  CDR3 for alpha chain variable domain of TCR clone 392356 (TRAV26-1, TRAJ39)
CIVRGSRAGNMLTF

SEQ ID NO: 784712 - protein, 15 aa, Homo sapiens
  CDR3 for beta chain variable domain of TCR clone 392356 (TRBV6-3, TRBJ2-7)
CASSSPGTVFYEQYF

SEQ ID NO: 784713 - protein, 14 aa, Homo sapiens
  CDR3 for alpha chain variable domain of TCR clone 392357 (TRAV17, TRAJ37)
CATDGSSNTGKLIF

SEQ ID NO: 784714 - protein, 13 aa, Homo sapiens
  CDR3 for beta chain variable domain of TCR clone 392357 (TRBV11-2, TRBJ2-1)
CASSLDLGNEQFF

SEQ ID NO: 784715 - protein, 16 aa, Homo sapiens
  CDR3 for alpha chain variable domain of TCR clone 392358 (TRAV8-6, TRAJ53)
CAVSENSGGSNYKLTF

SEQ ID NO: 784716 - protein, 15 aa, Homo sapiens
  CDR3 for beta chain variable domain of TCR clone 392358 (TRBV6-3, TRBJ1-5)
CASRTGQLNNQPQHF

SEQ ID NO: 784717 - protein, 14 aa, Homo sapiens
  CDR3 for alpha chain variable domain of TCR clone 392359 (TRAV8-3, TRAJ47)
CAVAYMEYGNKLVF

SEQ ID NO: 784718 - protein, 18 aa, Homo sapiens
  CDR3 for beta chain variable domain of TCR clone 392359 (TRBV7-9, TRBJ2-7)
CASSLTTSGSRTWYEQYF

SEQ ID NO: 784719 - protein, 15 aa, Homo sapiens
  CDR3 for alpha chain variable domain of TCR clone 392360 (TRAV26-1, TRAJ9)
CIVRESNTGGFKTIF

SEQ ID NO: 784720 - protein, 15 aa, Homo sapiens
  CDR3 for beta chain variable domain of TCR clone 392360 (TRBV7-2, TRBJ2-1)
CASSSGLAGGNEQFF

SEQ ID NO: 784721 - protein, 15 aa, Homo sapiens
  CDR3 for alpha chain variable domain of TCR clone 392361 (TRAV12-2, TRAJ57)
CAVSSGQGGSEKLVF

SEQ ID NO: 784722 - protein, 14 aa, Homo sapiens
  CDR3 for beta chain variable domain of TCR clone 392361 (TRBV20-1, TRBJ2-1)
CSAHPGLPYNEQFF

SEQ ID NO: 784723 - protein, 12 aa, Homo sapiens
  CDR3 for alpha chain variable domain of TCR clone 392362 (TRAV21, TRAJ33)
CAKMDSNYQLIW

SEQ ID NO: 784724 - protein, 16 aa, Homo sapiens
  CDR3 for beta chain variable domain of TCR clone 392362 (TRBV20-1, TRBJ2-1)
CSAPGLAGSYSDEQFF

SEQ ID NO: 784725 - protein, 11 aa, Homo sapiens
  CDR3 for alpha chain variable domain of TCR clone 392363 (TRAV1-1, TRAJ23)
CAVSQGGKLIF

SEQ ID NO: 784726 - protein, 14 aa, Homo sapiens
  CDR3 for beta chain variable domain of TCR clone 392363 (TRBV19, TRBJ2-1)
CASPTFVLSGEQFF

SEQ ID NO: 784727 - protein, 13 aa, Homo sapiens
  CDR3 for alpha chain variable domain of TCR clone 392364 (TRAV35, TRAJ48)
CAGQEFGNEKLTF

SEQ ID NO: 784728 - protein, 16 aa, Homo sapiens
  CDR3 for beta chain variable domain of TCR clone 392364 (TRBV12-5, TRBJ2-5)
CASGPRTSGNQETQYF

SEQ ID NO: 784729 - protein, 16 aa, Homo sapiens
  CDR3 for alpha chain variable domain of TCR clone 392365 (TRAV3, TRAJ10)
CAVRDMRAGGGNKLTF

SEQ ID NO: 784730 - protein, 16 aa, Homo sapiens
  CDR3 for beta chain variable domain of TCR clone 392365 (TRBV19, TRBJ2-1)
CASSKAGPSAYNEQFF

SEQ ID NO: 784731 - protein, 15 aa, Homo sapiens
  CDR3 for alpha chain variable domain of TCR clone 392366 (TRAV29/DV5, TRAJ24)
CAASGATDSWGKFQF

SEQ ID NO: 784732 - protein, 12 aa, Homo sapiens
  CDR3 for beta chain variable domain of TCR clone 392366 (TRBV11-2, TRBJ2-2)
CGSSLPTGELFF

SEQ ID NO: 784733 - protein, 14 aa, Homo sapiens
  CDR3 for alpha chain variable domain of TCR clone 392367 (TRAV2, TRAJ9)
CAVEDRSGGFKTIF

SEQ ID NO: 784734 - protein, 14 aa, Homo sapiens
  CDR3 for beta chain variable domain of TCR clone 392367 (TRBV23-1, TRBJ2-5)
CASSFLRSQETQYF

SEQ ID NO: 784735 - protein, 15 aa, Homo sapiens
  CDR3 for alpha chain variable domain of TCR clone 392368 (TRAV8-6, TRAJ4)
CAVRSFSGGYNKLIF

SEQ ID NO: 784736 - protein, 13 aa, Homo sapiens
  CDR3 for beta chain variable domain of TCR clone 392368 (TRBV7-2, TRBJ2-3)
CASSTDKLDTQYF

SEQ ID NO: 784737 - protein, 16 aa, Homo sapiens
  CDR3 for alpha chain variable domain of TCR clone 392369 (TRAV8-3, TRAJ48)
CAVGLISNFGNEKLTF

SEQ ID NO: 784738 - protein, 12 aa, Homo sapiens
  CDR3 for beta chain variable domain of TCR clone 392369 (TRBV7-9, TRBJ2-7)
CASSIKREEQYF

SEQ ID NO: 784739 - protein, 13 aa, Homo sapiens
  CDR3 for alpha chain variable domain of TCR clone 392370 (TRAV27, TRAJ29)
CAGAHSGNTPLVF

SEQ ID NO: 784740 - protein, 14 aa, Homo sapiens
  CDR3 for beta chain variable domain of TCR clone 392370 (TRBV2, TRBJ1-5)
CASSENRGGQPQHF

SEQ ID NO: 784741 - protein, 14 aa, Homo sapiens
  CDR3 for alpha chain variable domain of TCR clone 392371 (TRAV1-2, TRAJ16)
CDVKRFSDGQKLLF

SEQ ID NO: 784742 - protein, 14 aa, Homo sapiens
  CDR3 for beta chain variable domain of TCR clone 392371 (TRBV13, TRBJ2-5)
CASSLGRGQETQYF

SEQ ID NO: 784743 - protein, 13 aa, Homo sapiens
  CDR3 for alpha chain variable domain of TCR clone 392372 (TRAV12-2, TRAJ42)
CAVKRGSQGNLIF

SEQ ID NO: 784744 - protein, 16 aa, Homo sapiens
  CDR3 for beta chain variable domain of TCR clone 392372 (TRBV9, TRBJ2-2)
CASSAMGKGSTGELFF

SEQ ID NO: 784745 - protein, 15 aa, Homo sapiens
  CDR3 for alpha chain variable domain of TCR clone 392373 (TRAV35, TRAJ53)
CAGLTQAGSNYKLTF

SEQ ID NO: 784746 - protein, 11 aa, Homo sapiens
  CDR3 for beta chain variable domain of TCR clone 392373 (TRBV20-1, TRBJ1-2)
CSIWASYGYAF

SEQ ID NO: 784747 - protein, 13 aa, Homo sapiens
  CDR3 for alpha chain variable domain of TCR clone 392374 (TRAV8-3, TRAJ36)
CAVSATGANNVFF

SEQ ID NO: 784748 - protein, 15 aa, Homo sapiens
  CDR3 for beta chain variable domain of TCR clone 392374 (TRBV7-2, TRBJ1-2)
CASSPRAGWNYGYTF

SEQ ID NO: 784749 - protein, 16 aa, Homo sapiens
  CDR3 for alpha chain variable domain of TCR clone 392375 (TRAV30, TRAJ24)
RGTEIVDADSWGKFQF

SEQ ID NO: 784750 - protein, 14 aa, Homo sapiens
  CDR3 for beta chain variable domain of TCR clone 392375 (TRBV12-5, TRBJ2-5)
CASGSRTHQETQCF

SEQ ID NO: 784751 - protein, 16 aa, Homo sapiens
  CDR3 for alpha chain variable domain of TCR clone 392376 (TRAV38-1, TRAJ32)
CAFMKGGGGATNKLIF

SEQ ID NO: 784752 - protein, 14 aa, Homo sapiens
  CDR3 for beta chain variable domain of TCR clone 392376 (TRBV19, TRBJ2-1)
CASPTFVLSGEQFF

SEQ ID NO: 784753 - protein, 11 aa, Homo sapiens
  CDR3 for alpha chain variable domain of TCR clone 392377 (TRAV27, TRAJ47)
CRSNQGNKLVF

SEQ ID NO: 784754 - protein, 12 aa, Homo sapiens
  CDR3 for beta chain variable domain of TCR clone 392377 (TRBV12-4, TRBJ2-1)
CASSPGRNEQFF

SEQ ID NO: 784755 - protein, 22 aa, Homo sapiens
  CDR3 for alpha chain variable domain of TCR clone 392378 (TRAV12-2, TRAJ32)
CSSETPSPVIQPPKSATNKLLF

SEQ ID NO: 784756 - protein, 15 aa, Homo sapiens
  CDR3 for beta chain variable domain of TCR clone 392378 (TRBV28, TRBJ2-5)
CASSADWGRGETQYF

SEQ ID NO: 784757 - protein, 14 aa, Homo sapiens
  CDR3 for alpha chain variable domain of TCR clone 392379 (TRAV9-2, TRAJ39)
CALYIYNAGNILTF

SEQ ID NO: 784758 - protein, 16 aa, Homo sapiens
  CDR3 for beta chain variable domain of TCR clone 392379 (TRBV5-1, TRBJ2-2)
CASSSRTGGRTGELFF

SEQ ID NO: 784759 - protein, 13 aa, Homo sapiens
  CDR3 for alpha chain variable domain of TCR clone 392380 (TRAV12-1, TRAJ16)
CVVNGPDGPKLLF

SEQ ID NO: 784760 - protein, 15 aa, Homo sapiens
  CDR3 for beta chain variable domain of TCR clone 392380 (TRBV6-3, TRBJ2-7)
CASSSPGTVFYEQYF

SEQ ID NO: 784761 - protein, 13 aa, Homo sapiens
  CDR3 for alpha chain variable domain of TCR clone 392381 (TRAV1-2, TRAJ9)
CAALNTGGFKTIF

SEQ ID NO: 784762 - protein, 15 aa, Homo sapiens
  CDR3 for beta chain variable domain of TCR clone 392381 (TRBV24-1, TRBJ2-1)
CATSGSGGFSNEQFF

SEQ ID NO: 784763 - protein, 14 aa, Homo sapiens
  CDR3 for alpha chain variable domain of TCR clone 392382 (TRAV12-2, TRAJ11)
YAVRKNSGDSTLTF

SEQ ID NO: 784764 - protein, 14 aa, Homo sapiens
  CDR3 for beta chain variable domain of TCR clone 392382 (TRBV7-2, TRBJ2-5)
CASWQERFRETQYF

SEQ ID NO: 784765 - protein, 15 aa, Homo sapiens
  CDR3 for alpha chain variable domain of TCR clone 392383 (TRAV35, TRAJ52)
CAGPRGGTSYGKLTF

SEQ ID NO: 784766 - protein, 13 aa, Homo sapiens
  CDR3 for beta chain variable domain of TCR clone 392383 (TRBV12-4, TRBJ1-2)
CASSLRQGKGYTF

SEQ ID NO: 784767 - protein, 16 aa, Homo sapiens
  CDR3 for alpha chain variable domain of TCR clone 392384 (TRAV16, TRAJ52)
CALSAAGGTSDGKLTF

SEQ ID NO: 784768 - protein, 19 aa, Homo sapiens
  CDR3 for beta chain variable domain of TCR clone 392384 (TRBV19, TRBJ2-5)
CASSIGQVTDFFLGETQYF

SEQ ID NO: 784769 - protein, 10 aa, Homo sapiens
  CDR3 for alpha chain variable domain of TCR clone 392385 (TRAV8-4, TRAJ43)
CAVSADDMRF

SEQ ID NO: 784770 - protein, 16 aa, Homo sapiens
  CDR3 for beta chain variable domain of TCR clone 392385 (TRBV25-1, TRBJ1-1)
CASSGDRDRGRIEAFF

SEQ ID NO: 784771 - protein, 12 aa, Homo sapiens
  CDR3 for alpha chain variable domain of TCR clone 392386 (TRAV13-1, TRAJ15)
CAASQAGTALIF

SEQ ID NO: 784772 - protein, 18 aa, Homo sapiens
  CDR3 for beta chain variable domain of TCR clone 392386 (TRBV7-9, TRBJ2-3)
CASSLPINGQSSTDTQYF

SEQ ID NO: 784773 - protein, 17 aa, Homo sapiens
  CDR3 for alpha chain variable domain of TCR clone 392387 (TRAV3, TRAJ42)
CAVRDRDYGGSQGNIIF

SEQ ID NO: 784774 - protein, 14 aa, Homo sapiens
  CDR3 for beta chain variable domain of TCR clone 392387 (TRBV12-5, TRBJ2-5)
CASGSRTRQETQYF

SEQ ID NO: 784775 - protein, 16 aa, Homo sapiens
  CDR3 for alpha chain variable domain of TCR clone 392388 (TRAV3, TRAJ28)
CAVLPRSGAGSYQLTF

SEQ ID NO: 784776 - protein, 18 aa, Homo sapiens
  CDR3 for beta chain variable domain of TCR clone 392388 (TRBV23-1, TRBJ2-7)
CASSQYRRTDSTSSTSSR

SEQ ID NO: 784777 - protein, 13 aa, Homo sapiens
  CDR3 for alpha chain variable domain of TCR clone 392389 (TRAV6, TRAJ33)
CALPMDSNYQLIW

SEQ ID NO: 784778 - protein, 15 aa, Homo sapiens
  CDR3 for beta chain variable domain of TCR clone 392389 (TRBV11-3, TRBJ2-7)
CASSPGPASSYEQYF

SEQ ID NO: 784779 - protein, 16 aa, Homo sapiens
  CDR3 for alpha chain variable domain of TCR clone 392390 (TRAV21, TRAJ37)
CAVRPPAPSNTGKLIF

SEQ ID NO: 784780 - protein, 13 aa, Homo sapiens
  CDR3 for beta chain variable domain of TCR clone 392390 (TRBV7-9, TRBJ2-5)
CASLPSGRETQYF

SEQ ID NO: 784781 - protein, 13 aa, Homo sapiens
  CDR3 for alpha chain variable domain of TCR clone 392391 (TRAV21, TRAJ45)
CAVMGGGATGSTL

SEQ ID NO: 784782 - protein, 14 aa, Homo sapiens
  CDR3 for beta chain variable domain of TCR clone 392391 (TRBV4-3, TRBJ1-4)
CASSPLQRNEKLFF

SEQ ID NO: 784783 - protein, 12 aa, Homo sapiens
  CDR3 for alpha chain variable domain of TCR clone 392392 (TRAV8-3, TRAJ48)
CCGAFGNEKLTF

SEQ ID NO: 784784 - protein, 12 aa, Homo sapiens
  CDR3 for beta chain variable domain of TCR clone 392392 (TRBV11-2, TRBJ2-2)
CASSLGGGELFF

SEQ ID NO: 784785 - protein, 17 aa, Homo sapiens
  CDR3 for alpha chain variable domain of TCR clone 392393 (TRAV3, TRAJ6)
CAVRDGPRAGGSYIPTF

SEQ ID NO: 784786 - protein, 13 aa, Homo sapiens
  CDR3 for beta chain variable domain of TCR clone 392393 (TRBV7-2, TRBJ2-1)
CASNRDRWNEQFF

SEQ ID NO: 784787 - protein, 12 aa, Homo sapiens
  CDR3 for alpha chain variable domain of TCR clone 392394 (TRAV16, TRAJ36)
CALKTGANNLFF

SEQ ID NO: 784788 - protein, 16 aa, Homo sapiens
  CDR3 for beta chain variable domain of TCR clone 392394 (TRBV7-6, TRBJ2-1)
CASSAPGPSSYNEQFF

SEQ ID NO: 784789 - protein, 10 aa, Homo sapiens
  CDR3 for alpha chain variable domain of TCR clone 392395 (TRAV1-2, TRAJ31)
CVSEDARLMF

SEQ ID NO: 784790 - protein, 13 aa, Homo sapiens
  CDR3 for beta chain variable domain of TCR clone 392395 (TRBV7-9, TRBJ1-2)
CASSLKQNYGYTF

SEQ ID NO: 784791 - protein, 14 aa, Homo sapiens
  CDR3 for alpha chain variable domain of TCR clone 392396 (TRAV3, TRAJ17)
CAEPQGSCRQQANF

SEQ ID NO: 784792 - protein, 14 aa, Homo sapiens
  CDR3 for beta chain variable domain of TCR clone 392396 (TRBV5-1, TRBJ2-3)
CASSLFGPTDTQYF

SEQ ID NO: 784793 - protein, 14 aa, Homo sapiens
  CDR3 for alpha chain variable domain of TCR clone 392397 (TRAV12-2, TRAJ40)
CAVKIPSGTYKCSF

SEQ ID NO: 784794 - protein, 14 aa, Homo sapiens
  CDR3 for beta chain variable domain of TCR clone 392397 (TRBV20-1, TRBJ1-1)
CSAQTRIGGTEAFF

SEQ ID NO: 784795 - protein, 11 aa, Homo sapiens
  CDR3 for alpha chain variable domain of TCR clone 392398 (TRAV17, TRAJ9)
CGFTGGFTTIF

SEQ ID NO: 784796 - protein, 18 aa, Homo sapiens
  CDR3 for beta chain variable domain of TCR clone 392398 (TRBV12-4, TRBJ2-2)
CASSLVAGTRGRTGELFF

SEQ ID NO: 784797 - protein, 13 aa, Homo sapiens
  CDR3 for alpha chain variable domain of TCR clone 392399 (TRAV8-2, TRAJ29)
CALPGAGNTPLVF

SEQ ID NO: 784798 - protein, 16 aa, Homo sapiens
  CDR3 for beta chain variable domain of TCR clone 392399 (TRBV5-1, TRBJ2-5)
CATSSSGLGGAETQYF

SEQ ID NO: 784799 - protein, 11 aa, Homo sapiens
  CDR3 for alpha chain variable domain of TCR clone 392400 (TRAV12-3, TRAJ11)
CAMKGYSTPTF

SEQ ID NO: 784800 - protein, 16 aa, Homo sapiens
  CDR3 for beta chain variable domain of TCR clone 392400 (TRBV11-2, TRBJ2-3)
CASSLGVSGGQDTQYF

SEQ ID NO: 784801 - protein, 17 aa, Homo sapiens
  CDR3 for alpha chain variable domain of TCR clone 392401 (TRAV3, TRAJ42)
CAVRDRGYGGSQGNLIF

SEQ ID NO: 784802 - protein, 15 aa, Homo sapiens
  CDR3 for beta chain variable domain of TCR clone 392401 (TRBV2, TRBJ2-7)
CASSEGLARSYEQYF

SEQ ID NO: 784803 - protein, 13 aa, Homo sapiens
  CDR3 for alpha chain variable domain of TCR clone 392402 (TRAV12-2, TRAJ24)
CAVSPDSWGKLQF

SEQ ID NO: 784804 - protein, 12 aa, Homo sapiens
  CDR3 for beta chain variable domain of TCR clone 392402 (TRBV7-6, TRBJ2-7)
CASSLADSEQYF

SEQ ID NO: 784805 - protein, 14 aa, Homo sapiens
  CDR3 for alpha chain variable domain of TCR clone 392403 (TRAV12-2, TRAJ36)
CAVKISTGANNLFF

SEQ ID NO: 784806 - protein, 15 aa, Homo sapiens
  CDR3 for beta chain variable domain of TCR clone 392403 (TRBV7-3, TRBJ2-1)
CASSPTGGSRNEQFF

SEQ ID NO: 784807 - protein, 14 aa, Homo sapiens
  CDR3 for alpha chain variable domain of TCR clone 392404 (TRAV26-1, TRAJ45)
CIVRVVGGADVLTF

SEQ ID NO: 784808 - protein, 16 aa, Homo sapiens
  CDR3 for beta chain variable domain of TCR clone 392404 (TRBV7-9, TRBJ1-1)
CASSLTQVRSNTEAFF

SEQ ID NO: 784809 - protein, 15 aa, Homo sapiens
  CDR3 for alpha chain variable domain of TCR clone 392405 (TRAV16, TRAJ18)
CSLGAQRLNPGRLYF

SEQ ID NO: 784810 - protein, 15 aa, Homo sapiens
  CDR3 for beta chain variable domain of TCR clone 392405 (TRBV27, TRBJ2-1)
CASSNGGGSSNEQFF

SEQ ID NO: 784811 - protein, 15 aa, Homo sapiens
  CDR3 for alpha chain variable domain of TCR clone 392406 (TRAV21, TRAJ37)
CAVRPTLSNTGKLIF

SEQ ID NO: 784812 - protein, 16 aa, Homo sapiens
  CDR3 for beta chain variable domain of TCR clone 392406 (TRBV24-1, TRBJ2-3)
CATSDRRQDLTDTRYF

SEQ ID NO: 784813 - protein, 13 aa, Homo sapiens
  CDR3 for alpha chain variable domain of TCR clone 392407 (TRAV27, TRAJ45)
CRSSGGGADGLTF

SEQ ID NO: 784814 - protein, 17 aa, Homo sapiens
  CDR3 for beta chain variable domain of TCR clone 392407 (TRBV11-2, TRBJ2-1)
CASSLYPPGVENNEQFF

SEQ ID NO: 784815 - protein, 11 aa, Homo sapiens
  CDR3 for alpha chain variable domain of TCR clone 392408 (TRAV8-3, TRAJ49)
CAVGGGNQFYF

SEQ ID NO: 784816 - protein, 12 aa, Homo sapiens
  CDR3 for beta chain variable domain of TCR clone 392408 (TRBV5-1, TRBJ2-7)
CASSFRGYEQYF

SEQ ID NO: 784817 - protein, 14 aa, Homo sapiens
  CDR3 for alpha chain variable domain of TCR clone 392409 (TRAV12-2, TRAJ13)
CAVKKTGGYQKVTF

SEQ ID NO: 784818 - protein, 17 aa, Homo sapiens
  CDR3 for beta chain variable domain of TCR clone 392409 (TRBV20-1, TRBJ2-2)
CSASGAGQGGLTGELFF

SEQ ID NO: 784819 - protein, 11 aa, Homo sapiens
  CDR3 for alpha chain variable domain of TCR clone 392410 (TRAV12-1, TRAJ30)
CVVNGKDEIIF

SEQ ID NO: 784820 - protein, 12 aa, Homo sapiens
  CDR3 for beta chain variable domain of TCR clone 392410 (TRBV27, TRBJ2-2)
CASKLFTGELFF

SEQ ID NO: 784821 - protein, 14 aa, Homo sapiens
  CDR3 for alpha chain variable domain of TCR clone 392411 (TRAV12-3, TRAJ22)
CAMSLFGSARQLTF

SEQ ID NO: 784822 - protein, 11 aa, Homo sapiens
  CDR3 for beta chain variable domain of TCR clone 392411 (TRBV12-4, TRBJ2-2)
CASSSAGELFF

SEQ ID NO: 784823 - protein, 14 aa, Homo sapiens
  CDR3 for alpha chain variable domain of TCR clone 392412 (TRAV36/DV7, TRAJ40)
CAVETTSGTYKYIF

SEQ ID NO: 784824 - protein, 13 aa, Homo sapiens
  CDR3 for beta chain variable domain of TCR clone 392412 (TRBV10-3, TRBJ2-5)
CAMASGAGETQYF

SEQ ID NO: 784825 - protein, 16 aa, Homo sapiens
  CDR3 for alpha chain variable domain of TCR clone 392413 (TRAV3, TRAJ37)
CAVRVRGSGNTGKLIF

SEQ ID NO: 784826 - protein, 11 aa, Homo sapiens
  CDR3 for beta chain variable domain of TCR clone 392413 (TRBV11-2, TRBJ2-2)
CASSLPGELFI

SEQ ID NO: 784827 - protein, 14 aa, Homo sapiens
  CDR3 for alpha chain variable domain of TCR clone 392414 (TRAV23/DV6, TRAJ28)
CAASSGAGSYQLTF

SEQ ID NO: 784828 - protein, 12 aa, Homo sapiens
  CDR3 for beta chain variable domain of TCR clone 392414 (TRBV12-5, TRBJ2-5)
CASAQGVETQYF

SEQ ID NO: 784829 - protein, 13 aa, Homo sapiens
  CDR3 for alpha chain variable domain of TCR clone 392415 (TRAV2, TRAJ40)
WAVVTSGTYKYIF

SEQ ID NO: 784830 - protein, 12 aa, Homo sapiens
  CDR3 for beta chain variable domain of TCR clone 392415 (TRBV11-2, TRBJ2-1)
CASSPGNNEQFF

SEQ ID NO: 784831 - protein, 19 aa, Homo sapiens
  CDR3 for alpha chain variable domain of TCR clone 392416 (TRAV27, TRAJ53)
ASTSVQSRNSGGSNDKLTF

SEQ ID NO: 784832 - protein, 14 aa, Homo sapiens
  CDR3 for beta chain variable domain of TCR clone 392416 (TRBV7-3, TRBJ2-3)
CASSSTGVADTQYF

SEQ ID NO: 784833 - protein, 14 aa, Homo sapiens
  CDR3 for alpha chain variable domain of TCR clone 392417 (TRAV26-1, TRAJ38)
CIADNAGNNRKLIW

SEQ ID NO: 784834 - protein, 12 aa, Homo sapiens
  CDR3 for beta chain variable domain of TCR clone 392417 (TRBV7-8, TRBJ2-7)
CASSLGAREQYF

SEQ ID NO: 784835 - protein, 16 aa, Homo sapiens
  CDR3 for alpha chain variable domain of TCR clone 392418 (TRAV12-2, TRAJ28)
CAVITDSGAGSYQLTF

SEQ ID NO: 784836 - protein, 17 aa, Homo sapiens
  CDR3 for beta chain variable domain of TCR clone 392418 (TRBV25-1, TRBJ1-1)
CASSTPPAGAMNTEAFF

SEQ ID NO: 784837 - protein, 14 aa, Homo sapiens
  CDR3 for alpha chain variable domain of TCR clone 392419 (TRAV17, TRAJ12)
CAILSMDSSYKLIF

SEQ ID NO: 784838 - protein, 15 aa, Homo sapiens
  CDR3 for beta chain variable domain of TCR clone 392419 (TRBV5-1, TRBJ1-1)
CASSLGEGENTEAFF

SEQ ID NO: 784839 - protein, 19 aa, Homo sapiens
  CDR3 for alpha chain variable domain of TCR clone 392420 (TRAV12-3, TRAJ41)
LFIRDSQPSDSATPEALNF

SEQ ID NO: 784840 - protein, 15 aa, Homo sapiens
  CDR3 for beta chain variable domain of TCR clone 392420 (TRBV5-1, TRBJ2-7)
CASSLDLTSSYEQYF

SEQ ID NO: 784841 - protein, 12 aa, Homo sapiens
  CDR3 for alpha chain variable domain of TCR clone 392421 (TRAV12-3, TRAJ17)
CAMTLTGNKLTF

SEQ ID NO: 784842 - protein, 16 aa, Homo sapiens
  CDR3 for beta chain variable domain of TCR clone 392421 (TRBV7-3, TRBJ2-1)
CTSSLEGYRSYNEQFF

SEQ ID NO: 784843 - protein, 16 aa, Homo sapiens
  CDR3 for alpha chain variable domain of TCR clone 392422 (TRAV23/DV6, TRAJ9)
CAASIGGNTGGFKTIF

SEQ ID NO: 784844 - protein, 16 aa, Homo sapiens
  CDR3 for beta chain variable domain of TCR clone 392422 (TRBV25-1, TRBJ2-7)
CASSELTGGGIYEQYF

SEQ ID NO: 784845 - protein, 16 aa, Homo sapiens
  CDR3 for alpha chain variable domain of TCR clone 392423 (TRAV30, TRAJ24)
CGTESVDADSWGKFQF

SEQ ID NO: 784846 - protein, 15 aa, Homo sapiens
  CDR3 for beta chain variable domain of TCR clone 392423 (TRBV7-9, TRBJ1-4)
CASSARTGGNEKLFF

SEQ ID NO: 784847 - protein, 14 aa, Homo sapiens
  CDR3 for alpha chain variable domain of TCR clone 392424 (TRAV1-2, TRAJ16)
CAVNRFSDGQKLLF

SEQ ID NO: 784848 - protein, 16 aa, Homo sapiens
  CDR3 for beta chain variable domain of TCR clone 392424 (TRBV2, TRBJ1-2)
CASTRGDSGFNYGYTF

SEQ ID NO: 784849 - protein, 15 aa, Homo sapiens
  CDR3 for alpha chain variable domain of TCR clone 392425 (TRAV12-1, TRAJ9)
CVVSFVDTGGFKTIF

SEQ ID NO: 784850 - protein, 11 aa, Homo sapiens
  CDR3 for beta chain variable domain of TCR clone 392425 (TRBV11-2, TRBJ2-2)
CASSLPGELFF

SEQ ID NO: 784851 - protein, 12 aa, Homo sapiens
  CDR3 for alpha chain variable domain of TCR clone 392426 (TRAV3, TRAJ43)
CAVRDPNNYMRF

SEQ ID NO: 784852 - protein, 13 aa, Homo sapiens
  CDR3 for beta chain variable domain of TCR clone 392426 (TRBV19, TRBJ1-2)
CASSVPGQDGYTF

SEQ ID NO: 784853 - protein, 16 aa, Homo sapiens
  CDR3 for alpha chain variable domain of TCR clone 392427 (TRAV16, TRAJ57)
CAPYLITQGGSEKLVF

SEQ ID NO: 784854 - protein, 17 aa, Homo sapiens
  CDR3 for beta chain variable domain of TCR clone 392427 (TRBV24-1, TRBJ2-4)
SATSDAEARGVRNIQYF

SEQ ID NO: 784855 - protein, 12 aa, Homo sapiens
  CDR3 for alpha chain variable domain of TCR clone 392428 (TRAV13-2, TRAJ8)
CAPWLGFQKLVF

SEQ ID NO: 784856 - protein, 15 aa, Homo sapiens
  CDR3 for beta chain variable domain of TCR clone 392428 (TRBV19, TRBJ2-7)
CASSPAGSGEALRYF

SEQ ID NO: 784857 - protein, 14 aa, Homo sapiens
  CDR3 for alpha chain variable domain of TCR clone 392429 (TRAV12-2, TRAJ53)
CAVKGGGSNYKLTF

SEQ ID NO: 784858 - protein, 15 aa, Homo sapiens
  CDR3 for beta chain variable domain of TCR clone 392429 (TRBV10-3, TRBJ2-3)
CAISLTSGGTDTPYF

SEQ ID NO: 784859 - protein, 13 aa, Homo sapiens
  CDR3 for alpha chain variable domain of TCR clone 392430 (TRAV21, TRAJ37)
CAVSSGNTGKLIF

SEQ ID NO: 784860 - protein, 14 aa, Homo sapiens
  CDR3 for beta chain variable domain of TCR clone 392430 (TRBV25-1, TRBJ1-1)
CASTHLGGNTEAFF

SEQ ID NO: 784861 - protein, 12 aa, Homo sapiens
  CDR3 for alpha chain variable domain of TCR clone 392431 (TRAV12-3, TRAJ4)
CAMTGAGTMLAV

SEQ ID NO: 784862 - protein, 14 aa, Homo sapiens
  CDR3 for beta chain variable domain of TCR clone 392431 (TRBV10-3, TRBJ1-1)
CAISDTDRGVEAFF

SEQ ID NO: 784863 - protein, 23 aa, Homo sapiens
  CDR3 for alpha chain variable domain of TCR clone 392432 (TRAV26-1, )
CIADNACNNHIQNPDPAVYQLRD

SEQ ID NO: 784864 - protein, 13 aa, Homo sapiens
  CDR3 for beta chain variable domain of TCR clone 392432 (TRBV20-1, TRBJ1-1)
CSARGGGNTEAFS

SEQ ID NO: 784865 - protein, 11 aa, Homo sapiens
  CDR3 for alpha chain variable domain of TCR clone 392433 (TRAV8-6, TRAJ23)
CAVISGGKLIF

SEQ ID NO: 784866 - protein, 12 aa, Homo sapiens
  CDR3 for beta chain variable domain of TCR clone 392433 (TRBV7-8, TRBJ2-7)
CASSLGDREQYF

SEQ ID NO: 784867 - protein, 16 aa, Homo sapiens
  CDR3 for alpha chain variable domain of TCR clone 392434 (TRAV1-2, TRAJ10)
CAVRGVLTGGGNKLTF

SEQ ID NO: 784868 - protein, 20 aa, Homo sapiens
  CDR3 for beta chain variable domain of TCR clone 392434 (TRBV7-8, TRBJ2-2)
CSSSHLFPGPTIHITGELFF

SEQ ID NO: 784869 - protein, 13 aa, Homo sapiens
  CDR3 for alpha chain variable domain of TCR clone 392435 (TRAV23/DV6, TRAJ16)
CAASISDGQKLLF

SEQ ID NO: 784870 - protein, 17 aa, Homo sapiens
  CDR3 for beta chain variable domain of TCR clone 392435 (TRBV4-1, TRBJ1-3)
CASSHPGRLETPYILER

SEQ ID NO: 784871 - protein, 16 aa, Homo sapiens
  CDR3 for alpha chain variable domain of TCR clone 392436 (TRAV30, TRAJ24)
CGTAIVDADSWGKFQV

SEQ ID NO: 784872 - protein, 12 aa, Homo sapiens
  CDR3 for beta chain variable domain of TCR clone 392436 (TRBV11-2, TRBJ2-2)
CASSLGGGELFF

SEQ ID NO: 784873 - protein, 13 aa, Homo sapiens
  CDR3 for alpha chain variable domain of TCR clone 392437 (TRAV36/DV7, TRAJ37)
CAVFSSNTGKLIF

SEQ ID NO: 784874 - protein, 14 aa, Homo sapiens
  CDR3 for beta chain variable domain of TCR clone 392437 (TRBV2, TRBJ2-7)
CASSPASGGYEQYF

SEQ ID NO: 784875 - protein, 13 aa, Homo sapiens
  CDR3 for alpha chain variable domain of TCR clone 392438 (TRAV17, TRAJ6)
CATGFGGSYIPTF

SEQ ID NO: 784876 - protein, 12 aa, Homo sapiens
  CDR3 for beta chain variable domain of TCR clone 392438 (TRBV19, TRBJ1-2)
CASTRAEYGYTF

SEQ ID NO: 784877 - protein, 16 aa, Homo sapiens
  CDR3 for alpha chain variable domain of TCR clone 392439 (TRAV3, TRAJ3)
CAVRDRAKSSASKIIC

SEQ ID NO: 784878 - protein, 16 aa, Homo sapiens
  CDR3 for beta chain variable domain of TCR clone 392439 (TRBV20-1, TRBJ2-4)
CSATSLAELANHIQYF

SEQ ID NO: 784879 - protein, 16 aa, Homo sapiens
  CDR3 for alpha chain variable domain of TCR clone 392440 (TRAV26-1, TRAJ53)
CIVRVAMGGSNDKLTF

SEQ ID NO: 784880 - protein, 16 aa, Homo sapiens
  CDR3 for beta chain variable domain of TCR clone 392440 (TRBV6-1, TRBJ1-3)
CASVQGGVETPYILER

SEQ ID NO: 784881 - protein, 16 aa, Homo sapiens
  CDR3 for alpha chain variable domain of TCR clone 392441 (TRAV23/DV6, )
CAEPDIQNPDPAVYQL

SEQ ID NO: 784882 - protein, 14 aa, Homo sapiens
  CDR3 for beta chain variable domain of TCR clone 392441 (TRBV12-4, TRBJ2-5)
CSTLNSGRGETQYF

SEQ ID NO: 784883 - protein, 14 aa, Homo sapiens
  CDR3 for alpha chain variable domain of TCR clone 392442 (TRAV8-3, TRAJ4)
GAVGAAGGYNKLIF

SEQ ID NO: 784884 - protein, 16 aa, Homo sapiens
  CDR3 for beta chain variable domain of TCR clone 392442 (TRBV19, TRBJ2-2)
CASRSPGTGATGELFF

SEQ ID NO: 784885 - protein, 15 aa, Homo sapiens
  CDR3 for alpha chain variable domain of TCR clone 392443 (TRAV3, TRAJ4)
CAVRDGTGGYNKLIF

SEQ ID NO: 784886 - protein, 13 aa, Homo sapiens
  CDR3 for beta chain variable domain of TCR clone 392443 (TRBV10-3, TRBJ2-7)
CASKRAVNYEQYF

SEQ ID NO: 784887 - protein, 14 aa, Homo sapiens
  CDR3 for alpha chain variable domain of TCR clone 392444 (TRAV12-3, TRAJ9)
CAMSPNTGGFKTIF

SEQ ID NO: 784888 - protein, 15 aa, Homo sapiens
  CDR3 for beta chain variable domain of TCR clone 392444 (TRBV7-2, TRBJ2-3)
CASSQLAGVGDTQYF

SEQ ID NO: 784889 - protein, 15 aa, Homo sapiens
  CDR3 for alpha chain variable domain of TCR clone 392445 (TRAV26-1, TRAJ29)
GIVRVEGSGDTPLVF

SEQ ID NO: 784890 - protein, 14 aa, Homo sapiens
  CDR3 for beta chain variable domain of TCR clone 392445 (TRBV18, TRBJ2-5)
CASSPGVSQETQYF

SEQ ID NO: 784891 - protein, 15 aa, Homo sapiens
  CDR3 for alpha chain variable domain of TCR clone 392446 (TRAV27, TRAJ50)
CAGRERGTSYDKVIF

SEQ ID NO: 784892 - protein, 16 aa, Homo sapiens
  CDR3 for beta chain variable domain of TCR clone 392446 (TRBV7-3, TRBJ2-2)
CASSLKRGTLSGELFF

SEQ ID NO: 784893 - protein, 12 aa, Homo sapiens
  CDR3 for alpha chain variable domain of TCR clone 392447 (TRAV21, TRAJ31)
CDLAGNNARLMF

SEQ ID NO: 784894 - protein, 16 aa, Homo sapiens
  CDR3 for beta chain variable domain of TCR clone 392447 (TRBV27, TRBJ2-5)
CASSFGPGGTKETQYF

SEQ ID NO: 784895 - protein, 19 aa, Homo sapiens
  CDR3 for alpha chain variable domain of TCR clone 392448 (TRAV10, TRAJ43)
TASQLSDSASYPAPNDMRF

SEQ ID NO: 784896 - protein, 14 aa, Homo sapiens
  CDR3 for beta chain variable domain of TCR clone 392448 (TRBV19, TRBJ1-5)
CASSKMTGPQPQHF

SEQ ID NO: 784897 - protein, 14 aa, Homo sapiens
  CDR3 for alpha chain variable domain of TCR clone 392449 (TRAV8-4, TRAJ37)
FAVSEPSNTGKLIF

SEQ ID NO: 784898 - protein, 14 aa, Homo sapiens
  CDR3 for beta chain variable domain of TCR clone 392449 (TRBV28, TRBJ2-1)
CAIHRTGARTEQFF

SEQ ID NO: 784899 - protein, 12 aa, Homo sapiens
  CDR3 for alpha chain variable domain of TCR clone 392450 (TRAV13-1, TRAJ21)
CAAKEGFNKFYF

SEQ ID NO: 784900 - protein, 17 aa, Homo sapiens
  CDR3 for beta chain variable domain of TCR clone 392450 (TRBV19, TRBJ2-7)
CGSSISFYDSYPYEQYF

SEQ ID NO: 784901 - protein, 12 aa, Homo sapiens
  CDR3 for alpha chain variable domain of TCR clone 392451 (TRAV12-3, TRAJ40)
CAMSSGTYKYIF

SEQ ID NO: 784902 - protein, 15 aa, Homo sapiens
  CDR3 for beta chain variable domain of TCR clone 392451 (TRBV7-3, TRBJ2-2)
CASSETGHGTGELFF

SEQ ID NO: 784903 - protein, 14 aa, Homo sapiens
  CDR3 for alpha chain variable domain of TCR clone 392452 (TRAV12-2, TRAJ13)
CAVKKTGGSPKVTF

SEQ ID NO: 784904 - protein, 15 aa, Homo sapiens
  CDR3 for beta chain variable domain of TCR clone 392452 (TRBV27, TRBJ2-1)
CASSNGGGSSNEQFF

SEQ ID NO: 784905 - protein, 18 aa, Homo sapiens
  CDR3 for alpha chain variable domain of TCR clone 392453 (TRAV21, TRAJ52)
CAVRPSPAGGTSYGKLPF

SEQ ID NO: 784906 - protein, 17 aa, Homo sapiens
  CDR3 for beta chain variable domain of TCR clone 392453 (TRBV13, TRBJ2-3)
CASSLSRVAGGRNTQYL

SEQ ID NO: 784907 - protein, 16 aa, Homo sapiens
  CDR3 for alpha chain variable domain of TCR clone 392454 (TRAV12-2, TRAJ37)
CAVKEKGSSNTGKLIF

SEQ ID NO: 784908 - protein, 12 aa, Homo sapiens
  CDR3 for beta chain variable domain of TCR clone 392454 (TRBV10-1, TRBJ1-5)
GASSDSNQPQHF

SEQ ID NO: 784909 - protein, 18 aa, Homo sapiens
  CDR3 for alpha chain variable domain of TCR clone 392455 (TRAV26-1, TRAJ23)
CIVRVGLEVWNQGGKLIF

SEQ ID NO: 784910 - protein, 13 aa, Homo sapiens
  CDR3 for beta chain variable domain of TCR clone 392455 (TRBV27, TRBJ2-7)
CASSFSQGYEQYF

SEQ ID NO: 784911 - protein, 14 aa, Homo sapiens
  CDR3 for alpha chain variable domain of TCR clone 392456 (TRAV1-2, TRAJ16)
CAVNRFSDGQKLLF

SEQ ID NO: 784912 - protein, 17 aa, Homo sapiens
  CDR3 for beta chain variable domain of TCR clone 392456 (TRBV4-1, TRBJ1-4)
CTSSQEGPRGVEEKLFF

SEQ ID NO: 784913 - protein, 16 aa, Homo sapiens
  CDR3 for alpha chain variable domain of TCR clone 392457 (TRAV3, TRAJ40)
CAVRDRIASGPYKYIF

SEQ ID NO: 784914 - protein, 16 aa, Homo sapiens
  CDR3 for beta chain variable domain of TCR clone 392457 (TRBV2, TRBJ2-1)
CASRSPAGGKYNEQFF

SEQ ID NO: 784915 - protein, 14 aa, Homo sapiens
  CDR3 for alpha chain variable domain of TCR clone 392458 (TRAV1-2, TRAJ8)
CAVREDTGFHKLVF

SEQ ID NO: 784916 - protein, 15 aa, Homo sapiens
  CDR3 for beta chain variable domain of TCR clone 392458 (TRBV6-3, TRBJ2-7)
CASSSPGTVVYEQYF

SEQ ID NO: 784917 - protein, 14 aa, Homo sapiens
  CDR3 for alpha chain variable domain of TCR clone 392459 (TRAV13-1, TRAJ13)
CAASRVGGYQKVAF

SEQ ID NO: 784918 - protein, 17 aa, Homo sapiens
  CDR3 for beta chain variable domain of TCR clone 392459 (TRBV15, TRBJ1-5)
CATSRAPPGTRNQPQHF

SEQ ID NO: 784919 - protein, 17 aa, Homo sapiens
  CDR3 for alpha chain variable domain of TCR clone 392460 (TRAV3, TRAJ38)
SAVRDCLNAGNNRKLIW

SEQ ID NO: 784920 - protein, 13 aa, Homo sapiens
  CDR3 for beta chain variable domain of TCR clone 392460 (TRBV7-9, TRBJ1-2)
CASSLKQNYGYTF

SEQ ID NO: 784921 - protein, 17 aa, Homo sapiens
  CDR3 for alpha chain variable domain of TCR clone 392461 (TRAV8-6, TRAJ58)
CAVSSWVGETSGSRLAF

SEQ ID NO: 784922 - protein, 15 aa, Homo sapiens
  CDR3 for beta chain variable domain of TCR clone 392461 (TRBV6-3, TRBJ2-7)
CASSSPGTVFYEQYF

SEQ ID NO: 784923 - protein, 11 aa, Homo sapiens
  CDR3 for alpha chain variable domain of TCR clone 392462 (TRAV2, TRAJ13)
CASGGYQKVTF

SEQ ID NO: 784924 - protein, 16 aa, Homo sapiens
  CDR3 for beta chain variable domain of TCR clone 392462 (TRBV19, TRBJ2-1)
CASSKAGPGSYNEQFF

SEQ ID NO: 784925 - protein, 14 aa, Homo sapiens
  CDR3 for alpha chain variable domain of TCR clone 392463 (TRAV13-1, TRAJ35)
CAASKGGFLNVLHC

SEQ ID NO: 784926 - protein, 13 aa, Homo sapiens
  CDR3 for beta chain variable domain of TCR clone 392463 (TRBV7-3, TRBJ1-1)
CASSQDWGAEAFF

SEQ ID NO: 784927 - protein, 13 aa, Homo sapiens
  CDR3 for alpha chain variable domain of TCR clone 392464 (TRAV3, TRAJ41)
CAVSSNSGYALNF

SEQ ID NO: 784928 - protein, 18 aa, Homo sapiens
  CDR3 for beta chain variable domain of TCR clone 392464 (TRBV23-1, TRBJ2-3)
CASSQFHTGGISTDTQYF

SEQ ID NO: 784929 - protein, 15 aa, Homo sapiens
  CDR3 for alpha chain variable domain of TCR clone 392465 (TRAV8-2, TRAJ39)
CVVSSWDNAGNMLTF

SEQ ID NO: 784930 - protein, 12 aa, Homo sapiens
  CDR3 for beta chain variable domain of TCR clone 392465 (TRBV11-2, TRBJ2-2)
CASSLGGGELFF

SEQ ID NO: 784931 - protein, 10 aa, Homo sapiens
  CDR3 for alpha chain variable domain of TCR clone 392466 (TRAV23/DV6, TRAJ22)
CAASSRGSRF

SEQ ID NO: 784932 - protein, 15 aa, Homo sapiens
  CDR3 for beta chain variable domain of TCR clone 392466 (TRBV10-3, TRBJ2-3)
CAIATSGRRTDTQYF

SEQ ID NO: 784933 - protein, 16 aa, Homo sapiens
  CDR3 for alpha chain variable domain of TCR clone 392467 (TRAV8-3, TRAJ28)
CAVGATLGLGVTNSLS

SEQ ID NO: 784934 - protein, 14 aa, Homo sapiens
  CDR3 for beta chain variable domain of TCR clone 392467 (TRBV7-2, TRBJ2-1)
CAISLGVGYNEQFF

SEQ ID NO: 784935 - protein, 12 aa, Homo sapiens
  CDR3 for alpha chain variable domain of TCR clone 392468 (TRAV13-2, TRAJ23)
CAERHRGGKLIF

SEQ ID NO: 784936 - protein, 16 aa, Homo sapiens
  CDR3 for beta chain variable domain of TCR clone 392468 (TRBV20-1, TRBJ1-4)
CSAPGQGLLTNEKLCF

SEQ ID NO: 784937 - protein, 15 aa, Homo sapiens
  CDR3 for alpha chain variable domain of TCR clone 392469 (TRAV17, TRAJ4)
CATGTWSGGYNKLIF

SEQ ID NO: 784938 - protein, 13 aa, Homo sapiens
  CDR3 for beta chain variable domain of TCR clone 392469 (TRBV6-6, TRBJ2-7)
CASSAKHLAEQYF

SEQ ID NO: 784939 - protein, 20 aa, Homo sapiens
  CDR3 for alpha chain variable domain of TCR clone 392470 (TRAV26-1, TRAJ33)
CCVLLHRSLWGEDSNYQLIW

SEQ ID NO: 784940 - protein, 16 aa, Homo sapiens
  CDR3 for beta chain variable domain of TCR clone 392470 (TRBV12-4, TRBJ1-5)
CASSRPVGGSNQPQHF

SEQ ID NO: 784941 - protein, 16 aa, Homo sapiens
  CDR3 for alpha chain variable domain of TCR clone 392471 (TRAV30, TRAJ24)
CGTEIVDADSWGKFQF

SEQ ID NO: 784942 - protein, 16 aa, Homo sapiens
  CDR3 for beta chain variable domain of TCR clone 392471 (TRBV5-1, TRBJ2-2)
CASSSRTGGRTGELFF

SEQ ID NO: 784943 - protein, 14 aa, Homo sapiens
  CDR3 for alpha chain variable domain of TCR clone 392472 (TRAV12-2, TRAJ13)
CVVRKTGGYQKVTF

SEQ ID NO: 784944 - protein, 15 aa, Homo sapiens
  CDR3 for beta chain variable domain of TCR clone 392472 (TRBV27, TRBJ2-1)
CASSNGGGSSNEQFF

SEQ ID NO: 784945 - protein, 13 aa, Homo sapiens
  CDR3 for alpha chain variable domain of TCR clone 392473 (TRAV13-1, TRAJ6)
CAARRGGSYIPTF

SEQ ID NO: 784946 - protein, 15 aa, Homo sapiens
  CDR3 for beta chain variable domain of TCR clone 392473 (TRBV20-1, TRBJ2-7)
CSARDRVSGMDEQYF

SEQ ID NO: 784947 - protein, 17 aa, Homo sapiens
  CDR3 for alpha chain variable domain of TCR clone 392474 (TRAV3, TRAJ42)
CAVRDRDYGGSQGNLIF

SEQ ID NO: 784948 - protein, 14 aa, Homo sapiens
  CDR3 for beta chain variable domain of TCR clone 392474 (TRBV7-2, TRBJ2-5)
CASSPRGGSETQYF

SEQ ID NO: 784949 - protein, 11 aa, Homo sapiens
  CDR3 for alpha chain variable domain of TCR clone 392475 (TRAV17, TRAJ43)
CATPRSNDMRF

SEQ ID NO: 784950 - protein, 13 aa, Homo sapiens
  CDR3 for beta chain variable domain of TCR clone 392475 (TRBV20-1, TRBJ1-6)
CSAPLGVGSPLHF

SEQ ID NO: 784951 - protein, 13 aa, Homo sapiens
  CDR3 for alpha chain variable domain of TCR clone 392476 (TRAV40, TRAJ43)
SAVYYRPNNDMRF

SEQ ID NO: 784952 - protein, 14 aa, Homo sapiens
  CDR3 for beta chain variable domain of TCR clone 392476 (TRBV19, TRBJ2-1)
CASPTFVLSREQFF

SEQ ID NO: 784953 - protein, 16 aa, Homo sapiens
  CDR3 for alpha chain variable domain of TCR clone 392477 (TRAV30, TRAJ24)
CGTEIVDADSWGKFQF

SEQ ID NO: 784954 - protein, 20 aa, Homo sapiens
  CDR3 for beta chain variable domain of TCR clone 392477 (TRBV19, TRBJ2-1)
CASSISRTATSTRLNNEQFF

SEQ ID NO: 784955 - protein, 14 aa, Homo sapiens
  CDR3 for alpha chain variable domain of TCR clone 392478 (TRAV26-1, TRAJ26)
CIVRATFLGQNFVF

SEQ ID NO: 784956 - protein, 16 aa, Homo sapiens
  CDR3 for beta chain variable domain of TCR clone 392478 (TRBV12-4, TRBJ2-7)
CASRSTGTGLSYEQYF

SEQ ID NO: 784957 - protein, 16 aa, Homo sapiens
  CDR3 for alpha chain variable domain of TCR clone 392479 (TRAV23/DV6, TRAJ9)
CAASIGGNTGGFKTIF

SEQ ID NO: 784958 - protein, 15 aa, Homo sapiens
  CDR3 for beta chain variable domain of TCR clone 392479 (TRBV6-3, TRBJ2-7)
CASSSPGTVFCEQYF

SEQ ID NO: 784959 - protein, 17 aa, Homo sapiens
  CDR3 for alpha chain variable domain of TCR clone 392480 (TRAV3, TRAJ42)
CAVRDRDYGGSQGNLIF

SEQ ID NO: 784960 - protein, 15 aa, Homo sapiens
  CDR3 for beta chain variable domain of TCR clone 392480 (TRBV5-1, TRBJ2-2)
CASSLFGQNTGELFF

SEQ ID NO: 784961 - protein, 12 aa, Homo sapiens
  CDR3 for alpha chain variable domain of TCR clone 392481 (TRAV17, TRAJ48)
CTLNFGNEKLTF

SEQ ID NO: 784962 - protein, 13 aa, Homo sapiens
  CDR3 for beta chain variable domain of TCR clone 392481 (TRBV6-5, TRBJ2-5)
CASSSPGGETQYF

SEQ ID NO: 784963 - protein, 22 aa, Homo sapiens
  CDR3 for alpha chain variable domain of TCR clone 392482 (TRAV27, TRAJ38)
CAARSNAGNNHIQNPDPAVYQL

SEQ ID NO: 784964 - protein, 13 aa, Homo sapiens
  CDR3 for beta chain variable domain of TCR clone 392482 (TRBV12-5, TRBJ2-3)
CASGDRQSDTQYF

SEQ ID NO: 784965 - protein, 12 aa, Homo sapiens
  CDR3 for alpha chain variable domain of TCR clone 392483 (TRAV41, TRAJ58)
CAVETSGSRLTF

SEQ ID NO: 784966 - protein, 15 aa, Homo sapiens
  CDR3 for beta chain variable domain of TCR clone 392483 (TRBV29-1, TRBJ2-6)
CSVGDRGSWANVLTF

SEQ ID NO: 784967 - protein, 12 aa, Homo sapiens
  CDR3 for alpha chain variable domain of TCR clone 392484 (TRAV27, TRAJ35)
CAGADFGNVLHC

SEQ ID NO: 784968 - protein, 12 aa, Homo sapiens
  CDR3 for beta chain variable domain of TCR clone 392484 (TRBV14, TRBJ2-5)
CASSQLKETQYF

SEQ ID NO: 784969 - protein, 22 aa, Homo sapiens
  CDR3 for alpha chain variable domain of TCR clone 392485 (TRAV13-1, TRAJ32)
CAASNGWWCYKQAHLWNWHPAF

SEQ ID NO: 784970 - protein, 15 aa, Homo sapiens
  CDR3 for beta chain variable domain of TCR clone 392485 (TRBV20-1, TRBJ2-7)
CSARDRVSGMDEQYF

SEQ ID NO: 784971 - protein, 14 aa, Homo sapiens
  CDR3 for alpha chain variable domain of TCR clone 392486 (TRAV1-2, TRAJ13)
CAVKHSGGYQKVTF

SEQ ID NO: 784972 - protein, 12 aa, Homo sapiens
  CDR3 for beta chain variable domain of TCR clone 392486 (TRBV7-3, TRBJ2-5)
CASSSPIGTQYF

SEQ ID NO: 784973 - protein, 14 aa, Homo sapiens
  CDR3 for alpha chain variable domain of TCR clone 392487 (TRAV1-2, TRAJ16)
CAVNRFSGGQKLLF

SEQ ID NO: 784974 - protein, 16 aa, Homo sapiens
  CDR3 for beta chain variable domain of TCR clone 392487 (TRBV9, TRBJ2-1)
CASSVCGGRNYNEQFF

SEQ ID NO: 784975 - protein, 12 aa, Homo sapiens
  CDR3 for alpha chain variable domain of TCR clone 392488 (TRAV36/DV7, TRAJ40)
CAVGTGTYKYIF

SEQ ID NO: 784976 - protein, 14 aa, Homo sapiens
  CDR3 for beta chain variable domain of TCR clone 392488 (TRBV19, TRBJ2-3)
CASSIYLGGDTQYF

SEQ ID NO: 784977 - protein, 12 aa, Homo sapiens
  CDR3 for alpha chain variable domain of TCR clone 392489 (TRAV17, TRAJ47)
CATDFDGNKLFF

SEQ ID NO: 784978 - protein, 13 aa, Homo sapiens
  CDR3 for beta chain variable domain of TCR clone 392489 (TRBV4-2, TRBJ1-1)
CASSQAGNTEAFF

SEQ ID NO: 784979 - protein, 15 aa, Homo sapiens
  CDR3 for alpha chain variable domain of TCR clone 392490 (TRAV21, TRAJ38)
CAVRQDAGNNRKLMW

SEQ ID NO: 784980 - protein, 16 aa, Homo sapiens
  CDR3 for beta chain variable domain of TCR clone 392490 (TRBV4-2, TRBJ1-1)
CASRPLDGGGDTEAFF

SEQ ID NO: 784981 - protein, 16 aa, Homo sapiens
  CDR3 for alpha chain variable domain of TCR clone 392491 (TRAV3, TRAJ10)
CAVRDMRAGGGNKLTF

SEQ ID NO: 784982 - protein, 16 aa, Homo sapiens
  CDR3 for beta chain variable domain of TCR clone 392491 (TRBV11-2, TRBJ2-3)
CASSPRGGGAGDTQYF

SEQ ID NO: 784983 - protein, 15 aa, Homo sapiens
  CDR3 for alpha chain variable domain of TCR clone 392492 (TRAV3, TRAJ5)
CAVRDPYTGRRALTF

SEQ ID NO: 784984 - protein, 16 aa, Homo sapiens
  CDR3 for beta chain variable domain of TCR clone 392492 (TRBV20-1, TRBJ1-4)
CSAPGQGLLTNEKLFF

SEQ ID NO: 784985 - protein, 13 aa, Homo sapiens
  CDR3 for alpha chain variable domain of TCR clone 392493 (TRAV2, TRAJ40)
CAVVTSGTYKYIF

SEQ ID NO: 784986 - protein, 16 aa, Homo sapiens
  CDR3 for beta chain variable domain of TCR clone 392493 (TRBV29-1, TRBJ1-2)
CSVEANRDIANDGYTF

SEQ ID NO: 784987 - protein, 11 aa, Homo sapiens
  CDR3 for alpha chain variable domain of TCR clone 392494 (TRAV2, TRAJ33)
CAVEGNYQLIC

SEQ ID NO: 784988 - protein, 12 aa, Homo sapiens
  CDR3 for beta chain variable domain of TCR clone 392494 (TRBV11-2, TRBJ2-2)
CASSLGGGELFF

SEQ ID NO: 784989 - protein, 14 aa, Homo sapiens
  CDR3 for alpha chain variable domain of TCR clone 392495 (TRAV2, TRAJ37)
CAVDFTSNTGKLIF

SEQ ID NO: 784990 - protein, 15 aa, Homo sapiens
  CDR3 for beta chain variable domain of TCR clone 392495 (TRBV20-1, TRBJ2-7)
CSARKGLAESYEQYF

SEQ ID NO: 784991 - protein, 14 aa, Homo sapiens
  CDR3 for alpha chain variable domain of TCR clone 392496 (TRAV12-1, TRAJ3)
CGAARYSSASKIIF

SEQ ID NO: 784992 - protein, 15 aa, Homo sapiens
  CDR3 for beta chain variable domain of TCR clone 392496 (TRBV7-2, TRBJ2-6)
CASSREGSGANILTF

SEQ ID NO: 784993 - protein, 21 aa, Homo sapiens
  CDR3 for alpha chain variable domain of TCR clone 392497 (TRAV1-1, TRAJ6)
CLLLLRCERLERTGGSYIPTF

SEQ ID NO: 784994 - protein, 15 aa, Homo sapiens
  CDR3 for beta chain variable domain of TCR clone 392497 (TRBV20-1, TRBJ1-5)
CSATSDRCLGQPRHF

SEQ ID NO: 784995 - protein, 16 aa, Homo sapiens
  CDR3 for alpha chain variable domain of TCR clone 392498 (TRAV30, TRAJ24)
CGTEIVDADSWGKFQF

SEQ ID NO: 784996 - protein, 15 aa, Homo sapiens
  CDR3 for beta chain variable domain of TCR clone 392498 (TRBV20-1, TRBJ2-7)
CSARDRVSGMDGQYF

SEQ ID NO: 784997 - protein, 13 aa, Homo sapiens
  CDR3 for alpha chain variable domain of TCR clone 392499 (TRAV13-1, TRAJ20)
CAARVSNDYKLSF

SEQ ID NO: 784998 - protein, 16 aa, Homo sapiens
  CDR3 for beta chain variable domain of TCR clone 392499 (TRBV5-4, TRBJ2-3)
CASQQPGAGGADTQYF

SEQ ID NO: 784999 - protein, 15 aa, Homo sapiens
  CDR3 for alpha chain variable domain of TCR clone 392500 (TRAV3, TRAJ20)
CAVRDSRSSDYKLSV

SEQ ID NO: 785000 - protein, 14 aa, Homo sapiens
  CDR3 for beta chain variable domain of TCR clone 392500 (TRBV20-1, TRBJ2-7)
CSARRGNGIYEQYF

SEQ ID NO: 785001 - protein, 13 aa, Homo sapiens
  CDR3 for alpha chain variable domain of TCR clone 392501 (TRAV8-3, TRAJ48)
CAVVPFGNEKLTF

SEQ ID NO: 785002 - protein, 14 aa, Homo sapiens
  CDR3 for beta chain variable domain of TCR clone 392501 (TRBV18, TRBJ2-7)
CASSPRGGAYKQYF

SEQ ID NO: 785003 - protein, 16 aa, Homo sapiens
  CDR3 for alpha chain variable domain of TCR clone 392502 (TRAV14/DV4, TRAJ53)
CAMREGGGGSNYKLTF

SEQ ID NO: 785004 - protein, 16 aa, Homo sapiens
  CDR3 for beta chain variable domain of TCR clone 392502 (TRBV28, TRBJ2-3)
CASSLFTGVSTDTQYF

SEQ ID NO: 785005 - protein, 11 aa, Homo sapiens
  CDR3 for alpha chain variable domain of TCR clone 392503 (TRAV26-1, TRAJ26)
CIKGYGQNFVF

SEQ ID NO: 785006 - protein, 13 aa, Homo sapiens
  CDR3 for beta chain variable domain of TCR clone 392503 (TRBV15, TRBJ1-6)
CATSGGLNSPLHF

SEQ ID NO: 785007 - protein, 15 aa, Homo sapiens
  CDR3 for alpha chain variable domain of TCR clone 392504 (TRAV29/DV5, TRAJ36)
CAASADITGANNLFF

SEQ ID NO: 785008 - protein, 19 aa, Homo sapiens
  CDR3 for beta chain variable domain of TCR clone 392504 (TRBV4-1, TRBJ2-1)
CASSQGPLPGLGSRNEQFF

SEQ ID NO: 785009 - protein, 10 aa, Homo sapiens
  CDR3 for alpha chain variable domain of TCR clone 392505 (TRAV8-1, TRAJ21)
CAVIGTKFYF

SEQ ID NO: 785010 - protein, 16 aa, Homo sapiens
  CDR3 for beta chain variable domain of TCR clone 392505 (TRBV7-2, TRBJ1-5)
CASSPWGPEGNQPQHF

SEQ ID NO: 785011 - protein, 12 aa, Homo sapiens
  CDR3 for alpha chain variable domain of TCR clone 392506 (TRAV17, TRAJ39)
CATGAAGNMLTF

SEQ ID NO: 785012 - protein, 14 aa, Homo sapiens
  CDR3 for beta chain variable domain of TCR clone 392506 (TRBV7-9, TRBJ1-2)
CASSRLGANYGYIF

SEQ ID NO: 785013 - protein, 10 aa, Homo sapiens
  CDR3 for alpha chain variable domain of TCR clone 392507 (TRAV8-4, TRAJ43)
CAVSADDMRS

SEQ ID NO: 785014 - protein, 15 aa, Homo sapiens
  CDR3 for beta chain variable domain of TCR clone 392507 (TRBV5-1, TRBJ2-3)
CASSVTAGSTDTQYF

SEQ ID NO: 785015 - protein, 12 aa, Homo sapiens
  CDR3 for alpha chain variable domain of TCR clone 392508 (TRAV4, TRAJ6)
CLAPGGSYIPTF

SEQ ID NO: 785016 - protein, 13 aa, Homo sapiens
  CDR3 for beta chain variable domain of TCR clone 392508 (TRBV19, TRBJ1-2)
CASSVTGQDGDTF

SEQ ID NO: 785017 - protein, 15 aa, Homo sapiens
  CDR3 for alpha chain variable domain of TCR clone 392509 (TRAV21, TRAJ32)
CAAAPYGGATNKLIF

SEQ ID NO: 785018 - protein, 17 aa, Homo sapiens
  CDR3 for beta chain variable domain of TCR clone 392509 (TRBV18, TRBJ2-3)
CASSPFGDGGFTNTQYF

SEQ ID NO: 785019 - protein, 14 aa, Homo sapiens
  CDR3 for alpha chain variable domain of TCR clone 392510 (TRAV21, TRAJ37)
CAVKGSSNTGKLIF

SEQ ID NO: 785020 - protein, 14 aa, Homo sapiens
  CDR3 for beta chain variable domain of TCR clone 392510 (TRBV7-2, TRBJ2-1)
CARSRGGARNEQFF

SEQ ID NO: 785021 - protein, 14 aa, Homo sapiens
  CDR3 for alpha chain variable domain of TCR clone 392511 (TRAV12-2, TRAJ44)
CAVNIAGTASKLTF

SEQ ID NO: 785022 - protein, 15 aa, Homo sapiens
  CDR3 for beta chain variable domain of TCR clone 392511 (TRBV7-3, TRBJ2-2)
CASSETGQGTGELFF

SEQ ID NO: 785023 - protein, 14 aa, Homo sapiens
  CDR3 for alpha chain variable domain of TCR clone 392512 (TRAV35, TRAJ22)
CAGLRPGSARQLTF

SEQ ID NO: 785024 - protein, 18 aa, Homo sapiens
  CDR3 for beta chain variable domain of TCR clone 392512 (TRBV27, TRBJ2-3)
CASSLSGTSGRGTDTQYF

SEQ ID NO: 785025 - protein, 13 aa, Homo sapiens
  CDR3 for alpha chain variable domain of TCR clone 392513 (TRAV12-2, TRAJ34)
CAVRGYNTDKLIF

SEQ ID NO: 785026 - protein, 17 aa, Homo sapiens
  CDR3 for beta chain variable domain of TCR clone 392513 (TRBV11-2, TRBJ2-3)
CQQLRGGLAGAPNTQYF

SEQ ID NO: 785027 - protein, 15 aa, Homo sapiens
  CDR3 for alpha chain variable domain of TCR clone 392514 (TRAV3, TRAJ42)
CAVRGGTGSQGNIIF

SEQ ID NO: 785028 - protein, 14 aa, Homo sapiens
  CDR3 for beta chain variable domain of TCR clone 392514 (TRBV19, TRBJ1-2)
CASSSLFARDVYTF

SEQ ID NO: 785029 - protein, 21 aa, Homo sapiens
  CDR3 for alpha chain variable domain of TCR clone 392515 (TRAV9-2, )
CALTQIGDIQNPDPAVYQLRD

SEQ ID NO: 785030 - protein, 17 aa, Homo sapiens
  CDR3 for beta chain variable domain of TCR clone 392515 (TRBV7-8, TRBJ2-6)
CASSAGTGGAGANVLTF

SEQ ID NO: 785031 - protein, 14 aa, Homo sapiens
  CDR3 for alpha chain variable domain of TCR clone 392516 (TRAV26-2, TRAJ38)
CILYNAGNNRKLIW

SEQ ID NO: 785032 - protein, 14 aa, Homo sapiens
  CDR3 for beta chain variable domain of TCR clone 392516 (TRBV19, TRBJ2-1)
CASPTFVLSGEQFV

SEQ ID NO: 785033 - protein, 14 aa, Homo sapiens
  CDR3 for alpha chain variable domain of TCR clone 392517 (TRAV12-2, TRAJ17)
CAVNIKAAGNKLTF

SEQ ID NO: 785034 - protein, 16 aa, Homo sapiens
  CDR3 for beta chain variable domain of TCR clone 392517 (TRBV20-1, TRBJ2-6)
CSASSQGYDGAYVLTF

SEQ ID NO: 785035 - protein, 18 aa, Homo sapiens
  CDR3 for alpha chain variable domain of TCR clone 392518 (TRAV26-1, TRAJ52)
CIVRVAGAGGTSYGKLTF

SEQ ID NO: 785036 - protein, 16 aa, Homo sapiens
  CDR3 for beta chain variable domain of TCR clone 392518 (TRBV7-3, TRBJ2-2)
CASSLKRGTLSGELFF

SEQ ID NO: 785037 - protein, 11 aa, Homo sapiens
  CDR3 for alpha chain variable domain of TCR clone 392519 (TRAV13-2, TRAJ36)
CAETGANNLFF

SEQ ID NO: 785038 - protein, 13 aa, Homo sapiens
  CDR3 for beta chain variable domain of TCR clone 392519 (TRBV7-9, TRBJ2-4)
CSTEGLAGNIQYF

SEQ ID NO: 785039 - protein, 13 aa, Homo sapiens
  CDR3 for alpha chain variable domain of TCR clone 392520 (TRAV8-3, TRAJ43)
CAVGIYNNTDMRF

SEQ ID NO: 785040 - protein, 16 aa, Homo sapiens
  CDR3 for beta chain variable domain of TCR clone 392520 (TRBV7-2, TRBJ2-5)
CASSLVLWTKQETQYF

SEQ ID NO: 785041 - protein, 10 aa, Homo sapiens
  CDR3 for alpha chain variable domain of TCR clone 392521 (TRAV30, TRAJ48)
CGIGNEKLTF

SEQ ID NO: 785042 - protein, 15 aa, Homo sapiens
  CDR3 for beta chain variable domain of TCR clone 392521 (TRBV11-2, TRBJ2-7)
CASSLDRDGIYEQYF

SEQ ID NO: 785043 - protein, 18 aa, Homo sapiens
  CDR3 for alpha chain variable domain of TCR clone 392522 (TRAV13-1, TRAJ52)
FAASKKSAGGTSYGKLKF

SEQ ID NO: 785044 - protein, 13 aa, Homo sapiens
  CDR3 for beta chain variable domain of TCR clone 392522 (TRBV12-4, TRBJ1-2)
CASSLRQGKGYTF

SEQ ID NO: 785045 - protein, 12 aa, Homo sapiens
  CDR3 for alpha chain variable domain of TCR clone 392523 (TRAV23/DV6, TRAJ16)
CAATGTCQKLLF

SEQ ID NO: 785046 - protein, 15 aa, Homo sapiens
  CDR3 for beta chain variable domain of TCR clone 392523 (TRBV5-1, TRBJ2-3)
CASSLETASTDTQYF

SEQ ID NO: 785047 - protein, 12 aa, Homo sapiens
  CDR3 for alpha chain variable domain of TCR clone 392524 (TRAV13-1, TRAJ5)
CAATLPQAGTRA

SEQ ID NO: 785048 - protein, 17 aa, Homo sapiens
  CDR3 for beta chain variable domain of TCR clone 392524 (TRBV24-1, TRBJ2-1)
CATSDVSTSGTYNEQFF

SEQ ID NO: 785049 - protein, 18 aa, Homo sapiens
  CDR3 for alpha chain variable domain of TCR clone 392525 (TRAV26-2, TRAJ54)
CILRDVEVGTQGAQKLVF

SEQ ID NO: 785050 - protein, 14 aa, Homo sapiens
  CDR3 for beta chain variable domain of TCR clone 392525 (TRBV3-1, TRBJ2-3)
CASSQGFYTDTQYF

SEQ ID NO: 785051 - protein, 11 aa, Homo sapiens
  CDR3 for alpha chain variable domain of TCR clone 392526 (TRAV1-1, TRAJ16)
CAAGDGQKLLF

SEQ ID NO: 785052 - protein, 15 aa, Homo sapiens
  CDR3 for beta chain variable domain of TCR clone 392526 (TRBV28, TRBJ1-2)
CVSIPQGSDDYGYTF

SEQ ID NO: 785053 - protein, 13 aa, Homo sapiens
  CDR3 for alpha chain variable domain of TCR clone 392527 (TRAV17, TRAJ39)
CATDTNAGNMLTF

SEQ ID NO: 785054 - protein, 20 aa, Homo sapiens
  CDR3 for beta chain variable domain of TCR clone 392527 (TRBV28, TRBJ2-1)
CASTPIGRSPGLAGGNEQLF

SEQ ID NO: 785055 - protein, 15 aa, Homo sapiens
  CDR3 for alpha chain variable domain of TCR clone 392528 (TRAV8-3, TRAJ27)
CAVGSSKTNAGKSTF

SEQ ID NO: 785056 - protein, 15 aa, Homo sapiens
  CDR3 for beta chain variable domain of TCR clone 392528 (TRBV27, TRBJ2-5)
CASSNGGGSSNEQFF

SEQ ID NO: 785057 - protein, 14 aa, Homo sapiens
  CDR3 for alpha chain variable domain of TCR clone 392529 (TRAV8-1, TRAJ31)
CAVTSWNNNARLMF

SEQ ID NO: 785058 - protein, 16 aa, Homo sapiens
  CDR3 for beta chain variable domain of TCR clone 392529 (TRBV12-4, TRBJ2-5)
CASSFFVRGRQETQYF

SEQ ID NO: 785059 - protein, 17 aa, Homo sapiens
  CDR3 for alpha chain variable domain of TCR clone 392530 (TRAV1-2, TRAJ8)
CAVRDPDENTGFQKLVF

SEQ ID NO: 785060 - protein, 16 aa, Homo sapiens
  CDR3 for beta chain variable domain of TCR clone 392530 (TRBV7-9, TRBJ2-2)
CASSGLGGANTGELFF

SEQ ID NO: 785061 - protein, 16 aa, Homo sapiens
  CDR3 for alpha chain variable domain of TCR clone 392531 (TRAV30, TRAJ24)
CGTEIVDADSWGKFQF

SEQ ID NO: 785062 - protein, 15 aa, Homo sapiens
  CDR3 for beta chain variable domain of TCR clone 392531 (TRBV7-9, TRBJ1-4)
CACSARTGGNEKLFF

SEQ ID NO: 785063 - protein, 18 aa, Homo sapiens
  CDR3 for alpha chain variable domain of TCR clone 392532 (TRAV21, TRAJ52)
CAVRPSPAVGISYGKLTF

SEQ ID NO: 785064 - protein, 15 aa, Homo sapiens
  CDR3 for beta chain variable domain of TCR clone 392532 (TRBV7-9, TRBJ2-7)
CASSSSGLAVYEQYF

SEQ ID NO: 785065 - protein, 10 aa, Homo sapiens
  CDR3 for alpha chain variable domain of TCR clone 392533 (TRAV8-4, TRAJ43)
CAVSADDMRF

SEQ ID NO: 785066 - protein, 14 aa, Homo sapiens
  CDR3 for beta chain variable domain of TCR clone 392533 (TRBV5-1, TRBJ2-7)
CASSLVRGSGEQYF

SEQ ID NO: 785067 - protein, 14 aa, Homo sapiens
  CDR3 for alpha chain variable domain of TCR clone 392534 (TRAV12-2, TRAJ8)
CAVKENTGFQKLVF

SEQ ID NO: 785068 - protein, 15 aa, Homo sapiens
  CDR3 for beta chain variable domain of TCR clone 392534 (TRBV7-9, TRBJ1-5)
CASSQGHQANQPQHF

SEQ ID NO: 785069 - protein, 13 aa, Homo sapiens
  CDR3 for alpha chain variable domain of TCR clone 392535 (TRAV27, TRAJ23)
CAGVPPTGGKLIF

SEQ ID NO: 785070 - protein, 14 aa, Homo sapiens
  CDR3 for beta chain variable domain of TCR clone 392535 (TRBV5-8, TRBJ2-3)
CASSLSPSTDTQYF

SEQ ID NO: 785071 - protein, 11 aa, Homo sapiens
  CDR3 for alpha chain variable domain of TCR clone 392536 (TRAV4, TRAJ27)
CLVEGAGKSTF

SEQ ID NO: 785072 - protein, 14 aa, Homo sapiens
  CDR3 for beta chain variable domain of TCR clone 392536 (TRBV7-2, TRBJ1-3)
CASSLGTAGNTIYF

SEQ ID NO: 785073 - protein, 13 aa, Homo sapiens
  CDR3 for alpha chain variable domain of TCR clone 392537 (TRAV29/DV5, TRAJ29)
CAASAAGNTPLVF

SEQ ID NO: 785074 - protein, 13 aa, Homo sapiens
  CDR3 for beta chain variable domain of TCR clone 392537 (TRBV7-2, TRBJ2-7)
CASSSPGGSEQYF

SEQ ID NO: 785075 - protein, 13 aa, Homo sapiens
  CDR3 for alpha chain variable domain of TCR clone 392538 (TRAV12-1, TRAJ26)
CVVRRNYGQNFVF

SEQ ID NO: 785076 - protein, 16 aa, Homo sapiens
  CDR3 for beta chain variable domain of TCR clone 392538 (TRBV11-2, TRBJ2-7)
CASSLAPTGVNYEQYF

SEQ ID NO: 785077 - protein, 17 aa, Homo sapiens
  CDR3 for alpha chain variable domain of TCR clone 392539 (TRAV3, TRAJ6)
CAVRDGPRAGGSYVPTF

SEQ ID NO: 785078 - protein, 14 aa, Homo sapiens
  CDR3 for beta chain variable domain of TCR clone 392539 (TRBV7-2, TRBJ2-7)
CASSPKTSVYEQYF

SEQ ID NO: 785079 - protein, 12 aa, Homo sapiens
  CDR3 for alpha chain variable domain of TCR clone 392540 (TRAV8-3, TRAJ26)
CAGDNYGQNFVF

SEQ ID NO: 785080 - protein, 14 aa, Homo sapiens
  CDR3 for beta chain variable domain of TCR clone 392540 (TRBV7-2, TRBJ2-7)
CASMSQGAAYEQYF

SEQ ID NO: 785081 - protein, 13 aa, Homo sapiens
  CDR3 for alpha chain variable domain of TCR clone 392541 (TRAV21, TRAJ27)
CAARPGNAGKSTF

SEQ ID NO: 785082 - protein, 14 aa, Homo sapiens
  CDR3 for beta chain variable domain of TCR clone 392541 (TRBV7-2, TRBJ2-5)
CASSRRGSSETQYF

SEQ ID NO: 785083 - protein, 16 aa, Homo sapiens
  CDR3 for alpha chain variable domain of TCR clone 392542 (TRAV12-3, TRAJ45)
CAMGWGSGGGADGLTF

SEQ ID NO: 785084 - protein, 15 aa, Homo sapiens
  CDR3 for beta chain variable domain of TCR clone 392542 (TRBV7-2, TRBJ2-5)
CASSFLRGGEETQYF

SEQ ID NO: 785085 - protein, 14 aa, Homo sapiens
  CDR3 for alpha chain variable domain of TCR clone 392543 (TRAV1-2, TRAJ8)
CAVRKDTGFQKLVF

SEQ ID NO: 785086 - protein, 14 aa, Homo sapiens
  CDR3 for beta chain variable domain of TCR clone 392543 (TRBV19, TRBJ2-2)
CATTGHANTGELFF

SEQ ID NO: 785087 - protein, 16 aa, Homo sapiens
  CDR3 for alpha chain variable domain of TCR clone 392544 (TRAV19, TRAJ24)
CSSPLSTTGSWGKLQF

SEQ ID NO: 785088 - protein, 13 aa, Homo sapiens
  CDR3 for beta chain variable domain of TCR clone 392544 (TRBV12-5, TRBJ2-3)
CASGDRQSDTQYF

SEQ ID NO: 785089 - protein, 15 aa, Homo sapiens
  CDR3 for alpha chain variable domain of TCR clone 392545 (TRAV2, TRAJ9)
CAVEERGTGGFKTIF

SEQ ID NO: 785090 - protein, 17 aa, Homo sapiens
  CDR3 for beta chain variable domain of TCR clone 392545 (TRBV11-2, TRBJ2-1)
CASSLYPPGVEYNEQFF

SEQ ID NO: 785091 - protein, 16 aa, Homo sapiens
  CDR3 for alpha chain variable domain of TCR clone 392546 (TRAV30, TRAJ24)
CGTEIVDADSWGKFQF

SEQ ID NO: 785092 - protein, 15 aa, Homo sapiens
  CDR3 for beta chain variable domain of TCR clone 392546 (TRBV7-2, TRBJ1-1)
CASSFEGRVNTEAFF

SEQ ID NO: 785093 - protein, 12 aa, Homo sapiens
  CDR3 for alpha chain variable domain of TCR clone 392547 (TRAV1-2, TRAJ8)
CAVREDTGFQKL

SEQ ID NO: 785094 - protein, 15 aa, Homo sapiens
  CDR3 for beta chain variable domain of TCR clone 392547 (TRBV6-3, TRBJ2-7)
CASSSPGTVFYEQYF

SEQ ID NO: 785095 - protein, 15 aa, Homo sapiens
  CDR3 for alpha chain variable domain of TCR clone 392548 (TRAV2, TRAJ24)
CAVEVLTDSWGKFQF

SEQ ID NO: 785096 - protein, 13 aa, Homo sapiens
  CDR3 for beta chain variable domain of TCR clone 392548 (TRBV10-2, TRBJ2-7)
CASGTGGGYEQYF

SEQ ID NO: 785097 - protein, 14 aa, Homo sapiens
  CDR3 for alpha chain variable domain of TCR clone 392549 (TRAV1-2, TRAJ16)
CAVNRFSDGHKLLF

SEQ ID NO: 785098 - protein, 13 aa, Homo sapiens
  CDR3 for beta chain variable domain of TCR clone 392549 (TRBV14, TRBJ2-7)
CASSQDRRYEQYF

SEQ ID NO: 785099 - protein, 13 aa, Homo sapiens
  CDR3 for alpha chain variable domain of TCR clone 392550 (TRAV12-2, TRAJ47)
CAVFMEYGNKLVF

SEQ ID NO: 785100 - protein, 19 aa, Homo sapiens
  CDR3 for beta chain variable domain of TCR clone 392550 (TRBV19, TRBJ2-5)
CASSIGQVTDFFLGETQYF

SEQ ID NO: 785101 - protein, 12 aa, Homo sapiens
  CDR3 for alpha chain variable domain of TCR clone 392551 (TRAV3, TRAJ20)
CAVRDPDYKPSF

SEQ ID NO: 785102 - protein, 16 aa, Homo sapiens
  CDR3 for beta chain variable domain of TCR clone 392551 (TRBV24-1, TRBJ2-3)
CATSDPGTGATDTQYF

SEQ ID NO: 785103 - protein, 14 aa, Homo sapiens
  CDR3 for alpha chain variable domain of TCR clone 392552 (TRAV26-1, TRAJ38)
CIADSAGNNRKLIW

SEQ ID NO: 785104 - protein, 17 aa, Homo sapiens
  CDR3 for beta chain variable domain of TCR clone 392552 (TRBV7-9, TRBJ2-3)
CASSPTVAGDLTDTQYF

SEQ ID NO: 785105 - protein, 12 aa, Homo sapiens
  CDR3 for alpha chain variable domain of TCR clone 392553 (TRAV1-1, TRAJ12)
CAVGNSSYKLIF

SEQ ID NO: 785106 - protein, 14 aa, Homo sapiens
  CDR3 for beta chain variable domain of TCR clone 392553 (TRBV15, TRBJ2-3)
CATARDGGGDTQYF

SEQ ID NO: 785107 - protein, 15 aa, Homo sapiens
  CDR3 for alpha chain variable domain of TCR clone 392554 (TRAV3, TRAJ3)
CAVRDGHSSASKIIF

SEQ ID NO: 785108 - protein, 18 aa, Homo sapiens
  CDR3 for beta chain variable domain of TCR clone 392554 (TRBV20-1, TRBJ2-6)
CSAETTPTHGSGANVLTF

SEQ ID NO: 785109 - protein, 14 aa, Homo sapiens
  CDR3 for alpha chain variable domain of TCR clone 392555 (TRAV1-2, TRAJ6)
CAVSLSGGSYIPTF

SEQ ID NO: 785110 - protein, 14 aa, Homo sapiens
  CDR3 for beta chain variable domain of TCR clone 392555 (TRBV7-2, TRBJ1-1)
CASSFVTGPTEAFF

SEQ ID NO: 785111 - protein, 14 aa, Homo sapiens
  CDR3 for alpha chain variable domain of TCR clone 392556 (TRAV16, TRAJ33)
CALSAMDSNYQLIW

SEQ ID NO: 785112 - protein, 13 aa, Homo sapiens
  CDR3 for beta chain variable domain of TCR clone 392556 (TRBV7-2, TRBJ2-4)
CASSREHANIQYF

SEQ ID NO: 785113 - protein, 15 aa, Homo sapiens
  CDR3 for alpha chain variable domain of TCR clone 392557 (TRAV1-2, TRAJ28)
CAVKYSGAGSYQLTF

SEQ ID NO: 785114 - protein, 13 aa, Homo sapiens
  CDR3 for beta chain variable domain of TCR clone 392557 (TRBV20-1, TRBJ2-7)
CSATHTSGYEQYF

SEQ ID NO: 785115 - protein, 15 aa, Homo sapiens
  CDR3 for alpha chain variable domain of TCR clone 392558 (TRAV8-6, TRAJ26)
CAVSDQSPGGQNFVF

SEQ ID NO: 785116 - protein, 13 aa, Homo sapiens
  CDR3 for beta chain variable domain of TCR clone 392558 (TRBV7-3, TRBJ2-7)
CASSSSGPYEQYF

SEQ ID NO: 785117 - protein, 13 aa, Homo sapiens
  CDR3 for alpha chain variable domain of TCR clone 392559 (TRAV21, TRAJ11)
CAVPNSGYSTLTF

SEQ ID NO: 785118 - protein, 16 aa, Homo sapiens
  CDR3 for beta chain variable domain of TCR clone 392559 (TRBV13, TRBJ2-2)
CASSPRTGEHTGELFF

SEQ ID NO: 785119 - protein, 15 aa, Homo sapiens
  CDR3 for alpha chain variable domain of TCR clone 392560 (TRAV1-2, TRAJ36)
CAASADQTGANNLSF

SEQ ID NO: 785120 - protein, 15 aa, Homo sapiens
  CDR3 for beta chain variable domain of TCR clone 392560 (TRBV5-1, TRBJ2-7)
CASSFSTDSVYEQYF

SEQ ID NO: 785121 - protein, 18 aa, Homo sapiens
  CDR3 for alpha chain variable domain of TCR clone 392561 (TRAV21, TRAJ52)
CAVRPSPAGVTSYGKLTF

SEQ ID NO: 785122 - protein, 14 aa, Homo sapiens
  CDR3 for beta chain variable domain of TCR clone 392561 (TRBV4-1, TRBJ2-2)
CASSQAVNTGELFF

SEQ ID NO: 785123 - protein, 13 aa, Homo sapiens
  CDR3 for alpha chain variable domain of TCR clone 392562 (TRAV12-2, TRAJ47)
CAVFMEYGNKLVF

SEQ ID NO: 785124 - protein, 14 aa, Homo sapiens
  CDR3 for beta chain variable domain of TCR clone 392562 (TRBV4-1, TRBJ1-5)
CASSQAPTNQPQHF

SEQ ID NO: 785125 - protein, 13 aa, Homo sapiens
  CDR3 for alpha chain variable domain of TCR clone 392563 (TRAV3, TRAJ16)
CAVRDRNGQKLLF

SEQ ID NO: 785126 - protein, 15 aa, Homo sapiens
  CDR3 for beta chain variable domain of TCR clone 392563 (TRBV5-1, TRBJ2-1)
CTSSPPRAPYNKQFF

SEQ ID NO: 785127 - protein, 15 aa, Homo sapiens
  CDR3 for alpha chain variable domain of TCR clone 392564 (TRAV26-1, TRAJ40)
CIDRYATSGTYKYIF

SEQ ID NO: 785128 - protein, 17 aa, Homo sapiens
  CDR3 for beta chain variable domain of TCR clone 392564 (TRBV19, TRBJ2-7)
CASSISFYDSYPYEQYF

SEQ ID NO: 785129 - protein, 15 aa, Homo sapiens
  CDR3 for alpha chain variable domain of TCR clone 392565 (TRAV3, TRAJ5)
CAVRDRKTGRRALTF

SEQ ID NO: 785130 - protein, 14 aa, Homo sapiens
  CDR3 for beta chain variable domain of TCR clone 392565 (TRBV2, TRBJ2-1)
CASSEALIYNEQFF

SEQ ID NO: 785131 - protein, 14 aa, Homo sapiens
  CDR3 for alpha chain variable domain of TCR clone 392566 (TRAV8-3, TRAJ9)
CAVVYNTGGFKTIF

SEQ ID NO: 785132 - protein, 15 aa, Homo sapiens
  CDR3 for beta chain variable domain of TCR clone 392566 (TRBV11-3, TRBJ2-7)
CACSPGPASSYEQYF

SEQ ID NO: 785133 - protein, 14 aa, Homo sapiens
  CDR3 for alpha chain variable domain of TCR clone 392567 (TRAV38-1, TRAJ40)
CALRPTSGPSKYIF

SEQ ID NO: 785134 - protein, 14 aa, Homo sapiens
  CDR3 for beta chain variable domain of TCR clone 392567 (TRBV25-1, TRBJ1-1)
CASTHLGGNTEAFF

SEQ ID NO: 785135 - protein, 14 aa, Homo sapiens
  CDR3 for alpha chain variable domain of TCR clone 392568 (TRAV12-3, TRAJ54)
CAMRGIQGAQKLVF

SEQ ID NO: 785136 - protein, 13 aa, Homo sapiens
  CDR3 for beta chain variable domain of TCR clone 392568 (TRBV19, TRBJ1-1)
CAGSPSNGGEAFF

SEQ ID NO: 785137 - protein, 16 aa, Homo sapiens
  CDR3 for alpha chain variable domain of TCR clone 392569 (TRAV23/DV6, TRAJ48)
CAASGVGNFGNEKFTF

SEQ ID NO: 785138 - protein, 15 aa, Homo sapiens
  CDR3 for beta chain variable domain of TCR clone 392569 (TRBV20-1, TRBJ2-5)
CSAGLAGVAQETQYF

SEQ ID NO: 785139 - protein, 14 aa, Homo sapiens
  CDR3 for alpha chain variable domain of TCR clone 392570 (TRAV8-3, TRAJ9)
CAVVYNTGGFKTIF

SEQ ID NO: 785140 - protein, 14 aa, Homo sapiens
  CDR3 for beta chain variable domain of TCR clone 392570 (TRBV7-3, TRBJ2-2)
CACSSGGYTGELFF

SEQ ID NO: 785141 - protein, 12 aa, Homo sapiens
  CDR3 for alpha chain variable domain of TCR clone 392571 (TRAV16, TRAJ56)
CAPTGANSKLTF

SEQ ID NO: 785142 - protein, 17 aa, Homo sapiens
  CDR3 for beta chain variable domain of TCR clone 392571 (TRBV11-1, TRBJ2-6)
CASSLTGFASGANVLTF

SEQ ID NO: 785143 - protein, 14 aa, Homo sapiens
  CDR3 for alpha chain variable domain of TCR clone 392572 (TRAV3, TRAJ17)
CAVRDAAAGNKLTF

SEQ ID NO: 785144 - protein, 15 aa, Homo sapiens
  CDR3 for beta chain variable domain of TCR clone 392572 (TRBV6-3, TRBJ2-5)
CASSLPRGDQETQYF

SEQ ID NO: 785145 - protein, 12 aa, Homo sapiens
  CDR3 for alpha chain variable domain of TCR clone 392573 (TRAV12-1, )
CVVNSWISRTLT

SEQ ID NO: 785146 - protein, 14 aa, Homo sapiens
  CDR3 for beta chain variable domain of TCR clone 392573 (TRBV11-2, TRBJ2-3)
CASSRLARTDTQYF

SEQ ID NO: 785147 - protein, 13 aa, Homo sapiens
  CDR3 for alpha chain variable domain of TCR clone 392574 (TRAV12-3, TRAJ13)
CAMTSGCYQKVTF

SEQ ID NO: 785148 - protein, 13 aa, Homo sapiens
  CDR3 for beta chain variable domain of TCR clone 392574 (TRBV20-1, TRBJ2-2)
CSVLSGGAGELFF

SEQ ID NO: 785149 - protein, 13 aa, Homo sapiens
  CDR3 for alpha chain variable domain of TCR clone 392575 (TRAV3, TRAJ20)
CAVRDTPRYKLSF

SEQ ID NO: 785150 - protein, 15 aa, Homo sapiens
  CDR3 for beta chain variable domain of TCR clone 392575 (TRBV20-1, TRBJ2-7)
CSARDRVSGMDEQYV

SEQ ID NO: 785151 - protein, 13 aa, Homo sapiens
  CDR3 for alpha chain variable domain of TCR clone 392576 (TRAV8-6, TRAJ5)
CAVLDTGRRAFTF

SEQ ID NO: 785152 - protein, 12 aa, Homo sapiens
  CDR3 for beta chain variable domain of TCR clone 392576 (TRBV7-9, TRBJ1-6)
CASSASESPLHF

SEQ ID NO: 785153 - protein, 13 aa, Homo sapiens
  CDR3 for alpha chain variable domain of TCR clone 392577 (TRAV20, TRAJ21)
CAVEGYNFNKFYF

SEQ ID NO: 785154 - protein, 15 aa, Homo sapiens
  CDR3 for beta chain variable domain of TCR clone 392577 (TRBV11-3, TRBJ2-3)
CASLKDGREGDTQYF

SEQ ID NO: 785155 - protein, 14 aa, Homo sapiens
  CDR3 for alpha chain variable domain of TCR clone 392578 (TRAV1-2, TRAJ16)
CAVNRFSDGQKLLF

SEQ ID NO: 785156 - protein, 16 aa, Homo sapiens
  CDR3 for beta chain variable domain of TCR clone 392578 (TRBV9, TRBJ2-1)
CASSVGGGGNYKEQFF

SEQ ID NO: 785157 - protein, 12 aa, Homo sapiens
  CDR3 for alpha chain variable domain of TCR clone 392579 (TRAV21, TRAJ31)
CAVWCNNARLML

SEQ ID NO: 785158 - protein, 16 aa, Homo sapiens
  CDR3 for beta chain variable domain of TCR clone 392579 (TRBV27, TRBJ2-5)
CASSYGPGGQKETQYF

SEQ ID NO: 785159 - protein, 14 aa, Homo sapiens
  CDR3 for alpha chain variable domain of TCR clone 392580 (TRAV26-1, TRAJ45)
CFEVTGGGADGLTF

SEQ ID NO: 785160 - protein, 13 aa, Homo sapiens
  CDR3 for beta chain variable domain of TCR clone 392580 (TRBV7-6, TRBJ1-2)
CASSLVADYGYTF

SEQ ID NO: 785161 - protein, 14 aa, Homo sapiens
  CDR3 for alpha chain variable domain of TCR clone 392581 (TRAV12-2, TRAJ17)
CAVNIKAAGNKLTF

SEQ ID NO: 785162 - protein, 16 aa, Homo sapiens
  CDR3 for beta chain variable domain of TCR clone 392581 (TRBV20-1, TRBJ2-6)
CSASSQGYDGANALPF

SEQ ID NO: 785163 - protein, 15 aa, Homo sapiens
  CDR3 for alpha chain variable domain of TCR clone 392582 (TRAV8-2, TRAJ15)
CVLTMGNQAGTALIF

SEQ ID NO: 785164 - protein, 14 aa, Homo sapiens
  CDR3 for beta chain variable domain of TCR clone 392582 (TRBV12-5, TRBJ2-5)
CASGSRTHQETQYF

SEQ ID NO: 785165 - protein, 13 aa, Homo sapiens
  CDR3 for alpha chain variable domain of TCR clone 392583 (TRAV8-6, TRAJ49)
FAVITNTGNQFYF

SEQ ID NO: 785166 - protein, 12 aa, Homo sapiens
  CDR3 for beta chain variable domain of TCR clone 392583 (TRBV11-2, TRBJ2-2)
CASSLGGGELFF

SEQ ID NO: 785167 - protein, 12 aa, Homo sapiens
  CDR3 for alpha chain variable domain of TCR clone 392584 (TRAV9-2, TRAJ26)
CALRGYVQNFVF

SEQ ID NO: 785168 - protein, 12 aa, Homo sapiens
  CDR3 for beta chain variable domain of TCR clone 392584 (TRBV29-1, TRBJ2-3)
CSVTGGADTQYF

SEQ ID NO: 785169 - protein, 13 aa, Homo sapiens
  CDR3 for alpha chain variable domain of TCR clone 392585 (TRAV30, TRAJ31)
CGTETRNNARLMF

SEQ ID NO: 785170 - protein, 13 aa, Homo sapiens
  CDR3 for beta chain variable domain of TCR clone 392585 (TRBV12-5, TRBJ2-3)
CASGDRQSDTQYF

SEQ ID NO: 785171 - protein, 13 aa, Homo sapiens
  CDR3 for alpha chain variable domain of TCR clone 392586 (TRAV13-1, TRAJ39)
CSKYSNAGNMLTF

SEQ ID NO: 785172 - protein, 15 aa, Homo sapiens
  CDR3 for beta chain variable domain of TCR clone 392586 (TRBV4-1, TRBJ1-2)
CASRQGQGAAYGYTF

SEQ ID NO: 785173 - protein, 13 aa, Homo sapiens
  CDR3 for alpha chain variable domain of TCR clone 392587 (TRAV38-1, TRAJ42)
CARWGGSQGNLIF

SEQ ID NO: 785174 - protein, 10 aa, Homo sapiens
  CDR3 for beta chain variable domain of TCR clone 392587 (TRBV2, TRBJ2-5)
CACSAASQYF

SEQ ID NO: 785175 - protein, 14 aa, Homo sapiens
  CDR3 for alpha chain variable domain of TCR clone 392588 (TRAV12-1, TRAJ17)
CVVNYKAAGNKLTF

SEQ ID NO: 785176 - protein, 13 aa, Homo sapiens
  CDR3 for beta chain variable domain of TCR clone 392588 (TRBV2, TRBJ1-1)
CARNPTGGFHAFF

SEQ ID NO: 785177 - protein, 14 aa, Homo sapiens
  CDR3 for alpha chain variable domain of TCR clone 392589 (TRAV1-2, TRAJ16)
CSVNRFSDGQKLLF

SEQ ID NO: 785178 - protein, 15 aa, Homo sapiens
  CDR3 for beta chain variable domain of TCR clone 392589 (TRBV27, TRBJ1-4)
CASSPRHATNEKLFF

SEQ ID NO: 785179 - protein, 15 aa, Homo sapiens
  CDR3 for alpha chain variable domain of TCR clone 392590 (TRAV26-1, TRAJ37)
CCVLLHRQSRRKLIF

SEQ ID NO: 785180 - protein, 13 aa, Homo sapiens
  CDR3 for beta chain variable domain of TCR clone 392590 (TRBV14, TRBJ1-2)
CASSEDRRYGYTF

SEQ ID NO: 785181 - protein, 17 aa, Homo sapiens
  CDR3 for alpha chain variable domain of TCR clone 392591 (TRAV12-1, TRAJ32)
WVVNMQGYGGATNKLIF

SEQ ID NO: 785182 - protein, 13 aa, Homo sapiens
  CDR3 for beta chain variable domain of TCR clone 392591 (TRBV6-6, TRBJ2-1)
CASSLHQGDEQFF

SEQ ID NO: 785183 - protein, 11 aa, Homo sapiens
  CDR3 for alpha chain variable domain of TCR clone 392592 (TRAV3, TRAJ21)
CAVGNFNKFYC

SEQ ID NO: 785184 - protein, 16 aa, Homo sapiens
  CDR3 for beta chain variable domain of TCR clone 392592 (TRBV19, TRBJ2-1)
CASSKAGPSSYNEQFF

SEQ ID NO: 785185 - protein, 14 aa, Homo sapiens
  CDR3 for alpha chain variable domain of TCR clone 392593 (TRAV29/DV5, TRAJ44)
CAAFLVGTASKLTF

SEQ ID NO: 785186 - protein, 15 aa, Homo sapiens
  CDR3 for beta chain variable domain of TCR clone 392593 (TRBV4-1, TRBJ1-4)
CASSDTGGTNEKLFF

SEQ ID NO: 785187 - protein, 15 aa, Homo sapiens
  CDR3 for alpha chain variable domain of TCR clone 392594 (TRAV38-1, TRAJ37)
CAFIFGSGNTGKLIF

SEQ ID NO: 785188 - protein, 15 aa, Homo sapiens
  CDR3 for beta chain variable domain of TCR clone 392594 (TRBV20-1, TRBJ2-7)
CSARDRVSGMDEQYF

SEQ ID NO: 785189 - protein, 14 aa, Homo sapiens
  CDR3 for alpha chain variable domain of TCR clone 392595 (TRAV1-2, TRAJ16)
CAVNRFSDGQMLLF

SEQ ID NO: 785190 - protein, 14 aa, Homo sapiens
  CDR3 for beta chain variable domain of TCR clone 392595 (TRBV7-9, TRBJ2-3)
CASSLEDGTDTQYF

SEQ ID NO: 785191 - protein, 15 aa, Homo sapiens
  CDR3 for alpha chain variable domain of TCR clone 392596 (TRAV26-1, TRAJ22)
CIVRVSFWFCKATDH

SEQ ID NO: 785192 - protein, 12 aa, Homo sapiens
  CDR3 for beta chain variable domain of TCR clone 392596 (TRBV11-2, TRBJ2-2)
CASSLGGGELFF

SEQ ID NO: 785193 - protein, 14 aa, Homo sapiens
  CDR3 for alpha chain variable domain of TCR clone 392597 (TRAV12-2, TRAJ9)
CAMSPNTGGFTTIF

SEQ ID NO: 785194 - protein, 12 aa, Homo sapiens
  CDR3 for beta chain variable domain of TCR clone 392597 (TRBV19, TRBJ1-5)
CASSIAQQPQHF

SEQ ID NO: 785195 - protein, 13 aa, Homo sapiens
  CDR3 for alpha chain variable domain of TCR clone 392598 (TRAV14/DV4, TRAJ22)
CAMRDLSARQLTF

SEQ ID NO: 785196 - protein, 18 aa, Homo sapiens
  CDR3 for beta chain variable domain of TCR clone 392598 (TRBV19, TRBJ1-5)
CGSSKGQVSIHSNQPQHF

SEQ ID NO: 785197 - protein, 14 aa, Homo sapiens
  CDR3 for alpha chain variable domain of TCR clone 392599 (TRAV16, TRAJ57)
CALSGQGGSEKLVF

SEQ ID NO: 785198 - protein, 13 aa, Homo sapiens
  CDR3 for beta chain variable domain of TCR clone 392599 (TRBV5-4, TRBJ2-1)
CASSLQGPSEQFF

SEQ ID NO: 785199 - protein, 16 aa, Homo sapiens
  CDR3 for alpha chain variable domain of TCR clone 392600 (TRAV16, TRAJ4)
CALSRRFSGGYNKLIF

SEQ ID NO: 785200 - protein, 16 aa, Homo sapiens
  CDR3 for beta chain variable domain of TCR clone 392600 (TRBV24-1, TRBJ2-3)
CATSDPGAGATDTQYF

SEQ ID NO: 785201 - protein, 13 aa, Homo sapiens
  CDR3 for alpha chain variable domain of TCR clone 392601 (TRAV8-3, TRAJ48)
CAVVPFGNEKLTC

SEQ ID NO: 785202 - protein, 15 aa, Homo sapiens
  CDR3 for beta chain variable domain of TCR clone 392601 (TRBV11-2, TRBJ2-1)
CASSSPSTRYNELFF

SEQ ID NO: 785203 - protein, 12 aa, Homo sapiens
  CDR3 for alpha chain variable domain of TCR clone 392602 (TRAV12-3, TRAJ17)
CAMTLTGNKLTF

SEQ ID NO: 785204 - protein, 18 aa, Homo sapiens
  CDR3 for beta chain variable domain of TCR clone 392602 (TRBV4-3, TRBJ1-6)
CASSQETAASSYNSPLHF

SEQ ID NO: 785205 - protein, 15 aa, Homo sapiens
  CDR3 for alpha chain variable domain of TCR clone 392603 (TRAV13-2, TRAJ45)
CAEHHSGGGADGLTF

SEQ ID NO: 785206 - protein, 13 aa, Homo sapiens
  CDR3 for beta chain variable domain of TCR clone 392603 (TRBV19, TRBJ1-2)
CASSVPGQDGYTF

SEQ ID NO: 785207 - protein, 12 aa, Homo sapiens
  CDR3 for alpha chain variable domain of TCR clone 392604 (TRAV21, TRAJ49)
CAVNDGGNQFYF

SEQ ID NO: 785208 - protein, 14 aa, Homo sapiens
  CDR3 for beta chain variable domain of TCR clone 392604 (TRBV12-5, TRBJ2-5)
CASGSRTHQETEYF

SEQ ID NO: 785209 - protein, 18 aa, Homo sapiens
  CDR3 for alpha chain variable domain of TCR clone 392605 (TRAV4, TRAJ10)
CLVGDIPLLTGGGHKLTF

SEQ ID NO: 785210 - protein, 15 aa, Homo sapiens
  CDR3 for beta chain variable domain of TCR clone 392605 (TRBV9, TRBJ1-6)
CASSVAGTGDSPLHF

SEQ ID NO: 785211 - protein, 11 aa, Homo sapiens
  CDR3 for alpha chain variable domain of TCR clone 392606 (TRAV1-1, TRAJ20)
CAVRDRYKLSF

SEQ ID NO: 785212 - protein, 16 aa, Homo sapiens
  CDR3 for beta chain variable domain of TCR clone 392606 (TRBV19, TRBJ2-2)
CASSAAGTGGTGELFF

SEQ ID NO: 785213 - protein, 20 aa, Homo sapiens
  CDR3 for alpha chain variable domain of TCR clone 392607 (TRAV21, TRAJ13)
CAVPRSFWGLPESYLCNWNK

SEQ ID NO: 785214 - protein, 13 aa, Homo sapiens
  CDR3 for beta chain variable domain of TCR clone 392607 (TRBV7-9, TRBJ1-2)
CASSLKQNYGYTF

SEQ ID NO: 785215 - protein, 14 aa, Homo sapiens
  CDR3 for alpha chain variable domain of TCR clone 392608 (TRAV3, TRAJ34)
CAVRAPGNTDKLIF

SEQ ID NO: 785216 - protein, 17 aa, Homo sapiens
  CDR3 for beta chain variable domain of TCR clone 392608 (TRBV28, TRBJ2-5)
CASSTPEGDALQETQYF

SEQ ID NO: 785217 - protein, 15 aa, Homo sapiens
  CDR3 for alpha chain variable domain of TCR clone 392609 (TRAV8-3, TRAJ27)
CAVGPSKTNAGKSTS

SEQ ID NO: 785218 - protein, 15 aa, Homo sapiens
  CDR3 for beta chain variable domain of TCR clone 392609 (TRBV7-2, TRBJ2-1)
CASSSGIAGGNEQFF

SEQ ID NO: 785219 - protein, 14 aa, Homo sapiens
  CDR3 for alpha chain variable domain of TCR clone 392610 (TRAV21, TRAJ35)
CDVMPIGFGNVLHC

SEQ ID NO: 785220 - protein, 12 aa, Homo sapiens
  CDR3 for beta chain variable domain of TCR clone 392610 (TRBV7-9, TRBJ2-7)
CARSIKREEQYF

SEQ ID NO: 785221 - protein, 14 aa, Homo sapiens
  CDR3 for alpha chain variable domain of TCR clone 392611 (TRAV8-3, TRAJ4)
CAVGASGGYNKLTF

SEQ ID NO: 785222 - protein, 13 aa, Homo sapiens
  CDR3 for beta chain variable domain of TCR clone 392611 (TRBV7-9, TRBJ2-7)
CASSLKAGQEQYF

SEQ ID NO: 785223 - protein, 15 aa, Homo sapiens
  CDR3 for alpha chain variable domain of TCR clone 392612 (TRAV21, TRAJ24)
CAARSSTDSWGKLQF

SEQ ID NO: 785224 - protein, 12 aa, Homo sapiens
  CDR3 for beta chain variable domain of TCR clone 392612 (TRBV18, TRBJ2-1)
CASSSDEDEQFF

SEQ ID NO: 785225 - protein, 15 aa, Homo sapiens
  CDR3 for alpha chain variable domain of TCR clone 392613 (TRAV26-1, TRAJ44)
CIVRANTGTASKLTF

SEQ ID NO: 785226 - protein, 15 aa, Homo sapiens
  CDR3 for beta chain variable domain of TCR clone 392613 (TRBV12-4, TRBJ2-5)
CASSPPTGLQETQYF

SEQ ID NO: 785227 - protein, 14 aa, Homo sapiens
  CDR3 for alpha chain variable domain of TCR clone 392614 (TRAV12-1, TRAJ42)
CVVTYGGSQGNLIF

SEQ ID NO: 785228 - protein, 17 aa, Homo sapiens
  CDR3 for beta chain variable domain of TCR clone 392614 (TRBV3-1, TRBJ2-6)
CASSPNTGPAGANVLTF

SEQ ID NO: 785229 - protein, 16 aa, Homo sapiens
  CDR3 for alpha chain variable domain of TCR clone 392615 (TRAV26-1, TRAJ3)
CCVLLHRQSCASKIIF

SEQ ID NO: 785230 - protein, 15 aa, Homo sapiens
  CDR3 for beta chain variable domain of TCR clone 392615 (TRBV3-1, TRBJ2-2)
CASSTTTGPTGELFF

SEQ ID NO: 785231 - protein, 18 aa, Homo sapiens
  CDR3 for alpha chain variable domain of TCR clone 392616 (TRAV21, TRAJ52)
CTVRPSPAGGTSYGKLTL

SEQ ID NO: 785232 - protein, 17 aa, Homo sapiens
  CDR3 for beta chain variable domain of TCR clone 392616 (TRBV13, TRBJ2-3)
CASSLSRVAGGRNTQYF

SEQ ID NO: 785233 - protein, 13 aa, Homo sapiens
  CDR3 for alpha chain variable domain of TCR clone 392617 (TRAV3, TRAJ3)
CAVADSSASQIIF

SEQ ID NO: 785234 - protein, 17 aa, Homo sapiens
  CDR3 for beta chain variable domain of TCR clone 392617 (TRBV7-3, TRBJ2-3)
CASSLMKRMRGADTQYF

SEQ ID NO: 785235 - protein, 14 aa, Homo sapiens
  CDR3 for alpha chain variable domain of TCR clone 392618 (TRAV38-1, TRAJ40)
GALRLTSGTYKYIF

SEQ ID NO: 785236 - protein, 14 aa, Homo sapiens
  CDR3 for beta chain variable domain of TCR clone 392618 (TRBV25-1, TRBJ1-1)
CASTHLGGNTEAFF

SEQ ID NO: 785237 - protein, 16 aa, Homo sapiens
  CDR3 for alpha chain variable domain of TCR clone 392619 (TRAV27, TRAJ56)
CAGVSRKDGANSKLTF

SEQ ID NO: 785238 - protein, 15 aa, Homo sapiens
  CDR3 for beta chain variable domain of TCR clone 392619 (TRBV4-1, TRBJ2-5)
CASIQLAGGQETQYF

SEQ ID NO: 785239 - protein, 14 aa, Homo sapiens
  CDR3 for alpha chain variable domain of TCR clone 392620 (TRAV1-1, TRAJ28)
CAVQLWGWELPTHF

SEQ ID NO: 785240 - protein, 13 aa, Homo sapiens
  CDR3 for beta chain variable domain of TCR clone 392620 (TRBV12-4, TRBJ1-1)
CASSPGTGFEAFF

SEQ ID NO: 785241 - protein, 16 aa, Homo sapiens
  CDR3 for alpha chain variable domain of TCR clone 392621 (TRAV12-1, TRAJ12)
CVVNTLLMDRSYKLIF

SEQ ID NO: 785242 - protein, 13 aa, Homo sapiens
  CDR3 for beta chain variable domain of TCR clone 392621 (TRBV11-2, TRBJ2-1)
CASSSESYNEQFF

SEQ ID NO: 785243 - protein, 13 aa, Homo sapiens
  CDR3 for alpha chain variable domain of TCR clone 392622 (TRAV23/DV6, TRAJ9)
CAGSYTGGFKTIF

SEQ ID NO: 785244 - protein, 13 aa, Homo sapiens
  CDR3 for beta chain variable domain of TCR clone 392622 (TRBV7-9, TRBJ2-3)
CASSPGSTDTQYF

SEQ ID NO: 785245 - protein, 14 aa, Homo sapiens
  CDR3 for alpha chain variable domain of TCR clone 392623 (TRAV1-2, TRAJ8)
CAVREDTGFQKLVF

SEQ ID NO: 785246 - protein, 14 aa, Homo sapiens
  CDR3 for beta chain variable domain of TCR clone 392623 (TRBV7-9, TRBJ2-5)
CASSSPPGTETQYF

SEQ ID NO: 785247 - protein, 13 aa, Homo sapiens
  CDR3 for alpha chain variable domain of TCR clone 392624 (TRAV2, TRAJ40)
CAVVTSGTYKYIF

SEQ ID NO: 785248 - protein, 13 aa, Homo sapiens
  CDR3 for beta chain variable domain of TCR clone 392624 (TRBV7-2, TRBJ2-7)
CASSFTYSYEQYF

SEQ ID NO: 785249 - protein, 14 aa, Homo sapiens
  CDR3 for alpha chain variable domain of TCR clone 392625 (TRAV36/DV7, TRAJ13)
WGSGENGVYQKVTF

SEQ ID NO: 785250 - protein, 15 aa, Homo sapiens
  CDR3 for beta chain variable domain of TCR clone 392625 (TRBV19, TRBJ2-1)
CASSTGTSSYNEQFF

SEQ ID NO: 785251 - protein, 14 aa, Homo sapiens
  CDR3 for alpha chain variable domain of TCR clone 392626 (TRAV13-1, TRAJ44)
CAATATGTASKLTF

SEQ ID NO: 785252 - protein, 14 aa, Homo sapiens
  CDR3 for beta chain variable domain of TCR clone 392626 (TRBV19, TRBJ2-2)
CASSTLHRSGELFF

SEQ ID NO: 785253 - protein, 12 aa, Homo sapiens
  CDR3 for alpha chain variable domain of TCR clone 392627 (TRAV22, TRAJ22)
CAPGGSARQLTF

SEQ ID NO: 785254 - protein, 12 aa, Homo sapiens
  CDR3 for beta chain variable domain of TCR clone 392627 (TRBV7-9, TRBJ2-7)
CASSFGSYEQYF

SEQ ID NO: 785255 - protein, 13 aa, Homo sapiens
  CDR3 for alpha chain variable domain of TCR clone 392628 (TRAV27, TRAJ49)
CAPRPYTGNQFYF

SEQ ID NO: 785256 - protein, 15 aa, Homo sapiens
  CDR3 for beta chain variable domain of TCR clone 392628 (TRBV19, TRBJ2-1)
CASSSPGVPLDEQFF

SEQ ID NO: 785257 - protein, 13 aa, Homo sapiens
  CDR3 for alpha chain variable domain of TCR clone 392629 (TRAV35, TRAJ42)
CAGFPGSQGNLIF

SEQ ID NO: 785258 - protein, 13 aa, Homo sapiens
  CDR3 for beta chain variable domain of TCR clone 392629 (TRBV29-1, TRBJ2-1)
SSVEGGRVNEQFF

SEQ ID NO: 785259 - protein, 14 aa, Homo sapiens
  CDR3 for alpha chain variable domain of TCR clone 392630 (TRAV12-2, TRAJ17)
CAALFKAAGNKLTF

SEQ ID NO: 785260 - protein, 16 aa, Homo sapiens
  CDR3 for beta chain variable domain of TCR clone 392630 (TRBV20-1, TRBJ2-2)
CSASASGIPGAGELLF

SEQ ID NO: 785261 - protein, 14 aa, Homo sapiens
  CDR3 for alpha chain variable domain of TCR clone 392631 (TRAV9-2, TRAJ39)
CALYIYNAGNMLTF

SEQ ID NO: 785262 - protein, 22 aa, Homo sapiens
  CDR3 for beta chain variable domain of TCR clone 392631 (TRBV6-1, TRBJ1-3)
CASVQGGGWKHHIFWRGRLAHC

SEQ ID NO: 785263 - protein, 11 aa, Homo sapiens
  CDR3 for alpha chain variable domain of TCR clone 392632 (TRAV12-2, TRAJ31)
CAILNNARLMF

SEQ ID NO: 785264 - protein, 13 aa, Homo sapiens
  CDR3 for beta chain variable domain of TCR clone 392632 (TRBV20-1, TRBJ1-1)
CSARFGQGTEAFF

SEQ ID NO: 785265 - protein, 12 aa, Homo sapiens
  CDR3 for alpha chain variable domain of TCR clone 392633 (TRAV20, TRAJ54)
CAVQEGAQKMVF

SEQ ID NO: 785266 - protein, 16 aa, Homo sapiens
  CDR3 for beta chain variable domain of TCR clone 392633 (TRBV13, TRBJ2-3)
CQQPLQGSGGRNTQYF

SEQ ID NO: 785267 - protein, 12 aa, Homo sapiens
  CDR3 for alpha chain variable domain of TCR clone 392634 (TRAV12-3, TRAJ39)
CAMTQAGNMLTL

SEQ ID NO: 785268 - protein, 13 aa, Homo sapiens
  CDR3 for beta chain variable domain of TCR clone 392634 (TRBV20-1, TRBJ1-1)
CSAPEGGNTEAFF

SEQ ID NO: 785269 - protein, 14 aa, Homo sapiens
  CDR3 for alpha chain variable domain of TCR clone 392635 (TRAV8-3, TRAJ4)
CAVGAARGYNKLIF

SEQ ID NO: 785270 - protein, 15 aa, Homo sapiens
  CDR3 for beta chain variable domain of TCR clone 392635 (TRBV6-5, TRBJ2-1)
CASSYDAGAGNEQLF

SEQ ID NO: 785271 - protein, 16 aa, Homo sapiens
  CDR3 for alpha chain variable domain of TCR clone 392636 (TRAV2, TRAJ26)
NTVLGPPGDYGQNFVF

SEQ ID NO: 785272 - protein, 17 aa, Homo sapiens
  CDR3 for beta chain variable domain of TCR clone 392636 (TRBV11-2, TRBJ2-1)
CASSLYPPGVEYNEQFF

SEQ ID NO: 785273 - protein, 13 aa, Homo sapiens
  CDR3 for alpha chain variable domain of TCR clone 392637 (TRAV17, TRAJ26)
CATVDNYGQNFVI

SEQ ID NO: 785274 - protein, 16 aa, Homo sapiens
  CDR3 for beta chain variable domain of TCR clone 392637 (TRBV2, TRBJ2-1)
CASSVGGSLSYNEQFF

SEQ ID NO: 785275 - protein, 12 aa, Homo sapiens
  CDR3 for alpha chain variable domain of TCR clone 392638 (TRAV12-1, TRAJ40)
CVVYSGTYKYIF

SEQ ID NO: 785276 - protein, 18 aa, Homo sapiens
  CDR3 for beta chain variable domain of TCR clone 392638 (TRBV11-2, TRBJ2-3)
GSSSLGGASRGAPNTQYF

SEQ ID NO: 785277 - protein, 14 aa, Homo sapiens
  CDR3 for alpha chain variable domain of TCR clone 392639 (TRAV38-1, TRAJ40)
CALRPTSGTYTYIF

SEQ ID NO: 785278 - protein, 20 aa, Homo sapiens
  CDR3 for beta chain variable domain of TCR clone 392639 (TRBV11-2, TRBJ2-2)
LRTRPCISVPAALEAGSCFF

SEQ ID NO: 785279 - protein, 15 aa, Homo sapiens
  CDR3 for alpha chain variable domain of TCR clone 392640 (TRAV26-1, TRAJ29)
CIVRVEGSGNTPLVF

SEQ ID NO: 785280 - protein, 15 aa, Homo sapiens
  CDR3 for beta chain variable domain of TCR clone 392640 (TRBV28, TRBJ2-5)
RASSPGQGSIETQYF

SEQ ID NO: 785281 - protein, 15 aa, Homo sapiens
  CDR3 for alpha chain variable domain of TCR clone 392641 (TRAV38-1, TRAJ28)
CARRISGAGSYQLTF

SEQ ID NO: 785282 - protein, 15 aa, Homo sapiens
  CDR3 for beta chain variable domain of TCR clone 392641 (TRBV2, TRBJ1-3)
CASSISPRSGNTIYF

SEQ ID NO: 785283 - protein, 12 aa, Homo sapiens
  CDR3 for alpha chain variable domain of TCR clone 392642 (TRAV13-2, TRAJ8)
CAPWLGFQKLVF

SEQ ID NO: 785284 - protein, 20 aa, Homo sapiens
  CDR3 for beta chain variable domain of TCR clone 392642 (TRBV7-8, TRBJ2-2)
CASSHLFPGPTINITGELFF

SEQ ID NO: 785285 - protein, 14 aa, Homo sapiens
  CDR3 for alpha chain variable domain of TCR clone 392643 (TRAV1-2, TRAJ8)
CAVREDTGFQKLVF

SEQ ID NO: 785286 - protein, 15 aa, Homo sapiens
  CDR3 for beta chain variable domain of TCR clone 392643 (TRBV15, TRBJ1-1)
CATSLQGGRNTESFF

SEQ ID NO: 785287 - protein, 17 aa, Homo sapiens
  CDR3 for alpha chain variable domain of TCR clone 392644 (TRAV3, TRAJ42)
CAVRDRDYGGSQGNLIF

SEQ ID NO: 785288 - protein, 15 aa, Homo sapiens
  CDR3 for beta chain variable domain of TCR clone 392644 (TRBV9, TRBJ2-6)
CASSVLWNGANVLTF

SEQ ID NO: 785289 - protein, 13 aa, Homo sapiens
  CDR3 for alpha chain variable domain of TCR clone 392645 (TRAV2, TRAJ15)
CAVASQAGTALIF

SEQ ID NO: 785290 - protein, 14 aa, Homo sapiens
  CDR3 for beta chain variable domain of TCR clone 392645 (TRBV4-1, TRBJ2-2)
CTSSQAVNTGELFF

SEQ ID NO: 785291 - protein, 17 aa, Homo sapiens
  CDR3 for alpha chain variable domain of TCR clone 392646 (TRAV3, TRAJ42)
CAVRDRDYGGSQGNLIF

SEQ ID NO: 785292 - protein, 15 aa, Homo sapiens
  CDR3 for beta chain variable domain of TCR clone 392646 (TRBV27, TRBJ2-7)
CASRFWGQGADEQYF

SEQ ID NO: 785293 - protein, 15 aa, Homo sapiens
  CDR3 for alpha chain variable domain of TCR clone 392647 (TRAV12-1, TRAJ44)
CVADLPTGTASKLTF

SEQ ID NO: 785294 - protein, 13 aa, Homo sapiens
  CDR3 for beta chain variable domain of TCR clone 392647 (TRBV7-9, TRBJ1-2)
CASSLKQNYGDTF

SEQ ID NO: 785295 - protein, 17 aa, Homo sapiens
  CDR3 for alpha chain variable domain of TCR clone 392648 (TRAV8-6, TRAJ58)
CAVSSWVGETSGPRLTF

SEQ ID NO: 785296 - protein, 11 aa, Homo sapiens
  CDR3 for beta chain variable domain of TCR clone 392648 (TRBV7-9, TRBJ2-1)
CASSLSYEQFF

SEQ ID NO: 785297 - protein, 11 aa, Homo sapiens
  CDR3 for alpha chain variable domain of TCR clone 392649 (TRAV35, TRAJ30)
CAGPGDDKIIF

SEQ ID NO: 785298 - protein, 18 aa, Homo sapiens
  CDR3 for beta chain variable domain of TCR clone 392649 (TRBV7-6, TRBJ2-1)
CASSPRASGMSSYNEQFF

SEQ ID NO: 785299 - protein, 14 aa, Homo sapiens
  CDR3 for alpha chain variable domain of TCR clone 392650 (TRAV1-2, TRAJ16)
CAGNRFSDGQKLLF

SEQ ID NO: 785300 - protein, 14 aa, Homo sapiens
  CDR3 for beta chain variable domain of TCR clone 392650 (TRBV20-1, TRBJ1-1)
CSAQTRIGGTEAVF

SEQ ID NO: 785301 - protein, 14 aa, Homo sapiens
  CDR3 for alpha chain variable domain of TCR clone 392651 (TRAV8-3, TRAJ4)
CAVGAAGGYNKLIF

SEQ ID NO: 785302 - protein, 16 aa, Homo sapiens
  CDR3 for beta chain variable domain of TCR clone 392651 (TRBV11-2, TRBJ1-1)
CASSLRQGGEHSKAFF

SEQ ID NO: 785303 - protein, 20 aa, Homo sapiens
  CDR3 for alpha chain variable domain of TCR clone 392652 (TRAV12-3, TRAJ52)
CAMTQSYQNAGGTSYGKLTF

SEQ ID NO: 785304 - protein, 14 aa, Homo sapiens
  CDR3 for beta chain variable domain of TCR clone 392652 (TRBV7-3, TRBJ1-1)
CASSLKGGNTEAFF

SEQ ID NO: 785305 - protein, 11 aa, Homo sapiens
  CDR3 for alpha chain variable domain of TCR clone 392653 (TRAV17, TRAJ9)
CATTGGFKTIF

SEQ ID NO: 785306 - protein, 14 aa, Homo sapiens
  CDR3 for beta chain variable domain of TCR clone 392653 (TRBV7-6, TRBJ2-1)
CASSLGGGADEQFF

SEQ ID NO: 785307 - protein, 15 aa, Homo sapiens
  CDR3 for alpha chain variable domain of TCR clone 392654 (TRAV17, TRAJ10)
CATVLLTGGGNKLTS

SEQ ID NO: 785308 - protein, 16 aa, Homo sapiens
  CDR3 for beta chain variable domain of TCR clone 392654 (TRBV7-9, TRBJ2-3)
CASSPWREVGTDTQYF

SEQ ID NO: 785309 - protein, 17 aa, Homo sapiens
  CDR3 for alpha chain variable domain of TCR clone 392655 (TRAV12-2, TRAJ22)
CAVNRIPFSGSARKLTV

SEQ ID NO: 785310 - protein, 13 aa, Homo sapiens
  CDR3 for beta chain variable domain of TCR clone 392655 (TRBV11-3, TRBJ1-1)
CASSSNRDTEAFF

SEQ ID NO: 785311 - protein, 15 aa, Homo sapiens
  CDR3 for alpha chain variable domain of TCR clone 392656 (TRAV13-2, TRAJ40)
CAENRSRQETYKYIF

SEQ ID NO: 785312 - protein, 15 aa, Homo sapiens
  CDR3 for beta chain variable domain of TCR clone 392656 (TRBV19, TRBJ2-1)
CASSMGWNSNNEQFF

SEQ ID NO: 785313 - protein, 14 aa, Homo sapiens
  CDR3 for alpha chain variable domain of TCR clone 392657 (TRAV12-2, TRAJ24)
CAVTPADSWGKLQF

SEQ ID NO: 785314 - protein, 13 aa, Homo sapiens
  CDR3 for beta chain variable domain of TCR clone 392657 (TRBV4-2, TRBJ1-1)
CAGSQAGNTEAFF

SEQ ID NO: 785315 - protein, 15 aa, Homo sapiens
  CDR3 for alpha chain variable domain of TCR clone 392658 (TRAV13-1, TRAJ11)
CAASNRNSGYSTLTF

SEQ ID NO: 785316 - protein, 11 aa, Homo sapiens
  CDR3 for beta chain variable domain of TCR clone 392658 (TRBV20-1, TRBJ2-7)
CSARLSYEQSF

SEQ ID NO: 785317 - protein, 14 aa, Homo sapiens
  CDR3 for alpha chain variable domain of TCR clone 392659 (TRAV1-2, TRAJ16)
CAVNRFSDGQKLLF

SEQ ID NO: 785318 - protein, 16 aa, Homo sapiens
  CDR3 for beta chain variable domain of TCR clone 392659 (TRBV10-2, TRBJ2-7)
CASSESPGSSGFEQYF

SEQ ID NO: 785319 - protein, 14 aa, Homo sapiens
  CDR3 for alpha chain variable domain of TCR clone 392660 (TRAV1-2, TRAJ16)
CAVNRFSDGQKPLF

SEQ ID NO: 785320 - protein, 16 aa, Homo sapiens
  CDR3 for beta chain variable domain of TCR clone 392660 (TRBV9, TRBJ2-1)
CASSVGGGGNYNEQFF

SEQ ID NO: 785321 - protein, 12 aa, Homo sapiens
  CDR3 for alpha chain variable domain of TCR clone 392661 (TRAV1-2, TRAJ29)
CAVPSGNKPLVF

SEQ ID NO: 785322 - protein, 13 aa, Homo sapiens
  CDR3 for beta chain variable domain of TCR clone 392661 (TRBV12-4, TRBJ2-7)
CASSPTETYEQYF

SEQ ID NO: 785323 - protein, 14 aa, Homo sapiens
  CDR3 for alpha chain variable domain of TCR clone 392662 (TRAV1-2, TRAJ16)
CAVNRFSDGQKLLF

SEQ ID NO: 785324 - protein, 15 aa, Homo sapiens
  CDR3 for beta chain variable domain of TCR clone 392662 (TRBV5-7, TRBJ2-7)
CASSPYFEGSYEQYF

SEQ ID NO: 785325 - protein, 12 aa, Homo sapiens
  CDR3 for alpha chain variable domain of TCR clone 392663 (TRAV23/DV6, TRAJ30)
CAASKGDDKIIL

SEQ ID NO: 785326 - protein, 17 aa, Homo sapiens
  CDR3 for beta chain variable domain of TCR clone 392663 (TRBV13, TRBJ2-3)
CVSSLSRVAGGRNTQYF

SEQ ID NO: 785327 - protein, 12 aa, Homo sapiens
  CDR3 for alpha chain variable domain of TCR clone 392664 (TRAV17, TRAJ53)
CATEGSNYKLTF

SEQ ID NO: 785328 - protein, 19 aa, Homo sapiens
  CDR3 for beta chain variable domain of TCR clone 392664 (TRBV5-1, TRBJ2-3)
CASSLWTSGGITTPYTQYF

SEQ ID NO: 785329 - protein, 17 aa, Homo sapiens
  CDR3 for alpha chain variable domain of TCR clone 392665 (TRAV26-1, TRAJ53)
CIVRVDDSGGSNYKLTF

SEQ ID NO: 785330 - protein, 12 aa, Homo sapiens
  CDR3 for beta chain variable domain of TCR clone 392665 (TRBV11-2, TRBJ2-2)
CASSLGGGELFF

SEQ ID NO: 785331 - protein, 14 aa, Homo sapiens
  CDR3 for alpha chain variable domain of TCR clone 392666 (TRAV12-2, TRAJ17)
CAVLFKAAGNKLTF

SEQ ID NO: 785332 - protein, 13 aa, Homo sapiens
  CDR3 for beta chain variable domain of TCR clone 392666 (TRBV19, TRBJ1-2)
CASSHGQVYGYTF

SEQ ID NO: 785333 - protein, 15 aa, Homo sapiens
  CDR3 for alpha chain variable domain of TCR clone 392667 (TRAV12-2, TRAJ53)
CAVNGGGGSNYKLTF

SEQ ID NO: 785334 - protein, 17 aa, Homo sapiens
  CDR3 for beta chain variable domain of TCR clone 392667 (TRBV7-3, TRBJ2-3)
CASSLMKRMWGAETQYF

SEQ ID NO: 785335 - protein, 13 aa, Homo sapiens
  CDR3 for alpha chain variable domain of TCR clone 392668 (TRAV21, TRAJ20)
CAVVLRVDYKLSF

SEQ ID NO: 785336 - protein, 14 aa, Homo sapiens
  CDR3 for beta chain variable domain of TCR clone 392668 (TRBV4-1, TRBJ2-2)
CASSQAVNTGELFF

SEQ ID NO: 785337 - protein, 16 aa, Homo sapiens
  CDR3 for alpha chain variable domain of TCR clone 392669 (TRAV27, TRAJ13)
CAGAKSDSGGYQKVTF

SEQ ID NO: 785338 - protein, 15 aa, Homo sapiens
  CDR3 for beta chain variable domain of TCR clone 392669 (TRBV3-1, TRBJ1-2)
CASSPTRLPEGGYVF

SEQ ID NO: 785339 - protein, 15 aa, Homo sapiens
  CDR3 for alpha chain variable domain of TCR clone 392670 (TRAV17, TRAJ35)
CATAFVIGFGNVLHC

SEQ ID NO: 785340 - protein, 16 aa, Homo sapiens
  CDR3 for beta chain variable domain of TCR clone 392670 (TRBV11-2, TRBJ2-7)
CASSPLAGGPWYEQYF

SEQ ID NO: 785341 - protein, 11 aa, Homo sapiens
  CDR3 for alpha chain variable domain of TCR clone 392671 (TRAV2, TRAJ13)
CASGGYQKATF

SEQ ID NO: 785342 - protein, 16 aa, Homo sapiens
  CDR3 for beta chain variable domain of TCR clone 392671 (TRBV6-1, TRBJ2-5)
CASIETLDRGAETQYF

SEQ ID NO: 785343 - protein, 14 aa, Homo sapiens
  CDR3 for alpha chain variable domain of TCR clone 392672 (TRAV38-1, TRAJ40)
CALRPTSGTYKYIF

SEQ ID NO: 785344 - protein, 15 aa, Homo sapiens
  CDR3 for beta chain variable domain of TCR clone 392672 (TRBV7-2, TRBJ2-7)
CASSSGLAGRREQYF

SEQ ID NO: 785345 - protein, 11 aa, Homo sapiens
  CDR3 for alpha chain variable domain of TCR clone 392673 (TRAV2, TRAJ13)
CASGGYQKVTF

SEQ ID NO: 785346 - protein, 16 aa, Homo sapiens
  CDR3 for beta chain variable domain of TCR clone 392673 (TRBV6-1, TRBJ2-5)
CASCETLDRGAETQYF

SEQ ID NO: 785347 - protein, 15 aa, Homo sapiens
  CDR3 for alpha chain variable domain of TCR clone 392674 (TRAV13-1, TRAJ31)
CAPRDRLMFGDGTQM

SEQ ID NO: 785348 - protein, 12 aa, Homo sapiens
  CDR3 for beta chain variable domain of TCR clone 392674 (TRBV7-9, TRBJ2-7)
CASSLEGYEQYF

SEQ ID NO: 785349 - protein, 13 aa, Homo sapiens
  CDR3 for alpha chain variable domain of TCR clone 392675 (TRAV21, TRAJ27)
CAARPGNAGKSTF

SEQ ID NO: 785350 - protein, 16 aa, Homo sapiens
  CDR3 for beta chain variable domain of TCR clone 392675 (TRBV6-1, TRBJ2-1)
CASSARLAGSYNEQFF

SEQ ID NO: 785351 - protein, 14 aa, Homo sapiens
  CDR3 for alpha chain variable domain of TCR clone 392676 (TRAV12-2, TRAJ17)
CAVLFKAAGNKLTF

SEQ ID NO: 785352 - protein, 14 aa, Homo sapiens
  CDR3 for beta chain variable domain of TCR clone 392676 (TRBV4-1, TRBJ2-2)
CASSRAVNTGELFF

SEQ ID NO: 785353 - protein, 17 aa, Homo sapiens
  CDR3 for alpha chain variable domain of TCR clone 392677 (TRAV27, TRAJ42)
CAGRVIYYGGSQGNLIF

SEQ ID NO: 785354 - protein, 14 aa, Homo sapiens
  CDR3 for beta chain variable domain of TCR clone 392677 (TRBV20-1, TRBJ2-1)
CSAQIGGSANEQFF

SEQ ID NO: 785355 - protein, 13 aa, Homo sapiens
  CDR3 for alpha chain variable domain of TCR clone 392678 (TRAV29/DV5, TRAJ40)
CAASEAGTYKYIF

SEQ ID NO: 785356 - protein, 17 aa, Homo sapiens
  CDR3 for beta chain variable domain of TCR clone 392678 (TRBV14, TRBJ2-1)
CQHPRVWGAYLRGEQFF

SEQ ID NO: 785357 - protein, 14 aa, Homo sapiens
  CDR3 for alpha chain variable domain of TCR clone 392679 (TRAV16, TRAJ37)
CALDISGNTGKLIF

SEQ ID NO: 785358 - protein, 15 aa, Homo sapiens
  CDR3 for beta chain variable domain of TCR clone 392679 (TRBV5-1, TRBJ2-7)
CASSLGDFTTYEQYF

SEQ ID NO: 785359 - protein, 12 aa, Homo sapiens
  CDR3 for alpha chain variable domain of TCR clone 392680 (TRAV25, TRAJ16)
CAGNRDGQKLLL

SEQ ID NO: 785360 - protein, 15 aa, Homo sapiens
  CDR3 for beta chain variable domain of TCR clone 392680 (TRBV5-1, TRBJ2-7)
CASSLYPDGGYEQYF

SEQ ID NO: 785361 - protein, 14 aa, Homo sapiens
  CDR3 for alpha chain variable domain of TCR clone 392681 (TRAV2, TRAJ9)
CAVEDRSGGFKAIF

SEQ ID NO: 785362 - protein, 17 aa, Homo sapiens
  CDR3 for beta chain variable domain of TCR clone 392681 (TRBV4-1, TRBJ2-7)
CASSRDPLGVRGGEQYF

SEQ ID NO: 785363 - protein, 15 aa, Homo sapiens
  CDR3 for alpha chain variable domain of TCR clone 392682 (TRAV17, TRAJ52)
CATEAGGTSDGTLTF

SEQ ID NO: 785364 - protein, 14 aa, Homo sapiens
  CDR3 for beta chain variable domain of TCR clone 392682 (TRBV28, TRBJ1-5)
CASSLGVLVKPQHF

SEQ ID NO: 785365 - protein, 13 aa, Homo sapiens
  CDR3 for alpha chain variable domain of TCR clone 392683 (TRAV2, TRAJ40)
CAVVTSGTYKYIF

SEQ ID NO: 785366 - protein, 16 aa, Homo sapiens
  CDR3 for beta chain variable domain of TCR clone 392683 (TRBV19, TRBJ2-2)
CASRSPGTGATVELFF

SEQ ID NO: 785367 - protein, 13 aa, Homo sapiens
  CDR3 for alpha chain variable domain of TCR clone 392684 (TRAV8-3, TRAJ28)
CAVGAVGSYQLTF

SEQ ID NO: 785368 - protein, 17 aa, Homo sapiens
  CDR3 for beta chain variable domain of TCR clone 392684 (TRBV11-2, TRBJ2-7)
CASSLYPPGVEYNEQYF

SEQ ID NO: 785369 - protein, 12 aa, Homo sapiens
  CDR3 for alpha chain variable domain of TCR clone 392685 (TRAV12-3, TRAJ53)
CARAGSNYKLTF

SEQ ID NO: 785370 - protein, 11 aa, Homo sapiens
  CDR3 for beta chain variable domain of TCR clone 392685 (TRBV28, TRBJ2-1)
CASSTRTEQFF

SEQ ID NO: 785371 - protein, 12 aa, Homo sapiens
  CDR3 for alpha chain variable domain of TCR clone 392686 (TRAV8-4, TRAJ22)
CAATGSARQLTF

SEQ ID NO: 785372 - protein, 15 aa, Homo sapiens
  CDR3 for beta chain variable domain of TCR clone 392686 (TRBV13, TRBJ2-1)
CASSLLSGLNNEQFF

SEQ ID NO: 785373 - protein, 11 aa, Homo sapiens
  CDR3 for alpha chain variable domain of TCR clone 392687 (TRAV1-2, TRAJ40)
CAVPGTYKYIF

SEQ ID NO: 785374 - protein, 16 aa, Homo sapiens
  CDR3 for beta chain variable domain of TCR clone 392687 (TRBV29-1, TRBJ2-7)
CSVEVVGTTGSYEQYF

SEQ ID NO: 785375 - protein, 14 aa, Homo sapiens
  CDR3 for alpha chain variable domain of TCR clone 392688 (TRAV38-1, TRAJ45)
CAYYSGGGSDGLTF

SEQ ID NO: 785376 - protein, 14 aa, Homo sapiens
  CDR3 for beta chain variable domain of TCR clone 392688 (TRBV25-1, TRBJ1-1)
CASTHLGGNTEAFF

SEQ ID NO: 785377 - protein, 15 aa, Homo sapiens
  CDR3 for alpha chain variable domain of TCR clone 392689 (TRAV8-6, TRAJ10)
CAVSDQVGGGNNLTF

SEQ ID NO: 785378 - protein, 15 aa, Homo sapiens
  CDR3 for beta chain variable domain of TCR clone 392689 (TRBV3-1, TRBJ2-5)
CASSANLGGPETQYF

SEQ ID NO: 785379 - protein, 15 aa, Homo sapiens
  CDR3 for alpha chain variable domain of TCR clone 392690 (TRAV26-1, TRAJ23)
CIVRVLNNQGGKLIF

SEQ ID NO: 785380 - protein, 15 aa, Homo sapiens
  CDR3 for beta chain variable domain of TCR clone 392690 (TRBV7-3, TRBJ2-1)
CSSSFGQSNYNEQFF

SEQ ID NO: 785381 - protein, 14 aa, Homo sapiens
  CDR3 for alpha chain variable domain of TCR clone 392691 (TRAV13-1, TRAJ36)
WAASFETGANNLFF

SEQ ID NO: 785382 - protein, 13 aa, Homo sapiens
  CDR3 for beta chain variable domain of TCR clone 392691 (TRBV12-4, TRBJ1-5)
CASSPDRAQPQHF

SEQ ID NO: 785383 - protein, 11 aa, Homo sapiens
  CDR3 for alpha chain variable domain of TCR clone 392692 (TRAV12-3, TRAJ27)
CAMPMQANQPL

SEQ ID NO: 785384 - protein, 13 aa, Homo sapiens
  CDR3 for beta chain variable domain of TCR clone 392692 (TRBV20-1, TRBJ1-1)
CSARVGRNTEAFF

SEQ ID NO: 785385 - protein, 13 aa, Homo sapiens
  CDR3 for alpha chain variable domain of TCR clone 392693 (TRAV2, TRAJ40)
CAVVTSGTYKYIF

SEQ ID NO: 785386 - protein, 17 aa, Homo sapiens
  CDR3 for beta chain variable domain of TCR clone 392693 (TRBV5-4, TRBJ2-3)
CISVPAVLTASTDTQYF

SEQ ID NO: 785387 - protein, 16 aa, Homo sapiens
  CDR3 for alpha chain variable domain of TCR clone 392694 (TRAV8-3, TRAJ13)
CAVGAYPSGGYQKVTF

SEQ ID NO: 785388 - protein, 13 aa, Homo sapiens
  CDR3 for beta chain variable domain of TCR clone 392694 (TRBV7-2, TRBJ2-2)
CASSLAVTGELFF

SEQ ID NO: 785389 - protein, 18 aa, Homo sapiens
  CDR3 for alpha chain variable domain of TCR clone 392695 (TRAV26-1, TRAJ52)
CIVRVAGAGGTSYGKLTF

SEQ ID NO: 785390 - protein, 15 aa, Homo sapiens
  CDR3 for beta chain variable domain of TCR clone 392695 (TRBV4-1, TRBJ1-4)
CASSDTGGTNEKLFF

SEQ ID NO: 785391 - protein, 15 aa, Homo sapiens
  CDR3 for alpha chain variable domain of TCR clone 392696 (TRAV36/DV7, TRAJ54)
CAVEKPVQGAQKLVF

SEQ ID NO: 785392 - protein, 17 aa, Homo sapiens
  CDR3 for beta chain variable domain of TCR clone 392696 (TRBV6-5, TRBJ1-2)
CASRSPWEGAFDYGYTF

SEQ ID NO: 785393 - protein, 14 aa, Homo sapiens
  CDR3 for alpha chain variable domain of TCR clone 392697 (TRAV38-1, TRAJ57)
CAFMNTGGSEKLVF

SEQ ID NO: 785394 - protein, 12 aa, Homo sapiens
  CDR3 for beta chain variable domain of TCR clone 392697 (TRBV20-1, TRBJ1-5)
CSTSQGNQHQHF

SEQ ID NO: 785395 - protein, 15 aa, Homo sapiens
  CDR3 for alpha chain variable domain of TCR clone 392698 (TRAV3, TRAJ5)
CAVRDRKTGRRALTF

SEQ ID NO: 785396 - protein, 12 aa, Homo sapiens
  CDR3 for beta chain variable domain of TCR clone 392698 (TRBV2, TRBJ1-1)
CATPSRGTEASF

SEQ ID NO: 785397 - protein, 15 aa, Homo sapiens
  CDR3 for alpha chain variable domain of TCR clone 392699 (TRAV2, TRAJ44)
CAVEAYTGTASKLTF

SEQ ID NO: 785398 - protein, 17 aa, Homo sapiens
  CDR3 for beta chain variable domain of TCR clone 392699 (TRBV12-4, TRBJ2-1)
CASSPGLAGGRSNEQFF

SEQ ID NO: 785399 - protein, 11 aa, Homo sapiens
  CDR3 for alpha chain variable domain of TCR clone 392700 (TRAV1-2, TRAJ20)
CAVSNDYKFSF

SEQ ID NO: 785400 - protein, 17 aa, Homo sapiens
  CDR3 for beta chain variable domain of TCR clone 392700 (TRBV7-8, TRBJ2-6)
CASSAGTGGAGANVLTF

SEQ ID NO: 785401 - protein, 12 aa, Homo sapiens
  CDR3 for alpha chain variable domain of TCR clone 392701 (TRAV13-1, TRAJ21)
CAAKEGFYKFYF

SEQ ID NO: 785402 - protein, 16 aa, Homo sapiens
  CDR3 for beta chain variable domain of TCR clone 392701 (TRBV4-1, TRBJ2-5)
CASSHADRAGGETQYF

SEQ ID NO: 785403 - protein, 12 aa, Homo sapiens
  CDR3 for alpha chain variable domain of TCR clone 392702 (TRAV12-3, TRAJ40)
CAMSSGTYKYIF

SEQ ID NO: 785404 - protein, 16 aa, Homo sapiens
  CDR3 for beta chain variable domain of TCR clone 392702 (TRBV2, TRBJ2-1)
CARRKTSGGSYNEQFF

SEQ ID NO: 785405 - protein, 16 aa, Homo sapiens
  CDR3 for alpha chain variable domain of TCR clone 392703 (TRAV12-2, TRAJ32)
CAVNLGPGGATNKLIL

SEQ ID NO: 785406 - protein, 15 aa, Homo sapiens
  CDR3 for beta chain variable domain of TCR clone 392703 (TRBV20-1, TRBJ2-7)
CSARGPLAGGREQYF

SEQ ID NO: 785407 - protein, 13 aa, Homo sapiens
  CDR3 for alpha chain variable domain of TCR clone 392704 (TRAV23/DV6, TRAJ15)
CAALPAGRNCSDL

SEQ ID NO: 785408 - protein, 16 aa, Homo sapiens
  CDR3 for beta chain variable domain of TCR clone 392704 (TRBV19, TRBJ2-1)
CASSKAGPSSYNEQFF

SEQ ID NO: 785409 - protein, 14 aa, Homo sapiens
  CDR3 for alpha chain variable domain of TCR clone 392705 (TRAV1-2, TRAJ27)
CAVRLGTNAGKSTF

SEQ ID NO: 785410 - protein, 15 aa, Homo sapiens
  CDR3 for beta chain variable domain of TCR clone 392705 (TRBV18, TRBJ2-7)
CASSPLQGRTYEQYF

SEQ ID NO: 785411 - protein, 13 aa, Homo sapiens
  CDR3 for alpha chain variable domain of TCR clone 392706 (TRAV21, TRAJ27)
CAALNTNAGKSTL

SEQ ID NO: 785412 - protein, 15 aa, Homo sapiens
  CDR3 for beta chain variable domain of TCR clone 392706 (TRBV20-1, TRBJ2-7)
CSARDRVSGMDEQYF

SEQ ID NO: 785413 - protein, 11 aa, Homo sapiens
  CDR3 for alpha chain variable domain of TCR clone 392707 (TRAV21, TRAJ34)
CAVTNTDKLIF

SEQ ID NO: 785414 - protein, 15 aa, Homo sapiens
  CDR3 for beta chain variable domain of TCR clone 392707 (TRBV11-1, TRBJ2-1)
CASSLFRDTYNEQFF

SEQ ID NO: 785415 - protein, 14 aa, Homo sapiens
  CDR3 for alpha chain variable domain of TCR clone 392708 (TRAV9-2, TRAJ39)
CALYIYNAGNMLTF

SEQ ID NO: 785416 - protein, 15 aa, Homo sapiens
  CDR3 for beta chain variable domain of TCR clone 392708 (TRBV5-7, TRBJ2-3)
CASSPWDRATDTQYF

SEQ ID NO: 785417 - protein, 12 aa, Homo sapiens
  CDR3 for alpha chain variable domain of TCR clone 392709 (TRAV3, TRAJ31)
CAVRDGNARLMF

SEQ ID NO: 785418 - protein, 18 aa, Homo sapiens
  CDR3 for beta chain variable domain of TCR clone 392709 (TRBV7-2, TRBJ2-3)
CASSLKREGSGITNTQHF

SEQ ID NO: 785419 - protein, 17 aa, Homo sapiens
  CDR3 for alpha chain variable domain of TCR clone 392710 (TRAV13-1, TRAJ31)
CARRDRLMFGDGTQLVV

SEQ ID NO: 785420 - protein, 12 aa, Homo sapiens
  CDR3 for beta chain variable domain of TCR clone 392710 (TRBV7-9, TRBJ2-7)
CASSLEGYEQYF

SEQ ID NO: 785421 - protein, 14 aa, Homo sapiens
  CDR3 for alpha chain variable domain of TCR clone 392711 (TRAV1-2, TRAJ8)
CAVREDTGFQKLVF

SEQ ID NO: 785422 - protein, 14 aa, Homo sapiens
  CDR3 for beta chain variable domain of TCR clone 392711 (TRBV28, TRBJ1-4)
CASSFGTFDEKLFF

SEQ ID NO: 785423 - protein, 14 aa, Homo sapiens
  CDR3 for alpha chain variable domain of TCR clone 392712 (TRAV1-2, TRAJ16)
CAVNRFSDGQKLLF

SEQ ID NO: 785424 - protein, 14 aa, Homo sapiens
  CDR3 for beta chain variable domain of TCR clone 392712 (TRBV19, TRBJ2-1)
CAIPTFVLSGEQFF

SEQ ID NO: 785425 - protein, 11 aa, Homo sapiens
  CDR3 for alpha chain variable domain of TCR clone 392713 (TRAV12-3, TRAJ27)
CAMANAGKSTF

SEQ ID NO: 785426 - protein, 12 aa, Homo sapiens
  CDR3 for beta chain variable domain of TCR clone 392713 (TRBV3-1, TRBJ2-1)
CASSQGSSGQFF

SEQ ID NO: 785427 - protein, 14 aa, Homo sapiens
  CDR3 for alpha chain variable domain of TCR clone 392714 (TRAV8-1, TRAJ31)
CAVTSWNNNARLMF

SEQ ID NO: 785428 - protein, 14 aa, Homo sapiens
  CDR3 for beta chain variable domain of TCR clone 392714 (TRBV7-8, TRBJ2-3)
CASSFKSSTDTQYF

SEQ ID NO: 785429 - protein, 12 aa, Homo sapiens
  CDR3 for alpha chain variable domain of TCR clone 392715 (TRAV12-3, TRAJ20)
CAMVRGDYKLSF

SEQ ID NO: 785430 - protein, 16 aa, Homo sapiens
  CDR3 for beta chain variable domain of TCR clone 392715 (TRBV5-1, TRBJ2-3)
CASSLGLAVYTDTQYL

SEQ ID NO: 785431 - protein, 11 aa, Homo sapiens
  CDR3 for alpha chain variable domain of TCR clone 392716 (TRAV12-3, TRAJ49)
CAMSSGNQFYF

SEQ ID NO: 785432 - protein, 15 aa, Homo sapiens
  CDR3 for beta chain variable domain of TCR clone 392716 (TRBV20-1, TRBJ2-7)
CSARDRVSGMDEQYF

SEQ ID NO: 785433 - protein, 13 aa, Homo sapiens
  CDR3 for alpha chain variable domain of TCR clone 392717 (TRAV12-2, TRAJ23)
CAVMGNQGGKLIF

SEQ ID NO: 785434 - protein, 15 aa, Homo sapiens
  CDR3 for beta chain variable domain of TCR clone 392717 (TRBV5-1, TRBJ2-1)
CASTGSGRTYNEQFF

SEQ ID NO: 785435 - protein, 18 aa, Homo sapiens
  CDR3 for alpha chain variable domain of TCR clone 392718 (TRAV21, TRAJ52)
CAVRPSPAGGTSYGKLTF

SEQ ID NO: 785436 - protein, 16 aa, Homo sapiens
  CDR3 for beta chain variable domain of TCR clone 392718 (TRBV13, TRBJ2-3)
CQQPLRGSGGRNTQYF

SEQ ID NO: 785437 - protein, 16 aa, Homo sapiens
  CDR3 for alpha chain variable domain of TCR clone 392719 (TRAV4, TRAJ22)
CLVGDLYSGSARQLTF

SEQ ID NO: 785438 - protein, 17 aa, Homo sapiens
  CDR3 for beta chain variable domain of TCR clone 392719 (TRBV7-3, TRBJ2-3)
RASSLMKRMRGADTQYF

SEQ ID NO: 785439 - protein, 16 aa, Homo sapiens
  CDR3 for alpha chain variable domain of TCR clone 392720 (TRAV23/DV6, TRAJ9)
CAASIGGNTGGFKTIF

SEQ ID NO: 785440 - protein, 13 aa, Homo sapiens
  CDR3 for beta chain variable domain of TCR clone 392720 (TRBV5-7, TRBJ2-3)
CASSLGRTDTQYF

SEQ ID NO: 785441 - protein, 14 aa, Homo sapiens
  CDR3 for alpha chain variable domain of TCR clone 392721 (TRAV38-1, TRAJ54)
CAFISPSGAQNLVF

SEQ ID NO: 785442 - protein, 16 aa, Homo sapiens
  CDR3 for beta chain variable domain of TCR clone 392721 (TRBV28, TRBJ2-1)
CASSLGGSSSYNEHFF

SEQ ID NO: 785443 - protein, 11 aa, Homo sapiens
  CDR3 for alpha chain variable domain of TCR clone 392722 (TRAV13-1, TRAJ33)
CAANSNYQLIW

SEQ ID NO: 785444 - protein, 14 aa, Homo sapiens
  CDR3 for beta chain variable domain of TCR clone 392722 (TRBV20-1, TRBJ2-1)
CSAQIGGFANEQSF

SEQ ID NO: 785445 - protein, 13 aa, Homo sapiens
  CDR3 for alpha chain variable domain of TCR clone 392723 (TRAV17, TRAJ15)
CATDARAGTALIF

SEQ ID NO: 785446 - protein, 14 aa, Homo sapiens
  CDR3 for beta chain variable domain of TCR clone 392723 (TRBV7-6, TRBJ2-1)
CASSPRDSLYEQFF

SEQ ID NO: 785447 - protein, 15 aa, Homo sapiens
  CDR3 for alpha chain variable domain of TCR clone 392724 (TRAV6, TRAJ13)
CALGGDSGGYQKVTF

SEQ ID NO: 785448 - protein, 12 aa, Homo sapiens
  CDR3 for beta chain variable domain of TCR clone 392724 (TRBV5-7, TRBJ1-2)
CASSDSIHGYTF

SEQ ID NO: 785449 - protein, 17 aa, Homo sapiens
  CDR3 for alpha chain variable domain of TCR clone 392725 (TRAV3, TRAJ6)
CAVRDGPRAGGSYIPTF

SEQ ID NO: 785450 - protein, 15 aa, Homo sapiens
  CDR3 for beta chain variable domain of TCR clone 392725 (TRBV20-1, TRBJ2-7)
CSARDPVKGEGEQYF

SEQ ID NO: 785451 - protein, 13 aa, Homo sapiens
  CDR3 for alpha chain variable domain of TCR clone 392726 (TRAV13-1, TRAJ29)
CAATISGNTPLVF

SEQ ID NO: 785452 - protein, 16 aa, Homo sapiens
  CDR3 for beta chain variable domain of TCR clone 392726 (TRBV7-3, TRBJ2-2)
CASSLKRGTLSGELFF

SEQ ID NO: 785453 - protein, 11 aa, Homo sapiens
  CDR3 for alpha chain variable domain of TCR clone 392727 (TRAV12-2, )
CAVASLATTIS

SEQ ID NO: 785454 - protein, 16 aa, Homo sapiens
  CDR3 for beta chain variable domain of TCR clone 392727 (TRBV5-1, TRBJ2-2)
CASSSRTGGGTGELFF

SEQ ID NO: 785455 - protein, 10 aa, Homo sapiens
  CDR3 for alpha chain variable domain of TCR clone 392728 (TRAV13-1, TRAJ30)
CAARDDKIIF

SEQ ID NO: 785456 - protein, 13 aa, Homo sapiens
  CDR3 for beta chain variable domain of TCR clone 392728 (TRBV20-1, TRBJ1-1)
CSAPLGGGTEAFF

SEQ ID NO: 785457 - protein, 14 aa, Homo sapiens
  CDR3 for alpha chain variable domain of TCR clone 392729 (TRAV8-3, TRAJ39)
CAVGANNAGNMLTF

SEQ ID NO: 785458 - protein, 15 aa, Homo sapiens
  CDR3 for beta chain variable domain of TCR clone 392729 (TRBV4-3, TRBJ1-1)
CASSQELGRGTEVFF

SEQ ID NO: 785459 - protein, 15 aa, Homo sapiens
  CDR3 for alpha chain variable domain of TCR clone 392730 (TRAV36/DV7, TRAJ54)
CAVEKPVQGAQKLVF

SEQ ID NO: 785460 - protein, 14 aa, Homo sapiens
  CDR3 for beta chain variable domain of TCR clone 392730 (TRBV12-4, TRBJ1-1)
CASSAARGYTEAFF

SEQ ID NO: 785461 - protein, 14 aa, Homo sapiens
  CDR3 for alpha chain variable domain of TCR clone 392731 (TRAV8-4, TRAJ8)
CAVSVGTGFQKLVF

SEQ ID NO: 785462 - protein, 15 aa, Homo sapiens
  CDR3 for beta chain variable domain of TCR clone 392731 (TRBV2, TRBJ2-3)
CASSGEGTGKDTQYF

SEQ ID NO: 785463 - protein, 18 aa, Homo sapiens
  CDR3 for alpha chain variable domain of TCR clone 392732 (TRAV13-1, TRAJ52)
CAAKNPNAGGTSYGKLTF

SEQ ID NO: 785464 - protein, 17 aa, Homo sapiens
  CDR3 for beta chain variable domain of TCR clone 392732 (TRBV19, TRBJ1-1)
CASSTRGLGTSNTEAFF

SEQ ID NO: 785465 - protein, 14 aa, Homo sapiens
  CDR3 for alpha chain variable domain of TCR clone 392733 (TRAV17, TRAJ57)
CATDPQGGSEKLVF

SEQ ID NO: 785466 - protein, 13 aa, Homo sapiens
  CDR3 for beta chain variable domain of TCR clone 392733 (TRBV19, TRBJ2-5)
CASSMGGAGTQYF

SEQ ID NO: 785467 - protein, 14 aa, Homo sapiens
  CDR3 for alpha chain variable domain of TCR clone 392734 (TRAV9-2, TRAJ39)
CALYIYNAGNMLTF

SEQ ID NO: 785468 - protein, 15 aa, Homo sapiens
  CDR3 for beta chain variable domain of TCR clone 392734 (TRBV3-1, TRBJ1-2)
CASSHPGTPGYGYTF

SEQ ID NO: 785469 - protein, 15 aa, Homo sapiens
  CDR3 for alpha chain variable domain of TCR clone 392735 (TRAV29/DV5, TRAJ54)
CAAIPIVQGAQKLVF

SEQ ID NO: 785470 - protein, 15 aa, Homo sapiens
  CDR3 for beta chain variable domain of TCR clone 392735 (TRBV27, TRBJ2-1)
CASSNGGGSSNEQFF

SEQ ID NO: 785471 - protein, 10 aa, Homo sapiens
  CDR3 for alpha chain variable domain of TCR clone 392736 (TRAV26-1, TRAJ22)
RAGSARQLTF

SEQ ID NO: 785472 - protein, 14 aa, Homo sapiens
  CDR3 for beta chain variable domain of TCR clone 392736 (TRBV18, TRBJ2-7)
CASSPRGGAYEQYF

SEQ ID NO: 785473 - protein, 12 aa, Homo sapiens
  CDR3 for alpha chain variable domain of TCR clone 392737 (TRAV13-1, TRAJ49)
CAASIWGNQFYF

SEQ ID NO: 785474 - protein, 15 aa, Homo sapiens
  CDR3 for beta chain variable domain of TCR clone 392737 (TRBV20-1, TRBJ2-7)
CSARDRVSGMDEQYF

SEQ ID NO: 785475 - protein, 14 aa, Homo sapiens
  CDR3 for alpha chain variable domain of TCR clone 392738 (TRAV1-2, TRAJ8)
FAVREDTGFQKLVF

SEQ ID NO: 785476 - protein, 15 aa, Homo sapiens
  CDR3 for beta chain variable domain of TCR clone 392738 (TRBV29-1, TRBJ2-1)
CSVPTGLALYNEQFF

SEQ ID NO: 785477 - protein, 12 aa, Homo sapiens
  CDR3 for alpha chain variable domain of TCR clone 392739 (TRAV27, TRAJ35)
CAGADFGNVLHC

SEQ ID NO: 785478 - protein, 16 aa, Homo sapiens
  CDR3 for beta chain variable domain of TCR clone 392739 (TRBV6-1, TRBJ2-1)
CASIVRQGSSYNEQFF

SEQ ID NO: 785479 - protein, 13 aa, Homo sapiens
  CDR3 for alpha chain variable domain of TCR clone 392740 (TRAV5, TRAJ30)
CAEIANRDDKILF

SEQ ID NO: 785480 - protein, 14 aa, Homo sapiens
  CDR3 for beta chain variable domain of TCR clone 392740 (TRBV4-1, TRBJ2-2)
CASSQAVNTGELFF

SEQ ID NO: 785481 - protein, 15 aa, Homo sapiens
  CDR3 for alpha chain variable domain of TCR clone 392741 (TRAV23/DV6, TRAJ13)
CAACPGGGGYQKVTF

SEQ ID NO: 785482 - protein, 17 aa, Homo sapiens
  CDR3 for beta chain variable domain of TCR clone 392741 (TRBV19, TRBJ2-7)
CASSISFYDSYPYEQYF

SEQ ID NO: 785483 - protein, 13 aa, Homo sapiens
  CDR3 for alpha chain variable domain of TCR clone 392742 (TRAV8-3, TRAJ48)
FAVVRFGNEKLTF

SEQ ID NO: 785484 - protein, 16 aa, Homo sapiens
  CDR3 for beta chain variable domain of TCR clone 392742 (TRBV20-1, TRBJ2-5)
CSARDFASGIQETQYF

SEQ ID NO: 785485 - protein, 12 aa, Homo sapiens
  CDR3 for alpha chain variable domain of TCR clone 392743 (TRAV13-1, TRAJ9)
CASHTGGFKTIF

SEQ ID NO: 785486 - protein, 14 aa, Homo sapiens
  CDR3 for beta chain variable domain of TCR clone 392743 (TRBV6-1, TRBJ1-3)
CASVQGGGGNTMYF

SEQ ID NO: 785487 - protein, 17 aa, Homo sapiens
  CDR3 for alpha chain variable domain of TCR clone 392744 (TRAV16, TRAJ42)
CALSPKLYGGSQGNLIF

SEQ ID NO: 785488 - protein, 15 aa, Homo sapiens
  CDR3 for beta chain variable domain of TCR clone 392744 (TRBV11-2, TRBJ2-2)
CASSSDRVNAGELFF

SEQ ID NO: 785489 - protein, 16 aa, Homo sapiens
  CDR3 for alpha chain variable domain of TCR clone 392745 (TRAV30, TRAJ24)
CGTEIVDADSWGKFQF

SEQ ID NO: 785490 - protein, 13 aa, Homo sapiens
  CDR3 for beta chain variable domain of TCR clone 392745 (TRBV12-5, TRBJ1-1)
CASGVHPNTEAFF

SEQ ID NO: 785491 - protein, 14 aa, Homo sapiens
  CDR3 for alpha chain variable domain of TCR clone 392746 (TRAV26-1, TRAJ38)
CIADNAGNNRKLIW

SEQ ID NO: 785492 - protein, 19 aa, Homo sapiens
  CDR3 for beta chain variable domain of TCR clone 392746 (TRBV12-4, TRBJ2-1)
CASTLAFDPRDKEANEQFF

SEQ ID NO: 785493 - protein, 12 aa, Homo sapiens
  CDR3 for alpha chain variable domain of TCR clone 392747 (TRAV12-3, TRAJ17)
CAMTLTGNKLTL

SEQ ID NO: 785494 - protein, 16 aa, Homo sapiens
  CDR3 for beta chain variable domain of TCR clone 392747 (TRBV7-3, TRBJ2-1)
CASSLEGYRSYNEQFF

SEQ ID NO: 785495 - protein, 14 aa, Homo sapiens
  CDR3 for alpha chain variable domain of TCR clone 392748 (TRAV9-2, TRAJ39)
CALYIYNAGNMITF

SEQ ID NO: 785496 - protein, 16 aa, Homo sapiens
  CDR3 for beta chain variable domain of TCR clone 392748 (TRBV7-9, TRBJ1-2)
CASSLGFSSGEDGYAF

SEQ ID NO: 785497 - protein, 13 aa, Homo sapiens
  CDR3 for alpha chain variable domain of TCR clone 392749 (TRAV12-2, TRAJ18)
CAVTGSTLGRLYF

SEQ ID NO: 785498 - protein, 18 aa, Homo sapiens
  CDR3 for beta chain variable domain of TCR clone 392749 (TRBV27, TRBJ2-3)
CASSLSGTSGRGTDTQYF

SEQ ID NO: 785499 - protein, 14 aa, Homo sapiens
  CDR3 for alpha chain variable domain of TCR clone 392750 (TRAV17, TRAJ54)
CATDANQGAQKLVF

SEQ ID NO: 785500 - protein, 13 aa, Homo sapiens
  CDR3 for beta chain variable domain of TCR clone 392750 (TRBV4-2, TRBJ1-2)
CASSLSASGGYTF

SEQ ID NO: 785501 - protein, 11 aa, Homo sapiens
  CDR3 for alpha chain variable domain of TCR clone 392751 (TRAV4, TRAJ23)
CLVAHGGKLIF

SEQ ID NO: 785502 - protein, 13 aa, Homo sapiens
  CDR3 for beta chain variable domain of TCR clone 392751 (TRBV11-3, TRBJ1-1)
CATEEGLNTEAFF

SEQ ID NO: 785503 - protein, 10 aa, Homo sapiens
  CDR3 for alpha chain variable domain of TCR clone 392752 (TRAV12-2, TRAJ43)
CAVKVLSMRF

SEQ ID NO: 785504 - protein, 14 aa, Homo sapiens
  CDR3 for beta chain variable domain of TCR clone 392752 (TRBV11-2, TRBJ2-7)
CASSLGNSRYEQYF

SEQ ID NO: 785505 - protein, 14 aa, Homo sapiens
  CDR3 for alpha chain variable domain of TCR clone 392753 (TRAV12-2, TRAJ6)
CAVNPSGGSYIPTF

SEQ ID NO: 785506 - protein, 13 aa, Homo sapiens
  CDR3 for beta chain variable domain of TCR clone 392753 (TRBV5-5, TRBJ1-2)
CASSFWRGEDYTF

SEQ ID NO: 785507 - protein, 13 aa, Homo sapiens
  CDR3 for alpha chain variable domain of TCR clone 392754 (TRAV20, TRAJ34)
CAVRSYNTDKLIL

SEQ ID NO: 785508 - protein, 12 aa, Homo sapiens
  CDR3 for beta chain variable domain of TCR clone 392754 (TRBV11-2, TRBJ2-1)
CASSPGNNEQFF

SEQ ID NO: 785509 - protein, 14 aa, Homo sapiens
  CDR3 for alpha chain variable domain of TCR clone 392755 (TRAV8-1, TRAJ17)
CAVNDNNAGNKLTF

SEQ ID NO: 785510 - protein, 14 aa, Homo sapiens
  CDR3 for beta chain variable domain of TCR clone 392755 (TRBV28, TRBJ2-1)
CASSPSTGYNEQFF

SEQ ID NO: 785511 - protein, 13 aa, Homo sapiens
  CDR3 for alpha chain variable domain of TCR clone 392756 (TRAV8-3, TRAJ43)
CAVVPYNNNDMRF

SEQ ID NO: 785512 - protein, 15 aa, Homo sapiens
  CDR3 for beta chain variable domain of TCR clone 392756 (TRBV15, TRBJ1-4)
CATSRDMGSYEKLFF

SEQ ID NO: 785513 - protein, 12 aa, Homo sapiens
  CDR3 for alpha chain variable domain of TCR clone 392757 (TRAV17, TRAJ31)
CATEQGNARLMF

SEQ ID NO: 785514 - protein, 14 aa, Homo sapiens
  CDR3 for beta chain variable domain of TCR clone 392757 (TRBV25-1, TRBJ1-1)
CASTHLGGNTEAFF

SEQ ID NO: 785515 - protein, 16 aa, Homo sapiens
  CDR3 for alpha chain variable domain of TCR clone 392758 (TRAV3, TRAJ10)
CAVRDMRAGGGNKLTF

SEQ ID NO: 785516 - protein, 12 aa, Homo sapiens
  CDR3 for beta chain variable domain of TCR clone 392758 (TRBV12-4, TRBJ2-1)
CASSLQGSEQFF

SEQ ID NO: 785517 - protein, 15 aa, Homo sapiens
  CDR3 for alpha chain variable domain of TCR clone 392759 (TRAV34, TRAJ38)
CGADFTPGNNRKLIW

SEQ ID NO: 785518 - protein, 16 aa, Homo sapiens
  CDR3 for beta chain variable domain of TCR clone 392759 (TRBV12-5, TRBJ2-5)
CASGPWTRGNQETQYF

SEQ ID NO: 785519 - protein, 10 aa, Homo sapiens
  CDR3 for alpha chain variable domain of TCR clone 392760 (TRAV16, TRAJ22)
SAMYLRQLTF

SEQ ID NO: 785520 - protein, 14 aa, Homo sapiens
  CDR3 for beta chain variable domain of TCR clone 392760 (TRBV12-4, TRBJ1-6)
CASNLQGKGSPLHF

SEQ ID NO: 785521 - protein, 15 aa, Homo sapiens
  CDR3 for alpha chain variable domain of TCR clone 392761 (TRAV25, TRAJ52)
CAGRPGGTSYGKLTF

SEQ ID NO: 785522 - protein, 15 aa, Homo sapiens
  CDR3 for beta chain variable domain of TCR clone 392761 (TRBV20-1, TRBJ2-1)
CSASSAGSSYNEQFF

SEQ ID NO: 785523 - protein, 14 aa, Homo sapiens
  CDR3 for alpha chain variable domain of TCR clone 392762 (TRAV1-2, TRAJ8)
CAVREDTGFQKLVF

SEQ ID NO: 785524 - protein, 15 aa, Homo sapiens
  CDR3 for beta chain variable domain of TCR clone 392762 (TRBV7-9, TRBJ1-1)
CASSRRGTVNTEAFF

SEQ ID NO: 785525 - protein, 17 aa, Homo sapiens
  CDR3 for alpha chain variable domain of TCR clone 392763 (TRAV12-3, TRAJ18)
CAMIRADRGSTLGRLDF

SEQ ID NO: 785526 - protein, 14 aa, Homo sapiens
  CDR3 for beta chain variable domain of TCR clone 392763 (TRBV5-7, TRBJ1-6)
CASTPWPADSPLHF

SEQ ID NO: 785527 - protein, 14 aa, Homo sapiens
  CDR3 for alpha chain variable domain of TCR clone 392764 (TRAV12-1, TRAJ34)
CVVNLDYNTDKLIF

SEQ ID NO: 785528 - protein, 20 aa, Homo sapiens
  CDR3 for beta chain variable domain of TCR clone 392764 (TRBV7-3, TRBJ2-7)
CASSPRALAGMVAVLRAGHQ

SEQ ID NO: 785529 - protein, 13 aa, Homo sapiens
  CDR3 for alpha chain variable domain of TCR clone 392765 (TRAV1-2, TRAJ24)
CAVTTDSWGKLQF

SEQ ID NO: 785530 - protein, 16 aa, Homo sapiens
  CDR3 for beta chain variable domain of TCR clone 392765 (TRBV20-1, TRBJ2-3)
CSALAFDTGDPDTQYF

SEQ ID NO: 785531 - protein, 12 aa, Homo sapiens
  CDR3 for alpha chain variable domain of TCR clone 392766 (TRAV13-1, TRAJ21)
CAAKEGFNKFYF

SEQ ID NO: 785532 - protein, 15 aa, Homo sapiens
  CDR3 for beta chain variable domain of TCR clone 392766 (TRBV28, TRBJ2-5)
CASSPPWSYQETQYF

SEQ ID NO: 785533 - protein, 15 aa, Homo sapiens
  CDR3 for alpha chain variable domain of TCR clone 392767 (TRAV8-3, TRAJ45)
CALSYSGGGADGLNF

SEQ ID NO: 785534 - protein, 13 aa, Homo sapiens
  CDR3 for beta chain variable domain of TCR clone 392767 (TRBV10-3, TRBJ2-7)
CASKLAVNYEQYF

SEQ ID NO: 785535 - protein, 15 aa, Homo sapiens
  CDR3 for alpha chain variable domain of TCR clone 392768 (TRAV23/DV6, TRAJ45)
CAASSAGGGADGLTF

SEQ ID NO: 785536 - protein, 12 aa, Homo sapiens
  CDR3 for beta chain variable domain of TCR clone 392768 (TRBV5-1, TRBJ2-7)
CASSPRQGPQYF

SEQ ID NO: 785537 - protein, 17 aa, Homo sapiens
  CDR3 for alpha chain variable domain of TCR clone 392769 (TRAV3, TRAJ6)
CAVRDGPRAGGSYIPTF

SEQ ID NO: 785538 - protein, 14 aa, Homo sapiens
  CDR3 for beta chain variable domain of TCR clone 392769 (TRBV12-4, TRBJ2-7)
CASSFSGADYEQYF

SEQ ID NO: 785539 - protein, 12 aa, Homo sapiens
  CDR3 for alpha chain variable domain of TCR clone 392770 (TRAV13-2, TRAJ8)
CAPWLGFQKLVF

SEQ ID NO: 785540 - protein, 14 aa, Homo sapiens
  CDR3 for beta chain variable domain of TCR clone 392770 (TRBV7-3, TRBJ1-1)
CASSLKGGNTEAFF

SEQ ID NO: 785541 - protein, 14 aa, Homo sapiens
  CDR3 for alpha chain variable domain of TCR clone 392771 (TRAV1-1, TRAJ27)
CAVIYNTNAGKSTF

SEQ ID NO: 785542 - protein, 16 aa, Homo sapiens
  CDR3 for beta chain variable domain of TCR clone 392771 (TRBV7-2, TRBJ2-2)
CASSLKRGTLSGELFF

SEQ ID NO: 785543 - protein, 16 aa, Homo sapiens
  CDR3 for alpha chain variable domain of TCR clone 392772 (TRAV12-3, TRAJ10)
CAMKKGFTGGGNKLTF

SEQ ID NO: 785544 - protein, 12 aa, Homo sapiens
  CDR3 for beta chain variable domain of TCR clone 392772 (TRBV20-1, TRBJ2-7)
CSAITPTKEQYF

SEQ ID NO: 785545 - protein, 15 aa, Homo sapiens
  CDR3 for alpha chain variable domain of TCR clone 392773 (TRAV12-1, TRAJ42)
CVVTRDGGSQVNLIS

SEQ ID NO: 785546 - protein, 14 aa, Homo sapiens
  CDR3 for beta chain variable domain of TCR clone 392773 (TRBV11-2, TRBJ2-3)
CASSLGGGANTQYF

SEQ ID NO: 785547 - protein, 19 aa, Homo sapiens
  CDR3 for alpha chain variable domain of TCR clone 392774 (TRAV27, TRAJ53)
ASTSVQSRNSGGSNYKLTF

SEQ ID NO: 785548 - protein, 14 aa, Homo sapiens
  CDR3 for beta chain variable domain of TCR clone 392774 (TRBV4-1, TRBJ2-2)
CASSQAVNTGELFF

SEQ ID NO: 785549 - protein, 11 aa, Homo sapiens
  CDR3 for alpha chain variable domain of TCR clone 392775 (TRAV13-1, TRAJ49)
CACVGGNQFYF

SEQ ID NO: 785550 - protein, 15 aa, Homo sapiens
  CDR3 for beta chain variable domain of TCR clone 392775 (TRBV9, TRBJ2-7)
CASSPTSGYSYEQYF

SEQ ID NO: 785551 - protein, 14 aa, Homo sapiens
  CDR3 for alpha chain variable domain of TCR clone 392776 (TRAV26-1, TRAJ45)
CIEGTGGGADGLTF

SEQ ID NO: 785552 - protein, 13 aa, Homo sapiens
  CDR3 for beta chain variable domain of TCR clone 392776 (TRBV20-1, TRBJ2-5)
CSAREAFQETQYF

SEQ ID NO: 785553 - protein, 12 aa, Homo sapiens
  CDR3 for alpha chain variable domain of TCR clone 392777 (TRAV2, TRAJ33)
CAVEDSNYQLIW

SEQ ID NO: 785554 - protein, 14 aa, Homo sapiens
  CDR3 for beta chain variable domain of TCR clone 392777 (TRBV7-3, TRBJ2-1)
CASSLAGGTNEQFF

SEQ ID NO: 785555 - protein, 18 aa, Homo sapiens
  CDR3 for alpha chain variable domain of TCR clone 392778 (TRAV3, TRAJ32)
CAVRDIRGYGGAPNKLIF

SEQ ID NO: 785556 - protein, 15 aa, Homo sapiens
  CDR3 for beta chain variable domain of TCR clone 392778 (TRBV12-4, TRBJ2-2)
CASSLGVRHTGELFF

SEQ ID NO: 785557 - protein, 16 aa, Homo sapiens
  CDR3 for alpha chain variable domain of TCR clone 392779 (TRAV30, TRAJ24)
CGTEIVDADSWGKFQF

SEQ ID NO: 785558 - protein, 16 aa, Homo sapiens
  CDR3 for beta chain variable domain of TCR clone 392779 (TRBV20-1, TRBJ2-2)
CSASARGIPGAGELFF

SEQ ID NO: 785559 - protein, 11 aa, Homo sapiens
  CDR3 for alpha chain variable domain of TCR clone 392780 (TRAV21, TRAJ34)
CAHYNTDKLIF

SEQ ID NO: 785560 - protein, 13 aa, Homo sapiens
  CDR3 for beta chain variable domain of TCR clone 392780 (TRBV11-2, TRBJ2-7)
CASSPLGSYEQYF

SEQ ID NO: 785561 - protein, 15 aa, Homo sapiens
  CDR3 for alpha chain variable domain of TCR clone 392781 (TRAV3, TRAJ13)
CAVRVYSGGYQKVTF

SEQ ID NO: 785562 - protein, 16 aa, Homo sapiens
  CDR3 for beta chain variable domain of TCR clone 392781 (TRBV19, TRBJ2-1)
CASSSKGTRSYNEQFF

SEQ ID NO: 785563 - protein, 12 aa, Homo sapiens
  CDR3 for alpha chain variable domain of TCR clone 392782 (TRAV26-1, TRAJ53)
CIEGGSNYKLTF

SEQ ID NO: 785564 - protein, 14 aa, Homo sapiens
  CDR3 for beta chain variable domain of TCR clone 392782 (TRBV7-2, TRBJ2-7)
CASRSQGAAYEQYF

SEQ ID NO: 785565 - protein, 13 aa, Homo sapiens
  CDR3 for alpha chain variable domain of TCR clone 392783 (TRAV12-1, TRAJ20)
CVVNVPNDYKLSF

SEQ ID NO: 785566 - protein, 15 aa, Homo sapiens
  CDR3 for beta chain variable domain of TCR clone 392783 (TRBV11-2, TRBJ2-1)
CASSKNRGLIYEQFF

SEQ ID NO: 785567 - protein, 14 aa, Homo sapiens
  CDR3 for alpha chain variable domain of TCR clone 392784 (TRAV4, TRAJ23)
CLVGSYNQGRKLIF

SEQ ID NO: 785568 - protein, 18 aa, Homo sapiens
  CDR3 for beta chain variable domain of TCR clone 392784 (TRBV6-5, TRBJ2-6)
CASRTPGQGKTGANVLTF

SEQ ID NO: 785569 - protein, 18 aa, Homo sapiens
  CDR3 for alpha chain variable domain of TCR clone 392785 (TRAV17, TRAJ45)
CATSLDLYSGGGADGLTF

SEQ ID NO: 785570 - protein, 15 aa, Homo sapiens
  CDR3 for beta chain variable domain of TCR clone 392785 (TRBV11-2, TRBJ2-1)
CASSKNRVLIYEQFF

SEQ ID NO: 785571 - protein, 12 aa, Homo sapiens
  CDR3 for alpha chain variable domain of TCR clone 392786 (TRAV8-3, TRAJ26)
CAGDNYGQNFVF

SEQ ID NO: 785572 - protein, 14 aa, Homo sapiens
  CDR3 for beta chain variable domain of TCR clone 392786 (TRBV27, TRBJ2-2)
CASRPGVNTGELFF

SEQ ID NO: 785573 - protein, 13 aa, Homo sapiens
  CDR3 for alpha chain variable domain of TCR clone 392787 (TRAV36/DV7, TRAJ57)
FAVVLGGSEKLVF

SEQ ID NO: 785574 - protein, 14 aa, Homo sapiens
  CDR3 for beta chain variable domain of TCR clone 392787 (TRBV4-1, TRBJ1-2)
CASSQDGQVRGYTF

SEQ ID NO: 785575 - protein, 11 aa, Homo sapiens
  CDR3 for alpha chain variable domain of TCR clone 392788 (TRAV23/DV6, TRAJ48)
CAPRWGEKLTF

SEQ ID NO: 785576 - protein, 13 aa, Homo sapiens
  CDR3 for beta chain variable domain of TCR clone 392788 (TRBV12-4, TRBJ2-5)
CASSPGTDETQYF

SEQ ID NO: 785577 - protein, 11 aa, Homo sapiens
  CDR3 for alpha chain variable domain of TCR clone 392789 (TRAV2, TRAJ20)
CAVVNGYKLSF

SEQ ID NO: 785578 - protein, 17 aa, Homo sapiens
  CDR3 for beta chain variable domain of TCR clone 392789 (TRBV12-4, TRBJ2-1)
CASSPGLAGGRINEQFF

SEQ ID NO: 785579 - protein, 12 aa, Homo sapiens
  CDR3 for alpha chain variable domain of TCR clone 392790 (TRAV36/DV7, TRAJ54)
CAVVRGAQKLVF

SEQ ID NO: 785580 - protein, 15 aa, Homo sapiens
  CDR3 for beta chain variable domain of TCR clone 392790 (TRBV27, TRBJ1-6)
CASSFDRGLGSPLHF

SEQ ID NO: 785581 - protein, 12 aa, Homo sapiens
  CDR3 for alpha chain variable domain of TCR clone 392791 (TRAV20, TRAJ13)
CCVKRGYQKVTF

SEQ ID NO: 785582 - protein, 14 aa, Homo sapiens
  CDR3 for beta chain variable domain of TCR clone 392791 (TRBV18, TRBJ2-7)
CASSPRGGAYEQYF

SEQ ID NO: 785583 - protein, 13 aa, Homo sapiens
  CDR3 for alpha chain variable domain of TCR clone 392792 (TRAV3, TRAJ27)
CAVRPLGAGKSTF

SEQ ID NO: 785584 - protein, 13 aa, Homo sapiens
  CDR3 for beta chain variable domain of TCR clone 392792 (TRBV7-9, TRBJ2-2)
CASSLDPTGELFF

SEQ ID NO: 785585 - protein, 14 aa, Homo sapiens
  CDR3 for alpha chain variable domain of TCR clone 392793 (TRAV17, TRAJ5)
CATDRDTGRRALTF

SEQ ID NO: 785586 - protein, 14 aa, Homo sapiens
  CDR3 for beta chain variable domain of TCR clone 392793 (TRBV4-2, TRBJ2-3)
CASSQERGTDTQYF

SEQ ID NO: 785587 - protein, 20 aa, Homo sapiens
  CDR3 for alpha chain variable domain of TCR clone 392794 (TRAV12-2, TRAJ52)
SPVIQPHARAGGTSYGKLTF

SEQ ID NO: 785588 - protein, 16 aa, Homo sapiens
  CDR3 for beta chain variable domain of TCR clone 392794 (TRBV15, TRBJ1-2)
CATSRGPRTGGGGYTL

SEQ ID NO: 785589 - protein, 16 aa, Homo sapiens
  CDR3 for alpha chain variable domain of TCR clone 392795 (TRAV12-3, TRAJ53)
WAMSPGSGGSSYKLTF

SEQ ID NO: 785590 - protein, 16 aa, Homo sapiens
  CDR3 for beta chain variable domain of TCR clone 392795 (TRBV2, TRBJ2-1)
CASSVGGSLSYNEQFF

SEQ ID NO: 785591 - protein, 12 aa, Homo sapiens
  CDR3 for alpha chain variable domain of TCR clone 392796 (TRAV12-3, TRAJ17)
CAMTLRGNKLTF

SEQ ID NO: 785592 - protein, 15 aa, Homo sapiens
  CDR3 for beta chain variable domain of TCR clone 392796 (TRBV6-3, TRBJ2-2)
CASSFLATLTGELFF

SEQ ID NO: 785593 - protein, 17 aa, Homo sapiens
  CDR3 for alpha chain variable domain of TCR clone 392797 (TRAV12-3, TRAJ26)
CAMSGGRWDNYGQNLVF

SEQ ID NO: 785594 - protein, 12 aa, Homo sapiens
  CDR3 for beta chain variable domain of TCR clone 392797 (TRBV19, TRBJ1-5)
CASSIAQQPQHF

SEQ ID NO: 785595 - protein, 16 aa, Homo sapiens
  CDR3 for alpha chain variable domain of TCR clone 392798 (TRAV30, TRAJ24)
CGTEIVDADSWGKFQF

SEQ ID NO: 785596 - protein, 15 aa, Homo sapiens
  CDR3 for beta chain variable domain of TCR clone 392798 (TRBV5-1, TRBJ2-2)
CASSWTSPNTGELFF

SEQ ID NO: 785597 - protein, 16 aa, Homo sapiens
  CDR3 for alpha chain variable domain of TCR clone 392799 (TRAV30, TRAJ24)
CGTEVEDADSWGKFQF

SEQ ID NO: 785598 - protein, 14 aa, Homo sapiens
  CDR3 for beta chain variable domain of TCR clone 392799 (TRBV12-5, TRBJ2-5)
CASGSRTHQETQYF

SEQ ID NO: 785599 - protein, 12 aa, Homo sapiens
  CDR3 for alpha chain variable domain of TCR clone 392800 (TRAV12-3, TRAJ17)
CAMTLTGNKLTI

SEQ ID NO: 785600 - protein, 18 aa, Homo sapiens
  CDR3 for beta chain variable domain of TCR clone 392800 (TRBV28, TRBJ2-6)
CASSLAGRAVSGANVLTF

SEQ ID NO: 785601 - protein, 14 aa, Homo sapiens
  CDR3 for alpha chain variable domain of TCR clone 392801 (TRAV12-2, TRAJ13)
CAVKKTVGYQKATF

SEQ ID NO: 785602 - protein, 15 aa, Homo sapiens
  CDR3 for beta chain variable domain of TCR clone 392801 (TRBV27, TRBJ2-1)
CASSNGGGSSNEQFF

SEQ ID NO: 785603 - protein, 16 aa, Homo sapiens
  CDR3 for alpha chain variable domain of TCR clone 392802 (TRAV3, TRAJ37)
CAVRGKGSGNTGKLIF

SEQ ID NO: 785604 - protein, 15 aa, Homo sapiens
  CDR3 for beta chain variable domain of TCR clone 392802 (TRBV28, TRBJ1-5)
CQQFPWGYSNQPQHF

SEQ ID NO: 785605 - protein, 14 aa, Homo sapiens
  CDR3 for alpha chain variable domain of TCR clone 392803 (TRAV10, TRAJ39)
CVVSAGGAGNMLTF

SEQ ID NO: 785606 - protein, 14 aa, Homo sapiens
  CDR3 for beta chain variable domain of TCR clone 392803 (TRBV12-5, TRBJ2-5)
CASGSRTHQETQYF

SEQ ID NO: 785607 - protein, 14 aa, Homo sapiens
  CDR3 for alpha chain variable domain of TCR clone 392804 (TRAV1-2, TRAJ16)
CAVNRFSDGQKLLF

SEQ ID NO: 785608 - protein, 14 aa, Homo sapiens
  CDR3 for beta chain variable domain of TCR clone 392804 (TRBV20-1, TRBJ1-5)
SSAPGTGVGQPQHF

SEQ ID NO: 785609 - protein, 17 aa, Homo sapiens
  CDR3 for alpha chain variable domain of TCR clone 392805 (TRAV23/DV6, TRAJ57)
CAASSTLSQGGSEKLVF

SEQ ID NO: 785610 - protein, 16 aa, Homo sapiens
  CDR3 for beta chain variable domain of TCR clone 392805 (TRBV6-1, TRBJ1-3)
CASVQGGVETPYILER

SEQ ID NO: 785611 - protein, 14 aa, Homo sapiens
  CDR3 for alpha chain variable domain of TCR clone 392806 (TRAV13-2, TRAJ22)
WADGTLGSARQLTF

SEQ ID NO: 785612 - protein, 16 aa, Homo sapiens
  CDR3 for beta chain variable domain of TCR clone 392806 (TRBV19, TRBJ2-1)
CASSSKGTRSYNEQFF

SEQ ID NO: 785613 - protein, 15 aa, Homo sapiens
  CDR3 for alpha chain variable domain of TCR clone 392807 (TRAV10, TRAJ10)
CVVSAATGGGNKLTF

SEQ ID NO: 785614 - protein, 15 aa, Homo sapiens
  CDR3 for beta chain variable domain of TCR clone 392807 (TRBV11-3, TRBJ2-7)
CASSLLSGSSYEQYF

SEQ ID NO: 785615 - protein, 15 aa, Homo sapiens
  CDR3 for alpha chain variable domain of TCR clone 392808 (TRAV3, TRAJ22)
CAVRDRGGSARPLAF

SEQ ID NO: 785616 - protein, 16 aa, Homo sapiens
  CDR3 for beta chain variable domain of TCR clone 392808 (TRBV5-4, TRBJ2-3)
CASQQPGAGGADTQYF

SEQ ID NO: 785617 - protein, 13 aa, Homo sapiens
  CDR3 for alpha chain variable domain of TCR clone 392809 (TRAV3, TRAJ41)
CAVSSNSGYAFNF

SEQ ID NO: 785618 - protein, 14 aa, Homo sapiens
  CDR3 for beta chain variable domain of TCR clone 392809 (TRBV7-2, TRBJ2-7)
CASSPKTSFYEQYF

SEQ ID NO: 785619 - protein, 14 aa, Homo sapiens
  CDR3 for alpha chain variable domain of TCR clone 392810 (TRAV19, TRAJ15)
CALSEDQAGTALIF

SEQ ID NO: 785620 - protein, 15 aa, Homo sapiens
  CDR3 for beta chain variable domain of TCR clone 392810 (TRBV7-9, TRBJ1-5)
CASSQGHQPNQPQHF

SEQ ID NO: 785621 - protein, 13 aa, Homo sapiens
  CDR3 for alpha chain variable domain of TCR clone 392811 (TRAV2, TRAJ29)
CAAGGPGNTPLVF

SEQ ID NO: 785622 - protein, 13 aa, Homo sapiens
  CDR3 for beta chain variable domain of TCR clone 392811 (TRBV14, TRBJ1-2)
CASSEDRRYGYAF

SEQ ID NO: 785623 - protein, 13 aa, Homo sapiens
  CDR3 for alpha chain variable domain of TCR clone 392812 (TRAV12-2, TRAJ37)
CAGGSGNTGKLIF

SEQ ID NO: 785624 - protein, 21 aa, Homo sapiens
  CDR3 for beta chain variable domain of TCR clone 392812 (TRBV11-2, TRBJ2-7)
CASSPTTGGGILRAVLRAGHQ

SEQ ID NO: 785625 - protein, 14 aa, Homo sapiens
  CDR3 for alpha chain variable domain of TCR clone 392813 (TRAV3, TRAJ21)
CAVRDAYNFNKFYF

SEQ ID NO: 785626 - protein, 17 aa, Homo sapiens
  CDR3 for beta chain variable domain of TCR clone 392813 (TRBV11-2, TRBJ2-4)
CASSSVGPGGHRDIQYF

SEQ ID NO: 785627 - protein, 13 aa, Homo sapiens
  CDR3 for alpha chain variable domain of TCR clone 392814 (TRAV26-2, TRAJ54)
CIPRVGGAQKLVF

SEQ ID NO: 785628 - protein, 15 aa, Homo sapiens
  CDR3 for beta chain variable domain of TCR clone 392814 (TRBV20-1, TRBJ2-7)
CSARDRVSGMDEQYF

SEQ ID NO: 785629 - protein, 17 aa, Homo sapiens
  CDR3 for alpha chain variable domain of TCR clone 392815 (TRAV8-1, TRAJ43)
CAVTNDMRFGAVTRLTV

SEQ ID NO: 785630 - protein, 17 aa, Homo sapiens
  CDR3 for beta chain variable domain of TCR clone 392815 (TRBV5-4, TRBJ2-1)
CASSSAGGRGPYNEQFF

SEQ ID NO: 785631 - protein, 17 aa, Homo sapiens
  CDR3 for alpha chain variable domain of TCR clone 392816 (TRAV3, TRAJ12)
CAVRGGGRMDSSYKLIF

SEQ ID NO: 785632 - protein, 14 aa, Homo sapiens
  CDR3 for beta chain variable domain of TCR clone 392816 (TRBV7-9, TRBJ1-2)
CASSRQGANYGYTF

SEQ ID NO: 785633 - protein, 18 aa, Homo sapiens
  CDR3 for alpha chain variable domain of TCR clone 392817 (TRAV13-1, TRAJ52)
CAASKRSAGGTSYGKLTF

SEQ ID NO: 785634 - protein, 14 aa, Homo sapiens
  CDR3 for beta chain variable domain of TCR clone 392817 (TRBV7-2, TRBJ2-7)
CASSPKTRFYEQYF

SEQ ID NO: 785635 - protein, 15 aa, Homo sapiens
  CDR3 for alpha chain variable domain of TCR clone 392818 (TRAV21, TRAJ32)
CAVRRYGGATNKLIF

SEQ ID NO: 785636 - protein, 13 aa, Homo sapiens
  CDR3 for beta chain variable domain of TCR clone 392818 (TRBV4-1, TRBJ2-2)
CASSQENTGELFF

SEQ ID NO: 785637 - protein, 12 aa, Homo sapiens
  CDR3 for alpha chain variable domain of TCR clone 392819 (TRAV3, TRAJ20)
CAVRDGDYKLSF

SEQ ID NO: 785638 - protein, 15 aa, Homo sapiens
  CDR3 for beta chain variable domain of TCR clone 392819 (TRBV4-1, TRBJ1-4)
CASSDTGGTNEKLFF

SEQ ID NO: 785639 - protein, 15 aa, Homo sapiens
  CDR3 for alpha chain variable domain of TCR clone 392820 (TRAV3, TRAJ20)
CAVRDSRSNDYKLSF

SEQ ID NO: 785640 - protein, 14 aa, Homo sapiens
  CDR3 for beta chain variable domain of TCR clone 392820 (TRBV20-1, TRBJ2-7)
CSDRRGNGIYEQYF

SEQ ID NO: 785641 - protein, 13 aa, Homo sapiens
  CDR3 for alpha chain variable domain of TCR clone 392821 (TRAV3, TRAJ8)
CAVRFTGFQKLIF

SEQ ID NO: 785642 - protein, 15 aa, Homo sapiens
  CDR3 for beta chain variable domain of TCR clone 392821 (TRBV20-1, TRBJ2-7)
CSARDRVSGMDEQYF

SEQ ID NO: 785643 - protein, 17 aa, Homo sapiens
  CDR3 for alpha chain variable domain of TCR clone 392822 (TRAV16, TRAJ58)
CITVLSNGETSGFRLTF

SEQ ID NO: 785644 - protein, 17 aa, Homo sapiens
  CDR3 for beta chain variable domain of TCR clone 392822 (TRBV18, TRBJ2-1)
CASSKGLSGGADNEQFF

SEQ ID NO: 785645 - protein, 12 aa, Homo sapiens
  CDR3 for alpha chain variable domain of TCR clone 392823 (TRAV3, TRAJ31)
CAVRDGNARLMF

SEQ ID NO: 785646 - protein, 18 aa, Homo sapiens
  CDR3 for beta chain variable domain of TCR clone 392823 (TRBV7-2, TRBJ2-3)
CASSLKREGSGIADTQYF

SEQ ID NO: 785647 - protein, 14 aa, Homo sapiens
  CDR3 for alpha chain variable domain of TCR clone 392824 (TRAV2, TRAJ9)
CAVEDRSGGFKTIF

SEQ ID NO: 785648 - protein, 15 aa, Homo sapiens
  CDR3 for beta chain variable domain of TCR clone 392824 (TRBV7-2, TRBJ2-1)
CASTSASGDYNEQFF

SEQ ID NO: 785649 - protein, 14 aa, Homo sapiens
  CDR3 for alpha chain variable domain of TCR clone 392825 (TRAV23/DV6, TRAJ4)
CAAPSSGGYHKMIF

SEQ ID NO: 785650 - protein, 16 aa, Homo sapiens
  CDR3 for beta chain variable domain of TCR clone 392825 (TRBV19, TRBJ1-1)
CASRFGGPVTGTEAFF

SEQ ID NO: 785651 - protein, 13 aa, Homo sapiens
  CDR3 for alpha chain variable domain of TCR clone 392826 (TRAV36/DV7, TRAJ37)
CAVFSSNTGKLIF

SEQ ID NO: 785652 - protein, 15 aa, Homo sapiens
  CDR3 for beta chain variable domain of TCR clone 392826 (TRBV12-4, TRBJ2-5)
CQQFFVRWRQETQYF

SEQ ID NO: 785653 - protein, 14 aa, Homo sapiens
  CDR3 for alpha chain variable domain of TCR clone 392827 (TRAV1-2, TRAJ8)
CAVREDTGFQKLVF

SEQ ID NO: 785654 - protein, 16 aa, Homo sapiens
  CDR3 for beta chain variable domain of TCR clone 392827 (TRBV4-2, TRBJ1-2)
CASSQEIGGASYGYTF

SEQ ID NO: 785655 - protein, 13 aa, Homo sapiens
  CDR3 for alpha chain variable domain of TCR clone 392828 (TRAV21, TRAJ20)
CAVGLRVDYKLSF

SEQ ID NO: 785656 - protein, 12 aa, Homo sapiens
  CDR3 for beta chain variable domain of TCR clone 392828 (TRBV2, TRBJ2-7)
CASKRGSYEQYF

SEQ ID NO: 785657 - protein, 12 aa, Homo sapiens
  CDR3 for alpha chain variable domain of TCR clone 392829 (TRAV1-1, TRAJ12)
CAVGDISYKLIF

SEQ ID NO: 785658 - protein, 14 aa, Homo sapiens
  CDR3 for beta chain variable domain of TCR clone 392829 (TRBV15, TRBJ2-3)
CATARDGGGDTQYF

SEQ ID NO: 785659 - protein, 13 aa, Homo sapiens
  CDR3 for alpha chain variable domain of TCR clone 392830 (TRAV8-6, TRAJ34)
CAVSDQGTDKLLF

SEQ ID NO: 785660 - protein, 14 aa, Homo sapiens
  CDR3 for beta chain variable domain of TCR clone 392830 (TRBV12-4, TRBJ1-1)
CASTWTGHDTEAFF

SEQ ID NO: 785661 - protein, 11 aa, Homo sapiens
  CDR3 for alpha chain variable domain of TCR clone 392831 (TRAV8-3, TRAJ3)
CAATLKQCFQD

SEQ ID NO: 785662 - protein, 16 aa, Homo sapiens
  CDR3 for beta chain variable domain of TCR clone 392831 (TRBV6-5, TRBJ2-3)
CASRCHRGGGSDTQYF

SEQ ID NO: 785663 - protein, 13 aa, Homo sapiens
  CDR3 for alpha chain variable domain of TCR clone 392832 (TRAV12-3, TRAJ33)
CAMSVNSNYQLIW

SEQ ID NO: 785664 - protein, 15 aa, Homo sapiens
  CDR3 for beta chain variable domain of TCR clone 392832 (TRBV20-1, TRBJ1-1)
CSARPRQGAPTEAFF

SEQ ID NO: 785665 - protein, 11 aa, Homo sapiens
  CDR3 for alpha chain variable domain of TCR clone 392833 (TRAV1-2, TRAJ20)
CAVSNDYKLSF

SEQ ID NO: 785666 - protein, 17 aa, Homo sapiens
  CDR3 for beta chain variable domain of TCR clone 392833 (TRBV28, TRBJ2-5)
CASSRQGGLAGAETQYF

SEQ ID NO: 785667 - protein, 18 aa, Homo sapiens
  CDR3 for alpha chain variable domain of TCR clone 392834 (TRAV21, TRAJ52)
CAVRPSPAGGTSYGKLTF

SEQ ID NO: 785668 - protein, 15 aa, Homo sapiens
  CDR3 for beta chain variable domain of TCR clone 392834 (TRBV6-6, TRBJ2-7)
CASSCSYGGAYEQYF

SEQ ID NO: 785669 - protein, 12 aa, Homo sapiens
  CDR3 for alpha chain variable domain of TCR clone 392835 (TRAV8-3, TRAJ20)
CAVDFNDYKFSF

SEQ ID NO: 785670 - protein, 13 aa, Homo sapiens
  CDR3 for beta chain variable domain of TCR clone 392835 (TRBV5-7, TRBJ2-3)
CASSLGRTDTQYF

SEQ ID NO: 785671 - protein, 14 aa, Homo sapiens
  CDR3 for alpha chain variable domain of TCR clone 392836 (TRAV12-3, TRAJ58)
CAMSTETSGSRLNF

SEQ ID NO: 785672 - protein, 13 aa, Homo sapiens
  CDR3 for beta chain variable domain of TCR clone 392836 (TRBV27, TRBJ2-3)
CASSWGRTDTQYF

SEQ ID NO: 785673 - protein, 12 aa, Homo sapiens
  CDR3 for alpha chain variable domain of TCR clone 392837 (TRAV13-1, TRAJ53)
AASGGSNYKLTF

SEQ ID NO: 785674 - protein, 16 aa, Homo sapiens
  CDR3 for beta chain variable domain of TCR clone 392837 (TRBV28, TRBJ2-6)
CASSNRRGPGANGLTF

SEQ ID NO: 785675 - protein, 17 aa, Homo sapiens
  CDR3 for alpha chain variable domain of TCR clone 392838 (TRAV3, TRAJ38)
CAVRDCLNAGNNRKLIW

SEQ ID NO: 785676 - protein, 14 aa, Homo sapiens
  CDR3 for beta chain variable domain of TCR clone 392838 (TRBV18, TRBJ2-5)
CASSPLRVQETQYF

SEQ ID NO: 785677 - protein, 15 aa, Homo sapiens
  CDR3 for alpha chain variable domain of TCR clone 392839 (TRAV14/DV4, TRAJ39)
CAMRAVNNAGNMLTF

SEQ ID NO: 785678 - protein, 18 aa, Homo sapiens
  CDR3 for beta chain variable domain of TCR clone 392839 (TRBV5-8, TRBJ2-7)
CASSPHYRVWATSSTSGR

SEQ ID NO: 785679 - protein, 14 aa, Homo sapiens
  CDR3 for alpha chain variable domain of TCR clone 392840 (TRAV1-2, TRAJ16)
CAVNRFSDGQKLLF

SEQ ID NO: 785680 - protein, 16 aa, Homo sapiens
  CDR3 for beta chain variable domain of TCR clone 392840 (TRBV20-1, TRBJ1-4)
CSAPGQGLLTNEKLFF

SEQ ID NO: 785681 - protein, 18 aa, Homo sapiens
  CDR3 for alpha chain variable domain of TCR clone 392841 (TRAV29/DV5, TRAJ52)
CAAGFRGAGGTSYGKLTF

SEQ ID NO: 785682 - protein, 14 aa, Homo sapiens
  CDR3 for beta chain variable domain of TCR clone 392841 (TRBV25-1, TRBJ1-1)
CASTHLGGNTEAFF

SEQ ID NO: 785683 - protein, 16 aa, Homo sapiens
  CDR3 for alpha chain variable domain of TCR clone 392842 (TRAV30, TRAJ24)
CGTEIVDADSWGKFQF

SEQ ID NO: 785684 - protein, 16 aa, Homo sapiens
  CDR3 for beta chain variable domain of TCR clone 392842 (TRBV2, TRBJ1-3)
CASSGGAGRSGNTIYF

SEQ ID NO: 785685 - protein, 15 aa, Homo sapiens
  CDR3 for alpha chain variable domain of TCR clone 392843 (TRAV4, TRAJ39)
CLVVPNNNAGNMLTF

SEQ ID NO: 785686 - protein, 14 aa, Homo sapiens
  CDR3 for beta chain variable domain of TCR clone 392843 (TRBV19, TRBJ2-7)
CASNFRDTFTGMYF

SEQ ID NO: 785687 - protein, 14 aa, Homo sapiens
  CDR3 for alpha chain variable domain of TCR clone 392844 (TRAV2, TRAJ20)
CAVEDVVNDYKLSF

SEQ ID NO: 785688 - protein, 13 aa, Homo sapiens
  CDR3 for beta chain variable domain of TCR clone 392844 (TRBV19, TRBJ2-7)
CASRKAGGSEQYV

SEQ ID NO: 785689 - protein, 11 aa, Homo sapiens
  CDR3 for alpha chain variable domain of TCR clone 392845 (TRAV17, TRAJ43)
CATLRSNDMRF

SEQ ID NO: 785690 - protein, 15 aa, Homo sapiens
  CDR3 for beta chain variable domain of TCR clone 392845 (TRBV11-2, TRBJ2-1)
CASSLGTSGLNGQFF

SEQ ID NO: 785691 - protein, 15 aa, Homo sapiens
  CDR3 for alpha chain variable domain of TCR clone 392846 (TRAV8-3, TRAJ40)
CAAPSLGSGTYKYIF

SEQ ID NO: 785692 - protein, 15 aa, Homo sapiens
  CDR3 for beta chain variable domain of TCR clone 392846 (TRBV6-3, TRBJ2-7)
CASSSPGTVFYEQYF

SEQ ID NO: 785693 - protein, 16 aa, Homo sapiens
  CDR3 for alpha chain variable domain of TCR clone 392847 (TRAV12-2, TRAJ43)
CAGDDMHFGAGTRLTV

SEQ ID NO: 785694 - protein, 16 aa, Homo sapiens
  CDR3 for beta chain variable domain of TCR clone 392847 (TRBV2, TRBJ2-4)
CASSEAPGGEQNIQYF

SEQ ID NO: 785695 - protein, 12 aa, Homo sapiens
  CDR3 for alpha chain variable domain of TCR clone 392848 (TRAV22, TRAJ22)
CSPGGSARQLTF

SEQ ID NO: 785696 - protein, 13 aa, Homo sapiens
  CDR3 for beta chain variable domain of TCR clone 392848 (TRBV15, TRBJ1-6)
CATSGGLNSPLHF

SEQ ID NO: 785697 - protein, 15 aa, Homo sapiens
  CDR3 for alpha chain variable domain of TCR clone 392849 (TRAV16, TRAJ12)
CSKWTLRDSSYKLIF

SEQ ID NO: 785698 - protein, 13 aa, Homo sapiens
  CDR3 for beta chain variable domain of TCR clone 392849 (TRBV4-2, TRBJ1-1)
CASSQAGNTEAFF

SEQ ID NO: 785699 - protein, 14 aa, Homo sapiens
  CDR3 for alpha chain variable domain of TCR clone 392850 (TRAV27, TRAJ44)
CAASFTGTASKLTF

SEQ ID NO: 785700 - protein, 14 aa, Homo sapiens
  CDR3 for beta chain variable domain of TCR clone 392850 (TRBV7-3, TRBJ2-2)
CASSPDPSGRELFF

SEQ ID NO: 785701 - protein, 15 aa, Homo sapiens
  CDR3 for alpha chain variable domain of TCR clone 392851 (TRAV23/DV6, TRAJ18)
CAARYRGSTLGWLYF

SEQ ID NO: 785702 - protein, 13 aa, Homo sapiens
  CDR3 for beta chain variable domain of TCR clone 392851 (TRBV7-2, TRBJ2-7)
CASSSPSGSEQYF

SEQ ID NO: 785703 - protein, 14 aa, Homo sapiens
  CDR3 for alpha chain variable domain of TCR clone 392852 (TRAV23/DV6, TRAJ37)
CSASTSSNTGKLIF

SEQ ID NO: 785704 - protein, 14 aa, Homo sapiens
  CDR3 for beta chain variable domain of TCR clone 392852 (TRBV15, TRBJ2-3)
CATRSGTSTDSQYF

SEQ ID NO: 785705 - protein, 17 aa, Homo sapiens
  CDR3 for alpha chain variable domain of TCR clone 392853 (TRAV3, TRAJ6)
CAVRDGPRAGGSYIPTF

SEQ ID NO: 785706 - protein, 15 aa, Homo sapiens
  CDR3 for beta chain variable domain of TCR clone 392853 (TRBV6-1, TRBJ2-4)
CASSEAVWTINIQYF

SEQ ID NO: 785707 - protein, 13 aa, Homo sapiens
  CDR3 for alpha chain variable domain of TCR clone 392854 (TRAV8-6, TRAJ49)
CAVITNTGNQFYF

SEQ ID NO: 785708 - protein, 12 aa, Homo sapiens
  CDR3 for beta chain variable domain of TCR clone 392854 (TRBV5-1, TRBJ2-3)
CASSLAADTQYF

SEQ ID NO: 785709 - protein, 12 aa, Homo sapiens
  CDR3 for alpha chain variable domain of TCR clone 392855 (TRAV1-2, TRAJ33)
CAALDSNYQLIW

SEQ ID NO: 785710 - protein, 13 aa, Homo sapiens
  CDR3 for beta chain variable domain of TCR clone 392855 (TRBV9, TRBJ2-1)
CASSPSGGSEQFF

SEQ ID NO: 785711 - protein, 13 aa, Homo sapiens
  CDR3 for alpha chain variable domain of TCR clone 392856 (TRAV8-3, TRAJ28)
CAVGAVGSYQLTF

SEQ ID NO: 785712 - protein, 15 aa, Homo sapiens
  CDR3 for beta chain variable domain of TCR clone 392856 (TRBV12-4, TRBJ1-2)
CASSPITGGGYGYTF

SEQ ID NO: 785713 - protein, 12 aa, Homo sapiens
  CDR3 for alpha chain variable domain of TCR clone 392857 (TRAV3, TRAJ34)
CAVLGNTDKLIY

SEQ ID NO: 785714 - protein, 13 aa, Homo sapiens
  CDR3 for beta chain variable domain of TCR clone 392857 (TRBV19, TRBJ2-1)
CASSIGTGNEQFF

SEQ ID NO: 785715 - protein, 16 aa, Homo sapiens
  CDR3 for alpha chain variable domain of TCR clone 392858 (TRAV27, TRAJ48)
TAAHPGDTGLYLPLTF

SEQ ID NO: 785716 - protein, 13 aa, Homo sapiens
  CDR3 for beta chain variable domain of TCR clone 392858 (TRBV7-2, TRBJ2-5)
CASSQTSVETQYF

SEQ ID NO: 785717 - protein, 14 aa, Homo sapiens
  CDR3 for alpha chain variable domain of TCR clone 392859 (TRAV9-2, TRAJ39)
RALYIYNAGNMLTF

SEQ ID NO: 785718 - protein, 14 aa, Homo sapiens
  CDR3 for beta chain variable domain of TCR clone 392859 (TRBV6-1, TRBJ1-3)
CASVQGGGGNTIYF

SEQ ID NO: 785719 - protein, 13 aa, Homo sapiens
  CDR3 for alpha chain variable domain of TCR clone 392860 (TRAV17, TRAJ26)
CATVDNYGQNFVF

SEQ ID NO: 785720 - protein, 15 aa, Homo sapiens
  CDR3 for beta chain variable domain of TCR clone 392860 (TRBV28, TRBJ2-1)
CASSGLAEVDNEQFF

SEQ ID NO: 785721 - protein, 14 aa, Homo sapiens
  CDR3 for alpha chain variable domain of TCR clone 392861 (TRAV29/DV5, TRAJ49)
CAARAQNTGNQFYF

SEQ ID NO: 785722 - protein, 16 aa, Homo sapiens
  CDR3 for beta chain variable domain of TCR clone 392861 (TRBV12-4, TRBJ1-5)
CAGRQPVEGSNQPQHF

SEQ ID NO: 785723 - protein, 13 aa, Homo sapiens
  CDR3 for alpha chain variable domain of TCR clone 392862 (TRAV1-2, TRAJ33)
CAVSEDSNYQLIW

SEQ ID NO: 785724 - protein, 12 aa, Homo sapiens
  CDR3 for beta chain variable domain of TCR clone 392862 (TRBV7-9, TRBJ1-4)
CASSTDREKLFF

SEQ ID NO: 785725 - protein, 11 aa, Homo sapiens
  CDR3 for alpha chain variable domain of TCR clone 392863 (TRAV21, TRAJ9)
CAVPGGFKTIF

SEQ ID NO: 785726 - protein, 17 aa, Homo sapiens
  CDR3 for beta chain variable domain of TCR clone 392863 (TRBV7-9, TRBJ2-5)
FATSGCARDPLLRARHA

SEQ ID NO: 785727 - protein, 15 aa, Homo sapiens
  CDR3 for alpha chain variable domain of TCR clone 392864 (TRAV16, TRAJ16)
CALQGGGSDGQKLLF

SEQ ID NO: 785728 - protein, 15 aa, Homo sapiens
  CDR3 for beta chain variable domain of TCR clone 392864 (TRBV20-1, TRBJ2-7)
CSARDRVSGMDEEYF

SEQ ID NO: 785729 - protein, 16 aa, Homo sapiens
  CDR3 for alpha chain variable domain of TCR clone 392865 (TRAV21, TRAJ17)
CAVRPGEEAAGNKLTF

SEQ ID NO: 785730 - protein, 16 aa, Homo sapiens
  CDR3 for beta chain variable domain of TCR clone 392865 (TRBV2, TRBJ2-7)
CASSEPWTGPSYEQYI

SEQ ID NO: 785731 - protein, 15 aa, Homo sapiens
  CDR3 for alpha chain variable domain of TCR clone 392866 (TRAV3, TRAJ12)
CAVRDIRNSSYKLIF

SEQ ID NO: 785732 - protein, 15 aa, Homo sapiens
  CDR3 for beta chain variable domain of TCR clone 392866 (TRBV27, TRBJ2-7)
CASSLRNEQGYEQYF

SEQ ID NO: 785733 - protein, 15 aa, Homo sapiens
  CDR3 for alpha chain variable domain of TCR clone 392867 (TRAV8-3, TRAJ45)
CASSYSVGGAVGLTF

SEQ ID NO: 785734 - protein, 13 aa, Homo sapiens
  CDR3 for beta chain variable domain of TCR clone 392867 (TRBV10-3, TRBJ2-7)
CASKLAVNYEQYF

SEQ ID NO: 785735 - protein, 13 aa, Homo sapiens
  CDR3 for alpha chain variable domain of TCR clone 392868 (TRAV4, TRAJ28)
CVFIWGWELPTHF

SEQ ID NO: 785736 - protein, 14 aa, Homo sapiens
  CDR3 for beta chain variable domain of TCR clone 392868 (TRBV7-9, TRBJ2-5)
CASSLDTAQETQYF

SEQ ID NO: 785737 - protein, 11 aa, Homo sapiens
  CDR3 for alpha chain variable domain of TCR clone 392869 (TRAV8-3, TRAJ49)
CAVGGGNQFYF

SEQ ID NO: 785738 - protein, 15 aa, Homo sapiens
  CDR3 for beta chain variable domain of TCR clone 392869 (TRBV20-1, TRBJ1-1)
CSASRGVTGNTEAFF

SEQ ID NO: 785739 - protein, 14 aa, Homo sapiens
  CDR3 for alpha chain variable domain of TCR clone 392870 (TRAV26-1, TRAJ45)
CIEVTGGGADGLTF

SEQ ID NO: 785740 - protein, 12 aa, Homo sapiens
  CDR3 for beta chain variable domain of TCR clone 392870 (TRBV7-6, TRBJ1-2)
CQQLVADYGYTF

SEQ ID NO: 785741 - protein, 13 aa, Homo sapiens
  CDR3 for alpha chain variable domain of TCR clone 392871 (TRAV12-3, TRAJ5)
CAMIYTGRRALTF

SEQ ID NO: 785742 - protein, 14 aa, Homo sapiens
  CDR3 for beta chain variable domain of TCR clone 392871 (TRBV7-2, TRBJ2-7)
CASSPKTSFYEQYF

SEQ ID NO: 785743 - protein, 13 aa, Homo sapiens
  CDR3 for alpha chain variable domain of TCR clone 392872 (TRAV16, TRAJ26)
CITVLCLGKNFVF

SEQ ID NO: 785744 - protein, 12 aa, Homo sapiens
  CDR3 for beta chain variable domain of TCR clone 392872 (TRBV11-2, TRBJ2-1)
CASSPGNNEQFF

SEQ ID NO: 785745 - protein, 12 aa, Homo sapiens
  CDR3 for alpha chain variable domain of TCR clone 392873 (TRAV20, TRAJ29)
CAVGEGNTPLVF

SEQ ID NO: 785746 - protein, 11 aa, Homo sapiens
  CDR3 for beta chain variable domain of TCR clone 392873 (TRBV12-4, TRBJ2-3)
CASTATDTQYF

SEQ ID NO: 785747 - protein, 14 aa, Homo sapiens
  CDR3 for alpha chain variable domain of TCR clone 392874 (TRAV8-4, TRAJ23)
CAVSAPGSGGKLIF

SEQ ID NO: 785748 - protein, 17 aa, Homo sapiens
  CDR3 for beta chain variable domain of TCR clone 392874 (TRBV4-3, TRBJ2-3)
CASSQDPLAGAVDTRYF

SEQ ID NO: 785749 - protein, 13 aa, Homo sapiens
  CDR3 for alpha chain variable domain of TCR clone 392875 (TRAV13-1, TRAJ5)
CAAEHTGRRALTF

SEQ ID NO: 785750 - protein, 17 aa, Homo sapiens
  CDR3 for beta chain variable domain of TCR clone 392875 (TRBV7-3, TRBJ2-3)
CASSLMKRMRGADTQYF

SEQ ID NO: 785751 - protein, 11 aa, Homo sapiens
  CDR3 for alpha chain variable domain of TCR clone 392876 (TRAV1-2, TRAJ20)
CAVANDYKLSF

SEQ ID NO: 785752 - protein, 14 aa, Homo sapiens
  CDR3 for beta chain variable domain of TCR clone 392876 (TRBV15, TRBJ2-5)
CATSRVSVRETQYF

SEQ ID NO: 785753 - protein, 14 aa, Homo sapiens
  CDR3 for alpha chain variable domain of TCR clone 392877 (TRAV26-1, TRAJ21)
CVVRVVYNFNKFYF

SEQ ID NO: 785754 - protein, 17 aa, Homo sapiens
  CDR3 for beta chain variable domain of TCR clone 392877 (TRBV11-2, TRBJ2-1)
CASSLYPPGVEYNEQFF

SEQ ID NO: 785755 - protein, 16 aa, Homo sapiens
  CDR3 for alpha chain variable domain of TCR clone 392878 (TRAV20, TRAJ10)
CAVLRGLTGGGNKLTF

SEQ ID NO: 785756 - protein, 15 aa, Homo sapiens
  CDR3 for beta chain variable domain of TCR clone 392878 (TRBV12-4, TRBJ2-1)
CASSPLSGRNNEQFF

SEQ ID NO: 785757 - protein, 23 aa, Homo sapiens
  CDR3 for alpha chain variable domain of TCR clone 392879 (TRAV12-1, TRAJ44)
SSVIQPPTSVWPTYLRTASKLTF

SEQ ID NO: 785758 - protein, 13 aa, Homo sapiens
  CDR3 for beta chain variable domain of TCR clone 392879 (TRBV6-5, TRBJ2-5)
CASSPQGGETQYF

SEQ ID NO: 785759 - protein, 15 aa, Homo sapiens
  CDR3 for alpha chain variable domain of TCR clone 392880 (TRAV35, TRAJ40)
CAGQLGTSGTYKYIF

SEQ ID NO: 785760 - protein, 15 aa, Homo sapiens
  CDR3 for beta chain variable domain of TCR clone 392880 (TRBV27, TRBJ2-1)
CASSNGGGSSNEQFF

SEQ ID NO: 785761 - protein, 11 aa, Homo sapiens
  CDR3 for alpha chain variable domain of TCR clone 392881 (TRAV1-1, TRAJ23)
CAVRQGGKLIV

SEQ ID NO: 785762 - protein, 20 aa, Homo sapiens
  CDR3 for beta chain variable domain of TCR clone 392881 (TRBV11-2, TRBJ1-6)
CASSLVFATGGSVHPSTLGT

SEQ ID NO: 785763 - protein, 11 aa, Homo sapiens
  CDR3 for alpha chain variable domain of TCR clone 392882 (TRAV13-1, TRAJ6)
CATLGIYIPTF

SEQ ID NO: 785764 - protein, 12 aa, Homo sapiens
  CDR3 for beta chain variable domain of TCR clone 392882 (TRBV11-2, TRBJ2-1)
CASSPGNNEQFF

SEQ ID NO: 785765 - protein, 11 aa, Homo sapiens
  CDR3 for alpha chain variable domain of TCR clone 392883 (TRAV13-1, TRAJ40)
CAVSGTYKYIF

SEQ ID NO: 785766 - protein, 12 aa, Homo sapiens
  CDR3 for beta chain variable domain of TCR clone 392883 (TRBV11-2, TRBJ2-2)
CASSLGGGELFF

SEQ ID NO: 785767 - protein, 12 aa, Homo sapiens
  CDR3 for alpha chain variable domain of TCR clone 392884 (TRAV1-1, TRAJ43)
CAPRVSSNDMRF

SEQ ID NO: 785768 - protein, 13 aa, Homo sapiens
  CDR3 for beta chain variable domain of TCR clone 392884 (TRBV11-2, TRBJ2-5)
CASSSTGEETQYF

SEQ ID NO: 785769 - protein, 14 aa, Homo sapiens
  CDR3 for alpha chain variable domain of TCR clone 392885 (TRAV1-2, TRAJ16)
CAVNRFSDGQKLLF

SEQ ID NO: 785770 - protein, 12 aa, Homo sapiens
  CDR3 for beta chain variable domain of TCR clone 392885 (TRBV18, TRBJ2-3)
CASSPYTDTQYF

SEQ ID NO: 785771 - protein, 15 aa, Homo sapiens
  CDR3 for alpha chain variable domain of TCR clone 392886 (TRAV2, TRAJ9)
CAVEDRGTGGFKTIF

SEQ ID NO: 785772 - protein, 16 aa, Homo sapiens
  CDR3 for beta chain variable domain of TCR clone 392886 (TRBV19, TRBJ2-1)
CASSMGGGSSYNEQFF

SEQ ID NO: 785773 - protein, 16 aa, Homo sapiens
  CDR3 for alpha chain variable domain of TCR clone 392887 (TRAV30, TRAJ24)
CGTEIVDADSWGKFQV

SEQ ID NO: 785774 - protein, 14 aa, Homo sapiens
  CDR3 for beta chain variable domain of TCR clone 392887 (TRBV12-5, TRBJ2-5)
CASGSRTHPETQYF

SEQ ID NO: 785775 - protein, 15 aa, Homo sapiens
  CDR3 for alpha chain variable domain of TCR clone 392888 (TRAV29/DV5, TRAJ24)
CAASGATDSWGKFQF

SEQ ID NO: 785776 - protein, 13 aa, Homo sapiens
  CDR3 for beta chain variable domain of TCR clone 392888 (TRBV4-2, TRBJ1-1)
CASSQAGNTEAFF

SEQ ID NO: 785777 - protein, 13 aa, Homo sapiens
  CDR3 for alpha chain variable domain of TCR clone 392889 (TRAV27, TRAJ45)
CMSSGGGADGLTF

SEQ ID NO: 785778 - protein, 17 aa, Homo sapiens
  CDR3 for beta chain variable domain of TCR clone 392889 (TRBV11-2, TRBJ2-1)
CASSLSPPGVEYNEQFF

SEQ ID NO: 785779 - protein, 16 aa, Homo sapiens
  CDR3 for alpha chain variable domain of TCR clone 392890 (TRAV2, TRAJ4)
CAVEDRFSGGYNKLIF

SEQ ID NO: 785780 - protein, 13 aa, Homo sapiens
  CDR3 for beta chain variable domain of TCR clone 392890 (TRBV7-7, TRBJ2-5)
CASSRTGQETQYF

SEQ ID NO: 785781 - protein, 15 aa, Homo sapiens
  CDR3 for alpha chain variable domain of TCR clone 392891 (TRAV13-1, TRAJ5)
CAASKADTGRRALTF

SEQ ID NO: 785782 - protein, 16 aa, Homo sapiens
  CDR3 for beta chain variable domain of TCR clone 392891 (TRBV7-2, TRBJ2-1)
CASILGRTSGDNEQFF

SEQ ID NO: 785783 - protein, 17 aa, Homo sapiens
  CDR3 for alpha chain variable domain of TCR clone 392892 (TRAV39, TRAJ32)
CAVDIKWVGGATNKRIF

SEQ ID NO: 785784 - protein, 11 aa, Homo sapiens
  CDR3 for beta chain variable domain of TCR clone 392892 (TRBV18, TRBJ1-2)
CASSPLNGYTF

SEQ ID NO: 785785 - protein, 13 aa, Homo sapiens
  CDR3 for alpha chain variable domain of TCR clone 392893 (TRAV8-3, TRAJ43)
CAVVPYNNNDMRF

SEQ ID NO: 785786 - protein, 17 aa, Homo sapiens
  CDR3 for beta chain variable domain of TCR clone 392893 (TRBV7-7, TRBJ1-1)
CASIGDRPNIGVTEAFF

SEQ ID NO: 785787 - protein, 14 aa, Homo sapiens
  CDR3 for alpha chain variable domain of TCR clone 392894 (TRAV12-1, TRAJ17)
CVVNYKAAGNKLTF

SEQ ID NO: 785788 - protein, 12 aa, Homo sapiens
  CDR3 for beta chain variable domain of TCR clone 392894 (TRBV20-1, TRBJ2-7)
CSAITPTKEQYV

SEQ ID NO: 785789 - protein, 14 aa, Homo sapiens
  CDR3 for alpha chain variable domain of TCR clone 392895 (TRAV13-2, TRAJ10)
CAENITGGGNKLTF

SEQ ID NO: 785790 - protein, 15 aa, Homo sapiens
  CDR3 for beta chain variable domain of TCR clone 392895 (TRBV7-2, TRBJ2-7)
CASSVGGAKSGEQYF

SEQ ID NO: 785791 - protein, 12 aa, Homo sapiens
  CDR3 for alpha chain variable domain of TCR clone 392896 (TRAV12-1, TRAJ23)
CVVNKQGGKLIF

SEQ ID NO: 785792 - protein, 16 aa, Homo sapiens
  CDR3 for beta chain variable domain of TCR clone 392896 (TRBV11-1, TRBJ2-7)
CASSAQTGTLSYEQYF

SEQ ID NO: 785793 - protein, 15 aa, Homo sapiens
  CDR3 for alpha chain variable domain of TCR clone 392897 (TRAV26-1, TRAJ38)
CIVRAEGGNNRKLIW

SEQ ID NO: 785794 - protein, 14 aa, Homo sapiens
  CDR3 for beta chain variable domain of TCR clone 392897 (TRBV7-6, TRBJ2-5)
CASSSPSGSETEYF

SEQ ID NO: 785795 - protein, 14 aa, Homo sapiens
  CDR3 for alpha chain variable domain of TCR clone 392898 (TRAV3, TRAJ34)
CAVRAPGNTDKLIF

SEQ ID NO: 785796 - protein, 15 aa, Homo sapiens
  CDR3 for beta chain variable domain of TCR clone 392898 (TRBV11-3, TRBJ2-3)
CASLKDGREGDTQYF

SEQ ID NO: 785797 - protein, 10 aa, Homo sapiens
  CDR3 for alpha chain variable domain of TCR clone 392899 (TRAV12-3, TRAJ49)
CAMNDDQFYF

SEQ ID NO: 785798 - protein, 16 aa, Homo sapiens
  CDR3 for beta chain variable domain of TCR clone 392899 (TRBV20-1, TRBJ1-4)
CSAPGQGLLTNDKLFF

SEQ ID NO: 785799 - protein, 13 aa, Homo sapiens
  CDR3 for alpha chain variable domain of TCR clone 392900 (TRAV29/DV5, TRAJ33)
CAASVESNYQLIW

SEQ ID NO: 785800 - protein, 13 aa, Homo sapiens
  CDR3 for beta chain variable domain of TCR clone 392900 (TRBV7-2, TRBJ2-7)
CASSSPSGSEQYF

SEQ ID NO: 785801 - protein, 12 aa, Homo sapiens
  CDR3 for alpha chain variable domain of TCR clone 392901 (TRAV3, TRAJ43)
CAVRDPNNDMRF

SEQ ID NO: 785802 - protein, 15 aa, Homo sapiens
  CDR3 for beta chain variable domain of TCR clone 392901 (TRBV6-5, TRBJ2-1)
RASSYDAGAGNEQFF

SEQ ID NO: 785803 - protein, 12 aa, Homo sapiens
  CDR3 for alpha chain variable domain of TCR clone 392902 (TRAV1-1, TRAJ13)
CAEFWGLPESYL

SEQ ID NO: 785804 - protein, 12 aa, Homo sapiens
  CDR3 for beta chain variable domain of TCR clone 392902 (TRBV28, TRBJ2-1)
CASSVQINEQFF

SEQ ID NO: 785805 - protein, 16 aa, Homo sapiens
  CDR3 for alpha chain variable domain of TCR clone 392903 (TRAV12-1, TRAJ42)
CVVTPYYGGSHGNLIF

SEQ ID NO: 785806 - protein, 15 aa, Homo sapiens
  CDR3 for beta chain variable domain of TCR clone 392903 (TRBV4-3, TRBJ2-7)
CASSRGGRGIYEQYF

SEQ ID NO: 785807 - protein, 14 aa, Homo sapiens
  CDR3 for alpha chain variable domain of TCR clone 392904 (TRAV25, TRAJ22)
CAVRSSGSARQLTF

SEQ ID NO: 785808 - protein, 20 aa, Homo sapiens
  CDR3 for beta chain variable domain of TCR clone 392904 (TRBV7-8, TRBJ2-1)
CASSLAHRLAGVRSYNEQFF

SEQ ID NO: 785809 - protein, 15 aa, Homo sapiens
  CDR3 for alpha chain variable domain of TCR clone 392905 (TRAV26-1, TRAJ29)
CIVRVEGSGSTPLVF

SEQ ID NO: 785810 - protein, 16 aa, Homo sapiens
  CDR3 for beta chain variable domain of TCR clone 392905 (TRBV24-1, TRBJ2-3)
CATSDPGTGATDTQYF

SEQ ID NO: 785811 - protein, 14 aa, Homo sapiens
  CDR3 for alpha chain variable domain of TCR clone 392906 (TRAV1-1, TRAJ23)
CAVKAYNHGGKIIF

SEQ ID NO: 785812 - protein, 15 aa, Homo sapiens
  CDR3 for beta chain variable domain of TCR clone 392906 (TRBV7-2, TRBJ2-3)
CASTPTSGETDTQYF

SEQ ID NO: 785813 - protein, 14 aa, Homo sapiens
  CDR3 for alpha chain variable domain of TCR clone 392907 (TRAV29/DV5, TRAJ45)
CAASARGGADGLTF

SEQ ID NO: 785814 - protein, 12 aa, Homo sapiens
  CDR3 for beta chain variable domain of TCR clone 392907 (TRBV7-2, TRBJ1-5)
CASSLWSQPQHF

SEQ ID NO: 785815 - protein, 14 aa, Homo sapiens
  CDR3 for alpha chain variable domain of TCR clone 392908 (TRAV17, TRAJ22)
CATVLSGSARQLTF

SEQ ID NO: 785816 - protein, 13 aa, Homo sapiens
  CDR3 for beta chain variable domain of TCR clone 392908 (TRBV7-3, TRBJ1-1)
CASSQDWGAEAFF

SEQ ID NO: 785817 - protein, 14 aa, Homo sapiens
  CDR3 for alpha chain variable domain of TCR clone 392909 (TRAV3, TRAJ33)
CAVRDMDSNYQLIW

SEQ ID NO: 785818 - protein, 15 aa, Homo sapiens
  CDR3 for beta chain variable domain of TCR clone 392909 (TRBV7-3, TRBJ1-6)
CASSLDPWAVSPLHF

SEQ ID NO: 785819 - protein, 17 aa, Homo sapiens
  CDR3 for alpha chain variable domain of TCR clone 392910 (TRAV3, TRAJ6)
CAVRDGPRAGGSYIPTL

SEQ ID NO: 785820 - protein, 13 aa, Homo sapiens
  CDR3 for beta chain variable domain of TCR clone 392910 (TRBV19, TRBJ2-7)
CASSIDRTYEQYF

SEQ ID NO: 785821 - protein, 15 aa, Homo sapiens
  CDR3 for alpha chain variable domain of TCR clone 392911 (TRAV12-2, TRAJ53)
CAVNGGGGSNYKLTF

SEQ ID NO: 785822 - protein, 17 aa, Homo sapiens
  CDR3 for beta chain variable domain of TCR clone 392911 (TRBV7-3, TRBJ2-3)
RASSLMKRMRGADTQHF

SEQ ID NO: 785823 - protein, 16 aa, Homo sapiens
  CDR3 for alpha chain variable domain of TCR clone 392912 (TRAV38-1, TRAJ32)
CAFMKGGGGATNKLIF

SEQ ID NO: 785824 - protein, 13 aa, Homo sapiens
  CDR3 for beta chain variable domain of TCR clone 392912 (TRBV20-1, TRBJ2-5)
CSAREAFQETQSF

SEQ ID NO: 785825 - protein, 15 aa, Homo sapiens
  CDR3 for alpha chain variable domain of TCR clone 392913 (TRAV21, TRAJ53)
CATLNSGGSNYKLTF

SEQ ID NO: 785826 - protein, 16 aa, Homo sapiens
  CDR3 for beta chain variable domain of TCR clone 392913 (TRBV9, TRBJ2-1)
CASSVGGGGNYPEQFF

SEQ ID NO: 785827 - protein, 12 aa, Homo sapiens
  CDR3 for alpha chain variable domain of TCR clone 392914 (TRAV21, TRAJ11)
CAATSGYSNLTF

SEQ ID NO: 785828 - protein, 16 aa, Homo sapiens
  CDR3 for beta chain variable domain of TCR clone 392914 (TRBV28, TRBJ2-2)
CASSLEGGSNTGELFF

SEQ ID NO: 785829 - protein, 14 aa, Homo sapiens
  CDR3 for alpha chain variable domain of TCR clone 392915 (TRAV1-2, TRAJ8)
CAVREGTGFQKLVF

SEQ ID NO: 785830 - protein, 17 aa, Homo sapiens
  CDR3 for beta chain variable domain of TCR clone 392915 (TRBV11-3, TRBJ2-3)
CASSPGSSGGSTDTQYF

SEQ ID NO: 785831 - protein, 12 aa, Homo sapiens
  CDR3 for alpha chain variable domain of TCR clone 392916 (TRAV12-3, TRAJ17)
CAMTLTGNKLTF

SEQ ID NO: 785832 - protein, 13 aa, Homo sapiens
  CDR3 for beta chain variable domain of TCR clone 392916 (TRBV10-3, TRBJ1-2)
CAISERDSYSYTF

SEQ ID NO: 785833 - protein, 14 aa, Homo sapiens
  CDR3 for alpha chain variable domain of TCR clone 392917 (TRAV1-2, TRAJ16)
CAVNRFSAGQKRLF

SEQ ID NO: 785834 - protein, 15 aa, Homo sapiens
  CDR3 for beta chain variable domain of TCR clone 392917 (TRBV9, TRBJ1-6)
CASSVAGTGDSPLHF

SEQ ID NO: 785835 - protein, 14 aa, Homo sapiens
  CDR3 for alpha chain variable domain of TCR clone 392918 (TRAV1-2, TRAJ8)
CAVREDTGFQQLVF

SEQ ID NO: 785836 - protein, 14 aa, Homo sapiens
  CDR3 for beta chain variable domain of TCR clone 392918 (TRBV28, TRBJ2-1)
CASSFDSVSDEQFF

SEQ ID NO: 785837 - protein, 14 aa, Homo sapiens
  CDR3 for alpha chain variable domain of TCR clone 392919 (TRAV2, TRAJ9)
CAVDDRGGGFKTIF

SEQ ID NO: 785838 - protein, 11 aa, Homo sapiens
  CDR3 for beta chain variable domain of TCR clone 392919 (TRBV7-9, TRBJ2-5)
CASSLGETQYF

SEQ ID NO: 785839 - protein, 14 aa, Homo sapiens
  CDR3 for alpha chain variable domain of TCR clone 392920 (TRAV2, TRAJ29)
CAVTPPSGNTPLVF

SEQ ID NO: 785840 - protein, 13 aa, Homo sapiens
  CDR3 for beta chain variable domain of TCR clone 392920 (TRBV10-3, TRBJ2-7)
CASKLAVNYEQYF

SEQ ID NO: 785841 - protein, 13 aa, Homo sapiens
  CDR3 for alpha chain variable domain of TCR clone 392921 (TRAV36/DV7, TRAJ57)
CAVVLGGSEKLVL

SEQ ID NO: 785842 - protein, 14 aa, Homo sapiens
  CDR3 for beta chain variable domain of TCR clone 392921 (TRBV4-1, TRBJ1-2)
CASSQDGQVRGYTF

SEQ ID NO: 785843 - protein, 18 aa, Homo sapiens
  CDR3 for alpha chain variable domain of TCR clone 392922 (TRAV13-1, TRAJ39)
CAASIVMQATCSPFEGEQ

SEQ ID NO: 785844 - protein, 16 aa, Homo sapiens
  CDR3 for beta chain variable domain of TCR clone 392922 (TRBV20-1, TRBJ1-4)
CSAPGQGLLTNEKLFF

SEQ ID NO: 785845 - protein, 14 aa, Homo sapiens
  CDR3 for alpha chain variable domain of TCR clone 392923 (TRAV8-1, TRAJ5)
CAVRTDTGQESTYF

SEQ ID NO: 785846 - protein, 14 aa, Homo sapiens
  CDR3 for beta chain variable domain of TCR clone 392923 (TRBV7-8, TRBJ2-3)
CASSFPDGQDTQYF

SEQ ID NO: 785847 - protein, 14 aa, Homo sapiens
  CDR3 for alpha chain variable domain of TCR clone 392924 (TRAV1-2, TRAJ16)
CAVNRFSDGQKLLL

SEQ ID NO: 785848 - protein, 13 aa, Homo sapiens
  CDR3 for beta chain variable domain of TCR clone 392924 (TRBV7-9, TRBJ2-3)
CASSPGSTDTQYF

SEQ ID NO: 785849 - protein, 13 aa, Homo sapiens
  CDR3 for alpha chain variable domain of TCR clone 392925 (TRAV12-1, TRAJ33)
CGDAPDSNYQLIW

SEQ ID NO: 785850 - protein, 13 aa, Homo sapiens
  CDR3 for beta chain variable domain of TCR clone 392925 (TRBV10-3, TRBJ2-7)
CASKLAVNYEQYF

SEQ ID NO: 785851 - protein, 18 aa, Homo sapiens
  CDR3 for alpha chain variable domain of TCR clone 392926 (TRAV21, TRAJ52)
CAVRPSPAGDTSYGKLTF

SEQ ID NO: 785852 - protein, 13 aa, Homo sapiens
  CDR3 for beta chain variable domain of TCR clone 392926 (TRBV20-1, TRBJ1-1)
CSARVGGNTEAFF

SEQ ID NO: 785853 - protein, 13 aa, Homo sapiens
  CDR3 for alpha chain variable domain of TCR clone 392927 (TRAV21, TRAJ20)
CAVGLRVDYKLSF

SEQ ID NO: 785854 - protein, 14 aa, Homo sapiens
  CDR3 for beta chain variable domain of TCR clone 392927 (TRBV18, TRBJ1-2)
CASSPDRVVYGYTF

SEQ ID NO: 785855 - protein, 15 aa, Homo sapiens
  CDR3 for alpha chain variable domain of TCR clone 392928 (TRAV21, TRAJ53)
CATLNSGGSNYKLTF

SEQ ID NO: 785856 - protein, 15 aa, Homo sapiens
  CDR3 for beta chain variable domain of TCR clone 392928 (TRBV3-1, TRBJ2-7)
CASSQEWTGSYEQYF

SEQ ID NO: 785857 - protein, 14 aa, Homo sapiens
  CDR3 for alpha chain variable domain of TCR clone 392929 (TRAV12-1, TRAJ17)
CVVNYKDAGNKLTF

SEQ ID NO: 785858 - protein, 15 aa, Homo sapiens
  CDR3 for beta chain variable domain of TCR clone 392929 (TRBV20-1, TRBJ2-7)
CSARDRVSGMDEQYF

SEQ ID NO: 785859 - protein, 16 aa, Homo sapiens
  CDR3 for alpha chain variable domain of TCR clone 392930 (TRAV17, TRAJ52)
CATSNAGGTSYGKLTF

SEQ ID NO: 785860 - protein, 13 aa, Homo sapiens
  CDR3 for beta chain variable domain of TCR clone 392930 (TRBV27, TRBJ1-6)
CAISLVLVSPLHF

SEQ ID NO: 785861 - protein, 15 aa, Homo sapiens
  CDR3 for alpha chain variable domain of TCR clone 392931 (TRAV27, TRAJ38)
CAARHNAGNNRKLIW

SEQ ID NO: 785862 - protein, 14 aa, Homo sapiens
  CDR3 for beta chain variable domain of TCR clone 392931 (TRBV7-8, TRBJ2-3)
CASSLEAGTDTQYF

SEQ ID NO: 785863 - protein, 13 aa, Homo sapiens
  CDR3 for alpha chain variable domain of TCR clone 392932 (TRAV16, TRAJ10)
CAPAREEETNSPL

SEQ ID NO: 785864 - protein, 16 aa, Homo sapiens
  CDR3 for beta chain variable domain of TCR clone 392932 (TRBV2, TRBJ2-1)
CASSVGGSLSYNEQFF

SEQ ID NO: 785865 - protein, 12 aa, Homo sapiens
  CDR3 for alpha chain variable domain of TCR clone 392933 (TRAV23/DV6, TRAJ30)
CAASKGGDKIIF

SEQ ID NO: 785866 - protein, 15 aa, Homo sapiens
  CDR3 for beta chain variable domain of TCR clone 392933 (TRBV20-1, TRBJ2-7)
CSARDRVSGMDEQYF

SEQ ID NO: 785867 - protein, 16 aa, Homo sapiens
  CDR3 for alpha chain variable domain of TCR clone 392934 (TRAV12-3, TRAJ53)
CAVSPGSGGSNYKLTF

SEQ ID NO: 785868 - protein, 16 aa, Homo sapiens
  CDR3 for beta chain variable domain of TCR clone 392934 (TRBV4-2, TRBJ1-1)
CASSQAGFGMNTEAFF

SEQ ID NO: 785869 - protein, 14 aa, Homo sapiens
  CDR3 for alpha chain variable domain of TCR clone 392935 (TRAV12-1, TRAJ27)
CGEHIRTTAGKSTF

SEQ ID NO: 785870 - protein, 15 aa, Homo sapiens
  CDR3 for beta chain variable domain of TCR clone 392935 (TRBV19, TRBJ1-1)
CASTSGQIQNTEAFF

SEQ ID NO: 785871 - protein, 16 aa, Homo sapiens
  CDR3 for alpha chain variable domain of TCR clone 392936 (TRAV25, TRAJ52)
CAGPRAGGTSYGKLTF

SEQ ID NO: 785872 - protein, 15 aa, Homo sapiens
  CDR3 for beta chain variable domain of TCR clone 392936 (TRBV10-3, TRBJ2-2)
CAIDTGGTGTGELFF

SEQ ID NO: 785873 - protein, 14 aa, Homo sapiens
  CDR3 for alpha chain variable domain of TCR clone 392937 (TRAV23/DV6, TRAJ17)
CAARGRAAGNQLTF

SEQ ID NO: 785874 - protein, 12 aa, Homo sapiens
  CDR3 for beta chain variable domain of TCR clone 392937 (TRBV7-9, TRBJ2-3)
CASSFITDTQYF

SEQ ID NO: 785875 - protein, 16 aa, Homo sapiens
  CDR3 for alpha chain variable domain of TCR clone 392938 (TRAV30, TRAJ24)
WGKEIVDADSWGKFQF

SEQ ID NO: 785876 - protein, 12 aa, Homo sapiens
  CDR3 for beta chain variable domain of TCR clone 392938 (TRBV11-2, TRBJ2-2)
CASSLGGGELFF

SEQ ID NO: 785877 - protein, 16 aa, Homo sapiens
  CDR3 for alpha chain variable domain of TCR clone 392939 (TRAV3, TRAJ10)
CAVRDMRAGGGNKLTF

SEQ ID NO: 785878 - protein, 16 aa, Homo sapiens
  CDR3 for beta chain variable domain of TCR clone 392939 (TRBV12-4, TRBJ1-5)
CASSRPGGGSNQPQHF

SEQ ID NO: 785879 - protein, 15 aa, Homo sapiens
  CDR3 for alpha chain variable domain of TCR clone 392940 (TRAV21, TRAJ24)
CAARSSTDSWGKLKF

SEQ ID NO: 785880 - protein, 14 aa, Homo sapiens
  CDR3 for beta chain variable domain of TCR clone 392940 (TRBV11-3, TRBJ1-6)
CASSFSGGDSPLHF

SEQ ID NO: 785881 - protein, 12 aa, Homo sapiens
  CDR3 for alpha chain variable domain of TCR clone 392941 (TRAV1-2, TRAJ29)
CAVPSGNTPLVF

SEQ ID NO: 785882 - protein, 14 aa, Homo sapiens
  CDR3 for beta chain variable domain of TCR clone 392941 (TRBV19, TRBJ2-1)
CASPTFVLSGEQFF

SEQ ID NO: 785883 - protein, 14 aa, Homo sapiens
  CDR3 for alpha chain variable domain of TCR clone 392942 (TRAV16, TRAJ54)
CALSLIQGAQKPVS

SEQ ID NO: 785884 - protein, 17 aa, Homo sapiens
  CDR3 for beta chain variable domain of TCR clone 392942 (TRBV11-2, TRBJ2-4)
CASSSVGPGGHRNIQYF

SEQ ID NO: 785885 - protein, 13 aa, Homo sapiens
  CDR3 for alpha chain variable domain of TCR clone 392943 (TRAV27, TRAJ49)
CAPRPYTGNPFYF

SEQ ID NO: 785886 - protein, 16 aa, Homo sapiens
  CDR3 for beta chain variable domain of TCR clone 392943 (TRBV4-1, TRBJ1-2)
CASSQDAGQVLYGYTL

SEQ ID NO: 785887 - protein, 14 aa, Homo sapiens
  CDR3 for alpha chain variable domain of TCR clone 392944 (TRAV29/DV5, TRAJ36)
CAARRKTGANNLFF

SEQ ID NO: 785888 - protein, 14 aa, Homo sapiens
  CDR3 for beta chain variable domain of TCR clone 392944 (TRBV19, TRBJ1-1)
CASSIRGTGTEAFF

SEQ ID NO: 785889 - protein, 12 aa, Homo sapiens
  CDR3 for alpha chain variable domain of TCR clone 392945 (TRAV12-1, TRAJ40)
CVFYSGTYKYIF

SEQ ID NO: 785890 - protein, 13 aa, Homo sapiens
  CDR3 for beta chain variable domain of TCR clone 392945 (TRBV12-4, TRBJ2-5)
CASRLAVQETQYF

SEQ ID NO: 785891 - protein, 13 aa, Homo sapiens
  CDR3 for alpha chain variable domain of TCR clone 392946 (TRAV8-3, TRAJ28)
CAVGAVGSHQLTF

SEQ ID NO: 785892 - protein, 14 aa, Homo sapiens
  CDR3 for beta chain variable domain of TCR clone 392946 (TRBV25-1, TRBJ1-1)
CASTHLGGNTEAFF

SEQ ID NO: 785893 - protein, 11 aa, Homo sapiens
  CDR3 for alpha chain variable domain of TCR clone 392947 (TRAV2, TRAJ13)
CASGGYQKGTF

SEQ ID NO: 785894 - protein, 12 aa, Homo sapiens
  CDR3 for beta chain variable domain of TCR clone 392947 (TRBV11-2, TRBJ2-2)
YASSLPTGELFF

SEQ ID NO: 785895 - protein, 14 aa, Homo sapiens
  CDR3 for alpha chain variable domain of TCR clone 392948 (TRAV13-1, TRAJ35)
CAASKGGLGNVLHC

SEQ ID NO: 785896 - protein, 13 aa, Homo sapiens
  CDR3 for beta chain variable domain of TCR clone 392948 (TRBV7-3, TRBJ1-1)
CASSQDWGAAAFF

SEQ ID NO: 785897 - protein, 12 aa, Homo sapiens
  CDR3 for alpha chain variable domain of TCR clone 392949 (TRAV29/DV5, TRAJ34)
CAASGNTDKLIF

SEQ ID NO: 785898 - protein, 20 aa, Homo sapiens
  CDR3 for beta chain variable domain of TCR clone 392949 (TRBV19, TRBJ2-7)
CASTQVAPETLRAVLRAGHQ

SEQ ID NO: 785899 - protein, 16 aa, Homo sapiens
  CDR3 for alpha chain variable domain of TCR clone 392950 (TRAV12-2, TRAJ50)
CAVGTATKTTYDKVIF

SEQ ID NO: 785900 - protein, 12 aa, Homo sapiens
  CDR3 for beta chain variable domain of TCR clone 392950 (TRBV12-4, TRBJ1-5)
CASSLGRQPQHF

SEQ ID NO: 785901 - protein, 18 aa, Homo sapiens
  CDR3 for alpha chain variable domain of TCR clone 392951 (TRAV21, TRAJ52)
CAVRPSPAGGTSYVKLTF

SEQ ID NO: 785902 - protein, 13 aa, Homo sapiens
  CDR3 for beta chain variable domain of TCR clone 392951 (TRBV20-1, TRBJ2-5)
CSAREAFQETQYF

SEQ ID NO: 785903 - protein, 12 aa, Homo sapiens
  CDR3 for alpha chain variable domain of TCR clone 392952 (TRAV12-2, TRAJ10)
WGVTGGGNKLTV

SEQ ID NO: 785904 - protein, 14 aa, Homo sapiens
  CDR3 for beta chain variable domain of TCR clone 392952 (TRBV27, TRBJ2-7)
CASATGTERREQYF

SEQ ID NO: 785905 - protein, 12 aa, Homo sapiens
  CDR3 for alpha chain variable domain of TCR clone 392953 (TRAV17, TRAJ4)
CATDGGYNKLVF

SEQ ID NO: 785906 - protein, 13 aa, Homo sapiens
  CDR3 for beta chain variable domain of TCR clone 392953 (TRBV29-1, TRBJ2-2)
CSTTGVNTGELFF

SEQ ID NO: 785907 - protein, 16 aa, Homo sapiens
  CDR3 for alpha chain variable domain of TCR clone 392954 (TRAV12-3, TRAJ53)
CAMSPGSGGSNYNLTF

SEQ ID NO: 785908 - protein, 11 aa, Homo sapiens
  CDR3 for beta chain variable domain of TCR clone 392954 (TRBV29-1, TRBJ2-5)
CSEDRTGAQYF

SEQ ID NO: 785909 - protein, 11 aa, Homo sapiens
  CDR3 for alpha chain variable domain of TCR clone 392955 (TRAV1-1, TRAJ16)
CAAGDGQKLLF

SEQ ID NO: 785910 - protein, 16 aa, Homo sapiens
  CDR3 for beta chain variable domain of TCR clone 392955 (TRBV7-3, TRBJ2-2)
CASSLKRGTVSGELFF

SEQ ID NO: 785911 - protein, 12 aa, Homo sapiens
  CDR3 for alpha chain variable domain of TCR clone 392956 (TRAV12-3, TRAJ17)
CAMTLTGNKLTF

SEQ ID NO: 785912 - protein, 14 aa, Homo sapiens
  CDR3 for beta chain variable domain of TCR clone 392956 (TRBV5-1, TRBJ2-1)
CASSLDGDWNEQFF

SEQ ID NO: 785913 - protein, 17 aa, Homo sapiens
  CDR3 for alpha chain variable domain of TCR clone 392957 (TRAV3, TRAJ4)
CAVRDGTGGYNKLILDQ

SEQ ID NO: 785914 - protein, 13 aa, Homo sapiens
  CDR3 for beta chain variable domain of TCR clone 392957 (TRBV7-2, TRBJ1-2)
CASSSRGAYGYTF

SEQ ID NO: 785915 - protein, 14 aa, Homo sapiens
  CDR3 for alpha chain variable domain of TCR clone 392958 (TRAV4, TRAJ26)
CLVGPHNYGQNFVF

SEQ ID NO: 785916 - protein, 17 aa, Homo sapiens
  CDR3 for beta chain variable domain of TCR clone 392958 (TRBV24-1, TRBJ2-1)
CATSDVSTSGTHNEQFF

SEQ ID NO: 785917 - protein, 11 aa, Homo sapiens
  CDR3 for alpha chain variable domain of TCR clone 392959 (TRAV25, TRAJ41)
CARNSGYALNL

SEQ ID NO: 785918 - protein, 17 aa, Homo sapiens
  CDR3 for beta chain variable domain of TCR clone 392959 (TRBV20-1, TRBJ2-2)
CSASGSGQGGLTGELFF

SEQ ID NO: 785919 - protein, 15 aa, Homo sapiens
  CDR3 for alpha chain variable domain of TCR clone 392960 (TRAV13-2, TRAJ10)
CAENKIGGGGNKLTF

SEQ ID NO: 785920 - protein, 15 aa, Homo sapiens
  CDR3 for beta chain variable domain of TCR clone 392960 (TRBV5-1, TRBJ1-2)
CASSPGDRGSYGYIF

SEQ ID NO: 785921 - protein, 13 aa, Homo sapiens
  CDR3 for alpha chain variable domain of TCR clone 392961 (TRAV12-3, TRAJ7)
CAMTPYGKNRLAF

SEQ ID NO: 785922 - protein, 16 aa, Homo sapiens
  CDR3 for beta chain variable domain of TCR clone 392961 (TRBV20-1, TRBJ1-4)
CSARPYGGELNEKLFF

SEQ ID NO: 785923 - protein, 13 aa, Homo sapiens
  CDR3 for alpha chain variable domain of TCR clone 392962 (TRAV17, TRAJ54)
CATDAGGAQQLVF

SEQ ID NO: 785924 - protein, 17 aa, Homo sapiens
  CDR3 for beta chain variable domain of TCR clone 392962 (TRBV25-1, TRBJ1-6)
CASSEYIGERGNSPLHF

SEQ ID NO: 785925 - protein, 11 aa, Homo sapiens
  CDR3 for alpha chain variable domain of TCR clone 392963 (TRAV12-3, TRAJ27)
CAMANAGKSTF

SEQ ID NO: 785926 - protein, 14 aa, Homo sapiens
  CDR3 for beta chain variable domain of TCR clone 392963 (TRBV11-2, TRBJ2-7)
CASSLGAGAYEQYF

SEQ ID NO: 785927 - protein, 15 aa, Homo sapiens
  CDR3 for alpha chain variable domain of TCR clone 392964 (TRAV12-2, TRAJ5)
CAVNNEDTGRRALTF

SEQ ID NO: 785928 - protein, 13 aa, Homo sapiens
  CDR3 for beta chain variable domain of TCR clone 392964 (TRBV18, TRBJ2-5)
CASSLQGQETQYF

SEQ ID NO: 785929 - protein, 15 aa, Homo sapiens
  CDR3 for alpha chain variable domain of TCR clone 392965 (TRAV34, TRAJ38)
CGADFTPGNNRKLIW

SEQ ID NO: 785930 - protein, 15 aa, Homo sapiens
  CDR3 for beta chain variable domain of TCR clone 392965 (TRBV28, TRBJ2-7)
CASSPGGRGFYEQYF

SEQ ID NO: 785931 - protein, 14 aa, Homo sapiens
  CDR3 for alpha chain variable domain of TCR clone 392966 (TRAV16, TRAJ54)
CALSLIQGAQKLVF

SEQ ID NO: 785932 - protein, 17 aa, Homo sapiens
  CDR3 for beta chain variable domain of TCR clone 392966 (TRBV11-2, TRBJ2-4)
CASSSVGPGGHRNMQYC

SEQ ID NO: 785933 - protein, 14 aa, Homo sapiens
  CDR3 for alpha chain variable domain of TCR clone 392967 (TRAV9-2, TRAJ39)
CALYIYNAGNMPTF

SEQ ID NO: 785934 - protein, 13 aa, Homo sapiens
  CDR3 for beta chain variable domain of TCR clone 392967 (TRBV7-3, TRBJ1-5)
CASSLDSNQPRHF

SEQ ID NO: 785935 - protein, 12 aa, Homo sapiens
  CDR3 for alpha chain variable domain of TCR clone 392968 (TRAV12-3, TRAJ17)
CAMTLTGNKLTF

SEQ ID NO: 785936 - protein, 13 aa, Homo sapiens
  CDR3 for beta chain variable domain of TCR clone 392968 (TRBV18, TRBJ1-1)
CASSPGPSGEAFF

SEQ ID NO: 785937 - protein, 14 aa, Homo sapiens
  CDR3 for alpha chain variable domain of TCR clone 392969 (TRAV36/DV7, TRAJ44)
CCGANNGTASKLTF

SEQ ID NO: 785938 - protein, 16 aa, Homo sapiens
  CDR3 for beta chain variable domain of TCR clone 392969 (TRBV7-9, TRBJ1-2)
CASSLGFSSGEDGYTF

SEQ ID NO: 785939 - protein, 12 aa, Homo sapiens
  CDR3 for alpha chain variable domain of TCR clone 392970 (TRAV12-3, TRAJ20)
CAMVRGDYKLSF

SEQ ID NO: 785940 - protein, 17 aa, Homo sapiens
  CDR3 for beta chain variable domain of TCR clone 392970 (TRBV7-9, TRBJ2-3)
CASSLEEAGAYPDTQYF

SEQ ID NO: 785941 - protein, 10 aa, Homo sapiens
  CDR3 for alpha chain variable domain of TCR clone 392971 (TRAV38-2/DV8, TRAJ40)
CASGTYKYIF

SEQ ID NO: 785942 - protein, 16 aa, Homo sapiens
  CDR3 for beta chain variable domain of TCR clone 392971 (TRBV20-1, TRBJ2-7)
CSARAPGLALSYEQYF

SEQ ID NO: 785943 - protein, 13 aa, Homo sapiens
  CDR3 for alpha chain variable domain of TCR clone 392972 (TRAV20, TRAJ54)
CCAGWSGSQKLVF

SEQ ID NO: 785944 - protein, 17 aa, Homo sapiens
  CDR3 for beta chain variable domain of TCR clone 392972 (TRBV13, TRBJ2-3)
CASSLSRVAGGRNTQYF

SEQ ID NO: 785945 - protein, 16 aa, Homo sapiens
  CDR3 for alpha chain variable domain of TCR clone 392973 (TRAV14/DV4, TRAJ54)
CAMREGRIQGAQKLVF

SEQ ID NO: 785946 - protein, 14 aa, Homo sapiens
  CDR3 for beta chain variable domain of TCR clone 392973 (TRBV12-4, TRBJ1-2)
CASSPPGPGGGYTF

SEQ ID NO: 785947 - protein, 12 aa, Homo sapiens
  CDR3 for alpha chain variable domain of TCR clone 392974 (TRAV4, TRAJ26)
CLVGDYGQNFVF

SEQ ID NO: 785948 - protein, 16 aa, Homo sapiens
  CDR3 for beta chain variable domain of TCR clone 392974 (TRBV7-2, TRBJ1-2)
CASSSNQDRRGHGYTF

SEQ ID NO: 785949 - protein, 12 aa, Homo sapiens
  CDR3 for alpha chain variable domain of TCR clone 392975 (TRAV12-3, TRAJ17)
CAMTLTGNKPTF

SEQ ID NO: 785950 - protein, 15 aa, Homo sapiens
  CDR3 for beta chain variable domain of TCR clone 392975 (TRBV20-1, TRBJ2-7)
CSARDWVAGMDEQYF

SEQ ID NO: 785951 - protein, 11 aa, Homo sapiens
  CDR3 for alpha chain variable domain of TCR clone 392976 (TRAV17, TRAJ9)
CATTGGFKTIF

SEQ ID NO: 785952 - protein, 15 aa, Homo sapiens
  CDR3 for beta chain variable domain of TCR clone 392976 (TRBV9, TRBJ1-6)
CASGVAGTGDSPLHF

SEQ ID NO: 785953 - protein, 14 aa, Homo sapiens
  CDR3 for alpha chain variable domain of TCR clone 392977 (TRAV1-1, TRAJ30)
FAVRSLNRDDKIIL

SEQ ID NO: 785954 - protein, 15 aa, Homo sapiens
  CDR3 for beta chain variable domain of TCR clone 392977 (TRBV27, TRBJ1-4)
CASSAQQDLNEKLFF

SEQ ID NO: 785955 - protein, 10 aa, Homo sapiens
  CDR3 for alpha chain variable domain of TCR clone 392978 (TRAV36/DV7, TRAJ49)
CALTGNQFYF

SEQ ID NO: 785956 - protein, 16 aa, Homo sapiens
  CDR3 for beta chain variable domain of TCR clone 392978 (TRBV5-1, TRBJ1-1)
CASSSGGNSLNTEAFF

SEQ ID NO: 785957 - protein, 16 aa, Homo sapiens
  CDR3 for alpha chain variable domain of TCR clone 392979 (TRAV30, TRAJ49)
SAAQRVGPNTGNQFYF

SEQ ID NO: 785958 - protein, 15 aa, Homo sapiens
  CDR3 for beta chain variable domain of TCR clone 392979 (TRBV7-2, TRBJ2-1)
CASSSGLAGGNEQFL

SEQ ID NO: 785959 - protein, 10 aa, Homo sapiens
  CDR3 for alpha chain variable domain of TCR clone 392980 (TRAV23/DV6, TRAJ57)
CAASSTLSQV

SEQ ID NO: 785960 - protein, 19 aa, Homo sapiens
  CDR3 for beta chain variable domain of TCR clone 392980 (TRBV19, TRBJ2-2)
CASTRPGLAGGRVTGELFF

SEQ ID NO: 785961 - protein, 10 aa, Homo sapiens
  CDR3 for alpha chain variable domain of TCR clone 392981 (TRAV13-1, TRAJ21)
CAASLNKFYF

SEQ ID NO: 785962 - protein, 13 aa, Homo sapiens
  CDR3 for beta chain variable domain of TCR clone 392981 (TRBV7-9, TRBJ2-7)
CASSFYGSYELYF

SEQ ID NO: 785963 - protein, 15 aa, Homo sapiens
  CDR3 for alpha chain variable domain of TCR clone 392982 (TRAV3, TRAJ3)
CAVRDRDSSASKIIF

SEQ ID NO: 785964 - protein, 12 aa, Homo sapiens
  CDR3 for beta chain variable domain of TCR clone 392982 (TRBV28, TRBJ2-3)
CASSLYRDTQYF

SEQ ID NO: 785965 - protein, 13 aa, Homo sapiens
  CDR3 for alpha chain variable domain of TCR clone 392983 (TRAV38-1, TRAJ52)
CAFRGSSYGKLTF

SEQ ID NO: 785966 - protein, 15 aa, Homo sapiens
  CDR3 for beta chain variable domain of TCR clone 392983 (TRBV7-8, TRBJ2-5)
CASSDAAGSQETQYF

SEQ ID NO: 785967 - protein, 15 aa, Homo sapiens
  CDR3 for alpha chain variable domain of TCR clone 392984 (TRAV20, TRAJ52)
CAVQAGGTSYGKLTF

SEQ ID NO: 785968 - protein, 13 aa, Homo sapiens
  CDR3 for beta chain variable domain of TCR clone 392984 (TRBV10-3, TRBJ2-7)
CASKLAVNYEQYF

SEQ ID NO: 785969 - protein, 13 aa, Homo sapiens
  CDR3 for alpha chain variable domain of TCR clone 392985 (TRAV8-3, TRAJ6)
CAARRGGSYIPTF

SEQ ID NO: 785970 - protein, 15 aa, Homo sapiens
  CDR3 for beta chain variable domain of TCR clone 392985 (TRBV4-1, TRBJ2-3)
CASSNLAGWRDTQYF

SEQ ID NO: 785971 - protein, 16 aa, Homo sapiens
  CDR3 for alpha chain variable domain of TCR clone 392986 (TRAV26-1, TRAJ40)
CIVRVGTTSGTYKYIF

SEQ ID NO: 785972 - protein, 11 aa, Homo sapiens
  CDR3 for beta chain variable domain of TCR clone 392986 (TRBV12-4, TRBJ2-3)
CASTATDTQYF

SEQ ID NO: 785973 - protein, 11 aa, Homo sapiens
  CDR3 for alpha chain variable domain of TCR clone 392987 (TRAV3, TRAJ21)
CAVGTFNKFYF

SEQ ID NO: 785974 - protein, 15 aa, Homo sapiens
  CDR3 for beta chain variable domain of TCR clone 392987 (TRBV7-9, TRBJ1-4)
CASSARTGGNEKLFF

SEQ ID NO: 785975 - protein, 15 aa, Homo sapiens
  CDR3 for alpha chain variable domain of TCR clone 392988 (TRAV38-1, TRAJ37)
CAFIFGSGNTGKLIF

SEQ ID NO: 785976 - protein, 16 aa, Homo sapiens
  CDR3 for beta chain variable domain of TCR clone 392988 (TRBV2, TRBJ2-1)
CASSVGGSLSYNEQFF

SEQ ID NO: 785977 - protein, 14 aa, Homo sapiens
  CDR3 for alpha chain variable domain of TCR clone 392989 (TRAV12-2, TRAJ13)
CAVKKTVGYQKVTF

SEQ ID NO: 785978 - protein, 11 aa, Homo sapiens
  CDR3 for beta chain variable domain of TCR clone 392989 (TRBV29-1, TRBJ2-5)
CSEDRTGNQYF

SEQ ID NO: 785979 - protein, 14 aa, Homo sapiens
  CDR3 for alpha chain variable domain of TCR clone 392990 (TRAV16, TRAJ32)
CALKSGGATNKLIF

SEQ ID NO: 785980 - protein, 14 aa, Homo sapiens
  CDR3 for beta chain variable domain of TCR clone 392990 (TRBV25-1, TRBJ1-1)
CASTHLGGNTEAFF

SEQ ID NO: 785981 - protein, 14 aa, Homo sapiens
  CDR3 for alpha chain variable domain of TCR clone 392991 (TRAV8-3, TRAJ42)
CAVGAWGSQGNLIF

SEQ ID NO: 785982 - protein, 12 aa, Homo sapiens
  CDR3 for beta chain variable domain of TCR clone 392991 (TRBV11-2, TRBJ2-2)
CASSLGGGELFF

SEQ ID NO: 785983 - protein, 12 aa, Homo sapiens
  CDR3 for alpha chain variable domain of TCR clone 392992 (TRAV12-3, TRAJ21)
CAMFNNFNKSYF

SEQ ID NO: 785984 - protein, 14 aa, Homo sapiens
  CDR3 for beta chain variable domain of TCR clone 392992 (TRBV28, TRBJ2-1)
CASSIQGTVGEQFF

SEQ ID NO: 785985 - protein, 12 aa, Homo sapiens
  CDR3 for alpha chain variable domain of TCR clone 392993 (TRAV14/DV4, TRAJ11)
CAMSLYDSTLTF

SEQ ID NO: 785986 - protein, 12 aa, Homo sapiens
  CDR3 for beta chain variable domain of TCR clone 392993 (TRBV14, TRBJ2-7)
CASSSLKGEQYF

SEQ ID NO: 785987 - protein, 13 aa, Homo sapiens
  CDR3 for alpha chain variable domain of TCR clone 392994 (TRAV17, TRAJ7)
CATDNYGNNRLAF

SEQ ID NO: 785988 - protein, 14 aa, Homo sapiens
  CDR3 for beta chain variable domain of TCR clone 392994 (TRBV27, TRBJ2-7)
CASATGTERREQYF

SEQ ID NO: 785989 - protein, 13 aa, Homo sapiens
  CDR3 for alpha chain variable domain of TCR clone 392995 (TRAV13-1, TRAJ21)
CAASIYDFNKFYF

SEQ ID NO: 785990 - protein, 15 aa, Homo sapiens
  CDR3 for beta chain variable domain of TCR clone 392995 (TRBV9, TRBJ1-6)
CASSVAGTGDSPLHF

SEQ ID NO: 785991 - protein, 17 aa, Homo sapiens
  CDR3 for alpha chain variable domain of TCR clone 392996 (TRAV8-6, TRAJ58)
CAVSSWVGATSGSRLTF

SEQ ID NO: 785992 - protein, 17 aa, Homo sapiens
  CDR3 for beta chain variable domain of TCR clone 392996 (TRBV11-2, TRBJ2-1)
CASSLYPPGVEYNEQFF

SEQ ID NO: 785993 - protein, 17 aa, Homo sapiens
  CDR3 for alpha chain variable domain of TCR clone 392997 (TRAV9-2, TRAJ45)
CALSGYYSGGGAAGLTF

SEQ ID NO: 785994 - protein, 16 aa, Homo sapiens
  CDR3 for beta chain variable domain of TCR clone 392997 (TRBV5-7, TRBJ2-7)
PAANEGGGRGSYEQYF

SEQ ID NO: 785995 - protein, 16 aa, Homo sapiens
  CDR3 for alpha chain variable domain of TCR clone 392998 (TRAV12-2, TRAJ32)
CAVNLGQGGATNKLIF

SEQ ID NO: 785996 - protein, 15 aa, Homo sapiens
  CDR3 for beta chain variable domain of TCR clone 392998 (TRBV11-2, TRBJ2-1)
CASSLGTSGLNEQFF

SEQ ID NO: 785997 - protein, 11 aa, Homo sapiens
  CDR3 for alpha chain variable domain of TCR clone 392999 (TRAV17, TRAJ9)
CATTGGLKTIF

SEQ ID NO: 785998 - protein, 15 aa, Homo sapiens
  CDR3 for beta chain variable domain of TCR clone 392999 (TRBV7-9, TRBJ1-4)
CASSRTGGFNEKLFF

SEQ ID NO: 785999 - protein, 12 aa, Homo sapiens
  CDR3 for alpha chain variable domain of TCR clone 393000 (TRAV21, TRAJ39)
CAADNAGNMRTF

SEQ ID NO: 786000 - protein, 13 aa, Homo sapiens
  CDR3 for beta chain variable domain of TCR clone 393000 (TRBV6-1, TRBJ1-1)
CASSRQGNTEAFF

SEQ ID NO: 786001 - protein, 12 aa, Homo sapiens
  CDR3 for alpha chain variable domain of TCR clone 393001 (TRAV13-1, TRAJ21)
CAAKEGFNKFYF

SEQ ID NO: 786002 - protein, 14 aa, Homo sapiens
  CDR3 for beta chain variable domain of TCR clone 393001 (TRBV7-3, TRBJ1-1)
CASSRQGGDTEAFF

SEQ ID NO: 786003 - protein, 13 aa, Homo sapiens
  CDR3 for alpha chain variable domain of TCR clone 393002 (TRAV21, TRAJ36)
CAVITTGANNLFF

SEQ ID NO: 786004 - protein, 13 aa, Homo sapiens
  CDR3 for beta chain variable domain of TCR clone 393002 (TRBV29-1, TRBJ2-3)
CSATRGGRDTQYF

SEQ ID NO: 786005 - protein, 13 aa, Homo sapiens
  CDR3 for alpha chain variable domain of TCR clone 393003 (TRAV13-2, TRAJ48)
CAEMDFGNEKLTF

SEQ ID NO: 786006 - protein, 12 aa, Homo sapiens
  CDR3 for beta chain variable domain of TCR clone 393003 (TRBV11-2, TRBJ2-7)
CASSLPTYEQYF

SEQ ID NO: 786007 - protein, 15 aa, Homo sapiens
  CDR3 for alpha chain variable domain of TCR clone 393004 (TRAV1-2, TRAJ26)
CAVRDLITVVRILSL

SEQ ID NO: 786008 - protein, 17 aa, Homo sapiens
  CDR3 for beta chain variable domain of TCR clone 393004 (TRBV28, TRBJ2-5)
CASSRQGGLAGAETQYF

SEQ ID NO: 786009 - protein, 13 aa, Homo sapiens
  CDR3 for alpha chain variable domain of TCR clone 393005 (TRAV20, TRAJ34)
CAVSSYNADKLIF

SEQ ID NO: 786010 - protein, 15 aa, Homo sapiens
  CDR3 for beta chain variable domain of TCR clone 393005 (TRBV20-1, TRBJ1-2)
CSAAGEGARIYGYTF

SEQ ID NO: 786011 - protein, 14 aa, Homo sapiens
  CDR3 for alpha chain variable domain of TCR clone 393006 (TRAV12-2, TRAJ5)
CAVNRSTGRRALTF

SEQ ID NO: 786012 - protein, 16 aa, Homo sapiens
  CDR3 for beta chain variable domain of TCR clone 393006 (TRBV5-1, TRBJ2-2)
CASSSKLAENTGELVF

SEQ ID NO: 786013 - protein, 14 aa, Homo sapiens
  CDR3 for alpha chain variable domain of TCR clone 393007 (TRAV35, TRAJ30)
GSYPSVNRDDKLIF

SEQ ID NO: 786014 - protein, 16 aa, Homo sapiens
  CDR3 for beta chain variable domain of TCR clone 393007 (TRBV19, TRBJ1-5)
CASSIDRGGPRQPQHF

SEQ ID NO: 786015 - protein, 14 aa, Homo sapiens
  CDR3 for alpha chain variable domain of TCR clone 393008 (TRAV1-2, TRAJ16)
CAVNRFSDGQKLLF

SEQ ID NO: 786016 - protein, 14 aa, Homo sapiens
  CDR3 for beta chain variable domain of TCR clone 393008 (TRBV19, TRBJ2-2)
CASSTLHKSGELFF

SEQ ID NO: 786017 - protein, 12 aa, Homo sapiens
  CDR3 for alpha chain variable domain of TCR clone 393009 (TRAV1-1, TRAJ8)
CAGGTGFQKLVF

SEQ ID NO: 786018 - protein, 15 aa, Homo sapiens
  CDR3 for beta chain variable domain of TCR clone 393009 (TRBV20-1, TRBJ2-7)
CSASDRVSGMDEQYF

SEQ ID NO: 786019 - protein, 16 aa, Homo sapiens
  CDR3 for alpha chain variable domain of TCR clone 393010 (TRAV3, TRAJ10)
CVVRDMRAGGGNKLTF

SEQ ID NO: 786020 - protein, 14 aa, Homo sapiens
  CDR3 for beta chain variable domain of TCR clone 393010 (TRBV25-1, TRBJ1-1)
CASTHLGGNTEALF

SEQ ID NO: 786021 - protein, 13 aa, Homo sapiens
  CDR3 for alpha chain variable domain of TCR clone 393011 (TRAV21, TRAJ27)
CAARPGNAGKSTF

SEQ ID NO: 786022 - protein, 15 aa, Homo sapiens
  CDR3 for beta chain variable domain of TCR clone 393011 (TRBV18, TRBJ2-1)
CASLPDRGRDNEQFF

SEQ ID NO: 786023 - protein, 13 aa, Homo sapiens
  CDR3 for alpha chain variable domain of TCR clone 393012 (TRAV22, TRAJ29)
CAVGGSGNTPIVF

SEQ ID NO: 786024 - protein, 18 aa, Homo sapiens
  CDR3 for beta chain variable domain of TCR clone 393012 (TRBV10-3, TRBJ2-3)
CAISGSRVGPMRGDTQYF

SEQ ID NO: 786025 - protein, 11 aa, Homo sapiens
  CDR3 for alpha chain variable domain of TCR clone 393013 (TRAV12-3, TRAJ49)
CAATTGNQFYF

SEQ ID NO: 786026 - protein, 12 aa, Homo sapiens
  CDR3 for beta chain variable domain of TCR clone 393013 (TRBV6-3, TRBJ2-7)
CASSEPGFEQYF

SEQ ID NO: 786027 - protein, 16 aa, Homo sapiens
  CDR3 for alpha chain variable domain of TCR clone 393014 (TRAV23/DV6, )
CAEPDIQNPNPAVYQL

SEQ ID NO: 786028 - protein, 15 aa, Homo sapiens
  CDR3 for beta chain variable domain of TCR clone 393014 (TRBV12-4, TRBJ2-5)
CASTLNSGRGETQYF

SEQ ID NO: 786029 - protein, 13 aa, Homo sapiens
  CDR3 for alpha chain variable domain of TCR clone 393015 (TRAV3, TRAJ29)
CAVRDIRDTPLVF

SEQ ID NO: 786030 - protein, 14 aa, Homo sapiens
  CDR3 for beta chain variable domain of TCR clone 393015 (TRBV27, TRBJ2-1)
CASSATGGYNEQFF

SEQ ID NO: 786031 - protein, 13 aa, Homo sapiens
  CDR3 for alpha chain variable domain of TCR clone 393016 (TRAV2, TRAJ29)
CAAQNSGNTPLVF

SEQ ID NO: 786032 - protein, 11 aa, Homo sapiens
  CDR3 for beta chain variable domain of TCR clone 393016 (TRBV29-1, TRBJ2-5)
CSEDRTGTQYF

SEQ ID NO: 786033 - protein, 16 aa, Homo sapiens
  CDR3 for alpha chain variable domain of TCR clone 393017 (TRAV26-2, TRAJ45)
CTTASPIGGGADGLTF

SEQ ID NO: 786034 - protein, 14 aa, Homo sapiens
  CDR3 for beta chain variable domain of TCR clone 393017 (TRBV6-1, TRBJ1-3)
CASVQGGGGNTIYF

SEQ ID NO: 786035 - protein, 14 aa, Homo sapiens
  CDR3 for alpha chain variable domain of TCR clone 393018 (TRAV12-2, TRAJ13)
CAVKKTGGYQKVTF

SEQ ID NO: 786036 - protein, 16 aa, Homo sapiens
  CDR3 for beta chain variable domain of TCR clone 393018 (TRBV7-2, TRBJ1-2)
CASSPTSGTSLGGYTF

SEQ ID NO: 786037 - protein, 15 aa, Homo sapiens
  CDR3 for alpha chain variable domain of TCR clone 393019 (TRAV8-3, TRAJ45)
CASSYSGEGADGLTF

SEQ ID NO: 786038 - protein, 17 aa, Homo sapiens
  CDR3 for beta chain variable domain of TCR clone 393019 (TRBV7-8, TRBJ1-2)
CASSLRPLQGHLYGYTF

SEQ ID NO: 786039 - protein, 14 aa, Homo sapiens
  CDR3 for alpha chain variable domain of TCR clone 393020 (TRAV17, TRAJ57)
CATDPQGGSEKLVF

SEQ ID NO: 786040 - protein, 11 aa, Homo sapiens
  CDR3 for beta chain variable domain of TCR clone 393020 (TRBV6-1, TRBJ2-1)
CASRGYNEQFF

SEQ ID NO: 786041 - protein, 12 aa, Homo sapiens
  CDR3 for alpha chain variable domain of TCR clone 393021 (TRAV13-1, TRAJ21)
CAAFFNFNKFYF

SEQ ID NO: 786042 - protein, 14 aa, Homo sapiens
  CDR3 for beta chain variable domain of TCR clone 393021 (TRBV4-1, TRBJ2-7)
CASRQTSGSYEQYF

SEQ ID NO: 786043 - protein, 14 aa, Homo sapiens
  CDR3 for alpha chain variable domain of TCR clone 393022 (TRAV1-2, TRAJ17)
CALRRGAAGNKLTF

SEQ ID NO: 786044 - protein, 12 aa, Homo sapiens
  CDR3 for beta chain variable domain of TCR clone 393022 (TRBV11-2, TRBJ2-1)
CASSPGNNEQFF

SEQ ID NO: 786045 - protein, 14 aa, Homo sapiens
  CDR3 for alpha chain variable domain of TCR clone 393023 (TRAV29/DV5, TRAJ36)
CAARRKTGANNLLG

SEQ ID NO: 786046 - protein, 13 aa, Homo sapiens
  CDR3 for beta chain variable domain of TCR clone 393023 (TRBV24-1, TRBJ2-2)
CATSDWSTGELFV

SEQ ID NO: 786047 - protein, 15 aa, Homo sapiens
  CDR3 for alpha chain variable domain of TCR clone 393024 (TRAV1-2, TRAJ12)
CADARWMVSSYKLIF

SEQ ID NO: 786048 - protein, 11 aa, Homo sapiens
  CDR3 for beta chain variable domain of TCR clone 393024 (TRBV29-1, TRBJ2-5)
CSEDRTGTQYF

SEQ ID NO: 786049 - protein, 16 aa, Homo sapiens
  CDR3 for alpha chain variable domain of TCR clone 393025 (TRAV3, TRAJ37)
CAVRGKGSGNTGKLIF

SEQ ID NO: 786050 - protein, 16 aa, Homo sapiens
  CDR3 for beta chain variable domain of TCR clone 393025 (TRBV12-5, TRBJ2-5)
CASGTRTSGGQETQYF

SEQ ID NO: 786051 - protein, 15 aa, Homo sapiens
  CDR3 for alpha chain variable domain of TCR clone 393026 (TRAV26-1, TRAJ56)
CIVRVATGANSKLTF

SEQ ID NO: 786052 - protein, 15 aa, Homo sapiens
  CDR3 for beta chain variable domain of TCR clone 393026 (TRBV27, TRBJ2-7)
CASSPQREGQREQCF

SEQ ID NO: 786053 - protein, 15 aa, Homo sapiens
  CDR3 for alpha chain variable domain of TCR clone 393027 (TRAV26-1, TRAJ29)
CIVRVEGSGNTPLVF

SEQ ID NO: 786054 - protein, 12 aa, Homo sapiens
  CDR3 for beta chain variable domain of TCR clone 393027 (TRBV7-3, TRBJ2-5)
CASSSPGGTQYF

SEQ ID NO: 786055 - protein, 12 aa, Homo sapiens
  CDR3 for alpha chain variable domain of TCR clone 393028 (TRAV12-3, TRAJ40)
CAMSSGTYKYIF

SEQ ID NO: 786056 - protein, 15 aa, Homo sapiens
  CDR3 for beta chain variable domain of TCR clone 393028 (TRBV7-3, TRBJ2-2)
CASSETVQGTGELFF

SEQ ID NO: 786057 - protein, 13 aa, Homo sapiens
  CDR3 for alpha chain variable domain of TCR clone 393029 (TRAV12-3, TRAJ13)
CAMSSGGYQKVTF

SEQ ID NO: 786058 - protein, 15 aa, Homo sapiens
  CDR3 for beta chain variable domain of TCR clone 393029 (TRBV11-3, TRBJ2-3)
CASLKDGREGDTQYF

SEQ ID NO: 786059 - protein, 12 aa, Homo sapiens
  CDR3 for alpha chain variable domain of TCR clone 393030 (TRAV13-1, TRAJ27)
CAANTNAGKSTF

SEQ ID NO: 786060 - protein, 15 aa, Homo sapiens
  CDR3 for beta chain variable domain of TCR clone 393030 (TRBV7-2, TRBJ2-1)
CASSSGLAGGNEQFF

SEQ ID NO: 786061 - protein, 13 aa, Homo sapiens
  CDR3 for alpha chain variable domain of TCR clone 393031 (TRAV27, TRAJ49)
CAPRPYTGNQFYF

SEQ ID NO: 786062 - protein, 12 aa, Homo sapiens
  CDR3 for beta chain variable domain of TCR clone 393031 (TRBV28, TRBJ2-6)
CAIQAGANVLTF

SEQ ID NO: 786063 - protein, 16 aa, Homo sapiens
  CDR3 for alpha chain variable domain of TCR clone 393032 (TRAV3, TRAJ37)
CAVRGKGSGNTGKLIF

SEQ ID NO: 786064 - protein, 14 aa, Homo sapiens
  CDR3 for beta chain variable domain of TCR clone 393032 (TRBV7-2, TRBJ1-6)
CASSLQGANSPLHF

SEQ ID NO: 786065 - protein, 16 aa, Homo sapiens
  CDR3 for alpha chain variable domain of TCR clone 393033 (TRAV4, TRAJ18)
CCVLLIGGSTLGRLYF

SEQ ID NO: 786066 - protein, 12 aa, Homo sapiens
  CDR3 for beta chain variable domain of TCR clone 393033 (TRBV6-3, TRBJ2-7)
CASSLTPYEQYV

SEQ ID NO: 786067 - protein, 16 aa, Homo sapiens
  CDR3 for alpha chain variable domain of TCR clone 393034 (TRAV21, TRAJ45)
CAVSWGSGGGADGITF

SEQ ID NO: 786068 - protein, 14 aa, Homo sapiens
  CDR3 for beta chain variable domain of TCR clone 393034 (TRBV4-2, TRBJ1-2)
CASSPGGSNYGYTF

SEQ ID NO: 786069 - protein, 14 aa, Homo sapiens
  CDR3 for alpha chain variable domain of TCR clone 393035 (TRAV3, TRAJ22)
CAVRDDGSARQLTF

SEQ ID NO: 786070 - protein, 13 aa, Homo sapiens
  CDR3 for beta chain variable domain of TCR clone 393035 (TRBV11-3, TRBJ2-5)
CASGHGAKETQYF

SEQ ID NO: 786071 - protein, 16 aa, Homo sapiens
  CDR3 for alpha chain variable domain of TCR clone 393036 (TRAV35, TRAJ28)
CAGQKYSGAGSYQLTF

SEQ ID NO: 786072 - protein, 16 aa, Homo sapiens
  CDR3 for beta chain variable domain of TCR clone 393036 (TRBV7-3, TRBJ2-2)
CASSLKRGTLSGQLFF

SEQ ID NO: 786073 - protein, 12 aa, Homo sapiens
  CDR3 for alpha chain variable domain of TCR clone 393037 (TRAV13-1, TRAJ5)
CSKGHGQESTYF

SEQ ID NO: 786074 - protein, 15 aa, Homo sapiens
  CDR3 for beta chain variable domain of TCR clone 393037 (TRBV7-9, TRBJ2-7)
CASSPGGGLTYEQYF

SEQ ID NO: 786075 - protein, 20 aa, Homo sapiens
  CDR3 for alpha chain variable domain of TCR clone 393038 (TRAV6, TRAJ37)
TASQPAYSPRKAGNTGKLIF

SEQ ID NO: 786076 - protein, 13 aa, Homo sapiens
  CDR3 for beta chain variable domain of TCR clone 393038 (TRBV7-9, TRBJ1-2)
CASSLKQNYGYTF

SEQ ID NO: 786077 - protein, 17 aa, Homo sapiens
  CDR3 for alpha chain variable domain of TCR clone 393039 (TRAV14/DV4, TRAJ28)
RAMREVSSGAGSYQLTF

SEQ ID NO: 786078 - protein, 15 aa, Homo sapiens
  CDR3 for beta chain variable domain of TCR clone 393039 (TRBV11-2, TRBJ1-6)
CASTLRETGNSPLHF

SEQ ID NO: 786079 - protein, 15 aa, Homo sapiens
  CDR3 for alpha chain variable domain of TCR clone 393040 (TRAV2, TRAJ15)
CAVEDRGQAGTALIF

SEQ ID NO: 786080 - protein, 13 aa, Homo sapiens
  CDR3 for beta chain variable domain of TCR clone 393040 (TRBV10-2, TRBJ2-7)
CVSGASGGYEQYF

SEQ ID NO: 786081 - protein, 14 aa, Homo sapiens
  CDR3 for alpha chain variable domain of TCR clone 393041 (TRAV12-1, TRAJ17)
CVVNYTAAGNKITF

SEQ ID NO: 786082 - protein, 17 aa, Homo sapiens
  CDR3 for beta chain variable domain of TCR clone 393041 (TRBV20-1, TRBJ2-1)
CSASSSGLAGSYNEQFF

SEQ ID NO: 786083 - protein, 15 aa, Homo sapiens
  CDR3 for alpha chain variable domain of TCR clone 393042 (TRAV17, TRAJ16)
CATALRFSDGQKLLF

SEQ ID NO: 786084 - protein, 15 aa, Homo sapiens
  CDR3 for beta chain variable domain of TCR clone 393042 (TRBV20-1, TRBJ1-1)
CSASREVTGNTEAFF

SEQ ID NO: 786085 - protein, 17 aa, Homo sapiens
  CDR3 for alpha chain variable domain of TCR clone 393043 (TRAV13-1, TRAJ28)
CAASPPYSGAGSYQLTF

SEQ ID NO: 786086 - protein, 14 aa, Homo sapiens
  CDR3 for beta chain variable domain of TCR clone 393043 (TRBV24-1, TRBJ1-1)
CATSILRGDTEAFF

SEQ ID NO: 786087 - protein, 14 aa, Homo sapiens
  CDR3 for alpha chain variable domain of TCR clone 393044 (TRAV12-1, TRAJ24)
CVVGSTDSWGQFQF

SEQ ID NO: 786088 - protein, 13 aa, Homo sapiens
  CDR3 for beta chain variable domain of TCR clone 393044 (TRBV2, TRBJ2-3)
CASILAGGQGQYF

SEQ ID NO: 786089 - protein, 16 aa, Homo sapiens
  CDR3 for alpha chain variable domain of TCR clone 393045 (TRAV8-3, TRAJ8)
CAVPRDGNKGFQKIVF

SEQ ID NO: 786090 - protein, 14 aa, Homo sapiens
  CDR3 for beta chain variable domain of TCR clone 393045 (TRBV28, TRBJ1-1)
CASSESGRGTEAFF

SEQ ID NO: 786091 - protein, 10 aa, Homo sapiens
  CDR3 for alpha chain variable domain of TCR clone 393046 (TRAV12-3, TRAJ49)
CAMNDDQFYF

SEQ ID NO: 786092 - protein, 13 aa, Homo sapiens
  CDR3 for beta chain variable domain of TCR clone 393046 (TRBV11-2, TRBJ1-6)
CASSLAGVSPLHF

SEQ ID NO: 786093 - protein, 12 aa, Homo sapiens
  CDR3 for alpha chain variable domain of TCR clone 393047 (TRAV9-2, TRAJ40)
CALTSGTYRYIF

SEQ ID NO: 786094 - protein, 16 aa, Homo sapiens
  CDR3 for beta chain variable domain of TCR clone 393047 (TRBV7-7, TRBJ2-2)
CASSPRTGLNTGELFF

SEQ ID NO: 786095 - protein, 16 aa, Homo sapiens
  CDR3 for alpha chain variable domain of TCR clone 393048 (TRAV3, TRAJ32)
CAVRDMGGGATKKLIF

SEQ ID NO: 786096 - protein, 11 aa, Homo sapiens
  CDR3 for beta chain variable domain of TCR clone 393048 (TRBV12-4, TRBJ2-1)
CASSRLNEQFF

SEQ ID NO: 786097 - protein, 12 aa, Homo sapiens
  CDR3 for alpha chain variable domain of TCR clone 393049 (TRAV16, TRAJ9)
CALSSGGFKTIF

SEQ ID NO: 786098 - protein, 14 aa, Homo sapiens
  CDR3 for beta chain variable domain of TCR clone 393049 (TRBV7-9, TRBJ2-1)
CASSLAGPDNEQFF

SEQ ID NO: 786099 - protein, 13 aa, Homo sapiens
  CDR3 for alpha chain variable domain of TCR clone 393050 (TRAV35, TRAJ4)
CAGRDGGYNKLIF

SEQ ID NO: 786100 - protein, 12 aa, Homo sapiens
  CDR3 for beta chain variable domain of TCR clone 393050 (TRBV11-2, TRBJ2-2)
CASSLGGGELFF

SEQ ID NO: 786101 - protein, 11 aa, Homo sapiens
  CDR3 for alpha chain variable domain of TCR clone 393051 (TRAV2, TRAJ33)
CAVDSNYQLIW

SEQ ID NO: 786102 - protein, 14 aa, Homo sapiens
  CDR3 for beta chain variable domain of TCR clone 393051 (TRBV4-1, TRBJ1-1)
CASSRSGQSFEAFF

SEQ ID NO: 786103 - protein, 14 aa, Homo sapiens
  CDR3 for alpha chain variable domain of TCR clone 393052 (TRAV13-1, TRAJ44)
CAAKATDTASKLTF

SEQ ID NO: 786104 - protein, 14 aa, Homo sapiens
  CDR3 for beta chain variable domain of TCR clone 393052 (TRBV19, TRBJ2-2)
CASSTLHRSGELFF

SEQ ID NO: 786105 - protein, 15 aa, Homo sapiens
  CDR3 for alpha chain variable domain of TCR clone 393053 (TRAV38-1, TRAJ37)
CAFIFASGNTGKLIF

SEQ ID NO: 786106 - protein, 11 aa, Homo sapiens
  CDR3 for beta chain variable domain of TCR clone 393053 (TRBV12-4, TRBJ2-3)
CASTATDTQYF

SEQ ID NO: 786107 - protein, 13 aa, Homo sapiens
  CDR3 for alpha chain variable domain of TCR clone 393054 (TRAV13-2, TRAJ10)
CAENTGGGNKLTF

SEQ ID NO: 786108 - protein, 15 aa, Homo sapiens
  CDR3 for beta chain variable domain of TCR clone 393054 (TRBV12-4, TRBJ2-2)
CASSRQGANTGELSF

SEQ ID NO: 786109 - protein, 14 aa, Homo sapiens
  CDR3 for alpha chain variable domain of TCR clone 393055 (TRAV12-3, TRAJ29)
CAMILLSGNTPLVF

SEQ ID NO: 786110 - protein, 20 aa, Homo sapiens
  CDR3 for beta chain variable domain of TCR clone 393055 (TRBV7-8, TRBJ2-2)
CASSHLFPGPTIHITGELFF

SEQ ID NO: 786111 - protein, 11 aa, Homo sapiens
  CDR3 for alpha chain variable domain of TCR clone 393056 (TRAV3, TRAJ21)
CAVGNFNKFYF

SEQ ID NO: 786112 - protein, 15 aa, Homo sapiens
  CDR3 for beta chain variable domain of TCR clone 393056 (TRBV29-1, TRBJ2-1)
CSVEGGPASYNEQIF

SEQ ID NO: 786113 - protein, 17 aa, Homo sapiens
  CDR3 for alpha chain variable domain of TCR clone 393057 (TRAV12-2, TRAJ52)
CAMNPYAGGTSYGKLTF

SEQ ID NO: 786114 - protein, 13 aa, Homo sapiens
  CDR3 for beta chain variable domain of TCR clone 393057 (TRBV7-9, TRBJ1-2)
CASSLKQNYGYTF

SEQ ID NO: 786115 - protein, 14 aa, Homo sapiens
  CDR3 for alpha chain variable domain of TCR clone 393058 (TRAV1-2, TRAJ29)
CAVRELTSATPLDF

SEQ ID NO: 786116 - protein, 16 aa, Homo sapiens
  CDR3 for beta chain variable domain of TCR clone 393058 (TRBV19, TRBJ1-5)
CASSTWAGGGKQPQHF

SEQ ID NO: 786117 - protein, 15 aa, Homo sapiens
  CDR3 for alpha chain variable domain of TCR clone 393059 (TRAV34, TRAJ38)
CGADVTPGNNRKLIW

SEQ ID NO: 786118 - protein, 16 aa, Homo sapiens
  CDR3 for beta chain variable domain of TCR clone 393059 (TRBV12-5, TRBJ2-5)
CASGPRTSGNQETQYF

SEQ ID NO: 786119 - protein, 13 aa, Homo sapiens
  CDR3 for alpha chain variable domain of TCR clone 393060 (TRAV12-1, TRAJ43)
CVVSHHNNNEMRF

SEQ ID NO: 786120 - protein, 14 aa, Homo sapiens
  CDR3 for beta chain variable domain of TCR clone 393060 (TRBV5-5, TRBJ2-2)
CASSLLGDTGELFF

SEQ ID NO: 786121 - protein, 16 aa, Homo sapiens
  CDR3 for alpha chain variable domain of TCR clone 393061 (TRAV8-6, TRAJ54)
CAVSGSQNQGAQKLVF

SEQ ID NO: 786122 - protein, 13 aa, Homo sapiens
  CDR3 for beta chain variable domain of TCR clone 393061 (TRBV7-3, TRBJ1-1)
CASSQDWGAEASF

SEQ ID NO: 786123 - protein, 16 aa, Homo sapiens
  CDR3 for alpha chain variable domain of TCR clone 393062 (TRAV12-2, TRAJ10)
CAVNRVLTGGGNKLTF

SEQ ID NO: 786124 - protein, 17 aa, Homo sapiens
  CDR3 for beta chain variable domain of TCR clone 393062 (TRBV4-1, TRBJ1-4)
CASSQEGPPGVEEKLFF

SEQ ID NO: 786125 - protein, 15 aa, Homo sapiens
  CDR3 for alpha chain variable domain of TCR clone 393063 (TRAV12-3, TRAJ6)
CAMSAPSGGSYIPTF

SEQ ID NO: 786126 - protein, 13 aa, Homo sapiens
  CDR3 for beta chain variable domain of TCR clone 393063 (TRBV7-9, TRBJ1-2)
CASSLKQNYGYTF

SEQ ID NO: 786127 - protein, 11 aa, Homo sapiens
  CDR3 for alpha chain variable domain of TCR clone 393064 (TRAV3, TRAJ21)
CAVGNFNKFYF

SEQ ID NO: 786128 - protein, 16 aa, Homo sapiens
  CDR3 for beta chain variable domain of TCR clone 393064 (TRBV7-6, TRBJ2-1)
CASSAPGRSSYNEQFF

SEQ ID NO: 786129 - protein, 14 aa, Homo sapiens
  CDR3 for alpha chain variable domain of TCR clone 393065 (TRAV34, TRAJ44)
CGADGTGTASKLTF

SEQ ID NO: 786130 - protein, 15 aa, Homo sapiens
  CDR3 for beta chain variable domain of TCR clone 393065 (TRBV5-1, TRBJ2-1)
CASTGSGRTYNEQSF

SEQ ID NO: 786131 - protein, 13 aa, Homo sapiens
  CDR3 for alpha chain variable domain of TCR clone 393066 (TRAV21, TRAJ27)
CAARPGNAGKSTF

SEQ ID NO: 786132 - protein, 15 aa, Homo sapiens
  CDR3 for beta chain variable domain of TCR clone 393066 (TRBV7-2, TRBJ2-5)
CASSFLRGGEETQYF

SEQ ID NO: 786133 - protein, 16 aa, Homo sapiens
  CDR3 for alpha chain variable domain of TCR clone 393067 (TRAV3, TRAJ37)
CAVRGKGSGNTGKLIF

SEQ ID NO: 786134 - protein, 15 aa, Homo sapiens
  CDR3 for beta chain variable domain of TCR clone 393067 (TRBV20-1, TRBJ1-1)
CSASRGVTGNTEAFF

SEQ ID NO: 786135 - protein, 16 aa, Homo sapiens
  CDR3 for alpha chain variable domain of TCR clone 393068 (TRAV30, TRAJ24)
CGTEIVDADSWGKFQF

SEQ ID NO: 786136 - protein, 20 aa, Homo sapiens
  CDR3 for beta chain variable domain of TCR clone 393068 (TRBV4-1, TRBJ2-2)
CASGQASPPGLASNTGELFF

SEQ ID NO: 786137 - protein, 11 aa, Homo sapiens
  CDR3 for alpha chain variable domain of TCR clone 393069 (TRAV30, TRAJ24)
VDADSWGKFQF

SEQ ID NO: 786138 - protein, 17 aa, Homo sapiens
  CDR3 for beta chain variable domain of TCR clone 393069 (TRBV20-1, TRBJ2-1)
CSASSSGLAGSYNEQFF

SEQ ID NO: 786139 - protein, 15 aa, Homo sapiens
  CDR3 for alpha chain variable domain of TCR clone 393070 (TRAV12-1, TRAJ40)
CVVTRDTSGTYKYIF

SEQ ID NO: 786140 - protein, 13 aa, Homo sapiens
  CDR3 for beta chain variable domain of TCR clone 393070 (TRBV6-1, TRBJ2-1)
CASEGSSYNEQFF

SEQ ID NO: 786141 - protein, 15 aa, Homo sapiens
  CDR3 for alpha chain variable domain of TCR clone 393071 (TRAV12-1, TRAJ44)
CVADLPTGTASKLTF

SEQ ID NO: 786142 - protein, 15 aa, Homo sapiens
  CDR3 for beta chain variable domain of TCR clone 393071 (TRBV7-2, TRBJ2-1)
CASSSGLAGGNEQFF

SEQ ID NO: 786143 - protein, 15 aa, Homo sapiens
  CDR3 for alpha chain variable domain of TCR clone 393072 (TRAV17, TRAJ42)
CATDHYGGSQGNLIF

SEQ ID NO: 786144 - protein, 14 aa, Homo sapiens
  CDR3 for beta chain variable domain of TCR clone 393072 (TRBV19, TRBJ2-5)
CASSIEHSQGTQYF

SEQ ID NO: 786145 - protein, 14 aa, Homo sapiens
  CDR3 for alpha chain variable domain of TCR clone 393073 (TRAV13-2, TRAJ10)
CAETFTGGGNKLLF

SEQ ID NO: 786146 - protein, 16 aa, Homo sapiens
  CDR3 for beta chain variable domain of TCR clone 393073 (TRBV18, TRBJ2-7)
CASSPRSQGISYEQYF

SEQ ID NO: 786147 - protein, 18 aa, Homo sapiens
  CDR3 for alpha chain variable domain of TCR clone 393074 (TRAV26-1, TRAJ52)
CIVRVAGAGGTSYGKPTF

SEQ ID NO: 786148 - protein, 13 aa, Homo sapiens
  CDR3 for beta chain variable domain of TCR clone 393074 (TRBV7-8, TRBJ1-2)
CASSAQSYYGYTF

SEQ ID NO: 786149 - protein, 16 aa, Homo sapiens
  CDR3 for alpha chain variable domain of TCR clone 393075 (TRAV8-3, TRAJ13)
CAVGAYPSGGYQKVTF

SEQ ID NO: 786150 - protein, 13 aa, Homo sapiens
  CDR3 for beta chain variable domain of TCR clone 393075 (TRBV2, TRBJ2-2)
CASNRQNTGELFF

SEQ ID NO: 786151 - protein, 14 aa, Homo sapiens
  CDR3 for alpha chain variable domain of TCR clone 393076 (TRAV16, TRAJ17)
CALSGRAAGNKLTF

SEQ ID NO: 786152 - protein, 15 aa, Homo sapiens
  CDR3 for beta chain variable domain of TCR clone 393076 (TRBV3-1, TRBJ1-2)
CASSPTRLTEGGYTF

SEQ ID NO: 786153 - protein, 11 aa, Homo sapiens
  CDR3 for alpha chain variable domain of TCR clone 393077 (TRAV12-2, TRAJ33)
CAVGSNYQLIW

SEQ ID NO: 786154 - protein, 14 aa, Homo sapiens
  CDR3 for beta chain variable domain of TCR clone 393077 (TRBV6-1, TRBJ2-2)
CDSVEHIESGELFF

SEQ ID NO: 786155 - protein, 13 aa, Homo sapiens
  CDR3 for alpha chain variable domain of TCR clone 393078 (TRAV30, TRAJ24)
CGTVTDSWRKLQF

SEQ ID NO: 786156 - protein, 14 aa, Homo sapiens
  CDR3 for beta chain variable domain of TCR clone 393078 (TRBV6-3, TRBJ2-2)
CASTYTPDTGELFF

SEQ ID NO: 786157 - protein, 14 aa, Homo sapiens
  CDR3 for alpha chain variable domain of TCR clone 393079 (TRAV17, TRAJ57)
CATDPQGGSEKLVF

SEQ ID NO: 786158 - protein, 15 aa, Homo sapiens
  CDR3 for beta chain variable domain of TCR clone 393079 (TRBV6-6, TRBJ2-7)
CASSYSYGGSYEQYF

SEQ ID NO: 786159 - protein, 15 aa, Homo sapiens
  CDR3 for alpha chain variable domain of TCR clone 393080 (TRAV29/DV5, TRAJ53)
CAASASGGSNYKLTF

SEQ ID NO: 786160 - protein, 19 aa, Homo sapiens
  CDR3 for beta chain variable domain of TCR clone 393080 (TRBV5-1, TRBJ2-3)
CASSLWLAGGITTTDTQYL

SEQ ID NO: 786161 - protein, 14 aa, Homo sapiens
  CDR3 for alpha chain variable domain of TCR clone 393081 (TRAV2, TRAJ9)
CAVEDRSGGFKTIF

SEQ ID NO: 786162 - protein, 16 aa, Homo sapiens
  CDR3 for beta chain variable domain of TCR clone 393081 (TRBV12-4, TRBJ2-2)
CASSSQVGGPGGELFF

SEQ ID NO: 786163 - protein, 11 aa, Homo sapiens
  CDR3 for alpha chain variable domain of TCR clone 393082 (TRAV4, TRAJ31)
CLVGDNARLMF

SEQ ID NO: 786164 - protein, 17 aa, Homo sapiens
  CDR3 for beta chain variable domain of TCR clone 393082 (TRBV3-1, TRBJ2-7)
CASSQDLTGLSSYEQYF

SEQ ID NO: 786165 - protein, 14 aa, Homo sapiens
  CDR3 for alpha chain variable domain of TCR clone 393083 (TRAV35, TRAJ24)
CAGPRRDSWGKLQF

SEQ ID NO: 786166 - protein, 12 aa, Homo sapiens
  CDR3 for beta chain variable domain of TCR clone 393083 (TRBV12-4, TRBJ2-3)
CASSLVQDTQYF

SEQ ID NO: 786167 - protein, 17 aa, Homo sapiens
  CDR3 for alpha chain variable domain of TCR clone 393084 (TRAV17, TRAJ48)
CFLLLCYGRTGNEKLTF

SEQ ID NO: 786168 - protein, 14 aa, Homo sapiens
  CDR3 for beta chain variable domain of TCR clone 393084 (TRBV4-1, TRBJ2-7)
CASSPVAGGDEQYF

SEQ ID NO: 786169 - protein, 12 aa, Homo sapiens
  CDR3 for alpha chain variable domain of TCR clone 393085 (TRAV27, TRAJ35)
CAGADFGNVLHC

SEQ ID NO: 786170 - protein, 16 aa, Homo sapiens
  CDR3 for beta chain variable domain of TCR clone 393085 (TRBV6-1, TRBJ2-1)
CASILRQGSSYNEQFC

SEQ ID NO: 786171 - protein, 13 aa, Homo sapiens
  CDR3 for alpha chain variable domain of TCR clone 393086 (TRAV2, TRAJ5)
CAVPDTGRRALTF

SEQ ID NO: 786172 - protein, 15 aa, Homo sapiens
  CDR3 for beta chain variable domain of TCR clone 393086 (TRBV7-2, TRBJ2-2)
CASSTRTGDTGELFF

SEQ ID NO: 786173 - protein, 11 aa, Homo sapiens
  CDR3 for alpha chain variable domain of TCR clone 393087 (TRAV26-1, TRAJ37)
CIVRVGRKLIF

SEQ ID NO: 786174 - protein, 15 aa, Homo sapiens
  CDR3 for beta chain variable domain of TCR clone 393087 (TRBV19, TRBJ1-1)
CASMGFRDVNTEAFF

SEQ ID NO: 786175 - protein, 15 aa, Homo sapiens
  CDR3 for alpha chain variable domain of TCR clone 393088 (TRAV13-1, TRAJ10)
CAATLLTGGGNKLTF

SEQ ID NO: 786176 - protein, 15 aa, Homo sapiens
  CDR3 for beta chain variable domain of TCR clone 393088 (TRBV2, TRBJ2-7)
CASTLLGSGATEQYF

SEQ ID NO: 786177 - protein, 13 aa, Homo sapiens
  CDR3 for alpha chain variable domain of TCR clone 393089 (TRAV13-1, TRAJ37)
CAARSGNTGKLIF

SEQ ID NO: 786178 - protein, 14 aa, Homo sapiens
  CDR3 for beta chain variable domain of TCR clone 393089 (TRBV19, TRBJ2-1)
CASPTFVLSGEQFF

SEQ ID NO: 786179 - protein, 16 aa, Homo sapiens
  CDR3 for alpha chain variable domain of TCR clone 393090 (TRAV13-1, TRAJ48)
CAASIFGNFGNEKLTF

SEQ ID NO: 786180 - protein, 12 aa, Homo sapiens
  CDR3 for beta chain variable domain of TCR clone 393090 (TRBV7-9, TRBJ2-7)
CASSFGSYEQYF

SEQ ID NO: 786181 - protein, 13 aa, Homo sapiens
  CDR3 for alpha chain variable domain of TCR clone 393091 (TRAV13-2, TRAJ15)
CAESNQAGTALIF

SEQ ID NO: 786182 - protein, 12 aa, Homo sapiens
  CDR3 for beta chain variable domain of TCR clone 393091 (TRBV18, TRBJ2-1)
CASSSDEDEQFF

SEQ ID NO: 786183 - protein, 12 aa, Homo sapiens
  CDR3 for alpha chain variable domain of TCR clone 393092 (TRAV26-1, TRAJ17)
CISQSCRQRANF

SEQ ID NO: 786184 - protein, 16 aa, Homo sapiens
  CDR3 for beta chain variable domain of TCR clone 393092 (TRBV28, TRBJ1-4)
CASSSRTGAANEKLFF

SEQ ID NO: 786185 - protein, 17 aa, Homo sapiens
  CDR3 for alpha chain variable domain of TCR clone 393093 (TRAV3, TRAJ6)
CALRDGPRAGGSYIPTL

SEQ ID NO: 786186 - protein, 14 aa, Homo sapiens
  CDR3 for beta chain variable domain of TCR clone 393093 (TRBV7-2, TRBJ2-7)
CASSPKTSFYEQYF

SEQ ID NO: 786187 - protein, 15 aa, Homo sapiens
  CDR3 for alpha chain variable domain of TCR clone 393094 (TRAV13-2, TRAJ10)
CAENKIGGGGNKLTF

SEQ ID NO: 786188 - protein, 13 aa, Homo sapiens
  CDR3 for beta chain variable domain of TCR clone 393094 (TRBV14, TRBJ2-7)
CASSPRRPYEQYF

SEQ ID NO: 786189 - protein, 12 aa, Homo sapiens
  CDR3 for alpha chain variable domain of TCR clone 393095 (TRAV3, TRAJ20)
CAVRDPDYKLSF

SEQ ID NO: 786190 - protein, 14 aa, Homo sapiens
  CDR3 for beta chain variable domain of TCR clone 393095 (TRBV7-2, TRBJ2-7)
CASSPKTSFYEQYL

SEQ ID NO: 786191 - protein, 14 aa, Homo sapiens
  CDR3 for alpha chain variable domain of TCR clone 393096 (TRAV17, TRAJ53)
CATDAGGSTYKLTF

SEQ ID NO: 786192 - protein, 16 aa, Homo sapiens
  CDR3 for beta chain variable domain of TCR clone 393096 (TRBV4-1, TRBJ1-1)
CASSQDAGMGNTEAFF

SEQ ID NO: 786193 - protein, 17 aa, Homo sapiens
  CDR3 for alpha chain variable domain of TCR clone 393097 (TRAV3, TRAJ6)
RAVRDGPRARGSYIPTF

SEQ ID NO: 786194 - protein, 14 aa, Homo sapiens
  CDR3 for beta chain variable domain of TCR clone 393097 (TRBV7-2, TRBJ2-7)
CASSPKTSFYEQYF

SEQ ID NO: 786195 - protein, 14 aa, Homo sapiens
  CDR3 for alpha chain variable domain of TCR clone 393098 (TRAV23/DV6, TRAJ22)
CADISSGSARQLTF

SEQ ID NO: 786196 - protein, 15 aa, Homo sapiens
  CDR3 for beta chain variable domain of TCR clone 393098 (TRBV27, TRBJ2-1)
CASSNWGGSSNEQFF

SEQ ID NO: 786197 - protein, 13 aa, Homo sapiens
  CDR3 for alpha chain variable domain of TCR clone 393099 (TRAV39, TRAJ48)
CAAVNCGNEKLTF

SEQ ID NO: 786198 - protein, 12 aa, Homo sapiens
  CDR3 for beta chain variable domain of TCR clone 393099 (TRBV5-5, TRBJ2-5)
CASSYFGETQYF

SEQ ID NO: 786199 - protein, 11 aa, Homo sapiens
  CDR3 for alpha chain variable domain of TCR clone 393100 (TRAV3, TRAJ21)
CAVGNFNKFYF

SEQ ID NO: 786200 - protein, 17 aa, Homo sapiens
  CDR3 for beta chain variable domain of TCR clone 393100 (TRBV7-2, TRBJ2-3)
CASSARSSGSPTDTQYV

SEQ ID NO: 786201 - protein, 16 aa, Homo sapiens
  CDR3 for alpha chain variable domain of TCR clone 393101 (TRAV3, TRAJ37)
CAVRPHGSVNTGKLIF

SEQ ID NO: 786202 - protein, 14 aa, Homo sapiens
  CDR3 for beta chain variable domain of TCR clone 393101 (TRBV25-1, TRBJ1-1)
CASIHLGGNTEAFF

SEQ ID NO: 786203 - protein, 12 aa, Homo sapiens
  CDR3 for alpha chain variable domain of TCR clone 393102 (TRAV4, TRAJ6)
CLAPVGSYIPTF

SEQ ID NO: 786204 - protein, 18 aa, Homo sapiens
  CDR3 for beta chain variable domain of TCR clone 393102 (TRBV20-1, TRBJ2-3)
CSASGLAGGPGTTDTQYF

SEQ ID NO: 786205 - protein, 15 aa, Homo sapiens
  CDR3 for alpha chain variable domain of TCR clone 393103 (TRAV2, TRAJ15)
CAVEDRGQAGTALIF

SEQ ID NO: 786206 - protein, 16 aa, Homo sapiens
  CDR3 for beta chain variable domain of TCR clone 393103 (TRBV4-2, TRBJ1-1)
CASSQAGFGMNTEAFF

SEQ ID NO: 786207 - protein, 17 aa, Homo sapiens
  CDR3 for alpha chain variable domain of TCR clone 393104 (TRAV3, TRAJ6)
CAVRDGPRAGGSYIPTF

SEQ ID NO: 786208 - protein, 11 aa, Homo sapiens
  CDR3 for beta chain variable domain of TCR clone 393104 (TRBV7-9, TRBJ2-3)
CASSYTDTQYF

SEQ ID NO: 786209 - protein, 12 aa, Homo sapiens
  CDR3 for alpha chain variable domain of TCR clone 393105 (TRAV3, TRAJ20)
CAVRDPDYKLSF

SEQ ID NO: 786210 - protein, 14 aa, Homo sapiens
  CDR3 for beta chain variable domain of TCR clone 393105 (TRBV4-2, TRBJ2-1)
CASGPDRAYNEKFF

SEQ ID NO: 786211 - protein, 16 aa, Homo sapiens
  CDR3 for alpha chain variable domain of TCR clone 393106 (TRAV27, TRAJ53)
CAAPEGSGGSNYKPTF

SEQ ID NO: 786212 - protein, 14 aa, Homo sapiens
  CDR3 for beta chain variable domain of TCR clone 393106 (TRBV4-3, TRBJ1-5)
CASSQGGQGWPQHF

SEQ ID NO: 786213 - protein, 15 aa, Homo sapiens
  CDR3 for alpha chain variable domain of TCR clone 393107 (TRAV40, TRAJ48)
CLLFISNFGNEKLTF

SEQ ID NO: 786214 - protein, 13 aa, Homo sapiens
  CDR3 for beta chain variable domain of TCR clone 393107 (TRBV19, TRBJ1-5)
CASSINFNQHQHF

SEQ ID NO: 786215 - protein, 14 aa, Homo sapiens
  CDR3 for alpha chain variable domain of TCR clone 393108 (TRAV21, TRAJ35)
CAVMPIGFGNVLHV

SEQ ID NO: 786216 - protein, 12 aa, Homo sapiens
  CDR3 for beta chain variable domain of TCR clone 393108 (TRBV7-9, TRBJ2-7)
CASSIKREEQYF

SEQ ID NO: 786217 - protein, 14 aa, Homo sapiens
  CDR3 for alpha chain variable domain of TCR clone 393109 (TRAV38-2/DV8, TRAJ29)
CAYRSRSGNTPLVV

SEQ ID NO: 786218 - protein, 14 aa, Homo sapiens
  CDR3 for beta chain variable domain of TCR clone 393109 (TRBV12-4, TRBJ2-3)
CASTIAGWGDTQYF

SEQ ID NO: 786219 - protein, 11 aa, Homo sapiens
  CDR3 for alpha chain variable domain of TCR clone 393110 (TRAV3, TRAJ21)
CAVGNFNKFYF

SEQ ID NO: 786220 - protein, 16 aa, Homo sapiens
  CDR3 for beta chain variable domain of TCR clone 393110 (TRBV4-3, TRBJ2-1)
CASSPALDRGVNEQFF

SEQ ID NO: 786221 - protein, 23 aa, Homo sapiens
  CDR3 for alpha chain variable domain of TCR clone 393111 (TRAV26-1, TRAJ38)
CIADNAGNNHIQNPDPAVYQLRD

SEQ ID NO: 786222 - protein, 15 aa, Homo sapiens
  CDR3 for beta chain variable domain of TCR clone 393111 (TRBV19, TRBJ2-1)
CASSNGGGSSNEQFF

SEQ ID NO: 786223 - protein, 14 aa, Homo sapiens
  CDR3 for alpha chain variable domain of TCR clone 393112 (TRAV8-4, TRAJ13)
CAVTLSGGYQKLTF

SEQ ID NO: 786224 - protein, 14 aa, Homo sapiens
  CDR3 for beta chain variable domain of TCR clone 393112 (TRBV7-2, TRBJ1-2)
CASSQTGSTYGYTF

SEQ ID NO: 786225 - protein, 14 aa, Homo sapiens
  CDR3 for alpha chain variable domain of TCR clone 393113 (TRAV12-1, TRAJ12)
CVVTRMDSSYKLIF

SEQ ID NO: 786226 - protein, 13 aa, Homo sapiens
  CDR3 for beta chain variable domain of TCR clone 393113 (TRBV20-1, TRBJ1-1)
CSAIGGGNTEAFF

SEQ ID NO: 786227 - protein, 15 aa, Homo sapiens
  CDR3 for alpha chain variable domain of TCR clone 393114 (TRAV8-3, TRAJ27)
CAVGPSKTNAGKSTF

SEQ ID NO: 786228 - protein, 15 aa, Homo sapiens
  CDR3 for beta chain variable domain of TCR clone 393114 (TRBV7-2, TRBJ2-1)
CARSSGIAGGNEQFF

SEQ ID NO: 786229 - protein, 14 aa, Homo sapiens
  CDR3 for alpha chain variable domain of TCR clone 393115 (TRAV8-1, TRAJ5)
CAVRTDTGRRALIF

SEQ ID NO: 786230 - protein, 14 aa, Homo sapiens
  CDR3 for beta chain variable domain of TCR clone 393115 (TRBV5-5, TRBJ1-2)
CASSLDPYNYGYTF

SEQ ID NO: 786231 - protein, 14 aa, Homo sapiens
  CDR3 for alpha chain variable domain of TCR clone 393116 (TRAV12-2, TRAJ17)
CAVNIKAAGNKLTF

SEQ ID NO: 786232 - protein, 16 aa, Homo sapiens
  CDR3 for beta chain variable domain of TCR clone 393116 (TRBV20-1, TRBJ2-6)
CSASYQGYDGANVLTF

SEQ ID NO: 786233 - protein, 16 aa, Homo sapiens
  CDR3 for alpha chain variable domain of TCR clone 393117 (TRAV8-3, TRAJ28)
CAVPPQRGAGSYQLTF

SEQ ID NO: 786234 - protein, 15 aa, Homo sapiens
  CDR3 for beta chain variable domain of TCR clone 393117 (TRBV5-1, TRBJ2-2)
CASSSQGGNTGELFF

SEQ ID NO: 786235 - protein, 15 aa, Homo sapiens
  CDR3 for alpha chain variable domain of TCR clone 393118 (TRAV26-1, TRAJ56)
CIVRMATGANSKLTF

SEQ ID NO: 786236 - protein, 15 aa, Homo sapiens
  CDR3 for beta chain variable domain of TCR clone 393118 (TRBV27, TRBJ2-7)
CASSPQREGQREQYF

SEQ ID NO: 786237 - protein, 13 aa, Homo sapiens
  CDR3 for alpha chain variable domain of TCR clone 393119 (TRAV12-2, TRAJ20)
CAVYPSNDYKLSF

SEQ ID NO: 786238 - protein, 17 aa, Homo sapiens
  CDR3 for beta chain variable domain of TCR clone 393119 (TRBV10-2, TRBJ1-6)
CASSENRGSSYNSPLHF

SEQ ID NO: 786239 - protein, 13 aa, Homo sapiens
  CDR3 for alpha chain variable domain of TCR clone 393120 (TRAV1-2, TRAJ12)
CAVSMDSSYKLIF

SEQ ID NO: 786240 - protein, 14 aa, Homo sapiens
  CDR3 for beta chain variable domain of TCR clone 393120 (TRBV27, TRBJ2-1)
CAGSIAETYNEQFF

SEQ ID NO: 786241 - protein, 15 aa, Homo sapiens
  CDR3 for alpha chain variable domain of TCR clone 393121 (TRAV3, TRAJ3)
CAVRDMSSSASKIIF

SEQ ID NO: 786242 - protein, 14 aa, Homo sapiens
  CDR3 for beta chain variable domain of TCR clone 393121 (TRBV6-6, TRBJ2-7)
CASSIAGGVDEHYF

SEQ ID NO: 786243 - protein, 15 aa, Homo sapiens
  CDR3 for alpha chain variable domain of TCR clone 393122 (TRAV3, TRAJ47)
CVVRDIGEYGNKLGF

SEQ ID NO: 786244 - protein, 14 aa, Homo sapiens
  CDR3 for beta chain variable domain of TCR clone 393122 (TRBV13, TRBJ2-5)
CASSLERVGETQYV

SEQ ID NO: 786245 - protein, 18 aa, Homo sapiens
  CDR3 for alpha chain variable domain of TCR clone 393123 (TRAV35, TRAJ52)
CAGLLLYPGGTSYGKLTF

SEQ ID NO: 786246 - protein, 13 aa, Homo sapiens
  CDR3 for beta chain variable domain of TCR clone 393123 (TRBV2, TRBJ2-5)
CASGTPYQETQYF

SEQ ID NO: 786247 - protein, 13 aa, Homo sapiens
  CDR3 for alpha chain variable domain of TCR clone 393124 (TRAV13-1, TRAJ21)
CAASIYNFNKFYF

SEQ ID NO: 786248 - protein, 17 aa, Homo sapiens
  CDR3 for beta chain variable domain of TCR clone 393124 (TRBV20-1, TRBJ2-1)
CSARDPLAGVWDNEQFF

SEQ ID NO: 786249 - protein, 15 aa, Homo sapiens
  CDR3 for alpha chain variable domain of TCR clone 393125 (TRAV8-4, TRAJ6)
CAVSAPSGGSYIPTF

SEQ ID NO: 786250 - protein, 13 aa, Homo sapiens
  CDR3 for beta chain variable domain of TCR clone 393125 (TRBV18, TRBJ2-7)
CASQSGGGYEQYF

SEQ ID NO: 786251 - protein, 12 aa, Homo sapiens
  CDR3 for alpha chain variable domain of TCR clone 393126 (TRAV12-2, TRAJ10)
WGVTGGGNKLTF

SEQ ID NO: 786252 - protein, 15 aa, Homo sapiens
  CDR3 for beta chain variable domain of TCR clone 393126 (TRBV10-2, TRBJ2-6)
CACSEQGTGANVLTF

SEQ ID NO: 786253 - protein, 16 aa, Homo sapiens
  CDR3 for alpha chain variable domain of TCR clone 393127 (TRAV3, TRAJ10)
CAVRDMRAGGGNKLAF

SEQ ID NO: 786254 - protein, 13 aa, Homo sapiens
  CDR3 for beta chain variable domain of TCR clone 393127 (TRBV4-1, TRBJ2-7)
CASSQGQAYEQYF

SEQ ID NO: 786255 - protein, 15 aa, Homo sapiens
  CDR3 for alpha chain variable domain of TCR clone 393128 (TRAV4, TRAJ39)
CLVGPNNNAGNMLTF

SEQ ID NO: 786256 - protein, 13 aa, Homo sapiens
  CDR3 for beta chain variable domain of TCR clone 393128 (TRBV7-2, TRBJ2-2)
CASSLAVTGELFF

SEQ ID NO: 786257 - protein, 15 aa, Homo sapiens
  CDR3 for alpha chain variable domain of TCR clone 393129 (TRAV8-3, TRAJ11)
CAVGLLNSGYSTLTF

SEQ ID NO: 786258 - protein, 16 aa, Homo sapiens
  CDR3 for beta chain variable domain of TCR clone 393129 (TRBV27, TRBJ2-2)
CASSFRGLVRTGELFF

SEQ ID NO: 786259 - protein, 11 aa, Homo sapiens
  CDR3 for alpha chain variable domain of TCR clone 393130 (TRAV23/DV6, TRAJ21)
CAANNFNKFYF

SEQ ID NO: 786260 - protein, 12 aa, Homo sapiens
  CDR3 for beta chain variable domain of TCR clone 393130 (TRBV11-2, TRBJ2-1)
CASSPGNNGQFF

SEQ ID NO: 786261 - protein, 15 aa, Homo sapiens
  CDR3 for alpha chain variable domain of TCR clone 393131 (TRAV21, TRAJ24)
CAARSSTDSWGKLQF

SEQ ID NO: 786262 - protein, 15 aa, Homo sapiens
  CDR3 for beta chain variable domain of TCR clone 393131 (TRBV5-1, TRBJ2-1)
CASSPPRDPYNEQFF

SEQ ID NO: 786263 - protein, 14 aa, Homo sapiens
  CDR3 for alpha chain variable domain of TCR clone 393132 (TRAV12-2, TRAJ13)
CAVKKTGGYQKVTF

SEQ ID NO: 786264 - protein, 13 aa, Homo sapiens
  CDR3 for beta chain variable domain of TCR clone 393132 (TRBV28, TRBJ2-7)
CASKAGGVYEQDF

SEQ ID NO: 786265 - protein, 15 aa, Homo sapiens
  CDR3 for alpha chain variable domain of TCR clone 393133 (TRAV8-1, TRAJ23)
CAVNSHYNQGGKLIF

SEQ ID NO: 786266 - protein, 14 aa, Homo sapiens
  CDR3 for beta chain variable domain of TCR clone 393133 (TRBV7-9, TRBJ2-7)
CASSPSGGQNEQYF

SEQ ID NO: 786267 - protein, 14 aa, Homo sapiens
  CDR3 for alpha chain variable domain of TCR clone 393134 (TRAV1-1, TRAJ28)
CAAPSGAGSYQLTF

SEQ ID NO: 786268 - protein, 12 aa, Homo sapiens
  CDR3 for beta chain variable domain of TCR clone 393134 (TRBV7-2, TRBJ1-2)
CASSLVSGATMA

SEQ ID NO: 786269 - protein, 12 aa, Homo sapiens
  CDR3 for alpha chain variable domain of TCR clone 393135 (TRAV9-2, TRAJ40)
WALTSGTYKYIF

SEQ ID NO: 786270 - protein, 16 aa, Homo sapiens
  CDR3 for beta chain variable domain of TCR clone 393135 (TRBV7-7, TRBJ2-2)
CASSPRTGLNTGELFF

SEQ ID NO: 786271 - protein, 12 aa, Homo sapiens
  CDR3 for alpha chain variable domain of TCR clone 393136 (TRAV13-2, TRAJ23)
CAERHRGGKLIF

SEQ ID NO: 786272 - protein, 15 aa, Homo sapiens
  CDR3 for beta chain variable domain of TCR clone 393136 (TRBV9, TRBJ1-6)
CASSVAWTGDSPLHF

SEQ ID NO: 786273 - protein, 12 aa, Homo sapiens
  CDR3 for alpha chain variable domain of TCR clone 393137 (TRAV16, TRAJ12)
CALEDSSYKLIF

SEQ ID NO: 786274 - protein, 16 aa, Homo sapiens
  CDR3 for beta chain variable domain of TCR clone 393137 (TRBV19, TRBJ2-1)
CASSKAGPSSYNEQFF

SEQ ID NO: 786275 - protein, 12 aa, Homo sapiens
  CDR3 for alpha chain variable domain of TCR clone 393138 (TRAV3, TRAJ20)
CAVRDPDYKLSF

SEQ ID NO: 786276 - protein, 15 aa, Homo sapiens
  CDR3 for beta chain variable domain of TCR clone 393138 (TRBV3-1, TRBJ2-5)
CASSRGLALRETQYF

SEQ ID NO: 786277 - protein, 12 aa, Homo sapiens
  CDR3 for alpha chain variable domain of TCR clone 393139 (TRAV3, TRAJ20)
CAVRDPDYKLSF

SEQ ID NO: 786278 - protein, 17 aa, Homo sapiens
  CDR3 for beta chain variable domain of TCR clone 393139 (TRBV25-1, TRBJ2-1)
CASSAYGQGRGVYEQFF

SEQ ID NO: 786279 - protein, 12 aa, Homo sapiens
  CDR3 for alpha chain variable domain of TCR clone 393140 (TRAV10, TRAJ43)
CVVVRVGNDMRF

SEQ ID NO: 786280 - protein, 15 aa, Homo sapiens
  CDR3 for beta chain variable domain of TCR clone 393140 (TRBV2, TRBJ2-7)
CASSEGLARSYEQYL

SEQ ID NO: 786281 - protein, 11 aa, Homo sapiens
  CDR3 for alpha chain variable domain of TCR clone 393141 (TRAV12-1, TRAJ43)
CVEYDNNDIRF

SEQ ID NO: 786282 - protein, 17 aa, Homo sapiens
  CDR3 for beta chain variable domain of TCR clone 393141 (TRBV4-1, TRBJ1-4)
CASSQEGPRGVEEKLFF

SEQ ID NO: 786283 - protein, 14 aa, Homo sapiens
  CDR3 for alpha chain variable domain of TCR clone 393142 (TRAV17, TRAJ35)
CATDKPGFGNVLNC

SEQ ID NO: 786284 - protein, 19 aa, Homo sapiens
  CDR3 for beta chain variable domain of TCR clone 393142 (TRBV11-3, TRBJ2-2)
CASSTRPGAKTTNTGELFF

SEQ ID NO: 786285 - protein, 11 aa, Homo sapiens
  CDR3 for alpha chain variable domain of TCR clone 393143 (TRAV3, TRAJ21)
CAVGNFNKFYF

SEQ ID NO: 786286 - protein, 13 aa, Homo sapiens
  CDR3 for beta chain variable domain of TCR clone 393143 (TRBV7-3, TRBJ2-1)
CASSPVAYNEQFF

SEQ ID NO: 786287 - protein, 14 aa, Homo sapiens
  CDR3 for alpha chain variable domain of TCR clone 393144 (TRAV2, TRAJ42)
CAVVGGGSQGNLIF

SEQ ID NO: 786288 - protein, 15 aa, Homo sapiens
  CDR3 for beta chain variable domain of TCR clone 393144 (TRBV25-1, TRBJ1-4)
CASSKRIATNEKLFF

SEQ ID NO: 786289 - protein, 18 aa, Homo sapiens
  CDR3 for alpha chain variable domain of TCR clone 393145 (TRAV21, TRAJ37)
CAVRPSPAGGTSYGKLTF

SEQ ID NO: 786290 - protein, 15 aa, Homo sapiens
  CDR3 for beta chain variable domain of TCR clone 393145 (TRBV20-1, TRBJ1-1)
CSASRGVTGNTEAFF

SEQ ID NO: 786291 - protein, 14 aa, Homo sapiens
  CDR3 for alpha chain variable domain of TCR clone 393146 (TRAV38-1, TRAJ45)
CAYYSGGGADGLTF

SEQ ID NO: 786292 - protein, 13 aa, Homo sapiens
  CDR3 for beta chain variable domain of TCR clone 393146 (TRBV28, TRBJ2-7)
CASKAGGVYEQYF

SEQ ID NO: 786293 - protein, 15 aa, Homo sapiens
  CDR3 for alpha chain variable domain of TCR clone 393147 (TRAV1-2, TRAJ28)
CAVQYSGAGSYQLTF

SEQ ID NO: 786294 - protein, 12 aa, Homo sapiens
  CDR3 for beta chain variable domain of TCR clone 393147 (TRBV4-2, TRBJ1-1)
CRSQAGNTEAFF

SEQ ID NO: 786295 - protein, 16 aa, Homo sapiens
  CDR3 for alpha chain variable domain of TCR clone 393148 (TRAV14/DV4, TRAJ53)
CAMREGGGGSNYKLTF

SEQ ID NO: 786296 - protein, 15 aa, Homo sapiens
  CDR3 for beta chain variable domain of TCR clone 393148 (TRBV7-9, TRBJ2-3)
CASSVGDRYTDTQYF

SEQ ID NO: 786297 - protein, 14 aa, Homo sapiens
  CDR3 for alpha chain variable domain of TCR clone 393149 (TRAV1-2, TRAJ8)
CAVKEDTGFQKLVF

SEQ ID NO: 786298 - protein, 17 aa, Homo sapiens
  CDR3 for beta chain variable domain of TCR clone 393149 (TRBV20-1, TRBJ2-2)
CSASGSGQGGLTGELFF

SEQ ID NO: 786299 - protein, 12 aa, Homo sapiens
  CDR3 for alpha chain variable domain of TCR clone 393150 (TRAV12-3, TRAJ17)
CAMTLTGNKITF

SEQ ID NO: 786300 - protein, 15 aa, Homo sapiens
  CDR3 for beta chain variable domain of TCR clone 393150 (TRBV20-1, TRBJ2-7)
CSARDRVSVMDEQYF

SEQ ID NO: 786301 - protein, 14 aa, Homo sapiens
  CDR3 for alpha chain variable domain of TCR clone 393151 (TRAV3, TRAJ22)
CAVRDYGSARQLPF

SEQ ID NO: 786302 - protein, 13 aa, Homo sapiens
  CDR3 for beta chain variable domain of TCR clone 393151 (TRBV11-2, TRBJ2-5)
CASGYGAKETQYF

SEQ ID NO: 786303 - protein, 14 aa, Homo sapiens
  CDR3 for alpha chain variable domain of TCR clone 393152 (TRAV35, TRAJ24)
CAGPRRDSWGKLQF

SEQ ID NO: 786304 - protein, 12 aa, Homo sapiens
  CDR3 for beta chain variable domain of TCR clone 393152 (TRBV12-4, TRBJ2-3)
YASSLGQDTQHF

SEQ ID NO: 786305 - protein, 13 aa, Homo sapiens
  CDR3 for alpha chain variable domain of TCR clone 393153 (TRAV36/DV7, TRAJ33)
CAVDMDSNYQLIW

SEQ ID NO: 786306 - protein, 13 aa, Homo sapiens
  CDR3 for beta chain variable domain of TCR clone 393153 (TRBV7-3, TRBJ2-5)
CASSLMLGGTQYF

SEQ ID NO: 786307 - protein, 13 aa, Homo sapiens
  CDR3 for alpha chain variable domain of TCR clone 393154 (TRAV2, TRAJ15)
CAVASQAGTALIF

SEQ ID NO: 786308 - protein, 14 aa, Homo sapiens
  CDR3 for beta chain variable domain of TCR clone 393154 (TRBV7-8, TRBJ2-3)
CASSFKSSTDTQYF

SEQ ID NO: 786309 - protein, 13 aa, Homo sapiens
  CDR3 for alpha chain variable domain of TCR clone 393155 (TRAV20, TRAJ37)
CAGCSSNTGKLIF

SEQ ID NO: 786310 - protein, 16 aa, Homo sapiens
  CDR3 for beta chain variable domain of TCR clone 393155 (TRBV7-7, TRBJ2-1)
CASSLDISSSYNEQFF

SEQ ID NO: 786311 - protein, 11 aa, Homo sapiens
  CDR3 for alpha chain variable domain of TCR clone 393156 (TRAV2, TRAJ13)
CASGGSQKVTF

SEQ ID NO: 786312 - protein, 16 aa, Homo sapiens
  CDR3 for beta chain variable domain of TCR clone 393156 (TRBV6-1, TRBJ2-5)
CASSETLDRGAKTQYF

SEQ ID NO: 786313 - protein, 14 aa, Homo sapiens
  CDR3 for alpha chain variable domain of TCR clone 393157 (TRAV35, TRAJ22)
CAGLRPGSARQLTF

SEQ ID NO: 786314 - protein, 17 aa, Homo sapiens
  CDR3 for beta chain variable domain of TCR clone 393157 (TRBV7-3, TRBJ2-5)
CASSLGSGRSGSETQYF

SEQ ID NO: 786315 - protein, 13 aa, Homo sapiens
  CDR3 for alpha chain variable domain of TCR clone 393158 (TRAV17, TRAJ26)
CATVDNYGQNFVF

SEQ ID NO: 786316 - protein, 13 aa, Homo sapiens
  CDR3 for beta chain variable domain of TCR clone 393158 (TRBV12-4, TRBJ1-2)
CASSLDSNYGYTF

SEQ ID NO: 786317 - protein, 13 aa, Homo sapiens
  CDR3 for alpha chain variable domain of TCR clone 393159 (TRAV13-1, TRAJ49)
CAAMLYTGNQFYF

SEQ ID NO: 786318 - protein, 15 aa, Homo sapiens
  CDR3 for beta chain variable domain of TCR clone 393159 (TRBV12-4, TRBJ1-5)
CASTKGSGFGQPQHF

SEQ ID NO: 786319 - protein, 16 aa, Homo sapiens
  CDR3 for alpha chain variable domain of TCR clone 393160 (TRAV30, TRAJ24)
CGTETVDADSWGKFQF

SEQ ID NO: 786320 - protein, 18 aa, Homo sapiens
  CDR3 for beta chain variable domain of TCR clone 393160 (TRBV12-5, TRBJ2-5)
CASGSRTHKRPSTSGQAR

SEQ ID NO: 786321 - protein, 12 aa, Homo sapiens
  CDR3 for alpha chain variable domain of TCR clone 393161 (TRAV1-2, TRAJ29)
CAVPSGNTPLVF

SEQ ID NO: 786322 - protein, 12 aa, Homo sapiens
  CDR3 for beta chain variable domain of TCR clone 393161 (TRBV12-4, TRBJ2-7)
CQSPTETYEQYF

SEQ ID NO: 786323 - protein, 11 aa, Homo sapiens
  CDR3 for alpha chain variable domain of TCR clone 393162 (TRAV2, TRAJ13)
CASGGYQKVTF

SEQ ID NO: 786324 - protein, 14 aa, Homo sapiens
  CDR3 for beta chain variable domain of TCR clone 393162 (TRBV7-3, TRBJ2-7)
CASSYDEDYYEQYF

SEQ ID NO: 786325 - protein, 14 aa, Homo sapiens
  CDR3 for alpha chain variable domain of TCR clone 393163 (TRAV12-3, TRAJ10)
SHLPLTGGGNKLTF

SEQ ID NO: 786326 - protein, 14 aa, Homo sapiens
  CDR3 for beta chain variable domain of TCR clone 393163 (TRBV7-2, TRBJ2-2)
CASSLNSNTGELVF

SEQ ID NO: 786327 - protein, 14 aa, Homo sapiens
  CDR3 for alpha chain variable domain of TCR clone 393164 (TRAV16, TRAJ33)
RALSAMDSNYQLIW

SEQ ID NO: 786328 - protein, 15 aa, Homo sapiens
  CDR3 for beta chain variable domain of TCR clone 393164 (TRBV28, TRBJ2-7)
CASSLEAYPIYEQYF

SEQ ID NO: 786329 - protein, 15 aa, Homo sapiens
  CDR3 for alpha chain variable domain of TCR clone 393165 (TRAV3, TRAJ5)
CAVRDLDTGRRALTF

SEQ ID NO: 786330 - protein, 15 aa, Homo sapiens
  CDR3 for beta chain variable domain of TCR clone 393165 (TRBV7-2, TRBJ2-2)
CASSLVSQFTGELFF

SEQ ID NO: 786331 - protein, 14 aa, Homo sapiens
  CDR3 for alpha chain variable domain of TCR clone 393166 (TRAV26-1, TRAJ38)
CIADNAGNNRKLLW

SEQ ID NO: 786332 - protein, 13 aa, Homo sapiens
  CDR3 for beta chain variable domain of TCR clone 393166 (TRBV20-1, TRBJ1-1)
CSARGEGNTEAFF

SEQ ID NO: 786333 - protein, 12 aa, Homo sapiens
  CDR3 for alpha chain variable domain of TCR clone 393167 (TRAV8-3, TRAJ20)
CAVCAHDYKLSF

SEQ ID NO: 786334 - protein, 16 aa, Homo sapiens
  CDR3 for beta chain variable domain of TCR clone 393167 (TRBV19, TRBJ2-2)
CASRSPGTGATGELFF

SEQ ID NO: 786335 - protein, 15 aa, Homo sapiens
  CDR3 for alpha chain variable domain of TCR clone 393168 (TRAV17, TRAJ13)
CATVPNSGGYQKVTF

SEQ ID NO: 786336 - protein, 15 aa, Homo sapiens
  CDR3 for beta chain variable domain of TCR clone 393168 (TRBV20-1, TRBJ2-7)
CSARDRVSGMDEQYF

SEQ ID NO: 786337 - protein, 15 aa, Homo sapiens
  CDR3 for alpha chain variable domain of TCR clone 393169 (TRAV20, TRAJ41)
CAVQANSNSGYALNF

SEQ ID NO: 786338 - protein, 14 aa, Homo sapiens
  CDR3 for beta chain variable domain of TCR clone 393169 (TRBV7-2, TRBJ2-5)
CASSLSGGGETQYF

SEQ ID NO: 786339 - protein, 12 aa, Homo sapiens
  CDR3 for alpha chain variable domain of TCR clone 393170 (TRAV12-2, TRAJ31)
CAVNTPDARLMF

SEQ ID NO: 786340 - protein, 15 aa, Homo sapiens
  CDR3 for beta chain variable domain of TCR clone 393170 (TRBV20-1, TRBJ2-7)
CSARDRVSGMDEQYF

SEQ ID NO: 786341 - protein, 15 aa, Homo sapiens
  CDR3 for alpha chain variable domain of TCR clone 393171 (TRAV26-1, TRAJ3)
CIVRSGCSSASKIIF

SEQ ID NO: 786342 - protein, 14 aa, Homo sapiens
  CDR3 for beta chain variable domain of TCR clone 393171 (TRBV13, TRBJ2-5)
CASYRRLAEETQYF

SEQ ID NO: 786343 - protein, 17 aa, Homo sapiens
  CDR3 for alpha chain variable domain of TCR clone 393172 (TRAV38-2/DV8, TRAJ23)
CALSRKLIFGQGTELSV

SEQ ID NO: 786344 - protein, 17 aa, Homo sapiens
  CDR3 for beta chain variable domain of TCR clone 393172 (TRBV5-4, TRBJ2-1)
CASSSADGRGPYNEHFF

SEQ ID NO: 786345 - protein, 13 aa, Homo sapiens
  CDR3 for alpha chain variable domain of TCR clone 393173 (TRAV12-1, TRAJ16)
CVVYGPDGQKLLF

SEQ ID NO: 786346 - protein, 13 aa, Homo sapiens
  CDR3 for beta chain variable domain of TCR clone 393173 (TRBV2, TRBJ1-1)
CARNPTGGFHAFF

SEQ ID NO: 786347 - protein, 14 aa, Homo sapiens
  CDR3 for alpha chain variable domain of TCR clone 393174 (TRAV1-2, TRAJ16)
CAVNRFSDGQKLPF

SEQ ID NO: 786348 - protein, 15 aa, Homo sapiens
  CDR3 for beta chain variable domain of TCR clone 393174 (TRBV7-9, TRBJ1-4)
CASSARTGGNEKLFF

SEQ ID NO: 786349 - protein, 13 aa, Homo sapiens
  CDR3 for alpha chain variable domain of TCR clone 393175 (TRAV1-2, TRAJ39)
CAVKDNAGNMLTF

SEQ ID NO: 786350 - protein, 14 aa, Homo sapiens
  CDR3 for beta chain variable domain of TCR clone 393175 (TRBV7-8, TRBJ2-7)
CASSLGRASYEQYF

SEQ ID NO: 786351 - protein, 12 aa, Homo sapiens
  CDR3 for alpha chain variable domain of TCR clone 393176 (TRAV1-1, TRAJ30)
CAVRGRDDKIIF

SEQ ID NO: 786352 - protein, 13 aa, Homo sapiens
  CDR3 for beta chain variable domain of TCR clone 393176 (TRBV11-3, TRBJ2-7)
CASSLDKLYEQDF

SEQ ID NO: 786353 - protein, 16 aa, Homo sapiens
  CDR3 for alpha chain variable domain of TCR clone 393177 (TRAV3, TRAJ5)
CAVRDLDTGRRAQLRD

SEQ ID NO: 786354 - protein, 14 aa, Homo sapiens
  CDR3 for beta chain variable domain of TCR clone 393177 (TRBV20-1, TRBJ2-7)
CSAPELAGVGEQYF

SEQ ID NO: 786355 - protein, 11 aa, Homo sapiens
  CDR3 for alpha chain variable domain of TCR clone 393178 (TRAV35, TRAJ30)
CAPGGDDKIIF

SEQ ID NO: 786356 - protein, 16 aa, Homo sapiens
  CDR3 for beta chain variable domain of TCR clone 393178 (TRBV19, TRBJ2-1)
CASSKAGPSSYNEQFF

SEQ ID NO: 786357 - protein, 17 aa, Homo sapiens
  CDR3 for alpha chain variable domain of TCR clone 393179 (TRAV14/DV4, TRAJ4)
CAMREASGRGGYNTLIF

SEQ ID NO: 786358 - protein, 14 aa, Homo sapiens
  CDR3 for beta chain variable domain of TCR clone 393179 (TRBV19, TRBJ2-7)
CASSMGQGAIEQYF

SEQ ID NO: 786359 - protein, 13 aa, Homo sapiens
  CDR3 for alpha chain variable domain of TCR clone 393180 (TRAV21, TRAJ27)
CAARPGSAGKSTF

SEQ ID NO: 786360 - protein, 12 aa, Homo sapiens
  CDR3 for beta chain variable domain of TCR clone 393180 (TRBV6-3, TRBJ2-7)
CASSLTPYEQYF

SEQ ID NO: 786361 - protein, 14 aa, Homo sapiens
  CDR3 for alpha chain variable domain of TCR clone 393181 (TRAV26-1, TRAJ38)
CIADNAGNNGKLIW

SEQ ID NO: 786362 - protein, 13 aa, Homo sapiens
  CDR3 for beta chain variable domain of TCR clone 393181 (TRBV20-1, TRBJ1-1)
CSARGGWNTEAFF

SEQ ID NO: 786363 - protein, 12 aa, Homo sapiens
  CDR3 for alpha chain variable domain of TCR clone 393182 (TRAV13-1, TRAJ3)
CAATGVQQCFQD

SEQ ID NO: 786364 - protein, 16 aa, Homo sapiens
  CDR3 for beta chain variable domain of TCR clone 393182 (TRBV7-3, TRBJ2-2)
CASSLKRGTLSGELFC

SEQ ID NO: 786365 - protein, 13 aa, Homo sapiens
  CDR3 for alpha chain variable domain of TCR clone 393183 (TRAV17, TRAJ9)
CATDGTGGFKTIF

SEQ ID NO: 786366 - protein, 15 aa, Homo sapiens
  CDR3 for beta chain variable domain of TCR clone 393183 (TRBV5-1, TRBJ2-5)
CASSFKGGDQETQYF

SEQ ID NO: 786367 - protein, 14 aa, Homo sapiens
  CDR3 for alpha chain variable domain of TCR clone 393184 (TRAV20, TRAJ56)
CAVQFGGANSKLTF

SEQ ID NO: 786368 - protein, 13 aa, Homo sapiens
  CDR3 for beta chain variable domain of TCR clone 393184 (TRBV4-2, TRBJ2-2)
CASEDRGTGELFF

SEQ ID NO: 786369 - protein, 12 aa, Homo sapiens
  CDR3 for alpha chain variable domain of TCR clone 393185 (TRAV26-1, TRAJ13)
CIFSRGYQKVTF

SEQ ID NO: 786370 - protein, 16 aa, Homo sapiens
  CDR3 for beta chain variable domain of TCR clone 393185 (TRBV27, TRBJ2-1)
CASSLSKGFGLDEQFF

SEQ ID NO: 786371 - protein, 14 aa, Homo sapiens
  CDR3 for alpha chain variable domain of TCR clone 393186 (TRAV21, TRAJ35)
CAVMPIGFGNVLHC

SEQ ID NO: 786372 - protein, 13 aa, Homo sapiens
  CDR3 for beta chain variable domain of TCR clone 393186 (TRBV23-1, TRBJ1-4)
CASRGKFNEKMFF

SEQ ID NO: 786373 - protein, 13 aa, Homo sapiens
  CDR3 for alpha chain variable domain of TCR clone 393187 (TRAV17, TRAJ13)
CATDSGGYQKVTF

SEQ ID NO: 786374 - protein, 16 aa, Homo sapiens
  CDR3 for beta chain variable domain of TCR clone 393187 (TRBV18, TRBJ1-5)
CASSPSTGNSNQPQHF

SEQ ID NO: 786375 - protein, 14 aa, Homo sapiens
  CDR3 for alpha chain variable domain of TCR clone 393188 (TRAV1-2, TRAJ16)
CAVNRVSDGQKLLF

SEQ ID NO: 786376 - protein, 16 aa, Homo sapiens
  CDR3 for beta chain variable domain of TCR clone 393188 (TRBV6-6, TRBJ2-3)
CASSYSHAGSTDTQYF

SEQ ID NO: 786377 - protein, 13 aa, Homo sapiens
  CDR3 for alpha chain variable domain of TCR clone 393189 (TRAV8-3, TRAJ28)
CAVGAVGSYQLTF

SEQ ID NO: 786378 - protein, 16 aa, Homo sapiens
  CDR3 for beta chain variable domain of TCR clone 393189 (TRBV5-4, TRBJ2-3)
CASSLGAGGPSDTQYF

SEQ ID NO: 786379 - protein, 16 aa, Homo sapiens
  CDR3 for alpha chain variable domain of TCR clone 393190 (TRAV30, TRAJ24)
CGTEIVDADSWGKFQF

SEQ ID NO: 786380 - protein, 12 aa, Homo sapiens
  CDR3 for beta chain variable domain of TCR clone 393190 (TRBV11-2, TRBJ2-1)
CASSPGNNGQFF

SEQ ID NO: 786381 - protein, 17 aa, Homo sapiens
  CDR3 for alpha chain variable domain of TCR clone 393191 (TRAV4, TRAJ18)
CLVGERSVGSTLGRLYF

SEQ ID NO: 786382 - protein, 13 aa, Homo sapiens
  CDR3 for beta chain variable domain of TCR clone 393191 (TRBV20-1, TRBJ2-1)
CSARPGRYNEQFF

SEQ ID NO: 786383 - protein, 12 aa, Homo sapiens
  CDR3 for alpha chain variable domain of TCR clone 393192 (TRAV12-3, TRAJ20)
CAMVRGDYKLSF

SEQ ID NO: 786384 - protein, 14 aa, Homo sapiens
  CDR3 for beta chain variable domain of TCR clone 393192 (TRBV6-1, TRBJ2-7)
CASSDYSTSSTSGR

SEQ ID NO: 786385 - protein, 14 aa, Homo sapiens
  CDR3 for alpha chain variable domain of TCR clone 393193 (TRAV1-2, TRAJ8)
CAVREDTGIQKLVF

SEQ ID NO: 786386 - protein, 15 aa, Homo sapiens
  CDR3 for beta chain variable domain of TCR clone 393193 (TRBV4-1, TRBJ2-7)
CASSQNTGRLYEQYF

SEQ ID NO: 786387 - protein, 11 aa, Homo sapiens
  CDR3 for alpha chain variable domain of TCR clone 393194 (TRAV8-3, TRAJ15)
CAVGPGTALIF

SEQ ID NO: 786388 - protein, 15 aa, Homo sapiens
  CDR3 for beta chain variable domain of TCR clone 393194 (TRBV10-3, TRBJ2-1)
CAISDVQDRAYEQFF

SEQ ID NO: 786389 - protein, 13 aa, Homo sapiens
  CDR3 for alpha chain variable domain of TCR clone 393195 (TRAV2, TRAJ29)
CAAQNSGNTPLVF

SEQ ID NO: 786390 - protein, 14 aa, Homo sapiens
  CDR3 for beta chain variable domain of TCR clone 393195 (TRBV7-2, TRBJ2-5)
CASSPRGSSETQYF

SEQ ID NO: 786391 - protein, 15 aa, Homo sapiens
  CDR3 for alpha chain variable domain of TCR clone 393196 (TRAV8-3, TRAJ13)
CAVAPNSGGYQKVTF

SEQ ID NO: 786392 - protein, 14 aa, Homo sapiens
  CDR3 for beta chain variable domain of TCR clone 393196 (TRBV7-3, TRBJ2-1)
CASSLAGGTNEQFF

SEQ ID NO: 786393 - protein, 13 aa, Homo sapiens
  CDR3 for alpha chain variable domain of TCR clone 393197 (TRAV23/DV6, TRAJ40)
CSKPYLGTYKYIF

SEQ ID NO: 786394 - protein, 14 aa, Homo sapiens
  CDR3 for beta chain variable domain of TCR clone 393197 (TRBV5-1, TRBJ2-3)
CASSRGQGGGTQYF

SEQ ID NO: 786395 - protein, 12 aa, Homo sapiens
  CDR3 for alpha chain variable domain of TCR clone 393198 (TRAV21, TRAJ33)
CAKMDSNYQLIW

SEQ ID NO: 786396 - protein, 17 aa, Homo sapiens
  CDR3 for beta chain variable domain of TCR clone 393198 (TRBV3-1, TRBJ2-5)
CASSNWGGTSGQETQYF

SEQ ID NO: 786397 - protein, 16 aa, Homo sapiens
  CDR3 for alpha chain variable domain of TCR clone 393199 (TRAV26-1, TRAJ32)
CIVRTNYGGATNKLIF

SEQ ID NO: 786398 - protein, 13 aa, Homo sapiens
  CDR3 for beta chain variable domain of TCR clone 393199 (TRBV12-4, TRBJ2-5)
CASSPGTEETQYF

SEQ ID NO: 786399 - protein, 11 aa, Homo sapiens
  CDR3 for alpha chain variable domain of TCR clone 393200 (TRAV12-1, TRAJ34)
CVVNKGRELIF

SEQ ID NO: 786400 - protein, 12 aa, Homo sapiens
  CDR3 for beta chain variable domain of TCR clone 393200 (TRBV2, TRBJ2-1)
CAYGPPGNQQFF

SEQ ID NO: 786401 - protein, 20 aa, Homo sapiens
  CDR3 for alpha chain variable domain of TCR clone 393201 (TRAV26-1, TRAJ42)
CCVLLDRQTYYGGSQGNLIF

SEQ ID NO: 786402 - protein, 16 aa, Homo sapiens
  CDR3 for beta chain variable domain of TCR clone 393201 (TRBV7-3, TRBJ2-2)
CASSLKRGTLSGELFF

SEQ ID NO: 786403 - protein, 16 aa, Homo sapiens
  CDR3 for alpha chain variable domain of TCR clone 393202 (TRAV4, TRAJ9)
YLVGDPNRPGGFKTIF

SEQ ID NO: 786404 - protein, 16 aa, Homo sapiens
  CDR3 for beta chain variable domain of TCR clone 393202 (TRBV28, TRBJ1-4)
CASSPPYRGRSEKLFF

SEQ ID NO: 786405 - protein, 10 aa, Homo sapiens
  CDR3 for alpha chain variable domain of TCR clone 393203 (TRAV12-2, TRAJ41)
CAVTGYALNF

SEQ ID NO: 786406 - protein, 14 aa, Homo sapiens
  CDR3 for beta chain variable domain of TCR clone 393203 (TRBV7-2, TRBJ1-1)
CASSFLTGTTEAFF

SEQ ID NO: 786407 - protein, 12 aa, Homo sapiens
  CDR3 for alpha chain variable domain of TCR clone 393204 (TRAV12-3, TRAJ17)
CAMTLTGNQLTF

SEQ ID NO: 786408 - protein, 16 aa, Homo sapiens
  CDR3 for beta chain variable domain of TCR clone 393204 (TRBV2, TRBJ2-1)
CASSVGGSLSYNEQFF

SEQ ID NO: 786409 - protein, 14 aa, Homo sapiens
  CDR3 for alpha chain variable domain of TCR clone 393205 (TRAV12-2, TRAJ13)
CSVKKTGGYHKVTF

SEQ ID NO: 786410 - protein, 15 aa, Homo sapiens
  CDR3 for beta chain variable domain of TCR clone 393205 (TRBV27, TRBJ2-1)
CAGSNGGGSSNEQFF

SEQ ID NO: 786411 - protein, 10 aa, Homo sapiens
  CDR3 for alpha chain variable domain of TCR clone 393206 (TRAV26-1, TRAJ40)
CIAGTYQYNF

SEQ ID NO: 786412 - protein, 15 aa, Homo sapiens
  CDR3 for beta chain variable domain of TCR clone 393206 (TRBV19, TRBJ2-1)
CASSSPGVPLDEQFF

SEQ ID NO: 786413 - protein, 14 aa, Homo sapiens
  CDR3 for alpha chain variable domain of TCR clone 393207 (TRAV8-1, TRAJ32)
CAVNARGATSKLIF

SEQ ID NO: 786414 - protein, 14 aa, Homo sapiens
  CDR3 for beta chain variable domain of TCR clone 393207 (TRBV9, TRBJ2-7)
CASSVGVGSYEQYF

SEQ ID NO: 786415 - protein, 14 aa, Homo sapiens
  CDR3 for alpha chain variable domain of TCR clone 393208 (TRAV2, TRAJ9)
CAVEDRSGGFKTIF

SEQ ID NO: 786416 - protein, 13 aa, Homo sapiens
  CDR3 for beta chain variable domain of TCR clone 393208 (TRBV11-2, TRBJ2-5)
CASSFSSQETQYF

SEQ ID NO: 786417 - protein, 15 aa, Homo sapiens
  CDR3 for alpha chain variable domain of TCR clone 393209 (TRAV21, TRAJ24)
CAARSSTDSWGKLQF

SEQ ID NO: 786418 - protein, 14 aa, Homo sapiens
  CDR3 for beta chain variable domain of TCR clone 393209 (TRBV19, TRBJ1-6)
CASSSGTVYSPLHF

SEQ ID NO: 786419 - protein, 11 aa, Homo sapiens
  CDR3 for alpha chain variable domain of TCR clone 393210 (TRAV3, TRAJ32)
CAVREGIMVVL

SEQ ID NO: 786420 - protein, 13 aa, Homo sapiens
  CDR3 for beta chain variable domain of TCR clone 393210 (TRBV2, TRBJ1-1)
FASSEGWNTEAFF

SEQ ID NO: 786421 - protein, 16 aa, Homo sapiens
  CDR3 for alpha chain variable domain of TCR clone 393211 (TRAV30, TRAJ24)
CGTEIVDADSWGKFPF

SEQ ID NO: 786422 - protein, 15 aa, Homo sapiens
  CDR3 for beta chain variable domain of TCR clone 393211 (TRBV5-7, TRBJ2-7)
CASSPYFEGSYEQYF

SEQ ID NO: 786423 - protein, 14 aa, Homo sapiens
  CDR3 for alpha chain variable domain of TCR clone 393212 (TRAV17, TRAJ54)
RATDANQGAQKLVF

SEQ ID NO: 786424 - protein, 12 aa, Homo sapiens
  CDR3 for beta chain variable domain of TCR clone 393212 (TRBV6-3, TRBJ2-1)
CASSGSYNEQFF

SEQ ID NO: 786425 - protein, 16 aa, Homo sapiens
  CDR3 for alpha chain variable domain of TCR clone 393213 (TRAV21, TRAJ17)
CAVRSGEEAAGNKLTF

SEQ ID NO: 786426 - protein, 16 aa, Homo sapiens
  CDR3 for beta chain variable domain of TCR clone 393213 (TRBV2, TRBJ2-7)
CASSEPWTGPSYEQYF

SEQ ID NO: 786427 - protein, 14 aa, Homo sapiens
  CDR3 for alpha chain variable domain of TCR clone 393214 (TRAV12-2, TRAJ40)
CAVKIPSGTYKYIF

SEQ ID NO: 786428 - protein, 13 aa, Homo sapiens
  CDR3 for beta chain variable domain of TCR clone 393214 (TRBV20-1, TRBJ1-3)
CSARVQGRYTMYF

SEQ ID NO: 786429 - protein, 16 aa, Homo sapiens
  CDR3 for alpha chain variable domain of TCR clone 393215 (TRAV30, TRAJ24)
CGTEIVDADRWGKFQF

SEQ ID NO: 786430 - protein, 17 aa, Homo sapiens
  CDR3 for beta chain variable domain of TCR clone 393215 (TRBV7-3, TRBJ2-3)
CASSPRGQGYGTDTQYF

SEQ ID NO: 786431 - protein, 14 aa, Homo sapiens
  CDR3 for alpha chain variable domain of TCR clone 393216 (TRAV26-1, TRAJ38)
CIADNAGNNRKLIW

SEQ ID NO: 786432 - protein, 13 aa, Homo sapiens
  CDR3 for beta chain variable domain of TCR clone 393216 (TRBV20-1, TRBJ1-1)
CSARGGGNTEAVL

SEQ ID NO: 786433 - protein, 12 aa, Homo sapiens
  CDR3 for alpha chain variable domain of TCR clone 393217 (TRAV12-1, TRAJ40)
CVVPSGTYKYIF

SEQ ID NO: 786434 - protein, 15 aa, Homo sapiens
  CDR3 for beta chain variable domain of TCR clone 393217 (TRBV12-4, TRBJ2-1)
CAGSPLSGRNSERFF

SEQ ID NO: 786435 - protein, 15 aa, Homo sapiens
  CDR3 for alpha chain variable domain of TCR clone 393218 (TRAV34, TRAJ38)
CGADFTPGNNRKLIW

SEQ ID NO: 786436 - protein, 16 aa, Homo sapiens
  CDR3 for beta chain variable domain of TCR clone 393218 (TRBV19, TRBJ2-2)
CASSAAGTGGTGELFF

SEQ ID NO: 786437 - protein, 15 aa, Homo sapiens
  CDR3 for alpha chain variable domain of TCR clone 393219 (TRAV34, TRAJ38)
CGADFTRGNNRKLIW

SEQ ID NO: 786438 - protein, 12 aa, Homo sapiens
  CDR3 for beta chain variable domain of TCR clone 393219 (TRBV7-9, TRBJ2-7)
CATRTDAYEQYF

SEQ ID NO: 786439 - protein, 13 aa, Homo sapiens
  CDR3 for alpha chain variable domain of TCR clone 393220 (TRAV12-3, TRAJ7)
CAMSASGNNRLAF

SEQ ID NO: 786440 - protein, 13 aa, Homo sapiens
  CDR3 for beta chain variable domain of TCR clone 393220 (TRBV24-1, TRBJ2-2)
CATSDWSTGELFF

SEQ ID NO: 786441 - protein, 16 aa, Homo sapiens
  CDR3 for alpha chain variable domain of TCR clone 393221 (TRAV23/DV6, TRAJ9)
CAASLGGNTGGFKTIF

SEQ ID NO: 786442 - protein, 13 aa, Homo sapiens
  CDR3 for beta chain variable domain of TCR clone 393221 (TRBV7-9, TRBJ1-2)
CASSLKQNYGYTF

SEQ ID NO: 786443 - protein, 20 aa, Homo sapiens
  CDR3 for alpha chain variable domain of TCR clone 393222 (TRAV26-1, TRAJ42)
CCVLLHRQTYYGGSQGNLIF

SEQ ID NO: 786444 - protein, 14 aa, Homo sapiens
  CDR3 for beta chain variable domain of TCR clone 393222 (TRBV12-5, TRBJ2-5)
CASGSRTHQETQYF

SEQ ID NO: 786445 - protein, 14 aa, Homo sapiens
  CDR3 for alpha chain variable domain of TCR clone 393223 (TRAV1-2, TRAJ16)
RAVNRFSDGHKLLF

SEQ ID NO: 786446 - protein, 12 aa, Homo sapiens
  CDR3 for beta chain variable domain of TCR clone 393223 (TRBV11-2, TRBJ2-2)
CASSLGGGELFF

SEQ ID NO: 786447 - protein, 16 aa, Homo sapiens
  CDR3 for alpha chain variable domain of TCR clone 393224 (TRAV4, TRAJ8)
CLAGDSGNTGFQKLVV

SEQ ID NO: 786448 - protein, 15 aa, Homo sapiens
  CDR3 for beta chain variable domain of TCR clone 393224 (TRBV15, TRBJ1-2)
CATSRVRASGSGYTF

SEQ ID NO: 786449 - protein, 12 aa, Homo sapiens
  CDR3 for alpha chain variable domain of TCR clone 393225 (TRAV36/DV7, TRAJ37)
CACYGNTGNLIF

SEQ ID NO: 786450 - protein, 13 aa, Homo sapiens
  CDR3 for beta chain variable domain of TCR clone 393225 (TRBV10-3, TRBJ2-7)
CASKRAVNYEQYF

SEQ ID NO: 786451 - protein, 14 aa, Homo sapiens
  CDR3 for alpha chain variable domain of TCR clone 393226 (TRAV2, TRAJ39)
CAVEGDNAGNMLTF

SEQ ID NO: 786452 - protein, 14 aa, Homo sapiens
  CDR3 for beta chain variable domain of TCR clone 393226 (TRBV28, TRBJ2-7)
CASSLSARGNEQYF

SEQ ID NO: 786453 - protein, 13 aa, Homo sapiens
  CDR3 for alpha chain variable domain of TCR clone 393227 (TRAV13-1, TRAJ40)
CAARTSGTYKYIF

SEQ ID NO: 786454 - protein, 12 aa, Homo sapiens
  CDR3 for beta chain variable domain of TCR clone 393227 (TRBV24-1, TRBJ1-4)
CATSDPNEKLFF

SEQ ID NO: 786455 - protein, 14 aa, Homo sapiens
  CDR3 for alpha chain variable domain of TCR clone 393228 (TRAV16, TRAJ15)
CALSFNQAGTALIF

SEQ ID NO: 786456 - protein, 15 aa, Homo sapiens
  CDR3 for beta chain variable domain of TCR clone 393228 (TRBV5-1, TRBJ2-1)
CASSLVGTVKNEQFF

SEQ ID NO: 786457 - protein, 15 aa, Homo sapiens
  CDR3 for alpha chain variable domain of TCR clone 393229 (TRAV38-1, TRAJ57)
CAFMDSQGGSEKLVF

SEQ ID NO: 786458 - protein, 16 aa, Homo sapiens
  CDR3 for beta chain variable domain of TCR clone 393229 (TRBV10-3, TRBJ2-1)
CAIRGGGRGDYNEQFS

SEQ ID NO: 786459 - protein, 15 aa, Homo sapiens
  CDR3 for alpha chain variable domain of TCR clone 393230 (TRAV27, TRAJ38)
CAARRNACNNRKLIW

SEQ ID NO: 786460 - protein, 13 aa, Homo sapiens
  CDR3 for beta chain variable domain of TCR clone 393230 (TRBV12-5, TRBJ2-3)
RASGDRQSDTQYF

SEQ ID NO: 786461 - protein, 13 aa, Homo sapiens
  CDR3 for alpha chain variable domain of TCR clone 393231 (TRAV16, TRAJ20)
CALGPSNDYKLSL

SEQ ID NO: 786462 - protein, 15 aa, Homo sapiens
  CDR3 for beta chain variable domain of TCR clone 393231 (TRBV5-1, TRBJ2-2)
CASSRVGSDTGELFF

SEQ ID NO: 786463 - protein, 14 aa, Homo sapiens
  CDR3 for alpha chain variable domain of TCR clone 393232 (TRAV38-1, TRAJ43)
CAFMKYNNNNDMRF

SEQ ID NO: 786464 - protein, 17 aa, Homo sapiens
  CDR3 for beta chain variable domain of TCR clone 393232 (TRBV7-7, TRBJ1-4)
CASSLVGQGASNEKLFF

SEQ ID NO: 786465 - protein, 14 aa, Homo sapiens
  CDR3 for alpha chain variable domain of TCR clone 393233 (TRAV8-3, TRAJ9)
CAVVFNNGGFKTIF

SEQ ID NO: 786466 - protein, 14 aa, Homo sapiens
  CDR3 for beta chain variable domain of TCR clone 393233 (TRBV7-3, TRBJ2-2)
CASSSGGYTGELFF

SEQ ID NO: 786467 - protein, 14 aa, Homo sapiens
  CDR3 for alpha chain variable domain of TCR clone 393234 (TRAV35, TRAJ33)
CAGSSQDSNYQLIW

SEQ ID NO: 786468 - protein, 13 aa, Homo sapiens
  CDR3 for beta chain variable domain of TCR clone 393234 (TRBV11-2, TRBJ1-2)
CASSLDSPSGYTF

SEQ ID NO: 786469 - protein, 15 aa, Homo sapiens
  CDR3 for alpha chain variable domain of TCR clone 393235 (TRAV8-3, TRAJ45)
CASSYLGGGADGLTF

SEQ ID NO: 786470 - protein, 15 aa, Homo sapiens
  CDR3 for beta chain variable domain of TCR clone 393235 (TRBV4-1, TRBJ2-7)
CASSQNTGRLYEQYF

SEQ ID NO: 786471 - protein, 14 aa, Homo sapiens
  CDR3 for alpha chain variable domain of TCR clone 393236 (TRAV17, TRAJ56)
CATVPAGANSKLTF

SEQ ID NO: 786472 - protein, 12 aa, Homo sapiens
  CDR3 for beta chain variable domain of TCR clone 393236 (TRBV7-9, TRBJ2-7)
CASSIKREEQYF

SEQ ID NO: 786473 - protein, 20 aa, Homo sapiens
  CDR3 for alpha chain variable domain of TCR clone 393237 (TRAV27, TRAJ10)
ASTSVPSRGILTGGGNKLTF

SEQ ID NO: 786474 - protein, 15 aa, Homo sapiens
  CDR3 for beta chain variable domain of TCR clone 393237 (TRBV9, TRBJ2-3)
CASSLGGGLTGTQYF

SEQ ID NO: 786475 - protein, 16 aa, Homo sapiens
  CDR3 for alpha chain variable domain of TCR clone 393238 (TRAV3, TRAJ37)
CAVRGKGSGNTGKLIF

SEQ ID NO: 786476 - protein, 13 aa, Homo sapiens
  CDR3 for beta chain variable domain of TCR clone 393238 (TRBV14, TRBJ2-7)
CASSQDRQYEQYF

SEQ ID NO: 786477 - protein, 16 aa, Homo sapiens
  CDR3 for alpha chain variable domain of TCR clone 393239 (TRAV3, TRAJ10)
CAVRDMRAGGGNKLTF

SEQ ID NO: 786478 - protein, 15 aa, Homo sapiens
  CDR3 for beta chain variable domain of TCR clone 393239 (TRBV11-2, TRBJ1-6)
CASTGFGTEVSPLHF

SEQ ID NO: 786479 - protein, 12 aa, Homo sapiens
  CDR3 for alpha chain variable domain of TCR clone 393240 (TRAV2, TRAJ32)
CAVGGATNKLIF

SEQ ID NO: 786480 - protein, 15 aa, Homo sapiens
  CDR3 for beta chain variable domain of TCR clone 393240 (TRBV6-3, TRBJ2-2)
CASSFLATLTGELFF

SEQ ID NO: 786481 - protein, 13 aa, Homo sapiens
  CDR3 for alpha chain variable domain of TCR clone 393241 (TRAV3, TRAJ27)
CAVRPRGAGKSTC

SEQ ID NO: 786482 - protein, 13 aa, Homo sapiens
  CDR3 for beta chain variable domain of TCR clone 393241 (TRBV7-9, TRBJ2-3)
CASSPGSTDTQYF

SEQ ID NO: 786483 - protein, 12 aa, Homo sapiens
  CDR3 for alpha chain variable domain of TCR clone 393242 (TRAV12-1, TRAJ40)
CVVYSGTYKYIF

SEQ ID NO: 786484 - protein, 16 aa, Homo sapiens
  CDR3 for beta chain variable domain of TCR clone 393242 (TRBV29-1, TRBJ2-2)
CSVETRASGNTGELFF

SEQ ID NO: 786485 - protein, 13 aa, Homo sapiens
  CDR3 for alpha chain variable domain of TCR clone 393243 (TRAV8-3, TRAJ33)
CAVGIDSNCQLIW

SEQ ID NO: 786486 - protein, 15 aa, Homo sapiens
  CDR3 for beta chain variable domain of TCR clone 393243 (TRBV3-1, TRBJ2-1)
CASSQQPSGGNEQFF

SEQ ID NO: 786487 - protein, 12 aa, Homo sapiens
  CDR3 for alpha chain variable domain of TCR clone 393244 (TRAV13-2, TRAJ23)
CAERHRGGKLIF

SEQ ID NO: 786488 - protein, 14 aa, Homo sapiens
  CDR3 for beta chain variable domain of TCR clone 393244 (TRBV19, TRBJ2-3)
CASSAPRGTDTQYF

SEQ ID NO: 786489 - protein, 17 aa, Homo sapiens
  CDR3 for alpha chain variable domain of TCR clone 393245 (TRAV17, TRAJ28)
CATDPRRGGAGSYQLTF

SEQ ID NO: 786490 - protein, 14 aa, Homo sapiens
  CDR3 for beta chain variable domain of TCR clone 393245 (TRBV2, TRBJ2-7)
CASSLTSGGYEQYF

SEQ ID NO: 786491 - protein, 14 aa, Homo sapiens
  CDR3 for alpha chain variable domain of TCR clone 393246 (TRAV10, TRAJ36)
CVVKYEGGANNLFF

SEQ ID NO: 786492 - protein, 16 aa, Homo sapiens
  CDR3 for beta chain variable domain of TCR clone 393246 (TRBV7-3, TRBJ2-2)
FASSLKRGTLSGELFF

SEQ ID NO: 786493 - protein, 14 aa, Homo sapiens
  CDR3 for alpha chain variable domain of TCR clone 393247 (TRAV9-2, TRAJ20)
CALRDPLNDYKLSF

SEQ ID NO: 786494 - protein, 16 aa, Homo sapiens
  CDR3 for beta chain variable domain of TCR clone 393247 (TRBV7-3, TRBJ2-2)
CASSLKRGTLSGELFF

SEQ ID NO: 786495 - protein, 17 aa, Homo sapiens
  CDR3 for alpha chain variable domain of TCR clone 393248 (TRAV17, TRAJ52)
CATERPSGGTSYGKLTF

SEQ ID NO: 786496 - protein, 15 aa, Homo sapiens
  CDR3 for beta chain variable domain of TCR clone 393248 (TRBV5-1, TRBJ2-1)
CASSLVAISYNEQFF

SEQ ID NO: 786497 - protein, 15 aa, Homo sapiens
  CDR3 for alpha chain variable domain of TCR clone 393249 (TRAV3, TRAJ47)
CAVRDIGEYGNKLVF

SEQ ID NO: 786498 - protein, 15 aa, Homo sapiens
  CDR3 for beta chain variable domain of TCR clone 393249 (TRBV10-2, TRBJ2-6)
CASSEQGTGANVLTF

SEQ ID NO: 786499 - protein, 18 aa, Homo sapiens
  CDR3 for alpha chain variable domain of TCR clone 393250 (TRAV26-2, TRAJ45)
CILRLWGYSGGGADGLTF

SEQ ID NO: 786500 - protein, 13 aa, Homo sapiens
  CDR3 for beta chain variable domain of TCR clone 393250 (TRBV10-3, TRBJ2-7)
CASKLAVNYEQYF

SEQ ID NO: 786501 - protein, 16 aa, Homo sapiens
  CDR3 for alpha chain variable domain of TCR clone 393251 (TRAV30, TRAJ24)
CGTEIVYADSWGKFQF

SEQ ID NO: 786502 - protein, 15 aa, Homo sapiens
  CDR3 for beta chain variable domain of TCR clone 393251 (TRBV7-9, TRBJ1-4)
CASSARTGGNEKLFF

SEQ ID NO: 786503 - protein, 17 aa, Homo sapiens
  CDR3 for alpha chain variable domain of TCR clone 393252 (TRAV8-1, TRAJ43)
CAVTNDMRFGAGTRLTV

SEQ ID NO: 786504 - protein, 15 aa, Homo sapiens
  CDR3 for beta chain variable domain of TCR clone 393252 (TRBV7-2, TRBJ2-2)
CASRRPGQNTGELFF

SEQ ID NO: 786505 - protein, 14 aa, Homo sapiens
  CDR3 for alpha chain variable domain of TCR clone 393253 (TRAV13-2, TRAJ43)
CAEIPTYNNNDMRF

SEQ ID NO: 786506 - protein, 20 aa, Homo sapiens
  CDR3 for beta chain variable domain of TCR clone 393253 (TRBV7-8, TRBJ2-2)
CASSHLFPGPTIHITGELFF

SEQ ID NO: 786507 - protein, 10 aa, Homo sapiens
  CDR3 for alpha chain variable domain of TCR clone 393254 (TRAV8-6, TRAJ23)
CAVTGGKLIF

SEQ ID NO: 786508 - protein, 14 aa, Homo sapiens
  CDR3 for beta chain variable domain of TCR clone 393254 (TRBV5-1, TRBJ2-7)
CASSRGESLYEQYF

SEQ ID NO: 786509 - protein, 14 aa, Homo sapiens
  CDR3 for alpha chain variable domain of TCR clone 393255 (TRAV2, TRAJ9)
CAVEDRSGGFKTIF

SEQ ID NO: 786510 - protein, 16 aa, Homo sapiens
  CDR3 for beta chain variable domain of TCR clone 393255 (TRBV4-1, TRBJ2-7)
CASSPADRLSTTEQYF

SEQ ID NO: 786511 - protein, 14 aa, Homo sapiens
  CDR3 for alpha chain variable domain of TCR clone 393256 (TRAV12-2, TRAJ53)
CAVKGGGSNYKLTF

SEQ ID NO: 786512 - protein, 16 aa, Homo sapiens
  CDR3 for beta chain variable domain of TCR clone 393256 (TRBV11-2, TRBJ1-1)
CASSLRQGGEHSKAFF

SEQ ID NO: 786513 - protein, 22 aa, Homo sapiens
  CDR3 for alpha chain variable domain of TCR clone 393257 (TRAV27, TRAJ41)
CAVRTQIPDIQNPDPAVYQLRD

SEQ ID NO: 786514 - protein, 17 aa, Homo sapiens
  CDR3 for beta chain variable domain of TCR clone 393257 (TRBV13, TRBJ2-3)
CASSLSRVAGGRNTQYF

SEQ ID NO: 786515 - protein, 14 aa, Homo sapiens
  CDR3 for alpha chain variable domain of TCR clone 393258 (TRAV1-2, TRAJ8)
CAVREDTGFKKLVF

SEQ ID NO: 786516 - protein, 17 aa, Homo sapiens
  CDR3 for beta chain variable domain of TCR clone 393258 (TRBV11-2, TRBJ2-1)
CASSLYPPGVEYNEQFF

SEQ ID NO: 786517 - protein, 15 aa, Homo sapiens
  CDR3 for alpha chain variable domain of TCR clone 393259 (TRAV21, TRAJ53)
CATLNSGGSNYKLTF

SEQ ID NO: 786518 - protein, 13 aa, Homo sapiens
  CDR3 for beta chain variable domain of TCR clone 393259 (TRBV12-4, TRBJ2-7)
CASSFVPTAEQHF

SEQ ID NO: 786519 - protein, 13 aa, Homo sapiens
  CDR3 for alpha chain variable domain of TCR clone 393260 (TRAV13-1, TRAJ12)
CSKYMGSSYKLIF

SEQ ID NO: 786520 - protein, 15 aa, Homo sapiens
  CDR3 for beta chain variable domain of TCR clone 393260 (TRBV19, TRBJ1-1)
CASTSGQIQNTEAFF

SEQ ID NO: 786521 - protein, 17 aa, Homo sapiens
  CDR3 for alpha chain variable domain of TCR clone 393261 (TRAV26-1, TRAJ53)
CIVRVDDSGGSNYKLTF

SEQ ID NO: 786522 - protein, 14 aa, Homo sapiens
  CDR3 for beta chain variable domain of TCR clone 393261 (TRBV7-9, TRBJ2-7)
CASSLSQGSYEQYF

SEQ ID NO: 786523 - protein, 17 aa, Homo sapiens
  CDR3 for alpha chain variable domain of TCR clone 393262 (TRAV3, TRAJ6)
CSVRDGPRAGGSYIHTF

SEQ ID NO: 786524 - protein, 14 aa, Homo sapiens
  CDR3 for beta chain variable domain of TCR clone 393262 (TRBV7-2, TRBJ2-7)
CASSPKTSFYGQYF

SEQ ID NO: 786525 - protein, 14 aa, Homo sapiens
  CDR3 for alpha chain variable domain of TCR clone 393263 (TRAV23/DV6, TRAJ4)
CAAPRSGGYNKLIF

SEQ ID NO: 786526 - protein, 16 aa, Homo sapiens
  CDR3 for beta chain variable domain of TCR clone 393263 (TRBV19, TRBJ1-1)
CASRFGGPVTGTEAFF

SEQ ID NO: 786527 - protein, 15 aa, Homo sapiens
  CDR3 for alpha chain variable domain of TCR clone 393264 (TRAV12-3, TRAJ6)
CAMSATTGGGYIPTF

SEQ ID NO: 786528 - protein, 15 aa, Homo sapiens
  CDR3 for beta chain variable domain of TCR clone 393264 (TRBV28, TRBJ2-5)
CASSPPWSYQETQYL

SEQ ID NO: 786529 - protein, 12 aa, Homo sapiens
  CDR3 for alpha chain variable domain of TCR clone 393265 (TRAV12-3, TRAJ17)
CAMTLTGNKLTF

SEQ ID NO: 786530 - protein, 15 aa, Homo sapiens
  CDR3 for beta chain variable domain of TCR clone 393265 (TRBV20-1, TRBJ2-7)
CSATGRVSGMDEQYF

SEQ ID NO: 786531 - protein, 12 aa, Homo sapiens
  CDR3 for alpha chain variable domain of TCR clone 393266 (TRAV13-2, TRAJ23)
CAERNRGGKLIF

SEQ ID NO: 786532 - protein, 15 aa, Homo sapiens
  CDR3 for beta chain variable domain of TCR clone 393266 (TRBV9, TRBJ1-6)
CASSVAGTGDSPLHF

SEQ ID NO: 786533 - protein, 13 aa, Homo sapiens
  CDR3 for alpha chain variable domain of TCR clone 393267 (TRAV16, TRAJ31)
CALSAHNNARIMF

SEQ ID NO: 786534 - protein, 17 aa, Homo sapiens
  CDR3 for beta chain variable domain of TCR clone 393267 (TRBV12-4, TRBJ2-1)
CASSPGLAGGRINEQFF

SEQ ID NO: 786535 - protein, 15 aa, Homo sapiens
  CDR3 for alpha chain variable domain of TCR clone 393268 (TRAV25, TRAJ53)
CAATGGGGSNYKLTF

SEQ ID NO: 786536 - protein, 15 aa, Homo sapiens
  CDR3 for beta chain variable domain of TCR clone 393268 (TRBV7-9, TRBJ1-5)
CASSQGHQPNQPQHF

SEQ ID NO: 786537 - protein, 16 aa, Homo sapiens
  CDR3 for alpha chain variable domain of TCR clone 393269 (TRAV8-6, TRAJ4)
CAVSERISVGYNKLIF

SEQ ID NO: 786538 - protein, 19 aa, Homo sapiens
  CDR3 for beta chain variable domain of TCR clone 393269 (TRBV19, TRBJ1-5)
CASSISPRQTGGGNQPQHF

SEQ ID NO: 786539 - protein, 14 aa, Homo sapiens
  CDR3 for alpha chain variable domain of TCR clone 393270 (TRAV1-2, TRAJ16)
CAVNRFSDGQKLLF

SEQ ID NO: 786540 - protein, 15 aa, Homo sapiens
  CDR3 for beta chain variable domain of TCR clone 393270 (TRBV9, TRBJ1-6)
CASSVAGTGDSPLDV

SEQ ID NO: 786541 - protein, 14 aa, Homo sapiens
  CDR3 for alpha chain variable domain of TCR clone 393271 (TRAV8-1, TRAJ13)
CAVKSSGGYQKVTF

SEQ ID NO: 786542 - protein, 20 aa, Homo sapiens
  CDR3 for beta chain variable domain of TCR clone 393271 (TRBV28, TRBJ2-1)
CASTPIGRSPGLAGGNEQFF

SEQ ID NO: 786543 - protein, 15 aa, Homo sapiens
  CDR3 for alpha chain variable domain of TCR clone 393272 (TRAV16, TRAJ42)
CALRRGGGSQGNLIF

SEQ ID NO: 786544 - protein, 16 aa, Homo sapiens
  CDR3 for beta chain variable domain of TCR clone 393272 (TRBV4-1, TRBJ2-3)
CASSQSTSGAEDTQYF

SEQ ID NO: 786545 - protein, 12 aa, Homo sapiens
  CDR3 for alpha chain variable domain of TCR clone 393273 (TRAV12-3, TRAJ17)
CAMTLTGSKLTF

SEQ ID NO: 786546 - protein, 12 aa, Homo sapiens
  CDR3 for beta chain variable domain of TCR clone 393273 (TRBV11-2, TRBJ2-1)
CASSPGNNEQFF

SEQ ID NO: 786547 - protein, 16 aa, Homo sapiens
  CDR3 for alpha chain variable domain of TCR clone 393274 (TRAV3, TRAJ28)
CAVLPRSGAGSYQLLF

SEQ ID NO: 786548 - protein, 13 aa, Homo sapiens
  CDR3 for beta chain variable domain of TCR clone 393274 (TRBV12-4, TRBJ2-5)
CASRLAVQETQYF

SEQ ID NO: 786549 - protein, 14 aa, Homo sapiens
  CDR3 for alpha chain variable domain of TCR clone 393275 (TRAV29/DV5, TRAJ48)
CAAMALFGNEKLTF

SEQ ID NO: 786550 - protein, 14 aa, Homo sapiens
  CDR3 for beta chain variable domain of TCR clone 393275 (TRBV9, TRBJ2-4)
CASSPSGTSGFQYF

SEQ ID NO: 786551 - protein, 14 aa, Homo sapiens
  CDR3 for alpha chain variable domain of TCR clone 393276 (TRAV13-2, TRAJ11)
CAETGNSGYSTLTF

SEQ ID NO: 786552 - protein, 14 aa, Homo sapiens
  CDR3 for beta chain variable domain of TCR clone 393276 (TRBV5-5, TRBJ1-5)
CASSGQGVDQPQHF

SEQ ID NO: 786553 - protein, 14 aa, Homo sapiens
  CDR3 for alpha chain variable domain of TCR clone 393277 (TRAV3, TRAJ9)
CAVRGNTGGFKTIF

SEQ ID NO: 786554 - protein, 15 aa, Homo sapiens
  CDR3 for beta chain variable domain of TCR clone 393277 (TRBV10-2, TRBJ2-6)
CASSEQGTGANVLTF

SEQ ID NO: 786555 - protein, 15 aa, Homo sapiens
  CDR3 for alpha chain variable domain of TCR clone 393278 (TRAV9-2, TRAJ30)
CALIPLLDRDDKIIF

SEQ ID NO: 786556 - protein, 13 aa, Homo sapiens
  CDR3 for beta chain variable domain of TCR clone 393278 (TRBV7-3, TRBJ1-1)
CASSQDWGAEAFF

SEQ ID NO: 786557 - protein, 14 aa, Homo sapiens
  CDR3 for alpha chain variable domain of TCR clone 393279 (TRAV16, TRAJ33)
CALSAMDSNYQLIW

SEQ ID NO: 786558 - protein, 15 aa, Homo sapiens
  CDR3 for beta chain variable domain of TCR clone 393279 (TRBV6-5, TRBJ2-1)
CASSYDAGAGNEQFF

SEQ ID NO: 786559 - protein, 14 aa, Homo sapiens
  CDR3 for alpha chain variable domain of TCR clone 393280 (TRAV17, TRAJ54)
CAPDANQGAQKLVF

SEQ ID NO: 786560 - protein, 14 aa, Homo sapiens
  CDR3 for beta chain variable domain of TCR clone 393280 (TRBV25-1, TRBJ1-1)
CASTHLGGNTEAFF

SEQ ID NO: 786561 - protein, 16 aa, Homo sapiens
  CDR3 for alpha chain variable domain of TCR clone 393281 (TRAV8-3, TRAJ10)
CAVGPILTGGGNKLTF

SEQ ID NO: 786562 - protein, 15 aa, Homo sapiens
  CDR3 for beta chain variable domain of TCR clone 393281 (TRBV7-2, TRBJ2-2)
CASRRPGQSTGELFF

SEQ ID NO: 786563 - protein, 16 aa, Homo sapiens
  CDR3 for alpha chain variable domain of TCR clone 393282 (TRAV26-1, TRAJ50)
CIVRALMKTSYDKVIF

SEQ ID NO: 786564 - protein, 15 aa, Homo sapiens
  CDR3 for beta chain variable domain of TCR clone 393282 (TRBV7-3, TRBJ2-1)
CASSSRSSGRNEQFF

SEQ ID NO: 786565 - protein, 11 aa, Homo sapiens
  CDR3 for alpha chain variable domain of TCR clone 393283 (TRAV2, TRAJ13)
CASGGYQKVTF

SEQ ID NO: 786566 - protein, 14 aa, Homo sapiens
  CDR3 for beta chain variable domain of TCR clone 393283 (TRBV7-8, TRBJ2-7)
CASSLGRASYEQYF

SEQ ID NO: 786567 - protein, 15 aa, Homo sapiens
  CDR3 for alpha chain variable domain of TCR clone 393284 (TRAV3, TRAJ4)
CAVRDGTGGYNKLIF

SEQ ID NO: 786568 - protein, 16 aa, Homo sapiens
  CDR3 for beta chain variable domain of TCR clone 393284 (TRBV27, TRBJ2-2)
CASSSSGVSNTWELFF

SEQ ID NO: 786569 - protein, 18 aa, Homo sapiens
  CDR3 for alpha chain variable domain of TCR clone 393285 (TRAV9-2, TRAJ52)
CALSRHNAGGTSYGKLTF

SEQ ID NO: 786570 - protein, 14 aa, Homo sapiens
  CDR3 for beta chain variable domain of TCR clone 393285 (TRBV5-1, TRBJ2-1)
CASSALWAGNEQFF

SEQ ID NO: 786571 - protein, 15 aa, Homo sapiens
  CDR3 for alpha chain variable domain of TCR clone 393286 (TRAV23/DV6, TRAJ30)
CAASSQESRDDKIII

SEQ ID NO: 786572 - protein, 17 aa, Homo sapiens
  CDR3 for beta chain variable domain of TCR clone 393286 (TRBV4-3, TRBJ2-1)
CASSQFSSGRASGEQFF

SEQ ID NO: 786573 - protein, 13 aa, Homo sapiens
  CDR3 for alpha chain variable domain of TCR clone 393287 (TRAV27, TRAJ49)
CAPRPYTVNQFYF

SEQ ID NO: 786574 - protein, 16 aa, Homo sapiens
  CDR3 for beta chain variable domain of TCR clone 393287 (TRBV4-1, TRBJ1-2)
CASSQGAGQVLYGYNF

SEQ ID NO: 786575 - protein, 11 aa, Homo sapiens
  CDR3 for alpha chain variable domain of TCR clone 393288 (TRAV21, TRAJ34)
CAVTNTDKLIF

SEQ ID NO: 786576 - protein, 12 aa, Homo sapiens
  CDR3 for beta chain variable domain of TCR clone 393288 (TRBV6-3, TRBJ2-7)
CASLGSYYEQYF

SEQ ID NO: 786577 - protein, 13 aa, Homo sapiens
  CDR3 for alpha chain variable domain of TCR clone 393289 (TRAV12-3, TRAJ7)
CAMSASGNNKLAF

SEQ ID NO: 786578 - protein, 14 aa, Homo sapiens
  CDR3 for beta chain variable domain of TCR clone 393289 (TRBV13, TRBJ2-5)
CASSLGPRGETQYF

SEQ ID NO: 786579 - protein, 16 aa, Homo sapiens
  CDR3 for alpha chain variable domain of TCR clone 393290 (TRAV8-1, TRAJ18)
CAVNAGRGSTLGRLYF

SEQ ID NO: 786580 - protein, 15 aa, Homo sapiens
  CDR3 for beta chain variable domain of TCR clone 393290 (TRBV7-2, TRBJ2-5)
CASTPRGASGETQYC

SEQ ID NO: 786581 - protein, 14 aa, Homo sapiens
  CDR3 for alpha chain variable domain of TCR clone 393291 (TRAV3, TRAJ9)
CAVRLNTGGFKTIF

SEQ ID NO: 786582 - protein, 13 aa, Homo sapiens
  CDR3 for beta chain variable domain of TCR clone 393291 (TRBV29-1, TRBJ2-1)
CSVEGGRVNEQFF

SEQ ID NO: 786583 - protein, 14 aa, Homo sapiens
  CDR3 for alpha chain variable domain of TCR clone 393292 (TRAV1-2, TRAJ8)
CAVREDTGFQKLVF

SEQ ID NO: 786584 - protein, 15 aa, Homo sapiens
  CDR3 for beta chain variable domain of TCR clone 393292 (TRBV7-9, TRBJ2-5)
CASSLVAGGLETQYF

SEQ ID NO: 786585 - protein, 11 aa, Homo sapiens
  CDR3 for alpha chain variable domain of TCR clone 393293 (TRAV12-3, TRAJ43)
CAVSVSNDMRF

SEQ ID NO: 786586 - protein, 19 aa, Homo sapiens
  CDR3 for beta chain variable domain of TCR clone 393293 (TRBV28, TRBJ2-7)
CASSYSGTSRLGWVYEQYF

SEQ ID NO: 786587 - protein, 11 aa, Homo sapiens
  CDR3 for alpha chain variable domain of TCR clone 393294 (TRAV1-2, TRAJ40)
CAVPGTYKYIF

SEQ ID NO: 786588 - protein, 16 aa, Homo sapiens
  CDR3 for beta chain variable domain of TCR clone 393294 (TRBV6-5, TRBJ2-7)
CVSSSDPTSGFYEQYF

SEQ ID NO: 786589 - protein, 12 aa, Homo sapiens
  CDR3 for alpha chain variable domain of TCR clone 393295 (TRAV38-2/DV8, TRAJ48)
CALLSGNEKLTF

SEQ ID NO: 786590 - protein, 12 aa, Homo sapiens
  CDR3 for beta chain variable domain of TCR clone 393295 (TRBV14, TRBJ2-5)
CASSQLKETQYF

SEQ ID NO: 786591 - protein, 14 aa, Homo sapiens
  CDR3 for alpha chain variable domain of TCR clone 393296 (TRAV26-1, TRAJ45)
FIEVTGGGAVGLTF

SEQ ID NO: 786592 - protein, 13 aa, Homo sapiens
  CDR3 for beta chain variable domain of TCR clone 393296 (TRBV7-6, TRBJ1-2)
CASSLVADYGYTF

SEQ ID NO: 786593 - protein, 14 aa, Homo sapiens
  CDR3 for alpha chain variable domain of TCR clone 393297 (TRAV12-2, TRAJ44)
CAVNPAGTASKLTF

SEQ ID NO: 786594 - protein, 16 aa, Homo sapiens
  CDR3 for beta chain variable domain of TCR clone 393297 (TRBV12-4, TRBJ1-5)
CASSRPVGGSNQPQHF

SEQ ID NO: 786595 - protein, 15 aa, Homo sapiens
  CDR3 for alpha chain variable domain of TCR clone 393298 (TRAV26-2, TRAJ54)
CILRDVGQGAQKLVF

SEQ ID NO: 786596 - protein, 13 aa, Homo sapiens
  CDR3 for beta chain variable domain of TCR clone 393298 (TRBV7-9, TRBJ1-1)
CASSLAGVTEDFF

SEQ ID NO: 786597 - protein, 14 aa, Homo sapiens
  CDR3 for alpha chain variable domain of TCR clone 393299 (TRAV13-2, TRAJ9)
CAENLETGGFKTIF

SEQ ID NO: 786598 - protein, 16 aa, Homo sapiens
  CDR3 for beta chain variable domain of TCR clone 393299 (TRBV28, TRBJ2-5)
CASSFSPAWGWETQYF

SEQ ID NO: 786599 - protein, 14 aa, Homo sapiens
  CDR3 for alpha chain variable domain of TCR clone 393300 (TRAV12-2, TRAJ13)
CAVKKTGGYKKVTF

SEQ ID NO: 786600 - protein, 15 aa, Homo sapiens
  CDR3 for beta chain variable domain of TCR clone 393300 (TRBV9, TRBJ1-6)
CASSVAGTGDSPLHF

SEQ ID NO: 786601 - protein, 13 aa, Homo sapiens
  CDR3 for alpha chain variable domain of TCR clone 393301 (TRAV27, TRAJ41)
CAGEGNSGYALNF

SEQ ID NO: 786602 - protein, 15 aa, Homo sapiens
  CDR3 for beta chain variable domain of TCR clone 393301 (TRBV7-9, TRBJ1-4)
CASSATGGNNEKLFF

SEQ ID NO: 786603 - protein, 14 aa, Homo sapiens
  CDR3 for alpha chain variable domain of TCR clone 393302 (TRAV13-1, TRAJ5)
CAAHPDTGRRALTF

SEQ ID NO: 786604 - protein, 15 aa, Homo sapiens
  CDR3 for beta chain variable domain of TCR clone 393302 (TRBV11-3, TRBJ2-3)
CASLKDGREGDTQYF

SEQ ID NO: 786605 - protein, 18 aa, Homo sapiens
  CDR3 for alpha chain variable domain of TCR clone 393303 (TRAV13-1, TRAJ10)
CAASKGRAVPGGGNKLTF

SEQ ID NO: 786606 - protein, 14 aa, Homo sapiens
  CDR3 for beta chain variable domain of TCR clone 393303 (TRBV18, TRBJ2-7)
CASSPRGGAYEQYF

SEQ ID NO: 786607 - protein, 13 aa, Homo sapiens
  CDR3 for alpha chain variable domain of TCR clone 393304 (TRAV1-2, TRAJ9)
CAALNTGGFKTIF

SEQ ID NO: 786608 - protein, 13 aa, Homo sapiens
  CDR3 for beta chain variable domain of TCR clone 393304 (TRBV7-9, TRBJ1-2)
CASSLKQNYGYTF

SEQ ID NO: 786609 - protein, 13 aa, Homo sapiens
  CDR3 for alpha chain variable domain of TCR clone 393305 (TRAV14/DV4, TRAJ23)
CAMREVKGGKLIF

SEQ ID NO: 786610 - protein, 15 aa, Homo sapiens
  CDR3 for beta chain variable domain of TCR clone 393305 (TRBV7-3, TRBJ2-1)
CASSPTGGGEVEQFF

SEQ ID NO: 786611 - protein, 15 aa, Homo sapiens
  CDR3 for alpha chain variable domain of TCR clone 393306 (TRAV3, TRAJ22)
CAVRDRGGSARQLTF

SEQ ID NO: 786612 - protein, 14 aa, Homo sapiens
  CDR3 for beta chain variable domain of TCR clone 393306 (TRBV4-2, TRBJ1-5)
CASSRDRGNQPQHF

SEQ ID NO: 786613 - protein, 14 aa, Homo sapiens
  CDR3 for alpha chain variable domain of TCR clone 393307 (TRAV12-1, TRAJ24)
CVVRSTDSWGKFQF

SEQ ID NO: 786614 - protein, 13 aa, Homo sapiens
  CDR3 for beta chain variable domain of TCR clone 393307 (TRBV2, TRBJ2-3)
CASILAGGQGRYF

SEQ ID NO: 786615 - protein, 13 aa, Homo sapiens
  CDR3 for alpha chain variable domain of TCR clone 393308 (TRAV8-1, TRAJ28)
CAVSGAGSYQLTF

SEQ ID NO: 786616 - protein, 14 aa, Homo sapiens
  CDR3 for beta chain variable domain of TCR clone 393308 (TRBV7-2, TRBJ2-2)
CDSRGQGAAGELFF

SEQ ID NO: 786617 - protein, 14 aa, Homo sapiens
  CDR3 for alpha chain variable domain of TCR clone 393309 (TRAV3, TRAJ16)
CAVSGFSDGQKLLF

SEQ ID NO: 786618 - protein, 13 aa, Homo sapiens
  CDR3 for beta chain variable domain of TCR clone 393309 (TRBV7-3, TRBJ1-1)
CASSQDWGAEAFF

SEQ ID NO: 786619 - protein, 14 aa, Homo sapiens
  CDR3 for alpha chain variable domain of TCR clone 393310 (TRAV21, TRAJ45)
CAVSSGGGADGLTF

SEQ ID NO: 786620 - protein, 14 aa, Homo sapiens
  CDR3 for beta chain variable domain of TCR clone 393310 (TRBV7-9, TRBJ2-2)
CASSGLADTGELFF

SEQ ID NO: 786621 - protein, 15 aa, Homo sapiens
  CDR3 for alpha chain variable domain of TCR clone 393311 (TRAV17, TRAJ16)
CATALRFSDGQKLLF

SEQ ID NO: 786622 - protein, 15 aa, Homo sapiens
  CDR3 for beta chain variable domain of TCR clone 393311 (TRBV5-1, TRBJ2-3)
CASSVTSGSTDTQYF

SEQ ID NO: 786623 - protein, 14 aa, Homo sapiens
  CDR3 for alpha chain variable domain of TCR clone 393312 (TRAV3, TRAJ40)
CAVRDMTGTYKYIF

SEQ ID NO: 786624 - protein, 14 aa, Homo sapiens
  CDR3 for beta chain variable domain of TCR clone 393312 (TRBV19, TRBJ2-1)
CASPTSVLSGEQFF

SEQ ID NO: 786625 - protein, 12 aa, Homo sapiens
  CDR3 for alpha chain variable domain of TCR clone 393313 (TRAV6, TRAJ41)
CALRNSGYALNF

SEQ ID NO: 786626 - protein, 16 aa, Homo sapiens
  CDR3 for beta chain variable domain of TCR clone 393313 (TRBV19, TRBJ2-1)
CASSKAGPSSYNEQFF

SEQ ID NO: 786627 - protein, 14 aa, Homo sapiens
  CDR3 for alpha chain variable domain of TCR clone 393314 (TRAV13-1, TRAJ35)
CAASKGGFGNVLHC

SEQ ID NO: 786628 - protein, 16 aa, Homo sapiens
  CDR3 for beta chain variable domain of TCR clone 393314 (TRBV4-1, TRBJ2-4)
CASSLLRGTAKNIQYF

SEQ ID NO: 786629 - protein, 14 aa, Homo sapiens
  CDR3 for alpha chain variable domain of TCR clone 393315 (TRAV12-3, TRAJ42)
CAMNYGGSQGNLIF

SEQ ID NO: 786630 - protein, 13 aa, Homo sapiens
  CDR3 for beta chain variable domain of TCR clone 393315 (TRBV7-9, TRBJ1-2)
CASSPRGLSNTMA

SEQ ID NO: 786631 - protein, 16 aa, Homo sapiens
  CDR3 for alpha chain variable domain of TCR clone 393316 (TRAV13-1, TRAJ48)
CAASIFGNFENEKLTF

SEQ ID NO: 786632 - protein, 16 aa, Homo sapiens
  CDR3 for beta chain variable domain of TCR clone 393316 (TRBV18, TRBJ1-5)
CASSPYRVEGNQPQHF

SEQ ID NO: 786633 - protein, 14 aa, Homo sapiens
  CDR3 for alpha chain variable domain of TCR clone 393317 (TRAV4, TRAJ26)
CRVGPHNYGQNFVF

SEQ ID NO: 786634 - protein, 14 aa, Homo sapiens
  CDR3 for beta chain variable domain of TCR clone 393317 (TRBV7-9, TRBJ2-7)
CASSLSAATYEQYF

SEQ ID NO: 786635 - protein, 14 aa, Homo sapiens
  CDR3 for alpha chain variable domain of TCR clone 393318 (TRAV1-2, TRAJ16)
CAVNRLSDGQKLLF

SEQ ID NO: 786636 - protein, 17 aa, Homo sapiens
  CDR3 for beta chain variable domain of TCR clone 393318 (TRBV5-1, TRBJ2-2)
CASSLAGLSGGTGELFF

SEQ ID NO: 786637 - protein, 14 aa, Homo sapiens
  CDR3 for alpha chain variable domain of TCR clone 393319 (TRAV3, TRAJ6)
CAVRDPWGSYIPTF

SEQ ID NO: 786638 - protein, 16 aa, Homo sapiens
  CDR3 for beta chain variable domain of TCR clone 393319 (TRBV27, TRBJ2-5)
CASSLRRTAGGETQYF

SEQ ID NO: 786639 - protein, 15 aa, Homo sapiens
  CDR3 for alpha chain variable domain of TCR clone 393320 (TRAV8-3, TRAJ11)
CAVGLLNSGYSTLTF

SEQ ID NO: 786640 - protein, 16 aa, Homo sapiens
  CDR3 for beta chain variable domain of TCR clone 393320 (TRBV6-1, TRBJ2-5)
CASSETLDRGAETQYF

SEQ ID NO: 786641 - protein, 14 aa, Homo sapiens
  CDR3 for alpha chain variable domain of TCR clone 393321 (TRAV1-2, TRAJ16)
CAVNRFSDGQKRLF

SEQ ID NO: 786642 - protein, 14 aa, Homo sapiens
  CDR3 for beta chain variable domain of TCR clone 393321 (TRBV7-9, TRBJ2-3)
CASSLEYGTDTQYF

SEQ ID NO: 786643 - protein, 14 aa, Homo sapiens
  CDR3 for alpha chain variable domain of TCR clone 393322 (TRAV30, TRAJ26)
CGTEIVSYGQNFVF

SEQ ID NO: 786644 - protein, 13 aa, Homo sapiens
  CDR3 for beta chain variable domain of TCR clone 393322 (TRBV19, TRBJ1-3)
CASRLSLGKHLYF

SEQ ID NO: 786645 - protein, 16 aa, Homo sapiens
  CDR3 for alpha chain variable domain of TCR clone 393323 (TRAV13-1, TRAJ58)
CAASSPYAPSGSRLTF

SEQ ID NO: 786646 - protein, 14 aa, Homo sapiens
  CDR3 for beta chain variable domain of TCR clone 393323 (TRBV14, TRBJ2-3)
CASSQRLSTDTQYF

SEQ ID NO: 786647 - protein, 13 aa, Homo sapiens
  CDR3 for alpha chain variable domain of TCR clone 393324 (TRAV13-2, TRAJ13)
CAERPGGYQQVTF

SEQ ID NO: 786648 - protein, 14 aa, Homo sapiens
  CDR3 for beta chain variable domain of TCR clone 393324 (TRBV23-1, TRBJ2-5)
CASSFLRSQETQYF

SEQ ID NO: 786649 - protein, 16 aa, Homo sapiens
  CDR3 for alpha chain variable domain of TCR clone 393325 (TRAV3, TRAJ10)
CAVRDMRAGGGNKITF

SEQ ID NO: 786650 - protein, 14 aa, Homo sapiens
  CDR3 for beta chain variable domain of TCR clone 393325 (TRBV6-1, TRBJ1-3)
CASVQGGGGNTIYF

SEQ ID NO: 786651 - protein, 16 aa, Homo sapiens
  CDR3 for alpha chain variable domain of TCR clone 393326 (TRAV23/DV6, TRAJ57)
CAASSTLSQVGSEKLF

SEQ ID NO: 786652 - protein, 14 aa, Homo sapiens
  CDR3 for beta chain variable domain of TCR clone 393326 (TRBV25-1, TRBJ1-1)
CASTRLGGNTEAFF

SEQ ID NO: 786653 - protein, 12 aa, Homo sapiens
  CDR3 for alpha chain variable domain of TCR clone 393327 (TRAV3, TRAJ27)
CAVRDKAGKSTF

SEQ ID NO: 786654 - protein, 16 aa, Homo sapiens
  CDR3 for beta chain variable domain of TCR clone 393327 (TRBV4-1, TRBJ1-2)
CASSQDAGQVLYGYTF

SEQ ID NO: 786655 - protein, 14 aa, Homo sapiens
  CDR3 for alpha chain variable domain of TCR clone 393328 (TRAV13-1, TRAJ44)
CAANSTGTASKLTF

SEQ ID NO: 786656 - protein, 14 aa, Homo sapiens
  CDR3 for beta chain variable domain of TCR clone 393328 (TRBV19, TRBJ2-2)
CASSTLHRSGELFF

SEQ ID NO: 786657 - protein, 11 aa, Homo sapiens
  CDR3 for alpha chain variable domain of TCR clone 393329 (TRAV35, TRAJ30)
CAGLRDEKIIF

SEQ ID NO: 786658 - protein, 15 aa, Homo sapiens
  CDR3 for beta chain variable domain of TCR clone 393329 (TRBV2, TRBJ1-3)
CASSISPRSGNTIYF

SEQ ID NO: 786659 - protein, 23 aa, Homo sapiens
  CDR3 for alpha chain variable domain of TCR clone 393330 (TRAV26-1, TRAJ38)
CIADNAGNNHIQNPDPAVYQLRD

SEQ ID NO: 786660 - protein, 13 aa, Homo sapiens
  CDR3 for beta chain variable domain of TCR clone 393330 (TRBV19, TRBJ1-2)
CASSVPGQDGYTF

SEQ ID NO: 786661 - protein, 12 aa, Homo sapiens
  CDR3 for alpha chain variable domain of TCR clone 393331 (TRAV13-1, TRAJ49)
CAASPMGNQFYF

SEQ ID NO: 786662 - protein, 15 aa, Homo sapiens
  CDR3 for beta chain variable domain of TCR clone 393331 (TRBV14, TRBJ1-1)
CASSQDGMGRREAFF

SEQ ID NO: 786663 - protein, 19 aa, Homo sapiens
  CDR3 for alpha chain variable domain of TCR clone 393332 (TRAV29/DV5, TRAJ49)
CSVLLCSKLTVDTGNQFYF

SEQ ID NO: 786664 - protein, 15 aa, Homo sapiens
  CDR3 for beta chain variable domain of TCR clone 393332 (TRBV7-3, TRBJ2-2)
CQQLKAGDLVRELFF

SEQ ID NO: 786665 - protein, 14 aa, Homo sapiens
  CDR3 for alpha chain variable domain of TCR clone 393333 (TRAV1-2, TRAJ16)
CAVNRFSDGQKLLF

SEQ ID NO: 786666 - protein, 14 aa, Homo sapiens
  CDR3 for beta chain variable domain of TCR clone 393333 (TRBV19, TRBJ2-1)
CGSPTSVLSGEQFF

SEQ ID NO: 786667 - protein, 13 aa, Homo sapiens
  CDR3 for alpha chain variable domain of TCR clone 393334 (TRAV26-1, TRAJ40)
CIVRVEGTYKYIF

SEQ ID NO: 786668 - protein, 15 aa, Homo sapiens
  CDR3 for beta chain variable domain of TCR clone 393334 (TRBV12-4, TRBJ1-2)
CASSLAHRDGQACTF

SEQ ID NO: 786669 - protein, 13 aa, Homo sapiens
  CDR3 for alpha chain variable domain of TCR clone 393335 (TRAV23/DV6, TRAJ58)
CAATGTSGSRLTF

SEQ ID NO: 786670 - protein, 13 aa, Homo sapiens
  CDR3 for beta chain variable domain of TCR clone 393335 (TRBV5-5, TRBJ1-2)
CASSFWRGEDYPF

SEQ ID NO: 786671 - protein, 13 aa, Homo sapiens
  CDR3 for alpha chain variable domain of TCR clone 393336 (TRAV35, TRAJ36)
CAGPRIGANNLFF

SEQ ID NO: 786672 - protein, 15 aa, Homo sapiens
  CDR3 for beta chain variable domain of TCR clone 393336 (TRBV20-1, TRBJ2-7)
CSARDRVSGMEEQYF

SEQ ID NO: 786673 - protein, 15 aa, Homo sapiens
  CDR3 for alpha chain variable domain of TCR clone 393337 (TRAV17, TRAJ57)
CATGPSQGGSEKLVF

SEQ ID NO: 786674 - protein, 13 aa, Homo sapiens
  CDR3 for beta chain variable domain of TCR clone 393337 (TRBV12-4, TRBJ1-1)
CASSRQGNAEAFF

SEQ ID NO: 786675 - protein, 13 aa, Homo sapiens
  CDR3 for alpha chain variable domain of TCR clone 393338 (TRAV12-2, TRAJ11)
CAVPNSGYSTLTF

SEQ ID NO: 786676 - protein, 15 aa, Homo sapiens
  CDR3 for beta chain variable domain of TCR clone 393338 (TRBV5-1, TRBJ1-1)
CASSLGQGRFAEAFF

SEQ ID NO: 786677 - protein, 21 aa, Homo sapiens
  CDR3 for alpha chain variable domain of TCR clone 393339 (TRAV21, TRAJ27)
CAARPGNAGKSTSGDVTTLTV

SEQ ID NO: 786678 - protein, 14 aa, Homo sapiens
  CDR3 for beta chain variable domain of TCR clone 393339 (TRBV7-6, TRBJ2-3)
CASSLGTVTDTQYF

SEQ ID NO: 786679 - protein, 13 aa, Homo sapiens
  CDR3 for alpha chain variable domain of TCR clone 393340 (TRAV12-3, TRAJ7)
CAMTPYGNNRLAF

SEQ ID NO: 786680 - protein, 18 aa, Homo sapiens
  CDR3 for beta chain variable domain of TCR clone 393340 (TRBV18, TRBJ1-3)
CASSPRGGAGPSGNTIYF

SEQ ID NO: 786681 - protein, 14 aa, Homo sapiens
  CDR3 for alpha chain variable domain of TCR clone 393341 (TRAV12-2, TRAJ40)
CAVKIPSGTYKYIF

SEQ ID NO: 786682 - protein, 13 aa, Homo sapiens
  CDR3 for beta chain variable domain of TCR clone 393341 (TRBV18, TRBJ2-7)
CASSRSGSYEQYF

SEQ ID NO: 786683 - protein, 12 aa, Homo sapiens
  CDR3 for alpha chain variable domain of TCR clone 393342 (TRAV26-1, TRAJ36)
CIVETGANNLFF

SEQ ID NO: 786684 - protein, 17 aa, Homo sapiens
  CDR3 for beta chain variable domain of TCR clone 393342 (TRBV27, TRBJ2-6)
CASSLTGFASGANVLTF

SEQ ID NO: 786685 - protein, 11 aa, Homo sapiens
  CDR3 for alpha chain variable domain of TCR clone 393343 (TRAV4, TRAJ23)
CLVAPGGKLIF

SEQ ID NO: 786686 - protein, 14 aa, Homo sapiens
  CDR3 for beta chain variable domain of TCR clone 393343 (TRBV7-6, TRBJ2-3)
CASSLGTVTDTQYF

SEQ ID NO: 786687 - protein, 15 aa, Homo sapiens
  CDR3 for alpha chain variable domain of TCR clone 393344 (TRAV26-1, TRAJ23)
CIVRVLNNQGGKLIF

SEQ ID NO: 786688 - protein, 13 aa, Homo sapiens
  CDR3 for beta chain variable domain of TCR clone 393344 (TRBV12-4, TRBJ1-2)
CASSLRQGKGYTF

SEQ ID NO: 786689 - protein, 12 aa, Homo sapiens
  CDR3 for alpha chain variable domain of TCR clone 393345 (TRAV17, TRAJ12)
CATLRSSYKLIF

SEQ ID NO: 786690 - protein, 16 aa, Homo sapiens
  CDR3 for beta chain variable domain of TCR clone 393345 (TRBV28, TRBJ2-7)
CASSLFFETGDHEQYF

SEQ ID NO: 786691 - protein, 12 aa, Homo sapiens
  CDR3 for alpha chain variable domain of TCR clone 393346 (TRAV21, TRAJ12)
CAVLDSSYKLIF

SEQ ID NO: 786692 - protein, 16 aa, Homo sapiens
  CDR3 for beta chain variable domain of TCR clone 393346 (TRBV7-9, TRBJ2-5)
CASRLEIGTRKETQYF

SEQ ID NO: 786693 - protein, 16 aa, Homo sapiens
  CDR3 for alpha chain variable domain of TCR clone 393347 (TRAV30, TRAJ24)
CGTEIVDAHSWGKFQF

SEQ ID NO: 786694 - protein, 14 aa, Homo sapiens
  CDR3 for beta chain variable domain of TCR clone 393347 (TRBV12-5, TRBJ2-5)
CASGSRIHQETQYF

SEQ ID NO: 786695 - protein, 13 aa, Homo sapiens
  CDR3 for alpha chain variable domain of TCR clone 393348 (TRAV8-3, TRAJ44)
CAVVPGTASKLTF

SEQ ID NO: 786696 - protein, 15 aa, Homo sapiens
  CDR3 for beta chain variable domain of TCR clone 393348 (TRBV20-1, TRBJ2-7)
CSARVPAAYFYEQYF

SEQ ID NO: 786697 - protein, 17 aa, Homo sapiens
  CDR3 for alpha chain variable domain of TCR clone 393349 (TRAV3, TRAJ6)
CAVRDGPKAGGSYIPTF

SEQ ID NO: 786698 - protein, 14 aa, Homo sapiens
  CDR3 for beta chain variable domain of TCR clone 393349 (TRBV7-2, TRBJ2-7)
CASSPKTGFYEQYF

SEQ ID NO: 786699 - protein, 16 aa, Homo sapiens
  CDR3 for alpha chain variable domain of TCR clone 393350 (TRAV21, TRAJ52)
CAVSDAGGTSYGKLTF

SEQ ID NO: 786700 - protein, 13 aa, Homo sapiens
  CDR3 for beta chain variable domain of TCR clone 393350 (TRBV7-3, TRBJ2-5)
CAGSFRGSQTQYF

SEQ ID NO: 786701 - protein, 11 aa, Homo sapiens
  CDR3 for alpha chain variable domain of TCR clone 393351 (TRAV3, TRAJ21)
CAVGDFNKLYF

SEQ ID NO: 786702 - protein, 17 aa, Homo sapiens
  CDR3 for beta chain variable domain of TCR clone 393351 (TRBV24-1, TRBJ2-1)
CATSDVSTSGTYNEQFF

SEQ ID NO: 786703 - protein, 14 aa, Homo sapiens
  CDR3 for alpha chain variable domain of TCR clone 393352 (TRAV1-2, TRAJ8)
CAVREDTGFQKLVF

SEQ ID NO: 786704 - protein, 19 aa, Homo sapiens
  CDR3 for beta chain variable domain of TCR clone 393352 (TRBV4-1, TRBJ2-7)
CASSPVAGGGRAVPRAGHQ

SEQ ID NO: 786705 - protein, 11 aa, Homo sapiens
  CDR3 for alpha chain variable domain of TCR clone 393353 (TRAV12-3, TRAJ43)
CAMSVPNDMRF

SEQ ID NO: 786706 - protein, 15 aa, Homo sapiens
  CDR3 for beta chain variable domain of TCR clone 393353 (TRBV11-3, TRBJ2-3)
CASLKDGREGDTQYF

SEQ ID NO: 786707 - protein, 22 aa, Homo sapiens
  CDR3 for alpha chain variable domain of TCR clone 393354 (TRAV21, )
CAVRQDAGNNHIQNPDPAVYQL

SEQ ID NO: 786708 - protein, 15 aa, Homo sapiens
  CDR3 for beta chain variable domain of TCR clone 393354 (TRBV5-7, TRBJ1-2)
CASSLGVAANYGYTF

SEQ ID NO: 786709 - protein, 13 aa, Homo sapiens
  CDR3 for alpha chain variable domain of TCR clone 393355 (TRAV8-3, TRAJ36)
CAVGATGANNLFV

SEQ ID NO: 786710 - protein, 12 aa, Homo sapiens
  CDR3 for beta chain variable domain of TCR clone 393355 (TRBV7-9, TRBJ1-4)
CASSTDREKLFF

SEQ ID NO: 786711 - protein, 17 aa, Homo sapiens
  CDR3 for alpha chain variable domain of TCR clone 393356 (TRAV13-1, TRAJ52)
CAASSGAGGTSYGKLTF

SEQ ID NO: 786712 - protein, 15 aa, Homo sapiens
  CDR3 for beta chain variable domain of TCR clone 393356 (TRBV7-9, TRBJ2-3)
CASSQDRGITDTQYF

SEQ ID NO: 786713 - protein, 18 aa, Homo sapiens
  CDR3 for alpha chain variable domain of TCR clone 393357 (TRAV21, TRAJ52)
CAVRPSPAGGSSYGKLTF

SEQ ID NO: 786714 - protein, 13 aa, Homo sapiens
  CDR3 for beta chain variable domain of TCR clone 393357 (TRBV12-4, TRBJ2-7)
CASSPTETYEQYF

SEQ ID NO: 786715 - protein, 13 aa, Homo sapiens
  CDR3 for alpha chain variable domain of TCR clone 393358 (TRAV27, TRAJ41)
CAGEGNSGYALNF

SEQ ID NO: 786716 - protein, 15 aa, Homo sapiens
  CDR3 for beta chain variable domain of TCR clone 393358 (TRBV9, TRBJ2-6)
CASSVLWNGANVLTF

SEQ ID NO: 786717 - protein, 13 aa, Homo sapiens
  CDR3 for alpha chain variable domain of TCR clone 393359 (TRAV8-1, TRAJ30)
CAVIMNRDDKIIF

SEQ ID NO: 786718 - protein, 14 aa, Homo sapiens
  CDR3 for beta chain variable domain of TCR clone 393359 (TRBV5-4, TRBJ2-2)
CASRLDGGTGELFF

SEQ ID NO: 786719 - protein, 13 aa, Homo sapiens
  CDR3 for alpha chain variable domain of TCR clone 393360 (TRAV21, TRAJ36)
CAVIKTEANNLFF

SEQ ID NO: 786720 - protein, 13 aa, Homo sapiens
  CDR3 for beta chain variable domain of TCR clone 393360 (TRBV29-1, TRBJ2-3)
CSATRGGRDTQYF

SEQ ID NO: 786721 - protein, 11 aa, Homo sapiens
  CDR3 for alpha chain variable domain of TCR clone 393361 (TRAV23/DV6, TRAJ58)
CAARLLRGETS

SEQ ID NO: 786722 - protein, 13 aa, Homo sapiens
  CDR3 for beta chain variable domain of TCR clone 393361 (TRBV6-4, TRBJ1-5)
CASSADVNQPQHF

SEQ ID NO: 786723 - protein, 14 aa, Homo sapiens
  CDR3 for alpha chain variable domain of TCR clone 393362 (TRAV13-2, TRAJ17)
CAENSKAAGNKPTF

SEQ ID NO: 786724 - protein, 14 aa, Homo sapiens
  CDR3 for beta chain variable domain of TCR clone 393362 (TRBV19, TRBJ2-1)
CASPTFVLSGEQFF

SEQ ID NO: 786725 - protein, 13 aa, Homo sapiens
  CDR3 for alpha chain variable domain of TCR clone 393363 (TRAV24, TRAJ23)
CASHWNQGGKLIF

SEQ ID NO: 786726 - protein, 15 aa, Homo sapiens
  CDR3 for beta chain variable domain of TCR clone 393363 (TRBV13, TRBJ1-6)
CASSVAGTGDSPLHF

SEQ ID NO: 786727 - protein, 14 aa, Homo sapiens
  CDR3 for alpha chain variable domain of TCR clone 393364 (TRAV12-2, TRAJ45)
CALPERGGADGLTF

SEQ ID NO: 786728 - protein, 16 aa, Homo sapiens
  CDR3 for beta chain variable domain of TCR clone 393364 (TRBV7-8, TRBJ2-4)
CASSAERTLAKNMQYF

SEQ ID NO: 786729 - protein, 14 aa, Homo sapiens
  CDR3 for alpha chain variable domain of TCR clone 393365 (TRAV12-1, TRAJ43)
CAVNGRSNNNDMRF

SEQ ID NO: 786730 - protein, 10 aa, Homo sapiens
  CDR3 for beta chain variable domain of TCR clone 393365 (TRBV28, TRBJ2-5)
CQQSSWTQYF

SEQ ID NO: 786731 - protein, 13 aa, Homo sapiens
  CDR3 for alpha chain variable domain of TCR clone 393366 (TRAV12-2, TRAJ17)
CRAFKAAGNKLTF

SEQ ID NO: 786732 - protein, 14 aa, Homo sapiens
  CDR3 for beta chain variable domain of TCR clone 393366 (TRBV7-3, TRBJ1-1)
CASSLKGGNTEAFF

SEQ ID NO: 786733 - protein, 15 aa, Homo sapiens
  CDR3 for alpha chain variable domain of TCR clone 393367 (TRAV3, TRAJ29)
CAVRDINSGNTPLVF

SEQ ID NO: 786734 - protein, 16 aa, Homo sapiens
  CDR3 for beta chain variable domain of TCR clone 393367 (TRBV4-1, TRBJ2-5)
CASSQTFYGDQETQYF

SEQ ID NO: 786735 - protein, 12 aa, Homo sapiens
  CDR3 for alpha chain variable domain of TCR clone 393368 (TRAV16, TRAJ10)
CSRTGGGNKLTF

SEQ ID NO: 786736 - protein, 15 aa, Homo sapiens
  CDR3 for beta chain variable domain of TCR clone 393368 (TRBV6-3, TRBJ2-7)
CASSSPGTVFNEQYF

SEQ ID NO: 786737 - protein, 13 aa, Homo sapiens
  CDR3 for alpha chain variable domain of TCR clone 393369 (TRAV34, TRAJ33)
CGADMNSNYQLIW

SEQ ID NO: 786738 - protein, 12 aa, Homo sapiens
  CDR3 for beta chain variable domain of TCR clone 393369 (TRBV5-1, TRBJ2-7)
CASSDSTYEQYF

SEQ ID NO: 786739 - protein, 11 aa, Homo sapiens
  CDR3 for alpha chain variable domain of TCR clone 393370 (TRAV1-2, TRAJ20)
CAVANDYKPSF

SEQ ID NO: 786740 - protein, 18 aa, Homo sapiens
  CDR3 for beta chain variable domain of TCR clone 393370 (TRBV20-1, TRBJ2-6)
CSAETTPTPGSGANDLTF

SEQ ID NO: 786741 - protein, 17 aa, Homo sapiens
  CDR3 for alpha chain variable domain of TCR clone 393371 (TRAV16, TRAJ58)
CITVLANGETSGSRLTF

SEQ ID NO: 786742 - protein, 17 aa, Homo sapiens
  CDR3 for beta chain variable domain of TCR clone 393371 (TRBV18, TRBJ2-1)
CASSKGLSGGADNEQFF

SEQ ID NO: 786743 - protein, 12 aa, Homo sapiens
  CDR3 for alpha chain variable domain of TCR clone 393372 (TRAV21, TRAJ13)
PGPSGGYQKVTF

SEQ ID NO: 786744 - protein, 14 aa, Homo sapiens
  CDR3 for beta chain variable domain of TCR clone 393372 (TRBV5-1, TRBJ2-2)
CASSLIEGAGELFF

SEQ ID NO: 786745 - protein, 11 aa, Homo sapiens
  CDR3 for alpha chain variable domain of TCR clone 393373 (TRAV23/DV6, TRAJ48)
CAPRWGEKLTF

SEQ ID NO: 786746 - protein, 13 aa, Homo sapiens
  CDR3 for beta chain variable domain of TCR clone 393373 (TRBV7-2, TRBJ1-4)
CASSVSLGEKLFF

SEQ ID NO: 786747 - protein, 13 aa, Homo sapiens
  CDR3 for alpha chain variable domain of TCR clone 393374 (TRAV1-2, TRAJ24)
CAVTTDSWGKLQF

SEQ ID NO: 786748 - protein, 14 aa, Homo sapiens
  CDR3 for beta chain variable domain of TCR clone 393374 (TRBV7-2, TRBJ1-2)
CASSQTGSTYGYSF

SEQ ID NO: 786749 - protein, 12 aa, Homo sapiens
  CDR3 for alpha chain variable domain of TCR clone 393375 (TRAV13-2, TRAJ8)
CAPWLAFQKLVF

SEQ ID NO: 786750 - protein, 12 aa, Homo sapiens
  CDR3 for beta chain variable domain of TCR clone 393375 (TRBV27, TRBJ2-2)
CASKLFTGELFF

SEQ ID NO: 786751 - protein, 16 aa, Homo sapiens
  CDR3 for alpha chain variable domain of TCR clone 393376 (TRAV16, TRAJ4)
CALSRMLSGGYSKLIF

SEQ ID NO: 786752 - protein, 16 aa, Homo sapiens
  CDR3 for beta chain variable domain of TCR clone 393376 (TRBV24-1, TRBJ2-3)
CATSDPGTGATDTHYF

SEQ ID NO: 786753 - protein, 18 aa, Homo sapiens
  CDR3 for alpha chain variable domain of TCR clone 393377 (TRAV26-1, TRAJ23)
CIVRVGLEVWNQGGRLIF

SEQ ID NO: 786754 - protein, 16 aa, Homo sapiens
  CDR3 for beta chain variable domain of TCR clone 393377 (TRBV12-4, TRBJ2-5)
CASSCFVRGRQETQYF

SEQ ID NO: 786755 - protein, 12 aa, Homo sapiens
  CDR3 for alpha chain variable domain of TCR clone 393378 (TRAV3, TRAJ26)
CAVRDYGQNFVF

SEQ ID NO: 786756 - protein, 16 aa, Homo sapiens
  CDR3 for beta chain variable domain of TCR clone 393378 (TRBV4-3, TRBJ2-2)
CASSQDLSGGYGELFF

SEQ ID NO: 786757 - protein, 16 aa, Homo sapiens
  CDR3 for alpha chain variable domain of TCR clone 393379 (TRAV21, TRAJ37)
CAVRPRGSRNTGKLIF

SEQ ID NO: 786758 - protein, 13 aa, Homo sapiens
  CDR3 for beta chain variable domain of TCR clone 393379 (TRBV20-1, TRBJ2-2)
CSALSGGAGELFF

SEQ ID NO: 786759 - protein, 15 aa, Homo sapiens
  CDR3 for alpha chain variable domain of TCR clone 393380 (TRAV30, TRAJ57)
CGTAIPQGGSEKLVF

SEQ ID NO: 786760 - protein, 17 aa, Homo sapiens
  CDR3 for beta chain variable domain of TCR clone 393380 (TRBV11-2, TRBJ2-1)
CASSLSPTGVEYNEQFF

SEQ ID NO: 786761 - protein, 15 aa, Homo sapiens
  CDR3 for alpha chain variable domain of TCR clone 393381 (TRAV4, TRAJ42)
CLVGGYGGSQGNLIF

SEQ ID NO: 786762 - protein, 16 aa, Homo sapiens
  CDR3 for beta chain variable domain of TCR clone 393381 (TRBV27, TRBJ1-1)
CASSTRTGGVGTEDFF

SEQ ID NO: 786763 - protein, 13 aa, Homo sapiens
  CDR3 for alpha chain variable domain of TCR clone 393382 (TRAV8-6, TRAJ50)
CAVIKTSYDKVIF

SEQ ID NO: 786764 - protein, 15 aa, Homo sapiens
  CDR3 for beta chain variable domain of TCR clone 393382 (TRBV7-2, TRBJ2-2)
FASRRPGQNTGELFF

SEQ ID NO: 786765 - protein, 13 aa, Homo sapiens
  CDR3 for alpha chain variable domain of TCR clone 393383 (TRAV26-1, TRAJ34)
CIVSFYNTDKLIF

SEQ ID NO: 786766 - protein, 17 aa, Homo sapiens
  CDR3 for beta chain variable domain of TCR clone 393383 (TRBV20-1, TRBJ2-2)
CSASGSGQGGLTGELFF

SEQ ID NO: 786767 - protein, 13 aa, Homo sapiens
  CDR3 for alpha chain variable domain of TCR clone 393384 (TRAV27, TRAJ23)
CAGVLPKGGKLIF

SEQ ID NO: 786768 - protein, 14 aa, Homo sapiens
  CDR3 for beta chain variable domain of TCR clone 393384 (TRBV5-8, TRBJ2-3)
CASSLSPSTDTQYI

SEQ ID NO: 786769 - protein, 14 aa, Homo sapiens
  CDR3 for alpha chain variable domain of TCR clone 393385 (TRAV25, TRAJ27)
CAGPGNTNAGKSTF

SEQ ID NO: 786770 - protein, 12 aa, Homo sapiens
  CDR3 for beta chain variable domain of TCR clone 393385 (TRBV7-8, TRBJ2-7)
CASSLGDREQYF

SEQ ID NO: 786771 - protein, 12 aa, Homo sapiens
  CDR3 for alpha chain variable domain of TCR clone 393386 (TRAV25, TRAJ5)
CAGGGGRRALTF

SEQ ID NO: 786772 - protein, 15 aa, Homo sapiens
  CDR3 for beta chain variable domain of TCR clone 393386 (TRBV2, TRBJ2-1)
CASSEEREGVNEQFF

SEQ ID NO: 786773 - protein, 16 aa, Homo sapiens
  CDR3 for alpha chain variable domain of TCR clone 393387 (TRAV26-1, TRAJ23)
CIVRVERYNQGGKLIF

SEQ ID NO: 786774 - protein, 15 aa, Homo sapiens
  CDR3 for beta chain variable domain of TCR clone 393387 (TRBV27, TRBJ2-1)
CASSNGGGSSNEQFF

SEQ ID NO: 786775 - protein, 13 aa, Homo sapiens
  CDR3 for alpha chain variable domain of TCR clone 393388 (TRAV6, TRAJ45)
SPFSGGGADGLTF

SEQ ID NO: 786776 - protein, 13 aa, Homo sapiens
  CDR3 for beta chain variable domain of TCR clone 393388 (TRBV19, TRBJ1-2)
CASSVPGQDGYTF

SEQ ID NO: 786777 - protein, 11 aa, Homo sapiens
  CDR3 for alpha chain variable domain of TCR clone 393389 (TRAV2, TRAJ13)
CAPGGYQKVTF

SEQ ID NO: 786778 - protein, 11 aa, Homo sapiens
  CDR3 for beta chain variable domain of TCR clone 393389 (TRBV5-6, TRBJ2-5)
CASSLERTQYF

SEQ ID NO: 786779 - protein, 16 aa, Homo sapiens
  CDR3 for alpha chain variable domain of TCR clone 393390 (TRAV26-1, TRAJ23)
CIVRPRFYNQGGKLIF

SEQ ID NO: 786780 - protein, 13 aa, Homo sapiens
  CDR3 for beta chain variable domain of TCR clone 393390 (TRBV20-1, TRBJ1-1)
CSARGRGNTEAFF

SEQ ID NO: 786781 - protein, 11 aa, Homo sapiens
  CDR3 for alpha chain variable domain of TCR clone 393391 (TRAV2, TRAJ13)
CASGGYQKVTF

SEQ ID NO: 786782 - protein, 15 aa, Homo sapiens
  CDR3 for beta chain variable domain of TCR clone 393391 (TRBV20-1, TRBJ2-7)
CSARREAGAPREQYF

SEQ ID NO: 786783 - protein, 15 aa, Homo sapiens
  CDR3 for alpha chain variable domain of TCR clone 393392 (TRAV13-1, TRAJ17)
CAASIERAAGNKLTF

SEQ ID NO: 786784 - protein, 12 aa, Homo sapiens
  CDR3 for beta chain variable domain of TCR clone 393392 (TRBV7-8, TRBJ2-7)
CASSLGDREQYF

SEQ ID NO: 786785 - protein, 14 aa, Homo sapiens
  CDR3 for alpha chain variable domain of TCR clone 393393 (TRAV1-2, TRAJ6)
CAVSLSGGSYIPTF

SEQ ID NO: 786786 - protein, 19 aa, Homo sapiens
  CDR3 for beta chain variable domain of TCR clone 393393 (TRBV28, TRBJ2-5)
CASSLYLRLAGELQETQYF

SEQ ID NO: 786787 - protein, 17 aa, Homo sapiens
  CDR3 for alpha chain variable domain of TCR clone 393394 (TRAV4, TRAJ31)
CLVARMPDSCLEMELSC

SEQ ID NO: 786788 - protein, 15 aa, Homo sapiens
  CDR3 for beta chain variable domain of TCR clone 393394 (TRBV7-8, TRBJ1-2)
CASSLVRDGGLGYTF

SEQ ID NO: 786789 - protein, 12 aa, Homo sapiens
  CDR3 for alpha chain variable domain of TCR clone 393395 (TRAV21, TRAJ3)
CCFYSSASKIIF

SEQ ID NO: 786790 - protein, 15 aa, Homo sapiens
  CDR3 for beta chain variable domain of TCR clone 393395 (TRBV28, TRBJ2-1)
CASSIIAGGRSEQFF

SEQ ID NO: 786791 - protein, 13 aa, Homo sapiens
  CDR3 for alpha chain variable domain of TCR clone 393396 (TRAV8-3, TRAJ36)
CAVGATGANNLFF

SEQ ID NO: 786792 - protein, 14 aa, Homo sapiens
  CDR3 for beta chain variable domain of TCR clone 393396 (TRBV11-2, TRBJ2-7)
CASSSTGEGYEQYF

SEQ ID NO: 786793 - protein, 16 aa, Homo sapiens
  CDR3 for alpha chain variable domain of TCR clone 393397 (TRAV38-2/DV8, TRAJ57)
CAYRSAGQGGSEKLVF

SEQ ID NO: 786794 - protein, 15 aa, Homo sapiens
  CDR3 for beta chain variable domain of TCR clone 393397 (TRBV7-2, TRBJ2-7)
CASSSGLAGRREQYF

SEQ ID NO: 786795 - protein, 13 aa, Homo sapiens
  CDR3 for alpha chain variable domain of TCR clone 393398 (TRAV2, TRAJ4)
CAAGGYNKLILEQ

SEQ ID NO: 786796 - protein, 13 aa, Homo sapiens
  CDR3 for beta chain variable domain of TCR clone 393398 (TRBV20-1, TRBJ1-1)
CSARVGGNTEAFF

SEQ ID NO: 786797 - protein, 20 aa, Homo sapiens
  CDR3 for alpha chain variable domain of TCR clone 393399 (TRAV26-2, TRAJ43)
CCVLLHPETRALYNNNDMRF

SEQ ID NO: 786798 - protein, 14 aa, Homo sapiens
  CDR3 for beta chain variable domain of TCR clone 393399 (TRBV7-2, TRBJ2-7)
CASSLPPGQGPQYF

SEQ ID NO: 786799 - protein, 11 aa, Homo sapiens
  CDR3 for alpha chain variable domain of TCR clone 393400 (TRAV4, TRAJ31)
CLVGDNARLMF

SEQ ID NO: 786800 - protein, 16 aa, Homo sapiens
  CDR3 for beta chain variable domain of TCR clone 393400 (TRBV7-2, TRBJ2-5)
CASSSKWLGGQEAQYF

SEQ ID NO: 786801 - protein, 12 aa, Homo sapiens
  CDR3 for alpha chain variable domain of TCR clone 393401 (TRAV17, TRAJ57)
CATDGGSEKLVF

SEQ ID NO: 786802 - protein, 16 aa, Homo sapiens
  CDR3 for beta chain variable domain of TCR clone 393401 (TRBV3-1, TRBJ2-5)
CASSQDWASGQETQYF

SEQ ID NO: 786803 - protein, 16 aa, Homo sapiens
  CDR3 for alpha chain variable domain of TCR clone 393402 (TRAV14/DV4, TRAJ9)
CAMREGSDTGGFKTIF

SEQ ID NO: 786804 - protein, 15 aa, Homo sapiens
  CDR3 for beta chain variable domain of TCR clone 393402 (TRBV7-9, TRBJ1-1)
CASSDSLGENTEAFF

SEQ ID NO: 786805 - protein, 18 aa, Homo sapiens
  CDR3 for alpha chain variable domain of TCR clone 393403 (TRAV21, TRAJ52)
CAVRPSPAGGTSYGKLTF

SEQ ID NO: 786806 - protein, 15 aa, Homo sapiens
  CDR3 for beta chain variable domain of TCR clone 393403 (TRBV7-9, TRBJ1-4)
CASSATGGNNEKLFF

SEQ ID NO: 786807 - protein, 12 aa, Homo sapiens
  CDR3 for alpha chain variable domain of TCR clone 393404 (TRAV35, TRAJ31)
CAAASNNARLMF

SEQ ID NO: 786808 - protein, 13 aa, Homo sapiens
  CDR3 for beta chain variable domain of TCR clone 393404 (TRBV7-8, TRBJ2-1)
CASSLERLGEQFF

SEQ ID NO: 786809 - protein, 13 aa, Homo sapiens
  CDR3 for alpha chain variable domain of TCR clone 393405 (TRAV13-1, TRAJ11)
CAAVLAGYSTLTF

SEQ ID NO: 786810 - protein, 19 aa, Homo sapiens
  CDR3 for beta chain variable domain of TCR clone 393405 (TRBV25-1, TRBJ2-7)
CASSDARVVFSSYSSTSGR

SEQ ID NO: 786811 - protein, 14 aa, Homo sapiens
  CDR3 for alpha chain variable domain of TCR clone 393406 (TRAV12-1, TRAJ42)
CVVTRDGGQGNLIF

SEQ ID NO: 786812 - protein, 14 aa, Homo sapiens
  CDR3 for beta chain variable domain of TCR clone 393406 (TRBV11-2, TRBJ2-3)
CASSLGGGANTQYF

SEQ ID NO: 786813 - protein, 14 aa, Homo sapiens
  CDR3 for alpha chain variable domain of TCR clone 393407 (TRAV38-1, TRAJ45)
CAYYSGGGADGLTF

SEQ ID NO: 786814 - protein, 15 aa, Homo sapiens
  CDR3 for beta chain variable domain of TCR clone 393407 (TRBV11-2, TRBJ2-1)
SASSKNRGLIYEQFF

SEQ ID NO: 786815 - protein, 12 aa, Homo sapiens
  CDR3 for alpha chain variable domain of TCR clone 393408 (TRAV21, TRAJ58)
CAAETSGARLTF

SEQ ID NO: 786816 - protein, 18 aa, Homo sapiens
  CDR3 for beta chain variable domain of TCR clone 393408 (TRBV20-1, TRBJ2-6)
CSAETTPTHGSGANVLTF

SEQ ID NO: 786817 - protein, 13 aa, Homo sapiens
  CDR3 for alpha chain variable domain of TCR clone 393409 (TRAV12-1, TRAJ6)
CVVFPGGSYIPTF

SEQ ID NO: 786818 - protein, 14 aa, Homo sapiens
  CDR3 for beta chain variable domain of TCR clone 393409 (TRBV20-1, TRBJ1-3)
CSASATGAGNTIYF

SEQ ID NO: 786819 - protein, 16 aa, Homo sapiens
  CDR3 for alpha chain variable domain of TCR clone 393410 (TRAV30, TRAJ24)
CGTEIVDADSWGKFQF

SEQ ID NO: 786820 - protein, 15 aa, Homo sapiens
  CDR3 for beta chain variable domain of TCR clone 393410 (TRBV7-2, TRBJ2-3)
WASSLRGGSTDTQYF

SEQ ID NO: 786821 - protein, 13 aa, Homo sapiens
  CDR3 for alpha chain variable domain of TCR clone 393411 (TRAV13-2, TRAJ13)
CAEKPGGYQKVTF

SEQ ID NO: 786822 - protein, 15 aa, Homo sapiens
  CDR3 for beta chain variable domain of TCR clone 393411 (TRBV4-1, TRBJ2-1)
CASSQDAGGLYEQFF

SEQ ID NO: 786823 - protein, 14 aa, Homo sapiens
  CDR3 for alpha chain variable domain of TCR clone 393412 (TRAV2, TRAJ9)
CAVEDRCGGFKTIF

SEQ ID NO: 786824 - protein, 14 aa, Homo sapiens
  CDR3 for beta chain variable domain of TCR clone 393412 (TRBV18, TRBJ2-7)
CAGSPRGGAYEQYF

SEQ ID NO: 786825 - protein, 10 aa, Homo sapiens
  CDR3 for alpha chain variable domain of TCR clone 393413 (TRAV8-4, TRAJ39)
CAVAGNMLTF

SEQ ID NO: 786826 - protein, 13 aa, Homo sapiens
  CDR3 for beta chain variable domain of TCR clone 393413 (TRBV11-2, TRBJ2-5)
CASSSTGEETQYF

SEQ ID NO: 786827 - protein, 13 aa, Homo sapiens
  CDR3 for alpha chain variable domain of TCR clone 393414 (TRAV13-1, TRAJ6)
CAASKGGSYIPTV

SEQ ID NO: 786828 - protein, 15 aa, Homo sapiens
  CDR3 for beta chain variable domain of TCR clone 393414 (TRBV12-4, TRBJ1-1)
CASSGRTGMNTEALF

SEQ ID NO: 786829 - protein, 15 aa, Homo sapiens
  CDR3 for alpha chain variable domain of TCR clone 393415 (TRAV17, TRAJ57)
CATGPSQGRSERLVF

SEQ ID NO: 786830 - protein, 14 aa, Homo sapiens
  CDR3 for beta chain variable domain of TCR clone 393415 (TRBV12-5, TRBJ2-5)
CASGSRTHQETQYF

SEQ ID NO: 786831 - protein, 14 aa, Homo sapiens
  CDR3 for alpha chain variable domain of TCR clone 393416 (TRAV3, TRAJ21)
CTVRDAYNFNKFYF

SEQ ID NO: 786832 - protein, 15 aa, Homo sapiens
  CDR3 for beta chain variable domain of TCR clone 393416 (TRBV6-5, TRBJ1-5)
CASSYSWDSNQPQHF

SEQ ID NO: 786833 - protein, 13 aa, Homo sapiens
  CDR3 for alpha chain variable domain of TCR clone 393417 (TRAV16, TRAJ31)
CALSAHNNARLMF

SEQ ID NO: 786834 - protein, 17 aa, Homo sapiens
  CDR3 for beta chain variable domain of TCR clone 393417 (TRBV12-4, TRBJ2-1)
CASSPGLAGGRINEQLF

SEQ ID NO: 786835 - protein, 12 aa, Homo sapiens
  CDR3 for alpha chain variable domain of TCR clone 393418 (TRAV3, TRAJ20)
CAFRDPDYKLSF

SEQ ID NO: 786836 - protein, 14 aa, Homo sapiens
  CDR3 for beta chain variable domain of TCR clone 393418 (TRBV7-2, TRBJ2-7)
CASSPKTSFYEQYF

SEQ ID NO: 786837 - protein, 14 aa, Homo sapiens
  CDR3 for alpha chain variable domain of TCR clone 393419 (TRAV1-2, TRAJ8)
CAVREDTGFQKLVF

SEQ ID NO: 786838 - protein, 13 aa, Homo sapiens
  CDR3 for beta chain variable domain of TCR clone 393419 (TRBV10-3, TRBJ2-7)
GASKLAVNYEQYF

SEQ ID NO: 786839 - protein, 14 aa, Homo sapiens
  CDR3 for alpha chain variable domain of TCR clone 393420 (TRAV8-4, TRAJ22)
CAVSPGGSARQLTF

SEQ ID NO: 786840 - protein, 14 aa, Homo sapiens
  CDR3 for beta chain variable domain of TCR clone 393420 (TRBV7-9, TRBJ2-1)
CASSPRDSLYEQFF

SEQ ID NO: 786841 - protein, 14 aa, Homo sapiens
  CDR3 for alpha chain variable domain of TCR clone 393421 (TRAV1-2, TRAJ6)
WAVSLPGGSYIPTF

SEQ ID NO: 786842 - protein, 15 aa, Homo sapiens
  CDR3 for beta chain variable domain of TCR clone 393421 (TRBV28, TRBJ2-7)
CASSPGGRGFYEQYF

SEQ ID NO: 786843 - protein, 12 aa, Homo sapiens
  CDR3 for alpha chain variable domain of TCR clone 393422 (TRAV12-3, TRAJ17)
CAMTLTGNKLTF

SEQ ID NO: 786844 - protein, 10 aa, Homo sapiens
  CDR3 for beta chain variable domain of TCR clone 393422 (TRBV11-2, TRBJ2-1)
PGVEYNEQFF

SEQ ID NO: 786845 - protein, 14 aa, Homo sapiens
  CDR3 for alpha chain variable domain of TCR clone 393423 (TRAV9-2, TRAJ39)
CALYIYNAGNMLTF

SEQ ID NO: 786846 - protein, 13 aa, Homo sapiens
  CDR3 for beta chain variable domain of TCR clone 393423 (TRBV2, TRBJ1-1)
CASSVSGYTEAFF

SEQ ID NO: 786847 - protein, 14 aa, Homo sapiens
  CDR3 for alpha chain variable domain of TCR clone 393424 (TRAV23/DV6, TRAJ17)
CAASIGAAGNKLTF

SEQ ID NO: 786848 - protein, 12 aa, Homo sapiens
  CDR3 for beta chain variable domain of TCR clone 393424 (TRBV20-1, TRBJ2-5)
CSAGGAGETQYF

SEQ ID NO: 786849 - protein, 18 aa, Homo sapiens
  CDR3 for alpha chain variable domain of TCR clone 393425 (TRAV17, TRAJ45)
CATSLDLYSGGGADGPTF

SEQ ID NO: 786850 - protein, 15 aa, Homo sapiens
  CDR3 for beta chain variable domain of TCR clone 393425 (TRBV20-1, TRBJ2-7)
CSARDRVSGMDEQYF

SEQ ID NO: 786851 - protein, 16 aa, Homo sapiens
  CDR3 for alpha chain variable domain of TCR clone 393426 (TRAV26-1, TRAJ52)
CIVSNAVGTSYGKLTF

SEQ ID NO: 786852 - protein, 16 aa, Homo sapiens
  CDR3 for beta chain variable domain of TCR clone 393426 (TRBV5-1, TRBJ2-1)
CASSLEGRGLYNEQFF

SEQ ID NO: 786853 - protein, 14 aa, Homo sapiens
  CDR3 for alpha chain variable domain of TCR clone 393427 (TRAV1-2, TRAJ8)
CAVREDTSFQKLVF

SEQ ID NO: 786854 - protein, 15 aa, Homo sapiens
  CDR3 for beta chain variable domain of TCR clone 393427 (TRBV20-1, TRBJ2-7)
CSAESGTSGAYEQYF

SEQ ID NO: 786855 - protein, 10 aa, Homo sapiens
  CDR3 for alpha chain variable domain of TCR clone 393428 (TRAV26-1, )
CIVSHRVEGF

SEQ ID NO: 786856 - protein, 14 aa, Homo sapiens
  CDR3 for beta chain variable domain of TCR clone 393428 (TRBV20-1, TRBJ2-7)
CSAWTALSSYEHYF

SEQ ID NO: 786857 - protein, 11 aa, Homo sapiens
  CDR3 for alpha chain variable domain of TCR clone 393429 (TRAV3, TRAJ21)
CAVGNFNKFYF

SEQ ID NO: 786858 - protein, 18 aa, Homo sapiens
  CDR3 for beta chain variable domain of TCR clone 393429 (TRBV25-1, TRBJ1-2)
CAGSGLQNGQGLIFGYTF

SEQ ID NO: 786859 - protein, 15 aa, Homo sapiens
  CDR3 for alpha chain variable domain of TCR clone 393430 (TRAV3, TRAJ22)
CAVRDRGGSARQLTL

SEQ ID NO: 786860 - protein, 16 aa, Homo sapiens
  CDR3 for beta chain variable domain of TCR clone 393430 (TRBV5-4, TRBJ2-3)
CASQQPGAGGVDTQYF

SEQ ID NO: 786861 - protein, 13 aa, Homo sapiens
  CDR3 for alpha chain variable domain of TCR clone 393431 (TRAV36/DV7, TRAJ37)
CAVFSSNTGKLIF

SEQ ID NO: 786862 - protein, 12 aa, Homo sapiens
  CDR3 for beta chain variable domain of TCR clone 393431 (TRBV11-2, TRBJ2-2)
CASSLGGGELFY

SEQ ID NO: 786863 - protein, 13 aa, Homo sapiens
  CDR3 for alpha chain variable domain of TCR clone 393432 (TRAV12-1, TRAJ33)
CGDAPDSNYQLIW

SEQ ID NO: 786864 - protein, 12 aa, Homo sapiens
  CDR3 for beta chain variable domain of TCR clone 393432 (TRBV11-2, TRBJ2-2)
CDSSLGGGELFF

SEQ ID NO: 786865 - protein, 14 aa, Homo sapiens
  CDR3 for alpha chain variable domain of TCR clone 393433 (TRAV25, TRAJ39)
CGRSNNNAGNMLTF

SEQ ID NO: 786866 - protein, 17 aa, Homo sapiens
  CDR3 for beta chain variable domain of TCR clone 393433 (TRBV28, TRBJ2-5)
CASSRQGGLAGAETQYF

SEQ ID NO: 786867 - protein, 12 aa, Homo sapiens
  CDR3 for alpha chain variable domain of TCR clone 393434 (TRAV21, TRAJ11)
CAATSGYSTLTF

SEQ ID NO: 786868 - protein, 14 aa, Homo sapiens
  CDR3 for beta chain variable domain of TCR clone 393434 (TRBV20-1, TRBJ2-7)
CSAPELAGVGEQDF

SEQ ID NO: 786869 - protein, 14 aa, Homo sapiens
  CDR3 for alpha chain variable domain of TCR clone 393435 (TRAV35, TRAJ33)
CAGSSQDSNYQLIG

SEQ ID NO: 786870 - protein, 14 aa, Homo sapiens
  CDR3 for beta chain variable domain of TCR clone 393435 (TRBV18, TRBJ2-7)
CASSPRGGAYEQYF

SEQ ID NO: 786871 - protein, 11 aa, Homo sapiens
  CDR3 for alpha chain variable domain of TCR clone 393436 (TRAV12-2, TRAJ33)
CAVGSSYQLIW

SEQ ID NO: 786872 - protein, 12 aa, Homo sapiens
  CDR3 for beta chain variable domain of TCR clone 393436 (TRBV28, TRBJ2-3)
CASSLYRDTQYF

SEQ ID NO: 786873 - protein, 14 aa, Homo sapiens
  CDR3 for alpha chain variable domain of TCR clone 393437 (TRAV14/DV4, TRAJ43)
CAMREGYNNNDMRF

SEQ ID NO: 786874 - protein, 15 aa, Homo sapiens
  CDR3 for beta chain variable domain of TCR clone 393437 (TRBV7-3, TRBJ2-1)
CASSPTGGGEVEQFF

SEQ ID NO: 786875 - protein, 15 aa, Homo sapiens
  CDR3 for alpha chain variable domain of TCR clone 393438 (TRAV12-2, TRAJ53)
CAVNGGGGSSYKLTF

SEQ ID NO: 786876 - protein, 14 aa, Homo sapiens
  CDR3 for beta chain variable domain of TCR clone 393438 (TRBV19, TRBJ2-2)
CASSTLHRSGELFF

SEQ ID NO: 786877 - protein, 17 aa, Homo sapiens
  CDR3 for alpha chain variable domain of TCR clone 393439 (TRAV3, TRAJ6)
CAVRDGPRAGGSYIPTF

SEQ ID NO: 786878 - protein, 15 aa, Homo sapiens
  CDR3 for beta chain variable domain of TCR clone 393439 (TRBV5-8, TRBJ2-2)
CASSLDRGATGELFI

SEQ ID NO: 786879 - protein, 14 aa, Homo sapiens
  CDR3 for alpha chain variable domain of TCR clone 393440 (TRAV13-2, TRAJ17)
CAENSKAAGNKLTF

SEQ ID NO: 786880 - protein, 12 aa, Homo sapiens
  CDR3 for beta chain variable domain of TCR clone 393440 (TRBV7-9, TRBJ2-7)
CASSWDYYEQYF

SEQ ID NO: 786881 - protein, 16 aa, Homo sapiens
  CDR3 for alpha chain variable domain of TCR clone 393441 (TRAV3, TRAJ5)
CAVGNLMDTGRRALTF

SEQ ID NO: 786882 - protein, 13 aa, Homo sapiens
  CDR3 for beta chain variable domain of TCR clone 393441 (TRBV12-4, TRBJ1-2)
CASSLRQGEGYTF

SEQ ID NO: 786883 - protein, 12 aa, Homo sapiens
  CDR3 for alpha chain variable domain of TCR clone 393442 (TRAV12-3, TRAJ17)
CAMTLTGNKLTF

SEQ ID NO: 786884 - protein, 14 aa, Homo sapiens
  CDR3 for beta chain variable domain of TCR clone 393442 (TRBV12-4, TRBJ2-5)
CASSQSGGGETQYF

SEQ ID NO: 786885 - protein, 14 aa, Homo sapiens
  CDR3 for alpha chain variable domain of TCR clone 393443 (TRAV2, TRAJ37)
CAVDFTSNTGKLIF

SEQ ID NO: 786886 - protein, 15 aa, Homo sapiens
  CDR3 for beta chain variable domain of TCR clone 393443 (TRBV27, TRBJ2-5)
CASSLYPRGGETQYF

SEQ ID NO: 786887 - protein, 17 aa, Homo sapiens
  CDR3 for alpha chain variable domain of TCR clone 393444 (TRAV3, TRAJ6)
CAVRDGPRAGGSYIPTF

SEQ ID NO: 786888 - protein, 14 aa, Homo sapiens
  CDR3 for beta chain variable domain of TCR clone 393444 (TRBV11-2, TRBJ2-3)
CASSRRARTDTQYV

SEQ ID NO: 786889 - protein, 12 aa, Homo sapiens
  CDR3 for alpha chain variable domain of TCR clone 393445 (TRAV17, TRAJ57)
CATDGGSEKLVF

SEQ ID NO: 786890 - protein, 15 aa, Homo sapiens
  CDR3 for beta chain variable domain of TCR clone 393445 (TRBV6-3, TRBJ2-2)
CASSFLATPTGELFF

SEQ ID NO: 786891 - protein, 14 aa, Homo sapiens
  CDR3 for alpha chain variable domain of TCR clone 393446 (TRAV12-2, TRAJ17)
CAVLFKAAGNKLTF

SEQ ID NO: 786892 - protein, 17 aa, Homo sapiens
  CDR3 for beta chain variable domain of TCR clone 393446 (TRBV20-1, TRBJ2-2)
CNASGSRQGGLTGELFF

SEQ ID NO: 786893 - protein, 14 aa, Homo sapiens
  CDR3 for alpha chain variable domain of TCR clone 393447 (TRAV23/DV6, TRAJ24)
CAASLSDSWGKLQF

SEQ ID NO: 786894 - protein, 17 aa, Homo sapiens
  CDR3 for beta chain variable domain of TCR clone 393447 (TRBV13, TRBJ2-3)
CASSLSRVAGGRNTQYF

SEQ ID NO: 786895 - protein, 11 aa, Homo sapiens
  CDR3 for alpha chain variable domain of TCR clone 393448 (TRAV21, TRAJ34)
CAVTNTDKLIF

SEQ ID NO: 786896 - protein, 16 aa, Homo sapiens
  CDR3 for beta chain variable domain of TCR clone 393448 (TRBV18, TRBJ1-1)
CASSPDVGGRGGEAFF

SEQ ID NO: 786897 - protein, 16 aa, Homo sapiens
  CDR3 for alpha chain variable domain of TCR clone 393449 (TRAV3, TRAJ18)
CAVRDGRGSALGRLYF

SEQ ID NO: 786898 - protein, 17 aa, Homo sapiens
  CDR3 for beta chain variable domain of TCR clone 393449 (TRBV5-1, TRBJ2-3)
CASSTSGLVDRTDTQYF

SEQ ID NO: 786899 - protein, 16 aa, Homo sapiens
  CDR3 for alpha chain variable domain of TCR clone 393450 (TRAV3, TRAJ37)
CSVRPHGSGNTGKLIL

SEQ ID NO: 786900 - protein, 14 aa, Homo sapiens
  CDR3 for beta chain variable domain of TCR clone 393450 (TRBV25-1, TRBJ1-1)
CASTHLGGNTEAFF

SEQ ID NO: 786901 - protein, 15 aa, Homo sapiens
  CDR3 for alpha chain variable domain of TCR clone 393451 (TRAV13-1, TRAJ17)
CAASIHGGCRQQANF

SEQ ID NO: 786902 - protein, 14 aa, Homo sapiens
  CDR3 for beta chain variable domain of TCR clone 393451 (TRBV20-1, TRBJ2-4)
CSARDRGQGGIQYF

SEQ ID NO: 786903 - protein, 16 aa, Homo sapiens
  CDR3 for alpha chain variable domain of TCR clone 393452 (TRAV30, TRAJ24)
CGTELVDAYSWGKFQF

SEQ ID NO: 786904 - protein, 14 aa, Homo sapiens
  CDR3 for beta chain variable domain of TCR clone 393452 (TRBV12-5, TRBJ2-5)
CASGSRTHQETQYF

SEQ ID NO: 786905 - protein, 12 aa, Homo sapiens
  CDR3 for alpha chain variable domain of TCR clone 393453 (TRAV12-3, TRAJ42)
CAPGGSQGNLIF

SEQ ID NO: 786906 - protein, 14 aa, Homo sapiens
  CDR3 for beta chain variable domain of TCR clone 393453 (TRBV5-4, TRBJ1-1)
CASSLDSRKDEAFF

SEQ ID NO: 786907 - protein, 14 aa, Homo sapiens
  CDR3 for alpha chain variable domain of TCR clone 393454 (TRAV26-1, TRAJ57)
CIRAGQGGSEKLVF

SEQ ID NO: 786908 - protein, 15 aa, Homo sapiens
  CDR3 for beta chain variable domain of TCR clone 393454 (TRBV6-1, TRBJ2-3)
CASSERGGITDTQYF

SEQ ID NO: 786909 - protein, 14 aa, Homo sapiens
  CDR3 for alpha chain variable domain of TCR clone 393455 (TRAV12-2, TRAJ13)
CAVKKPGGYQQVTF

SEQ ID NO: 786910 - protein, 13 aa, Homo sapiens
  CDR3 for beta chain variable domain of TCR clone 393455 (TRBV20-1, TRBJ1-1)
CSARLGQGTEAFF

SEQ ID NO: 786911 - protein, 15 aa, Homo sapiens
  CDR3 for alpha chain variable domain of TCR clone 393456 (TRAV3, TRAJ5)
CAVRDIDTGRRALTF

SEQ ID NO: 786912 - protein, 13 aa, Homo sapiens
  CDR3 for beta chain variable domain of TCR clone 393456 (TRBV20-1, TRBJ2-5)
CSARDSKQATQYF

SEQ ID NO: 786913 - protein, 13 aa, Homo sapiens
  CDR3 for alpha chain variable domain of TCR clone 393457 (TRAV2, TRAJ47)
CAVDREYGNKLVF

SEQ ID NO: 786914 - protein, 17 aa, Homo sapiens
  CDR3 for beta chain variable domain of TCR clone 393457 (TRBV15, TRBJ1-5)
CVTSRVKGIYSNQPQHF

SEQ ID NO: 786915 - protein, 14 aa, Homo sapiens
  CDR3 for alpha chain variable domain of TCR clone 393458 (TRAV29/DV5, TRAJ32)
CTAAYGGATNKLIF

SEQ ID NO: 786916 - protein, 15 aa, Homo sapiens
  CDR3 for beta chain variable domain of TCR clone 393458 (TRBV27, TRBJ2-7)
CASSTAGTGSYEQYF

SEQ ID NO: 786917 - protein, 15 aa, Homo sapiens
  CDR3 for alpha chain variable domain of TCR clone 393459 (TRAV13-1, TRAJ17)
CAASIERGAGNKLTF

SEQ ID NO: 786918 - protein, 17 aa, Homo sapiens
  CDR3 for beta chain variable domain of TCR clone 393459 (TRBV20-1, TRBJ2-7)
CSATRAGGVAGVEEQYF

SEQ ID NO: 786919 - protein, 15 aa, Homo sapiens
  CDR3 for alpha chain variable domain of TCR clone 393460 (TRAV25, TRAJ53)
CPTSNSGGSNYKLKF

SEQ ID NO: 786920 - protein, 14 aa, Homo sapiens
  CDR3 for beta chain variable domain of TCR clone 393460 (TRBV11-2, TRBJ2-3)
CASSRLARTDTQYF

SEQ ID NO: 786921 - protein, 23 aa, Homo sapiens
  CDR3 for alpha chain variable domain of TCR clone 393461 (TRAV26-1, TRAJ38)
CIADNAGNNHIQNPDPAVYQLRE

SEQ ID NO: 786922 - protein, 13 aa, Homo sapiens
  CDR3 for beta chain variable domain of TCR clone 393461 (TRBV20-1, TRBJ1-1)
RSARGGGNTEAFF

SEQ ID NO: 786923 - protein, 11 aa, Homo sapiens
  CDR3 for alpha chain variable domain of TCR clone 393462 (TRAV12-1, TRAJ47)
CVVNDGNKLVF

SEQ ID NO: 786924 - protein, 14 aa, Homo sapiens
  CDR3 for beta chain variable domain of TCR clone 393462 (TRBV20-1, TRBJ2-7)
CSAKRGRSSYEQYF

SEQ ID NO: 786925 - protein, 12 aa, Homo sapiens
  CDR3 for alpha chain variable domain of TCR clone 393463 (TRAV12-2, TRAJ3)
CAGWSSASKIIF

SEQ ID NO: 786926 - protein, 12 aa, Homo sapiens
  CDR3 for beta chain variable domain of TCR clone 393463 (TRBV11-2, TRBJ2-1)
CASSPGNNEQFF

SEQ ID NO: 786927 - protein, 17 aa, Homo sapiens
  CDR3 for alpha chain variable domain of TCR clone 393464 (TRAV12-3, TRAJ6)
CAMSARGGAGGSYIPTF

SEQ ID NO: 786928 - protein, 13 aa, Homo sapiens
  CDR3 for beta chain variable domain of TCR clone 393464 (TRBV12-4, TRBJ1-2)
CASSLRQGKGYTF

SEQ ID NO: 786929 - protein, 12 aa, Homo sapiens
  CDR3 for alpha chain variable domain of TCR clone 393465 (TRAV12-3, TRAJ17)
FAMTLTGNKLTF

SEQ ID NO: 786930 - protein, 15 aa, Homo sapiens
  CDR3 for beta chain variable domain of TCR clone 393465 (TRBV20-1, TRBJ2-7)
CSASDRVSGMDEQYF

SEQ ID NO: 786931 - protein, 14 aa, Homo sapiens
  CDR3 for alpha chain variable domain of TCR clone 393466 (TRAV1-2, TRAJ16)
CAVNRFSDGQKLLF

SEQ ID NO: 786932 - protein, 12 aa, Homo sapiens
  CDR3 for beta chain variable domain of TCR clone 393466 (TRBV11-2, TRBJ2-2)
CARSLGGGELFF

SEQ ID NO: 786933 - protein, 14 aa, Homo sapiens
  CDR3 for alpha chain variable domain of TCR clone 393467 (TRAV1-1, TRAJ28)
CAAPSGAGSYQLTF

SEQ ID NO: 786934 - protein, 15 aa, Homo sapiens
  CDR3 for beta chain variable domain of TCR clone 393467 (TRBV7-2, TRBJ1-2)
CASRLVSGGDYGYTF

SEQ ID NO: 786935 - protein, 16 aa, Homo sapiens
  CDR3 for alpha chain variable domain of TCR clone 393468 (TRAV21, TRAJ37)
CAVRPRGSSNTGKPIF

SEQ ID NO: 786936 - protein, 13 aa, Homo sapiens
  CDR3 for beta chain variable domain of TCR clone 393468 (TRBV7-9, TRBJ2-5)
CASLSPGQEAQYF

SEQ ID NO: 786937 - protein, 14 aa, Homo sapiens
  CDR3 for alpha chain variable domain of TCR clone 393469 (TRAV3, TRAJ6)
CAVRDPWGSYIPTF

SEQ ID NO: 786938 - protein, 16 aa, Homo sapiens
  CDR3 for beta chain variable domain of TCR clone 393469 (TRBV19, TRBJ1-3)
CASSMDRALPGNTIYF

SEQ ID NO: 786939 - protein, 10 aa, Homo sapiens
  CDR3 for alpha chain variable domain of TCR clone 393470 (TRAV30, TRAJ16)
CGTGGQKLLF
